United States Patent Application Publication US 2014/0004565 A1 - sequence listing, part 13

SEQ ID NO: 195537 - RNA, 19 nt, Artificial Sequence
  Description of Artificial Sequence: Synthetic oligonucleotide
gcaguaacaucuggggccu

SEQ ID NO: 195538 - RNA, 19 nt, Artificial Sequence
  Description of Artificial Sequence: Synthetic oligonucleotide
cauaggccucauacagccu

SEQ ID NO: 195539 - RNA, 19 nt, Artificial Sequence
  Description of Artificial Sequence: Synthetic oligonucleotide
cagcugaaugcagcuucca

SEQ ID NO: 195540 - RNA, 19 nt, Artificial Sequence
  Description of Artificial Sequence: Synthetic oligonucleotide
cacauucccgauuccucuu

SEQ ID NO: 195541 - RNA, 19 nt, Artificial Sequence
  Description of Artificial Sequence: Synthetic oligonucleotide
cccugcauuccauacgagu

SEQ ID NO: 195542 - RNA, 19 nt, Artificial Sequence
  Description of Artificial Sequence: Synthetic oligonucleotide
cacaagcaauagggacuuc

SEQ ID NO: 195543 - RNA, 19 nt, Artificial Sequence
  Description of Artificial Sequence: Synthetic oligonucleotide
gggcuccguauucgagcag

SEQ ID NO: 195544 - RNA, 19 nt, Artificial Sequence
  Description of Artificial Sequence: Synthetic oligonucleotide
cacugcgggcuagggccag

SEQ ID NO: 195545 - RNA, 19 nt, Artificial Sequence
  Description of Artificial Sequence: Synthetic oligonucleotide
cagcuggaccgagucucuc

SEQ ID NO: 195546 - RNA, 19 nt, Artificial Sequence
  Description of Artificial Sequence: Synthetic oligonucleotide
cugugguugguccgccccu

SEQ ID NO: 195547 - RNA, 19 nt, Artificial Sequence
  Description of Artificial Sequence: Synthetic oligonucleotide
gcgucccaauacaauggca

SEQ ID NO: 195548 - RNA, 19 nt, Artificial Sequence
  Description of Artificial Sequence: Synthetic oligonucleotide
ggggccuuaggugcacgca

SEQ ID NO: 195549 - RNA, 19 nt, Artificial Sequence
  Description of Artificial Sequence: Synthetic oligonucleotide
gacagccgguuggguccag

SEQ ID NO: 195550 - RNA, 19 nt, Artificial Sequence
  Description of Artificial Sequence: Synthetic oligonucleotide
ccgugucuccagaugguaa

SEQ ID NO: 195551 - RNA, 19 nt, Artificial Sequence
  Description of Artificial Sequence: Synthetic oligonucleotide
uccgccccuugucccuauu

SEQ ID NO: 195552 - RNA, 19 nt, Artificial Sequence
  Description of Artificial Sequence: Synthetic oligonucleotide
gguccagucucacccggau

SEQ ID NO: 195553 - RNA, 19 nt, Artificial Sequence
  Description of Artificial Sequence: Synthetic oligonucleotide
ggugggcccauaccucaua

SEQ ID NO: 195554 - RNA, 19 nt, Artificial Sequence
  Description of Artificial Sequence: Synthetic oligonucleotide
ggcgccccauaucagcagu

SEQ ID NO: 195555 - RNA, 19 nt, Artificial Sequence
  Description of Artificial Sequence: Synthetic oligonucleotide
cguacugaugucccguacu

SEQ ID NO: 195556 - RNA, 19 nt, Artificial Sequence
  Description of Artificial Sequence: Synthetic oligonucleotide
agcccuuguguggcaucaa

SEQ ID NO: 195557 - RNA, 19 nt, Artificial Sequence
  Description of Artificial Sequence: Synthetic oligonucleotide
ccgccccuugucccuauug

SEQ ID NO: 195558 - RNA, 19 nt, Artificial Sequence
  Description of Artificial Sequence: Synthetic oligonucleotide
cccacgcgucccaauacaa

SEQ ID NO: 195559 - RNA, 19 nt, Artificial Sequence
  Description of Artificial Sequence: Synthetic oligonucleotide
gcccugcauuccauacgag

SEQ ID NO: 195560 - RNA, 19 nt, Artificial Sequence
  Description of Artificial Sequence: Synthetic oligonucleotide
ccgcacaggcuuccguguc

SEQ ID NO: 195561 - RNA, 19 nt, Artificial Sequence
  Description of Artificial Sequence: Synthetic oligonucleotide
gccucaugccagugcaccu

SEQ ID NO: 195562 - RNA, 19 nt, Artificial Sequence
  Description of Artificial Sequence: Synthetic oligonucleotide
gcacaaccucuuggcugag

SEQ ID NO: 195563 - RNA, 19 nt, Artificial Sequence
  Description of Artificial Sequence: Synthetic oligonucleotide
gccucaccauggacucucc

SEQ ID NO: 195564 - RNA, 19 nt, Artificial Sequence
  Description of Artificial Sequence: Synthetic oligonucleotide
ccaaccgcuucaggcgauc

SEQ ID NO: 195565 - RNA, 19 nt, Artificial Sequence
  Description of Artificial Sequence: Synthetic oligonucleotide
gccccuugucccuauuguu

SEQ ID NO: 195566 - RNA, 19 nt, Artificial Sequence
  Description of Artificial Sequence: Synthetic oligonucleotide
ccucguacugaugucccgu

SEQ ID NO: 195567 - RNA, 19 nt, Artificial Sequence
  Description of Artificial Sequence: Synthetic oligonucleotide
ggccccgcacaggcuuccg

SEQ ID NO: 195568 - RNA, 19 nt, Artificial Sequence
  Description of Artificial Sequence: Synthetic oligonucleotide
gcacugcgggcuagggcca

SEQ ID NO: 195569 - RNA, 19 nt, Artificial Sequence
  Description of Artificial Sequence: Synthetic oligonucleotide
gccagaacucagagcacau

SEQ ID NO: 195570 - RNA, 19 nt, Artificial Sequence
  Description of Artificial Sequence: Synthetic oligonucleotide
caguucgguggaggcugaa

SEQ ID NO: 195571 - RNA, 19 nt, Artificial Sequence
  Description of Artificial Sequence: Synthetic oligonucleotide
ccacgcgucccaauacaau

SEQ ID NO: 195572 - RNA, 19 nt, Artificial Sequence
  Description of Artificial Sequence: Synthetic oligonucleotide
ccacggcaggcaaacuccu

SEQ ID NO: 195573 - RNA, 19 nt, Artificial Sequence
  Description of Artificial Sequence: Synthetic oligonucleotide
gcaugcaggccaggguagu

SEQ ID NO: 195574 - RNA, 19 nt, Artificial Sequence
  Description of Artificial Sequence: Synthetic oligonucleotide
ccaugggaauggaugucuu

SEQ ID NO: 195575 - RNA, 19 nt, Artificial Sequence
  Description of Artificial Sequence: Synthetic oligonucleotide
gccgggcaugcaggccagg

SEQ ID NO: 195576 - RNA, 19 nt, Artificial Sequence
  Description of Artificial Sequence: Synthetic oligonucleotide
gcggggcugauggcucuuc

SEQ ID NO: 195577 - RNA, 19 nt, Artificial Sequence
  Description of Artificial Sequence: Synthetic oligonucleotide
gcgccccauaucagcagua

SEQ ID NO: 195578 - RNA, 19 nt, Artificial Sequence
  Description of Artificial Sequence: Synthetic oligonucleotide
caccuccauguuggccaaa

SEQ ID NO: 195579 - RNA, 19 nt, Artificial Sequence
  Description of Artificial Sequence: Synthetic oligonucleotide
ccccaucuccgaagccgaa

SEQ ID NO: 195580 - RNA, 19 nt, Artificial Sequence
  Description of Artificial Sequence: Synthetic oligonucleotide
gccccgcacaggcuuccgu

SEQ ID NO: 195581 - RNA, 19 nt, Artificial Sequence
  Description of Artificial Sequence: Synthetic oligonucleotide
cgccccauaucagcaguaa

SEQ ID NO: 195582 - RNA, 19 nt, Artificial Sequence
  Description of Artificial Sequence: Synthetic oligonucleotide
cccaaccgcuucaggcgau

SEQ ID NO: 195583 - RNA, 19 nt, Artificial Sequence
  Description of Artificial Sequence: Synthetic oligonucleotide
ccucagcgauggccucccu

SEQ ID NO: 195584 - RNA, 19 nt, Artificial Sequence
  Description of Artificial Sequence: Synthetic oligonucleotide
aagucgauaagcugcacgc

SEQ ID NO: 195585 - RNA, 19 nt, Artificial Sequence
  Description of Artificial Sequence: Synthetic oligonucleotide
uugaauaaauuccucaccc

SEQ ID NO: 195586 - RNA, 19 nt, Artificial Sequence
  Description of Artificial Sequence: Synthetic oligonucleotide
aagaauuugccaucauggc

SEQ ID NO: 195587 - RNA, 19 nt, Artificial Sequence
  Description of Artificial Sequence: Synthetic oligonucleotide
guaucuuucacauggagag

SEQ ID NO: 195588 - RNA, 19 nt, Artificial Sequence
  Description of Artificial Sequence: Synthetic oligonucleotide
ugugacaacacccugugug

SEQ ID NO: 195589 - RNA, 19 nt, Artificial Sequence
  Description of Artificial Sequence: Synthetic oligonucleotide
aacgucgacagguaccugc

SEQ ID NO: 195590 - RNA, 19 nt, Artificial Sequence
  Description of Artificial Sequence: Synthetic oligonucleotide
gaggguguuucauagaugc

SEQ ID NO: 195591 - RNA, 19 nt, Artificial Sequence
  Description of Artificial Sequence: Synthetic oligonucleotide
aaugauguuaccucccgga

SEQ ID NO: 195592 - RNA, 19 nt, Artificial Sequence
  Description of Artificial Sequence: Synthetic oligonucleotide
guacuuaucaaaaucagug

SEQ ID NO: 195593 - RNA, 19 nt, Artificial Sequence
  Description of Artificial Sequence: Synthetic oligonucleotide
aaagcgaucuuuguuguuc

SEQ ID NO: 195594 - RNA, 19 nt, Artificial Sequence
  Description of Artificial Sequence: Synthetic oligonucleotide
uucaauugagacuggaucu

SEQ ID NO: 195595 - RNA, 19 nt, Artificial Sequence
  Description of Artificial Sequence: Synthetic oligonucleotide
auagcggccaguugggucc

SEQ ID NO: 195596 - RNA, 19 nt, Artificial Sequence
  Description of Artificial Sequence: Synthetic oligonucleotide
acaacaaucacugagucga

SEQ ID NO: 195597 - RNA, 19 nt, Artificial Sequence
  Description of Artificial Sequence: Synthetic oligonucleotide
ugaauaaauuccucacccg

SEQ ID NO: 195598 - RNA, 19 nt, Artificial Sequence
  Description of Artificial Sequence: Synthetic oligonucleotide
ugggcugaaagugacaagg

SEQ ID NO: 195599 - RNA, 19 nt, Artificial Sequence
  Description of Artificial Sequence: Synthetic oligonucleotide
cauucggaagauuucaaag

SEQ ID NO: 195600 - RNA, 19 nt, Artificial Sequence
  Description of Artificial Sequence: Synthetic oligonucleotide
auagaugcuaagaguaucc

SEQ ID NO: 195601 - RNA, 19 nt, Artificial Sequence
  Description of Artificial Sequence: Synthetic oligonucleotide
aucacugaucgucauguac

SEQ ID NO: 195602 - RNA, 19 nt, Artificial Sequence
  Description of Artificial Sequence: Synthetic oligonucleotide
accaguaacgcaaauuccc

SEQ ID NO: 195603 - RNA, 19 nt, Artificial Sequence
  Description of Artificial Sequence: Synthetic oligonucleotide
aacaacgucgacagguacc

SEQ ID NO: 195604 - RNA, 19 nt, Artificial Sequence
  Description of Artificial Sequence: Synthetic oligonucleotide
uguacuuaucaaaaucagu

SEQ ID NO: 195605 - RNA, 19 nt, Artificial Sequence
  Description of Artificial Sequence: Synthetic oligonucleotide
agaccgauauccgaggugc

SEQ ID NO: 195606 - RNA, 19 nt, Artificial Sequence
  Description of Artificial Sequence: Synthetic oligonucleotide
cucuucacgugguagaagg

SEQ ID NO: 195607 - RNA, 19 nt, Artificial Sequence
  Description of Artificial Sequence: Synthetic oligonucleotide
cuccacuugaaaaugggcc

SEQ ID NO: 195608 - RNA, 19 nt, Artificial Sequence
  Description of Artificial Sequence: Synthetic oligonucleotide
caagcgauccuucugcucg

SEQ ID NO: 195609 - RNA, 19 nt, Artificial Sequence
  Description of Artificial Sequence: Synthetic oligonucleotide
aguugggucccacucaacg

SEQ ID NO: 195610 - RNA, 19 nt, Artificial Sequence
  Description of Artificial Sequence: Synthetic oligonucleotide
agguccacagccaauaagc

SEQ ID NO: 195611 - RNA, 19 nt, Artificial Sequence
  Description of Artificial Sequence: Synthetic oligonucleotide
cuucaauugagacuggauc

SEQ ID NO: 195612 - RNA, 19 nt, Artificial Sequence
  Description of Artificial Sequence: Synthetic oligonucleotide
uacaacaaucacugagucg

SEQ ID NO: 195613 - RNA, 19 nt, Artificial Sequence
  Description of Artificial Sequence: Synthetic oligonucleotide
aggaacguugucuacaaca

SEQ ID NO: 195614 - RNA, 19 nt, Artificial Sequence
  Description of Artificial Sequence: Synthetic oligonucleotide
uuugcuuuaucugauccug

SEQ ID NO: 195615 - RNA, 19 nt, Artificial Sequence
  Description of Artificial Sequence: Synthetic oligonucleotide
uacuuaucaaaaucaguga

SEQ ID NO: 195616 - RNA, 19 nt, Artificial Sequence
  Description of Artificial Sequence: Synthetic oligonucleotide
aguaacgcaaauuccccag

SEQ ID NO: 195617 - RNA, 19 nt, Artificial Sequence
  Description of Artificial Sequence: Synthetic oligonucleotide
acuuaucaaaaucagugaa

SEQ ID NO: 195618 - RNA, 19 nt, Artificial Sequence
  Description of Artificial Sequence: Synthetic oligonucleotide
auucggaagauuucaaagu

SEQ ID NO: 195619 - RNA, 19 nt, Artificial Sequence
  Description of Artificial Sequence: Synthetic oligonucleotide
cuuuggacuggcucaagcg

SEQ ID NO: 195620 - RNA, 19 nt, Artificial Sequence
  Description of Artificial Sequence: Synthetic oligonucleotide
gaucuuagaguauuucuuc

SEQ ID NO: 195621 - RNA, 19 nt, Artificial Sequence
  Description of Artificial Sequence: Synthetic oligonucleotide
ugaaaaugggccagugggc

SEQ ID NO: 195622 - RNA, 19 nt, Artificial Sequence
  Description of Artificial Sequence: Synthetic oligonucleotide
auagggaccccacugagcu

SEQ ID NO: 195623 - RNA, 19 nt, Artificial Sequence
  Description of Artificial Sequence: Synthetic oligonucleotide
aacgcaaauuccccagguc

SEQ ID NO: 195624 - RNA, 19 nt, Artificial Sequence
  Description of Artificial Sequence: Synthetic oligonucleotide
ugacggugcagucugaagu

SEQ ID NO: 195625 - RNA, 19 nt, Artificial Sequence
  Description of Artificial Sequence: Synthetic oligonucleotide
uugaguauaucaccaagua

SEQ ID NO: 195626 - RNA, 19 nt, Artificial Sequence
  Description of Artificial Sequence: Synthetic oligonucleotide
ugagagaggagccucgagu

SEQ ID NO: 195627 - RNA, 19 nt, Artificial Sequence
  Description of Artificial Sequence: Synthetic oligonucleotide
ugaguauaucaccaaguaa

SEQ ID NO: 195628 - RNA, 19 nt, Artificial Sequence
  Description of Artificial Sequence: Synthetic oligonucleotide
aauagggaccccacugagc

SEQ ID NO: 195629 - RNA, 19 nt, Artificial Sequence
  Description of Artificial Sequence: Synthetic oligonucleotide
ucucaagccgauccggucc

SEQ ID NO: 195630 - RNA, 19 nt, Artificial Sequence
  Description of Artificial Sequence: Synthetic oligonucleotide
uguccacuuucacacacag

SEQ ID NO: 195631 - RNA, 19 nt, Artificial Sequence
  Description of Artificial Sequence: Synthetic oligonucleotide
ugaauagggaccccacuga

SEQ ID NO: 195632 - RNA, 19 nt, Artificial Sequence
  Description of Artificial Sequence: Synthetic oligonucleotide
ucgaguguccccacugugg

SEQ ID NO: 195633 - RNA, 19 nt, Artificial Sequence
  Description of Artificial Sequence: Synthetic oligonucleotide
ucgaucuucccauugcucu

SEQ ID NO: 195634 - RNA, 19 nt, Artificial Sequence
  Description of Artificial Sequence: Synthetic oligonucleotide
cagaugagaacccagccug

SEQ ID NO: 195635 - RNA, 19 nt, Artificial Sequence
  Description of Artificial Sequence: Synthetic oligonucleotide
uggagagaagucgauaagc

SEQ ID NO: 195636 - RNA, 19 nt, Artificial Sequence
  Description of Artificial Sequence: Synthetic oligonucleotide
aauaaauuccucacccgga

SEQ ID NO: 195637 - RNA, 19 nt, Artificial Sequence
  Description of Artificial Sequence: Synthetic oligonucleotide
uuuucgguauugccggaag

SEQ ID NO: 195638 - RNA, 19 nt, Artificial Sequence
  Description of Artificial Sequence: Synthetic oligonucleotide
uccucuucggguugggccg

SEQ ID NO: 195639 - RNA, 19 nt, Artificial Sequence
  Description of Artificial Sequence: Synthetic oligonucleotide
uguacucgaaguccagagc

SEQ ID NO: 195640 - RNA, 19 nt, Artificial Sequence
  Description of Artificial Sequence: Synthetic oligonucleotide
aaaucagugaagagguuga

SEQ ID NO: 195641 - RNA, 19 nt, Artificial Sequence
  Description of Artificial Sequence: Synthetic oligonucleotide
ucuuugacgucauuccgga

SEQ ID NO: 195642 - RNA, 19 nt, Artificial Sequence
  Description of Artificial Sequence: Synthetic oligonucleotide
ucacauggagagaagucga

SEQ ID NO: 195643 - RNA, 19 nt, Artificial Sequence
  Description of Artificial Sequence: Synthetic oligonucleotide
cagucaaccacauugaaua

SEQ ID NO: 195644 - RNA, 19 nt, Artificial Sequence
  Description of Artificial Sequence: Synthetic oligonucleotide
ggucaaaugagagaggagc

SEQ ID NO: 195645 - RNA, 19 nt, Artificial Sequence
  Description of Artificial Sequence: Synthetic oligonucleotide
aauggaauccucucuucuu

SEQ ID NO: 195646 - RNA, 19 nt, Artificial Sequence
  Description of Artificial Sequence: Synthetic oligonucleotide
gaguauaucaccaaguaau

SEQ ID NO: 195647 - RNA, 19 nt, Artificial Sequence
  Description of Artificial Sequence: Synthetic oligonucleotide
uccgagaggaaugaucucc

SEQ ID NO: 195648 - RNA, 19 nt, Artificial Sequence
  Description of Artificial Sequence: Synthetic oligonucleotide
cuuccggcacccaaaaggc

SEQ ID NO: 195649 - RNA, 19 nt, Artificial Sequence
  Description of Artificial Sequence: Synthetic oligonucleotide
acgcaaauuccccaggucu

SEQ ID NO: 195650 - RNA, 19 nt, Artificial Sequence
  Description of Artificial Sequence: Synthetic oligonucleotide
aaaugagagaggagccucg

SEQ ID NO: 195651 - RNA, 19 nt, Artificial Sequence
  Description of Artificial Sequence: Synthetic oligonucleotide
acaauggaauccucucuuc

SEQ ID NO: 195652 - RNA, 19 nt, Artificial Sequence
  Description of Artificial Sequence: Synthetic oligonucleotide
uugcuuuaucugauccugg

SEQ ID NO: 195653 - RNA, 19 nt, Artificial Sequence
  Description of Artificial Sequence: Synthetic oligonucleotide
gaauagggaccccacugag

SEQ ID NO: 195654 - RNA, 19 nt, Artificial Sequence
  Description of Artificial Sequence: Synthetic oligonucleotide
gaagugucgacaaacgcca

SEQ ID NO: 195655 - RNA, 19 nt, Artificial Sequence
  Description of Artificial Sequence: Synthetic oligonucleotide
ugauguuaccucccggaga

SEQ ID NO: 195656 - RNA, 19 nt, Artificial Sequence
  Description of Artificial Sequence: Synthetic oligonucleotide
uugacgucauuccggaaga

SEQ ID NO: 195657 - RNA, 19 nt, Artificial Sequence
  Description of Artificial Sequence: Synthetic oligonucleotide
guacucgaaguccagagca

SEQ ID NO: 195658 - RNA, 19 nt, Artificial Sequence
  Description of Artificial Sequence: Synthetic oligonucleotide
ugcuuguccagcuuguauc

SEQ ID NO: 195659 - RNA, 19 nt, Artificial Sequence
  Description of Artificial Sequence: Synthetic oligonucleotide
acccaaaaggcaaugaugu

SEQ ID NO: 195660 - RNA, 19 nt, Artificial Sequence
  Description of Artificial Sequence: Synthetic oligonucleotide
ucauuccggaagauggaug

SEQ ID NO: 195661 - RNA, 19 nt, Artificial Sequence
  Description of Artificial Sequence: Synthetic oligonucleotide
aacgccaaggcaccauuca

SEQ ID NO: 195662 - RNA, 19 nt, Artificial Sequence
  Description of Artificial Sequence: Synthetic oligonucleotide
gaaggguggccucggaucc

SEQ ID NO: 195663 - RNA, 19 nt, Artificial Sequence
  Description of Artificial Sequence: Synthetic oligonucleotide
aagccgauccggucccacc

SEQ ID NO: 195664 - RNA, 19 nt, Artificial Sequence
  Description of Artificial Sequence: Synthetic oligonucleotide
guguacucgaaguccagag

SEQ ID NO: 195665 - RNA, 19 nt, Artificial Sequence
  Description of Artificial Sequence: Synthetic oligonucleotide
ugcaaugaggccccacagc

SEQ ID NO: 195666 - RNA, 19 nt, Artificial Sequence
  Description of Artificial Sequence: Synthetic oligonucleotide
ucuucaauugagacuggau

SEQ ID NO: 195667 - RNA, 19 nt, Artificial Sequence
  Description of Artificial Sequence: Synthetic oligonucleotide
ugcccuuaggggaccagcg

SEQ ID NO: 195668 - RNA, 19 nt, Artificial Sequence
  Description of Artificial Sequence: Synthetic oligonucleotide
auaaauuccucacccggau

SEQ ID NO: 195669 - RNA, 19 nt, Artificial Sequence
  Description of Artificial Sequence: Synthetic oligonucleotide
aacuuacugccauuggguu

SEQ ID NO: 195670 - RNA, 19 nt, Artificial Sequence
  Description of Artificial Sequence: Synthetic oligonucleotide
cacccaaaaggcaaugaug

SEQ ID NO: 195671 - RNA, 19 nt, Artificial Sequence
  Description of Artificial Sequence: Synthetic oligonucleotide
augauguuaccucccggag

SEQ ID NO: 195672 - RNA, 19 nt, Artificial Sequence
  Description of Artificial Sequence: Synthetic oligonucleotide
gaacgugugcugcuugucc

SEQ ID NO: 195673 - RNA, 19 nt, Artificial Sequence
  Description of Artificial Sequence: Synthetic oligonucleotide
ucauagaugcuaagaguau

SEQ ID NO: 195674 - RNA, 19 nt, Artificial Sequence
  Description of Artificial Sequence: Synthetic oligonucleotide
auauccgaggugccucgcc

SEQ ID NO: 195675 - RNA, 19 nt, Artificial Sequence
  Description of Artificial Sequence: Synthetic oligonucleotide
agcugcacgccuugguggc

SEQ ID NO: 195676 - RNA, 19 nt, Artificial Sequence
  Description of Artificial Sequence: Synthetic oligonucleotide
ucauucggaagauuucaaa

SEQ ID NO: 195677 - RNA, 19 nt, Artificial Sequence
  Description of Artificial Sequence: Synthetic oligonucleotide
ucggggucgcugaaggagg

SEQ ID NO: 195678 - RNA, 19 nt, Artificial Sequence
  Description of Artificial Sequence: Synthetic oligonucleotide
acgccuugguggcuaaacc

SEQ ID NO: 195679 - RNA, 19 nt, Artificial Sequence
  Description of Artificial Sequence: Synthetic oligonucleotide
uaacgcaaauuccccaggu

SEQ ID NO: 195680 - RNA, 19 nt, Artificial Sequence
  Description of Artificial Sequence: Synthetic oligonucleotide
guaacgcaaauuccccagg

SEQ ID NO: 195681 - RNA, 19 nt, Artificial Sequence
  Description of Artificial Sequence: Synthetic oligonucleotide
gacggugcagucugaagug

SEQ ID NO: 195682 - RNA, 19 nt, Artificial Sequence
  Description of Artificial Sequence: Synthetic oligonucleotide
accauucaugcuccucagc

SEQ ID NO: 195683 - RNA, 19 nt, Artificial Sequence
  Description of Artificial Sequence: Synthetic oligonucleotide
aucugauccuggcugagga

SEQ ID NO: 195684 - RNA, 19 nt, Artificial Sequence
  Description of Artificial Sequence: Synthetic oligonucleotide
auggagagaagucgauaag

SEQ ID NO: 195685 - RNA, 19 nt, Artificial Sequence
  Description of Artificial Sequence: Synthetic oligonucleotide
uccucuucaggguaauagu

SEQ ID NO: 195686 - RNA, 19 nt, Artificial Sequence
  Description of Artificial Sequence: Synthetic oligonucleotide
gaaagauguacccuuuagu

SEQ ID NO: 195687 - RNA, 19 nt, Artificial Sequence
  Description of Artificial Sequence: Synthetic oligonucleotide
augagaacccagccugagg

SEQ ID NO: 195688 - RNA, 19 nt, Artificial Sequence
  Description of Artificial Sequence: Synthetic oligonucleotide
agugucgacaaacgccaag

SEQ ID NO: 195689 - RNA, 19 nt, Artificial Sequence
  Description of Artificial Sequence: Synthetic oligonucleotide
cuuaugcccugugagaaug

SEQ ID NO: 195690 - RNA, 19 nt, Artificial Sequence
  Description of Artificial Sequence: Synthetic oligonucleotide
cauggagagaagucgauaa

SEQ ID NO: 195691 - RNA, 19 nt, Artificial Sequence
  Description of Artificial Sequence: Synthetic oligonucleotide
uguuaccucccggagacca

SEQ ID NO: 195692 - RNA, 19 nt, Artificial Sequence
  Description of Artificial Sequence: Synthetic oligonucleotide
cuuagaguauuucuucaga

SEQ ID NO: 195693 - RNA, 19 nt, Artificial Sequence
  Description of Artificial Sequence: Synthetic oligonucleotide
aggagaccgauauccgagg

SEQ ID NO: 195694 - RNA, 19 nt, Artificial Sequence
  Description of Artificial Sequence: Synthetic oligonucleotide
ucccucauucggaagauuu

SEQ ID NO: 195695 - RNA, 19 nt, Artificial Sequence
  Description of Artificial Sequence: Synthetic oligonucleotide
cuuugaaaggcuguuucuc

SEQ ID NO: 195696 - RNA, 19 nt, Artificial Sequence
  Description of Artificial Sequence: Synthetic oligonucleotide
agucgauaagcugcacgcc

SEQ ID NO: 195697 - RNA, 19 nt, Artificial Sequence
  Description of Artificial Sequence: Synthetic oligonucleotide
gcauuguccaccuuauggc

SEQ ID NO: 195698 - RNA, 19 nt, Artificial Sequence
  Description of Artificial Sequence: Synthetic oligonucleotide
gacaagguaucuuucacau

SEQ ID NO: 195699 - RNA, 19 nt, Artificial Sequence
  Description of Artificial Sequence: Synthetic oligonucleotide
uccggcacccaaaaggcaa

SEQ ID NO: 195700 - RNA, 19 nt, Artificial Sequence
  Description of Artificial Sequence: Synthetic oligonucleotide
ucgcucuuucuucaauuga

SEQ ID NO: 195701 - RNA, 19 nt, Artificial Sequence
  Description of Artificial Sequence: Synthetic oligonucleotide
ucgguauugccggaagucc

SEQ ID NO: 195702 - RNA, 19 nt, Artificial Sequence
  Description of Artificial Sequence: Synthetic oligonucleotide
ggguaauagucauuuauga

SEQ ID NO: 195703 - RNA, 19 nt, Artificial Sequence
  Description of Artificial Sequence: Synthetic oligonucleotide
acgaacugucccuggggac

SEQ ID NO: 195704 - RNA, 19 nt, Artificial Sequence
  Description of Artificial Sequence: Synthetic oligonucleotide
uauccgaggugccucgcca

SEQ ID NO: 195705 - RNA, 19 nt, Artificial Sequence
  Description of Artificial Sequence: Synthetic oligonucleotide
ucaacaacgucgacaggua

SEQ ID NO: 195706 - RNA, 19 nt, Artificial Sequence
  Description of Artificial Sequence: Synthetic oligonucleotide
ucacuucgggcuccggucc

SEQ ID NO: 195707 - RNA, 19 nt, Artificial Sequence
  Description of Artificial Sequence: Synthetic oligonucleotide
ugaugaguucgaucuuccc

SEQ ID NO: 195708 - RNA, 19 nt, Artificial Sequence
  Description of Artificial Sequence: Synthetic oligonucleotide
guaguguucugcaauguuc

SEQ ID NO: 195709 - RNA, 19 nt, Artificial Sequence
  Description of Artificial Sequence: Synthetic oligonucleotide
cauagaugcuaagaguauc

SEQ ID NO: 195710 - RNA, 19 nt, Artificial Sequence
  Description of Artificial Sequence: Synthetic oligonucleotide
agccugaacaggugugagg

SEQ ID NO: 195711 - RNA, 19 nt, Artificial Sequence
  Description of Artificial Sequence: Synthetic oligonucleotide
auggauguccggucuccac

SEQ ID NO: 195712 - RNA, 19 nt, Artificial Sequence
  Description of Artificial Sequence: Synthetic oligonucleotide
uuucgguauugccggaagu

SEQ ID NO: 195713 - RNA, 19 nt, Artificial Sequence
  Description of Artificial Sequence: Synthetic oligonucleotide
caagagcgcugcaaugagg

SEQ ID NO: 195714 - RNA, 19 nt, Artificial Sequence
  Description of Artificial Sequence: Synthetic oligonucleotide
uccaucaugguccgccuuc

SEQ ID NO: 195715 - RNA, 19 nt, Artificial Sequence
  Description of Artificial Sequence: Synthetic oligonucleotide
gacuggaucuuugacguca

SEQ ID NO: 195716 - RNA, 19 nt, Artificial Sequence
  Description of Artificial Sequence: Synthetic oligonucleotide
aaaugggccagugggcuga

SEQ ID NO: 195717 - RNA, 19 nt, Artificial Sequence
  Description of Artificial Sequence: Synthetic oligonucleotide
cagauaaugauggccugag

SEQ ID NO: 195718 - RNA, 19 nt, Artificial Sequence
  Description of Artificial Sequence: Synthetic oligonucleotide
cucccggagaccaagaaaa

SEQ ID NO: 195719 - RNA, 19 nt, Artificial Sequence
  Description of Artificial Sequence: Synthetic oligonucleotide
uaucugauccuggcugagg

SEQ ID NO: 195720 - RNA, 19 nt, Artificial Sequence
  Description of Artificial Sequence: Synthetic oligonucleotide
acuccugacuuccgagagg

SEQ ID NO: 195721 - RNA, 19 nt, Artificial Sequence
  Description of Artificial Sequence: Synthetic oligonucleotide
uccccgcaguucuagacgc

SEQ ID NO: 195722 - RNA, 19 nt, Artificial Sequence
  Description of Artificial Sequence: Synthetic oligonucleotide
auuguccaccuuauggcuc

SEQ ID NO: 195723 - RNA, 19 nt, Artificial Sequence
  Description of Artificial Sequence: Synthetic oligonucleotide
ugaucucuacacucugccu

SEQ ID NO: 195724 - RNA, 19 nt, Artificial Sequence
  Description of Artificial Sequence: Synthetic oligonucleotide
gagaccgauauccgaggug

SEQ ID NO: 195725 - RNA, 19 nt, Artificial Sequence
  Description of Artificial Sequence: Synthetic oligonucleotide
auaagcugcacgccuuggu

SEQ ID NO: 195726 - RNA, 19 nt, Artificial Sequence
  Description of Artificial Sequence: Synthetic oligonucleotide
acaacgucgacagguaccu

SEQ ID NO: 195727 - RNA, 19 nt, Artificial Sequence
  Description of Artificial Sequence: Synthetic oligonucleotide
uucgguauugccggaaguc

SEQ ID NO: 195728 - RNA, 19 nt, Artificial Sequence
  Description of Artificial Sequence: Synthetic oligonucleotide
aaacgccaaggcaccauuc

SEQ ID NO: 195729 - RNA, 19 nt, Artificial Sequence
  Description of Artificial Sequence: Synthetic oligonucleotide
ucaacgucagaggccaugu

SEQ ID NO: 195730 - RNA, 19 nt, Artificial Sequence
  Description of Artificial Sequence: Synthetic oligonucleotide
gcaauguucaugacggugc

SEQ ID NO: 195731 - RNA, 19 nt, Artificial Sequence
  Description of Artificial Sequence: Synthetic oligonucleotide
cacaguguugaagucacuc

SEQ ID NO: 195732 - RNA, 19 nt, Artificial Sequence
  Description of Artificial Sequence: Synthetic oligonucleotide
uagaugcuaagaguaucca

SEQ ID NO: 195733 - RNA, 19 nt, Artificial Sequence
  Description of Artificial Sequence: Synthetic oligonucleotide
uguacccuuuagucuuucc

SEQ ID NO: 195734 - RNA, 19 nt, Artificial Sequence
  Description of Artificial Sequence: Synthetic oligonucleotide
gacggagugcucccgggcc

SEQ ID NO: 195735 - RNA, 19 nt, Artificial Sequence
  Description of Artificial Sequence: Synthetic oligonucleotide
caguucuagacgcucguuc

SEQ ID NO: 195736 - RNA, 19 nt, Artificial Sequence
  Description of Artificial Sequence: Synthetic oligonucleotide
cuugaguauaucaccaagu

SEQ ID NO: 195737 - RNA, 19 nt, Artificial Sequence
  Description of Artificial Sequence: Synthetic oligonucleotide
ucuagacgcucguucuucu

SEQ ID NO: 195738 - RNA, 19 nt, Artificial Sequence
  Description of Artificial Sequence: Synthetic oligonucleotide
aacuucuccccuccccaga

SEQ ID NO: 195739 - RNA, 19 nt, Artificial Sequence
  Description of Artificial Sequence: Synthetic oligonucleotide
ugcgccgaggaucguuccg

SEQ ID NO: 195740 - RNA, 19 nt, Artificial Sequence
  Description of Artificial Sequence: Synthetic oligonucleotide
agcugugucgggauggaag

SEQ ID NO: 195741 - RNA, 19 nt, Artificial Sequence
  Description of Artificial Sequence: Synthetic oligonucleotide
aaaagcgaucuuuguuguu

SEQ ID NO: 195742 - RNA, 19 nt, Artificial Sequence
  Description of Artificial Sequence: Synthetic oligonucleotide
cugagucgaucccaucugc

SEQ ID NO: 195743 - RNA, 19 nt, Artificial Sequence
  Description of Artificial Sequence: Synthetic oligonucleotide
uccagcgacggagugcucc

SEQ ID NO: 195744 - RNA, 19 nt, Artificial Sequence
  Description of Artificial Sequence: Synthetic oligonucleotide
gguaggugcccuuagggga

SEQ ID NO: 195745 - RNA, 19 nt, Artificial Sequence
  Description of Artificial Sequence: Synthetic oligonucleotide
ucccggagaccaagaaaag

SEQ ID NO: 195746 - RNA, 19 nt, Artificial Sequence
  Description of Artificial Sequence: Synthetic oligonucleotide
uuaucugauccuggcugag

SEQ ID NO: 195747 - RNA, 19 nt, Artificial Sequence
  Description of Artificial Sequence: Synthetic oligonucleotide
gaucguuccgccggcugcg

SEQ ID NO: 195748 - RNA, 19 nt, Artificial Sequence
  Description of Artificial Sequence: Synthetic oligonucleotide
caugguccgccuucuuucc

SEQ ID NO: 195749 - RNA, 19 nt, Artificial Sequence
  Description of Artificial Sequence: Synthetic oligonucleotide
uccuugaguauaucaccaa

SEQ ID NO: 195750 - RNA, 19 nt, Artificial Sequence
  Description of Artificial Sequence: Synthetic oligonucleotide
acgaaauccucggggucgc

SEQ ID NO: 195751 - RNA, 19 nt, Artificial Sequence
  Description of Artificial Sequence: Synthetic oligonucleotide
acuugaaaaugggccagug

SEQ ID NO: 195752 - RNA, 19 nt, Artificial Sequence
  Description of Artificial Sequence: Synthetic oligonucleotide
ucccauugcucuucacgug

SEQ ID NO: 195753 - RNA, 19 nt, Artificial Sequence
  Description of Artificial Sequence: Synthetic oligonucleotide
uuaccucccggagaccaag

SEQ ID NO: 195754 - RNA, 19 nt, Artificial Sequence
  Description of Artificial Sequence: Synthetic oligonucleotide
ccaguaacgcaaauucccc

SEQ ID NO: 195755 - RNA, 19 nt, Artificial Sequence
  Description of Artificial Sequence: Synthetic oligonucleotide
ccggagaccaagaaaaguc

SEQ ID NO: 195756 - RNA, 19 nt, Artificial Sequence
  Description of Artificial Sequence: Synthetic oligonucleotide
ccuuugaagcuuuggacug

SEQ ID NO: 195757 - RNA, 19 nt, Artificial Sequence
  Description of Artificial Sequence: Synthetic oligonucleotide
gaaaaugggccagugggcu

SEQ ID NO: 195758 - RNA, 19 nt, Artificial Sequence
  Description of Artificial Sequence: Synthetic oligonucleotide
cucggggucgcugaaggag

SEQ ID NO: 195759 - RNA, 19 nt, Artificial Sequence
  Description of Artificial Sequence: Synthetic oligonucleotide
cucaagccgauccgguccc

SEQ ID NO: 195760 - RNA, 19 nt, Artificial Sequence
  Description of Artificial Sequence: Synthetic oligonucleotide
agucaaccacauugaauaa

SEQ ID NO: 195761 - RNA, 19 nt, Artificial Sequence
  Description of Artificial Sequence: Synthetic oligonucleotide
gguagaaggagaccgauau

SEQ ID NO: 195762 - RNA, 19 nt, Artificial Sequence
  Description of Artificial Sequence: Synthetic oligonucleotide
ucgauaagcugcacgccuu

SEQ ID NO: 195763 - RNA, 19 nt, Artificial Sequence
  Description of Artificial Sequence: Synthetic oligonucleotide
uucucaagccgauccgguc

SEQ ID NO: 195764 - RNA, 19 nt, Artificial Sequence
  Description of Artificial Sequence: Synthetic oligonucleotide
uucuagacgcucguucuuc

SEQ ID NO: 195765 - RNA, 19 nt, Artificial Sequence
  Description of Artificial Sequence: Synthetic oligonucleotide
agucacuccugacuuccga

SEQ ID NO: 195766 - RNA, 19 nt, Artificial Sequence
  Description of Artificial Sequence: Synthetic oligonucleotide
aaugccccgcugaugaaaa

SEQ ID NO: 195767 - RNA, 19 nt, Artificial Sequence
  Description of Artificial Sequence: Synthetic oligonucleotide
ucaagcgauccuucugcuc

SEQ ID NO: 195768 - RNA, 19 nt, Artificial Sequence
  Description of Artificial Sequence: Synthetic oligonucleotide
ucggaccccgcccuccucc

SEQ ID NO: 195769 - RNA, 19 nt, Artificial Sequence
  Description of Artificial Sequence: Synthetic oligonucleotide
cucaacaacgucgacaggu

SEQ ID NO: 195770 - RNA, 19 nt, Artificial Sequence
  Description of Artificial Sequence: Synthetic oligonucleotide
agcgacggagugcucccgg

SEQ ID NO: 195771 - RNA, 19 nt, Artificial Sequence
  Description of Artificial Sequence: Synthetic oligonucleotide
cuucccgggagcagagggc

SEQ ID NO: 195772 - RNA, 19 nt, Artificial Sequence
  Description of Artificial Sequence: Synthetic oligonucleotide
cauuccggaagauggaugu

SEQ ID NO: 195773 - RNA, 19 nt, Artificial Sequence
  Description of Artificial Sequence: Synthetic oligonucleotide
cugcuucauguagaguucc

SEQ ID NO: 195774 - RNA, 19 nt, Artificial Sequence
  Description of Artificial Sequence: Synthetic oligonucleotide
gucgccguuuccucuucgg

SEQ ID NO: 195775 - RNA, 19 nt, Artificial Sequence
  Description of Artificial Sequence: Synthetic oligonucleotide
ucaggcgagcugccaucgg

SEQ ID NO: 195776 - RNA, 19 nt, Artificial Sequence
  Description of Artificial Sequence: Synthetic oligonucleotide
caacaacgucgacagguac

SEQ ID NO: 195777 - RNA, 19 nt, Artificial Sequence
  Description of Artificial Sequence: Synthetic oligonucleotide
ucggauccugggcacggca

SEQ ID NO: 195778 - RNA, 19 nt, Artificial Sequence
  Description of Artificial Sequence: Synthetic oligonucleotide
gucguccacgaaauccucg

SEQ ID NO: 195779 - RNA, 19 nt, Artificial Sequence
  Description of Artificial Sequence: Synthetic oligonucleotide
cccgcugaugaaaaguggc

SEQ ID NO: 195780 - RNA, 19 nt, Artificial Sequence
  Description of Artificial Sequence: Synthetic oligonucleotide
cuccguucuccagagcccg

SEQ ID NO: 195781 - RNA, 19 nt, Artificial Sequence
  Description of Artificial Sequence: Synthetic oligonucleotide
ucgccaugaagcacagcaa

SEQ ID NO: 195782 - RNA, 19 nt, Artificial Sequence
  Description of Artificial Sequence: Synthetic oligonucleotide
ugguccgccuucuuuccac

SEQ ID NO: 195783 - RNA, 19 nt, Artificial Sequence
  Description of Artificial Sequence: Synthetic oligonucleotide
cacucaacgucagaggcca

SEQ ID NO: 195784 - RNA, 19 nt, Artificial Sequence
  Description of Artificial Sequence: Synthetic oligonucleotide
ucaucucaacaacgucgac

SEQ ID NO: 195785 - RNA, 19 nt, Artificial Sequence
  Description of Artificial Sequence: Synthetic oligonucleotide
uuccggcacccaaaaggca

SEQ ID NO: 195786 - RNA, 19 nt, Artificial Sequence
  Description of Artificial Sequence: Synthetic oligonucleotide
uggacuggcucaagcgauc

SEQ ID NO: 195787 - RNA, 19 nt, Artificial Sequence
  Description of Artificial Sequence: Synthetic oligonucleotide
guugacccggaacgugugc

SEQ ID NO: 195788 - RNA, 19 nt, Artificial Sequence
  Description of Artificial Sequence: Synthetic oligonucleotide
agccgauccggucccaccu

SEQ ID NO: 195789 - RNA, 19 nt, Artificial Sequence
  Description of Artificial Sequence: Synthetic oligonucleotide
guagaaggagaccgauauc

SEQ ID NO: 195790 - RNA, 19 nt, Artificial Sequence
  Description of Artificial Sequence: Synthetic oligonucleotide
cuagacgcucguucuucug

SEQ ID NO: 195791 - RNA, 19 nt, Artificial Sequence
  Description of Artificial Sequence: Synthetic oligonucleotide
ucgcucacgucguccacga

SEQ ID NO: 195792 - RNA, 19 nt, Artificial Sequence
  Description of Artificial Sequence: Synthetic oligonucleotide
cucgaguguccccacugug

SEQ ID NO: 195793 - RNA, 19 nt, Artificial Sequence
  Description of Artificial Sequence: Synthetic oligonucleotide
uccgaggugccucgccaug

SEQ ID NO: 195794 - RNA, 19 nt, Artificial Sequence
  Description of Artificial Sequence: Synthetic oligonucleotide
ggaagauggauguccgguc

SEQ ID NO: 195795 - RNA, 19 nt, Artificial Sequence
  Description of Artificial Sequence: Synthetic oligonucleotide
gguaauagucauuuaugau

SEQ ID NO: 195796 - RNA, 19 nt, Artificial Sequence
  Description of Artificial Sequence: Synthetic oligonucleotide
ggagucucuggaaacacca

SEQ ID NO: 195797 - RNA, 19 nt, Artificial Sequence
  Description of Artificial Sequence: Synthetic oligonucleotide
aagaguauccagagucauu

SEQ ID NO: 195798 - RNA, 19 nt, Artificial Sequence
  Description of Artificial Sequence: Synthetic oligonucleotide
caccaagagcgcugcaaug

SEQ ID NO: 195799 - RNA, 19 nt, Artificial Sequence
  Description of Artificial Sequence: Synthetic oligonucleotide
ggcgucuuccgucugcccc

SEQ ID NO: 195800 - RNA, 19 nt, Artificial Sequence
  Description of Artificial Sequence: Synthetic oligonucleotide
uugaagcuuuggacuggcu

SEQ ID NO: 195801 - RNA, 19 nt, Artificial Sequence
  Description of Artificial Sequence: Synthetic oligonucleotide
ggaaacaccacgggcagca

SEQ ID NO: 195802 - RNA, 19 nt, Artificial Sequence
  Description of Artificial Sequence: Synthetic oligonucleotide
aggaucguuccgccggcug

SEQ ID NO: 195803 - RNA, 19 nt, Artificial Sequence
  Description of Artificial Sequence: Synthetic oligonucleotide
acgucguccacgaaauccu

SEQ ID NO: 195804 - RNA, 19 nt, Artificial Sequence
  Description of Artificial Sequence: Synthetic oligonucleotide
cucaggcgagcugccaucg

SEQ ID NO: 195805 - RNA, 19 nt, Artificial Sequence
  Description of Artificial Sequence: Synthetic oligonucleotide
ccaaccugcgcagagggcc

SEQ ID NO: 195806 - RNA, 19 nt, Artificial Sequence
  Description of Artificial Sequence: Synthetic oligonucleotide
gucgauaagcugcacgccu

SEQ ID NO: 195807 - RNA, 19 nt, Artificial Sequence
  Description of Artificial Sequence: Synthetic oligonucleotide
agggcucauccgccucucc

SEQ ID NO: 195808 - RNA, 19 nt, Artificial Sequence
  Description of Artificial Sequence: Synthetic oligonucleotide
ggcuccacuugaaaauggg

SEQ ID NO: 195809 - RNA, 19 nt, Artificial Sequence
  Description of Artificial Sequence: Synthetic oligonucleotide
caaaagcgaucuuuguugu

SEQ ID NO: 195810 - RNA, 19 nt, Artificial Sequence
  Description of Artificial Sequence: Synthetic oligonucleotide
guauugaucucuacacucu

SEQ ID NO: 195811 - RNA, 19 nt, Artificial Sequence
  Description of Artificial Sequence: Synthetic oligonucleotide
guaggugcccuuaggggac

SEQ ID NO: 195812 - RNA, 19 nt, Artificial Sequence
  Description of Artificial Sequence: Synthetic oligonucleotide
gacucgucgccguuuccuc

SEQ ID NO: 195813 - RNA, 19 nt, Artificial Sequence
  Description of Artificial Sequence: Synthetic oligonucleotide
cuucggguugggccgcccg

SEQ ID NO: 195814 - RNA, 19 nt, Artificial Sequence
  Description of Artificial Sequence: Synthetic oligonucleotide
cuuguauccaucagcguuu

SEQ ID NO: 195815 - RNA, 19 nt, Artificial Sequence
  Description of Artificial Sequence: Synthetic oligonucleotide
cugccaucggaccccgccc

SEQ ID NO: 195816 - RNA, 19 nt, Artificial Sequence
  Description of Artificial Sequence: Synthetic oligonucleotide
gucaaccacauugaauaaa

SEQ ID NO: 195817 - RNA, 19 nt, Artificial Sequence
  Description of Artificial Sequence: Synthetic oligonucleotide
cucauucggaagauuucaa

SEQ ID NO: 195818 - RNA, 19 nt, Artificial Sequence
  Description of Artificial Sequence: Synthetic oligonucleotide
gcugugucgggauggaaga

SEQ ID NO: 195819 - RNA, 19 nt, Artificial Sequence
  Description of Artificial Sequence: Synthetic oligonucleotide
gacccggaacgugugcugc

SEQ ID NO: 195820 - RNA, 19 nt, Artificial Sequence
  Description of Artificial Sequence: Synthetic oligonucleotide
gaggaacguugucuacaac

SEQ ID NO: 195821 - RNA, 19 nt, Artificial Sequence
  Description of Artificial Sequence: Synthetic oligonucleotide
ccgaggaucguuccgccgg

SEQ ID NO: 195822 - RNA, 19 nt, Artificial Sequence
  Description of Artificial Sequence: Synthetic oligonucleotide
ggaucguuccgccggcugc

SEQ ID NO: 195823 - RNA, 19 nt, Artificial Sequence
  Description of Artificial Sequence: Synthetic oligonucleotide
gauauccgaggugccucgc

SEQ ID NO: 195824 - RNA, 19 nt, Artificial Sequence
  Description of Artificial Sequence: Synthetic oligonucleotide
ucaugacggugcagucuga

SEQ ID NO: 195825 - RNA, 19 nt, Artificial Sequence
  Description of Artificial Sequence: Synthetic oligonucleotide
accgauauccgaggugccu

SEQ ID NO: 195826 - RNA, 19 nt, Artificial Sequence
  Description of Artificial Sequence: Synthetic oligonucleotide
cacgugguagaaggagacc

SEQ ID NO: 195827 - RNA, 19 nt, Artificial Sequence
  Description of Artificial Sequence: Synthetic oligonucleotide
uggaaacaccacgggcagc

SEQ ID NO: 195828 - RNA, 19 nt, Artificial Sequence
  Description of Artificial Sequence: Synthetic oligonucleotide
ucggcgucuuccgucugcc

SEQ ID NO: 195829 - RNA, 19 nt, Artificial Sequence
  Description of Artificial Sequence: Synthetic oligonucleotide
guugggucccacucaacgu

SEQ ID NO: 195830 - RNA, 19 nt, Artificial Sequence
  Description of Artificial Sequence: Synthetic oligonucleotide
auguacccuuuagucuuuc

SEQ ID NO: 195831 - RNA, 19 nt, Artificial Sequence
  Description of Artificial Sequence: Synthetic oligonucleotide
cacgccuugguggcuaaac

SEQ ID NO: 195832 - RNA, 19 nt, Artificial Sequence
  Description of Artificial Sequence: Synthetic oligonucleotide
gcuuguauccaucagcguu

SEQ ID NO: 195833 - RNA, 19 nt, Artificial Sequence
  Description of Artificial Sequence: Synthetic oligonucleotide
cuguauugaucucuacacu

SEQ ID NO: 195834 - RNA, 19 nt, Artificial Sequence
  Description of Artificial Sequence: Synthetic oligonucleotide
gaaaaguggccagguaggu

SEQ ID NO: 195835 - RNA, 19 nt, Artificial Sequence
  Description of Artificial Sequence: Synthetic oligonucleotide
uccguucuccagagcccgc

SEQ ID NO: 195836 - RNA, 19 nt, Artificial Sequence
  Description of Artificial Sequence: Synthetic oligonucleotide
gacaacacccugugugccu

SEQ ID NO: 195837 - RNA, 19 nt, Artificial Sequence
  Description of Artificial Sequence: Synthetic oligonucleotide
ccuuauggcuccaccauga

SEQ ID NO: 195838 - RNA, 19 nt, Artificial Sequence
  Description of Artificial Sequence: Synthetic oligonucleotide
acggagugcucccgggccu

SEQ ID NO: 195839 - RNA, 19 nt, Artificial Sequence
  Description of Artificial Sequence: Synthetic oligonucleotide
ucacugagucgaucccauc

SEQ ID NO: 195840 - RNA, 19 nt, Artificial Sequence
  Description of Artificial Sequence: Synthetic oligonucleotide
uccgguccggccucuuccu

SEQ ID NO: 195841 - RNA, 19 nt, Artificial Sequence
  Description of Artificial Sequence: Synthetic oligonucleotide
gcuccacuugaaaaugggc

SEQ ID NO: 195842 - RNA, 19 nt, Artificial Sequence
  Description of Artificial Sequence: Synthetic oligonucleotide
ccaugaauagggaccccac

SEQ ID NO: 195843 - RNA, 19 nt, Artificial Sequence
  Description of Artificial Sequence: Synthetic oligonucleotide
ccaagagcgcugcaaugag

SEQ ID NO: 195844 - RNA, 19 nt, Artificial Sequence
  Description of Artificial Sequence: Synthetic oligonucleotide
acaaacgccaaggcaccau

SEQ ID NO: 195845 - RNA, 19 nt, Artificial Sequence
  Description of Artificial Sequence: Synthetic oligonucleotide
cucacgucguccacgaaau

SEQ ID NO: 195846 - RNA, 19 nt, Artificial Sequence
  Description of Artificial Sequence: Synthetic oligonucleotide
cagccugaacaggugugag

SEQ ID NO: 195847 - RNA, 19 nt, Artificial Sequence
  Description of Artificial Sequence: Synthetic oligonucleotide
gaaccccggguguacucga

SEQ ID NO: 195848 - RNA, 19 nt, Artificial Sequence
  Description of Artificial Sequence: Synthetic oligonucleotide
gggacuccagaagauggug

SEQ ID NO: 195849 - RNA, 19 nt, Artificial Sequence
  Description of Artificial Sequence: Synthetic oligonucleotide
augguccgccuucuuucca

SEQ ID NO: 195850 - RNA, 19 nt, Artificial Sequence
  Description of Artificial Sequence: Synthetic oligonucleotide
gaccgauauccgaggugcc

SEQ ID NO: 195851 - RNA, 19 nt, Artificial Sequence
  Description of Artificial Sequence: Synthetic oligonucleotide
augccccgcugaugaaaag

SEQ ID NO: 195852 - RNA, 19 nt, Artificial Sequence
  Description of Artificial Sequence: Synthetic oligonucleotide
ggcugaaagugacaaggua

SEQ ID NO: 195853 - RNA, 19 nt, Artificial Sequence
  Description of Artificial Sequence: Synthetic oligonucleotide
gugcccuuaggggaccagc

SEQ ID NO: 195854 - RNA, 19 nt, Artificial Sequence
  Description of Artificial Sequence: Synthetic oligonucleotide
gcgagcugccaucggaccc

SEQ ID NO: 195855 - RNA, 19 nt, Artificial Sequence
  Description of Artificial Sequence: Synthetic oligonucleotide
ccuuaggggaccagcgcac

SEQ ID NO: 195856 - RNA, 19 nt, Artificial Sequence
  Description of Artificial Sequence: Synthetic oligonucleotide
ccacuugaaaaugggccag

SEQ ID NO: 195857 - RNA, 19 nt, Artificial Sequence
  Description of Artificial Sequence: Synthetic oligonucleotide
acgucgacagguaccugcu

SEQ ID NO: 195858 - RNA, 19 nt, Artificial Sequence
  Description of Artificial Sequence: Synthetic oligonucleotide
acggccggacucgucgccg

SEQ ID NO: 195859 - RNA, 19 nt, Artificial Sequence
  Description of Artificial Sequence: Synthetic oligonucleotide
acaacacccugugugccuu

SEQ ID NO: 195860 - RNA, 19 nt, Artificial Sequence
  Description of Artificial Sequence: Synthetic oligonucleotide
ccgcuuggcccucacuucg

SEQ ID NO: 195861 - RNA, 19 nt, Artificial Sequence
  Description of Artificial Sequence: Synthetic oligonucleotide
ggcgacacggccggacucg

SEQ ID NO: 195862 - RNA, 19 nt, Artificial Sequence
  Description of Artificial Sequence: Synthetic oligonucleotide
auccgaggugccucgccau

SEQ ID NO: 195863 - RNA, 19 nt, Artificial Sequence
  Description of Artificial Sequence: Synthetic oligonucleotide
cgacaaacgccaaggcacc

SEQ ID NO: 195864 - RNA, 19 nt, Artificial Sequence
  Description of Artificial Sequence: Synthetic oligonucleotide
aucggaccccgcccuccuc

SEQ ID NO: 195865 - RNA, 19 nt, Artificial Sequence
  Description of Artificial Sequence: Synthetic oligonucleotide
cugcgccgaggaucguucc

SEQ ID NO: 195866 - RNA, 19 nt, Artificial Sequence
  Description of Artificial Sequence: Synthetic oligonucleotide
ggcgagcugccaucggacc

SEQ ID NO: 195867 - RNA, 19 nt, Artificial Sequence
  Description of Artificial Sequence: Synthetic oligonucleotide
gucgcugaaggagggcuca

SEQ ID NO: 195868 - RNA, 19 nt, Artificial Sequence
  Description of Artificial Sequence: Synthetic oligonucleotide
ccgcaguucuagacgcucg

SEQ ID NO: 195869 - RNA, 19 nt, Artificial Sequence
  Description of Artificial Sequence: Synthetic oligonucleotide
gcgaucuuuguuguucuuc

SEQ ID NO: 195870 - RNA, 19 nt, Artificial Sequence
  Description of Artificial Sequence: Synthetic oligonucleotide
gccucgaguguccccacug

SEQ ID NO: 195871 - RNA, 19 nt, Artificial Sequence
  Description of Artificial Sequence: Synthetic oligonucleotide
uaggugcccuuaggggacc

SEQ ID NO: 195872 - RNA, 19 nt, Artificial Sequence
  Description of Artificial Sequence: Synthetic oligonucleotide
gugcagucugaagugucga

SEQ ID NO: 195873 - RNA, 19 nt, Artificial Sequence
  Description of Artificial Sequence: Synthetic oligonucleotide
ccucauucggaagauuuca

SEQ ID NO: 195874 - RNA, 19 nt, Artificial Sequence
  Description of Artificial Sequence: Synthetic oligonucleotide
cgauauccgaggugccucg

SEQ ID NO: 195875 - RNA, 19 nt, Artificial Sequence
  Description of Artificial Sequence: Synthetic oligonucleotide
caguugggucccacucaac

SEQ ID NO: 195876 - RNA, 19 nt, Artificial Sequence
  Description of Artificial Sequence: Synthetic oligonucleotide
aggguguuucauagaugcu

SEQ ID NO: 195877 - RNA, 19 nt, Artificial Sequence
  Description of Artificial Sequence: Synthetic oligonucleotide
gguccgccuucuuuccacc

SEQ ID NO: 195878 - RNA, 19 nt, Artificial Sequence
  Description of Artificial Sequence: Synthetic oligonucleotide
aagugucgacaaacgccaa

SEQ ID NO: 195879 - RNA, 19 nt, Artificial Sequence
  Description of Artificial Sequence: Synthetic oligonucleotide
gguguacucgaaguccaga

SEQ ID NO: 195880 - RNA, 19 nt, Artificial Sequence
  Description of Artificial Sequence: Synthetic oligonucleotide
gccgaggaucguuccgccg

SEQ ID NO: 195881 - RNA, 19 nt, Artificial Sequence
  Description of Artificial Sequence: Synthetic oligonucleotide
ccagcgacggagugcuccc

SEQ ID NO: 195882 - RNA, 19 nt, Artificial Sequence
  Description of Artificial Sequence: Synthetic oligonucleotide
gcgacggagugcucccggg

SEQ ID NO: 195883 - RNA, 19 nt, Artificial Sequence
  Description of Artificial Sequence: Synthetic oligonucleotide
ccggaagauggauguccgg

SEQ ID NO: 195884 - RNA, 19 nt, Artificial Sequence
  Description of Artificial Sequence: Synthetic oligonucleotide
cuuaggggaccagcgcaca

SEQ ID NO: 195885 - RNA, 19 nt, Artificial Sequence
  Description of Artificial Sequence: Synthetic oligonucleotide
agccucgaguguccccacu

SEQ ID NO: 195886 - RNA, 19 nt, Artificial Sequence
  Description of Artificial Sequence: Synthetic oligonucleotide
gauguccggucuccacucu

SEQ ID NO: 195887 - RNA, 19 nt, Artificial Sequence
  Description of Artificial Sequence: Synthetic oligonucleotide
cuuugacgucauuccggaa

SEQ ID NO: 195888 - RNA, 19 nt, Artificial Sequence
  Description of Artificial Sequence: Synthetic oligonucleotide
caaugccccgcugaugaaa

SEQ ID NO: 195889 - RNA, 19 nt, Artificial Sequence
  Description of Artificial Sequence: Synthetic oligonucleotide
gcccuuaggggaccagcgc

SEQ ID NO: 195890 - RNA, 19 nt, Artificial Sequence
  Description of Artificial Sequence: Synthetic oligonucleotide
caagccgauccggucccac

SEQ ID NO: 195891 - RNA, 19 nt, Artificial Sequence
  Description of Artificial Sequence: Synthetic oligonucleotide
ucuucggguugggccgccc

SEQ ID NO: 195892 - RNA, 19 nt, Artificial Sequence
  Description of Artificial Sequence: Synthetic oligonucleotide
caugacggugcagucugaa

SEQ ID NO: 195893 - RNA, 19 nt, Artificial Sequence
  Description of Artificial Sequence: Synthetic oligonucleotide
cucaagcgauccuucugcu

SEQ ID NO: 195894 - RNA, 19 nt, Artificial Sequence
  Description of Artificial Sequence: Synthetic oligonucleotide
ugcacgccuugguggcuaa

SEQ ID NO: 195895 - RNA, 19 nt, Artificial Sequence
  Description of Artificial Sequence: Synthetic oligonucleotide
ucaagccgauccgguccca

SEQ ID NO: 195896 - RNA, 19 nt, Artificial Sequence
  Description of Artificial Sequence: Synthetic oligonucleotide
cccuuaggggaccagcgca

SEQ ID NO: 195897 - RNA, 19 nt, Artificial Sequence
  Description of Artificial Sequence: Synthetic oligonucleotide
gcgauccuucugcucgaag

SEQ ID NO: 195898 - RNA, 19 nt, Artificial Sequence
  Description of Artificial Sequence: Synthetic oligonucleotide
cucggauccugggcacggc

SEQ ID NO: 195899 - RNA, 19 nt, Artificial Sequence
  Description of Artificial Sequence: Synthetic oligonucleotide
ccugaacaggugugaggug

SEQ ID NO: 195900 - RNA, 19 nt, Artificial Sequence
  Description of Artificial Sequence: Synthetic oligonucleotide
ccugcgccgaggaucguuc

SEQ ID NO: 195901 - RNA, 19 nt, Artificial Sequence
  Description of Artificial Sequence: Synthetic oligonucleotide
uccugcgccgaggaucguu

SEQ ID NO: 195902 - RNA, 19 nt, Artificial Sequence
  Description of Artificial Sequence: Synthetic oligonucleotide
cuucgggcuccgguccggc

SEQ ID NO: 195903 - RNA, 19 nt, Artificial Sequence
  Description of Artificial Sequence: Synthetic oligonucleotide
ggaacgugugcugcuuguc

SEQ ID NO: 195904 - RNA, 19 nt, Artificial Sequence
  Description of Artificial Sequence: Synthetic oligonucleotide
ccagauaaugauggccuga

SEQ ID NO: 195905 - RNA, 19 nt, Artificial Sequence
  Description of Artificial Sequence: Synthetic oligonucleotide
ccgauauccgaggugccuc

SEQ ID NO: 195906 - RNA, 19 nt, Artificial Sequence
  Description of Artificial Sequence: Synthetic oligonucleotide
cacugaucgucauguacuu

SEQ ID NO: 195907 - RNA, 19 nt, Artificial Sequence
  Description of Artificial Sequence: Synthetic oligonucleotide
ccggccagcaccacgaacu

SEQ ID NO: 195908 - RNA, 19 nt, Artificial Sequence
  Description of Artificial Sequence: Synthetic oligonucleotide
ccauagaggguguuucaua

SEQ ID NO: 195909 - RNA, 19 nt, Artificial Sequence
  Description of Artificial Sequence: Synthetic oligonucleotide
cagcgacggagugcucccg

SEQ ID NO: 195910 - RNA, 19 nt, Artificial Sequence
  Description of Artificial Sequence: Synthetic oligonucleotide
ggagaccgauauccgaggu

SEQ ID NO: 195911 - RNA, 19 nt, Artificial Sequence
  Description of Artificial Sequence: Synthetic oligonucleotide
cacauaagucucuguccau

SEQ ID NO: 195912 - RNA, 19 nt, Artificial Sequence
  Description of Artificial Sequence: Synthetic oligonucleotide
gcgccgaggaucguuccgc

SEQ ID NO: 195913 - RNA, 19 nt, Artificial Sequence
  Description of Artificial Sequence: Synthetic oligonucleotide
cguccacgaaauccucggg

SEQ ID NO: 195914 - RNA, 19 nt, Artificial Sequence
  Description of Artificial Sequence: Synthetic oligonucleotide
ccguucuccagagcccgcg

SEQ ID NO: 195915 - RNA, 19 nt, Artificial Sequence
  Description of Artificial Sequence: Synthetic oligonucleotide
ccucggauccugggcacgg

SEQ ID NO: 195916 - RNA, 19 nt, Artificial Sequence
  Description of Artificial Sequence: Synthetic oligonucleotide
caaacgccaaggcaccauu

SEQ ID NO: 195917 - RNA, 19 nt, Artificial Sequence
  Description of Artificial Sequence: Synthetic oligonucleotide
aaccccggguguacucgaa

SEQ ID NO: 195918 - RNA, 19 nt, Artificial Sequence
  Description of Artificial Sequence: Synthetic oligonucleotide
ccucaggcgagcugccauc

SEQ ID NO: 195919 - RNA, 19 nt, Artificial Sequence
  Description of Artificial Sequence: Synthetic oligonucleotide
gauguacccuuuagucuuu

SEQ ID NO: 195920 - RNA, 19 nt, Artificial Sequence
  Description of Artificial Sequence: Synthetic oligonucleotide
ccauuggguucccaggcaa

SEQ ID NO: 195921 - RNA, 19 nt, Artificial Sequence
  Description of Artificial Sequence: Synthetic oligonucleotide
caacgucgacagguaccug

SEQ ID NO: 195922 - RNA, 19 nt, Artificial Sequence
  Description of Artificial Sequence: Synthetic oligonucleotide
gccgauccggucccaccug

SEQ ID NO: 195923 - RNA, 19 nt, Artificial Sequence
  Description of Artificial Sequence: Synthetic oligonucleotide
cucuucggguugggccgcc

SEQ ID NO: 195924 - RNA, 19 nt, Artificial Sequence
  Description of Artificial Sequence: Synthetic oligonucleotide
agcgauccuucugcucgaa

SEQ ID NO: 195925 - RNA, 19 nt, Artificial Sequence
  Description of Artificial Sequence: Synthetic oligonucleotide
ccggaucuccugucuggug

SEQ ID NO: 195926 - RNA, 19 nt, Artificial Sequence
  Description of Artificial Sequence: Synthetic oligonucleotide
caacaaucacugagucgau

SEQ ID NO: 195927 - RNA, 19 nt, Artificial Sequence
  Description of Artificial Sequence: Synthetic oligonucleotide
cacuugaaaaugggccagu

SEQ ID NO: 195928 - RNA, 19 nt, Artificial Sequence
  Description of Artificial Sequence: Synthetic oligonucleotide
gccucggauccugggcacg

SEQ ID NO: 195929 - RNA, 19 nt, Artificial Sequence
  Description of Artificial Sequence: Synthetic oligonucleotide
ggugcccuuaggggaccag

SEQ ID NO: 195930 - RNA, 19 nt, Artificial Sequence
  Description of Artificial Sequence: Synthetic oligonucleotide
cgaggaucguuccgccggc

SEQ ID NO: 195931 - RNA, 19 nt, Artificial Sequence
  Description of Artificial Sequence: Synthetic oligonucleotide
cccgcaguucuagacgcuc

SEQ ID NO: 195932 - RNA, 19 nt, Artificial Sequence
  Description of Artificial Sequence: Synthetic oligonucleotide
gacgcucguucuucugcuu

SEQ ID NO: 195933 - RNA, 19 nt, Artificial Sequence
  Description of Artificial Sequence: Synthetic oligonucleotide
ccaucggaccccgcccucc

SEQ ID NO: 195934 - RNA, 19 nt, Artificial Sequence
  Description of Artificial Sequence: Synthetic oligonucleotide
cggucccaccugaggaacg

SEQ ID NO: 195935 - RNA, 19 nt, Artificial Sequence
  Description of Artificial Sequence: Synthetic oligonucleotide
acccuggcuggaauaucuu

SEQ ID NO: 195936 - RNA, 19 nt, Artificial Sequence
  Description of Artificial Sequence: Synthetic oligonucleotide
gggcgacacggccggacuc

SEQ ID NO: 195937 - RNA, 19 nt, Artificial Sequence
  Description of Artificial Sequence: Synthetic oligonucleotide
ccgagaggaaugaucuccu

SEQ ID NO: 195938 - RNA, 19 nt, Artificial Sequence
  Description of Artificial Sequence: Synthetic oligonucleotide
gacuuccgagaggaaugau

SEQ ID NO: 195939 - RNA, 19 nt, Artificial Sequence
  Description of Artificial Sequence: Synthetic oligonucleotide
cgucguccacgaaauccuc

SEQ ID NO: 195940 - RNA, 19 nt, Artificial Sequence
  Description of Artificial Sequence: Synthetic oligonucleotide
cgauccggucccaccugag

SEQ ID NO: 195941 - RNA, 19 nt, Artificial Sequence
  Description of Artificial Sequence: Synthetic oligonucleotide
gaggaucguuccgccggcu

SEQ ID NO: 195942 - RNA, 19 nt, Artificial Sequence
  Description of Artificial Sequence: Synthetic oligonucleotide
ccucuucggguugggccgc

SEQ ID NO: 195943 - RNA, 19 nt, Artificial Sequence
  Description of Artificial Sequence: Synthetic oligonucleotide
cgccgaggaucguuccgcc

SEQ ID NO: 195944 - RNA, 19 nt, Artificial Sequence
  Description of Artificial Sequence: Synthetic oligonucleotide
cugcacgccuugguggcua

SEQ ID NO: 195945 - RNA, 19 nt, Artificial Sequence
  Description of Artificial Sequence: Synthetic oligonucleotide
ggagugcucccgggccugc

SEQ ID NO: 195946 - RNA, 19 nt, Artificial Sequence
  Description of Artificial Sequence: Synthetic oligonucleotide
caucggaccccgcccuccu

SEQ ID NO: 195947 - RNA, 19 nt, Artificial Sequence
  Description of Artificial Sequence: Synthetic oligonucleotide
gcuccgguccggccucuuc

SEQ ID NO: 195948 - RNA, 19 nt, Artificial Sequence
  Description of Artificial Sequence: Synthetic oligonucleotide
ggcguccuuggaaggucca

SEQ ID NO: 195949 - RNA, 19 nt, Artificial Sequence
  Description of Artificial Sequence: Synthetic oligonucleotide
ccgauccggucccaccuga

SEQ ID NO: 195950 - RNA, 19 nt, Artificial Sequence
  Description of Artificial Sequence: Synthetic oligonucleotide
guagaguuccugggccauu

SEQ ID NO: 195951 - RNA, 19 nt, Artificial Sequence
  Description of Artificial Sequence: Synthetic oligonucleotide
cggaagauggauguccggu

SEQ ID NO: 195952 - RNA, 19 nt, Artificial Sequence
  Description of Artificial Sequence: Synthetic oligonucleotide
cccggagaccaagaaaagu

SEQ ID NO: 195953 - RNA, 19 nt, Artificial Sequence
  Description of Artificial Sequence: Synthetic oligonucleotide
ggggcgacacggccggacu

SEQ ID NO: 195954 - RNA, 19 nt, Artificial Sequence
  Description of Artificial Sequence: Synthetic oligonucleotide
gccaucggaccccgcccuc

SEQ ID NO: 195955 - RNA, 19 nt, Artificial Sequence
  Description of Artificial Sequence: Synthetic oligonucleotide
ccgaggugccucgccauga

SEQ ID NO: 195956 - RNA, 19 nt, Artificial Sequence
  Description of Artificial Sequence: Synthetic oligonucleotide
cccaaaaggcaaugauguu

SEQ ID NO: 195957 - RNA, 19 nt, Artificial Sequence
  Description of Artificial Sequence: Synthetic oligonucleotide
cgaucccaucugcuuccug

SEQ ID NO: 195958 - RNA, 19 nt, Artificial Sequence
  Description of Artificial Sequence: Synthetic oligonucleotide
cggacucgucgccguuucc

SEQ ID NO: 195959 - RNA, 19 nt, Artificial Sequence
  Description of Artificial Sequence: Synthetic oligonucleotide
ggaccccgcccuccuccuc

SEQ ID NO: 195960 - RNA, 19 nt, Artificial Sequence
  Description of Artificial Sequence: Synthetic oligonucleotide
gcggccaguugggucccac

SEQ ID NO: 195961 - RNA, 19 nt, Artificial Sequence
  Description of Artificial Sequence: Synthetic oligonucleotide
ggccgauccuugaguauau

SEQ ID NO: 195962 - RNA, 19 nt, Artificial Sequence
  Description of Artificial Sequence: Synthetic oligonucleotide
ccgguccggccucuuccuc

SEQ ID NO: 195963 - RNA, 19 nt, Artificial Sequence
  Description of Artificial Sequence: Synthetic oligonucleotide
cggcgucuuccgucugccc

SEQ ID NO: 195964 - RNA, 19 nt, Artificial Sequence
  Description of Artificial Sequence: Synthetic oligonucleotide
gcaguucuagacgcucguu

SEQ ID NO: 195965 - RNA, 19 nt, Artificial Sequence
  Description of Artificial Sequence: Synthetic oligonucleotide
ccaccccuccccgcaguuc

SEQ ID NO: 195966 - RNA, 19 nt, Artificial Sequence
  Description of Artificial Sequence: Synthetic oligonucleotide
cggaacgugugcugcuugu

SEQ ID NO: 195967 - RNA, 19 nt, Artificial Sequence
  Description of Artificial Sequence: Synthetic oligonucleotide
cggagugcucccgggccug

SEQ ID NO: 195968 - RNA, 19 nt, Artificial Sequence
  Description of Artificial Sequence: Synthetic oligonucleotide
ccggcacccaaaaggcaau

SEQ ID NO: 195969 - RNA, 19 nt, Artificial Sequence
  Description of Artificial Sequence: Synthetic oligonucleotide
cgaggugccucgccaugaa

SEQ ID NO: 195970 - RNA, 19 nt, Artificial Sequence
  Description of Artificial Sequence: Synthetic oligonucleotide
gccccgccacagccugaac

SEQ ID NO: 195971 - RNA, 19 nt, Artificial Sequence
  Description of Artificial Sequence: Synthetic oligonucleotide
cccggaucuccugucuggu

SEQ ID NO: 195972 - RNA, 19 nt, Artificial Sequence
  Description of Artificial Sequence: Synthetic oligonucleotide
gcacgccuugguggcuaaa

SEQ ID NO: 195973 - RNA, 19 nt, Artificial Sequence
  Description of Artificial Sequence: Synthetic oligonucleotide
gcgacacggccggacucgu

SEQ ID NO: 195974 - RNA, 19 nt, Artificial Sequence
  Description of Artificial Sequence: Synthetic oligonucleotide
ccccgcaguucuagacgcu

SEQ ID NO: 195975 - RNA, 19 nt, Artificial Sequence
  Description of Artificial Sequence: Synthetic oligonucleotide
gccggacucgucgccguuu

SEQ ID NO: 195976 - RNA, 19 nt, Artificial Sequence
  Description of Artificial Sequence: Synthetic oligonucleotide
ggccggacucgucgccguu

SEQ ID NO: 195977 - RNA, 19 nt, Artificial Sequence
  Description of Artificial Sequence: Synthetic oligonucleotide
cuccugcgccgaggaucgu

SEQ ID NO: 195978 - RNA, 19 nt, Artificial Sequence
  Description of Artificial Sequence: Synthetic oligonucleotide
cgcucacgucguccacgaa

SEQ ID NO: 195979 - RNA, 19 nt, Artificial Sequence
  Description of Artificial Sequence: Synthetic oligonucleotide
cggaccccgcccuccuccu

SEQ ID NO: 195980 - RNA, 19 nt, Artificial Sequence
  Description of Artificial Sequence: Synthetic oligonucleotide
cgucgacagguaccugcuu

SEQ ID NO: 195981 - RNA, 19 nt, Artificial Sequence
  Description of Artificial Sequence: Synthetic oligonucleotide
cggccggacucgucgccgu

SEQ ID NO: 195982 - RNA, 19 nt, Artificial Sequence
  Description of Artificial Sequence: Synthetic oligonucleotide
cgaaauccucggggucgcu

SEQ ID NO: 195983 - RNA, 19 nt, Artificial Sequence
  Description of Artificial Sequence: Synthetic oligonucleotide
aauguugugaccugcaugg

SEQ ID NO: 195984 - RNA, 19 nt, Artificial Sequence
  Description of Artificial Sequence: Synthetic oligonucleotide
aaacuaaggaauuguauuc

SEQ ID NO: 195985 - RNA, 19 nt, Artificial Sequence
  Description of Artificial Sequence: Synthetic oligonucleotide
auaacaaaugguaacaacc

SEQ ID NO: 195986 - RNA, 19 nt, Artificial Sequence
  Description of Artificial Sequence: Synthetic oligonucleotide
uguacauauuauuugagag

SEQ ID NO: 195987 - RNA, 19 nt, Artificial Sequence
  Description of Artificial Sequence: Synthetic oligonucleotide
uuuauuagacauuuaaugu

SEQ ID NO: 195988 - RNA, 19 nt, Artificial Sequence
  Description of Artificial Sequence: Synthetic oligonucleotide
cuugaauugauuuauuuug

SEQ ID NO: 195989 - RNA, 19 nt, Artificial Sequence
  Description of Artificial Sequence: Synthetic oligonucleotide
agcgcuuuuacucugcucc

SEQ ID NO: 195990 - RNA, 19 nt, Artificial Sequence
  Description of Artificial Sequence: Synthetic oligonucleotide
uuugugaauaauuaaauua

SEQ ID NO: 195991 - RNA, 19 nt, Artificial Sequence
  Description of Artificial Sequence: Synthetic oligonucleotide
uauaccaggucucugaagc

SEQ ID NO: 195992 - RNA, 19 nt, Artificial Sequence
  Description of Artificial Sequence: Synthetic oligonucleotide
aguuguguuauccagcuuc

SEQ ID NO: 195993 - RNA, 19 nt, Artificial Sequence
  Description of Artificial Sequence: Synthetic oligonucleotide
ucuucguugaguuuaaugu

SEQ ID NO: 195994 - RNA, 19 nt, Artificial Sequence
  Description of Artificial Sequence: Synthetic oligonucleotide
aaugguaacaaccacccau

SEQ ID NO: 195995 - RNA, 19 nt, Artificial Sequence
  Description of Artificial Sequence: Synthetic oligonucleotide
ucugcaauuguguuaaacc

SEQ ID NO: 195996 - RNA, 19 nt, Artificial Sequence
  Description of Artificial Sequence: Synthetic oligonucleotide
uguuaaaccguuauccuug

SEQ ID NO: 195997 - RNA, 19 nt, Artificial Sequence
  Description of Artificial Sequence: Synthetic oligonucleotide
uuccaaaucuaauauagca

SEQ ID NO: 195998 - RNA, 19 nt, Artificial Sequence
  Description of Artificial Sequence: Synthetic oligonucleotide
aaagcuccgucauuagagc

SEQ ID NO: 195999 - RNA, 19 nt, Artificial Sequence
  Description of Artificial Sequence: Synthetic oligonucleotide
uacauauuauuugagagga

SEQ ID NO: 196000 - RNA, 19 nt, Artificial Sequence
  Description of Artificial Sequence: Synthetic oligonucleotide
guacauauuauuugagagg

SEQ ID NO: 196001 - RNA, 19 nt, Artificial Sequence
  Description of Artificial Sequence: Synthetic oligonucleotide
uuuguuuaauucuucaguc

SEQ ID NO: 196002 - RNA, 19 nt, Artificial Sequence
  Description of Artificial Sequence: Synthetic oligonucleotide
cuaguaugcaaccagaguc

SEQ ID NO: 196003 - RNA, 19 nt, Artificial Sequence
  Description of Artificial Sequence: Synthetic oligonucleotide
ucuaauucugaccuuggca

SEQ ID NO: 196004 - RNA, 19 nt, Artificial Sequence
  Description of Artificial Sequence: Synthetic oligonucleotide
ucuacacuuaauuuccucc

SEQ ID NO: 196005 - RNA, 19 nt, Artificial Sequence
  Description of Artificial Sequence: Synthetic oligonucleotide
uuguguuaaaccguuaucc

SEQ ID NO: 196006 - RNA, 19 nt, Artificial Sequence
  Description of Artificial Sequence: Synthetic oligonucleotide
uagacauuuaauguuagug

SEQ ID NO: 196007 - RNA, 19 nt, Artificial Sequence
  Description of Artificial Sequence: Synthetic oligonucleotide
uuauugugcaacagaaacc

SEQ ID NO: 196008 - RNA, 19 nt, Artificial Sequence
  Description of Artificial Sequence: Synthetic oligonucleotide
agucauauuauccauuagu

SEQ ID NO: 196009 - RNA, 19 nt, Artificial Sequence
  Description of Artificial Sequence: Synthetic oligonucleotide
cuucaagauccuaaggugg

SEQ ID NO: 196010 - RNA, 19 nt, Artificial Sequence
  Description of Artificial Sequence: Synthetic oligonucleotide
aauuguguuaaaccguuau

SEQ ID NO: 196011 - RNA, 19 nt, Artificial Sequence
  Description of Artificial Sequence: Synthetic oligonucleotide
uuagggauuaaauggagaa

SEQ ID NO: 196012 - RNA, 19 nt, Artificial Sequence
  Description of Artificial Sequence: Synthetic oligonucleotide
uuuuagggauuaaauggag

SEQ ID NO: 196013 - RNA, 19 nt, Artificial Sequence
  Description of Artificial Sequence: Synthetic oligonucleotide
agacauuuaauguuagugu

SEQ ID NO: 196014 - RNA, 19 nt, Artificial Sequence
  Description of Artificial Sequence: Synthetic oligonucleotide
ucuugugccagugagagcu

SEQ ID NO: 196015 - RNA, 19 nt, Artificial Sequence
  Description of Artificial Sequence: Synthetic oligonucleotide
uuauuagacauuuaauguu

SEQ ID NO: 196016 - RNA, 19 nt, Artificial Sequence
  Description of Artificial Sequence: Synthetic oligonucleotide
gaaagcuccgucauuagag

SEQ ID NO: 196017 - RNA, 19 nt, Artificial Sequence
  Description of Artificial Sequence: Synthetic oligonucleotide
gauuauucugaaccguugc

SEQ ID NO: 196018 - RNA, 19 nt, Artificial Sequence
  Description of Artificial Sequence: Synthetic oligonucleotide
cuugagugaacugaguucc

SEQ ID NO: 196019 - RNA, 19 nt, Artificial Sequence
  Description of Artificial Sequence: Synthetic oligonucleotide
aauauacgaauuccaauuu

SEQ ID NO: 196020 - RNA, 19 nt, Artificial Sequence
  Description of Artificial Sequence: Synthetic oligonucleotide
ucugaguaguguuauguca

SEQ ID NO: 196021 - RNA, 19 nt, Artificial Sequence
  Description of Artificial Sequence: Synthetic oligonucleotide
gacuuaacuuuucaaauuc

SEQ ID NO: 196022 - RNA, 19 nt, Artificial Sequence
  Description of Artificial Sequence: Synthetic oligonucleotide
ugugcaacagaaaccauaa

SEQ ID NO: 196023 - RNA, 19 nt, Artificial Sequence
  Description of Artificial Sequence: Synthetic oligonucleotide
agaaaacuccuccuuccgc

SEQ ID NO: 196024 - RNA, 19 nt, Artificial Sequence
  Description of Artificial Sequence: Synthetic oligonucleotide
uguaucuugagcccuugug

SEQ ID NO: 196025 - RNA, 19 nt, Artificial Sequence
  Description of Artificial Sequence: Synthetic oligonucleotide
auuguguuaaaccguuauc

SEQ ID NO: 196026 - RNA, 19 nt, Artificial Sequence
  Description of Artificial Sequence: Synthetic oligonucleotide
uaaaccguuauccuugcaa

SEQ ID NO: 196027 - RNA, 19 nt, Artificial Sequence
  Description of Artificial Sequence: Synthetic oligonucleotide
ugccguagaggucagacug

SEQ ID NO: 196028 - RNA, 19 nt, Artificial Sequence
  Description of Artificial Sequence: Synthetic oligonucleotide
uuagagaaucagaaacuug

SEQ ID NO: 196029 - RNA, 19 nt, Artificial Sequence
  Description of Artificial Sequence: Synthetic oligonucleotide
cuacacuuaauuuccuccg

SEQ ID NO: 196030 - RNA, 19 nt, Artificial Sequence
  Description of Artificial Sequence: Synthetic oligonucleotide
uaguaugcaaccagagucc

SEQ ID NO: 196031 - RNA, 19 nt, Artificial Sequence
  Description of Artificial Sequence: Synthetic oligonucleotide
ucauauuauccauuagugu

SEQ ID NO: 196032 - RNA, 19 nt, Artificial Sequence
  Description of Artificial Sequence: Synthetic oligonucleotide
cauauuauuugagaggaug

SEQ ID NO: 196033 - RNA, 19 nt, Artificial Sequence
  Description of Artificial Sequence: Synthetic oligonucleotide
ugucagagcaagauuggcc

SEQ ID NO: 196034 - RNA, 19 nt, Artificial Sequence
  Description of Artificial Sequence: Synthetic oligonucleotide
ucagaaaacuccuccuucc

SEQ ID NO: 196035 - RNA, 19 nt, Artificial Sequence
  Description of Artificial Sequence: Synthetic oligonucleotide
uuaguguuugaacuuggac

SEQ ID NO: 196036 - RNA, 19 nt, Artificial Sequence
  Description of Artificial Sequence: Synthetic oligonucleotide
uuaagugaggccuguaggu

SEQ ID NO: 196037 - RNA, 19 nt, Artificial Sequence
  Description of Artificial Sequence: Synthetic oligonucleotide
acacgaacaggcuucuucg

SEQ ID NO: 196038 - RNA, 19 nt, Artificial Sequence
  Description of Artificial Sequence: Synthetic oligonucleotide
uuuaauguugugaccugca

SEQ ID NO: 196039 - RNA, 19 nt, Artificial Sequence
  Description of Artificial Sequence: Synthetic oligonucleotide
aguaguguuaugucaucuc

SEQ ID NO: 196040 - RNA, 19 nt, Artificial Sequence
  Description of Artificial Sequence: Synthetic oligonucleotide
ugugacaguacucugcaau

SEQ ID NO: 196041 - RNA, 19 nt, Artificial Sequence
  Description of Artificial Sequence: Synthetic oligonucleotide
agccucguuuucuucaugc

SEQ ID NO: 196042 - RNA, 19 nt, Artificial Sequence
  Description of Artificial Sequence: Synthetic oligonucleotide
acacugucggcagugaugc

SEQ ID NO: 196043 - RNA, 19 nt, Artificial Sequence
  Description of Artificial Sequence: Synthetic oligonucleotide
ugaaccguugcuucuaaga

SEQ ID NO: 196044 - RNA, 19 nt, Artificial Sequence
  Description of Artificial Sequence: Synthetic oligonucleotide
ucauugucuaauucugacc

SEQ ID NO: 196045 - RNA, 19 nt, Artificial Sequence
  Description of Artificial Sequence: Synthetic oligonucleotide
uguucaaugcuugugugug

SEQ ID NO: 196046 - RNA, 19 nt, Artificial Sequence
  Description of Artificial Sequence: Synthetic oligonucleotide
gucauauuauccauuagug

SEQ ID NO: 196047 - RNA, 19 nt, Artificial Sequence
  Description of Artificial Sequence: Synthetic oligonucleotide
aaaccguuauccuugcaaa

SEQ ID NO: 196048 - RNA, 19 nt, Artificial Sequence
  Description of Artificial Sequence: Synthetic oligonucleotide
uuucacaguacccaaguuu

SEQ ID NO: 196049 - RNA, 19 nt, Artificial Sequence
  Description of Artificial Sequence: Synthetic oligonucleotide
auauacgaauuccaauuug

SEQ ID NO: 196050 - RNA, 19 nt, Artificial Sequence
  Description of Artificial Sequence: Synthetic oligonucleotide
ucugcaucuugacuuaacu

SEQ ID NO: 196051 - RNA, 19 nt, Artificial Sequence
  Description of Artificial Sequence: Synthetic oligonucleotide
uuguuuaauucuucaguca

SEQ ID NO: 196052 - RNA, 19 nt, Artificial Sequence
  Description of Artificial Sequence: Synthetic oligonucleotide
ucuaauauagcagcuuuuc

SEQ ID NO: 196053 - RNA, 19 nt, Artificial Sequence
  Description of Artificial Sequence: Synthetic oligonucleotide
ucuugcuucaagauccuaa

SEQ ID NO: 196054 - RNA, 19 nt, Artificial Sequence
  Description of Artificial Sequence: Synthetic oligonucleotide
uucuauaccaggucucuga

SEQ ID NO: 196055 - RNA, 19 nt, Artificial Sequence
  Description of Artificial Sequence: Synthetic oligonucleotide
auuuacauuucauugucua

SEQ ID NO: 196056 - RNA, 19 nt, Artificial Sequence
  Description of Artificial Sequence: Synthetic oligonucleotide
ugucuaauucugaccuugg

SEQ ID NO: 196057 - RNA, 19 nt, Artificial Sequence
  Description of Artificial Sequence: Synthetic oligonucleotide
ucucucacguuccaaaguc

SEQ ID NO: 196058 - RNA, 19 nt, Artificial Sequence
  Description of Artificial Sequence: Synthetic oligonucleotide
ugcaaaucguugaaacaug

SEQ ID NO: 196059 - RNA, 19 nt, Artificial Sequence
  Description of Artificial Sequence: Synthetic oligonucleotide
ucugccuugagugaacuga

SEQ ID NO: 196060 - RNA, 19 nt, Artificial Sequence
  Description of Artificial Sequence: Synthetic oligonucleotide
uucguugaguuuaauguau

SEQ ID NO: 196061 - RNA, 19 nt, Artificial Sequence
  Description of Artificial Sequence: Synthetic oligonucleotide
uugcaaaucguugaaacau

SEQ ID NO: 196062 - RNA, 19 nt, Artificial Sequence
  Description of Artificial Sequence: Synthetic oligonucleotide
uuucgucuugauuauucug

SEQ ID NO: 196063 - RNA, 19 nt, Artificial Sequence
  Description of Artificial Sequence: Synthetic oligonucleotide
caugguaagcuuagccucg

SEQ ID NO: 196064 - RNA, 19 nt, Artificial Sequence
  Description of Artificial Sequence: Synthetic oligonucleotide
gaaaacuccuccuuccgca

SEQ ID NO: 196065 - RNA, 19 nt, Artificial Sequence
  Description of Artificial Sequence: Synthetic oligonucleotide
gaaccguugcuucuaagac

SEQ ID NO: 196066 - RNA, 19 nt, Artificial Sequence
  Description of Artificial Sequence: Synthetic oligonucleotide
ucuucgaagaaggaguuaa

SEQ ID NO: 196067 - RNA, 19 nt, Artificial Sequence
  Description of Artificial Sequence: Synthetic oligonucleotide
aauuuggccuaguaugcaa

SEQ ID NO: 196068 - RNA, 19 nt, Artificial Sequence
  Description of Artificial Sequence: Synthetic oligonucleotide
aaccguugcuucuaagaca

SEQ ID NO: 196069 - RNA, 19 nt, Artificial Sequence
  Description of Artificial Sequence: Synthetic oligonucleotide
agcaucaugaacugccuca

SEQ ID NO: 196070 - RNA, 19 nt, Artificial Sequence
  Description of Artificial Sequence: Synthetic oligonucleotide
uccugaauuacaguugucu

SEQ ID NO: 196071 - RNA, 19 nt, Artificial Sequence
  Description of Artificial Sequence: Synthetic oligonucleotide
cauccaaagauuauuuaca

SEQ ID NO: 196072 - RNA, 19 nt, Artificial Sequence
  Description of Artificial Sequence: Synthetic oligonucleotide
auuauucugaaccguugcu

SEQ ID NO: 196073 - RNA, 19 nt, Artificial Sequence
  Description of Artificial Sequence: Synthetic oligonucleotide
uccaccaacagaacaaaua

SEQ ID NO: 196074 - RNA, 19 nt, Artificial Sequence
  Description of Artificial Sequence: Synthetic oligonucleotide
ugaugcuuuaguucuuuac

SEQ ID NO: 196075 - RNA, 19 nt, Artificial Sequence
  Description of Artificial Sequence: Synthetic oligonucleotide
ugucauaggugcuuuguaa

SEQ ID NO: 196076 - RNA, 19 nt, Artificial Sequence
  Description of Artificial Sequence: Synthetic oligonucleotide
agcugauuuauguugcccu

SEQ ID NO: 196077 - RNA, 19 nt, Artificial Sequence
  Description of Artificial Sequence: Synthetic oligonucleotide
gagucuugcuccaaaguag

SEQ ID NO: 196078 - RNA, 19 nt, Artificial Sequence
  Description of Artificial Sequence: Synthetic oligonucleotide
cuagaagugcucuucuuuc

SEQ ID NO: 196079 - RNA, 19 nt, Artificial Sequence
  Description of Artificial Sequence: Synthetic oligonucleotide
ugucugaguaguguuaugu

SEQ ID NO: 196080 - RNA, 19 nt, Artificial Sequence
  Description of Artificial Sequence: Synthetic oligonucleotide
ugauuuauguugcccugga

SEQ ID NO: 196081 - RNA, 19 nt, Artificial Sequence
  Description of Artificial Sequence: Synthetic oligonucleotide
uuucgcuugcucuuguaac

SEQ ID NO: 196082 - RNA, 19 nt, Artificial Sequence
  Description of Artificial Sequence: Synthetic oligonucleotide
uugucuaauucugaccuug

SEQ ID NO: 196083 - RNA, 19 nt, Artificial Sequence
  Description of Artificial Sequence: Synthetic oligonucleotide
aauucugaccuuggcauga

SEQ ID NO: 196084 - RNA, 19 nt, Artificial Sequence
  Description of Artificial Sequence: Synthetic oligonucleotide
ugaaagcuccgucauuaga

SEQ ID NO: 196085 - RNA, 19 nt, Artificial Sequence
  Description of Artificial Sequence: Synthetic oligonucleotide
gaugccgucucacugugac

SEQ ID NO: 196086 - RNA, 19 nt, Artificial Sequence
  Description of Artificial Sequence: Synthetic oligonucleotide
aaggaauuguauucaucau

SEQ ID NO: 196087 - RNA, 19 nt, Artificial Sequence
  Description of Artificial Sequence: Synthetic oligonucleotide
auauuuccacacugucggc

SEQ ID NO: 196088 - RNA, 19 nt, Artificial Sequence
  Description of Artificial Sequence: Synthetic oligonucleotide
gucaucucgugucagagca

SEQ ID NO: 196089 - RNA, 19 nt, Artificial Sequence
  Description of Artificial Sequence: Synthetic oligonucleotide
uuuggccuaguaugcaacc

SEQ ID NO: 196090 - RNA, 19 nt, Artificial Sequence
  Description of Artificial Sequence: Synthetic oligonucleotide
uggccuaguaugcaaccag

SEQ ID NO: 196091 - RNA, 19 nt, Artificial Sequence
  Description of Artificial Sequence: Synthetic oligonucleotide
ugaccagcgucauugccag

SEQ ID NO: 196092 - RNA, 19 nt, Artificial Sequence
  Description of Artificial Sequence: Synthetic oligonucleotide
uuuucgcuugcucuuguaa

SEQ ID NO: 196093 - RNA, 19 nt, Artificial Sequence
  Description of Artificial Sequence: Synthetic oligonucleotide
uucgcuugcucuuguaaca

SEQ ID NO: 196094 - RNA, 19 nt, Artificial Sequence
  Description of Artificial Sequence: Synthetic oligonucleotide
ugacuuaacuuuucaaauu

SEQ ID NO: 196095 - RNA, 19 nt, Artificial Sequence
  Description of Artificial Sequence: Synthetic oligonucleotide
uaugcaaccagaguccaaa

SEQ ID NO: 196096 - RNA, 19 nt, Artificial Sequence
  Description of Artificial Sequence: Synthetic oligonucleotide
accauaacaaaugguaaca

SEQ ID NO: 196097 - RNA, 19 nt, Artificial Sequence
  Description of Artificial Sequence: Synthetic oligonucleotide
auauuauuugagaggauga

SEQ ID NO: 196098 - RNA, 19 nt, Artificial Sequence
  Description of Artificial Sequence: Synthetic oligonucleotide
cuugcucuuguaacaggcg

SEQ ID NO: 196099 - RNA, 19 nt, Artificial Sequence
  Description of Artificial Sequence: Synthetic oligonucleotide
uguacagccgcaguugugu

SEQ ID NO: 196100 - RNA, 19 nt, Artificial Sequence
  Description of Artificial Sequence: Synthetic oligonucleotide
ugaauuacaguugucuguu

SEQ ID NO: 196101 - RNA, 19 nt, Artificial Sequence
  Description of Artificial Sequence: Synthetic oligonucleotide
guaucuugagcccuuguga

SEQ ID NO: 196102 - RNA, 19 nt, Artificial Sequence
  Description of Artificial Sequence: Synthetic oligonucleotide
auccaaagauuauuuacau

SEQ ID NO: 196103 - RNA, 19 nt, Artificial Sequence
  Description of Artificial Sequence: Synthetic oligonucleotide
uauuauuugagaggaugaa

SEQ ID NO: 196104 - RNA, 19 nt, Artificial Sequence
  Description of Artificial Sequence: Synthetic oligonucleotide
uuccaauuuggccuaguau

SEQ ID NO: 196105 - RNA, 19 nt, Artificial Sequence
  Description of Artificial Sequence: Synthetic oligonucleotide
gucauaggugcuuuguaac

SEQ ID NO: 196106 - RNA, 19 nt, Artificial Sequence
  Description of Artificial Sequence: Synthetic oligonucleotide
uuagcugauuuauguugcc

SEQ ID NO: 196107 - RNA, 19 nt, Artificial Sequence
  Description of Artificial Sequence: Synthetic oligonucleotide
gauuuauguugcccuggag

SEQ ID NO: 196108 - RNA, 19 nt, Artificial Sequence
  Description of Artificial Sequence: Synthetic oligonucleotide
accguuauccuugcaaauc

SEQ ID NO: 196109 - RNA, 19 nt, Artificial Sequence
  Description of Artificial Sequence: Synthetic oligonucleotide
uuugccguagaggucagac

SEQ ID NO: 196110 - RNA, 19 nt, Artificial Sequence
  Description of Artificial Sequence: Synthetic oligonucleotide
uugacuagacugccacucc

SEQ ID NO: 196111 - RNA, 19 nt, Artificial Sequence
  Description of Artificial Sequence: Synthetic oligonucleotide
cuucagucaaaugugucac

SEQ ID NO: 196112 - RNA, 19 nt, Artificial Sequence
  Description of Artificial Sequence: Synthetic oligonucleotide
uguguuuuaucugcaggga

SEQ ID NO: 196113 - RNA, 19 nt, Artificial Sequence
  Description of Artificial Sequence: Synthetic oligonucleotide
aagcuccgucauuagagcu

SEQ ID NO: 196114 - RNA, 19 nt, Artificial Sequence
  Description of Artificial Sequence: Synthetic oligonucleotide
uguuagugugacaguacuc

SEQ ID NO: 196115 - RNA, 19 nt, Artificial Sequence
  Description of Artificial Sequence: Synthetic oligonucleotide
aaaugguaacaaccaccca

SEQ ID NO: 196116 - RNA, 19 nt, Artificial Sequence
  Description of Artificial Sequence: Synthetic oligonucleotide
cagaaaacuccuccuuccg

SEQ ID NO: 196117 - RNA, 19 nt, Artificial Sequence
  Description of Artificial Sequence: Synthetic oligonucleotide
guugagaagucucuuucuc

SEQ ID NO: 196118 - RNA, 19 nt, Artificial Sequence
  Description of Artificial Sequence: Synthetic oligonucleotide
uccacuuugccuugaaguu

SEQ ID NO: 196119 - RNA, 19 nt, Artificial Sequence
  Description of Artificial Sequence: Synthetic oligonucleotide
auuuggccuaguaugcaac

SEQ ID NO: 196120 - RNA, 19 nt, Artificial Sequence
  Description of Artificial Sequence: Synthetic oligonucleotide
uuuguaacguugacaguuu

SEQ ID NO: 196121 - RNA, 19 nt, Artificial Sequence
  Description of Artificial Sequence: Synthetic oligonucleotide
cauuuaauguugugaccug

SEQ ID NO: 196122 - RNA, 19 nt, Artificial Sequence
  Description of Artificial Sequence: Synthetic oligonucleotide
ucggagacucuuuuccuca

SEQ ID NO: 196123 - RNA, 19 nt, Artificial Sequence
  Description of Artificial Sequence: Synthetic oligonucleotide
uugaaagcuccgucauuag

SEQ ID NO: 196124 - RNA, 19 nt, Artificial Sequence
  Description of Artificial Sequence: Synthetic oligonucleotide
cuaacucuccguugacuag

SEQ ID NO: 196125 - RNA, 19 nt, Artificial Sequence
  Description of Artificial Sequence: Synthetic oligonucleotide
cuugcaaaucguugaaaca

SEQ ID NO: 196126 - RNA, 19 nt, Artificial Sequence
  Description of Artificial Sequence: Synthetic oligonucleotide
agaguguuacacuccugug

SEQ ID NO: 196127 - RNA, 19 nt, Artificial Sequence
  Description of Artificial Sequence: Synthetic oligonucleotide
guuaaaccguuauccuugc

SEQ ID NO: 196128 - RNA, 19 nt, Artificial Sequence
  Description of Artificial Sequence: Synthetic oligonucleotide
uucaugcuucuucauuccu

SEQ ID NO: 196129 - RNA, 19 nt, Artificial Sequence
  Description of Artificial Sequence: Synthetic oligonucleotide
ucacuguuauugugcaaca

SEQ ID NO: 196130 - RNA, 19 nt, Artificial Sequence
  Description of Artificial Sequence: Synthetic oligonucleotide
guuuucaggucuguggcug

SEQ ID NO: 196131 - RNA, 19 nt, Artificial Sequence
  Description of Artificial Sequence: Synthetic oligonucleotide
ugacaguacucugcaauug

SEQ ID NO: 196132 - RNA, 19 nt, Artificial Sequence
  Description of Artificial Sequence: Synthetic oligonucleotide
gaguuuuacuugacacugg

SEQ ID NO: 196133 - RNA, 19 nt, Artificial Sequence
  Description of Artificial Sequence: Synthetic oligonucleotide
aaccguuauccuugcaaau

SEQ ID NO: 196134 - RNA, 19 nt, Artificial Sequence
  Description of Artificial Sequence: Synthetic oligonucleotide
uguugugaccugcauggua

SEQ ID NO: 196135 - RNA, 19 nt, Artificial Sequence
  Description of Artificial Sequence: Synthetic oligonucleotide
cugauuuauguugcccugg

SEQ ID NO: 196136 - RNA, 19 nt, Artificial Sequence
  Description of Artificial Sequence: Synthetic oligonucleotide
caagcucacuaacucuccg

SEQ ID NO: 196137 - RNA, 19 nt, Artificial Sequence
  Description of Artificial Sequence: Synthetic oligonucleotide
ccuaagguggcuuuccagc

SEQ ID NO: 196138 - RNA, 19 nt, Artificial Sequence
  Description of Artificial Sequence: Synthetic oligonucleotide
uuauucugaaccguugcuu

SEQ ID NO: 196139 - RNA, 19 nt, Artificial Sequence
  Description of Artificial Sequence: Synthetic oligonucleotide
uaacucuccguugacuaga

SEQ ID NO: 196140 - RNA, 19 nt, Artificial Sequence
  Description of Artificial Sequence: Synthetic oligonucleotide
guugacuagacugccacuc

SEQ ID NO: 196141 - RNA, 19 nt, Artificial Sequence
  Description of Artificial Sequence: Synthetic oligonucleotide
cuucuaagacagcaauuuc

SEQ ID NO: 196142 - RNA, 19 nt, Artificial Sequence
  Description of Artificial Sequence: Synthetic oligonucleotide
guuacacuccugugcaaug

SEQ ID NO: 196143 - RNA, 19 nt, Artificial Sequence
  Description of Artificial Sequence: Synthetic oligonucleotide
agccgcaguuguguuaucc

SEQ ID NO: 196144 - RNA, 19 nt, Artificial Sequence
  Description of Artificial Sequence: Synthetic oligonucleotide
acguuccaaagucauauua

SEQ ID NO: 196145 - RNA, 19 nt, Artificial Sequence
  Description of Artificial Sequence: Synthetic oligonucleotide
agauccugaauuacaguug

SEQ ID NO: 196146 - RNA, 19 nt, Artificial Sequence
  Description of Artificial Sequence: Synthetic oligonucleotide
ccaauuuggccuaguaugc

SEQ ID NO: 196147 - RNA, 19 nt, Artificial Sequence
  Description of Artificial Sequence: Synthetic oligonucleotide
guuaugucaucucguguca

SEQ ID NO: 196148 - RNA, 19 nt, Artificial Sequence
  Description of Artificial Sequence: Synthetic oligonucleotide
aguucuaauuucugcugaa

SEQ ID NO: 196149 - RNA, 19 nt, Artificial Sequence
  Description of Artificial Sequence: Synthetic oligonucleotide
augucaucucgugucagag

SEQ ID NO: 196150 - RNA, 19 nt, Artificial Sequence
  Description of Artificial Sequence: Synthetic oligonucleotide
aacucuccguugacuagac

SEQ ID NO: 196151 - RNA, 19 nt, Artificial Sequence
  Description of Artificial Sequence: Synthetic oligonucleotide
ucagucaaaugugucacuu

SEQ ID NO: 196152 - RNA, 19 nt, Artificial Sequence
  Description of Artificial Sequence: Synthetic oligonucleotide
aucuucuauaccaggucuc

SEQ ID NO: 196153 - RNA, 19 nt, Artificial Sequence
  Description of Artificial Sequence: Synthetic oligonucleotide
uuugcaacucuagaacuuu

SEQ ID NO: 196154 - RNA, 19 nt, Artificial Sequence
  Description of Artificial Sequence: Synthetic oligonucleotide
uguuacacuccugugcaau

SEQ ID NO: 196155 - RNA, 19 nt, Artificial Sequence
  Description of Artificial Sequence: Synthetic oligonucleotide
ucgucuugauuauucugaa

SEQ ID NO: 196156 - RNA, 19 nt, Artificial Sequence
  Description of Artificial Sequence: Synthetic oligonucleotide
ugcucuuugagcguacuuu

SEQ ID NO: 196157 - RNA, 19 nt, Artificial Sequence
  Description of Artificial Sequence: Synthetic oligonucleotide
guaacaggcgcugacuuuc

SEQ ID NO: 196158 - RNA, 19 nt, Artificial Sequence
  Description of Artificial Sequence: Synthetic oligonucleotide
uucgcuuccuucucagaaa

SEQ ID NO: 196159 - RNA, 19 nt, Artificial Sequence
  Description of Artificial Sequence: Synthetic oligonucleotide
uugccagcaucaugaacug

SEQ ID NO: 196160 - RNA, 19 nt, Artificial Sequence
  Description of Artificial Sequence: Synthetic oligonucleotide
guuguguuauccagcuucc

SEQ ID NO: 196161 - RNA, 19 nt, Artificial Sequence
  Description of Artificial Sequence: Synthetic oligonucleotide
gccaagagcuuucauacac

SEQ ID NO: 196162 - RNA, 19 nt, Artificial Sequence
  Description of Artificial Sequence: Synthetic oligonucleotide
ugaguaguguuaugucauc

SEQ ID NO: 196163 - RNA, 19 nt, Artificial Sequence
  Description of Artificial Sequence: Synthetic oligonucleotide
ucucgugucagagcaagau

SEQ ID NO: 196164 - RNA, 19 nt, Artificial Sequence
  Description of Artificial Sequence: Synthetic oligonucleotide
ugccuggcauuugucauag

SEQ ID NO: 196165 - RNA, 19 nt, Artificial Sequence
  Description of Artificial Sequence: Synthetic oligonucleotide
uucagucaaaugugucacu

SEQ ID NO: 196166 - RNA, 19 nt, Artificial Sequence
  Description of Artificial Sequence: Synthetic oligonucleotide
uuaaaccguuauccuugca

SEQ ID NO: 196167 - RNA, 19 nt, Artificial Sequence
  Description of Artificial Sequence: Synthetic oligonucleotide
caucucgugucagagcaag

SEQ ID NO: 196168 - RNA, 19 nt, Artificial Sequence
  Description of Artificial Sequence: Synthetic oligonucleotide
ggacuugaguucuucguug

SEQ ID NO: 196169 - RNA, 19 nt, Artificial Sequence
  Description of Artificial Sequence: Synthetic oligonucleotide
ccguuauccuugcaaaucg

SEQ ID NO: 196170 - RNA, 19 nt, Artificial Sequence
  Description of Artificial Sequence: Synthetic oligonucleotide
uagggauuaaauggagaaa

SEQ ID NO: 196171 - RNA, 19 nt, Artificial Sequence
  Description of Artificial Sequence: Synthetic oligonucleotide
caucggcagagccaagagc

SEQ ID NO: 196172 - RNA, 19 nt, Artificial Sequence
  Description of Artificial Sequence: Synthetic oligonucleotide
aaacugaacccaagucuca

SEQ ID NO: 196173 - RNA, 19 nt, Artificial Sequence
  Description of Artificial Sequence: Synthetic oligonucleotide
ucgcuugcucuuguaacag

SEQ ID NO: 196174 - RNA, 19 nt, Artificial Sequence
  Description of Artificial Sequence: Synthetic oligonucleotide
acaguacccaaguuuucau

SEQ ID NO: 196175 - RNA, 19 nt, Artificial Sequence
  Description of Artificial Sequence: Synthetic oligonucleotide
caaaucguugaaacaugca

SEQ ID NO: 196176 - RNA, 19 nt, Artificial Sequence
  Description of Artificial Sequence: Synthetic oligonucleotide
auuccaauuuggccuagua

SEQ ID NO: 196177 - RNA, 19 nt, Artificial Sequence
  Description of Artificial Sequence: Synthetic oligonucleotide
uuagccucguuuucuucau

SEQ ID NO: 196178 - RNA, 19 nt, Artificial Sequence
  Description of Artificial Sequence: Synthetic oligonucleotide
uaacaggcgcugacuuucc

SEQ ID NO: 196179 - RNA, 19 nt, Artificial Sequence
  Description of Artificial Sequence: Synthetic oligonucleotide
ugugccagugagagcuucu

SEQ ID NO: 196180 - RNA, 19 nt, Artificial Sequence
  Description of Artificial Sequence: Synthetic oligonucleotide
ucacuaacucuccguugac

SEQ ID NO: 196181 - RNA, 19 nt, Artificial Sequence
  Description of Artificial Sequence: Synthetic oligonucleotide
cugaauuacaguugucugu

SEQ ID NO: 196182 - RNA, 19 nt, Artificial Sequence
  Description of Artificial Sequence: Synthetic oligonucleotide
gcaugguaagcuuagccuc

SEQ ID NO: 196183 - RNA, 19 nt, Artificial Sequence
  Description of Artificial Sequence: Synthetic oligonucleotide
cuucguugaguuuaaugua

SEQ ID NO: 196184 - RNA, 19 nt, Artificial Sequence
  Description of Artificial Sequence: Synthetic oligonucleotide
ucugaaccguugcuucuaa

SEQ ID NO: 196185 - RNA, 19 nt, Artificial Sequence
  Description of Artificial Sequence: Synthetic oligonucleotide
ucguugaguuuaauguauu

SEQ ID NO: 196186 - RNA, 19 nt, Artificial Sequence
  Description of Artificial Sequence: Synthetic oligonucleotide
cuagaacuuuggucugaag

SEQ ID NO: 196187 - RNA, 19 nt, Artificial Sequence
  Description of Artificial Sequence: Synthetic oligonucleotide
agauccuaagguggcuuuc

SEQ ID NO: 196188 - RNA, 19 nt, Artificial Sequence
  Description of Artificial Sequence: Synthetic oligonucleotide
agcucacuaacucuccguu

SEQ ID NO: 196189 - RNA, 19 nt, Artificial Sequence
  Description of Artificial Sequence: Synthetic oligonucleotide
uugucugaguaguguuaug

SEQ ID NO: 196190 - RNA, 19 nt, Artificial Sequence
  Description of Artificial Sequence: Synthetic oligonucleotide
aguaugcaaccagagucca

SEQ ID NO: 196191 - RNA, 19 nt, Artificial Sequence
  Description of Artificial Sequence: Synthetic oligonucleotide
guggcuacaaguucagacu

SEQ ID NO: 196192 - RNA, 19 nt, Artificial Sequence
  Description of Artificial Sequence: Synthetic oligonucleotide
aauuccaauuuggccuagu

SEQ ID NO: 196193 - RNA, 19 nt, Artificial Sequence
  Description of Artificial Sequence: Synthetic oligonucleotide
cuucgcuuccuucucagaa

SEQ ID NO: 196194 - RNA, 19 nt, Artificial Sequence
  Description of Artificial Sequence: Synthetic oligonucleotide
uuguaacguugacaguuuu

SEQ ID NO: 196195 - RNA, 19 nt, Artificial Sequence
  Description of Artificial Sequence: Synthetic oligonucleotide
ugaacccaagucucacaaa

SEQ ID NO: 196196 - RNA, 19 nt, Artificial Sequence
  Description of Artificial Sequence: Synthetic oligonucleotide
gggauuaaauggagaaaag

SEQ ID NO: 196197 - RNA, 19 nt, Artificial Sequence
  Description of Artificial Sequence: Synthetic oligonucleotide
cugaacccaagucucacaa

SEQ ID NO: 196198 - RNA, 19 nt, Artificial Sequence
  Description of Artificial Sequence: Synthetic oligonucleotide
aacaggcgcugacuuuccu

SEQ ID NO: 196199 - RNA, 19 nt, Artificial Sequence
  Description of Artificial Sequence: Synthetic oligonucleotide
uugccguagaggucagacu

SEQ ID NO: 196200 - RNA, 19 nt, Artificial Sequence
  Description of Artificial Sequence: Synthetic oligonucleotide
cucauaguguuugaaaagu

SEQ ID NO: 196201 - RNA, 19 nt, Artificial Sequence
  Description of Artificial Sequence: Synthetic oligonucleotide
caucuucuauaccaggucu

SEQ ID NO: 196202 - RNA, 19 nt, Artificial Sequence
  Description of Artificial Sequence: Synthetic oligonucleotide
ggauuaaauggagaaaagu

SEQ ID NO: 196203 - RNA, 19 nt, Artificial Sequence
  Description of Artificial Sequence: Synthetic oligonucleotide
auuucaccccguaagucau

SEQ ID NO: 196204 - RNA, 19 nt, Artificial Sequence
  Description of Artificial Sequence: Synthetic oligonucleotide
cugaguaguguuaugucau

SEQ ID NO: 196205 - RNA, 19 nt, Artificial Sequence
  Description of Artificial Sequence: Synthetic oligonucleotide
ggugcuuuguaacguugac

SEQ ID NO: 196206 - RNA, 19 nt, Artificial Sequence
  Description of Artificial Sequence: Synthetic oligonucleotide
cagaguccaaaucaaauuu

SEQ ID NO: 196207 - RNA, 19 nt, Artificial Sequence
  Description of Artificial Sequence: Synthetic oligonucleotide
cuuugagcguacuuucugu

SEQ ID NO: 196208 - RNA, 19 nt, Artificial Sequence
  Description of Artificial Sequence: Synthetic oligonucleotide
agagcaagauuggccucuc

SEQ ID NO: 196209 - RNA, 19 nt, Artificial Sequence
  Description of Artificial Sequence: Synthetic oligonucleotide
augguaacaaccacccaua

SEQ ID NO: 196210 - RNA, 19 nt, Artificial Sequence
  Description of Artificial Sequence: Synthetic oligonucleotide
ucaucucgugucagagcaa

SEQ ID NO: 196211 - RNA, 19 nt, Artificial Sequence
  Description of Artificial Sequence: Synthetic oligonucleotide
uucugcucuuugagcguac

SEQ ID NO: 196212 - RNA, 19 nt, Artificial Sequence
  Description of Artificial Sequence: Synthetic oligonucleotide
gugcuuuguaacguugaca

SEQ ID NO: 196213 - RNA, 19 nt, Artificial Sequence
  Description of Artificial Sequence: Synthetic oligonucleotide
uucugaccuuggcaugaaa

SEQ ID NO: 196214 - RNA, 19 nt, Artificial Sequence
  Description of Artificial Sequence: Synthetic oligonucleotide
cucucacguuccaaaguca

SEQ ID NO: 196215 - RNA, 19 nt, Artificial Sequence
  Description of Artificial Sequence: Synthetic oligonucleotide
gaguaguguuaugucaucu

SEQ ID NO: 196216 - RNA, 19 nt, Artificial Sequence
  Description of Artificial Sequence: Synthetic oligonucleotide
cuugauuauucugaaccgu

SEQ ID NO: 196217 - RNA, 19 nt, Artificial Sequence
  Description of Artificial Sequence: Synthetic oligonucleotide
uacagccgcaguuguguua

SEQ ID NO: 196218 - RNA, 19 nt, Artificial Sequence
  Description of Artificial Sequence: Synthetic oligonucleotide
aaccacccauacauuuugu

SEQ ID NO: 196219 - RNA, 19 nt, Artificial Sequence
  Description of Artificial Sequence: Synthetic oligonucleotide
gcuucuucgaagaaggagu

SEQ ID NO: 196220 - RNA, 19 nt, Artificial Sequence
  Description of Artificial Sequence: Synthetic oligonucleotide
cuuucugcgccucuacugu

SEQ ID NO: 196221 - RNA, 19 nt, Artificial Sequence
  Description of Artificial Sequence: Synthetic oligonucleotide
gagcaagauuggccucucc

SEQ ID NO: 196222 - RNA, 19 nt, Artificial Sequence
  Description of Artificial Sequence: Synthetic oligonucleotide
ucugcucuuugagcguacu

SEQ ID NO: 196223 - RNA, 19 nt, Artificial Sequence
  Description of Artificial Sequence: Synthetic oligonucleotide
uuguguuauccagcuuccu

SEQ ID NO: 196224 - RNA, 19 nt, Artificial Sequence
  Description of Artificial Sequence: Synthetic oligonucleotide
cgugucagagcaagauugg

SEQ ID NO: 196225 - RNA, 19 nt, Artificial Sequence
  Description of Artificial Sequence: Synthetic oligonucleotide
caauuuggccuaguaugca

SEQ ID NO: 196226 - RNA, 19 nt, Artificial Sequence
  Description of Artificial Sequence: Synthetic oligonucleotide
ccguugacuagacugccac

SEQ ID NO: 196227 - RNA, 19 nt, Artificial Sequence
  Description of Artificial Sequence: Synthetic oligonucleotide
gccuaguaugcaaccagag

SEQ ID NO: 196228 - RNA, 19 nt, Artificial Sequence
  Description of Artificial Sequence: Synthetic oligonucleotide
cuuugcaacucuagaacuu

SEQ ID NO: 196229 - RNA, 19 nt, Artificial Sequence
  Description of Artificial Sequence: Synthetic oligonucleotide
guguuugaacuuggaccag

SEQ ID NO: 196230 - RNA, 19 nt, Artificial Sequence
  Description of Artificial Sequence: Synthetic oligonucleotide
cguugaaacaugcaucaca

SEQ ID NO: 196231 - RNA, 19 nt, Artificial Sequence
  Description of Artificial Sequence: Synthetic oligonucleotide
uccuugagguuugcuacuu

SEQ ID NO: 196232 - RNA, 19 nt, Artificial Sequence
  Description of Artificial Sequence: Synthetic oligonucleotide
acauauuauuugagaggau

SEQ ID NO: 196233 - RNA, 19 nt, Artificial Sequence
  Description of Artificial Sequence: Synthetic oligonucleotide
ccgcaguuguguuauccag

SEQ ID NO: 196234 - RNA, 19 nt, Artificial Sequence
  Description of Artificial Sequence: Synthetic oligonucleotide
cuugccuggcauuugucau

SEQ ID NO: 196235 - RNA, 19 nt, Artificial Sequence
  Description of Artificial Sequence: Synthetic oligonucleotide
ucaccccguaagucaucug

SEQ ID NO: 196236 - RNA, 19 nt, Artificial Sequence
  Description of Artificial Sequence: Synthetic oligonucleotide
aguucuucguugaguuuaa

SEQ ID NO: 196237 - RNA, 19 nt, Artificial Sequence
  Description of Artificial Sequence: Synthetic oligonucleotide
caccccguaagucaucugu

SEQ ID NO: 196238 - RNA, 19 nt, Artificial Sequence
  Description of Artificial Sequence: Synthetic oligonucleotide
augguaagcuuagccucgu

SEQ ID NO: 196239 - RNA, 19 nt, Artificial Sequence
  Description of Artificial Sequence: Synthetic oligonucleotide
cacgaacaggcuucuucga

SEQ ID NO: 196240 - RNA, 19 nt, Artificial Sequence
  Description of Artificial Sequence: Synthetic oligonucleotide
cuugagcccuugugacuuc

SEQ ID NO: 196241 - RNA, 19 nt, Artificial Sequence
  Description of Artificial Sequence: Synthetic oligonucleotide
cuuguaacaggcgcugacu

SEQ ID NO: 196242 - RNA, 19 nt, Artificial Sequence
  Description of Artificial Sequence: Synthetic oligonucleotide
acucuccguugacuagacu

SEQ ID NO: 196243 - RNA, 19 nt, Artificial Sequence
  Description of Artificial Sequence: Synthetic oligonucleotide
caauuguguuaaaccguua

SEQ ID NO: 196244 - RNA, 19 nt, Artificial Sequence
  Description of Artificial Sequence: Synthetic oligonucleotide
cagcgcuuuuacucugcuc

SEQ ID NO: 196245 - RNA, 19 nt, Artificial Sequence
  Description of Artificial Sequence: Synthetic oligonucleotide
agcuccgucauuagagcuu

SEQ ID NO: 196246 - RNA, 19 nt, Artificial Sequence
  Description of Artificial Sequence: Synthetic oligonucleotide
ccucaucauauuuugauuu

SEQ ID NO: 196247 - RNA, 19 nt, Artificial Sequence
  Description of Artificial Sequence: Synthetic oligonucleotide
ugguaagcuuagccucguu

SEQ ID NO: 196248 - RNA, 19 nt, Artificial Sequence
  Description of Artificial Sequence: Synthetic oligonucleotide
ucguugucuucugcccacu

SEQ ID NO: 196249 - RNA, 19 nt, Artificial Sequence
  Description of Artificial Sequence: Synthetic oligonucleotide
cagcgucauugccagcauc

SEQ ID NO: 196250 - RNA, 19 nt, Artificial Sequence
  Description of Artificial Sequence: Synthetic oligonucleotide
cucucucacguuccaaagu

SEQ ID NO: 196251 - RNA, 19 nt, Artificial Sequence
  Description of Artificial Sequence: Synthetic oligonucleotide
auguugugaccugcauggu

SEQ ID NO: 196252 - RNA, 19 nt, Artificial Sequence
  Description of Artificial Sequence: Synthetic oligonucleotide
gaccugcaugguaagcuua

SEQ ID NO: 196253 - RNA, 19 nt, Artificial Sequence
  Description of Artificial Sequence: Synthetic oligonucleotide
cucagcgcagaagauauuu

SEQ ID NO: 196254 - RNA, 19 nt, Artificial Sequence
  Description of Artificial Sequence: Synthetic oligonucleotide
uccuuaagugaggccugua

SEQ ID NO: 196255 - RNA, 19 nt, Artificial Sequence
  Description of Artificial Sequence: Synthetic oligonucleotide
gcguacuuucugucuguac

SEQ ID NO: 196256 - RNA, 19 nt, Artificial Sequence
  Description of Artificial Sequence: Synthetic oligonucleotide
cacugucggcagugaugcc

SEQ ID NO: 196257 - RNA, 19 nt, Artificial Sequence
  Description of Artificial Sequence: Synthetic oligonucleotide
gaccagcgucauugccagc

SEQ ID NO: 196258 - RNA, 19 nt, Artificial Sequence
  Description of Artificial Sequence: Synthetic oligonucleotide
guaagucaucuguuugcuu

SEQ ID NO: 196259 - RNA, 19 nt, Artificial Sequence
  Description of Artificial Sequence: Synthetic oligonucleotide
ggccuaguaugcaaccaga

SEQ ID NO: 196260 - RNA, 19 nt, Artificial Sequence
  Description of Artificial Sequence: Synthetic oligonucleotide
aucucgugucagagcaaga

SEQ ID NO: 196261 - RNA, 19 nt, Artificial Sequence
  Description of Artificial Sequence: Synthetic oligonucleotide
gcaauuguguuaaaccguu

SEQ ID NO: 196262 - RNA, 19 nt, Artificial Sequence
  Description of Artificial Sequence: Synthetic oligonucleotide
agcguacuuucugucugua

SEQ ID NO: 196263 - RNA, 19 nt, Artificial Sequence
  Description of Artificial Sequence: Synthetic oligonucleotide
accccguaagucaucuguu

SEQ ID NO: 196264 - RNA, 19 nt, Artificial Sequence
  Description of Artificial Sequence: Synthetic oligonucleotide
gcgccucuacuguuuucag

SEQ ID NO: 196265 - RNA, 19 nt, Artificial Sequence
  Description of Artificial Sequence: Synthetic oligonucleotide
gccuugagugaacugaguu

SEQ ID NO: 196266 - RNA, 19 nt, Artificial Sequence
  Description of Artificial Sequence: Synthetic oligonucleotide
ccuaguaugcaaccagagu

SEQ ID NO: 196267 - RNA, 19 nt, Artificial Sequence
  Description of Artificial Sequence: Synthetic oligonucleotide
guaugcaaccagaguccaa

SEQ ID NO: 196268 - RNA, 19 nt, Artificial Sequence
  Description of Artificial Sequence: Synthetic oligonucleotide
cacuaacucuccguugacu

SEQ ID NO: 196269 - RNA, 19 nt, Artificial Sequence
  Description of Artificial Sequence: Synthetic oligonucleotide
gguuuccaauuugauuucu

SEQ ID NO: 196270 - RNA, 19 nt, Artificial Sequence
  Description of Artificial Sequence: Synthetic oligonucleotide
cauuugucauaggugcuuu

SEQ ID NO: 196271 - RNA, 19 nt, Artificial Sequence
  Description of Artificial Sequence: Synthetic oligonucleotide
gccucguuuucuucaugcu

SEQ ID NO: 196272 - RNA, 19 nt, Artificial Sequence
  Description of Artificial Sequence: Synthetic oligonucleotide
gccguagaggucagacuga

SEQ ID NO: 196273 - RNA, 19 nt, Artificial Sequence
  Description of Artificial Sequence: Synthetic oligonucleotide
gccuggcauuugucauagg

SEQ ID NO: 196274 - RNA, 19 nt, Artificial Sequence
  Description of Artificial Sequence: Synthetic oligonucleotide
guacagccgcaguuguguu

SEQ ID NO: 196275 - RNA, 19 nt, Artificial Sequence
  Description of Artificial Sequence: Synthetic oligonucleotide
gccgucucacugugacuga

SEQ ID NO: 196276 - RNA, 19 nt, Artificial Sequence
  Description of Artificial Sequence: Synthetic oligonucleotide
ccguugcuucuaagacagc

SEQ ID NO: 196277 - RNA, 19 nt, Artificial Sequence
  Description of Artificial Sequence: Synthetic oligonucleotide
gcgcuuuuacucugcuccu

SEQ ID NO: 196278 - RNA, 19 nt, Artificial Sequence
  Description of Artificial Sequence: Synthetic oligonucleotide
gcagcgcuuuuacucugcu

SEQ ID NO: 196279 - RNA, 19 nt, Artificial Sequence
  Description of Artificial Sequence: Synthetic oligonucleotide
cguaagucaucuguuugcu

SEQ ID NO: 196280 - RNA, 19 nt, Artificial Sequence
  Description of Artificial Sequence: Synthetic oligonucleotide
guucuucguugaguuuaau

SEQ ID NO: 196281 - RNA, 19 nt, Artificial Sequence
  Description of Artificial Sequence: Synthetic oligonucleotide
cuccgucauuagagcuucu

SEQ ID NO: 196282 - RNA, 19 nt, Artificial Sequence
  Description of Artificial Sequence: Synthetic oligonucleotide
cguugacuagacugccacu

SEQ ID NO: 196283 - RNA, 19 nt, Artificial Sequence
  Description of Artificial Sequence: Synthetic oligonucleotide
uuuaacuaaaauacagucg

SEQ ID NO: 196284 - RNA, 19 nt, Artificial Sequence
  Description of Artificial Sequence: Synthetic oligonucleotide
aaugccauaaccugaacag

SEQ ID NO: 196285 - RNA, 19 nt, Artificial Sequence
  Description of Artificial Sequence: Synthetic oligonucleotide
gaagauaugccauugcugg

SEQ ID NO: 196286 - RNA, 19 nt, Artificial Sequence
  Description of Artificial Sequence: Synthetic oligonucleotide
aauuucuacuaccucguac

SEQ ID NO: 196287 - RNA, 19 nt, Artificial Sequence
  Description of Artificial Sequence: Synthetic oligonucleotide
uaucuaauaaucccugccg

SEQ ID NO: 196288 - RNA, 19 nt, Artificial Sequence
  Description of Artificial Sequence: Synthetic oligonucleotide
aauaaaucggguugcuaac

SEQ ID NO: 196289 - RNA, 19 nt, Artificial Sequence
  Description of Artificial Sequence: Synthetic oligonucleotide
cauuucaccaaccagcucg

SEQ ID NO: 196290 - RNA, 19 nt, Artificial Sequence
  Description of Artificial Sequence: Synthetic oligonucleotide
uaucgaaacaaccugguga

SEQ ID NO: 196291 - RNA, 19 nt, Artificial Sequence
  Description of Artificial Sequence: Synthetic oligonucleotide
aaucucaugacacugcagu

SEQ ID NO: 196292 - RNA, 19 nt, Artificial Sequence
  Description of Artificial Sequence: Synthetic oligonucleotide
uaaucuuauccaaaggcag

SEQ ID NO: 196293 - RNA, 19 nt, Artificial Sequence
  Description of Artificial Sequence: Synthetic oligonucleotide
cuaaauauuacugccaggc

SEQ ID NO: 196294 - RNA, 19 nt, Artificial Sequence
  Description of Artificial Sequence: Synthetic oligonucleotide
uuugccuacacaacgaaca

SEQ ID NO: 196295 - RNA, 19 nt, Artificial Sequence
  Description of Artificial Sequence: Synthetic oligonucleotide
cauaguucugugaagauac

SEQ ID NO: 196296 - RNA, 19 nt, Artificial Sequence
  Description of Artificial Sequence: Synthetic oligonucleotide
agaaagucggccuaucaac

SEQ ID NO: 196297 - RNA, 19 nt, Artificial Sequence
  Description of Artificial Sequence: Synthetic oligonucleotide
aauacagucguccuguaaa

SEQ ID NO: 196298 - RNA, 19 nt, Artificial Sequence
  Description of Artificial Sequence: Synthetic oligonucleotide
ucgggagacaacaugaaag

SEQ ID NO: 196299 - RNA, 19 nt, Artificial Sequence
  Description of Artificial Sequence: Synthetic oligonucleotide
aauagggucaggguugggc

SEQ ID NO: 196300 - RNA, 19 nt, Artificial Sequence
  Description of Artificial Sequence: Synthetic oligonucleotide
ugaauaaccucaucauugg

SEQ ID NO: 196301 - RNA, 19 nt, Artificial Sequence
  Description of Artificial Sequence: Synthetic oligonucleotide
uguaagaucgggaugacua

SEQ ID NO: 196302 - RNA, 19 nt, Artificial Sequence
  Description of Artificial Sequence: Synthetic oligonucleotide
ugugucuaaauauuacugc

SEQ ID NO: 196303 - RNA, 19 nt, Artificial Sequence
  Description of Artificial Sequence: Synthetic oligonucleotide
ucugaauucccacauuccc

SEQ ID NO: 196304 - RNA, 19 nt, Artificial Sequence
  Description of Artificial Sequence: Synthetic oligonucleotide
uaaauauuacugccaggcg

SEQ ID NO: 196305 - RNA, 19 nt, Artificial Sequence
  Description of Artificial Sequence: Synthetic oligonucleotide
ucaauaaggugacagggcu

SEQ ID NO: 196306 - RNA, 19 nt, Artificial Sequence
  Description of Artificial Sequence: Synthetic oligonucleotide
aacacucuuugcuauagca

SEQ ID NO: 196307 - RNA, 19 nt, Artificial Sequence
  Description of Artificial Sequence: Synthetic oligonucleotide
aauugcaguggacuuagca

SEQ ID NO: 196308 - RNA, 19 nt, Artificial Sequence
  Description of Artificial Sequence: Synthetic oligonucleotide
auuucuacuaccucguacu

SEQ ID NO: 196309 - RNA, 19 nt, Artificial Sequence
  Description of Artificial Sequence: Synthetic oligonucleotide
gaauaaaucggguugcuaa

SEQ ID NO: 196310 - RNA, 19 nt, Artificial Sequence
  Description of Artificial Sequence: Synthetic oligonucleotide
uuauucuugagauggcuac

SEQ ID NO: 196311 - RNA, 19 nt, Artificial Sequence
  Description of Artificial Sequence: Synthetic oligonucleotide
uccaaaacucccaaguuaa

SEQ ID NO: 196312 - RNA, 19 nt, Artificial Sequence
  Description of Artificial Sequence: Synthetic oligonucleotide
gaagucuguaaguuguuug

SEQ ID NO: 196313 - RNA, 19 nt, Artificial Sequence
  Description of Artificial Sequence: Synthetic oligonucleotide
uucuacaauaggauuggug

SEQ ID NO: 196314 - RNA, 19 nt, Artificial Sequence
  Description of Artificial Sequence: Synthetic oligonucleotide
ucgcaauucaaaaucuucu

SEQ ID NO: 196315 - RNA, 19 nt, Artificial Sequence
  Description of Artificial Sequence: Synthetic oligonucleotide
aagauaugccauugcuggg

SEQ ID NO: 196316 - RNA, 19 nt, Artificial Sequence
  Description of Artificial Sequence: Synthetic oligonucleotide
ucgguaccaaaguuaaagg

SEQ ID NO: 196317 - RNA, 19 nt, Artificial Sequence
  Description of Artificial Sequence: Synthetic oligonucleotide
gaaguuacuguccaaaacu

SEQ ID NO: 196318 - RNA, 19 nt, Artificial Sequence
  Description of Artificial Sequence: Synthetic oligonucleotide
aacucaugugaauugcagu

SEQ ID NO: 196319 - RNA, 19 nt, Artificial Sequence
  Description of Artificial Sequence: Synthetic oligonucleotide
cugaauaggucaucuacag

SEQ ID NO: 196320 - RNA, 19 nt, Artificial Sequence
  Description of Artificial Sequence: Synthetic oligonucleotide
acuaaaauacagucguccu

SEQ ID NO: 196321 - RNA, 19 nt, Artificial Sequence
  Description of Artificial Sequence: Synthetic oligonucleotide
aguuagucuccacauuuuc

SEQ ID NO: 196322 - RNA, 19 nt, Artificial Sequence
  Description of Artificial Sequence: Synthetic oligonucleotide
aaggaauucucuagccacc

SEQ ID NO: 196323 - RNA, 19 nt, Artificial Sequence
  Description of Artificial Sequence: Synthetic oligonucleotide
uaugaucccggcaaacuga

SEQ ID NO: 196324 - RNA, 19 nt, Artificial Sequence
  Description of Artificial Sequence: Synthetic oligonucleotide
uaaaucuucacgugccaca

SEQ ID NO: 196325 - RNA, 19 nt, Artificial Sequence
  Description of Artificial Sequence: Synthetic oligonucleotide
uccggaucaacacucuuug

SEQ ID NO: 196326 - RNA, 19 nt, Artificial Sequence
  Description of Artificial Sequence: Synthetic oligonucleotide
gucgguaccaaaguuaaag

SEQ ID NO: 196327 - RNA, 19 nt, Artificial Sequence
  Description of Artificial Sequence: Synthetic oligonucleotide
cuacgcugaauaaaucggg

SEQ ID NO: 196328 - RNA, 19 nt, Artificial Sequence
  Description of Artificial Sequence: Synthetic oligonucleotide
aacucaauagggucagggu

SEQ ID NO: 196329 - RNA, 19 nt, Artificial Sequence
  Description of Artificial Sequence: Synthetic oligonucleotide
cugauugugggacacaguc

SEQ ID NO: 196330 - RNA, 19 nt, Artificial Sequence
  Description of Artificial Sequence: Synthetic oligonucleotide
acacgguacacauucacca

SEQ ID NO: 196331 - RNA, 19 nt, Artificial Sequence
  Description of Artificial Sequence: Synthetic oligonucleotide
cuuuuagcaaacccacugc

SEQ ID NO: 196332 - RNA, 19 nt, Artificial Sequence
  Description of Artificial Sequence: Synthetic oligonucleotide
ucggugcuuauuuagaguc

SEQ ID NO: 196333 - RNA, 19 nt, Artificial Sequence
  Description of Artificial Sequence: Synthetic oligonucleotide
auggcuacaccacaggaca

SEQ ID NO: 196334 - RNA, 19 nt, Artificial Sequence
  Description of Artificial Sequence: Synthetic oligonucleotide
cugaauucccacauucccc

SEQ ID NO: 196335 - RNA, 19 nt, Artificial Sequence
  Description of Artificial Sequence: Synthetic oligonucleotide
aggaaauuucuacuaccuc

SEQ ID NO: 196336 - RNA, 19 nt, Artificial Sequence
  Description of Artificial Sequence: Synthetic oligonucleotide
agcgcuaauaacuuauuau

SEQ ID NO: 196337 - RNA, 19 nt, Artificial Sequence
  Description of Artificial Sequence: Synthetic oligonucleotide
auaugaucccggcaaacug

SEQ ID NO: 196338 - RNA, 19 nt, Artificial Sequence
  Description of Artificial Sequence: Synthetic oligonucleotide
auaaccucaucauugguuu

SEQ ID NO: 196339 - RNA, 19 nt, Artificial Sequence
  Description of Artificial Sequence: Synthetic oligonucleotide
cacaacgaacagcaaagcg

SEQ ID NO: 196340 - RNA, 19 nt, Artificial Sequence
  Description of Artificial Sequence: Synthetic oligonucleotide
uacaauccgauugucagcu

SEQ ID NO: 196341 - RNA, 19 nt, Artificial Sequence
  Description of Artificial Sequence: Synthetic oligonucleotide
caaucaagaaaaucagguc

SEQ ID NO: 196342 - RNA, 19 nt, Artificial Sequence
  Description of Artificial Sequence: Synthetic oligonucleotide
aauauuacugccaggcgau

SEQ ID NO: 196343 - RNA, 19 nt, Artificial Sequence
  Description of Artificial Sequence: Synthetic oligonucleotide
ggcuacgcugaauaaaucg

SEQ ID NO: 196344 - RNA, 19 nt, Artificial Sequence
  Description of Artificial Sequence: Synthetic oligonucleotide
caauccgauugucagcucg

SEQ ID NO: 196345 - RNA, 19 nt, Artificial Sequence
  Description of Artificial Sequence: Synthetic oligonucleotide
ugacaacucaugugaauug

SEQ ID NO: 196346 - RNA, 19 nt, Artificial Sequence
  Description of Artificial Sequence: Synthetic oligonucleotide
uauuauuagccaugaaguu

SEQ ID NO: 196347 - RNA, 19 nt, Artificial Sequence
  Description of Artificial Sequence: Synthetic oligonucleotide
agcucgaugcuuguguacc

SEQ ID NO: 196348 - RNA, 19 nt, Artificial Sequence
  Description of Artificial Sequence: Synthetic oligonucleotide
uaaaucggguugcuaaccu

SEQ ID NO: 196349 - RNA, 19 nt, Artificial Sequence
  Description of Artificial Sequence: Synthetic oligonucleotide
aucgaaacaaccuggugaa

SEQ ID NO: 196350 - RNA, 19 nt, Artificial Sequence
  Description of Artificial Sequence: Synthetic oligonucleotide
ugggcaauuucuaggaguc

SEQ ID NO: 196351 - RNA, 19 nt, Artificial Sequence
  Description of Artificial Sequence: Synthetic oligonucleotide
agagaaccgcuucugucac

SEQ ID NO: 196352 - RNA, 19 nt, Artificial Sequence
  Description of Artificial Sequence: Synthetic oligonucleotide
uguaaguuguuuguguguc

SEQ ID NO: 196353 - RNA, 19 nt, Artificial Sequence
  Description of Artificial Sequence: Synthetic oligonucleotide
cuguucuaggagcugaaag

SEQ ID NO: 196354 - RNA, 19 nt, Artificial Sequence
  Description of Artificial Sequence: Synthetic oligonucleotide
uacaauaggauuggugugu

SEQ ID NO: 196355 - RNA, 19 nt, Artificial Sequence
  Description of Artificial Sequence: Synthetic oligonucleotide
gucaucuacagugucgggg

SEQ ID NO: 196356 - RNA, 19 nt, Artificial Sequence
  Description of Artificial Sequence: Synthetic oligonucleotide
agaguagaauacaacuggg

SEQ ID NO: 196357 - RNA, 19 nt, Artificial Sequence
  Description of Artificial Sequence: Synthetic oligonucleotide
uagucgguaccaaaguuaa

SEQ ID NO: 196358 - RNA, 19 nt, Artificial Sequence
  Description of Artificial Sequence: Synthetic oligonucleotide
uaccucguacugaggaugg

SEQ ID NO: 196359 - RNA, 19 nt, Artificial Sequence
  Description of Artificial Sequence: Synthetic oligonucleotide
cuaucaaccugcaugaucu

SEQ ID NO: 196360 - RNA, 19 nt, Artificial Sequence
  Description of Artificial Sequence: Synthetic oligonucleotide
uugggcuccgcaugaauag

SEQ ID NO: 196361 - RNA, 19 nt, Artificial Sequence
  Description of Artificial Sequence: Synthetic oligonucleotide
caacucaugugaauugcag

SEQ ID NO: 196362 - RNA, 19 nt, Artificial Sequence
  Description of Artificial Sequence: Synthetic oligonucleotide
uugccuacacaacgaacag

SEQ ID NO: 196363 - RNA, 19 nt, Artificial Sequence
  Description of Artificial Sequence: Synthetic oligonucleotide
uggugugucuaaauauuac

SEQ ID NO: 196364 - RNA, 19 nt, Artificial Sequence
  Description of Artificial Sequence: Synthetic oligonucleotide
aucuuauccaaaggcaguc

SEQ ID NO: 196365 - RNA, 19 nt, Artificial Sequence
  Description of Artificial Sequence: Synthetic oligonucleotide
ucucgcaaggcccagcaaa

SEQ ID NO: 196366 - RNA, 19 nt, Artificial Sequence
  Description of Artificial Sequence: Synthetic oligonucleotide
ugaagauacggcaguaauu

SEQ ID NO: 196367 - RNA, 19 nt, Artificial Sequence
  Description of Artificial Sequence: Synthetic oligonucleotide
ucguccuguaaauacauuu

SEQ ID NO: 196368 - RNA, 19 nt, Artificial Sequence
  Description of Artificial Sequence: Synthetic oligonucleotide
accugcaacaacguucuac

SEQ ID NO: 196369 - RNA, 19 nt, Artificial Sequence
  Description of Artificial Sequence: Synthetic oligonucleotide
ugacccgacucuuuaauuc

SEQ ID NO: 196370 - RNA, 19 nt, Artificial Sequence
  Description of Artificial Sequence: Synthetic oligonucleotide
auguucuccuagucgguac

SEQ ID NO: 196371 - RNA, 19 nt, Artificial Sequence
  Description of Artificial Sequence: Synthetic oligonucleotide
uguagcuauauuccucauc

SEQ ID NO: 196372 - RNA, 19 nt, Artificial Sequence
  Description of Artificial Sequence: Synthetic oligonucleotide
caguaaucuuauccaaagg

SEQ ID NO: 196373 - RNA, 19 nt, Artificial Sequence
  Description of Artificial Sequence: Synthetic oligonucleotide
aagaagcaguuccaaaguu

SEQ ID NO: 196374 - RNA, 19 nt, Artificial Sequence
  Description of Artificial Sequence: Synthetic oligonucleotide
acugaacaaauauuaugaa

SEQ ID NO: 196375 - RNA, 19 nt, Artificial Sequence
  Description of Artificial Sequence: Synthetic oligonucleotide
augaaguuuuauccuguug

SEQ ID NO: 196376 - RNA, 19 nt, Artificial Sequence
  Description of Artificial Sequence: Synthetic oligonucleotide
aggucaucuacagugucgg

SEQ ID NO: 196377 - RNA, 19 nt, Artificial Sequence
  Description of Artificial Sequence: Synthetic oligonucleotide
uuucuacuaccucguacug

SEQ ID NO: 196378 - RNA, 19 nt, Artificial Sequence
  Description of Artificial Sequence: Synthetic oligonucleotide
ugaauaggucaucuacagu

SEQ ID NO: 196379 - RNA, 19 nt, Artificial Sequence
  Description of Artificial Sequence: Synthetic oligonucleotide
ugaagucucgcaaggccca

SEQ ID NO: 196380 - RNA, 19 nt, Artificial Sequence
  Description of Artificial Sequence: Synthetic oligonucleotide
aauccgauugucagcucgg

SEQ ID NO: 196381 - RNA, 19 nt, Artificial Sequence
  Description of Artificial Sequence: Synthetic oligonucleotide
agauacggcaguaauucag

SEQ ID NO: 196382 - RNA, 19 nt, Artificial Sequence
  Description of Artificial Sequence: Synthetic oligonucleotide
agccauaugaucccggcaa

SEQ ID NO: 196383 - RNA, 19 nt, Artificial Sequence
  Description of Artificial Sequence: Synthetic oligonucleotide
ugugaauugcaguggacuu

SEQ ID NO: 196384 - RNA, 19 nt, Artificial Sequence
  Description of Artificial Sequence: Synthetic oligonucleotide
cuacaauccgauugucagc

SEQ ID NO: 196385 - RNA, 19 nt, Artificial Sequence
  Description of Artificial Sequence: Synthetic oligonucleotide
aaagaagcgcuaauaacuu

SEQ ID NO: 196386 - RNA, 19 nt, Artificial Sequence
  Description of Artificial Sequence: Synthetic oligonucleotide
aggucugacacucuugaau

SEQ ID NO: 196387 - RNA, 19 nt, Artificial Sequence
  Description of Artificial Sequence: Synthetic oligonucleotide
agcuaucgaaacaaccugg

SEQ ID NO: 196388 - RNA, 19 nt, Artificial Sequence
  Description of Artificial Sequence: Synthetic oligonucleotide
ugauugugggacacagucu

SEQ ID NO: 196389 - RNA, 19 nt, Artificial Sequence
  Description of Artificial Sequence: Synthetic oligonucleotide
ucggucaaccacuucacuc

SEQ ID NO: 196390 - RNA, 19 nt, Artificial Sequence
  Description of Artificial Sequence: Synthetic oligonucleotide
caaauaagaagcaguucca

SEQ ID NO: 196391 - RNA, 19 nt, Artificial Sequence
  Description of Artificial Sequence: Synthetic oligonucleotide
ugccaggcgaucuaagaac

SEQ ID NO: 196392 - RNA, 19 nt, Artificial Sequence
  Description of Artificial Sequence: Synthetic oligonucleotide
uuggugugucuaaauauua

SEQ ID NO: 196393 - RNA, 19 nt, Artificial Sequence
  Description of Artificial Sequence: Synthetic oligonucleotide
aaucggguugcuaaccuga

SEQ ID NO: 196394 - RNA, 19 nt, Artificial Sequence
  Description of Artificial Sequence: Synthetic oligonucleotide
ccuuucaucaaauagccca

SEQ ID NO: 196395 - RNA, 19 nt, Artificial Sequence
  Description of Artificial Sequence: Synthetic oligonucleotide
cuccuagucgguaccaaag

SEQ ID NO: 196396 - RNA, 19 nt, Artificial Sequence
  Description of Artificial Sequence: Synthetic oligonucleotide
agccaugaaguuacugucc

SEQ ID NO: 196397 - RNA, 19 nt, Artificial Sequence
  Description of Artificial Sequence: Synthetic oligonucleotide
cucaugugaauugcagugg

SEQ ID NO: 196398 - RNA, 19 nt, Artificial Sequence
  Description of Artificial Sequence: Synthetic oligonucleotide
aagcgcuaauaacuuauua

SEQ ID NO: 196399 - RNA, 19 nt, Artificial Sequence
  Description of Artificial Sequence: Synthetic oligonucleotide
agcauagcucgcuaagaca

SEQ ID NO: 196400 - RNA, 19 nt, Artificial Sequence
  Description of Artificial Sequence: Synthetic oligonucleotide
gauuggugugucuaaauau

SEQ ID NO: 196401 - RNA, 19 nt, Artificial Sequence
  Description of Artificial Sequence: Synthetic oligonucleotide
auaaccugaacagagcaua

SEQ ID NO: 196402 - RNA, 19 nt, Artificial Sequence
  Description of Artificial Sequence: Synthetic oligonucleotide
uccuagucgguaccaaagu

SEQ ID NO: 196403 - RNA, 19 nt, Artificial Sequence
  Description of Artificial Sequence: Synthetic oligonucleotide
gauggcuacaccacaggac

SEQ ID NO: 196404 - RNA, 19 nt, Artificial Sequence
  Description of Artificial Sequence: Synthetic oligonucleotide
uacggcaguaauucagaac

SEQ ID NO: 196405 - RNA, 19 nt, Artificial Sequence
  Description of Artificial Sequence: Synthetic oligonucleotide
gugagcuugagcuaucgaa

SEQ ID NO: 196406 - RNA, 19 nt, Artificial Sequence
  Description of Artificial Sequence: Synthetic oligonucleotide
cuuugccuacacaacgaac

SEQ ID NO: 196407 - RNA, 19 nt, Artificial Sequence
  Description of Artificial Sequence: Synthetic oligonucleotide
guaagaucgggaugacuac

SEQ ID NO: 196408 - RNA, 19 nt, Artificial Sequence
  Description of Artificial Sequence: Synthetic oligonucleotide
ccgauugucagcucggugc

SEQ ID NO: 196409 - RNA, 19 nt, Artificial Sequence
  Description of Artificial Sequence: Synthetic oligonucleotide
uccuucuauucacccaugu

SEQ ID NO: 196410 - RNA, 19 nt, Artificial Sequence
  Description of Artificial Sequence: Synthetic oligonucleotide
acaauaggauugguguguc

SEQ ID NO: 196411 - RNA, 19 nt, Artificial Sequence
  Description of Artificial Sequence: Synthetic oligonucleotide
gcuacgcugaauaaaucgg

SEQ ID NO: 196412 - RNA, 19 nt, Artificial Sequence
  Description of Artificial Sequence: Synthetic oligonucleotide
acaacugggcaaagcauuc

SEQ ID NO: 196413 - RNA, 19 nt, Artificial Sequence
  Description of Artificial Sequence: Synthetic oligonucleotide
acagaaagucggccuauca

SEQ ID NO: 196414 - RNA, 19 nt, Artificial Sequence
  Description of Artificial Sequence: Synthetic oligonucleotide
augacaacucaugugaauu

SEQ ID NO: 196415 - RNA, 19 nt, Artificial Sequence
  Description of Artificial Sequence: Synthetic oligonucleotide
gauacggcaguaauucaga

SEQ ID NO: 196416 - RNA, 19 nt, Artificial Sequence
  Description of Artificial Sequence: Synthetic oligonucleotide
aaugugcccgucucacagu

SEQ ID NO: 196417 - RNA, 19 nt, Artificial Sequence
  Description of Artificial Sequence: Synthetic oligonucleotide
uagauuagaugaaguuuua

SEQ ID NO: 196418 - RNA, 19 nt, Artificial Sequence
  Description of Artificial Sequence: Synthetic oligonucleotide
uaguaccuccacaagggua

SEQ ID NO: 196419 - RNA, 19 nt, Artificial Sequence
  Description of Artificial Sequence: Synthetic oligonucleotide
aagaagcgcuaauaacuua

SEQ ID NO: 196420 - RNA, 19 nt, Artificial Sequence
  Description of Artificial Sequence: Synthetic oligonucleotide
aggguaggauuguucuccg

SEQ ID NO: 196421 - RNA, 19 nt, Artificial Sequence
  Description of Artificial Sequence: Synthetic oligonucleotide
cauagagagcagagcacac

SEQ ID NO: 196422 - RNA, 19 nt, Artificial Sequence
  Description of Artificial Sequence: Synthetic oligonucleotide
agaagcgcuaauaacuuau

SEQ ID NO: 196423 - RNA, 19 nt, Artificial Sequence
  Description of Artificial Sequence: Synthetic oligonucleotide
cuaucgaaacaaccuggug

SEQ ID NO: 196424 - RNA, 19 nt, Artificial Sequence
  Description of Artificial Sequence: Synthetic oligonucleotide
gugaagucucgcaaggccc

SEQ ID NO: 196425 - RNA, 19 nt, Artificial Sequence
  Description of Artificial Sequence: Synthetic oligonucleotide
cacauucaccaucugugug

SEQ ID NO: 196426 - RNA, 19 nt, Artificial Sequence
  Description of Artificial Sequence: Synthetic oligonucleotide
aggcgaucuaagaacacag

SEQ ID NO: 196427 - RNA, 19 nt, Artificial Sequence
  Description of Artificial Sequence: Synthetic oligonucleotide
uuaaagugcugagccauau

SEQ ID NO: 196428 - RNA, 19 nt, Artificial Sequence
  Description of Artificial Sequence: Synthetic oligonucleotide
uccgauugucagcucggug

SEQ ID NO: 196429 - RNA, 19 nt, Artificial Sequence
  Description of Artificial Sequence: Synthetic oligonucleotide
auaggauuggugugucuaa

SEQ ID NO: 196430 - RNA, 19 nt, Artificial Sequence
  Description of Artificial Sequence: Synthetic oligonucleotide
guauccucuccacccaccc

SEQ ID NO: 196431 - RNA, 19 nt, Artificial Sequence
  Description of Artificial Sequence: Synthetic oligonucleotide
ucugauugugggacacagu

SEQ ID NO: 196432 - RNA, 19 nt, Artificial Sequence
  Description of Artificial Sequence: Synthetic oligonucleotide
cuaauaaucccugccgaca

SEQ ID NO: 196433 - RNA, 19 nt, Artificial Sequence
  Description of Artificial Sequence: Synthetic oligonucleotide
agucuugcuaggacaagag

SEQ ID NO: 196434 - RNA, 19 nt, Artificial Sequence
  Description of Artificial Sequence: Synthetic oligonucleotide
caggaaucucaugacacug

SEQ ID NO: 196435 - RNA, 19 nt, Artificial Sequence
  Description of Artificial Sequence: Synthetic oligonucleotide
gaaucucaugacacugcag

SEQ ID NO: 196436 - RNA, 19 nt, Artificial Sequence
  Description of Artificial Sequence: Synthetic oligonucleotide
cuagucgguaccaaaguua

SEQ ID NO: 196437 - RNA, 19 nt, Artificial Sequence
  Description of Artificial Sequence: Synthetic oligonucleotide
cucgcaggaaucucaugac

SEQ ID NO: 196438 - RNA, 19 nt, Artificial Sequence
  Description of Artificial Sequence: Synthetic oligonucleotide
aagucucgcaaggcccagc

SEQ ID NO: 196439 - RNA, 19 nt, Artificial Sequence
  Description of Artificial Sequence: Synthetic oligonucleotide
caugaucauuggcuacucc

SEQ ID NO: 196440 - RNA, 19 nt, Artificial Sequence
  Description of Artificial Sequence: Synthetic oligonucleotide
cugggaggcggacaacucc

SEQ ID NO: 196441 - RNA, 19 nt, Artificial Sequence
  Description of Artificial Sequence: Synthetic oligonucleotide
ggccuuucaucaaauagcc

SEQ ID NO: 196442 - RNA, 19 nt, Artificial Sequence
  Description of Artificial Sequence: Synthetic oligonucleotide
gguaggauuguucuccgga

SEQ ID NO: 196443 - RNA, 19 nt, Artificial Sequence
  Description of Artificial Sequence: Synthetic oligonucleotide
uggcuacaccacaggacag

SEQ ID NO: 196444 - RNA, 19 nt, Artificial Sequence
  Description of Artificial Sequence: Synthetic oligonucleotide
cuaccucguacugaggaug

SEQ ID NO: 196445 - RNA, 19 nt, Artificial Sequence
  Description of Artificial Sequence: Synthetic oligonucleotide
gcaguuccaaaguucgaag

SEQ ID NO: 196446 - RNA, 19 nt, Artificial Sequence
  Description of Artificial Sequence: Synthetic oligonucleotide
ugaauaaaucggguugcua

SEQ ID NO: 196447 - RNA, 19 nt, Artificial Sequence
  Description of Artificial Sequence: Synthetic oligonucleotide
uacugccaggcgaucuaag

SEQ ID NO: 196448 - RNA, 19 nt, Artificial Sequence
  Description of Artificial Sequence: Synthetic oligonucleotide
gcaacuggcuuacaagcug

SEQ ID NO: 196449 - RNA, 19 nt, Artificial Sequence
  Description of Artificial Sequence: Synthetic oligonucleotide
ucguacugaggauggccug

SEQ ID NO: 196450 - RNA, 19 nt, Artificial Sequence
  Description of Artificial Sequence: Synthetic oligonucleotide
ugccuacacaacgaacagc

SEQ ID NO: 196451 - RNA, 19 nt, Artificial Sequence
  Description of Artificial Sequence: Synthetic oligonucleotide
aggauuggugugucuaaau

SEQ ID NO: 196452 - RNA, 19 nt, Artificial Sequence
  Description of Artificial Sequence: Synthetic oligonucleotide
auaguucugugaagauacg

SEQ ID NO: 196453 - RNA, 19 nt, Artificial Sequence
  Description of Artificial Sequence: Synthetic oligonucleotide
ccaaucaagaaaaucaggu

SEQ ID NO: 196454 - RNA, 19 nt, Artificial Sequence
  Description of Artificial Sequence: Synthetic oligonucleotide
agauuagaugaaguuuuau

SEQ ID NO: 196455 - RNA, 19 nt, Artificial Sequence
  Description of Artificial Sequence: Synthetic oligonucleotide
acuguaagaucgggaugac

SEQ ID NO: 196456 - RNA, 19 nt, Artificial Sequence
  Description of Artificial Sequence: Synthetic oligonucleotide
uagccaccgacagaaaguc

SEQ ID NO: 196457 - RNA, 19 nt, Artificial Sequence
  Description of Artificial Sequence: Synthetic oligonucleotide
agagcauagcucgcuaaga

SEQ ID NO: 196458 - RNA, 19 nt, Artificial Sequence
  Description of Artificial Sequence: Synthetic oligonucleotide
aucccggcaaacugaacaa

SEQ ID NO: 196459 - RNA, 19 nt, Artificial Sequence
  Description of Artificial Sequence: Synthetic oligonucleotide
auacggcaguaauucagaa

SEQ ID NO: 196460 - RNA, 19 nt, Artificial Sequence
  Description of Artificial Sequence: Synthetic oligonucleotide
gggagacaaaagcagcaug

SEQ ID NO: 196461 - RNA, 19 nt, Artificial Sequence
  Description of Artificial Sequence: Synthetic oligonucleotide
gcucggugcuuauuuagag

SEQ ID NO: 196462 - RNA, 19 nt, Artificial Sequence
  Description of Artificial Sequence: Synthetic oligonucleotide
agggcuacgcugaauaaau

SEQ ID NO: 196463 - RNA, 19 nt, Artificial Sequence
  Description of Artificial Sequence: Synthetic oligonucleotide
uucuccggaucaacacucu

SEQ ID NO: 196464 - RNA, 19 nt, Artificial Sequence
  Description of Artificial Sequence: Synthetic oligonucleotide
acgcugaauaaaucggguu

SEQ ID NO: 196465 - RNA, 19 nt, Artificial Sequence
  Description of Artificial Sequence: Synthetic oligonucleotide
cuccuaugucugcagauga

SEQ ID NO: 196466 - RNA, 19 nt, Artificial Sequence
  Description of Artificial Sequence: Synthetic oligonucleotide
guucuccggaucaacacuc

SEQ ID NO: 196467 - RNA, 19 nt, Artificial Sequence
  Description of Artificial Sequence: Synthetic oligonucleotide
acaauccgauugucagcuc

SEQ ID NO: 196468 - RNA, 19 nt, Artificial Sequence
  Description of Artificial Sequence: Synthetic oligonucleotide
gggagugggcaauuucuag

SEQ ID NO: 196469 - RNA, 19 nt, Artificial Sequence
  Description of Artificial Sequence: Synthetic oligonucleotide
uugcuaggacaagagcugu

SEQ ID NO: 196470 - RNA, 19 nt, Artificial Sequence
  Description of Artificial Sequence: Synthetic oligonucleotide
ucccugaccaugacauaaa

SEQ ID NO: 196471 - RNA, 19 nt, Artificial Sequence
  Description of Artificial Sequence: Synthetic oligonucleotide
caaacuugcuuacauuccu

SEQ ID NO: 196472 - RNA, 19 nt, Artificial Sequence
  Description of Artificial Sequence: Synthetic oligonucleotide
cagaaagucggccuaucaa

SEQ ID NO: 196473 - RNA, 19 nt, Artificial Sequence
  Description of Artificial Sequence: Synthetic oligonucleotide
guaccgcacagccauaugu

SEQ ID NO: 196474 - RNA, 19 nt, Artificial Sequence
  Description of Artificial Sequence: Synthetic oligonucleotide
cuaaccugaauaggucauc

SEQ ID NO: 196475 - RNA, 19 nt, Artificial Sequence
  Description of Artificial Sequence: Synthetic oligonucleotide
agcaacuggcuuacaagcu

SEQ ID NO: 196476 - RNA, 19 nt, Artificial Sequence
  Description of Artificial Sequence: Synthetic oligonucleotide
gaugacccgacucuuuaau

SEQ ID NO: 196477 - RNA, 19 nt, Artificial Sequence
  Description of Artificial Sequence: Synthetic oligonucleotide
ggcaauuucuaggagucca

SEQ ID NO: 196478 - RNA, 19 nt, Artificial Sequence
  Description of Artificial Sequence: Synthetic oligonucleotide
cagucguccuguaaauaca

SEQ ID NO: 196479 - RNA, 19 nt, Artificial Sequence
  Description of Artificial Sequence: Synthetic oligonucleotide
ggcaccugcaacaacguuc

SEQ ID NO: 196480 - RNA, 19 nt, Artificial Sequence
  Description of Artificial Sequence: Synthetic oligonucleotide
cuuaguaaugugcccgucu

SEQ ID NO: 196481 - RNA, 19 nt, Artificial Sequence
  Description of Artificial Sequence: Synthetic oligonucleotide
agaugacccgacucuuuaa

SEQ ID NO: 196482 - RNA, 19 nt, Artificial Sequence
  Description of Artificial Sequence: Synthetic oligonucleotide
augacccgacucuuuaauu

SEQ ID NO: 196483 - RNA, 19 nt, Artificial Sequence
  Description of Artificial Sequence: Synthetic oligonucleotide
acggagguuucugauugug

SEQ ID NO: 196484 - RNA, 19 nt, Artificial Sequence
  Description of Artificial Sequence: Synthetic oligonucleotide
cuuguguaccgcacagcca

SEQ ID NO: 196485 - RNA, 19 nt, Artificial Sequence
  Description of Artificial Sequence: Synthetic oligonucleotide
gugaagauacggcaguaau

SEQ ID NO: 196486 - RNA, 19 nt, Artificial Sequence
  Description of Artificial Sequence: Synthetic oligonucleotide
ugcuuguguaccgcacagc

SEQ ID NO: 196487 - RNA, 19 nt, Artificial Sequence
  Description of Artificial Sequence: Synthetic oligonucleotide
cuccgcaugaauagcaacu

SEQ ID NO: 196488 - RNA, 19 nt, Artificial Sequence
  Description of Artificial Sequence: Synthetic oligonucleotide
gcgaguuccaucaucccug

SEQ ID NO: 196489 - RNA, 19 nt, Artificial Sequence
  Description of Artificial Sequence: Synthetic oligonucleotide
guaaugugcccgucucaca

SEQ ID NO: 196490 - RNA, 19 nt, Artificial Sequence
  Description of Artificial Sequence: Synthetic oligonucleotide
agucguccuguaaauacau

SEQ ID NO: 196491 - RNA, 19 nt, Artificial Sequence
  Description of Artificial Sequence: Synthetic oligonucleotide
ccccuuaguaaugugcccg

SEQ ID NO: 196492 - RNA, 19 nt, Artificial Sequence
  Description of Artificial Sequence: Synthetic oligonucleotide
ccauaaccugaacagagca

SEQ ID NO: 196493 - RNA, 19 nt, Artificial Sequence
  Description of Artificial Sequence: Synthetic oligonucleotide
ucuccggaucaacacucuu

SEQ ID NO: 196494 - RNA, 19 nt, Artificial Sequence
  Description of Artificial Sequence: Synthetic oligonucleotide
ugggcuccgcaugaauagc

SEQ ID NO: 196495 - RNA, 19 nt, Artificial Sequence
  Description of Artificial Sequence: Synthetic oligonucleotide
gcucgaugcuuguguaccg

SEQ ID NO: 196496 - RNA, 19 nt, Artificial Sequence
  Description of Artificial Sequence: Synthetic oligonucleotide
ggucaucucuaaagguggg

SEQ ID NO: 196497 - RNA, 19 nt, Artificial Sequence
  Description of Artificial Sequence: Synthetic oligonucleotide
ggagacaaaagcagcaugu

SEQ ID NO: 196498 - RNA, 19 nt, Artificial Sequence
  Description of Artificial Sequence: Synthetic oligonucleotide
agugugagcuugagcuauc

SEQ ID NO: 196499 - RNA, 19 nt, Artificial Sequence
  Description of Artificial Sequence: Synthetic oligonucleotide
cagcucgaugcuuguguac

SEQ ID NO: 196500 - RNA, 19 nt, Artificial Sequence
  Description of Artificial Sequence: Synthetic oligonucleotide
accaucugugugacuagug

SEQ ID NO: 196501 - RNA, 19 nt, Artificial Sequence
  Description of Artificial Sequence: Synthetic oligonucleotide
accucguacugaggauggc

SEQ ID NO: 196502 - RNA, 19 nt, Artificial Sequence
  Description of Artificial Sequence: Synthetic oligonucleotide
ugaucccggcaaacugaac

SEQ ID NO: 196503 - RNA, 19 nt, Artificial Sequence
  Description of Artificial Sequence: Synthetic oligonucleotide
uucacgugccacagccaua

SEQ ID NO: 196504 - RNA, 19 nt, Artificial Sequence
  Description of Artificial Sequence: Synthetic oligonucleotide
cucguacugaggauggccu

SEQ ID NO: 196505 - RNA, 19 nt, Artificial Sequence
  Description of Artificial Sequence: Synthetic oligonucleotide
cagucuugcuaggacaaga

SEQ ID NO: 196506 - RNA, 19 nt, Artificial Sequence
  Description of Artificial Sequence: Synthetic oligonucleotide
cccacagucgucuccuuug

SEQ ID NO: 196507 - RNA, 19 nt, Artificial Sequence
  Description of Artificial Sequence: Synthetic oligonucleotide
guaggauuguucuccggau

SEQ ID NO: 196508 - RNA, 19 nt, Artificial Sequence
  Description of Artificial Sequence: Synthetic oligonucleotide
cuucgggagacaacaugaa

SEQ ID NO: 196509 - RNA, 19 nt, Artificial Sequence
  Description of Artificial Sequence: Synthetic oligonucleotide
gugcccgucucacagugaa

SEQ ID NO: 196510 - RNA, 19 nt, Artificial Sequence
  Description of Artificial Sequence: Synthetic oligonucleotide
cauaugaucccggcaaacu

SEQ ID NO: 196511 - RNA, 19 nt, Artificial Sequence
  Description of Artificial Sequence: Synthetic oligonucleotide
gcugauguacacgguacac

SEQ ID NO: 196512 - RNA, 19 nt, Artificial Sequence
  Description of Artificial Sequence: Synthetic oligonucleotide
gcgcuaauaacuuauuauu

SEQ ID NO: 196513 - RNA, 19 nt, Artificial Sequence
  Description of Artificial Sequence: Synthetic oligonucleotide
ggucucccagaccuuggcc

SEQ ID NO: 196514 - RNA, 19 nt, Artificial Sequence
  Description of Artificial Sequence: Synthetic oligonucleotide
agucaagggagugggcaau

SEQ ID NO: 196515 - RNA, 19 nt, Artificial Sequence
  Description of Artificial Sequence: Synthetic oligonucleotide
guugggcuccgcaugaaua

SEQ ID NO: 196516 - RNA, 19 nt, Artificial Sequence
  Description of Artificial Sequence: Synthetic oligonucleotide
uucuccuagucgguaccaa

SEQ ID NO: 196517 - RNA, 19 nt, Artificial Sequence
  Description of Artificial Sequence: Synthetic oligonucleotide
cauaaccugaacagagcau

SEQ ID NO: 196518 - RNA, 19 nt, Artificial Sequence
  Description of Artificial Sequence: Synthetic oligonucleotide
ccugccgacagccuucuuc

SEQ ID NO: 196519 - RNA, 19 nt, Artificial Sequence
  Description of Artificial Sequence: Synthetic oligonucleotide
uguguaccgcacagccaua

SEQ ID NO: 196520 - RNA, 19 nt, Artificial Sequence
  Description of Artificial Sequence: Synthetic oligonucleotide
ggguggguugccuucuuuc

SEQ ID NO: 196521 - RNA, 19 nt, Artificial Sequence
  Description of Artificial Sequence: Synthetic oligonucleotide
gagugugagcuugagcuau

SEQ ID NO: 196522 - RNA, 19 nt, Artificial Sequence
  Description of Artificial Sequence: Synthetic oligonucleotide
cuuauccaaaggcagucuu

SEQ ID NO: 196523 - RNA, 19 nt, Artificial Sequence
  Description of Artificial Sequence: Synthetic oligonucleotide
ucggccuaucaaccugcau

SEQ ID NO: 196524 - RNA, 19 nt, Artificial Sequence
  Description of Artificial Sequence: Synthetic oligonucleotide
cagugucggggugauuuug

SEQ ID NO: 196525 - RNA, 19 nt, Artificial Sequence
  Description of Artificial Sequence: Synthetic oligonucleotide
ccucguacugaggauggcc

SEQ ID NO: 196526 - RNA, 19 nt, Artificial Sequence
  Description of Artificial Sequence: Synthetic oligonucleotide
ucccggcaaacugaacaaa

SEQ ID NO: 196527 - RNA, 19 nt, Artificial Sequence
  Description of Artificial Sequence: Synthetic oligonucleotide
gugucggggugauuuugga

SEQ ID NO: 196528 - RNA, 19 nt, Artificial Sequence
  Description of Artificial Sequence: Synthetic oligonucleotide
cucggugcuuauuuagagu

SEQ ID NO: 196529 - RNA, 19 nt, Artificial Sequence
  Description of Artificial Sequence: Synthetic oligonucleotide
ggugugcaaguguuccuuc

SEQ ID NO: 196530 - RNA, 19 nt, Artificial Sequence
  Description of Artificial Sequence: Synthetic oligonucleotide
ccgucucacagugaaggcc

SEQ ID NO: 196531 - RNA, 19 nt, Artificial Sequence
  Description of Artificial Sequence: Synthetic oligonucleotide
ugccgacagccuucuucca

SEQ ID NO: 196532 - RNA, 19 nt, Artificial Sequence
  Description of Artificial Sequence: Synthetic oligonucleotide
cgggaugacuacuuggcuc

SEQ ID NO: 196533 - RNA, 19 nt, Artificial Sequence
  Description of Artificial Sequence: Synthetic oligonucleotide
guucuccuagucgguacca

SEQ ID NO: 196534 - RNA, 19 nt, Artificial Sequence
  Description of Artificial Sequence: Synthetic oligonucleotide
acccgacucuuuaauucca

SEQ ID NO: 196535 - RNA, 19 nt, Artificial Sequence
  Description of Artificial Sequence: Synthetic oligonucleotide
agagaugacccgacucuuu

SEQ ID NO: 196536 - RNA, 19 nt, Artificial Sequence
  Description of Artificial Sequence: Synthetic oligonucleotide
auccgauugucagcucggu

SEQ ID NO: 196537 - RNA, 19 nt, Artificial Sequence
  Description of Artificial Sequence: Synthetic oligonucleotide
gugcaaguguuccuucuau

SEQ ID NO: 196538 - RNA, 19 nt, Artificial Sequence
  Description of Artificial Sequence: Synthetic oligonucleotide
agcgccuggagcauaucua

SEQ ID NO: 196539 - RNA, 19 nt, Artificial Sequence
  Description of Artificial Sequence: Synthetic oligonucleotide
ggcgaguuccaucaucccu

SEQ ID NO: 196540 - RNA, 19 nt, Artificial Sequence
  Description of Artificial Sequence: Synthetic oligonucleotide
ggccugacacaaauaagaa

SEQ ID NO: 196541 - RNA, 19 nt, Artificial Sequence
  Description of Artificial Sequence: Synthetic oligonucleotide
ggcccacuguaagaucggg

SEQ ID NO: 196542 - RNA, 19 nt, Artificial Sequence
  Description of Artificial Sequence: Synthetic oligonucleotide
cccgucucacagugaaggc

SEQ ID NO: 196543 - RNA, 19 nt, Artificial Sequence
  Description of Artificial Sequence: Synthetic oligonucleotide
ccauaugaucccggcaaac

SEQ ID NO: 196544 - RNA, 19 nt, Artificial Sequence
  Description of Artificial Sequence: Synthetic oligonucleotide
ccaugccguacucauccac

SEQ ID NO: 196545 - RNA, 19 nt, Artificial Sequence
  Description of Artificial Sequence: Synthetic oligonucleotide
ccggaucaacacucuuugc

SEQ ID NO: 196546 - RNA, 19 nt, Artificial Sequence
  Description of Artificial Sequence: Synthetic oligonucleotide
cuccggaucaacacucuuu

SEQ ID NO: 196547 - RNA, 19 nt, Artificial Sequence
  Description of Artificial Sequence: Synthetic oligonucleotide
caggaaaguuucacauagu

SEQ ID NO: 196548 - RNA, 19 nt, Artificial Sequence
  Description of Artificial Sequence: Synthetic oligonucleotide
gaagcgcuaauaacuuauu

SEQ ID NO: 196549 - RNA, 19 nt, Artificial Sequence
  Description of Artificial Sequence: Synthetic oligonucleotide
gcgccuggagcauaucuaa

SEQ ID NO: 196550 - RNA, 19 nt, Artificial Sequence
  Description of Artificial Sequence: Synthetic oligonucleotide
gggcaauuucuaggagucc

SEQ ID NO: 196551 - RNA, 19 nt, Artificial Sequence
  Description of Artificial Sequence: Synthetic oligonucleotide
ccaggcgaucuaagaacac

SEQ ID NO: 196552 - RNA, 19 nt, Artificial Sequence
  Description of Artificial Sequence: Synthetic oligonucleotide
accaaccagcucgaugcuu

SEQ ID NO: 196553 - RNA, 19 nt, Artificial Sequence
  Description of Artificial Sequence: Synthetic oligonucleotide
cugaauaaaucggguugcu

SEQ ID NO: 196554 - RNA, 19 nt, Artificial Sequence
  Description of Artificial Sequence: Synthetic oligonucleotide
gcuaucgaaacaaccuggu

SEQ ID NO: 196555 - RNA, 19 nt, Artificial Sequence
  Description of Artificial Sequence: Synthetic oligonucleotide
ugucagcucggugcuuauu

SEQ ID NO: 196556 - RNA, 19 nt, Artificial Sequence
  Description of Artificial Sequence: Synthetic oligonucleotide
cacgguacacauucaccau

SEQ ID NO: 196557 - RNA, 19 nt, Artificial Sequence
  Description of Artificial Sequence: Synthetic oligonucleotide
ccuucuuucagaguagaau

SEQ ID NO: 196558 - RNA, 19 nt, Artificial Sequence
  Description of Artificial Sequence: Synthetic oligonucleotide
gccauaugaucccggcaaa

SEQ ID NO: 196559 - RNA, 19 nt, Artificial Sequence
  Description of Artificial Sequence: Synthetic oligonucleotide
gcggacaacucccucuagu

SEQ ID NO: 196560 - RNA, 19 nt, Artificial Sequence
  Description of Artificial Sequence: Synthetic oligonucleotide
ccggcaaacugaacaaaua

SEQ ID NO: 196561 - RNA, 19 nt, Artificial Sequence
  Description of Artificial Sequence: Synthetic oligonucleotide
cuguaagaucgggaugacu

SEQ ID NO: 196562 - RNA, 19 nt, Artificial Sequence
  Description of Artificial Sequence: Synthetic oligonucleotide
gucucgcaaggcccagcaa

SEQ ID NO: 196563 - RNA, 19 nt, Artificial Sequence
  Description of Artificial Sequence: Synthetic oligonucleotide
caauuucuaggaguccauu

SEQ ID NO: 196564 - RNA, 19 nt, Artificial Sequence
  Description of Artificial Sequence: Synthetic oligonucleotide
cauagcucgcuaagacauu

SEQ ID NO: 196565 - RNA, 19 nt, Artificial Sequence
  Description of Artificial Sequence: Synthetic oligonucleotide
cagagcacuucagccacgu

SEQ ID NO: 196566 - RNA, 19 nt, Artificial Sequence
  Description of Artificial Sequence: Synthetic oligonucleotide
caaccagcucgaugcuugu

SEQ ID NO: 196567 - RNA, 19 nt, Artificial Sequence
  Description of Artificial Sequence: Synthetic oligonucleotide
gcuguucuaggagcugaaa

SEQ ID NO: 196568 - RNA, 19 nt, Artificial Sequence
  Description of Artificial Sequence: Synthetic oligonucleotide
cacggaugagucuguccau

SEQ ID NO: 196569 - RNA, 19 nt, Artificial Sequence
  Description of Artificial Sequence: Synthetic oligonucleotide
cacggagguuucugauugu

SEQ ID NO: 196570 - RNA, 19 nt, Artificial Sequence
  Description of Artificial Sequence: Synthetic oligonucleotide
ccuaugucugcagaugaau

SEQ ID NO: 196571 - RNA, 19 nt, Artificial Sequence
  Description of Artificial Sequence: Synthetic oligonucleotide
ccuagucgguaccaaaguu

SEQ ID NO: 196572 - RNA, 19 nt, Artificial Sequence
  Description of Artificial Sequence: Synthetic oligonucleotide
cccuuaguaaugugcccgu

SEQ ID NO: 196573 - RNA, 19 nt, Artificial Sequence
  Description of Artificial Sequence: Synthetic oligonucleotide
cacgucugguaagguauau

SEQ ID NO: 196574 - RNA, 19 nt, Artificial Sequence
  Description of Artificial Sequence: Synthetic oligonucleotide
ccacgucugguaagguaua

SEQ ID NO: 196575 - RNA, 19 nt, Artificial Sequence
  Description of Artificial Sequence: Synthetic oligonucleotide
cgauugucagcucggugcu

SEQ ID NO: 196576 - RNA, 19 nt, Artificial Sequence
  Description of Artificial Sequence: Synthetic oligonucleotide
gccauaugauaggcagucu

SEQ ID NO: 196577 - RNA, 19 nt, Artificial Sequence
  Description of Artificial Sequence: Synthetic oligonucleotide
ccccuccuaugucugcaga

SEQ ID NO: 196578 - RNA, 19 nt, Artificial Sequence
  Description of Artificial Sequence: Synthetic oligonucleotide
ggguuucggucaaccacuu

SEQ ID NO: 196579 - RNA, 19 nt, Artificial Sequence
  Description of Artificial Sequence: Synthetic oligonucleotide
ccaggguggguugccuucu

SEQ ID NO: 196580 - RNA, 19 nt, Artificial Sequence
  Description of Artificial Sequence: Synthetic oligonucleotide
gccuaucaaccugcaugau

SEQ ID NO: 196581 - RNA, 19 nt, Artificial Sequence
  Description of Artificial Sequence: Synthetic oligonucleotide
cuacagugucggggugauu

SEQ ID NO: 196582 - RNA, 19 nt, Artificial Sequence
  Description of Artificial Sequence: Synthetic oligonucleotide
cccuggcgaguuccaucau

SEQ ID NO: 196583 - RNA, 19 nt, Artificial Sequence
  Description of Artificial Sequence: Synthetic oligonucleotide
auaugaaccugacaggccc

SEQ ID NO: 196584 - RNA, 19 nt, Artificial Sequence
  Description of Artificial Sequence: Synthetic oligonucleotide
aaaguaacccuuuccuggc

SEQ ID NO: 196585 - RNA, 19 nt, Artificial Sequence
  Description of Artificial Sequence: Synthetic oligonucleotide
uguauuauaggaagaagca

SEQ ID NO: 196586 - RNA, 19 nt, Artificial Sequence
  Description of Artificial Sequence: Synthetic oligonucleotide
uguucaagggccuugggcg

SEQ ID NO: 196587 - RNA, 19 nt, Artificial Sequence
  Description of Artificial Sequence: Synthetic oligonucleotide
aguucgauagccaacaccc

SEQ ID NO: 196588 - RNA, 19 nt, Artificial Sequence
  Description of Artificial Sequence: Synthetic oligonucleotide
auaaguaucgcgcagaaaa

SEQ ID NO: 196589 - RNA, 19 nt, Artificial Sequence
  Description of Artificial Sequence: Synthetic oligonucleotide
aaugcuguauccccagccc

SEQ ID NO: 196590 - RNA, 19 nt, Artificial Sequence
  Description of Artificial Sequence: Synthetic oligonucleotide
aaacgcguagucuuuuacc

SEQ ID NO: 196591 - RNA, 19 nt, Artificial Sequence
  Description of Artificial Sequence: Synthetic oligonucleotide
agguaaucauuauaggagc

SEQ ID NO: 196592 - RNA, 19 nt, Artificial Sequence
  Description of Artificial Sequence: Synthetic oligonucleotide
uaaacggcgguaaucagag

SEQ ID NO: 196593 - RNA, 19 nt, Artificial Sequence
  Description of Artificial Sequence: Synthetic oligonucleotide
uugaacaacugguugagcc

SEQ ID NO: 196594 - RNA, 19 nt, Artificial Sequence
  Description of Artificial Sequence: Synthetic oligonucleotide
aguuaagcgaagaagcugc

SEQ ID NO: 196595 - RNA, 19 nt, Artificial Sequence
  Description of Artificial Sequence: Synthetic oligonucleotide
cagguaaucauuauaggag

SEQ ID NO: 196596 - RNA, 19 nt, Artificial Sequence
  Description of Artificial Sequence: Synthetic oligonucleotide
aacugguugagccccauag

SEQ ID NO: 196597 - RNA, 19 nt, Artificial Sequence
  Description of Artificial Sequence: Synthetic oligonucleotide
auuguaagaagcugccugg

SEQ ID NO: 196598 - RNA, 19 nt, Artificial Sequence
  Description of Artificial Sequence: Synthetic oligonucleotide
aacgcguagucuuuuacca

SEQ ID NO: 196599 - RNA, 19 nt, Artificial Sequence
  Description of Artificial Sequence: Synthetic oligonucleotide
uuugccguugagcugcgcg

SEQ ID NO: 196600 - RNA, 19 nt, Artificial Sequence
  Description of Artificial Sequence: Synthetic oligonucleotide
aggcaaagaaaacaaagca

SEQ ID NO: 196601 - RNA, 19 nt, Artificial Sequence
  Description of Artificial Sequence: Synthetic oligonucleotide
uucaugacggcgcagcuca

SEQ ID NO: 196602 - RNA, 19 nt, Artificial Sequence
  Description of Artificial Sequence: Synthetic oligonucleotide
cuacggaggagaaucaggg

SEQ ID NO: 196603 - RNA, 19 nt, Artificial Sequence
  Description of Artificial Sequence: Synthetic oligonucleotide
uaccuuuucgacauggcga

SEQ ID NO: 196604 - RNA, 19 nt, Artificial Sequence
  Description of Artificial Sequence: Synthetic oligonucleotide
guguauuauaggaagaagc

SEQ ID NO: 196605 - RNA, 19 nt, Artificial Sequence
  Description of Artificial Sequence: Synthetic oligonucleotide
ugauaaacggcgguaauca

SEQ ID NO: 196606 - RNA, 19 nt, Artificial Sequence
  Description of Artificial Sequence: Synthetic oligonucleotide
aaucggaaugggcaucggg

SEQ ID NO: 196607 - RNA, 19 nt, Artificial Sequence
  Description of Artificial Sequence: Synthetic oligonucleotide
auaacuauucaacuggguu

SEQ ID NO: 196608 - RNA, 19 nt, Artificial Sequence
  Description of Artificial Sequence: Synthetic oligonucleotide
aacuauucaacuggguuug

SEQ ID NO: 196609 - RNA, 19 nt, Artificial Sequence
  Description of Artificial Sequence: Synthetic oligonucleotide
uuuguagggaucgucguag

SEQ ID NO: 196610 - RNA, 19 nt, Artificial Sequence
  Description of Artificial Sequence: Synthetic oligonucleotide
accuuuucgacauggcgac

SEQ ID NO: 196611 - RNA, 19 nt, Artificial Sequence
  Description of Artificial Sequence: Synthetic oligonucleotide
uccaugugaacaaacgcgu

SEQ ID NO: 196612 - RNA, 19 nt, Artificial Sequence
  Description of Artificial Sequence: Synthetic oligonucleotide
augaccgugccguagggcg

SEQ ID NO: 196613 - RNA, 19 nt, Artificial Sequence
  Description of Artificial Sequence: Synthetic oligonucleotide
uagggaucgucguagcugg

SEQ ID NO: 196614 - RNA, 19 nt, Artificial Sequence
  Description of Artificial Sequence: Synthetic oligonucleotide
uuuggacacauaccaacug

SEQ ID NO: 196615 - RNA, 19 nt, Artificial Sequence
  Description of Artificial Sequence: Synthetic oligonucleotide
agcguucucgcgcaugugc

SEQ ID NO: 196616 - RNA, 19 nt, Artificial Sequence
  Description of Artificial Sequence: Synthetic oligonucleotide
uguguauuauaggaagaag

SEQ ID NO: 196617 - RNA, 19 nt, Artificial Sequence
  Description of Artificial Sequence: Synthetic oligonucleotide
uaacuauucaacuggguuu

SEQ ID NO: 196618 - RNA, 19 nt, Artificial Sequence
  Description of Artificial Sequence: Synthetic oligonucleotide
uagggaauugggacuaugc

SEQ ID NO: 196619 - RNA, 19 nt, Artificial Sequence
  Description of Artificial Sequence: Synthetic oligonucleotide
cuaaacgccggucggaacc

SEQ ID NO: 196620 - RNA, 19 nt, Artificial Sequence
  Description of Artificial Sequence: Synthetic oligonucleotide
ugugcacgaaggcaaacug

SEQ ID NO: 196621 - RNA, 19 nt, Artificial Sequence
  Description of Artificial Sequence: Synthetic oligonucleotide
uugguugagaguuccacgu

SEQ ID NO: 196622 - RNA, 19 nt, Artificial Sequence
  Description of Artificial Sequence: Synthetic oligonucleotide
aucggaaugggcaucgggc

SEQ ID NO: 196623 - RNA, 19 nt, Artificial Sequence
  Description of Artificial Sequence: Synthetic oligonucleotide
aaccauaaguaucgcgcag

SEQ ID NO: 196624 - RNA, 19 nt, Artificial Sequence
  Description of Artificial Sequence: Synthetic oligonucleotide
aaacuucagugguaagcag

SEQ ID NO: 196625 - RNA, 19 nt, Artificial Sequence
  Description of Artificial Sequence: Synthetic oligonucleotide
aucgggagagguaugagac

SEQ ID NO: 196626 - RNA, 19 nt, Artificial Sequence
  Description of Artificial Sequence: Synthetic oligonucleotide
guuguaucacccuccaggc

SEQ ID NO: 196627 - RNA, 19 nt, Artificial Sequence
  Description of Artificial Sequence: Synthetic oligonucleotide
aggaaaugguuaaaguaac

SEQ ID NO: 196628 - RNA, 19 nt, Artificial Sequence
  Description of Artificial Sequence: Synthetic oligonucleotide
cauaagcuagugaggaggc

SEQ ID NO: 196629 - RNA, 19 nt, Artificial Sequence
  Description of Artificial Sequence: Synthetic oligonucleotide
acuagggcuagccagcuga

SEQ ID NO: 196630 - RNA, 19 nt, Artificial Sequence
  Description of Artificial Sequence: Synthetic oligonucleotide
ugcgacucugauaaacggc

SEQ ID NO: 196631 - RNA, 19 nt, Artificial Sequence
  Description of Artificial Sequence: Synthetic oligonucleotide
uaagcuagugaggaggcug

SEQ ID NO: 196632 - RNA, 19 nt, Artificial Sequence
  Description of Artificial Sequence: Synthetic oligonucleotide
ucgcgcaugugcacgaagg

SEQ ID NO: 196633 - RNA, 19 nt, Artificial Sequence
  Description of Artificial Sequence: Synthetic oligonucleotide
cucaacagucucuacggag

SEQ ID NO: 196634 - RNA, 19 nt, Artificial Sequence
  Description of Artificial Sequence: Synthetic oligonucleotide
uguaagaagcugccugggc

SEQ ID NO: 196635 - RNA, 19 nt, Artificial Sequence
  Description of Artificial Sequence: Synthetic oligonucleotide
ggagauagggaauugggac

SEQ ID NO: 196636 - RNA, 19 nt, Artificial Sequence
  Description of Artificial Sequence: Synthetic oligonucleotide
gaguucgauagccaacacc

SEQ ID NO: 196637 - RNA, 19 nt, Artificial Sequence
  Description of Artificial Sequence: Synthetic oligonucleotide
agccccauaacuauucaac

SEQ ID NO: 196638 - RNA, 19 nt, Artificial Sequence
  Description of Artificial Sequence: Synthetic oligonucleotide
uguuucaugacggcgcagc

SEQ ID NO: 196639 - RNA, 19 nt, Artificial Sequence
  Description of Artificial Sequence: Synthetic oligonucleotide
cccauaacuauucaacugg

SEQ ID NO: 196640 - RNA, 19 nt, Artificial Sequence
  Description of Artificial Sequence: Synthetic oligonucleotide
aauagcgugcguaaucgga

SEQ ID NO: 196641 - RNA, 19 nt, Artificial Sequence
  Description of Artificial Sequence: Synthetic oligonucleotide
cauuuugccgccguagccg

SEQ ID NO: 196642 - RNA, 19 nt, Artificial Sequence
  Description of Artificial Sequence: Synthetic oligonucleotide
cuacaugcggcgcugguag

SEQ ID NO: 196643 - RNA, 19 nt, Artificial Sequence
  Description of Artificial Sequence: Synthetic oligonucleotide
gacuuugucggcgagcggc

SEQ ID NO: 196644 - RNA, 19 nt, Artificial Sequence
  Description of Artificial Sequence: Synthetic oligonucleotide
gauaaacggcgguaaucag

SEQ ID NO: 196645 - RNA, 19 nt, Artificial Sequence
  Description of Artificial Sequence: Synthetic oligonucleotide
ucggaaccauaccuuuucg

SEQ ID NO: 196646 - RNA, 19 nt, Artificial Sequence
  Description of Artificial Sequence: Synthetic oligonucleotide
gcgguaaucagagagcucg

SEQ ID NO: 196647 - RNA, 19 nt, Artificial Sequence
  Description of Artificial Sequence: Synthetic oligonucleotide
gaauagcgugcguaaucgg

SEQ ID NO: 196648 - RNA, 19 nt, Artificial Sequence
  Description of Artificial Sequence: Synthetic oligonucleotide
gguuaaaguaacccuuucc

SEQ ID NO: 196649 - RNA, 19 nt, Artificial Sequence
  Description of Artificial Sequence: Synthetic oligonucleotide
cacauaagaggcucgagga

SEQ ID NO: 196650 - RNA, 19 nt, Artificial Sequence
  Description of Artificial Sequence: Synthetic oligonucleotide
gaggcggguacgcucauag

SEQ ID NO: 196651 - RNA, 19 nt, Artificial Sequence
  Description of Artificial Sequence: Synthetic oligonucleotide
ucggcuaaacgccggucgg

SEQ ID NO: 196652 - RNA, 19 nt, Artificial Sequence
  Description of Artificial Sequence: Synthetic oligonucleotide
aggauggcccuacaugcgg

SEQ ID NO: 196653 - RNA, 19 nt, Artificial Sequence
  Description of Artificial Sequence: Synthetic oligonucleotide
guaaucggaaugggcaucg

SEQ ID NO: 196654 - RNA, 19 nt, Artificial Sequence
  Description of Artificial Sequence: Synthetic oligonucleotide
aacgaaagcugcgacucug

SEQ ID NO: 196655 - RNA, 19 nt, Artificial Sequence
  Description of Artificial Sequence: Synthetic oligonucleotide
ugugaacaaacgcguaguc

SEQ ID NO: 196656 - RNA, 19 nt, Artificial Sequence
  Description of Artificial Sequence: Synthetic oligonucleotide
ggaaccauaccuuuucgac

SEQ ID NO: 196657 - RNA, 19 nt, Artificial Sequence
  Description of Artificial Sequence: Synthetic oligonucleotide
caugcagccgacacauugc

SEQ ID NO: 196658 - RNA, 19 nt, Artificial Sequence
  Description of Artificial Sequence: Synthetic oligonucleotide
cuuuucgacauggcgacag

SEQ ID NO: 196659 - RNA, 19 nt, Artificial Sequence
  Description of Artificial Sequence: Synthetic oligonucleotide
ggcggguacgcucauaggg

SEQ ID NO: 196660 - RNA, 19 nt, Artificial Sequence
  Description of Artificial Sequence: Synthetic oligonucleotide
cacgaaggcaaacuguuuc

SEQ ID NO: 196661 - RNA, 19 nt, Artificial Sequence
  Description of Artificial Sequence: Synthetic oligonucleotide
agcugcgacucugauaaac

SEQ ID NO: 196662 - RNA, 19 nt, Artificial Sequence
  Description of Artificial Sequence: Synthetic oligonucleotide
agccagagugcaucugagc

SEQ ID NO: 196663 - RNA, 19 nt, Artificial Sequence
  Description of Artificial Sequence: Synthetic oligonucleotide
cugcgacucugauaaacgg

SEQ ID NO: 196664 - RNA, 19 nt, Artificial Sequence
  Description of Artificial Sequence: Synthetic oligonucleotide
uccauaagcuagugaggag

SEQ ID NO: 196665 - RNA, 19 nt, Artificial Sequence
  Description of Artificial Sequence: Synthetic oligonucleotide
cucggcuaaacgccggucg

SEQ ID NO: 196666 - RNA, 19 nt, Artificial Sequence
  Description of Artificial Sequence: Synthetic oligonucleotide
cugggacauagacagguag

SEQ ID NO: 196667 - RNA, 19 nt, Artificial Sequence
  Description of Artificial Sequence: Synthetic oligonucleotide
auugggacuaugccaguca

SEQ ID NO: 196668 - RNA, 19 nt, Artificial Sequence
  Description of Artificial Sequence: Synthetic oligonucleotide
auaggaguuaagcgaagaa

SEQ ID NO: 196669 - RNA, 19 nt, Artificial Sequence
  Description of Artificial Sequence: Synthetic oligonucleotide
gggaacuagggcuagccag

SEQ ID NO: 196670 - RNA, 19 nt, Artificial Sequence
  Description of Artificial Sequence: Synthetic oligonucleotide
cuaacaccaccuacuuggg

SEQ ID NO: 196671 - RNA, 19 nt, Artificial Sequence
  Description of Artificial Sequence: Synthetic oligonucleotide
gauggcccuacaugcggcg

SEQ ID NO: 196672 - RNA, 19 nt, Artificial Sequence
  Description of Artificial Sequence: Synthetic oligonucleotide
cacgaaaaucuuccaagug

SEQ ID NO: 196673 - RNA, 19 nt, Artificial Sequence
  Description of Artificial Sequence: Synthetic oligonucleotide
cucuaugacgcguccgcgg

SEQ ID NO: 196674 - RNA, 19 nt, Artificial Sequence
  Description of Artificial Sequence: Synthetic oligonucleotide
cacgguaagaggcugccug

SEQ ID NO: 196675 - RNA, 19 nt, Artificial Sequence
  Description of Artificial Sequence: Synthetic oligonucleotide
cauaccuuuucgacauggc

SEQ ID NO: 196676 - RNA, 19 nt, Artificial Sequence
  Description of Artificial Sequence: Synthetic oligonucleotide
ucaugaccgugccguaggg

SEQ ID NO: 196677 - RNA, 19 nt, Artificial Sequence
  Description of Artificial Sequence: Synthetic oligonucleotide
gucucuacggaggagaauc

SEQ ID NO: 196678 - RNA, 19 nt, Artificial Sequence
  Description of Artificial Sequence: Synthetic oligonucleotide
acgguaagaggcugccugg

SEQ ID NO: 196679 - RNA, 19 nt, Artificial Sequence
  Description of Artificial Sequence: Synthetic oligonucleotide
cacucuaugacgcguccgc

SEQ ID NO: 196680 - RNA, 19 nt, Artificial Sequence
  Description of Artificial Sequence: Synthetic oligonucleotide
gcgacgguaauccagcgag

SEQ ID NO: 196681 - RNA, 19 nt, Artificial Sequence
  Description of Artificial Sequence: Synthetic oligonucleotide
acgaaggcaaacuguuuca

SEQ ID NO: 196682 - RNA, 19 nt, Artificial Sequence
  Description of Artificial Sequence: Synthetic oligonucleotide
caccauaggaagcugccug

SEQ ID NO: 196683 - RNA, 19 nt, Artificial Sequence
  Description of Artificial Sequence: Synthetic oligonucleotide
aaaaggcgccgcccgaccu

SEQ ID NO: 196684 - RNA, 19 nt, Artificial Sequence
  Description of Artificial Sequence: Synthetic oligonucleotide
acgcguagucuuuuaccac

SEQ ID NO: 196685 - RNA, 19 nt, Artificial Sequence
  Description of Artificial Sequence: Synthetic oligonucleotide
uugggacuaugccagucac

SEQ ID NO: 196686 - RNA, 19 nt, Artificial Sequence
  Description of Artificial Sequence: Synthetic oligonucleotide
cagguuacugccaaacaca

SEQ ID NO: 196687 - RNA, 19 nt, Artificial Sequence
  Description of Artificial Sequence: Synthetic oligonucleotide
ucgcgaccaaagaauggag

SEQ ID NO: 196688 - RNA, 19 nt, Artificial Sequence
  Description of Artificial Sequence: Synthetic oligonucleotide
gaucgucguagcuggcccg

SEQ ID NO: 196689 - RNA, 19 nt, Artificial Sequence
  Description of Artificial Sequence: Synthetic oligonucleotide
ucguaucugccccaucgac

SEQ ID NO: 196690 - RNA, 19 nt, Artificial Sequence
  Description of Artificial Sequence: Synthetic oligonucleotide
cucgauggcgcgcaccgcg

SEQ ID NO: 196691 - RNA, 19 nt, Artificial Sequence
  Description of Artificial Sequence: Synthetic oligonucleotide
uacgcucauaggguggcgg

SEQ ID NO: 196692 - RNA, 19 nt, Artificial Sequence
  Description of Artificial Sequence: Synthetic oligonucleotide
aucgccccaaguuuuauuu

SEQ ID NO: 196693 - RNA, 19 nt, Artificial Sequence
  Description of Artificial Sequence: Synthetic oligonucleotide
ugguuaaaguaacccuuuc

SEQ ID NO: 196694 - RNA, 19 nt, Artificial Sequence
  Description of Artificial Sequence: Synthetic oligonucleotide
ccauaagcuagugaggagg

SEQ ID NO: 196695 - RNA, 19 nt, Artificial Sequence
  Description of Artificial Sequence: Synthetic oligonucleotide
gguugagccccauaggaac

SEQ ID NO: 196696 - RNA, 19 nt, Artificial Sequence
  Description of Artificial Sequence: Synthetic oligonucleotide
ucccuguguauuauaggaa

SEQ ID NO: 196697 - RNA, 19 nt, Artificial Sequence
  Description of Artificial Sequence: Synthetic oligonucleotide
ucucuacggaggagaauca

SEQ ID NO: 196698 - RNA, 19 nt, Artificial Sequence
  Description of Artificial Sequence: Synthetic oligonucleotide
agugcgguaaggagcugcc

SEQ ID NO: 196699 - RNA, 19 nt, Artificial Sequence
  Description of Artificial Sequence: Synthetic oligonucleotide
acuguuucaugacggcgca

SEQ ID NO: 196700 - RNA, 19 nt, Artificial Sequence
  Description of Artificial Sequence: Synthetic oligonucleotide
ugcggucgcgaccaaagaa

SEQ ID NO: 196701 - RNA, 19 nt, Artificial Sequence
  Description of Artificial Sequence: Synthetic oligonucleotide
gagauagggaauugggacu

SEQ ID NO: 196702 - RNA, 19 nt, Artificial Sequence
  Description of Artificial Sequence: Synthetic oligonucleotide
acaugcggcgcugguagcc

SEQ ID NO: 196703 - RNA, 19 nt, Artificial Sequence
  Description of Artificial Sequence: Synthetic oligonucleotide
ugguugagccccauaggaa

SEQ ID NO: 196704 - RNA, 19 nt, Artificial Sequence
  Description of Artificial Sequence: Synthetic oligonucleotide
guggugauaaccugggucu

SEQ ID NO: 196705 - RNA, 19 nt, Artificial Sequence
  Description of Artificial Sequence: Synthetic oligonucleotide
ccacauaagaggcucgagg

SEQ ID NO: 196706 - RNA, 19 nt, Artificial Sequence
  Description of Artificial Sequence: Synthetic oligonucleotide
uacggaggagaaucagggc

SEQ ID NO: 196707 - RNA, 19 nt, Artificial Sequence
  Description of Artificial Sequence: Synthetic oligonucleotide
gcgacucugauaaacggcg

SEQ ID NO: 196708 - RNA, 19 nt, Artificial Sequence
  Description of Artificial Sequence: Synthetic oligonucleotide
caccauaugggccaagcga

SEQ ID NO: 196709 - RNA, 19 nt, Artificial Sequence
  Description of Artificial Sequence: Synthetic oligonucleotide
ucgaggaggugaacggcgc

SEQ ID NO: 196710 - RNA, 19 nt, Artificial Sequence
  Description of Artificial Sequence: Synthetic oligonucleotide
ugagccccauaacuauuca

SEQ ID NO: 196711 - RNA, 19 nt, Artificial Sequence
  Description of Artificial Sequence: Synthetic oligonucleotide
caaacgcguagucuuuuac

SEQ ID NO: 196712 - RNA, 19 nt, Artificial Sequence
  Description of Artificial Sequence: Synthetic oligonucleotide
augugaacaaacgcguagu

SEQ ID NO: 196713 - RNA, 19 nt, Artificial Sequence
  Description of Artificial Sequence: Synthetic oligonucleotide
gcugauuaccauaggaggc

SEQ ID NO: 196714 - RNA, 19 nt, Artificial Sequence
  Description of Artificial Sequence: Synthetic oligonucleotide
augacggcgcagcucauga

SEQ ID NO: 196715 - RNA, 19 nt, Artificial Sequence
  Description of Artificial Sequence: Synthetic oligonucleotide
guagccagagugcaucuga

SEQ ID NO: 196716 - RNA, 19 nt, Artificial Sequence
  Description of Artificial Sequence: Synthetic oligonucleotide
gccccauaggaguuaagcg

SEQ ID NO: 196717 - RNA, 19 nt, Artificial Sequence
  Description of Artificial Sequence: Synthetic oligonucleotide
ugggacuaugccagucacc

SEQ ID NO: 196718 - RNA, 19 nt, Artificial Sequence
  Description of Artificial Sequence: Synthetic oligonucleotide
cccuguguauuauaggaag

SEQ ID NO: 196719 - RNA, 19 nt, Artificial Sequence
  Description of Artificial Sequence: Synthetic oligonucleotide
ccauaugaaccugacaggc

SEQ ID NO: 196720 - RNA, 19 nt, Artificial Sequence
  Description of Artificial Sequence: Synthetic oligonucleotide
gucggaaccauaccuuuuc

SEQ ID NO: 196721 - RNA, 19 nt, Artificial Sequence
  Description of Artificial Sequence: Synthetic oligonucleotide
uccaccauaugggccaagc

SEQ ID NO: 196722 - RNA, 19 nt, Artificial Sequence
  Description of Artificial Sequence: Synthetic oligonucleotide
gguuucuaacaccaccuac

SEQ ID NO: 196723 - RNA, 19 nt, Artificial Sequence
  Description of Artificial Sequence: Synthetic oligonucleotide
agcugaccccuguaugggg

SEQ ID NO: 196724 - RNA, 19 nt, Artificial Sequence
  Description of Artificial Sequence: Synthetic oligonucleotide
accaacugacugucccaac

SEQ ID NO: 196725 - RNA, 19 nt, Artificial Sequence
  Description of Artificial Sequence: Synthetic oligonucleotide
uccggcgucguaucugccc

SEQ ID NO: 196726 - RNA, 19 nt, Artificial Sequence
  Description of Artificial Sequence: Synthetic oligonucleotide
caucguaggcacugcccgg

SEQ ID NO: 196727 - RNA, 19 nt, Artificial Sequence
  Description of Artificial Sequence: Synthetic oligonucleotide
acgguaggaggcagcagcc

SEQ ID NO: 196728 - RNA, 19 nt, Artificial Sequence
  Description of Artificial Sequence: Synthetic oligonucleotide
ugaguucgauagccaacac

SEQ ID NO: 196729 - RNA, 19 nt, Artificial Sequence
  Description of Artificial Sequence: Synthetic oligonucleotide
gaccaaagaauggaggugu

SEQ ID NO: 196730 - RNA, 19 nt, Artificial Sequence
  Description of Artificial Sequence: Synthetic oligonucleotide
accauaaguaucgcgcaga

SEQ ID NO: 196731 - RNA, 19 nt, Artificial Sequence
  Description of Artificial Sequence: Synthetic oligonucleotide
uucaagggccuugggcgcg

SEQ ID NO: 196732 - RNA, 19 nt, Artificial Sequence
  Description of Artificial Sequence: Synthetic oligonucleotide
acgacugagugcgguaagg

SEQ ID NO: 196733 - RNA, 19 nt, Artificial Sequence
  Description of Artificial Sequence: Synthetic oligonucleotide
uuugucggcgagcggcgga

SEQ ID NO: 196734 - RNA, 19 nt, Artificial Sequence
  Description of Artificial Sequence: Synthetic oligonucleotide
uaugacgcguccgcggcgc

SEQ ID NO: 196735 - RNA, 19 nt, Artificial Sequence
  Description of Artificial Sequence: Synthetic oligonucleotide
gacgguaauccagcgagga

SEQ ID NO: 196736 - RNA, 19 nt, Artificial Sequence
  Description of Artificial Sequence: Synthetic oligonucleotide
agagcucggcuaaacgccg

SEQ ID NO: 196737 - RNA, 19 nt, Artificial Sequence
  Description of Artificial Sequence: Synthetic oligonucleotide
cugaguucgauagccaaca

SEQ ID NO: 196738 - RNA, 19 nt, Artificial Sequence
  Description of Artificial Sequence: Synthetic oligonucleotide
agcauauggggcagacugg

SEQ ID NO: 196739 - RNA, 19 nt, Artificial Sequence
  Description of Artificial Sequence: Synthetic oligonucleotide
gagugcgguaaggagcugc

SEQ ID NO: 196740 - RNA, 19 nt, Artificial Sequence
  Description of Artificial Sequence: Synthetic oligonucleotide
agcgugcguaaucggaaug

SEQ ID NO: 196741 - RNA, 19 nt, Artificial Sequence
  Description of Artificial Sequence: Synthetic oligonucleotide
aggauggcugauuaccaua

SEQ ID NO: 196742 - RNA, 19 nt, Artificial Sequence
  Description of Artificial Sequence: Synthetic oligonucleotide
uacccuaccucuuccucuc

SEQ ID NO: 196743 - RNA, 19 nt, Artificial Sequence
  Description of Artificial Sequence: Synthetic oligonucleotide
guaaucagagagcucggcu

SEQ ID NO: 196744 - RNA, 19 nt, Artificial Sequence
  Description of Artificial Sequence: Synthetic oligonucleotide
ccaucguaggcacugcccg

SEQ ID NO: 196745 - RNA, 19 nt, Artificial Sequence
  Description of Artificial Sequence: Synthetic oligonucleotide
ugcagccgacacauugccc

SEQ ID NO: 196746 - RNA, 19 nt, Artificial Sequence
  Description of Artificial Sequence: Synthetic oligonucleotide
acucuaugacgcguccgcg

SEQ ID NO: 196747 - RNA, 19 nt, Artificial Sequence
  Description of Artificial Sequence: Synthetic oligonucleotide
gcugcgacucugauaaacg

SEQ ID NO: 196748 - RNA, 19 nt, Artificial Sequence
  Description of Artificial Sequence: Synthetic oligonucleotide
ucgggagagguaugagaca

SEQ ID NO: 196749 - RNA, 19 nt, Artificial Sequence
  Description of Artificial Sequence: Synthetic oligonucleotide
aagccaguagcaagaugug

SEQ ID NO: 196750 - RNA, 19 nt, Artificial Sequence
  Description of Artificial Sequence: Synthetic oligonucleotide
cacacucuaugacgcgucc

SEQ ID NO: 196751 - RNA, 19 nt, Artificial Sequence
  Description of Artificial Sequence: Synthetic oligonucleotide
ucguagcuggcccggggug

SEQ ID NO: 196752 - RNA, 19 nt, Artificial Sequence
  Description of Artificial Sequence: Synthetic oligonucleotide
ucgccccaaguuuuauuug

SEQ ID NO: 196753 - RNA, 19 nt, Artificial Sequence
  Description of Artificial Sequence: Synthetic oligonucleotide
acacucuaugacgcguccg

SEQ ID NO: 196754 - RNA, 19 nt, Artificial Sequence
  Description of Artificial Sequence: Synthetic oligonucleotide
ccaaaccacaaaucgcccc

SEQ ID NO: 196755 - RNA, 19 nt, Artificial Sequence
  Description of Artificial Sequence: Synthetic oligonucleotide
ugaccgugccguagggcgc

SEQ ID NO: 196756 - RNA, 19 nt, Artificial Sequence
  Description of Artificial Sequence: Synthetic oligonucleotide
caucgggagagguaugaga

SEQ ID NO: 196757 - RNA, 19 nt, Artificial Sequence
  Description of Artificial Sequence: Synthetic oligonucleotide
uaaacgccggucggaacca

SEQ ID NO: 196758 - RNA, 19 nt, Artificial Sequence
  Description of Artificial Sequence: Synthetic oligonucleotide
aacaaacgcguagucuuuu

SEQ ID NO: 196759 - RNA, 19 nt, Artificial Sequence
  Description of Artificial Sequence: Synthetic oligonucleotide
cuguguauuauaggaagaa

SEQ ID NO: 196760 - RNA, 19 nt, Artificial Sequence
  Description of Artificial Sequence: Synthetic oligonucleotide
uugggcgccauaagaggau

SEQ ID NO: 196761 - RNA, 19 nt, Artificial Sequence
  Description of Artificial Sequence: Synthetic oligonucleotide
acuuugucggcgagcggcg

SEQ ID NO: 196762 - RNA, 19 nt, Artificial Sequence
  Description of Artificial Sequence: Synthetic oligonucleotide
ggaucgucguagcuggccc

SEQ ID NO: 196763 - RNA, 19 nt, Artificial Sequence
  Description of Artificial Sequence: Synthetic oligonucleotide
gccguagccgccuuuccgg

SEQ ID NO: 196764 - RNA, 19 nt, Artificial Sequence
  Description of Artificial Sequence: Synthetic oligonucleotide
ggaacuagggcuagccagc

SEQ ID NO: 196765 - RNA, 19 nt, Artificial Sequence
  Description of Artificial Sequence: Synthetic oligonucleotide
uaaucggaaugggcaucgg

SEQ ID NO: 196766 - RNA, 19 nt, Artificial Sequence
  Description of Artificial Sequence: Synthetic oligonucleotide
cuggacgcagcucguggcc

SEQ ID NO: 196767 - RNA, 19 nt, Artificial Sequence
  Description of Artificial Sequence: Synthetic oligonucleotide
acggcgcagcucaugaccg

SEQ ID NO: 196768 - RNA, 19 nt, Artificial Sequence
  Description of Artificial Sequence: Synthetic oligonucleotide
cuaugacgcguccgcggcg

SEQ ID NO: 196769 - RNA, 19 nt, Artificial Sequence
  Description of Artificial Sequence: Synthetic oligonucleotide
cgaauagcgugcguaaucg

SEQ ID NO: 196770 - RNA, 19 nt, Artificial Sequence
  Description of Artificial Sequence: Synthetic oligonucleotide
gagccacauaagaggcucg

SEQ ID NO: 196771 - RNA, 19 nt, Artificial Sequence
  Description of Artificial Sequence: Synthetic oligonucleotide
acgccggucggaaccauac

SEQ ID NO: 196772 - RNA, 19 nt, Artificial Sequence
  Description of Artificial Sequence: Synthetic oligonucleotide
gacgcguccgcggcgcucg

SEQ ID NO: 196773 - RNA, 19 nt, Artificial Sequence
  Description of Artificial Sequence: Synthetic oligonucleotide
cgcguagucuuuuaccacg

SEQ ID NO: 196774 - RNA, 19 nt, Artificial Sequence
  Description of Artificial Sequence: Synthetic oligonucleotide
gggaaugcuguauccccag

SEQ ID NO: 196775 - RNA, 19 nt, Artificial Sequence
  Description of Artificial Sequence: Synthetic oligonucleotide
auagcgugcguaaucggaa

SEQ ID NO: 196776 - RNA, 19 nt, Artificial Sequence
  Description of Artificial Sequence: Synthetic oligonucleotide
ccccauaacuauucaacug

SEQ ID NO: 196777 - RNA, 19 nt, Artificial Sequence
  Description of Artificial Sequence: Synthetic oligonucleotide
ucgauggcgcgcaccgcgc

SEQ ID NO: 196778 - RNA, 19 nt, Artificial Sequence
  Description of Artificial Sequence: Synthetic oligonucleotide
gacucugauaaacggcggu

SEQ ID NO: 196779 - RNA, 19 nt, Artificial Sequence
  Description of Artificial Sequence: Synthetic oligonucleotide
auaggagcccgaauagcgu

SEQ ID NO: 196780 - RNA, 19 nt, Artificial Sequence
  Description of Artificial Sequence: Synthetic oligonucleotide
auggcccuacaugcggcgc

SEQ ID NO: 196781 - RNA, 19 nt, Artificial Sequence
  Description of Artificial Sequence: Synthetic oligonucleotide
uggugauaaccugggucug

SEQ ID NO: 196782 - RNA, 19 nt, Artificial Sequence
  Description of Artificial Sequence: Synthetic oligonucleotide
uuggggagauagggaauug

SEQ ID NO: 196783 - RNA, 19 nt, Artificial Sequence
  Description of Artificial Sequence: Synthetic oligonucleotide
ugguugagaguuccacguu

SEQ ID NO: 196784 - RNA, 19 nt, Artificial Sequence
  Description of Artificial Sequence: Synthetic oligonucleotide
aaacggcgguaaucagaga

SEQ ID NO: 196785 - RNA, 19 nt, Artificial Sequence
  Description of Artificial Sequence: Synthetic oligonucleotide
uggcccuacaugcggcgcu

SEQ ID NO: 196786 - RNA, 19 nt, Artificial Sequence
  Description of Artificial Sequence: Synthetic oligonucleotide
cagcugaccccuguauggg

SEQ ID NO: 196787 - RNA, 19 nt, Artificial Sequence
  Description of Artificial Sequence: Synthetic oligonucleotide
augguuaaaguaacccuuu

SEQ ID NO: 196788 - RNA, 19 nt, Artificial Sequence
  Description of Artificial Sequence: Synthetic oligonucleotide
acaaacgcguagucuuuua

SEQ ID NO: 196789 - RNA, 19 nt, Artificial Sequence
  Description of Artificial Sequence: Synthetic oligonucleotide
gugcguaaucggaaugggc

SEQ ID NO: 196790 - RNA, 19 nt, Artificial Sequence
  Description of Artificial Sequence: Synthetic oligonucleotide
gggcccuauaggcagcucc

SEQ ID NO: 196791 - RNA, 19 nt, Artificial Sequence
  Description of Artificial Sequence: Synthetic oligonucleotide
uagcgugcguaaucggaau

SEQ ID NO: 196792 - RNA, 19 nt, Artificial Sequence
  Description of Artificial Sequence: Synthetic oligonucleotide
gucggcgagcggcggaacg

SEQ ID NO: 196793 - RNA, 19 nt, Artificial Sequence
  Description of Artificial Sequence: Synthetic oligonucleotide
uguuggcguuggcaacggc

SEQ ID NO: 196794 - RNA, 19 nt, Artificial Sequence
  Description of Artificial Sequence: Synthetic oligonucleotide
cauaacuauucaacugggu

SEQ ID NO: 196795 - RNA, 19 nt, Artificial Sequence
  Description of Artificial Sequence: Synthetic oligonucleotide
gaccgugccguagggcgcg

SEQ ID NO: 196796 - RNA, 19 nt, Artificial Sequence
  Description of Artificial Sequence: Synthetic oligonucleotide
gcgugcguaaucggaaugg

SEQ ID NO: 196797 - RNA, 19 nt, Artificial Sequence
  Description of Artificial Sequence: Synthetic oligonucleotide
aggcggguacgcucauagg

SEQ ID NO: 196798 - RNA, 19 nt, Artificial Sequence
  Description of Artificial Sequence: Synthetic oligonucleotide
acucugauaaacggcggua

SEQ ID NO: 196799 - RNA, 19 nt, Artificial Sequence
  Description of Artificial Sequence: Synthetic oligonucleotide
auaagcuagugaggaggcu

SEQ ID NO: 196800 - RNA, 19 nt, Artificial Sequence
  Description of Artificial Sequence: Synthetic oligonucleotide
gagccccauaacuauucaa

SEQ ID NO: 196801 - RNA, 19 nt, Artificial Sequence
  Description of Artificial Sequence: Synthetic oligonucleotide
ggcacuguaagaggcugag

SEQ ID NO: 196802 - RNA, 19 nt, Artificial Sequence
  Description of Artificial Sequence: Synthetic oligonucleotide
ccccauaggaguuaagcga

SEQ ID NO: 196803 - RNA, 19 nt, Artificial Sequence
  Description of Artificial Sequence: Synthetic oligonucleotide
cacgaaccccauaggaaga

SEQ ID NO: 196804 - RNA, 19 nt, Artificial Sequence
  Description of Artificial Sequence: Synthetic oligonucleotide
ccauagguggaaagggcug

SEQ ID NO: 196805 - RNA, 19 nt, Artificial Sequence
  Description of Artificial Sequence: Synthetic oligonucleotide
cgccauaagaggauggcug

SEQ ID NO: 196806 - RNA, 19 nt, Artificial Sequence
  Description of Artificial Sequence: Synthetic oligonucleotide
caugaccgugccguagggc

SEQ ID NO: 196807 - RNA, 19 nt, Artificial Sequence
  Description of Artificial Sequence: Synthetic oligonucleotide
gccccaucgacauugccca

SEQ ID NO: 196808 - RNA, 19 nt, Artificial Sequence
  Description of Artificial Sequence: Synthetic oligonucleotide
gaugcgcuugcccuucacu

SEQ ID NO: 196809 - RNA, 19 nt, Artificial Sequence
  Description of Artificial Sequence: Synthetic oligonucleotide
gggaaaacugcagaucuaa

SEQ ID NO: 196810 - RNA, 19 nt, Artificial Sequence
  Description of Artificial Sequence: Synthetic oligonucleotide
caacagucucuacggagga

SEQ ID NO: 196811 - RNA, 19 nt, Artificial Sequence
  Description of Artificial Sequence: Synthetic oligonucleotide
agggaaugcuguaucccca

SEQ ID NO: 196812 - RNA, 19 nt, Artificial Sequence
  Description of Artificial Sequence: Synthetic oligonucleotide
ugagccccauaggaguuaa

SEQ ID NO: 196813 - RNA, 19 nt, Artificial Sequence
  Description of Artificial Sequence: Synthetic oligonucleotide
gguacgcucauaggguggc

SEQ ID NO: 196814 - RNA, 19 nt, Artificial Sequence
  Description of Artificial Sequence: Synthetic oligonucleotide
uccuccggcgucguaucug

SEQ ID NO: 196815 - RNA, 19 nt, Artificial Sequence
  Description of Artificial Sequence: Synthetic oligonucleotide
cucgcgcaugugcacgaag

SEQ ID NO: 196816 - RNA, 19 nt, Artificial Sequence
  Description of Artificial Sequence: Synthetic oligonucleotide
ugggccgucagaggagcca

SEQ ID NO: 196817 - RNA, 19 nt, Artificial Sequence
  Description of Artificial Sequence: Synthetic oligonucleotide
gucguaucugccccaucga

SEQ ID NO: 196818 - RNA, 19 nt, Artificial Sequence
  Description of Artificial Sequence: Synthetic oligonucleotide
caugugcacgaaggcaaac

SEQ ID NO: 196819 - RNA, 19 nt, Artificial Sequence
  Description of Artificial Sequence: Synthetic oligonucleotide
ccagagugcaucugagcug

SEQ ID NO: 196820 - RNA, 19 nt, Artificial Sequence
  Description of Artificial Sequence: Synthetic oligonucleotide
gugaacaaacgcguagucu

SEQ ID NO: 196821 - RNA, 19 nt, Artificial Sequence
  Description of Artificial Sequence: Synthetic oligonucleotide
accacgagcgcgcgaccug

SEQ ID NO: 196822 - RNA, 19 nt, Artificial Sequence
  Description of Artificial Sequence: Synthetic oligonucleotide
cucugauaaacggcgguaa

SEQ ID NO: 196823 - RNA, 19 nt, Artificial Sequence
  Description of Artificial Sequence: Synthetic oligonucleotide
accauaccuuuucgacaug

SEQ ID NO: 196824 - RNA, 19 nt, Artificial Sequence
  Description of Artificial Sequence: Synthetic oligonucleotide
ggaaugcuguauccccagc

SEQ ID NO: 196825 - RNA, 19 nt, Artificial Sequence
  Description of Artificial Sequence: Synthetic oligonucleotide
cacccuacccuaccucuuc

SEQ ID NO: 196826 - RNA, 19 nt, Artificial Sequence
  Description of Artificial Sequence: Synthetic oligonucleotide
guuaagcgaagaagcugca

SEQ ID NO: 196827 - RNA, 19 nt, Artificial Sequence
  Description of Artificial Sequence: Synthetic oligonucleotide
agcucggcuaaacgccggu

SEQ ID NO: 196828 - RNA, 19 nt, Artificial Sequence
  Description of Artificial Sequence: Synthetic oligonucleotide
gcaggcgacgguaauccag

SEQ ID NO: 196829 - RNA, 19 nt, Artificial Sequence
  Description of Artificial Sequence: Synthetic oligonucleotide
gacgggcuugcccaucaaa

SEQ ID NO: 196830 - RNA, 19 nt, Artificial Sequence
  Description of Artificial Sequence: Synthetic oligonucleotide
ccaccauaugggccaagcg

SEQ ID NO: 196831 - RNA, 19 nt, Artificial Sequence
  Description of Artificial Sequence: Synthetic oligonucleotide
ccccauagguggaaagggc

SEQ ID NO: 196832 - RNA, 19 nt, Artificial Sequence
  Description of Artificial Sequence: Synthetic oligonucleotide
ucggcgagcggcggaacga

SEQ ID NO: 196833 - RNA, 19 nt, Artificial Sequence
  Description of Artificial Sequence: Synthetic oligonucleotide
cuuugucggcgagcggcgg

SEQ ID NO: 196834 - RNA, 19 nt, Artificial Sequence
  Description of Artificial Sequence: Synthetic oligonucleotide
gcugcggucgcgaccaaag

SEQ ID NO: 196835 - RNA, 19 nt, Artificial Sequence
  Description of Artificial Sequence: Synthetic oligonucleotide
ugacggcgcagcucaugac

SEQ ID NO: 196836 - RNA, 19 nt, Artificial Sequence
  Description of Artificial Sequence: Synthetic oligonucleotide
gcgaccaaagaauggaggu

SEQ ID NO: 196837 - RNA, 19 nt, Artificial Sequence
  Description of Artificial Sequence: Synthetic oligonucleotide
ccuguguauuauaggaaga

SEQ ID NO: 196838 - RNA, 19 nt, Artificial Sequence
  Description of Artificial Sequence: Synthetic oligonucleotide
cuacccuaccucuuccucu

SEQ ID NO: 196839 - RNA, 19 nt, Artificial Sequence
  Description of Artificial Sequence: Synthetic oligonucleotide
uuaccacgucacacucuau

SEQ ID NO: 196840 - RNA, 19 nt, Artificial Sequence
  Description of Artificial Sequence: Synthetic oligonucleotide
ccgaauagcgugcguaauc

SEQ ID NO: 196841 - RNA, 19 nt, Artificial Sequence
  Description of Artificial Sequence: Synthetic oligonucleotide
ggcuggccacgguaggagg

SEQ ID NO: 196842 - RNA, 19 nt, Artificial Sequence
  Description of Artificial Sequence: Synthetic oligonucleotide
agcccgaauagcgugcgua

SEQ ID NO: 196843 - RNA, 19 nt, Artificial Sequence
  Description of Artificial Sequence: Synthetic oligonucleotide
cuauucaacuggguuugaa

SEQ ID NO: 196844 - RNA, 19 nt, Artificial Sequence
  Description of Artificial Sequence: Synthetic oligonucleotide
acuauucaacuggguuuga

SEQ ID NO: 196845 - RNA, 19 nt, Artificial Sequence
  Description of Artificial Sequence: Synthetic oligonucleotide
acgaaagcugcgacucuga

SEQ ID NO: 196846 - RNA, 19 nt, Artificial Sequence
  Description of Artificial Sequence: Synthetic oligonucleotide
accaccuacuuggggagau

SEQ ID NO: 196847 - RNA, 19 nt, Artificial Sequence
  Description of Artificial Sequence: Synthetic oligonucleotide
ccuugggcgcgacaucucc

SEQ ID NO: 196848 - RNA, 19 nt, Artificial Sequence
  Description of Artificial Sequence: Synthetic oligonucleotide
ggagcccgaauagcgugcg

SEQ ID NO: 196849 - RNA, 19 nt, Artificial Sequence
  Description of Artificial Sequence: Synthetic oligonucleotide
guacgcucauaggguggcg

SEQ ID NO: 196850 - RNA, 19 nt, Artificial Sequence
  Description of Artificial Sequence: Synthetic oligonucleotide
agagugcaucugagcugcc

SEQ ID NO: 196851 - RNA, 19 nt, Artificial Sequence
  Description of Artificial Sequence: Synthetic oligonucleotide
gggaucgucguagcuggcc

SEQ ID NO: 196852 - RNA, 19 nt, Artificial Sequence
  Description of Artificial Sequence: Synthetic oligonucleotide
ggaguuaagcgaagaagcu

SEQ ID NO: 196853 - RNA, 19 nt, Artificial Sequence
  Description of Artificial Sequence: Synthetic oligonucleotide
cugacgggcuugcccauca

SEQ ID NO: 196854 - RNA, 19 nt, Artificial Sequence
  Description of Artificial Sequence: Synthetic oligonucleotide
ggcccuauaggcagcuccc

SEQ ID NO: 196855 - RNA, 19 nt, Artificial Sequence
  Description of Artificial Sequence: Synthetic oligonucleotide
ccuccggcgucguaucugc

SEQ ID NO: 196856 - RNA, 19 nt, Artificial Sequence
  Description of Artificial Sequence: Synthetic oligonucleotide
agggaucgucguagcuggc

SEQ ID NO: 196857 - RNA, 19 nt, Artificial Sequence
  Description of Artificial Sequence: Synthetic oligonucleotide
gaccuggacgcagcucgug

SEQ ID NO: 196858 - RNA, 19 nt, Artificial Sequence
  Description of Artificial Sequence: Synthetic oligonucleotide
cccuauaggcagcucccag

SEQ ID NO: 196859 - RNA, 19 nt, Artificial Sequence
  Description of Artificial Sequence: Synthetic oligonucleotide
gcggaacgaaagcugcgac

SEQ ID NO: 196860 - RNA, 19 nt, Artificial Sequence
  Description of Artificial Sequence: Synthetic oligonucleotide
ggacuuugucggcgagcgg

SEQ ID NO: 196861 - RNA, 19 nt, Artificial Sequence
  Description of Artificial Sequence: Synthetic oligonucleotide
ucgaugcuugagccccaua

SEQ ID NO: 196862 - RNA, 19 nt, Artificial Sequence
  Description of Artificial Sequence: Synthetic oligonucleotide
gcuaaacgccggucggaac

SEQ ID NO: 196863 - RNA, 19 nt, Artificial Sequence
  Description of Artificial Sequence: Synthetic oligonucleotide
ugacgggcuugcccaucaa

SEQ ID NO: 196864 - RNA, 19 nt, Artificial Sequence
  Description of Artificial Sequence: Synthetic oligonucleotide
cgacucugauaaacggcgg

SEQ ID NO: 196865 - RNA, 19 nt, Artificial Sequence
  Description of Artificial Sequence: Synthetic oligonucleotide
gugccguagggcgcgaaga

SEQ ID NO: 196866 - RNA, 19 nt, Artificial Sequence
  Description of Artificial Sequence: Synthetic oligonucleotide
gcggcggaacgaaagcugc

SEQ ID NO: 196867 - RNA, 19 nt, Artificial Sequence
  Description of Artificial Sequence: Synthetic oligonucleotide
agggaaaacugcagaucua

SEQ ID NO: 196868 - RNA, 19 nt, Artificial Sequence
  Description of Artificial Sequence: Synthetic oligonucleotide
gaacuagggcuagccagcu

SEQ ID NO: 196869 - RNA, 19 nt, Artificial Sequence
  Description of Artificial Sequence: Synthetic oligonucleotide
ggcgcgacaucuccaccac

SEQ ID NO: 196870 - RNA, 19 nt, Artificial Sequence
  Description of Artificial Sequence: Synthetic oligonucleotide
agcugcccgcagguaauca

SEQ ID NO: 196871 - RNA, 19 nt, Artificial Sequence
  Description of Artificial Sequence: Synthetic oligonucleotide
ggcggaacgaaagcugcga

SEQ ID NO: 196872 - RNA, 19 nt, Artificial Sequence
  Description of Artificial Sequence: Synthetic oligonucleotide
gaacaaacgcguagucuuu

SEQ ID NO: 196873 - RNA, 19 nt, Artificial Sequence
  Description of Artificial Sequence: Synthetic oligonucleotide
cuccggcgucguaucugcc

SEQ ID NO: 196874 - RNA, 19 nt, Artificial Sequence
  Description of Artificial Sequence: Synthetic oligonucleotide
cgucacacucuaugacgcg

SEQ ID NO: 196875 - RNA, 19 nt, Artificial Sequence
  Description of Artificial Sequence: Synthetic oligonucleotide
gugcacgaaggcaaacugu

SEQ ID NO: 196876 - RNA, 19 nt, Artificial Sequence
  Description of Artificial Sequence: Synthetic oligonucleotide
cgugcguaaucggaauggg

SEQ ID NO: 196877 - RNA, 19 nt, Artificial Sequence
  Description of Artificial Sequence: Synthetic oligonucleotide
ggcgacgguaauccagcga

SEQ ID NO: 196878 - RNA, 19 nt, Artificial Sequence
  Description of Artificial Sequence: Synthetic oligonucleotide
aucagagagcucggcuaaa

SEQ ID NO: 196879 - RNA, 19 nt, Artificial Sequence
  Description of Artificial Sequence: Synthetic oligonucleotide
acaacugguugagccccau

SEQ ID NO: 196880 - RNA, 19 nt, Artificial Sequence
  Description of Artificial Sequence: Synthetic oligonucleotide
gcguccgcggcgcucgaag

SEQ ID NO: 196881 - RNA, 19 nt, Artificial Sequence
  Description of Artificial Sequence: Synthetic oligonucleotide
cgguaaucagagagcucgg

SEQ ID NO: 196882 - RNA, 19 nt, Artificial Sequence
  Description of Artificial Sequence: Synthetic oligonucleotide
cgaugcuugagccccauaa

SEQ ID NO: 196883 - RNA, 19 nt, Artificial Sequence
  Description of Artificial Sequence: Synthetic oligonucleotide
cgagcgcgcgaccuggacg

SEQ ID NO: 196884 - RNA, 19 nt, Artificial Sequence
  Description of Artificial Sequence: Synthetic oligonucleotide
caucgaugcuugagcccca

SEQ ID NO: 196885 - RNA, 19 nt, Artificial Sequence
  Description of Artificial Sequence: Synthetic oligonucleotide
gucccaucguaggcacugc

SEQ ID NO: 196886 - RNA, 19 nt, Artificial Sequence
  Description of Artificial Sequence: Synthetic oligonucleotide
aaacgccggucggaaccau

SEQ ID NO: 196887 - RNA, 19 nt, Artificial Sequence
  Description of Artificial Sequence: Synthetic oligonucleotide
cccgguagguggcuggcug

SEQ ID NO: 196888 - RNA, 19 nt, Artificial Sequence
  Description of Artificial Sequence: Synthetic oligonucleotide
gcugggccgucagaggagc

SEQ ID NO: 196889 - RNA, 19 nt, Artificial Sequence
  Description of Artificial Sequence: Synthetic oligonucleotide
gcgauggcggcuuuggcau

SEQ ID NO: 196890 - RNA, 19 nt, Artificial Sequence
  Description of Artificial Sequence: Synthetic oligonucleotide
ccauaaguaucgcgcagaa

SEQ ID NO: 196891 - RNA, 19 nt, Artificial Sequence
  Description of Artificial Sequence: Synthetic oligonucleotide
cgacacauugcccacgaaa

SEQ ID NO: 196892 - RNA, 19 nt, Artificial Sequence
  Description of Artificial Sequence: Synthetic oligonucleotide
aacgccggucggaaccaua

SEQ ID NO: 196893 - RNA, 19 nt, Artificial Sequence
  Description of Artificial Sequence: Synthetic oligonucleotide
cggguacgcucauagggug

SEQ ID NO: 196894 - RNA, 19 nt, Artificial Sequence
  Description of Artificial Sequence: Synthetic oligonucleotide
gcgcgacaucuccaccacg

SEQ ID NO: 196895 - RNA, 19 nt, Artificial Sequence
  Description of Artificial Sequence: Synthetic oligonucleotide
cugcggucgcgaccaaaga

SEQ ID NO: 196896 - RNA, 19 nt, Artificial Sequence
  Description of Artificial Sequence: Synthetic oligonucleotide
cgacgguaauccagcgagg

SEQ ID NO: 196897 - RNA, 19 nt, Artificial Sequence
  Description of Artificial Sequence: Synthetic oligonucleotide
cgcgcaugugcacgaaggc

SEQ ID NO: 196898 - RNA, 19 nt, Artificial Sequence
  Description of Artificial Sequence: Synthetic oligonucleotide
gcccgaauagcgugcguaa

SEQ ID NO: 196899 - RNA, 19 nt, Artificial Sequence
  Description of Artificial Sequence: Synthetic oligonucleotide
ggcgcucgaagaggcugcg

SEQ ID NO: 196900 - RNA, 19 nt, Artificial Sequence
  Description of Artificial Sequence: Synthetic oligonucleotide
ggcuaaacgccggucggaa

SEQ ID NO: 196901 - RNA, 19 nt, Artificial Sequence
  Description of Artificial Sequence: Synthetic oligonucleotide
ccacgagcgcgcgaccugg

SEQ ID NO: 196902 - RNA, 19 nt, Artificial Sequence
  Description of Artificial Sequence: Synthetic oligonucleotide
augacgcguccgcggcgcu

SEQ ID NO: 196903 - RNA, 19 nt, Artificial Sequence
  Description of Artificial Sequence: Synthetic oligonucleotide
cgacaccgaggguugggcc

SEQ ID NO: 196904 - RNA, 19 nt, Artificial Sequence
  Description of Artificial Sequence: Synthetic oligonucleotide
ccaucgggagagguaugag

SEQ ID NO: 196905 - RNA, 19 nt, Artificial Sequence
  Description of Artificial Sequence: Synthetic oligonucleotide
gauagggaauugggacuau

SEQ ID NO: 196906 - RNA, 19 nt, Artificial Sequence
  Description of Artificial Sequence: Synthetic oligonucleotide
cguaaucggaaugggcauc

SEQ ID NO: 196907 - RNA, 19 nt, Artificial Sequence
  Description of Artificial Sequence: Synthetic oligonucleotide
gcguaaucggaaugggcau

SEQ ID NO: 196908 - RNA, 19 nt, Artificial Sequence
  Description of Artificial Sequence: Synthetic oligonucleotide
ugacgcguccgcggcgcuc

SEQ ID NO: 196909 - RNA, 19 nt, Artificial Sequence
  Description of Artificial Sequence: Synthetic oligonucleotide
cggaaccauaccuuuucga

SEQ ID NO: 196910 - RNA, 19 nt, Artificial Sequence
  Description of Artificial Sequence: Synthetic oligonucleotide
gggccgucagaggagccac

SEQ ID NO: 196911 - RNA, 19 nt, Artificial Sequence
  Description of Artificial Sequence: Synthetic oligonucleotide
cggcggaacgaaagcugcg

SEQ ID NO: 196912 - RNA, 19 nt, Artificial Sequence
  Description of Artificial Sequence: Synthetic oligonucleotide
gcuccuccggcgucguauc

SEQ ID NO: 196913 - RNA, 19 nt, Artificial Sequence
  Description of Artificial Sequence: Synthetic oligonucleotide
cugcccgcagguaaucauu

SEQ ID NO: 196914 - RNA, 19 nt, Artificial Sequence
  Description of Artificial Sequence: Synthetic oligonucleotide
ggcccuacaugcggcgcug

SEQ ID NO: 196915 - RNA, 19 nt, Artificial Sequence
  Description of Artificial Sequence: Synthetic oligonucleotide
ggcaggcgacgguaaucca

SEQ ID NO: 196916 - RNA, 19 nt, Artificial Sequence
  Description of Artificial Sequence: Synthetic oligonucleotide
ggcgguaaucagagagcuc

SEQ ID NO: 196917 - RNA, 19 nt, Artificial Sequence
  Description of Artificial Sequence: Synthetic oligonucleotide
ugggcccuauaggcagcuc

SEQ ID NO: 196918 - RNA, 19 nt, Artificial Sequence
  Description of Artificial Sequence: Synthetic oligonucleotide
gcggucgcgaccaaagaau

SEQ ID NO: 196919 - RNA, 19 nt, Artificial Sequence
  Description of Artificial Sequence: Synthetic oligonucleotide
cgugccguagggcgcgaag

SEQ ID NO: 196920 - RNA, 19 nt, Artificial Sequence
  Description of Artificial Sequence: Synthetic oligonucleotide
gcgccagcguucucgcgca

SEQ ID NO: 196921 - RNA, 19 nt, Artificial Sequence
  Description of Artificial Sequence: Synthetic oligonucleotide
gcggguacgcucauagggu

SEQ ID NO: 196922 - RNA, 19 nt, Artificial Sequence
  Description of Artificial Sequence: Synthetic oligonucleotide
ggccuugggcgcgacaucu

SEQ ID NO: 196923 - RNA, 19 nt, Artificial Sequence
  Description of Artificial Sequence: Synthetic oligonucleotide
cauugggguaguggcuugu

SEQ ID NO: 196924 - RNA, 19 nt, Artificial Sequence
  Description of Artificial Sequence: Synthetic oligonucleotide
gcugacgacugagugcggu

SEQ ID NO: 196925 - RNA, 19 nt, Artificial Sequence
  Description of Artificial Sequence: Synthetic oligonucleotide
gcgcgauggcggcuuuggc

SEQ ID NO: 196926 - RNA, 19 nt, Artificial Sequence
  Description of Artificial Sequence: Synthetic oligonucleotide
cacgagcgcgcgaccugga

SEQ ID NO: 196927 - RNA, 19 nt, Artificial Sequence
  Description of Artificial Sequence: Synthetic oligonucleotide
caucgacauugcccacaaa

SEQ ID NO: 196928 - RNA, 19 nt, Artificial Sequence
  Description of Artificial Sequence: Synthetic oligonucleotide
gagcccgaauagcgugcgu

SEQ ID NO: 196929 - RNA, 19 nt, Artificial Sequence
  Description of Artificial Sequence: Synthetic oligonucleotide
gcccuacaugcggcgcugg

SEQ ID NO: 196930 - RNA, 19 nt, Artificial Sequence
  Description of Artificial Sequence: Synthetic oligonucleotide
gcucggcuaaacgccgguc

SEQ ID NO: 196931 - RNA, 19 nt, Artificial Sequence
  Description of Artificial Sequence: Synthetic oligonucleotide
ggcccgguagguggcuggc

SEQ ID NO: 196932 - RNA, 19 nt, Artificial Sequence
  Description of Artificial Sequence: Synthetic oligonucleotide
gccauugggguaguggcuu

SEQ ID NO: 196933 - RNA, 19 nt, Artificial Sequence
  Description of Artificial Sequence: Synthetic oligonucleotide
gccgccguagccgccuuuc

SEQ ID NO: 196934 - RNA, 19 nt, Artificial Sequence
  Description of Artificial Sequence: Synthetic oligonucleotide
gcccuauaggcagcuccca

SEQ ID NO: 196935 - RNA, 19 nt, Artificial Sequence
  Description of Artificial Sequence: Synthetic oligonucleotide
gcgccauaagaggauggcu

SEQ ID NO: 196936 - RNA, 19 nt, Artificial Sequence
  Description of Artificial Sequence: Synthetic oligonucleotide
caccacgagcgcgcgaccu

SEQ ID NO: 196937 - RNA, 19 nt, Artificial Sequence
  Description of Artificial Sequence: Synthetic oligonucleotide
ccuacaugcggcgcuggua

SEQ ID NO: 196938 - RNA, 19 nt, Artificial Sequence
  Description of Artificial Sequence: Synthetic oligonucleotide
cggaacgaaagcugcgacu

SEQ ID NO: 196939 - RNA, 19 nt, Artificial Sequence
  Description of Artificial Sequence: Synthetic oligonucleotide
ggcuagccagcugaccccu

SEQ ID NO: 196940 - RNA, 19 nt, Artificial Sequence
  Description of Artificial Sequence: Synthetic oligonucleotide
gcgcgcgaccuggacgcag

SEQ ID NO: 196941 - RNA, 19 nt, Artificial Sequence
  Description of Artificial Sequence: Synthetic oligonucleotide
agcgcgcgaccuggacgca

SEQ ID NO: 196942 - RNA, 19 nt, Artificial Sequence
  Description of Artificial Sequence: Synthetic oligonucleotide
ccccaucgacauugcccac

SEQ ID NO: 196943 - RNA, 19 nt, Artificial Sequence
  Description of Artificial Sequence: Synthetic oligonucleotide
cugggcccuauaggcagcu

SEQ ID NO: 196944 - RNA, 19 nt, Artificial Sequence
  Description of Artificial Sequence: Synthetic oligonucleotide
ggucggaaccauaccuuuu

SEQ ID NO: 196945 - RNA, 19 nt, Artificial Sequence
  Description of Artificial Sequence: Synthetic oligonucleotide
gcagggauuuggacacaua

SEQ ID NO: 196946 - RNA, 19 nt, Artificial Sequence
  Description of Artificial Sequence: Synthetic oligonucleotide
gcgucguaucugccccauc

SEQ ID NO: 196947 - RNA, 19 nt, Artificial Sequence
  Description of Artificial Sequence: Synthetic oligonucleotide
gcgcucgaagaggcugcgc

SEQ ID NO: 196948 - RNA, 19 nt, Artificial Sequence
  Description of Artificial Sequence: Synthetic oligonucleotide
acgcguccgcggcgcucga

SEQ ID NO: 196949 - RNA, 19 nt, Artificial Sequence
  Description of Artificial Sequence: Synthetic oligonucleotide
ccuuuucgacauggcgaca

SEQ ID NO: 196950 - RNA, 19 nt, Artificial Sequence
  Description of Artificial Sequence: Synthetic oligonucleotide
gccaagcgaggaagcugca

SEQ ID NO: 196951 - RNA, 19 nt, Artificial Sequence
  Description of Artificial Sequence: Synthetic oligonucleotide
ccggucggaaccauaccuu

SEQ ID NO: 196952 - RNA, 19 nt, Artificial Sequence
  Description of Artificial Sequence: Synthetic oligonucleotide
cgauggcggcuuuggcauc

SEQ ID NO: 196953 - RNA, 19 nt, Artificial Sequence
  Description of Artificial Sequence: Synthetic oligonucleotide
gcacgaaggcaaacuguuu

SEQ ID NO: 196954 - RNA, 19 nt, Artificial Sequence
  Description of Artificial Sequence: Synthetic oligonucleotide
gcccgcagguaaucauuau

SEQ ID NO: 196955 - RNA, 19 nt, Artificial Sequence
  Description of Artificial Sequence: Synthetic oligonucleotide
ggcugcggucgcgaccaaa

SEQ ID NO: 196956 - RNA, 19 nt, Artificial Sequence
  Description of Artificial Sequence: Synthetic oligonucleotide
gcacgguaagaggcugccu

SEQ ID NO: 196957 - RNA, 19 nt, Artificial Sequence
  Description of Artificial Sequence: Synthetic oligonucleotide
ggcgucguaucugccccau

SEQ ID NO: 196958 - RNA, 19 nt, Artificial Sequence
  Description of Artificial Sequence: Synthetic oligonucleotide
ggcugacgggcuugcccau

SEQ ID NO: 196959 - RNA, 19 nt, Artificial Sequence
  Description of Artificial Sequence: Synthetic oligonucleotide
cggcuaaacgccggucgga

SEQ ID NO: 196960 - RNA, 19 nt, Artificial Sequence
  Description of Artificial Sequence: Synthetic oligonucleotide
cccuacaugcggcgcuggu

SEQ ID NO: 196961 - RNA, 19 nt, Artificial Sequence
  Description of Artificial Sequence: Synthetic oligonucleotide
cccgaauagcgugcguaau

SEQ ID NO: 196962 - RNA, 19 nt, Artificial Sequence
  Description of Artificial Sequence: Synthetic oligonucleotide
cgacauggcgacagcuuuu

SEQ ID NO: 196963 - RNA, 19 nt, Artificial Sequence
  Description of Artificial Sequence: Synthetic oligonucleotide
ccaccuacuuggggagaua

SEQ ID NO: 196964 - RNA, 19 nt, Artificial Sequence
  Description of Artificial Sequence: Synthetic oligonucleotide
gcaccgcgccagcguucuc

SEQ ID NO: 196965 - RNA, 19 nt, Artificial Sequence
  Description of Artificial Sequence: Synthetic oligonucleotide
cggcgucguaucugcccca

SEQ ID NO: 196966 - RNA, 19 nt, Artificial Sequence
  Description of Artificial Sequence: Synthetic oligonucleotide
cgaccuggacgcagcucgu

SEQ ID NO: 196967 - RNA, 19 nt, Artificial Sequence
  Description of Artificial Sequence: Synthetic oligonucleotide
gcugcgcgauggcggcuuu

SEQ ID NO: 196968 - RNA, 19 nt, Artificial Sequence
  Description of Artificial Sequence: Synthetic oligonucleotide
cgcaccgcgccagcguucu

SEQ ID NO: 196969 - RNA, 19 nt, Artificial Sequence
  Description of Artificial Sequence: Synthetic oligonucleotide
ccgugccguagggcgcgaa

SEQ ID NO: 196970 - RNA, 19 nt, Artificial Sequence
  Description of Artificial Sequence: Synthetic oligonucleotide
cgcguccgcggcgcucgaa

SEQ ID NO: 196971 - RNA, 19 nt, Artificial Sequence
  Description of Artificial Sequence: Synthetic oligonucleotide
cgccagcguucucgcgcau

SEQ ID NO: 196972 - RNA, 19 nt, Artificial Sequence
  Description of Artificial Sequence: Synthetic oligonucleotide
aaaucguaggccuggaagc

SEQ ID NO: 196973 - RNA, 19 nt, Artificial Sequence
  Description of Artificial Sequence: Synthetic oligonucleotide
agcucauagagccaaaagc

SEQ ID NO: 196974 - RNA, 19 nt, Artificial Sequence
  Description of Artificial Sequence: Synthetic oligonucleotide
agauagaccucucugaaag

SEQ ID NO: 196975 - RNA, 19 nt, Artificial Sequence
  Description of Artificial Sequence: Synthetic oligonucleotide
aagagaccagacgagaacc

SEQ ID NO: 196976 - RNA, 19 nt, Artificial Sequence
  Description of Artificial Sequence: Synthetic oligonucleotide
cuuagugccaacuccauag

SEQ ID NO: 196977 - RNA, 19 nt, Artificial Sequence
  Description of Artificial Sequence: Synthetic oligonucleotide
gaugcuuagugccaacucc

SEQ ID NO: 196978 - RNA, 19 nt, Artificial Sequence
  Description of Artificial Sequence: Synthetic oligonucleotide
gaguccaaagcgcagggcg

SEQ ID NO: 196979 - RNA, 19 nt, Artificial Sequence
  Description of Artificial Sequence: Synthetic oligonucleotide
gacgauggcauggagauag

SEQ ID NO: 196980 - RNA, 19 nt, Artificial Sequence
  Description of Artificial Sequence: Synthetic oligonucleotide
agggaaagagaccagacga

SEQ ID NO: 196981 - RNA, 19 nt, Artificial Sequence
  Description of Artificial Sequence: Synthetic oligonucleotide
uugggccaaccaaagaugg

SEQ ID NO: 196982 - RNA, 19 nt, Artificial Sequence
  Description of Artificial Sequence: Synthetic oligonucleotide
gguacgaccagucagcucc

SEQ ID NO: 196983 - RNA, 19 nt, Artificial Sequence
  Description of Artificial Sequence: Synthetic oligonucleotide
auagaccucucugaaaggc

SEQ ID NO: 196984 - RNA, 19 nt, Artificial Sequence
  Description of Artificial Sequence: Synthetic oligonucleotide
aaucguaggccuggaagcc

SEQ ID NO: 196985 - RNA, 19 nt, Artificial Sequence
  Description of Artificial Sequence: Synthetic oligonucleotide
ugacgaagggcaugaaugg

SEQ ID NO: 196986 - RNA, 19 nt, Artificial Sequence
  Description of Artificial Sequence: Synthetic oligonucleotide
aguaccgcccaucaggguc

SEQ ID NO: 196987 - RNA, 19 nt, Artificial Sequence
  Description of Artificial Sequence: Synthetic oligonucleotide
guuacagccgcacuggcag

SEQ ID NO: 196988 - RNA, 19 nt, Artificial Sequence
  Description of Artificial Sequence: Synthetic oligonucleotide
aucuucaccgcaccugugc

SEQ ID NO: 196989 - RNA, 19 nt, Artificial Sequence
  Description of Artificial Sequence: Synthetic oligonucleotide
guaucuggggucuuugggg

SEQ ID NO: 196990 - RNA, 19 nt, Artificial Sequence
  Description of Artificial Sequence: Synthetic oligonucleotide
uguugguggaccacugggg

SEQ ID NO: 196991 - RNA, 19 nt, Artificial Sequence
  Description of Artificial Sequence: Synthetic oligonucleotide
cuacugacaguuuaggguc

SEQ ID NO: 196992 - RNA, 19 nt, Artificial Sequence
  Description of Artificial Sequence: Synthetic oligonucleotide
auagucauucuggucaugg

SEQ ID NO: 196993 - RNA, 19 nt, Artificial Sequence
  Description of Artificial Sequence: Synthetic oligonucleotide
ucaacuggugguaaauccu

SEQ ID NO: 196994 - RNA, 19 nt, Artificial Sequence
  Description of Artificial Sequence: Synthetic oligonucleotide
uuguagucggcacgcaggg

SEQ ID NO: 196995 - RNA, 19 nt, Artificial Sequence
  Description of Artificial Sequence: Synthetic oligonucleotide
agagcgguugcaaaguggc

SEQ ID NO: 196996 - RNA, 19 nt, Artificial Sequence
  Description of Artificial Sequence: Synthetic oligonucleotide
uaacgaaagccucugucac

SEQ ID NO: 196997 - RNA, 19 nt, Artificial Sequence
  Description of Artificial Sequence: Synthetic oligonucleotide
gaugccgcggaacaguccc

SEQ ID NO: 196998 - RNA, 19 nt, Artificial Sequence
  Description of Artificial Sequence: Synthetic oligonucleotide
aucgucucaauccgagucg

SEQ ID NO: 196999 - RNA, 19 nt, Artificial Sequence
  Description of Artificial Sequence: Synthetic oligonucleotide
uuaggguccauggugaaac

SEQ ID NO: 197000 - RNA, 19 nt, Artificial Sequence
  Description of Artificial Sequence: Synthetic oligonucleotide
agcuacugacaguuuaggg

SEQ ID NO: 197001 - RNA, 19 nt, Artificial Sequence
  Description of Artificial Sequence: Synthetic oligonucleotide
augccaaguccgcugaugg

SEQ ID NO: 197002 - RNA, 19 nt, Artificial Sequence
  Description of Artificial Sequence: Synthetic oligonucleotide
aggcacuccaaguagacgu

SEQ ID NO: 197003 - RNA, 19 nt, Artificial Sequence
  Description of Artificial Sequence: Synthetic oligonucleotide
auggagccuaacgaaagcc

SEQ ID NO: 197004 - RNA, 19 nt, Artificial Sequence
  Description of Artificial Sequence: Synthetic oligonucleotide
uagagcgguugcaaagugg

SEQ ID NO: 197005 - RNA, 19 nt, Artificial Sequence
  Description of Artificial Sequence: Synthetic oligonucleotide
uggagauagaccucucuga

SEQ ID NO: 197006 - RNA, 19 nt, Artificial Sequence
  Description of Artificial Sequence: Synthetic oligonucleotide
gugacgaagggcaugaaug

SEQ ID NO: 197007 - RNA, 19 nt, Artificial Sequence
  Description of Artificial Sequence: Synthetic oligonucleotide
ugggcauccccaagaaagg

SEQ ID NO: 197008 - RNA, 19 nt, Artificial Sequence
  Description of Artificial Sequence: Synthetic oligonucleotide
ucucaauccgagucguugc

SEQ ID NO: 197009 - RNA, 19 nt, Artificial Sequence
  Description of Artificial Sequence: Synthetic oligonucleotide
ugaucuucaccgcaccugu

SEQ ID NO: 197010 - RNA, 19 nt, Artificial Sequence
  Description of Artificial Sequence: Synthetic oligonucleotide
caaggagacuccauggaug

SEQ ID NO: 197011 - RNA, 19 nt, Artificial Sequence
  Description of Artificial Sequence: Synthetic oligonucleotide
agcgguugcaaaguggcac

SEQ ID NO: 197012 - RNA, 19 nt, Artificial Sequence
  Description of Artificial Sequence: Synthetic oligonucleotide
cuucccaaggccacgcagg

SEQ ID NO: 197013 - RNA, 19 nt, Artificial Sequence
  Description of Artificial Sequence: Synthetic oligonucleotide
aguagccggaggcagcacg

SEQ ID NO: 197014 - RNA, 19 nt, Artificial Sequence
  Description of Artificial Sequence: Synthetic oligonucleotide
acacuccaaacucccgugc

SEQ ID NO: 197015 - RNA, 19 nt, Artificial Sequence
  Description of Artificial Sequence: Synthetic oligonucleotide
acacgaggaccccaaacuc

SEQ ID NO: 197016 - RNA, 19 nt, Artificial Sequence
  Description of Artificial Sequence: Synthetic oligonucleotide
ccagguguccaauacaucc

SEQ ID NO: 197017 - RNA, 19 nt, Artificial Sequence
  Description of Artificial Sequence: Synthetic oligonucleotide
gaaacagucaggccugguc

SEQ ID NO: 197018 - RNA, 19 nt, Artificial Sequence
  Description of Artificial Sequence: Synthetic oligonucleotide
agcacggcgcuccugcagc

SEQ ID NO: 197019 - RNA, 19 nt, Artificial Sequence
  Description of Artificial Sequence: Synthetic oligonucleotide
uuagagcgguugcaaagug

SEQ ID NO: 197020 - RNA, 19 nt, Artificial Sequence
  Description of Artificial Sequence: Synthetic oligonucleotide
ucacugacggugacgaagu

SEQ ID NO: 197021 - RNA, 19 nt, Artificial Sequence
  Description of Artificial Sequence: Synthetic oligonucleotide
uuguaggcaaaggacacga

SEQ ID NO: 197022 - RNA, 19 nt, Artificial Sequence
  Description of Artificial Sequence: Synthetic oligonucleotide
guuguagucggcacgcagg

SEQ ID NO: 197023 - RNA, 19 nt, Artificial Sequence
  Description of Artificial Sequence: Synthetic oligonucleotide
cugcaaggagacuccaugg

SEQ ID NO: 197024 - RNA, 19 nt, Artificial Sequence
  Description of Artificial Sequence: Synthetic oligonucleotide
acguccuuagagcgguugc

SEQ ID NO: 197025 - RNA, 19 nt, Artificial Sequence
  Description of Artificial Sequence: Synthetic oligonucleotide
cuguugguggaccacuggg

SEQ ID NO: 197026 - RNA, 19 nt, Artificial Sequence
  Description of Artificial Sequence: Synthetic oligonucleotide
aacgaaagccucugucaca

SEQ ID NO: 197027 - RNA, 19 nt, Artificial Sequence
  Description of Artificial Sequence: Synthetic oligonucleotide
aacuccauagcagcuucag

SEQ ID NO: 197028 - RNA, 19 nt, Artificial Sequence
  Description of Artificial Sequence: Synthetic oligonucleotide
ugggcgucacggacgaugg

SEQ ID NO: 197029 - RNA, 19 nt, Artificial Sequence
  Description of Artificial Sequence: Synthetic oligonucleotide
uggugaaacaggcucgguc

SEQ ID NO: 197030 - RNA, 19 nt, Artificial Sequence
  Description of Artificial Sequence: Synthetic oligonucleotide
uugccgaguagccggaggc

SEQ ID NO: 197031 - RNA, 19 nt, Artificial Sequence
  Description of Artificial Sequence: Synthetic oligonucleotide
ugccaaguuucuucaacug

SEQ ID NO: 197032 - RNA, 19 nt, Artificial Sequence
  Description of Artificial Sequence: Synthetic oligonucleotide
gaccaguugaccaggcggg

SEQ ID NO: 197033 - RNA, 19 nt, Artificial Sequence
  Description of Artificial Sequence: Synthetic oligonucleotide
ugacugauugggccaacca

SEQ ID NO: 197034 - RNA, 19 nt, Artificial Sequence
  Description of Artificial Sequence: Synthetic oligonucleotide
caucgucucaauccgaguc

SEQ ID NO: 197035 - RNA, 19 nt, Artificial Sequence
  Description of Artificial Sequence: Synthetic oligonucleotide
ugagccucacuucgccugg

SEQ ID NO: 197036 - RNA, 19 nt, Artificial Sequence
  Description of Artificial Sequence: Synthetic oligonucleotide
gauugggccaaccaaagau

SEQ ID NO: 197037 - RNA, 19 nt, Artificial Sequence
  Description of Artificial Sequence: Synthetic oligonucleotide
aagguggcggcacguugac

SEQ ID NO: 197038 - RNA, 19 nt, Artificial Sequence
  Description of Artificial Sequence: Synthetic oligonucleotide
cucgagugaugcuuagugc

SEQ ID NO: 197039 - RNA, 19 nt, Artificial Sequence
  Description of Artificial Sequence: Synthetic oligonucleotide
ugaugcuuagugccaacuc

SEQ ID NO: 197040 - RNA, 19 nt, Artificial Sequence
  Description of Artificial Sequence: Synthetic oligonucleotide
uagaccucucugaaaggca

SEQ ID NO: 197041 - RNA, 19 nt, Artificial Sequence
  Description of Artificial Sequence: Synthetic oligonucleotide
cugauugggccaaccaaag

SEQ ID NO: 197042 - RNA, 19 nt, Artificial Sequence
  Description of Artificial Sequence: Synthetic oligonucleotide
aggauacggaggucgcccc

SEQ ID NO: 197043 - RNA, 19 nt, Artificial Sequence
  Description of Artificial Sequence: Synthetic oligonucleotide
cacggccucagucaggcgg

SEQ ID NO: 197044 - RNA, 19 nt, Artificial Sequence
  Description of Artificial Sequence: Synthetic oligonucleotide
ugugacgaagggcaugaau

SEQ ID NO: 197045 - RNA, 19 nt, Artificial Sequence
  Description of Artificial Sequence: Synthetic oligonucleotide
gaaagguggcggcacguug

SEQ ID NO: 197046 - RNA, 19 nt, Artificial Sequence
  Description of Artificial Sequence: Synthetic oligonucleotide
gucacugacggugacgaag

SEQ ID NO: 197047 - RNA, 19 nt, Artificial Sequence
  Description of Artificial Sequence: Synthetic oligonucleotide
aaaccugggcauccccaag

SEQ ID NO: 197048 - RNA, 19 nt, Artificial Sequence
  Description of Artificial Sequence: Synthetic oligonucleotide
caggguacgaccagucagc

SEQ ID NO: 197049 - RNA, 19 nt, Artificial Sequence
  Description of Artificial Sequence: Synthetic oligonucleotide
gccuguuaguuucaggccg

SEQ ID NO: 197050 - RNA, 19 nt, Artificial Sequence
  Description of Artificial Sequence: Synthetic oligonucleotide
acacacuaaggucuucuga

SEQ ID NO: 197051 - RNA, 19 nt, Artificial Sequence
  Description of Artificial Sequence: Synthetic oligonucleotide
gugguaaauccugucaccc

SEQ ID NO: 197052 - RNA, 19 nt, Artificial Sequence
  Description of Artificial Sequence: Synthetic oligonucleotide
gaugucucgacccugggau

SEQ ID NO: 197053 - RNA, 19 nt, Artificial Sequence
  Description of Artificial Sequence: Synthetic oligonucleotide
gcaacuucgccucaucugc

SEQ ID NO: 197054 - RNA, 19 nt, Artificial Sequence
  Description of Artificial Sequence: Synthetic oligonucleotide
gccaaguuucuucaacugg

SEQ ID NO: 197055 - RNA, 19 nt, Artificial Sequence
  Description of Artificial Sequence: Synthetic oligonucleotide
aaccagguguccaauacau

SEQ ID NO: 197056 - RNA, 19 nt, Artificial Sequence
  Description of Artificial Sequence: Synthetic oligonucleotide
agguggauggagcagcggu

SEQ ID NO: 197057 - RNA, 19 nt, Artificial Sequence
  Description of Artificial Sequence: Synthetic oligonucleotide
ugguccgccccauucagca

SEQ ID NO: 197058 - RNA, 19 nt, Artificial Sequence
  Description of Artificial Sequence: Synthetic oligonucleotide
auguguaggcacagagucc

SEQ ID NO: 197059 - RNA, 19 nt, Artificial Sequence
  Description of Artificial Sequence: Synthetic oligonucleotide
ggugcuacgguagaugacc

SEQ ID NO: 197060 - RNA, 19 nt, Artificial Sequence
  Description of Artificial Sequence: Synthetic oligonucleotide
aggcaggauacggaggucg

SEQ ID NO: 197061 - RNA, 19 nt, Artificial Sequence
  Description of Artificial Sequence: Synthetic oligonucleotide
uggcgguaccccaggaucc

SEQ ID NO: 197062 - RNA, 19 nt, Artificial Sequence
  Description of Artificial Sequence: Synthetic oligonucleotide
aaagguggcggcacguuga

SEQ ID NO: 197063 - RNA, 19 nt, Artificial Sequence
  Description of Artificial Sequence: Synthetic oligonucleotide
cuuguaggcaaaggacacg

SEQ ID NO: 197064 - RNA, 19 nt, Artificial Sequence
  Description of Artificial Sequence: Synthetic oligonucleotide
gacacgaggaccccaaacu

SEQ ID NO: 197065 - RNA, 19 nt, Artificial Sequence
  Description of Artificial Sequence: Synthetic oligonucleotide
ugguaaauccugucacccu

SEQ ID NO: 197066 - RNA, 19 nt, Artificial Sequence
  Description of Artificial Sequence: Synthetic oligonucleotide
gacugauugggccaaccaa

SEQ ID NO: 197067 - RNA, 19 nt, Artificial Sequence
  Description of Artificial Sequence: Synthetic oligonucleotide
cucaauccgagucguugcc

SEQ ID NO: 197068 - RNA, 19 nt, Artificial Sequence
  Description of Artificial Sequence: Synthetic oligonucleotide
agccagacaccgaggaugc

SEQ ID NO: 197069 - RNA, 19 nt, Artificial Sequence
  Description of Artificial Sequence: Synthetic oligonucleotide
gucacggacgauggcaugg

SEQ ID NO: 197070 - RNA, 19 nt, Artificial Sequence
  Description of Artificial Sequence: Synthetic oligonucleotide
guccgccccauucagcacg

SEQ ID NO: 197071 - RNA, 19 nt, Artificial Sequence
  Description of Artificial Sequence: Synthetic oligonucleotide
gauacggaggucgccccgg

SEQ ID NO: 197072 - RNA, 19 nt, Artificial Sequence
  Description of Artificial Sequence: Synthetic oligonucleotide
gauucgguggccccaccac

SEQ ID NO: 197073 - RNA, 19 nt, Artificial Sequence
  Description of Artificial Sequence: Synthetic oligonucleotide
caauccgagucguugccac

SEQ ID NO: 197074 - RNA, 19 nt, Artificial Sequence
  Description of Artificial Sequence: Synthetic oligonucleotide
gucucaauccgagucguug

SEQ ID NO: 197075 - RNA, 19 nt, Artificial Sequence
  Description of Artificial Sequence: Synthetic oligonucleotide
ugacaguuuaggguccaug

SEQ ID NO: 197076 - RNA, 19 nt, Artificial Sequence
  Description of Artificial Sequence: Synthetic oligonucleotide
agggucccaggguagaaca

SEQ ID NO: 197077 - RNA, 19 nt, Artificial Sequence
  Description of Artificial Sequence: Synthetic oligonucleotide
aggaccaguugaccaggcg

SEQ ID NO: 197078 - RNA, 19 nt, Artificial Sequence
  Description of Artificial Sequence: Synthetic oligonucleotide
cccaguaccgcccaucagg

SEQ ID NO: 197079 - RNA, 19 nt, Artificial Sequence
  Description of Artificial Sequence: Synthetic oligonucleotide
acugauugggccaaccaaa

SEQ ID NO: 197080 - RNA, 19 nt, Artificial Sequence
  Description of Artificial Sequence: Synthetic oligonucleotide
gcaggguacgaccagucag

SEQ ID NO: 197081 - RNA, 19 nt, Artificial Sequence
  Description of Artificial Sequence: Synthetic oligonucleotide
gaaagagaccagacgagaa

SEQ ID NO: 197082 - RNA, 19 nt, Artificial Sequence
  Description of Artificial Sequence: Synthetic oligonucleotide
cucaaggggcaccuuugcc

SEQ ID NO: 197083 - RNA, 19 nt, Artificial Sequence
  Description of Artificial Sequence: Synthetic oligonucleotide
cuucgccucaucugccucc

SEQ ID NO: 197084 - RNA, 19 nt, Artificial Sequence
  Description of Artificial Sequence: Synthetic oligonucleotide
gcggucugaagccacagcc

SEQ ID NO: 197085 - RNA, 19 nt, Artificial Sequence
  Description of Artificial Sequence: Synthetic oligonucleotide
caggauacggaggucgccc

SEQ ID NO: 197086 - RNA, 19 nt, Artificial Sequence
  Description of Artificial Sequence: Synthetic oligonucleotide
cuuucccuugaggugcugg

SEQ ID NO: 197087 - RNA, 19 nt, Artificial Sequence
  Description of Artificial Sequence: Synthetic oligonucleotide
cacagaguccaaagcgcag

SEQ ID NO: 197088 - RNA, 19 nt, Artificial Sequence
  Description of Artificial Sequence: Synthetic oligonucleotide
gagggugcaggaccaguug

SEQ ID NO: 197089 - RNA, 19 nt, Artificial Sequence
  Description of Artificial Sequence: Synthetic oligonucleotide
acgaccagucagcuccuuc

SEQ ID NO: 197090 - RNA, 19 nt, Artificial Sequence
  Description of Artificial Sequence: Synthetic oligonucleotide
uuauugcugccaucccugu

SEQ ID NO: 197091 - RNA, 19 nt, Artificial Sequence
  Description of Artificial Sequence: Synthetic oligonucleotide
ggcacguugaccagggucc

SEQ ID NO: 197092 - RNA, 19 nt, Artificial Sequence
  Description of Artificial Sequence: Synthetic oligonucleotide
ucgacccugggauguguag

SEQ ID NO: 197093 - RNA, 19 nt, Artificial Sequence
  Description of Artificial Sequence: Synthetic oligonucleotide
ccagcaucgucucaauccg

SEQ ID NO: 197094 - RNA, 19 nt, Artificial Sequence
  Description of Artificial Sequence: Synthetic oligonucleotide
gcuacugacaguuuagggu

SEQ ID NO: 197095 - RNA, 19 nt, Artificial Sequence
  Description of Artificial Sequence: Synthetic oligonucleotide
uccgcugaugggccucagg

SEQ ID NO: 197096 - RNA, 19 nt, Artificial Sequence
  Description of Artificial Sequence: Synthetic oligonucleotide
uccgcgucagguuguaguc

SEQ ID NO: 197097 - RNA, 19 nt, Artificial Sequence
  Description of Artificial Sequence: Synthetic oligonucleotide
ccuuagagcgguugcaaag

SEQ ID NO: 197098 - RNA, 19 nt, Artificial Sequence
  Description of Artificial Sequence: Synthetic oligonucleotide
aagcucucgugcccuucag

SEQ ID NO: 197099 - RNA, 19 nt, Artificial Sequence
  Description of Artificial Sequence: Synthetic oligonucleotide
agggugcaggaccaguuga

SEQ ID NO: 197100 - RNA, 19 nt, Artificial Sequence
  Description of Artificial Sequence: Synthetic oligonucleotide
cuccccacagcgcacguac

SEQ ID NO: 197101 - RNA, 19 nt, Artificial Sequence
  Description of Artificial Sequence: Synthetic oligonucleotide
uccuuagagcgguugcaaa

SEQ ID NO: 197102 - RNA, 19 nt, Artificial Sequence
  Description of Artificial Sequence: Synthetic oligonucleotide
gagauagaccucucugaaa

SEQ ID NO: 197103 - RNA, 19 nt, Artificial Sequence
  Description of Artificial Sequence: Synthetic oligonucleotide
ccauggugaaacaggcucg

SEQ ID NO: 197104 - RNA, 19 nt, Artificial Sequence
  Description of Artificial Sequence: Synthetic oligonucleotide
ucagugcguccgcucaccc

SEQ ID NO: 197105 - RNA, 19 nt, Artificial Sequence
  Description of Artificial Sequence: Synthetic oligonucleotide
ggagcgcacagcucgagug

SEQ ID NO: 197106 - RNA, 19 nt, Artificial Sequence
  Description of Artificial Sequence: Synthetic oligonucleotide
cuuucagugcagccagcac

SEQ ID NO: 197107 - RNA, 19 nt, Artificial Sequence
  Description of Artificial Sequence: Synthetic oligonucleotide
uacgguagaugaccccuuc

SEQ ID NO: 197108 - RNA, 19 nt, Artificial Sequence
  Description of Artificial Sequence: Synthetic oligonucleotide
uccgccccauucagcacgg

SEQ ID NO: 197109 - RNA, 19 nt, Artificial Sequence
  Description of Artificial Sequence: Synthetic oligonucleotide
guggcgguaccccaggauc

SEQ ID NO: 197110 - RNA, 19 nt, Artificial Sequence
  Description of Artificial Sequence: Synthetic oligonucleotide
ugucucgacccugggaugu

SEQ ID NO: 197111 - RNA, 19 nt, Artificial Sequence
  Description of Artificial Sequence: Synthetic oligonucleotide
cagaauugagggugcagga

SEQ ID NO: 197112 - RNA, 19 nt, Artificial Sequence
  Description of Artificial Sequence: Synthetic oligonucleotide
ucaauccgagucguugcca

SEQ ID NO: 197113 - RNA, 19 nt, Artificial Sequence
  Description of Artificial Sequence: Synthetic oligonucleotide
ugccgguucacaccccgcu

SEQ ID NO: 197114 - RNA, 19 nt, Artificial Sequence
  Description of Artificial Sequence: Synthetic oligonucleotide
uguuaguuucaggccgagc

SEQ ID NO: 197115 - RNA, 19 nt, Artificial Sequence
  Description of Artificial Sequence: Synthetic oligonucleotide
auucgguggccccaccaca

SEQ ID NO: 197116 - RNA, 19 nt, Artificial Sequence
  Description of Artificial Sequence: Synthetic oligonucleotide
augcuuagugccaacucca

SEQ ID NO: 197117 - RNA, 19 nt, Artificial Sequence
  Description of Artificial Sequence: Synthetic oligonucleotide
ugccaagagacuugcucau

SEQ ID NO: 197118 - RNA, 19 nt, Artificial Sequence
  Description of Artificial Sequence: Synthetic oligonucleotide
ggucugaagccacagccac

SEQ ID NO: 197119 - RNA, 19 nt, Artificial Sequence
  Description of Artificial Sequence: Synthetic oligonucleotide
aaguccgcugaugggccuc

SEQ ID NO: 197120 - RNA, 19 nt, Artificial Sequence
  Description of Artificial Sequence: Synthetic oligonucleotide
guagccggaggcagcacgg

SEQ ID NO: 197121 - RNA, 19 nt, Artificial Sequence
  Description of Artificial Sequence: Synthetic oligonucleotide
uccaaagcgcagggcgucg

SEQ ID NO: 197122 - RNA, 19 nt, Artificial Sequence
  Description of Artificial Sequence: Synthetic oligonucleotide
uccaaacucccgugcugcc

SEQ ID NO: 197123 - RNA, 19 nt, Artificial Sequence
  Description of Artificial Sequence: Synthetic oligonucleotide
gacggugacgaaguaggca

SEQ ID NO: 197124 - RNA, 19 nt, Artificial Sequence
  Description of Artificial Sequence: Synthetic oligonucleotide
gaaaaucguaggccuggaa

SEQ ID NO: 197125 - RNA, 19 nt, Artificial Sequence
  Description of Artificial Sequence: Synthetic oligonucleotide
uucagugcguccgcucacc

SEQ ID NO: 197126 - RNA, 19 nt, Artificial Sequence
  Description of Artificial Sequence: Synthetic oligonucleotide
gaccaggcgggugcuacgg

SEQ ID NO: 197127 - RNA, 19 nt, Artificial Sequence
  Description of Artificial Sequence: Synthetic oligonucleotide
uugucaggggacacuccaa

SEQ ID NO: 197128 - RNA, 19 nt, Artificial Sequence
  Description of Artificial Sequence: Synthetic oligonucleotide
gcaccagucucuaauguug

SEQ ID NO: 197129 - RNA, 19 nt, Artificial Sequence
  Description of Artificial Sequence: Synthetic oligonucleotide
ccaguaccgcccaucaggg

SEQ ID NO: 197130 - RNA, 19 nt, Artificial Sequence
  Description of Artificial Sequence: Synthetic oligonucleotide
ccuaacgaaagccucuguc

SEQ ID NO: 197131 - RNA, 19 nt, Artificial Sequence
  Description of Artificial Sequence: Synthetic oligonucleotide
aaggccacgcagggcgaac

SEQ ID NO: 197132 - RNA, 19 nt, Artificial Sequence
  Description of Artificial Sequence: Synthetic oligonucleotide
uugaccaggcgggugcuac

SEQ ID NO: 197133 - RNA, 19 nt, Artificial Sequence
  Description of Artificial Sequence: Synthetic oligonucleotide
caaggggcaccuuugccga

SEQ ID NO: 197134 - RNA, 19 nt, Artificial Sequence
  Description of Artificial Sequence: Synthetic oligonucleotide
accacguccuuagagcggu

SEQ ID NO: 197135 - RNA, 19 nt, Artificial Sequence
  Description of Artificial Sequence: Synthetic oligonucleotide
acggccucagucaggcggc

SEQ ID NO: 197136 - RNA, 19 nt, Artificial Sequence
  Description of Artificial Sequence: Synthetic oligonucleotide
gugccaaacuccaugucca

SEQ ID NO: 197137 - RNA, 19 nt, Artificial Sequence
  Description of Artificial Sequence: Synthetic oligonucleotide
cuucaggcuuggagguggg

SEQ ID NO: 197138 - RNA, 19 nt, Artificial Sequence
  Description of Artificial Sequence: Synthetic oligonucleotide
ucgucucaauccgagucgu

SEQ ID NO: 197139 - RNA, 19 nt, Artificial Sequence
  Description of Artificial Sequence: Synthetic oligonucleotide
uuacagccgcacuggcagc

SEQ ID NO: 197140 - RNA, 19 nt, Artificial Sequence
  Description of Artificial Sequence: Synthetic oligonucleotide
aaggggcaccuuugccgag

SEQ ID NO: 197141 - RNA, 19 nt, Artificial Sequence
  Description of Artificial Sequence: Synthetic oligonucleotide
auacggaggucgccccggg

SEQ ID NO: 197142 - RNA, 19 nt, Artificial Sequence
  Description of Artificial Sequence: Synthetic oligonucleotide
caccgaggaugccaaggcc

SEQ ID NO: 197143 - RNA, 19 nt, Artificial Sequence
  Description of Artificial Sequence: Synthetic oligonucleotide
ugccgugggcgucacggac

SEQ ID NO: 197144 - RNA, 19 nt, Artificial Sequence
  Description of Artificial Sequence: Synthetic oligonucleotide
gaagucggccuucuguccu

SEQ ID NO: 197145 - RNA, 19 nt, Artificial Sequence
  Description of Artificial Sequence: Synthetic oligonucleotide
gugggcgucacggacgaug

SEQ ID NO: 197146 - RNA, 19 nt, Artificial Sequence
  Description of Artificial Sequence: Synthetic oligonucleotide
ggugccgguucacaccccg

SEQ ID NO: 197147 - RNA, 19 nt, Artificial Sequence
  Description of Artificial Sequence: Synthetic oligonucleotide
cugacugauugggccaacc

SEQ ID NO: 197148 - RNA, 19 nt, Artificial Sequence
  Description of Artificial Sequence: Synthetic oligonucleotide
aguuucaggccgagcauga

SEQ ID NO: 197149 - RNA, 19 nt, Artificial Sequence
  Description of Artificial Sequence: Synthetic oligonucleotide
gaacacacuaaggucuucu

SEQ ID NO: 197150 - RNA, 19 nt, Artificial Sequence
  Description of Artificial Sequence: Synthetic oligonucleotide
caggcacuccaaguagacg

SEQ ID NO: 197151 - RNA, 19 nt, Artificial Sequence
  Description of Artificial Sequence: Synthetic oligonucleotide
acgucacagagcucauaga

SEQ ID NO: 197152 - RNA, 19 nt, Artificial Sequence
  Description of Artificial Sequence: Synthetic oligonucleotide
agccuaacgaaagccucug

SEQ ID NO: 197153 - RNA, 19 nt, Artificial Sequence
  Description of Artificial Sequence: Synthetic oligonucleotide
gacgaagggcaugaaugga

SEQ ID NO: 197154 - RNA, 19 nt, Artificial Sequence
  Description of Artificial Sequence: Synthetic oligonucleotide
acgaggaccccaaacucca

SEQ ID NO: 197155 - RNA, 19 nt, Artificial Sequence
  Description of Artificial Sequence: Synthetic oligonucleotide
acgucucccagcaucgucu

SEQ ID NO: 197156 - RNA, 19 nt, Artificial Sequence
  Description of Artificial Sequence: Synthetic oligonucleotide
uaggguccauggugaaaca

SEQ ID NO: 197157 - RNA, 19 nt, Artificial Sequence
  Description of Artificial Sequence: Synthetic oligonucleotide
caccuuugccgaguagccg

SEQ ID NO: 197158 - RNA, 19 nt, Artificial Sequence
  Description of Artificial Sequence: Synthetic oligonucleotide
ucccgugcugccuucucuc

SEQ ID NO: 197159 - RNA, 19 nt, Artificial Sequence
  Description of Artificial Sequence: Synthetic oligonucleotide
aguggcgguaccccaggau

SEQ ID NO: 197160 - RNA, 19 nt, Artificial Sequence
  Description of Artificial Sequence: Synthetic oligonucleotide
agcgcacguaccacugugg

SEQ ID NO: 197161 - RNA, 19 nt, Artificial Sequence
  Description of Artificial Sequence: Synthetic oligonucleotide
gagcgcacagcucgaguga

SEQ ID NO: 197162 - RNA, 19 nt, Artificial Sequence
  Description of Artificial Sequence: Synthetic oligonucleotide
ucuuuggggugcacagcua

SEQ ID NO: 197163 - RNA, 19 nt, Artificial Sequence
  Description of Artificial Sequence: Synthetic oligonucleotide
guagccaggcacagagagc

SEQ ID NO: 197164 - RNA, 19 nt, Artificial Sequence
  Description of Artificial Sequence: Synthetic oligonucleotide
gaccagacgagaaccaggu

SEQ ID NO: 197165 - RNA, 19 nt, Artificial Sequence
  Description of Artificial Sequence: Synthetic oligonucleotide
cagcgcagcccuguggugc

SEQ ID NO: 197166 - RNA, 19 nt, Artificial Sequence
  Description of Artificial Sequence: Synthetic oligonucleotide
ucacggacgauggcaugga

SEQ ID NO: 197167 - RNA, 19 nt, Artificial Sequence
  Description of Artificial Sequence: Synthetic oligonucleotide
ccaauacauccucaucuug

SEQ ID NO: 197168 - RNA, 19 nt, Artificial Sequence
  Description of Artificial Sequence: Synthetic oligonucleotide
gcgguugcaaaguggcacc

SEQ ID NO: 197169 - RNA, 19 nt, Artificial Sequence
  Description of Artificial Sequence: Synthetic oligonucleotide
guccgcucacccaguaccg

SEQ ID NO: 197170 - RNA, 19 nt, Artificial Sequence
  Description of Artificial Sequence: Synthetic oligonucleotide
ggauacggaggucgccccg

SEQ ID NO: 197171 - RNA, 19 nt, Artificial Sequence
  Description of Artificial Sequence: Synthetic oligonucleotide
ccaaguccgcugaugggcc

SEQ ID NO: 197172 - RNA, 19 nt, Artificial Sequence
  Description of Artificial Sequence: Synthetic oligonucleotide
acggaggucgccccggguu

SEQ ID NO: 197173 - RNA, 19 nt, Artificial Sequence
  Description of Artificial Sequence: Synthetic oligonucleotide
gugcuacgguagaugaccc

SEQ ID NO: 197174 - RNA, 19 nt, Artificial Sequence
  Description of Artificial Sequence: Synthetic oligonucleotide
cugguccgccccauucagc

SEQ ID NO: 197175 - RNA, 19 nt, Artificial Sequence
  Description of Artificial Sequence: Synthetic oligonucleotide
gggucugccgggcacacuc

SEQ ID NO: 197176 - RNA, 19 nt, Artificial Sequence
  Description of Artificial Sequence: Synthetic oligonucleotide
cuuagagcgguugcaaagu

SEQ ID NO: 197177 - RNA, 19 nt, Artificial Sequence
  Description of Artificial Sequence: Synthetic oligonucleotide
cagaaguggcgguacccca

SEQ ID NO: 197178 - RNA, 19 nt, Artificial Sequence
  Description of Artificial Sequence: Synthetic oligonucleotide
uccgagucguugccaccac

SEQ ID NO: 197179 - RNA, 19 nt, Artificial Sequence
  Description of Artificial Sequence: Synthetic oligonucleotide
agcgcagcccuguggugca

SEQ ID NO: 197180 - RNA, 19 nt, Artificial Sequence
  Description of Artificial Sequence: Synthetic oligonucleotide
cguccgcucacccaguacc

SEQ ID NO: 197181 - RNA, 19 nt, Artificial Sequence
  Description of Artificial Sequence: Synthetic oligonucleotide
gccuucauugcugagccuc

SEQ ID NO: 197182 - RNA, 19 nt, Artificial Sequence
  Description of Artificial Sequence: Synthetic oligonucleotide
cacguccuuagagcgguug

SEQ ID NO: 197183 - RNA, 19 nt, Artificial Sequence
  Description of Artificial Sequence: Synthetic oligonucleotide
cacucgggaaugccugcug

SEQ ID NO: 197184 - RNA, 19 nt, Artificial Sequence
  Description of Artificial Sequence: Synthetic oligonucleotide
cuucaccgcaccugugcca

SEQ ID NO: 197185 - RNA, 19 nt, Artificial Sequence
  Description of Artificial Sequence: Synthetic oligonucleotide
ugccgaguagccggaggca

SEQ ID NO: 197186 - RNA, 19 nt, Artificial Sequence
  Description of Artificial Sequence: Synthetic oligonucleotide
caccugguccgccccauuc

SEQ ID NO: 197187 - RNA, 19 nt, Artificial Sequence
  Description of Artificial Sequence: Synthetic oligonucleotide
gacguccaggcagguguag

SEQ ID NO: 197188 - RNA, 19 nt, Artificial Sequence
  Description of Artificial Sequence: Synthetic oligonucleotide
gcacucugagggcucuggg

SEQ ID NO: 197189 - RNA, 19 nt, Artificial Sequence
  Description of Artificial Sequence: Synthetic oligonucleotide
gguuguccuugaugccgcg

SEQ ID NO: 197190 - RNA, 19 nt, Artificial Sequence
  Description of Artificial Sequence: Synthetic oligonucleotide
cauccgggccacccagaag

SEQ ID NO: 197191 - RNA, 19 nt, Artificial Sequence
  Description of Artificial Sequence: Synthetic oligonucleotide
ccagacgagaaccaggugu

SEQ ID NO: 197192 - RNA, 19 nt, Artificial Sequence
  Description of Artificial Sequence: Synthetic oligonucleotide
accgcaccugugccaaacu

SEQ ID NO: 197193 - RNA, 19 nt, Artificial Sequence
  Description of Artificial Sequence: Synthetic oligonucleotide
agucaggccugguccgcgu

SEQ ID NO: 197194 - RNA, 19 nt, Artificial Sequence
  Description of Artificial Sequence: Synthetic oligonucleotide
cacggacgauggcauggag

SEQ ID NO: 197195 - RNA, 19 nt, Artificial Sequence
  Description of Artificial Sequence: Synthetic oligonucleotide
cucgugcccuucaggcuug

SEQ ID NO: 197196 - RNA, 19 nt, Artificial Sequence
  Description of Artificial Sequence: Synthetic oligonucleotide
ggcagaauugagggugcag

SEQ ID NO: 197197 - RNA, 19 nt, Artificial Sequence
  Description of Artificial Sequence: Synthetic oligonucleotide
ccgaggaugccaaggcccc

SEQ ID NO: 197198 - RNA, 19 nt, Artificial Sequence
  Description of Artificial Sequence: Synthetic oligonucleotide
gcaccuuugccgaguagcc

SEQ ID NO: 197199 - RNA, 19 nt, Artificial Sequence
  Description of Artificial Sequence: Synthetic oligonucleotide
cacgcagggagcgcacagc

SEQ ID NO: 197200 - RNA, 19 nt, Artificial Sequence
  Description of Artificial Sequence: Synthetic oligonucleotide
uacggaggucgccccgggu

SEQ ID NO: 197201 - RNA, 19 nt, Artificial Sequence
  Description of Artificial Sequence: Synthetic oligonucleotide
ggggucaaugacauugcca

SEQ ID NO: 197202 - RNA, 19 nt, Artificial Sequence
  Description of Artificial Sequence: Synthetic oligonucleotide
guccgcgucagguuguagu

SEQ ID NO: 197203 - RNA, 19 nt, Artificial Sequence
  Description of Artificial Sequence: Synthetic oligonucleotide
cgcgucagguuguagucgg

SEQ ID NO: 197204 - RNA, 19 nt, Artificial Sequence
  Description of Artificial Sequence: Synthetic oligonucleotide
gcgcacguaccacuguggc

SEQ ID NO: 197205 - RNA, 19 nt, Artificial Sequence
  Description of Artificial Sequence: Synthetic oligonucleotide
cagggcgucggugccacac

SEQ ID NO: 197206 - RNA, 19 nt, Artificial Sequence
  Description of Artificial Sequence: Synthetic oligonucleotide
cuugaugccgcggaacagu

SEQ ID NO: 197207 - RNA, 19 nt, Artificial Sequence
  Description of Artificial Sequence: Synthetic oligonucleotide
ccggguuacagccgcacug

SEQ ID NO: 197208 - RNA, 19 nt, Artificial Sequence
  Description of Artificial Sequence: Synthetic oligonucleotide
gcacguaccacuguggccu

SEQ ID NO: 197209 - RNA, 19 nt, Artificial Sequence
  Description of Artificial Sequence: Synthetic oligonucleotide
gagccuaacgaaagccucu

SEQ ID NO: 197210 - RNA, 19 nt, Artificial Sequence
  Description of Artificial Sequence: Synthetic oligonucleotide
uccgggccacccagaagaa

SEQ ID NO: 197211 - RNA, 19 nt, Artificial Sequence
  Description of Artificial Sequence: Synthetic oligonucleotide
ugggauccagguugcuguu

SEQ ID NO: 197212 - RNA, 19 nt, Artificial Sequence
  Description of Artificial Sequence: Synthetic oligonucleotide
cacaccccgcucucuccag

SEQ ID NO: 197213 - RNA, 19 nt, Artificial Sequence
  Description of Artificial Sequence: Synthetic oligonucleotide
ggcgucacggacgauggca

SEQ ID NO: 197214 - RNA, 19 nt, Artificial Sequence
  Description of Artificial Sequence: Synthetic oligonucleotide
guagagggucugccgggca

SEQ ID NO: 197215 - RNA, 19 nt, Artificial Sequence
  Description of Artificial Sequence: Synthetic oligonucleotide
cagguggauggagcagcgg

SEQ ID NO: 197216 - RNA, 19 nt, Artificial Sequence
  Description of Artificial Sequence: Synthetic oligonucleotide
aguugaccaggcgggugcu

SEQ ID NO: 197217 - RNA, 19 nt, Artificial Sequence
  Description of Artificial Sequence: Synthetic oligonucleotide
augccgcggaacagucccc

SEQ ID NO: 197218 - RNA, 19 nt, Artificial Sequence
  Description of Artificial Sequence: Synthetic oligonucleotide
cagggucccaggguagaac

SEQ ID NO: 197219 - RNA, 19 nt, Artificial Sequence
  Description of Artificial Sequence: Synthetic oligonucleotide
agggcgucggugccacacu

SEQ ID NO: 197220 - RNA, 19 nt, Artificial Sequence
  Description of Artificial Sequence: Synthetic oligonucleotide
gggacacuccaaacucccg

SEQ ID NO: 197221 - RNA, 19 nt, Artificial Sequence
  Description of Artificial Sequence: Synthetic oligonucleotide
guuucaggccgagcaugac

SEQ ID NO: 197222 - RNA, 19 nt, Artificial Sequence
  Description of Artificial Sequence: Synthetic oligonucleotide
ccucaaggggcaccuuugc

SEQ ID NO: 197223 - RNA, 19 nt, Artificial Sequence
  Description of Artificial Sequence: Synthetic oligonucleotide
caccgcaccugugccaaac

SEQ ID NO: 197224 - RNA, 19 nt, Artificial Sequence
  Description of Artificial Sequence: Synthetic oligonucleotide
ggguuguccuugaugccgc

SEQ ID NO: 197225 - RNA, 19 nt, Artificial Sequence
  Description of Artificial Sequence: Synthetic oligonucleotide
cuuugccgaguagccggag

SEQ ID NO: 197226 - RNA, 19 nt, Artificial Sequence
  Description of Artificial Sequence: Synthetic oligonucleotide
gacgaaguaggcagggauu

SEQ ID NO: 197227 - RNA, 19 nt, Artificial Sequence
  Description of Artificial Sequence: Synthetic oligonucleotide
ggauucgguggccccacca

SEQ ID NO: 197228 - RNA, 19 nt, Artificial Sequence
  Description of Artificial Sequence: Synthetic oligonucleotide
guccaaagcgcagggcguc

SEQ ID NO: 197229 - RNA, 19 nt, Artificial Sequence
  Description of Artificial Sequence: Synthetic oligonucleotide
gaccucaaggggcaccuuu

SEQ ID NO: 197230 - RNA, 19 nt, Artificial Sequence
  Description of Artificial Sequence: Synthetic oligonucleotide
auggugaaacaggcucggu

SEQ ID NO: 197231 - RNA, 19 nt, Artificial Sequence
  Description of Artificial Sequence: Synthetic oligonucleotide
caggccgagcaugaccauc

SEQ ID NO: 197232 - RNA, 19 nt, Artificial Sequence
  Description of Artificial Sequence: Synthetic oligonucleotide
aggcgggugcuacgguaga

SEQ ID NO: 197233 - RNA, 19 nt, Artificial Sequence
  Description of Artificial Sequence: Synthetic oligonucleotide
aggggcaccuuugccgagu

SEQ ID NO: 197234 - RNA, 19 nt, Artificial Sequence
  Description of Artificial Sequence: Synthetic oligonucleotide
gcacgcagggagcgcacag

SEQ ID NO: 197235 - RNA, 19 nt, Artificial Sequence
  Description of Artificial Sequence: Synthetic oligonucleotide
ccuguuaguuucaggccga

SEQ ID NO: 197236 - RNA, 19 nt, Artificial Sequence
  Description of Artificial Sequence: Synthetic oligonucleotide
gcuacgguagaugaccccu

SEQ ID NO: 197237 - RNA, 19 nt, Artificial Sequence
  Description of Artificial Sequence: Synthetic oligonucleotide
aggucgccccggguuacag

SEQ ID NO: 197238 - RNA, 19 nt, Artificial Sequence
  Description of Artificial Sequence: Synthetic oligonucleotide
ggccaaccaaagauggaga

SEQ ID NO: 197239 - RNA, 19 nt, Artificial Sequence
  Description of Artificial Sequence: Synthetic oligonucleotide
ggaaaaucguaggccugga

SEQ ID NO: 197240 - RNA, 19 nt, Artificial Sequence
  Description of Artificial Sequence: Synthetic oligonucleotide
uguucacauccagguugau

SEQ ID NO: 197241 - RNA, 19 nt, Artificial Sequence
  Description of Artificial Sequence: Synthetic oligonucleotide
ggcagggauucgguggccc

SEQ ID NO: 197242 - RNA, 19 nt, Artificial Sequence
  Description of Artificial Sequence: Synthetic oligonucleotide
gguugcaaaguggcaccac

SEQ ID NO: 197243 - RNA, 19 nt, Artificial Sequence
  Description of Artificial Sequence: Synthetic oligonucleotide
ccaggguagaacacacuaa

SEQ ID NO: 197244 - RNA, 19 nt, Artificial Sequence
  Description of Artificial Sequence: Synthetic oligonucleotide
ggugaucuucaccgcaccu

SEQ ID NO: 197245 - RNA, 19 nt, Artificial Sequence
  Description of Artificial Sequence: Synthetic oligonucleotide
cagugcguccgcucaccca

SEQ ID NO: 197246 - RNA, 19 nt, Artificial Sequence
  Description of Artificial Sequence: Synthetic oligonucleotide
gagccucacuucgccuggc

SEQ ID NO: 197247 - RNA, 19 nt, Artificial Sequence
  Description of Artificial Sequence: Synthetic oligonucleotide
ucgugcccuucaggcuugg

SEQ ID NO: 197248 - RNA, 19 nt, Artificial Sequence
  Description of Artificial Sequence: Synthetic oligonucleotide
gcgggugcuacgguagaug

SEQ ID NO: 197249 - RNA, 19 nt, Artificial Sequence
  Description of Artificial Sequence: Synthetic oligonucleotide
cgcacguaccacuguggcc

SEQ ID NO: 197250 - RNA, 19 nt, Artificial Sequence
  Description of Artificial Sequence: Synthetic oligonucleotide
ccgcucuuucagugcagcc

SEQ ID NO: 197251 - RNA, 19 nt, Artificial Sequence
  Description of Artificial Sequence: Synthetic oligonucleotide
cacagcucgagugaugcuu

SEQ ID NO: 197252 - RNA, 19 nt, Artificial Sequence
  Description of Artificial Sequence: Synthetic oligonucleotide
cgagucguugccaccacca

SEQ ID NO: 197253 - RNA, 19 nt, Artificial Sequence
  Description of Artificial Sequence: Synthetic oligonucleotide
cagcccgugccgcugucca

SEQ ID NO: 197254 - RNA, 19 nt, Artificial Sequence
  Description of Artificial Sequence: Synthetic oligonucleotide
cuccgccuuccacucccac

SEQ ID NO: 197255 - RNA, 19 nt, Artificial Sequence
  Description of Artificial Sequence: Synthetic oligonucleotide
gccgggcacacuccacugc

SEQ ID NO: 197256 - RNA, 19 nt, Artificial Sequence
  Description of Artificial Sequence: Synthetic oligonucleotide
ggcacuccaaguagacguc

SEQ ID NO: 197257 - RNA, 19 nt, Artificial Sequence
  Description of Artificial Sequence: Synthetic oligonucleotide
ccaucccuguugguggacc

SEQ ID NO: 197258 - RNA, 19 nt, Artificial Sequence
  Description of Artificial Sequence: Synthetic oligonucleotide
cagggauucgguggcccca

SEQ ID NO: 197259 - RNA, 19 nt, Artificial Sequence
  Description of Artificial Sequence: Synthetic oligonucleotide
cgcugagccucacuucgcc

SEQ ID NO: 197260 - RNA, 19 nt, Artificial Sequence
  Description of Artificial Sequence: Synthetic oligonucleotide
ccgcgucagguuguagucg

SEQ ID NO: 197261 - RNA, 19 nt, Artificial Sequence
  Description of Artificial Sequence: Synthetic oligonucleotide
cucgacccugggaugugua

SEQ ID NO: 197262 - RNA, 19 nt, Artificial Sequence
  Description of Artificial Sequence: Synthetic oligonucleotide
ccgacguccaggcaggugu

SEQ ID NO: 197263 - RNA, 19 nt, Artificial Sequence
  Description of Artificial Sequence: Synthetic oligonucleotide
cggcacguugaccaggguc

SEQ ID NO: 197264 - RNA, 19 nt, Artificial Sequence
  Description of Artificial Sequence: Synthetic oligonucleotide
cagggagcgcacagcucga

SEQ ID NO: 197265 - RNA, 19 nt, Artificial Sequence
  Description of Artificial Sequence: Synthetic oligonucleotide
gcacuccaaguagacguca

SEQ ID NO: 197266 - RNA, 19 nt, Artificial Sequence
  Description of Artificial Sequence: Synthetic oligonucleotide
cccgcucuuucagugcagc

SEQ ID NO: 197267 - RNA, 19 nt, Artificial Sequence
  Description of Artificial Sequence: Synthetic oligonucleotide
ccgagucguugccaccacc

SEQ ID NO: 197268 - RNA, 19 nt, Artificial Sequence
  Description of Artificial Sequence: Synthetic oligonucleotide
gugccgguucacaccccgc

SEQ ID NO: 197269 - RNA, 19 nt, Artificial Sequence
  Description of Artificial Sequence: Synthetic oligonucleotide
ucaccgcaccugugccaaa

SEQ ID NO: 197270 - RNA, 19 nt, Artificial Sequence
  Description of Artificial Sequence: Synthetic oligonucleotide
acgauggcauggagauaga

SEQ ID NO: 197271 - RNA, 19 nt, Artificial Sequence
  Description of Artificial Sequence: Synthetic oligonucleotide
gguccgccccauucagcac

SEQ ID NO: 197272 - RNA, 19 nt, Artificial Sequence
  Description of Artificial Sequence: Synthetic oligonucleotide
ccgcaccugugccaaacuc

SEQ ID NO: 197273 - RNA, 19 nt, Artificial Sequence
  Description of Artificial Sequence: Synthetic oligonucleotide
gggcgucggugccacacuc

SEQ ID NO: 197274 - RNA, 19 nt, Artificial Sequence
  Description of Artificial Sequence: Synthetic oligonucleotide
cgggugcuacgguagauga

SEQ ID NO: 197275 - RNA, 19 nt, Artificial Sequence
  Description of Artificial Sequence: Synthetic oligonucleotide
cgccccauucagcacgggc

SEQ ID NO: 197276 - RNA, 19 nt, Artificial Sequence
  Description of Artificial Sequence: Synthetic oligonucleotide
gguccccuuggaguccaug

SEQ ID NO: 197277 - RNA, 19 nt, Artificial Sequence
  Description of Artificial Sequence: Synthetic oligonucleotide
gccuuggaccuuguaggca

SEQ ID NO: 197278 - RNA, 19 nt, Artificial Sequence
  Description of Artificial Sequence: Synthetic oligonucleotide
gcacggcgcuccugcagcc

SEQ ID NO: 197279 - RNA, 19 nt, Artificial Sequence
  Description of Artificial Sequence: Synthetic oligonucleotide
ggucugccgggcacacucc

SEQ ID NO: 197280 - RNA, 19 nt, Artificial Sequence
  Description of Artificial Sequence: Synthetic oligonucleotide
ugguccgcgucagguugua

SEQ ID NO: 197281 - RNA, 19 nt, Artificial Sequence
  Description of Artificial Sequence: Synthetic oligonucleotide
cuacgguagaugaccccuu

SEQ ID NO: 197282 - RNA, 19 nt, Artificial Sequence
  Description of Artificial Sequence: Synthetic oligonucleotide
caaguccgcugaugggccu

SEQ ID NO: 197283 - RNA, 19 nt, Artificial Sequence
  Description of Artificial Sequence: Synthetic oligonucleotide
uacgaccagucagcuccuu

SEQ ID NO: 197284 - RNA, 19 nt, Artificial Sequence
  Description of Artificial Sequence: Synthetic oligonucleotide
uaccgcccaucaggguccu

SEQ ID NO: 197285 - RNA, 19 nt, Artificial Sequence
  Description of Artificial Sequence: Synthetic oligonucleotide
gaggucgccccggguuaca

SEQ ID NO: 197286 - RNA, 19 nt, Artificial Sequence
  Description of Artificial Sequence: Synthetic oligonucleotide
gcaucgucucaauccgagu

SEQ ID NO: 197287 - RNA, 19 nt, Artificial Sequence
  Description of Artificial Sequence: Synthetic oligonucleotide
cccgugccgcuguccaacc

SEQ ID NO: 197288 - RNA, 19 nt, Artificial Sequence
  Description of Artificial Sequence: Synthetic oligonucleotide
gcguccgcucacccaguac

SEQ ID NO: 197289 - RNA, 19 nt, Artificial Sequence
  Description of Artificial Sequence: Synthetic oligonucleotide
caaagcgcagggcgucggu

SEQ ID NO: 197290 - RNA, 19 nt, Artificial Sequence
  Description of Artificial Sequence: Synthetic oligonucleotide
gccgcacuggcagccugag

SEQ ID NO: 197291 - RNA, 19 nt, Artificial Sequence
  Description of Artificial Sequence: Synthetic oligonucleotide
gccgcggaacaguccccgc

SEQ ID NO: 197292 - RNA, 19 nt, Artificial Sequence
  Description of Artificial Sequence: Synthetic oligonucleotide
gcauggagauagaccucuc

SEQ ID NO: 197293 - RNA, 19 nt, Artificial Sequence
  Description of Artificial Sequence: Synthetic oligonucleotide
cagggcgaacuugguggca

SEQ ID NO: 197294 - RNA, 19 nt, Artificial Sequence
  Description of Artificial Sequence: Synthetic oligonucleotide
gguccgcgucagguuguag

SEQ ID NO: 197295 - RNA, 19 nt, Artificial Sequence
  Description of Artificial Sequence: Synthetic oligonucleotide
uuccugccgugggcgucac

SEQ ID NO: 197296 - RNA, 19 nt, Artificial Sequence
  Description of Artificial Sequence: Synthetic oligonucleotide
gcagcggucugaagccaca

SEQ ID NO: 197297 - RNA, 19 nt, Artificial Sequence
  Description of Artificial Sequence: Synthetic oligonucleotide
gggcauccccaagaaaggu

SEQ ID NO: 197298 - RNA, 19 nt, Artificial Sequence
  Description of Artificial Sequence: Synthetic oligonucleotide
caaggccacgcagggcgaa

SEQ ID NO: 197299 - RNA, 19 nt, Artificial Sequence
  Description of Artificial Sequence: Synthetic oligonucleotide
cgucacggacgauggcaug

SEQ ID NO: 197300 - RNA, 19 nt, Artificial Sequence
  Description of Artificial Sequence: Synthetic oligonucleotide
guugaccaggcgggugcua

SEQ ID NO: 197301 - RNA, 19 nt, Artificial Sequence
  Description of Artificial Sequence: Synthetic oligonucleotide
guacgaccagucagcuccu

SEQ ID NO: 197302 - RNA, 19 nt, Artificial Sequence
  Description of Artificial Sequence: Synthetic oligonucleotide
gccuaacgaaagccucugu

SEQ ID NO: 197303 - RNA, 19 nt, Artificial Sequence
  Description of Artificial Sequence: Synthetic oligonucleotide
ccauccgggccacccagaa

SEQ ID NO: 197304 - RNA, 19 nt, Artificial Sequence
  Description of Artificial Sequence: Synthetic oligonucleotide
ccgggccacccagaagaag

SEQ ID NO: 197305 - RNA, 19 nt, Artificial Sequence
  Description of Artificial Sequence: Synthetic oligonucleotide
cguccuuagagcgguugca

SEQ ID NO: 197306 - RNA, 19 nt, Artificial Sequence
  Description of Artificial Sequence: Synthetic oligonucleotide
accgcccaucaggguccuc

SEQ ID NO: 197307 - RNA, 19 nt, Artificial Sequence
  Description of Artificial Sequence: Synthetic oligonucleotide
ccgugggcgucacggacga

SEQ ID NO: 197308 - RNA, 19 nt, Artificial Sequence
  Description of Artificial Sequence: Synthetic oligonucleotide
gccaucccuguugguggac

SEQ ID NO: 197309 - RNA, 19 nt, Artificial Sequence
  Description of Artificial Sequence: Synthetic oligonucleotide
gguucacaccccgcucucu

SEQ ID NO: 197310 - RNA, 19 nt, Artificial Sequence
  Description of Artificial Sequence: Synthetic oligonucleotide
ggcagccugccuguuaguu

SEQ ID NO: 197311 - RNA, 19 nt, Artificial Sequence
  Description of Artificial Sequence: Synthetic oligonucleotide
ggcgguaccccaggauccu

SEQ ID NO: 197312 - RNA, 19 nt, Artificial Sequence
  Description of Artificial Sequence: Synthetic oligonucleotide
gcgucacggacgauggcau

SEQ ID NO: 197313 - RNA, 19 nt, Artificial Sequence
  Description of Artificial Sequence: Synthetic oligonucleotide
cacguaccacuguggccuu

SEQ ID NO: 197314 - RNA, 19 nt, Artificial Sequence
  Description of Artificial Sequence: Synthetic oligonucleotide
cgguugcaaaguggcacca

SEQ ID NO: 197315 - RNA, 19 nt, Artificial Sequence
  Description of Artificial Sequence: Synthetic oligonucleotide
ccgcggaacaguccccgcu

SEQ ID NO: 197316 - RNA, 19 nt, Artificial Sequence
  Description of Artificial Sequence: Synthetic oligonucleotide
cccggguuacagccgcacu

SEQ ID NO: 197317 - RNA, 19 nt, Artificial Sequence
  Description of Artificial Sequence: Synthetic oligonucleotide
cgacguccaggcaggugua

SEQ ID NO: 197318 - RNA, 19 nt, Artificial Sequence
  Description of Artificial Sequence: Synthetic oligonucleotide
ccgccccauucagcacggg

SEQ ID NO: 197319 - RNA, 19 nt, Artificial Sequence
  Description of Artificial Sequence: Synthetic oligonucleotide
cagccacgucucccagcau

SEQ ID NO: 197320 - RNA, 19 nt, Artificial Sequence
  Description of Artificial Sequence: Synthetic oligonucleotide
guccgccggggcagccucu

SEQ ID NO: 197321 - RNA, 19 nt, Artificial Sequence
  Description of Artificial Sequence: Synthetic oligonucleotide
gccccggguuacagccgca

SEQ ID NO: 197322 - RNA, 19 nt, Artificial Sequence
  Description of Artificial Sequence: Synthetic oligonucleotide
ccacgucucccagcaucgu

SEQ ID NO: 197323 - RNA, 19 nt, Artificial Sequence
  Description of Artificial Sequence: Synthetic oligonucleotide
cgucucaauccgagucguu

SEQ ID NO: 197324 - RNA, 19 nt, Artificial Sequence
  Description of Artificial Sequence: Synthetic oligonucleotide
cggaacaguccccgcucuu

SEQ ID NO: 197325 - RNA, 19 nt, Artificial Sequence
  Description of Artificial Sequence: Synthetic oligonucleotide
ccacguccuuagagcgguu

SEQ ID NO: 197326 - RNA, 19 nt, Artificial Sequence
  Description of Artificial Sequence: Synthetic oligonucleotide
cgugggcgucacggacgau

SEQ ID NO: 197327 - RNA, 19 nt, Artificial Sequence
  Description of Artificial Sequence: Synthetic oligonucleotide
aagauuaugaugugcaaac

SEQ ID NO: 197328 - RNA, 19 nt, Artificial Sequence
  Description of Artificial Sequence: Synthetic oligonucleotide
aaacaaacaaggcuugugc

SEQ ID NO: 197329 - RNA, 19 nt, Artificial Sequence
  Description of Artificial Sequence: Synthetic oligonucleotide
cauaauucagaauaagucc

SEQ ID NO: 197330 - RNA, 19 nt, Artificial Sequence
  Description of Artificial Sequence: Synthetic oligonucleotide
aaauuugaguucuagguca

SEQ ID NO: 197331 - RNA, 19 nt, Artificial Sequence
  Description of Artificial Sequence: Synthetic oligonucleotide
aaagugauaaacaagauua

SEQ ID NO: 197332 - RNA, 19 nt, Artificial Sequence
  Description of Artificial Sequence: Synthetic oligonucleotide
auuuuaccgagcuauaaac

SEQ ID NO: 197333 - RNA, 19 nt, Artificial Sequence
  Description of Artificial Sequence: Synthetic oligonucleotide
auaauucagaauaaguccc

SEQ ID NO: 197334 - RNA, 19 nt, Artificial Sequence
  Description of Artificial Sequence: Synthetic oligonucleotide
uguacaaaccuccaaccgg

SEQ ID NO: 197335 - RNA, 19 nt, Artificial Sequence
  Description of Artificial Sequence: Synthetic oligonucleotide
aagucucuaguguaauucc

SEQ ID NO: 197336 - RNA, 19 nt, Artificial Sequence
  Description of Artificial Sequence: Synthetic oligonucleotide
gaugguguuagccaugggg

SEQ ID NO: 197337 - RNA, 19 nt, Artificial Sequence
  Description of Artificial Sequence: Synthetic oligonucleotide
uuugaggugacuaugugac

SEQ ID NO: 197338 - RNA, 19 nt, Artificial Sequence
  Description of Artificial Sequence: Synthetic oligonucleotide
aaagucucuaguguaauuc

SEQ ID NO: 197339 - RNA, 19 nt, Artificial Sequence
  Description of Artificial Sequence: Synthetic oligonucleotide
acaggguuagcaaagaacc

SEQ ID NO: 197340 - RNA, 19 nt, Artificial Sequence
  Description of Artificial Sequence: Synthetic oligonucleotide
ucaucauacacgaugcgag

SEQ ID NO: 197341 - RNA, 19 nt, Artificial Sequence
  Description of Artificial Sequence: Synthetic oligonucleotide
uguaauuccaucugaggcc

SEQ ID NO: 197342 - RNA, 19 nt, Artificial Sequence
  Description of Artificial Sequence: Synthetic oligonucleotide
ucaucuaggcaccagacca

SEQ ID NO: 197343 - RNA, 19 nt, Artificial Sequence
  Description of Artificial Sequence: Synthetic oligonucleotide
ucaucuuaaacacucgcug

SEQ ID NO: 197344 - RNA, 19 nt, Artificial Sequence
  Description of Artificial Sequence: Synthetic oligonucleotide
uucgaucucagcuugacca

SEQ ID NO: 197345 - RNA, 19 nt, Artificial Sequence
  Description of Artificial Sequence: Synthetic oligonucleotide
uuaauucuagagaagguuc

SEQ ID NO: 197346 - RNA, 19 nt, Artificial Sequence
  Description of Artificial Sequence: Synthetic oligonucleotide
cacacaauugaugugaccg

SEQ ID NO: 197347 - RNA, 19 nt, Artificial Sequence
  Description of Artificial Sequence: Synthetic oligonucleotide
aaauguuuggcaaauacau

SEQ ID NO: 197348 - RNA, 19 nt, Artificial Sequence
  Description of Artificial Sequence: Synthetic oligonucleotide
augacuaaggaauuggccu

SEQ ID NO: 197349 - RNA, 19 nt, Artificial Sequence
  Description of Artificial Sequence: Synthetic oligonucleotide
ucaaccaaaagucucuagu

SEQ ID NO: 197350 - RNA, 19 nt, Artificial Sequence
  Description of Artificial Sequence: Synthetic oligonucleotide
gagcuauaaacacaggccc

SEQ ID NO: 197351 - RNA, 19 nt, Artificial Sequence
  Description of Artificial Sequence: Synthetic oligonucleotide
uguaaauggugacuuccgg

SEQ ID NO: 197352 - RNA, 19 nt, Artificial Sequence
  Description of Artificial Sequence: Synthetic oligonucleotide
aaagccacacacuaccgug

SEQ ID NO: 197353 - RNA, 19 nt, Artificial Sequence
  Description of Artificial Sequence: Synthetic oligonucleotide
uuuaccgagcuauaaacac

SEQ ID NO: 197354 - RNA, 19 nt, Artificial Sequence
  Description of Artificial Sequence: Synthetic oligonucleotide
guguaauuccaucugaggc

SEQ ID NO: 197355 - RNA, 19 nt, Artificial Sequence
  Description of Artificial Sequence: Synthetic oligonucleotide
acgaugggauuucacaacc

SEQ ID NO: 197356 - RNA, 19 nt, Artificial Sequence
  Description of Artificial Sequence: Synthetic oligonucleotide
aacgucuccccauccaugg

SEQ ID NO: 197357 - RNA, 19 nt, Artificial Sequence
  Description of Artificial Sequence: Synthetic oligonucleotide
uggagcaguagucagugag

SEQ ID NO: 197358 - RNA, 19 nt, Artificial Sequence
  Description of Artificial Sequence: Synthetic oligonucleotide
auugcuguaccagaccucc

SEQ ID NO: 197359 - RNA, 19 nt, Artificial Sequence
  Description of Artificial Sequence: Synthetic oligonucleotide
aguguaauuccaucugagg

SEQ ID NO: 197360 - RNA, 19 nt, Artificial Sequence
  Description of Artificial Sequence: Synthetic oligonucleotide
guaaauguuuggcaaauac

SEQ ID NO: 197361 - RNA, 19 nt, Artificial Sequence
  Description of Artificial Sequence: Synthetic oligonucleotide
caccuuuucaucauacacg

SEQ ID NO: 197362 - RNA, 19 nt, Artificial Sequence
  Description of Artificial Sequence: Synthetic oligonucleotide
ucaccuuuucaucauacac

SEQ ID NO: 197363 - RNA, 19 nt, Artificial Sequence
  Description of Artificial Sequence: Synthetic oligonucleotide
aacaaacaaggcuugugcu

SEQ ID NO: 197364 - RNA, 19 nt, Artificial Sequence
  Description of Artificial Sequence: Synthetic oligonucleotide
uaccgagcuauaaacacag

SEQ ID NO: 197365 - RNA, 19 nt, Artificial Sequence
  Description of Artificial Sequence: Synthetic oligonucleotide
uuuuaccgagcuauaaaca

SEQ ID NO: 197366 - RNA, 19 nt, Artificial Sequence
  Description of Artificial Sequence: Synthetic oligonucleotide
uccaaguuuauuuuaccga

SEQ ID NO: 197367 - RNA, 19 nt, Artificial Sequence
  Description of Artificial Sequence: Synthetic oligonucleotide
auacagaaccauuccauag

SEQ ID NO: 197368 - RNA, 19 nt, Artificial Sequence
  Description of Artificial Sequence: Synthetic oligonucleotide
ugggauuucacaaccgggc

SEQ ID NO: 197369 - RNA, 19 nt, Artificial Sequence
  Description of Artificial Sequence: Synthetic oligonucleotide
cacuauugggcaaugcugg

SEQ ID NO: 197370 - RNA, 19 nt, Artificial Sequence
  Description of Artificial Sequence: Synthetic oligonucleotide
aauaacaaugacauccccu

SEQ ID NO: 197371 - RNA, 19 nt, Artificial Sequence
  Description of Artificial Sequence: Synthetic oligonucleotide
aggagauucgaucucagcu

SEQ ID NO: 197372 - RNA, 19 nt, Artificial Sequence
  Description of Artificial Sequence: Synthetic oligonucleotide
cuugcguguacaaaccucc

SEQ ID NO: 197373 - RNA, 19 nt, Artificial Sequence
  Description of Artificial Sequence: Synthetic oligonucleotide
ucauaggacugguagaaga

SEQ ID NO: 197374 - RNA, 19 nt, Artificial Sequence
  Description of Artificial Sequence: Synthetic oligonucleotide
caucuuaaacacucgcugg

SEQ ID NO: 197375 - RNA, 19 nt, Artificial Sequence
  Description of Artificial Sequence: Synthetic oligonucleotide
aaagaacccguuugucuuc

SEQ ID NO: 197376 - RNA, 19 nt, Artificial Sequence
  Description of Artificial Sequence: Synthetic oligonucleotide
caugacuaaggaauuggcc

SEQ ID NO: 197377 - RNA, 19 nt, Artificial Sequence
  Description of Artificial Sequence: Synthetic oligonucleotide
uauuuuaccgagcuauaaa

SEQ ID NO: 197378 - RNA, 19 nt, Artificial Sequence
  Description of Artificial Sequence: Synthetic oligonucleotide
ugcuaugaaccuuugccag

SEQ ID NO: 197379 - RNA, 19 nt, Artificial Sequence
  Description of Artificial Sequence: Synthetic oligonucleotide
uguaccagaccuccaaucu

SEQ ID NO: 197380 - RNA, 19 nt, Artificial Sequence
  Description of Artificial Sequence: Synthetic oligonucleotide
ucucgggcuuuuaagacag

SEQ ID NO: 197381 - RNA, 19 nt, Artificial Sequence
  Description of Artificial Sequence: Synthetic oligonucleotide
aagacgugggcgugagugc

SEQ ID NO: 197382 - RNA, 19 nt, Artificial Sequence
  Description of Artificial Sequence: Synthetic oligonucleotide
agugguacaugacuaagga

SEQ ID NO: 197383 - RNA, 19 nt, Artificial Sequence
  Description of Artificial Sequence: Synthetic oligonucleotide
uucacaaccgggccuaacc

SEQ ID NO: 197384 - RNA, 19 nt, Artificial Sequence
  Description of Artificial Sequence: Synthetic oligonucleotide
auucauuaugccaggaagg

SEQ ID NO: 197385 - RNA, 19 nt, Artificial Sequence
  Description of Artificial Sequence: Synthetic oligonucleotide
uuuaauucuagagaagguu

SEQ ID NO: 197386 - RNA, 19 nt, Artificial Sequence
  Description of Artificial Sequence: Synthetic oligonucleotide
augaugugcaaacaaacaa

SEQ ID NO: 197387 - RNA, 19 nt, Artificial Sequence
  Description of Artificial Sequence: Synthetic oligonucleotide
uuuugggugagcccagcag

SEQ ID NO: 197388 - RNA, 19 nt, Artificial Sequence
  Description of Artificial Sequence: Synthetic oligonucleotide
aagacagcgaugacucugc

SEQ ID NO: 197389 - RNA, 19 nt, Artificial Sequence
  Description of Artificial Sequence: Synthetic oligonucleotide
uugaguucuaggucaagca

SEQ ID NO: 197390 - RNA, 19 nt, Artificial Sequence
  Description of Artificial Sequence: Synthetic oligonucleotide
uucauuaugccaggaaggc

SEQ ID NO: 197391 - RNA, 19 nt, Artificial Sequence
  Description of Artificial Sequence: Synthetic oligonucleotide
caaauuugaguucuagguc

SEQ ID NO: 197392 - RNA, 19 nt, Artificial Sequence
  Description of Artificial Sequence: Synthetic oligonucleotide
gaugugaccguggaagggg

SEQ ID NO: 197393 - RNA, 19 nt, Artificial Sequence
  Description of Artificial Sequence: Synthetic oligonucleotide
ucuagagaagguucaacaa

SEQ ID NO: 197394 - RNA, 19 nt, Artificial Sequence
  Description of Artificial Sequence: Synthetic oligonucleotide
aucauacacgaugcgaggc

SEQ ID NO: 197395 - RNA, 19 nt, Artificial Sequence
  Description of Artificial Sequence: Synthetic oligonucleotide
gaacauaucaccuuuucau

SEQ ID NO: 197396 - RNA, 19 nt, Artificial Sequence
  Description of Artificial Sequence: Synthetic oligonucleotide
ucauacacgaugcgaggcc

SEQ ID NO: 197397 - RNA, 19 nt, Artificial Sequence
  Description of Artificial Sequence: Synthetic oligonucleotide
aggguuagcaaagaacccg

SEQ ID NO: 197398 - RNA, 19 nt, Artificial Sequence
  Description of Artificial Sequence: Synthetic oligonucleotide
uuaccgagcuauaaacaca

SEQ ID NO: 197399 - RNA, 19 nt, Artificial Sequence
  Description of Artificial Sequence: Synthetic oligonucleotide
cucaugaaaggacugccgc

SEQ ID NO: 197400 - RNA, 19 nt, Artificial Sequence
  Description of Artificial Sequence: Synthetic oligonucleotide
auaaacacaggcccuuucu

SEQ ID NO: 197401 - RNA, 19 nt, Artificial Sequence
  Description of Artificial Sequence: Synthetic oligonucleotide
accaaacggggccucacgc

SEQ ID NO: 197402 - RNA, 19 nt, Artificial Sequence
  Description of Artificial Sequence: Synthetic oligonucleotide
agaacauaucaccuuuuca

SEQ ID NO: 197403 - RNA, 19 nt, Artificial Sequence
  Description of Artificial Sequence: Synthetic oligonucleotide
acccguuugucuucugugc

SEQ ID NO: 197404 - RNA, 19 nt, Artificial Sequence
  Description of Artificial Sequence: Synthetic oligonucleotide
ucucuugcguguacaaacc

SEQ ID NO: 197405 - RNA, 19 nt, Artificial Sequence
  Description of Artificial Sequence: Synthetic oligonucleotide
gaaggaacccauucauccc

SEQ ID NO: 197406 - RNA, 19 nt, Artificial Sequence
  Description of Artificial Sequence: Synthetic oligonucleotide
aauucccuggcgccccagc

SEQ ID NO: 197407 - RNA, 19 nt, Artificial Sequence
  Description of Artificial Sequence: Synthetic oligonucleotide
cuguugugcccauacaccc

SEQ ID NO: 197408 - RNA, 19 nt, Artificial Sequence
  Description of Artificial Sequence: Synthetic oligonucleotide
cugauauccaggacugugc

SEQ ID NO: 197409 - RNA, 19 nt, Artificial Sequence
  Description of Artificial Sequence: Synthetic oligonucleotide
acuccaaggguacugcuug

SEQ ID NO: 197410 - RNA, 19 nt, Artificial Sequence
  Description of Artificial Sequence: Synthetic oligonucleotide
ggaauagcuggucagggag

SEQ ID NO: 197411 - RNA, 19 nt, Artificial Sequence
  Description of Artificial Sequence: Synthetic oligonucleotide
uguccugacagcaacucau

SEQ ID NO: 197412 - RNA, 19 nt, Artificial Sequence
  Description of Artificial Sequence: Synthetic oligonucleotide
gagauucgaucucagcuug

SEQ ID NO: 197413 - RNA, 19 nt, Artificial Sequence
  Description of Artificial Sequence: Synthetic oligonucleotide
ugcccauacacccugcuaa

SEQ ID NO: 197414 - RNA, 19 nt, Artificial Sequence
  Description of Artificial Sequence: Synthetic oligonucleotide
acaugacuaaggaauuggc

SEQ ID NO: 197415 - RNA, 19 nt, Artificial Sequence
  Description of Artificial Sequence: Synthetic oligonucleotide
acuaccguguccuuugcca

SEQ ID NO: 197416 - RNA, 19 nt, Artificial Sequence
  Description of Artificial Sequence: Synthetic oligonucleotide
gcugcaacgauuucucugg

SEQ ID NO: 197417 - RNA, 19 nt, Artificial Sequence
  Description of Artificial Sequence: Synthetic oligonucleotide
ugugcacagaauuuauaaa

SEQ ID NO: 197418 - RNA, 19 nt, Artificial Sequence
  Description of Artificial Sequence: Synthetic oligonucleotide
aucuuaaacacucgcugga

SEQ ID NO: 197419 - RNA, 19 nt, Artificial Sequence
  Description of Artificial Sequence: Synthetic oligonucleotide
ugguguuagccauggggcg

SEQ ID NO: 197420 - RNA, 19 nt, Artificial Sequence
  Description of Artificial Sequence: Synthetic oligonucleotide
cagggcacccucaugaaag

SEQ ID NO: 197421 - RNA, 19 nt, Artificial Sequence
  Description of Artificial Sequence: Synthetic oligonucleotide
aguagucagugagugaguc

SEQ ID NO: 197422 - RNA, 19 nt, Artificial Sequence
  Description of Artificial Sequence: Synthetic oligonucleotide
gaccuaggagucucggugg

SEQ ID NO: 197423 - RNA, 19 nt, Artificial Sequence
  Description of Artificial Sequence: Synthetic oligonucleotide
aggccaauaacaaugacau

SEQ ID NO: 197424 - RNA, 19 nt, Artificial Sequence
  Description of Artificial Sequence: Synthetic oligonucleotide
ucuuaacacaggguuagca

SEQ ID NO: 197425 - RNA, 19 nt, Artificial Sequence
  Description of Artificial Sequence: Synthetic oligonucleotide
auacgaugggauuucacaa

SEQ ID NO: 197426 - RNA, 19 nt, Artificial Sequence
  Description of Artificial Sequence: Synthetic oligonucleotide
aggccugaucucuggagcc

SEQ ID NO: 197427 - RNA, 19 nt, Artificial Sequence
  Description of Artificial Sequence: Synthetic oligonucleotide
aaugugcugcaacgauuuc

SEQ ID NO: 197428 - RNA, 19 nt, Artificial Sequence
  Description of Artificial Sequence: Synthetic oligonucleotide
caucauacacgaugcgagg

SEQ ID NO: 197429 - RNA, 19 nt, Artificial Sequence
  Description of Artificial Sequence: Synthetic oligonucleotide
ugggcaguaaauguuuggc

SEQ ID NO: 197430 - RNA, 19 nt, Artificial Sequence
  Description of Artificial Sequence: Synthetic oligonucleotide
uuuauuuuaccgagcuaua

SEQ ID NO: 197431 - RNA, 19 nt, Artificial Sequence
  Description of Artificial Sequence: Synthetic oligonucleotide
cauugaaccugagaacucc

SEQ ID NO: 197432 - RNA, 19 nt, Artificial Sequence
  Description of Artificial Sequence: Synthetic oligonucleotide
ccaaguuuauuuuaccgag

SEQ ID NO: 197433 - RNA, 19 nt, Artificial Sequence
  Description of Artificial Sequence: Synthetic oligonucleotide
accgccugcauccaccagg

SEQ ID NO: 197434 - RNA, 19 nt, Artificial Sequence
  Description of Artificial Sequence: Synthetic oligonucleotide
caucuucccucaauguggg

SEQ ID NO: 197435 - RNA, 19 nt, Artificial Sequence
  Description of Artificial Sequence: Synthetic oligonucleotide
uaaccgcugagauauuacu

SEQ ID NO: 197436 - RNA, 19 nt, Artificial Sequence
  Description of Artificial Sequence: Synthetic oligonucleotide
ugagugguacaugacuaag

SEQ ID NO: 197437 - RNA, 19 nt, Artificial Sequence
  Description of Artificial Sequence: Synthetic oligonucleotide
auugaaccugagaacuccc

SEQ ID NO: 197438 - RNA, 19 nt, Artificial Sequence
  Description of Artificial Sequence: Synthetic oligonucleotide
uacgaugggauuucacaac

SEQ ID NO: 197439 - RNA, 19 nt, Artificial Sequence
  Description of Artificial Sequence: Synthetic oligonucleotide
uauaaacacaggcccuuuc

SEQ ID NO: 197440 - RNA, 19 nt, Artificial Sequence
  Description of Artificial Sequence: Synthetic oligonucleotide
ucgccugcugauauccagg

SEQ ID NO: 197441 - RNA, 19 nt, Artificial Sequence
  Description of Artificial Sequence: Synthetic oligonucleotide
aaacggacaggcccauuca

SEQ ID NO: 197442 - RNA, 19 nt, Artificial Sequence
  Description of Artificial Sequence: Synthetic oligonucleotide
ucuugcguguacaaaccuc

SEQ ID NO: 197443 - RNA, 19 nt, Artificial Sequence
  Description of Artificial Sequence: Synthetic oligonucleotide
guacaaaccuccaaccggc

SEQ ID NO: 197444 - RNA, 19 nt, Artificial Sequence
  Description of Artificial Sequence: Synthetic oligonucleotide
ggucaagcagacuccaagg

SEQ ID NO: 197445 - RNA, 19 nt, Artificial Sequence
  Description of Artificial Sequence: Synthetic oligonucleotide
accaaaagucucuagugua

SEQ ID NO: 197446 - RNA, 19 nt, Artificial Sequence
  Description of Artificial Sequence: Synthetic oligonucleotide
ucuaucuaggucuguuuau

SEQ ID NO: 197447 - RNA, 19 nt, Artificial Sequence
  Description of Artificial Sequence: Synthetic oligonucleotide
uuaauuuguuaaagugaua

SEQ ID NO: 197448 - RNA, 19 nt, Artificial Sequence
  Description of Artificial Sequence: Synthetic oligonucleotide
ggcauuaccuucucuugcg

SEQ ID NO: 197449 - RNA, 19 nt, Artificial Sequence
  Description of Artificial Sequence: Synthetic oligonucleotide
cuaaccgcugagauauuac

SEQ ID NO: 197450 - RNA, 19 nt, Artificial Sequence
  Description of Artificial Sequence: Synthetic oligonucleotide
caggccaauaacaaugaca

SEQ ID NO: 197451 - RNA, 19 nt, Artificial Sequence
  Description of Artificial Sequence: Synthetic oligonucleotide
caacgauuucucugguucc

SEQ ID NO: 197452 - RNA, 19 nt, Artificial Sequence
  Description of Artificial Sequence: Synthetic oligonucleotide
ucucuaguguaauuccauc

SEQ ID NO: 197453 - RNA, 19 nt, Artificial Sequence
  Description of Artificial Sequence: Synthetic oligonucleotide
uugaaccugagaacuccca

SEQ ID NO: 197454 - RNA, 19 nt, Artificial Sequence
  Description of Artificial Sequence: Synthetic oligonucleotide
gcaguagucagugagugag

SEQ ID NO: 197455 - RNA, 19 nt, Artificial Sequence
  Description of Artificial Sequence: Synthetic oligonucleotide
uugaacgucuccccaucca

SEQ ID NO: 197456 - RNA, 19 nt, Artificial Sequence
  Description of Artificial Sequence: Synthetic oligonucleotide
cauuaugccaggaaggccu

SEQ ID NO: 197457 - RNA, 19 nt, Artificial Sequence
  Description of Artificial Sequence: Synthetic oligonucleotide
acaauugaugugaccgugg

SEQ ID NO: 197458 - RNA, 19 nt, Artificial Sequence
  Description of Artificial Sequence: Synthetic oligonucleotide
cgugcuaugaaccuuugcc

SEQ ID NO: 197459 - RNA, 19 nt, Artificial Sequence
  Description of Artificial Sequence: Synthetic oligonucleotide
cuuuggggaaggagggccg

SEQ ID NO: 197460 - RNA, 19 nt, Artificial Sequence
  Description of Artificial Sequence: Synthetic oligonucleotide
uccuugacgcucagggacc

SEQ ID NO: 197461 - RNA, 19 nt, Artificial Sequence
  Description of Artificial Sequence: Synthetic oligonucleotide
agcucucgggcuuuuaaga

SEQ ID NO: 197462 - RNA, 19 nt, Artificial Sequence
  Description of Artificial Sequence: Synthetic oligonucleotide
agcacaacuucacauucaa

SEQ ID NO: 197463 - RNA, 19 nt, Artificial Sequence
  Description of Artificial Sequence: Synthetic oligonucleotide
acuaugugacugccugggg

SEQ ID NO: 197464 - RNA, 19 nt, Artificial Sequence
  Description of Artificial Sequence: Synthetic oligonucleotide
accccaaccagaucucaag

SEQ ID NO: 197465 - RNA, 19 nt, Artificial Sequence
  Description of Artificial Sequence: Synthetic oligonucleotide
cgagcuauaaacacaggcc

SEQ ID NO: 197466 - RNA, 19 nt, Artificial Sequence
  Description of Artificial Sequence: Synthetic oligonucleotide
ucccauacagagcccuugc

SEQ ID NO: 197467 - RNA, 19 nt, Artificial Sequence
  Description of Artificial Sequence: Synthetic oligonucleotide
caggguuagcaaagaaccc

SEQ ID NO: 197468 - RNA, 19 nt, Artificial Sequence
  Description of Artificial Sequence: Synthetic oligonucleotide
aacgauuucucugguuccu

SEQ ID NO: 197469 - RNA, 19 nt, Artificial Sequence
  Description of Artificial Sequence: Synthetic oligonucleotide
aauucuagagaagguucaa

SEQ ID NO: 197470 - RNA, 19 nt, Artificial Sequence
  Description of Artificial Sequence: Synthetic oligonucleotide
uggaauagcuggucaggga

SEQ ID NO: 197471 - RNA, 19 nt, Artificial Sequence
  Description of Artificial Sequence: Synthetic oligonucleotide
gcaacgauuucucugguuc

SEQ ID NO: 197472 - RNA, 19 nt, Artificial Sequence
  Description of Artificial Sequence: Synthetic oligonucleotide
ggcaccugaauucuucucc

SEQ ID NO: 197473 - RNA, 19 nt, Artificial Sequence
  Description of Artificial Sequence: Synthetic oligonucleotide
aaacggggccucacgcucc

SEQ ID NO: 197474 - RNA, 19 nt, Artificial Sequence
  Description of Artificial Sequence: Synthetic oligonucleotide
accgcugagauauuacuua

SEQ ID NO: 197475 - RNA, 19 nt, Artificial Sequence
  Description of Artificial Sequence: Synthetic oligonucleotide
gugcuaugaaccuuugcca

SEQ ID NO: 197476 - RNA, 19 nt, Artificial Sequence
  Description of Artificial Sequence: Synthetic oligonucleotide
ucaaauucccuggcgcccc

SEQ ID NO: 197477 - RNA, 19 nt, Artificial Sequence
  Description of Artificial Sequence: Synthetic oligonucleotide
ugaaaggacugccgcgaga

SEQ ID NO: 197478 - RNA, 19 nt, Artificial Sequence
  Description of Artificial Sequence: Synthetic oligonucleotide
ggaccuaggagucucggug

SEQ ID NO: 197479 - RNA, 19 nt, Artificial Sequence
  Description of Artificial Sequence: Synthetic oligonucleotide
uuagccauggggcgccgca

SEQ ID NO: 197480 - RNA, 19 nt, Artificial Sequence
  Description of Artificial Sequence: Synthetic oligonucleotide
cuaguguaauuccaucuga

SEQ ID NO: 197481 - RNA, 19 nt, Artificial Sequence
  Description of Artificial Sequence: Synthetic oligonucleotide
aauguuuggcaaauacaua

SEQ ID NO: 197482 - RNA, 19 nt, Artificial Sequence
  Description of Artificial Sequence: Synthetic oligonucleotide
cucgcacugggcuuuccgg

SEQ ID NO: 197483 - RNA, 19 nt, Artificial Sequence
  Description of Artificial Sequence: Synthetic oligonucleotide
uaggagaacauaucaccuu

SEQ ID NO: 197484 - RNA, 19 nt, Artificial Sequence
  Description of Artificial Sequence: Synthetic oligonucleotide
gaccaaacggggccucacg

SEQ ID NO: 197485 - RNA, 19 nt, Artificial Sequence
  Description of Artificial Sequence: Synthetic oligonucleotide
cucucaaccagacccugug

SEQ ID NO: 197486 - RNA, 19 nt, Artificial Sequence
  Description of Artificial Sequence: Synthetic oligonucleotide
ccgagcuauaaacacaggc

SEQ ID NO: 197487 - RNA, 19 nt, Artificial Sequence
  Description of Artificial Sequence: Synthetic oligonucleotide
uaggaggacauggagcagu

SEQ ID NO: 197488 - RNA, 19 nt, Artificial Sequence
  Description of Artificial Sequence: Synthetic oligonucleotide
uacaaaccuccaaccggcc

SEQ ID NO: 197489 - RNA, 19 nt, Artificial Sequence
  Description of Artificial Sequence: Synthetic oligonucleotide
ucgagcugcguccaaguuu

SEQ ID NO: 197490 - RNA, 19 nt, Artificial Sequence
  Description of Artificial Sequence: Synthetic oligonucleotide
agacagcgaugacucugcc

SEQ ID NO: 197491 - RNA, 19 nt, Artificial Sequence
  Description of Artificial Sequence: Synthetic oligonucleotide
gagguuucccauacagagc

SEQ ID NO: 197492 - RNA, 19 nt, Artificial Sequence
  Description of Artificial Sequence: Synthetic oligonucleotide
acacuaccguguccuuugc

SEQ ID NO: 197493 - RNA, 19 nt, Artificial Sequence
  Description of Artificial Sequence: Synthetic oligonucleotide
cacaaccgggccuaaccgc

SEQ ID NO: 197494 - RNA, 19 nt, Artificial Sequence
  Description of Artificial Sequence: Synthetic oligonucleotide
cacaauugaugugaccgug

SEQ ID NO: 197495 - RNA, 19 nt, Artificial Sequence
  Description of Artificial Sequence: Synthetic oligonucleotide
augaaaggacugccgcgag

SEQ ID NO: 197496 - RNA, 19 nt, Artificial Sequence
  Description of Artificial Sequence: Synthetic oligonucleotide
ugcguguacaaaccuccaa

SEQ ID NO: 197497 - RNA, 19 nt, Artificial Sequence
  Description of Artificial Sequence: Synthetic oligonucleotide
agauuaugaugugcaaaca

SEQ ID NO: 197498 - RNA, 19 nt, Artificial Sequence
  Description of Artificial Sequence: Synthetic oligonucleotide
cugauuggguuucuccuuc

SEQ ID NO: 197499 - RNA, 19 nt, Artificial Sequence
  Description of Artificial Sequence: Synthetic oligonucleotide
ucgcacugggcuuuccggc

SEQ ID NO: 197500 - RNA, 19 nt, Artificial Sequence
  Description of Artificial Sequence: Synthetic oligonucleotide
agccacacacuaccguguc

SEQ ID NO: 197501 - RNA, 19 nt, Artificial Sequence
  Description of Artificial Sequence: Synthetic oligonucleotide
ugggcgugagugcacgugu

SEQ ID NO: 197502 - RNA, 19 nt, Artificial Sequence
  Description of Artificial Sequence: Synthetic oligonucleotide
ucuuaaacacucgcuggau

SEQ ID NO: 197503 - RNA, 19 nt, Artificial Sequence
  Description of Artificial Sequence: Synthetic oligonucleotide
gacuaaggaauuggccuug

SEQ ID NO: 197504 - RNA, 19 nt, Artificial Sequence
  Description of Artificial Sequence: Synthetic oligonucleotide
uuaagacagcgaugacucu

SEQ ID NO: 197505 - RNA, 19 nt, Artificial Sequence
  Description of Artificial Sequence: Synthetic oligonucleotide
caggagauucgaucucagc

SEQ ID NO: 197506 - RNA, 19 nt, Artificial Sequence
  Description of Artificial Sequence: Synthetic oligonucleotide
ggugucccagcgcaggacg

SEQ ID NO: 197507 - RNA, 19 nt, Artificial Sequence
  Description of Artificial Sequence: Synthetic oligonucleotide
cuguaaaacuguaaauggu

SEQ ID NO: 197508 - RNA, 19 nt, Artificial Sequence
  Description of Artificial Sequence: Synthetic oligonucleotide
cagcuugaccaaacggggc

SEQ ID NO: 197509 - RNA, 19 nt, Artificial Sequence
  Description of Artificial Sequence: Synthetic oligonucleotide
gucaaauucccuggcgccc

SEQ ID NO: 197510 - RNA, 19 nt, Artificial Sequence
  Description of Artificial Sequence: Synthetic oligonucleotide
aagaacccguuugucuucu

SEQ ID NO: 197511 - RNA, 19 nt, Artificial Sequence
  Description of Artificial Sequence: Synthetic oligonucleotide
ucucucaaccagacccugu

SEQ ID NO: 197512 - RNA, 19 nt, Artificial Sequence
  Description of Artificial Sequence: Synthetic oligonucleotide
ccaaaugaggucuuugaca

SEQ ID NO: 197513 - RNA, 19 nt, Artificial Sequence
  Description of Artificial Sequence: Synthetic oligonucleotide
uugcguguacaaaccucca

SEQ ID NO: 197514 - RNA, 19 nt, Artificial Sequence
  Description of Artificial Sequence: Synthetic oligonucleotide
ucgaucucagcuugaccaa

SEQ ID NO: 197515 - RNA, 19 nt, Artificial Sequence
  Description of Artificial Sequence: Synthetic oligonucleotide
caaacggggccucacgcuc

SEQ ID NO: 197516 - RNA, 19 nt, Artificial Sequence
  Description of Artificial Sequence: Synthetic oligonucleotide
uaccguguccuuugccacc

SEQ ID NO: 197517 - RNA, 19 nt, Artificial Sequence
  Description of Artificial Sequence: Synthetic oligonucleotide
ccacuauugggcaaugcug

SEQ ID NO: 197518 - RNA, 19 nt, Artificial Sequence
  Description of Artificial Sequence: Synthetic oligonucleotide
uaagucccauacgauggga

SEQ ID NO: 197519 - RNA, 19 nt, Artificial Sequence
  Description of Artificial Sequence: Synthetic oligonucleotide
ucuaggcaccagaccaccu

SEQ ID NO: 197520 - RNA, 19 nt, Artificial Sequence
  Description of Artificial Sequence: Synthetic oligonucleotide
uacacccugcuaacaauuu

SEQ ID NO: 197521 - RNA, 19 nt, Artificial Sequence
  Description of Artificial Sequence: Synthetic oligonucleotide
caugaaaggacugccgcga

SEQ ID NO: 197522 - RNA, 19 nt, Artificial Sequence
  Description of Artificial Sequence: Synthetic oligonucleotide
gauuucacaaccgggccua

SEQ ID NO: 197523 - RNA, 19 nt, Artificial Sequence
  Description of Artificial Sequence: Synthetic oligonucleotide
aggacugccgcgagaugcc

SEQ ID NO: 197524 - RNA, 19 nt, Artificial Sequence
  Description of Artificial Sequence: Synthetic oligonucleotide
ucgcuggaugguguuagcc

SEQ ID NO: 197525 - RNA, 19 nt, Artificial Sequence
  Description of Artificial Sequence: Synthetic oligonucleotide
uucucuaucuaggucuguu

SEQ ID NO: 197526 - RNA, 19 nt, Artificial Sequence
  Description of Artificial Sequence: Synthetic oligonucleotide
ccaagcaggagauucgauc

SEQ ID NO: 197527 - RNA, 19 nt, Artificial Sequence
  Description of Artificial Sequence: Synthetic oligonucleotide
agcucaucuuaaacacucg

SEQ ID NO: 197528 - RNA, 19 nt, Artificial Sequence
  Description of Artificial Sequence: Synthetic oligonucleotide
ccaacaggcacgaagcuca

SEQ ID NO: 197529 - RNA, 19 nt, Artificial Sequence
  Description of Artificial Sequence: Synthetic oligonucleotide
aaccgcugagauauuacuu

SEQ ID NO: 197530 - RNA, 19 nt, Artificial Sequence
  Description of Artificial Sequence: Synthetic oligonucleotide
cugacggggaccuaggagu

SEQ ID NO: 197531 - RNA, 19 nt, Artificial Sequence
  Description of Artificial Sequence: Synthetic oligonucleotide
agcuauaaacacaggcccu

SEQ ID NO: 197532 - RNA, 19 nt, Artificial Sequence
  Description of Artificial Sequence: Synthetic oligonucleotide
agcaggagauucgaucuca

SEQ ID NO: 197533 - RNA, 19 nt, Artificial Sequence
  Description of Artificial Sequence: Synthetic oligonucleotide
ccugagaacucccaaacca

SEQ ID NO: 197534 - RNA, 19 nt, Artificial Sequence
  Description of Artificial Sequence: Synthetic oligonucleotide
cguguacaaaccuccaacc

SEQ ID NO: 197535 - RNA, 19 nt, Artificial Sequence
  Description of Artificial Sequence: Synthetic oligonucleotide
ugacggggaccuaggaguc

SEQ ID NO: 197536 - RNA, 19 nt, Artificial Sequence
  Description of Artificial Sequence: Synthetic oligonucleotide
cauugcuguaccagaccuc

SEQ ID NO: 197537 - RNA, 19 nt, Artificial Sequence
  Description of Artificial Sequence: Synthetic oligonucleotide
uguagccgaggggucaggc

SEQ ID NO: 197538 - RNA, 19 nt, Artificial Sequence
  Description of Artificial Sequence: Synthetic oligonucleotide
auaucaccuuuucaucaua

SEQ ID NO: 197539 - RNA, 19 nt, Artificial Sequence
  Description of Artificial Sequence: Synthetic oligonucleotide
guguugguugaacgucucc

SEQ ID NO: 197540 - RNA, 19 nt, Artificial Sequence
  Description of Artificial Sequence: Synthetic oligonucleotide
aacaggcacgaagcucauc

SEQ ID NO: 197541 - RNA, 19 nt, Artificial Sequence
  Description of Artificial Sequence: Synthetic oligonucleotide
uucuuaacacaggguuagc

SEQ ID NO: 197542 - RNA, 19 nt, Artificial Sequence
  Description of Artificial Sequence: Synthetic oligonucleotide
aagucccauacgaugggau

SEQ ID NO: 197543 - RNA, 19 nt, Artificial Sequence
  Description of Artificial Sequence: Synthetic oligonucleotide
aggugugguaggagguagc

SEQ ID NO: 197544 - RNA, 19 nt, Artificial Sequence
  Description of Artificial Sequence: Synthetic oligonucleotide
aaccgggccuaaccgcuga

SEQ ID NO: 197545 - RNA, 19 nt, Artificial Sequence
  Description of Artificial Sequence: Synthetic oligonucleotide
agaagugacgcugggcgaa

SEQ ID NO: 197546 - RNA, 19 nt, Artificial Sequence
  Description of Artificial Sequence: Synthetic oligonucleotide
gaaaggacugccgcgagau

SEQ ID NO: 197547 - RNA, 19 nt, Artificial Sequence
  Description of Artificial Sequence: Synthetic oligonucleotide
ccugcuaacaauuucacuu

SEQ ID NO: 197548 - RNA, 19 nt, Artificial Sequence
  Description of Artificial Sequence: Synthetic oligonucleotide
uacacgaugcgaggccuga

SEQ ID NO: 197549 - RNA, 19 nt, Artificial Sequence
  Description of Artificial Sequence: Synthetic oligonucleotide
gugcaaacaaacaaggcuu

SEQ ID NO: 197550 - RNA, 19 nt, Artificial Sequence
  Description of Artificial Sequence: Synthetic oligonucleotide
uccgugcuaugaaccuuug

SEQ ID NO: 197551 - RNA, 19 nt, Artificial Sequence
  Description of Artificial Sequence: Synthetic oligonucleotide
aggaaacgugucucugaga

SEQ ID NO: 197552 - RNA, 19 nt, Artificial Sequence
  Description of Artificial Sequence: Synthetic oligonucleotide
gaaugugcugcaacgauuu

SEQ ID NO: 197553 - RNA, 19 nt, Artificial Sequence
  Description of Artificial Sequence: Synthetic oligonucleotide
acggggaccuaggagucuc

SEQ ID NO: 197554 - RNA, 19 nt, Artificial Sequence
  Description of Artificial Sequence: Synthetic oligonucleotide
gugguacaugacuaaggaa

SEQ ID NO: 197555 - RNA, 19 nt, Artificial Sequence
  Description of Artificial Sequence: Synthetic oligonucleotide
caccaggaccccaugagaa

SEQ ID NO: 197556 - RNA, 19 nt, Artificial Sequence
  Description of Artificial Sequence: Synthetic oligonucleotide
ugauguugacauguuccuu

SEQ ID NO: 197557 - RNA, 19 nt, Artificial Sequence
  Description of Artificial Sequence: Synthetic oligonucleotide
acaaccgggccuaaccgcu

SEQ ID NO: 197558 - RNA, 19 nt, Artificial Sequence
  Description of Artificial Sequence: Synthetic oligonucleotide
gaugcgaggccugaucucu

SEQ ID NO: 197559 - RNA, 19 nt, Artificial Sequence
  Description of Artificial Sequence: Synthetic oligonucleotide
aagugacgcugggcgaaag

SEQ ID NO: 197560 - RNA, 19 nt, Artificial Sequence
  Description of Artificial Sequence: Synthetic oligonucleotide
ugcaacgauuucucugguu

SEQ ID NO: 197561 - RNA, 19 nt, Artificial Sequence
  Description of Artificial Sequence: Synthetic oligonucleotide
gggacucagagccuuguga

SEQ ID NO: 197562 - RNA, 19 nt, Artificial Sequence
  Description of Artificial Sequence: Synthetic oligonucleotide
agguguugguugaacgucu

SEQ ID NO: 197563 - RNA, 19 nt, Artificial Sequence
  Description of Artificial Sequence: Synthetic oligonucleotide
cuuugacucugaaugugcu

SEQ ID NO: 197564 - RNA, 19 nt, Artificial Sequence
  Description of Artificial Sequence: Synthetic oligonucleotide
cacgaugcgaggccugauc

SEQ ID NO: 197565 - RNA, 19 nt, Artificial Sequence
  Description of Artificial Sequence: Synthetic oligonucleotide
ugaccguggaaggggcugc

SEQ ID NO: 197566 - RNA, 19 nt, Artificial Sequence
  Description of Artificial Sequence: Synthetic oligonucleotide
uucugugcccuuggagggc

SEQ ID NO: 197567 - RNA, 19 nt, Artificial Sequence
  Description of Artificial Sequence: Synthetic oligonucleotide
caacaugagccaagcacaa

SEQ ID NO: 197568 - RNA, 19 nt, Artificial Sequence
  Description of Artificial Sequence: Synthetic oligonucleotide
aaauucccuggcgccccag

SEQ ID NO: 197569 - RNA, 19 nt, Artificial Sequence
  Description of Artificial Sequence: Synthetic oligonucleotide
ucccauacgaugggauuuc

SEQ ID NO: 197570 - RNA, 19 nt, Artificial Sequence
  Description of Artificial Sequence: Synthetic oligonucleotide
gggcaguaaauguuuggca

SEQ ID NO: 197571 - RNA, 19 nt, Artificial Sequence
  Description of Artificial Sequence: Synthetic oligonucleotide
auuaugccaggaaggccug

SEQ ID NO: 197572 - RNA, 19 nt, Artificial Sequence
  Description of Artificial Sequence: Synthetic oligonucleotide
cacuaccguguccuuugcc

SEQ ID NO: 197573 - RNA, 19 nt, Artificial Sequence
  Description of Artificial Sequence: Synthetic oligonucleotide
cccaaaugaggucuuugac

SEQ ID NO: 197574 - RNA, 19 nt, Artificial Sequence
  Description of Artificial Sequence: Synthetic oligonucleotide
guuagcaaagaacccguuu

SEQ ID NO: 197575 - RNA, 19 nt, Artificial Sequence
  Description of Artificial Sequence: Synthetic oligonucleotide
acgugucucugagaggacu

SEQ ID NO: 197576 - RNA, 19 nt, Artificial Sequence
  Description of Artificial Sequence: Synthetic oligonucleotide
cugagugguacaugacuaa

SEQ ID NO: 197577 - RNA, 19 nt, Artificial Sequence
  Description of Artificial Sequence: Synthetic oligonucleotide
gguguuagccauggggcgc

SEQ ID NO: 197578 - RNA, 19 nt, Artificial Sequence
  Description of Artificial Sequence: Synthetic oligonucleotide
agacugacggggaccuagg

SEQ ID NO: 197579 - RNA, 19 nt, Artificial Sequence
  Description of Artificial Sequence: Synthetic oligonucleotide
agacgugggcgugagugca

SEQ ID NO: 197580 - RNA, 19 nt, Artificial Sequence
  Description of Artificial Sequence: Synthetic oligonucleotide
gcucucgggcuuuuaagac

SEQ ID NO: 197581 - RNA, 19 nt, Artificial Sequence
  Description of Artificial Sequence: Synthetic oligonucleotide
guguuagccauggggcgcc

SEQ ID NO: 197582 - RNA, 19 nt, Artificial Sequence
  Description of Artificial Sequence: Synthetic oligonucleotide
ugccgcgagaugccguagu

SEQ ID NO: 197583 - RNA, 19 nt, Artificial Sequence
  Description of Artificial Sequence: Synthetic oligonucleotide
acgauuucucugguuccug

SEQ ID NO: 197584 - RNA, 19 nt, Artificial Sequence
  Description of Artificial Sequence: Synthetic oligonucleotide
caggaccccaugagaaguc

SEQ ID NO: 197585 - RNA, 19 nt, Artificial Sequence
  Description of Artificial Sequence: Synthetic oligonucleotide
ugcacaccccaaccagauc

SEQ ID NO: 197586 - RNA, 19 nt, Artificial Sequence
  Description of Artificial Sequence: Synthetic oligonucleotide
gugaccguggaaggggcug

SEQ ID NO: 197587 - RNA, 19 nt, Artificial Sequence
  Description of Artificial Sequence: Synthetic oligonucleotide
cucgcuggaugguguuagc

SEQ ID NO: 197588 - RNA, 19 nt, Artificial Sequence
  Description of Artificial Sequence: Synthetic oligonucleotide
cuaggucaagcagacucca

SEQ ID NO: 197589 - RNA, 19 nt, Artificial Sequence
  Description of Artificial Sequence: Synthetic oligonucleotide
uugaccaaacggggccuca

SEQ ID NO: 197590 - RNA, 19 nt, Artificial Sequence
  Description of Artificial Sequence: Synthetic oligonucleotide
gguugaacgucuccccauc

SEQ ID NO: 197591 - RNA, 19 nt, Artificial Sequence
  Description of Artificial Sequence: Synthetic oligonucleotide
cucagcccuucuuaacaca

SEQ ID NO: 197592 - RNA, 19 nt, Artificial Sequence
  Description of Artificial Sequence: Synthetic oligonucleotide
gggcuuuuaagacagcgau

SEQ ID NO: 197593 - RNA, 19 nt, Artificial Sequence
  Description of Artificial Sequence: Synthetic oligonucleotide
caucagcuugcacacccca

SEQ ID NO: 197594 - RNA, 19 nt, Artificial Sequence
  Description of Artificial Sequence: Synthetic oligonucleotide
cccguuugucuucugugcc

SEQ ID NO: 197595 - RNA, 19 nt, Artificial Sequence
  Description of Artificial Sequence: Synthetic oligonucleotide
acugccgcgagaugccgua

SEQ ID NO: 197596 - RNA, 19 nt, Artificial Sequence
  Description of Artificial Sequence: Synthetic oligonucleotide
guagccgaggggucaggca

SEQ ID NO: 197597 - RNA, 19 nt, Artificial Sequence
  Description of Artificial Sequence: Synthetic oligonucleotide
uggggcgccgcaugcugug

SEQ ID NO: 197598 - RNA, 19 nt, Artificial Sequence
  Description of Artificial Sequence: Synthetic oligonucleotide
gacucuugaaggaacccau

SEQ ID NO: 197599 - RNA, 19 nt, Artificial Sequence
  Description of Artificial Sequence: Synthetic oligonucleotide
uggcaaagacgugggcgug

SEQ ID NO: 197600 - RNA, 19 nt, Artificial Sequence
  Description of Artificial Sequence: Synthetic oligonucleotide
accuucucuugcguguaca

SEQ ID NO: 197601 - RNA, 19 nt, Artificial Sequence
  Description of Artificial Sequence: Synthetic oligonucleotide
cugaggcaaucugguaggc

SEQ ID NO: 197602 - RNA, 19 nt, Artificial Sequence
  Description of Artificial Sequence: Synthetic oligonucleotide
ccguuugucuucugugccc

SEQ ID NO: 197603 - RNA, 19 nt, Artificial Sequence
  Description of Artificial Sequence: Synthetic oligonucleotide
acgaggaguaggaggacau

SEQ ID NO: 197604 - RNA, 19 nt, Artificial Sequence
  Description of Artificial Sequence: Synthetic oligonucleotide
cucucucaaccagacccug

SEQ ID NO: 197605 - RNA, 19 nt, Artificial Sequence
  Description of Artificial Sequence: Synthetic oligonucleotide
uguuagccauggggcgccg

SEQ ID NO: 197606 - RNA, 19 nt, Artificial Sequence
  Description of Artificial Sequence: Synthetic oligonucleotide
guuucccauacagagcccu

SEQ ID NO: 197607 - RNA, 19 nt, Artificial Sequence
  Description of Artificial Sequence: Synthetic oligonucleotide
ccauacagagcccuugcca

SEQ ID NO: 197608 - RNA, 19 nt, Artificial Sequence
  Description of Artificial Sequence: Synthetic oligonucleotide
aaccggcccagcuccucau

SEQ ID NO: 197609 - RNA, 19 nt, Artificial Sequence
  Description of Artificial Sequence: Synthetic oligonucleotide
ggccuaaccgcugagauau

SEQ ID NO: 197610 - RNA, 19 nt, Artificial Sequence
  Description of Artificial Sequence: Synthetic oligonucleotide
accgagcuauaaacacagg

SEQ ID NO: 197611 - RNA, 19 nt, Artificial Sequence
  Description of Artificial Sequence: Synthetic oligonucleotide
cuuccacucccagggcacc

SEQ ID NO: 197612 - RNA, 19 nt, Artificial Sequence
  Description of Artificial Sequence: Synthetic oligonucleotide
ggcuuuccggcugugacuc

SEQ ID NO: 197613 - RNA, 19 nt, Artificial Sequence
  Description of Artificial Sequence: Synthetic oligonucleotide
cacgagcccuccucccacc

SEQ ID NO: 197614 - RNA, 19 nt, Artificial Sequence
  Description of Artificial Sequence: Synthetic oligonucleotide
cgaugggauuucacaaccg

SEQ ID NO: 197615 - RNA, 19 nt, Artificial Sequence
  Description of Artificial Sequence: Synthetic oligonucleotide
gcguccaaguuuauuuuac

SEQ ID NO: 197616 - RNA, 19 nt, Artificial Sequence
  Description of Artificial Sequence: Synthetic oligonucleotide
cgcgagaugccguagucug

SEQ ID NO: 197617 - RNA, 19 nt, Artificial Sequence
  Description of Artificial Sequence: Synthetic oligonucleotide
auacacgaugcgaggccug

SEQ ID NO: 197618 - RNA, 19 nt, Artificial Sequence
  Description of Artificial Sequence: Synthetic oligonucleotide
auccgugcuaugaaccuuu

SEQ ID NO: 197619 - RNA, 19 nt, Artificial Sequence
  Description of Artificial Sequence: Synthetic oligonucleotide
ugugcccuuggagggcugu

SEQ ID NO: 197620 - RNA, 19 nt, Artificial Sequence
  Description of Artificial Sequence: Synthetic oligonucleotide
gcucacgucugcaaugcac

SEQ ID NO: 197621 - RNA, 19 nt, Artificial Sequence
  Description of Artificial Sequence: Synthetic oligonucleotide
auccccacuauugggcaau

SEQ ID NO: 197622 - RNA, 19 nt, Artificial Sequence
  Description of Artificial Sequence: Synthetic oligonucleotide
acgugugugcacagaauuu

SEQ ID NO: 197623 - RNA, 19 nt, Artificial Sequence
  Description of Artificial Sequence: Synthetic oligonucleotide
gcgaaaggcacacuggaau

SEQ ID NO: 197624 - RNA, 19 nt, Artificial Sequence
  Description of Artificial Sequence: Synthetic oligonucleotide
cacgugugugcacagaauu

SEQ ID NO: 197625 - RNA, 19 nt, Artificial Sequence
  Description of Artificial Sequence: Synthetic oligonucleotide
ugagaggacuggggucccc

SEQ ID NO: 197626 - RNA, 19 nt, Artificial Sequence
  Description of Artificial Sequence: Synthetic oligonucleotide
ccauacgaugggauuucac

SEQ ID NO: 197627 - RNA, 19 nt, Artificial Sequence
  Description of Artificial Sequence: Synthetic oligonucleotide
gcugagugguacaugacua

SEQ ID NO: 197628 - RNA, 19 nt, Artificial Sequence
  Description of Artificial Sequence: Synthetic oligonucleotide
gcaaagacgugggcgugag

SEQ ID NO: 197629 - RNA, 19 nt, Artificial Sequence
  Description of Artificial Sequence: Synthetic oligonucleotide
cucgggcuuuuaagacagc

SEQ ID NO: 197630 - RNA, 19 nt, Artificial Sequence
  Description of Artificial Sequence: Synthetic oligonucleotide
ccugaucucuggagccugg

SEQ ID NO: 197631 - RNA, 19 nt, Artificial Sequence
  Description of Artificial Sequence: Synthetic oligonucleotide
acgagcccuccucccaccu

SEQ ID NO: 197632 - RNA, 19 nt, Artificial Sequence
  Description of Artificial Sequence: Synthetic oligonucleotide
uccaaccggcccagcuccu

SEQ ID NO: 197633 - RNA, 19 nt, Artificial Sequence
  Description of Artificial Sequence: Synthetic oligonucleotide
agcagacuccaaggguacu

SEQ ID NO: 197634 - RNA, 19 nt, Artificial Sequence
  Description of Artificial Sequence: Synthetic oligonucleotide
ccgggcacacagcugguag

SEQ ID NO: 197635 - RNA, 19 nt, Artificial Sequence
  Description of Artificial Sequence: Synthetic oligonucleotide
caugagccaagcacaacuu

SEQ ID NO: 197636 - RNA, 19 nt, Artificial Sequence
  Description of Artificial Sequence: Synthetic oligonucleotide
cugagaggacugggguccc

SEQ ID NO: 197637 - RNA, 19 nt, Artificial Sequence
  Description of Artificial Sequence: Synthetic oligonucleotide
ccucgcacugggcuuuccg

SEQ ID NO: 197638 - RNA, 19 nt, Artificial Sequence
  Description of Artificial Sequence: Synthetic oligonucleotide
gucucuaguguaauuccau

SEQ ID NO: 197639 - RNA, 19 nt, Artificial Sequence
  Description of Artificial Sequence: Synthetic oligonucleotide
ccauacacccugcuaacaa

SEQ ID NO: 197640 - RNA, 19 nt, Artificial Sequence
  Description of Artificial Sequence: Synthetic oligonucleotide
uccccacuauugggcaaug

SEQ ID NO: 197641 - RNA, 19 nt, Artificial Sequence
  Description of Artificial Sequence: Synthetic oligonucleotide
caagcugaucagcauccgu

SEQ ID NO: 197642 - RNA, 19 nt, Artificial Sequence
  Description of Artificial Sequence: Synthetic oligonucleotide
cauacacgaugcgaggccu

SEQ ID NO: 197643 - RNA, 19 nt, Artificial Sequence
  Description of Artificial Sequence: Synthetic oligonucleotide
cucuugcguguacaaaccu

SEQ ID NO: 197644 - RNA, 19 nt, Artificial Sequence
  Description of Artificial Sequence: Synthetic oligonucleotide
ggggaccuaggagucucgg

SEQ ID NO: 197645 - RNA, 19 nt, Artificial Sequence
  Description of Artificial Sequence: Synthetic oligonucleotide
ugccguagucugacagcuu

SEQ ID NO: 197646 - RNA, 19 nt, Artificial Sequence
  Description of Artificial Sequence: Synthetic oligonucleotide
uacuagcuucucagcccuu

SEQ ID NO: 197647 - RNA, 19 nt, Artificial Sequence
  Description of Artificial Sequence: Synthetic oligonucleotide
gaagugacgcugggcgaaa

SEQ ID NO: 197648 - RNA, 19 nt, Artificial Sequence
  Description of Artificial Sequence: Synthetic oligonucleotide
gacgugggcgugagugcac

SEQ ID NO: 197649 - RNA, 19 nt, Artificial Sequence
  Description of Artificial Sequence: Synthetic oligonucleotide
acggacaggcccauucauu

SEQ ID NO: 197650 - RNA, 19 nt, Artificial Sequence
  Description of Artificial Sequence: Synthetic oligonucleotide
guuagccauggggcgccgc

SEQ ID NO: 197651 - RNA, 19 nt, Artificial Sequence
  Description of Artificial Sequence: Synthetic oligonucleotide
caccccaaccagaucucaa

SEQ ID NO: 197652 - RNA, 19 nt, Artificial Sequence
  Description of Artificial Sequence: Synthetic oligonucleotide
ccaaucugaaguugguggu

SEQ ID NO: 197653 - RNA, 19 nt, Artificial Sequence
  Description of Artificial Sequence: Synthetic oligonucleotide
ucccgggcacacagcuggu

SEQ ID NO: 197654 - RNA, 19 nt, Artificial Sequence
  Description of Artificial Sequence: Synthetic oligonucleotide
caaccggcccagcuccuca

SEQ ID NO: 197655 - RNA, 19 nt, Artificial Sequence
  Description of Artificial Sequence: Synthetic oligonucleotide
cuguagccgaggggucagg

SEQ ID NO: 197656 - RNA, 19 nt, Artificial Sequence
  Description of Artificial Sequence: Synthetic oligonucleotide
gguguugguugaacgucuc

SEQ ID NO: 197657 - RNA, 19 nt, Artificial Sequence
  Description of Artificial Sequence: Synthetic oligonucleotide
gacuccaaggguacugcuu

SEQ ID NO: 197658 - RNA, 19 nt, Artificial Sequence
  Description of Artificial Sequence: Synthetic oligonucleotide
ggacugccgcgagaugccg

SEQ ID NO: 197659 - RNA, 19 nt, Artificial Sequence
  Description of Artificial Sequence: Synthetic oligonucleotide
ccgugcuaugaaccuuugc

SEQ ID NO: 197660 - RNA, 19 nt, Artificial Sequence
  Description of Artificial Sequence: Synthetic oligonucleotide
cgagcugcguccaaguuua

SEQ ID NO: 197661 - RNA, 19 nt, Artificial Sequence
  Description of Artificial Sequence: Synthetic oligonucleotide
gucccauacgaugggauuu

SEQ ID NO: 197662 - RNA, 19 nt, Artificial Sequence
  Description of Artificial Sequence: Synthetic oligonucleotide
caaauucccuggcgcccca

SEQ ID NO: 197663 - RNA, 19 nt, Artificial Sequence
  Description of Artificial Sequence: Synthetic oligonucleotide
ggguuagcaaagaacccgu

SEQ ID NO: 197664 - RNA, 19 nt, Artificial Sequence
  Description of Artificial Sequence: Synthetic oligonucleotide
cccacuauugggcaaugcu

SEQ ID NO: 197665 - RNA, 19 nt, Artificial Sequence
  Description of Artificial Sequence: Synthetic oligonucleotide
augcgaggccugaucucug

SEQ ID NO: 197666 - RNA, 19 nt, Artificial Sequence
  Description of Artificial Sequence: Synthetic oligonucleotide
cagcgcaggacgcuguccu

SEQ ID NO: 197667 - RNA, 19 nt, Artificial Sequence
  Description of Artificial Sequence: Synthetic oligonucleotide
cuugacgcucagggaccac

SEQ ID NO: 197668 - RNA, 19 nt, Artificial Sequence
  Description of Artificial Sequence: Synthetic oligonucleotide
ggagcaguagucagugagu

SEQ ID NO: 197669 - RNA, 19 nt, Artificial Sequence
  Description of Artificial Sequence: Synthetic oligonucleotide
ggcaaagacgugggcguga

SEQ ID NO: 197670 - RNA, 19 nt, Artificial Sequence
  Description of Artificial Sequence: Synthetic oligonucleotide
auggggcgccgcaugcugu

SEQ ID NO: 197671 - RNA, 19 nt, Artificial Sequence
  Description of Artificial Sequence: Synthetic oligonucleotide
ccucaaugugggcaguaaa

SEQ ID NO: 197672 - RNA, 19 nt, Artificial Sequence
  Description of Artificial Sequence: Synthetic oligonucleotide
ccgcugagauauuacuuaa

SEQ ID NO: 197673 - RNA, 19 nt, Artificial Sequence
  Description of Artificial Sequence: Synthetic oligonucleotide
caccgccugcauccaccag

SEQ ID NO: 197674 - RNA, 19 nt, Artificial Sequence
  Description of Artificial Sequence: Synthetic oligonucleotide
gccgcgagaugccguaguc

SEQ ID NO: 197675 - RNA, 19 nt, Artificial Sequence
  Description of Artificial Sequence: Synthetic oligonucleotide
ggugagcccagcagccuuc

SEQ ID NO: 197676 - RNA, 19 nt, Artificial Sequence
  Description of Artificial Sequence: Synthetic oligonucleotide
caggccugcugauuggguu

SEQ ID NO: 197677 - RNA, 19 nt, Artificial Sequence
  Description of Artificial Sequence: Synthetic oligonucleotide
ggcgaaaggcacacuggaa

SEQ ID NO: 197678 - RNA, 19 nt, Artificial Sequence
  Description of Artificial Sequence: Synthetic oligonucleotide
caguagcuacuagcuucuc

SEQ ID NO: 197679 - RNA, 19 nt, Artificial Sequence
  Description of Artificial Sequence: Synthetic oligonucleotide
gcauuaccuucucuugcgu

SEQ ID NO: 197680 - RNA, 19 nt, Artificial Sequence
  Description of Artificial Sequence: Synthetic oligonucleotide
cuggcgccccagccccucc

SEQ ID NO: 197681 - RNA, 19 nt, Artificial Sequence
  Description of Artificial Sequence: Synthetic oligonucleotide
acacgaugcgaggccugau

SEQ ID NO: 197682 - RNA, 19 nt, Artificial Sequence
  Description of Artificial Sequence: Synthetic oligonucleotide
cugccgcgagaugccguag

SEQ ID NO: 197683 - RNA, 19 nt, Artificial Sequence
  Description of Artificial Sequence: Synthetic oligonucleotide
caaagggcuccagucgccu

SEQ ID NO: 197684 - RNA, 19 nt, Artificial Sequence
  Description of Artificial Sequence: Synthetic oligonucleotide
acgcugggcgaaaggcaca

SEQ ID NO: 197685 - RNA, 19 nt, Artificial Sequence
  Description of Artificial Sequence: Synthetic oligonucleotide
cuauaaacacaggcccuuu

SEQ ID NO: 197686 - RNA, 19 nt, Artificial Sequence
  Description of Artificial Sequence: Synthetic oligonucleotide
gggccuaaccgcugagaua

SEQ ID NO: 197687 - RNA, 19 nt, Artificial Sequence
  Description of Artificial Sequence: Synthetic oligonucleotide
ggcagacugacggggaccu

SEQ ID NO: 197688 - RNA, 19 nt, Artificial Sequence
  Description of Artificial Sequence: Synthetic oligonucleotide
cucgguggguggggacgag

SEQ ID NO: 197689 - RNA, 19 nt, Artificial Sequence
  Description of Artificial Sequence: Synthetic oligonucleotide
gggaccuaggagucucggu

SEQ ID NO: 197690 - RNA, 19 nt, Artificial Sequence
  Description of Artificial Sequence: Synthetic oligonucleotide
ccuaaccgcugagauauua

SEQ ID NO: 197691 - RNA, 19 nt, Artificial Sequence
  Description of Artificial Sequence: Synthetic oligonucleotide
ucggaccugcuggcuccac

SEQ ID NO: 197692 - RNA, 19 nt, Artificial Sequence
  Description of Artificial Sequence: Synthetic oligonucleotide
gcucgagcugcguccaagu

SEQ ID NO: 197693 - RNA, 19 nt, Artificial Sequence
  Description of Artificial Sequence: Synthetic oligonucleotide
gcgaggccugaucucugga

SEQ ID NO: 197694 - RNA, 19 nt, Artificial Sequence
  Description of Artificial Sequence: Synthetic oligonucleotide
ccgccugcauccaccagga

SEQ ID NO: 197695 - RNA, 19 nt, Artificial Sequence
  Description of Artificial Sequence: Synthetic oligonucleotide
cugcaacgauuucucuggu

SEQ ID NO: 197696 - RNA, 19 nt, Artificial Sequence
  Description of Artificial Sequence: Synthetic oligonucleotide
ggcgugagugcacgugugu

SEQ ID NO: 197697 - RNA, 19 nt, Artificial Sequence
  Description of Artificial Sequence: Synthetic oligonucleotide
gacugccgcgagaugccgu

SEQ ID NO: 197698 - RNA, 19 nt, Artificial Sequence
  Description of Artificial Sequence: Synthetic oligonucleotide
gacggggaccuaggagucu

SEQ ID NO: 197699 - RNA, 19 nt, Artificial Sequence
  Description of Artificial Sequence: Synthetic oligonucleotide
caccaguagcuacuagcuu

SEQ ID NO: 197700 - RNA, 19 nt, Artificial Sequence
  Description of Artificial Sequence: Synthetic oligonucleotide
ccccacuauugggcaaugc

SEQ ID NO: 197701 - RNA, 19 nt, Artificial Sequence
  Description of Artificial Sequence: Synthetic oligonucleotide
ccaaacggggccucacgcu

SEQ ID NO: 197702 - RNA, 19 nt, Artificial Sequence
  Description of Artificial Sequence: Synthetic oligonucleotide
gcgagaugccguagucuga

SEQ ID NO: 197703 - RNA, 19 nt, Artificial Sequence
  Description of Artificial Sequence: Synthetic oligonucleotide
cccugcuaacaauuucacu

SEQ ID NO: 197704 - RNA, 19 nt, Artificial Sequence
  Description of Artificial Sequence: Synthetic oligonucleotide
cauccgugcuaugaaccuu

SEQ ID NO: 197705 - RNA, 19 nt, Artificial Sequence
  Description of Artificial Sequence: Synthetic oligonucleotide
gcgccgcaugcugugggug

SEQ ID NO: 197706 - RNA, 19 nt, Artificial Sequence
  Description of Artificial Sequence: Synthetic oligonucleotide
caacaggcacgaagcucau

SEQ ID NO: 197707 - RNA, 19 nt, Artificial Sequence
  Description of Artificial Sequence: Synthetic oligonucleotide
cgcugggcgaaaggcacac

SEQ ID NO: 197708 - RNA, 19 nt, Artificial Sequence
  Description of Artificial Sequence: Synthetic oligonucleotide
gguuagcaaagaacccguu

SEQ ID NO: 197709 - RNA, 19 nt, Artificial Sequence
  Description of Artificial Sequence: Synthetic oligonucleotide
cccagcgcaggacgcuguc

SEQ ID NO: 197710 - RNA, 19 nt, Artificial Sequence
  Description of Artificial Sequence: Synthetic oligonucleotide
ggccugaucucuggagccu

SEQ ID NO: 197711 - RNA, 19 nt, Artificial Sequence
  Description of Artificial Sequence: Synthetic oligonucleotide
cccauacgaugggauuuca

SEQ ID NO: 197712 - RNA, 19 nt, Artificial Sequence
  Description of Artificial Sequence: Synthetic oligonucleotide
gugcccuuggagggcugua

SEQ ID NO: 197713 - RNA, 19 nt, Artificial Sequence
  Description of Artificial Sequence: Synthetic oligonucleotide
ccgggccuaaccgcugaga

SEQ ID NO: 197714 - RNA, 19 nt, Artificial Sequence
  Description of Artificial Sequence: Synthetic oligonucleotide
cccucgcacugggcuuucc

SEQ ID NO: 197715 - RNA, 19 nt, Artificial Sequence
  Description of Artificial Sequence: Synthetic oligonucleotide
ccgcgagaugccguagucu

SEQ ID NO: 197716 - RNA, 19 nt, Artificial Sequence
  Description of Artificial Sequence: Synthetic oligonucleotide
gcugggcgaaaggcacacu

SEQ ID NO: 197717 - RNA, 19 nt, Artificial Sequence
  Description of Artificial Sequence: Synthetic oligonucleotide
gcccucgcacugggcuuuc

SEQ ID NO: 197718 - RNA, 19 nt, Artificial Sequence
  Description of Artificial Sequence: Synthetic oligonucleotide
ccauggggcgccgcaugcu

SEQ ID NO: 197719 - RNA, 19 nt, Artificial Sequence
  Description of Artificial Sequence: Synthetic oligonucleotide
gccuaaccgcugagauauu

SEQ ID NO: 197720 - RNA, 19 nt, Artificial Sequence
  Description of Artificial Sequence: Synthetic oligonucleotide
uuaacuucggucuuggagg

SEQ ID NO: 197721 - RNA, 19 nt, Artificial Sequence
  Description of Artificial Sequence: Synthetic oligonucleotide
uguaauccagucuucaggg

SEQ ID NO: 197722 - RNA, 19 nt, Artificial Sequence
  Description of Artificial Sequence: Synthetic oligonucleotide
gaaacuuuaaucgagccgc

SEQ ID NO: 197723 - RNA, 19 nt, Artificial Sequence
  Description of Artificial Sequence: Synthetic oligonucleotide
aaacgaaaacaguccaugg

SEQ ID NO: 197724 - RNA, 19 nt, Artificial Sequence
  Description of Artificial Sequence: Synthetic oligonucleotide
uuaccaauucccuucgugg

SEQ ID NO: 197725 - RNA, 19 nt, Artificial Sequence
  Description of Artificial Sequence: Synthetic oligonucleotide
uggugaagagauuauaagc

SEQ ID NO: 197726 - RNA, 19 nt, Artificial Sequence
  Description of Artificial Sequence: Synthetic oligonucleotide
agaaacuuuaaucgagccg

SEQ ID NO: 197727 - RNA, 19 nt, Artificial Sequence
  Description of Artificial Sequence: Synthetic oligonucleotide
uacaacaaacacuucuagg

SEQ ID NO: 197728 - RNA, 19 nt, Artificial Sequence
  Description of Artificial Sequence: Synthetic oligonucleotide
agaaaucuugcacggagac

SEQ ID NO: 197729 - RNA, 19 nt, Artificial Sequence
  Description of Artificial Sequence: Synthetic oligonucleotide
uuuguuaccaauucccuuc

SEQ ID NO: 197730 - RNA, 19 nt, Artificial Sequence
  Description of Artificial Sequence: Synthetic oligonucleotide
gacuauucagcauagaucu

SEQ ID NO: 197731 - RNA, 19 nt, Artificial Sequence
  Description of Artificial Sequence: Synthetic oligonucleotide
aaguuacaaagcaacaauc

SEQ ID NO: 197732 - RNA, 19 nt, Artificial Sequence
  Description of Artificial Sequence: Synthetic oligonucleotide
cuuaacuucggucuuggag

SEQ ID NO: 197733 - RNA, 19 nt, Artificial Sequence
  Description of Artificial Sequence: Synthetic oligonucleotide
accuuuauacucccguacc

SEQ ID NO: 197734 - RNA, 19 nt, Artificial Sequence
  Description of Artificial Sequence: Synthetic oligonucleotide
aauuguacaggaaucucag

SEQ ID NO: 197735 - RNA, 19 nt, Artificial Sequence
  Description of Artificial Sequence: Synthetic oligonucleotide
ucugauucagaucgagucc

SEQ ID NO: 197736 - RNA, 19 nt, Artificial Sequence
  Description of Artificial Sequence: Synthetic oligonucleotide
aacgaaaacaguccauggu

SEQ ID NO: 197737 - RNA, 19 nt, Artificial Sequence
  Description of Artificial Sequence: Synthetic oligonucleotide
augauaacggcacuaauau

SEQ ID NO: 197738 - RNA, 19 nt, Artificial Sequence
  Description of Artificial Sequence: Synthetic oligonucleotide
aacguguacuguucuacuc

SEQ ID NO: 197739 - RNA, 19 nt, Artificial Sequence
  Description of Artificial Sequence: Synthetic oligonucleotide
ugacuauucagcauagauc

SEQ ID NO: 197740 - RNA, 19 nt, Artificial Sequence
  Description of Artificial Sequence: Synthetic oligonucleotide
gauuuugugugacuugcgc

SEQ ID NO: 197741 - RNA, 19 nt, Artificial Sequence
  Description of Artificial Sequence: Synthetic oligonucleotide
uguuaauuuugguauggac

SEQ ID NO: 197742 - RNA, 19 nt, Artificial Sequence
  Description of Artificial Sequence: Synthetic oligonucleotide
uguacugagaggcuuucga

SEQ ID NO: 197743 - RNA, 19 nt, Artificial Sequence
  Description of Artificial Sequence: Synthetic oligonucleotide
aacccaugcccucucuggc

SEQ ID NO: 197744 - RNA, 19 nt, Artificial Sequence
  Description of Artificial Sequence: Synthetic oligonucleotide
gagaugacgaguucugagc

SEQ ID NO: 197745 - RNA, 19 nt, Artificial Sequence
  Description of Artificial Sequence: Synthetic oligonucleotide
uccgaugaguuucugaaaa

SEQ ID NO: 197746 - RNA, 19 nt, Artificial Sequence
  Description of Artificial Sequence: Synthetic oligonucleotide
caacgcuugguguauagcc

SEQ ID NO: 197747 - RNA, 19 nt, Artificial Sequence
  Description of Artificial Sequence: Synthetic oligonucleotide
uacccguuucucaugaacc

SEQ ID NO: 197748 - RNA, 19 nt, Artificial Sequence
  Description of Artificial Sequence: Synthetic oligonucleotide
uuucgaagggaaacacagg

SEQ ID NO: 197749 - RNA, 19 nt, Artificial Sequence
  Description of Artificial Sequence: Synthetic oligonucleotide
ucuuugcuugggaugaagc

SEQ ID NO: 197750 - RNA, 19 nt, Artificial Sequence
  Description of Artificial Sequence: Synthetic oligonucleotide
uauagccauauucuguggu

SEQ ID NO: 197751 - RNA, 19 nt, Artificial Sequence
  Description of Artificial Sequence: Synthetic oligonucleotide
ucgggguuucuuaacuucg

SEQ ID NO: 197752 - RNA, 19 nt, Artificial Sequence
  Description of Artificial Sequence: Synthetic oligonucleotide
uugauuguugaggagggcc

SEQ ID NO: 197753 - RNA, 19 nt, Artificial Sequence
  Description of Artificial Sequence: Synthetic oligonucleotide
uuguuaccaauucccuucg

SEQ ID NO: 197754 - RNA, 19 nt, Artificial Sequence
  Description of Artificial Sequence: Synthetic oligonucleotide
uccgcaacaggcugggugg

SEQ ID NO: 197755 - RNA, 19 nt, Artificial Sequence
  Description of Artificial Sequence: Synthetic oligonucleotide
aauuccgaugaguuucuga

SEQ ID NO: 197756 - RNA, 19 nt, Artificial Sequence
  Description of Artificial Sequence: Synthetic oligonucleotide
gucacuugaaaccauacaa

SEQ ID NO: 197757 - RNA, 19 nt, Artificial Sequence
  Description of Artificial Sequence: Synthetic oligonucleotide
uguacuguucuacucuuuc

SEQ ID NO: 197758 - RNA, 19 nt, Artificial Sequence
  Description of Artificial Sequence: Synthetic oligonucleotide
guaaggacuuccuugcggc

SEQ ID NO: 197759 - RNA, 19 nt, Artificial Sequence
  Description of Artificial Sequence: Synthetic oligonucleotide
aaucuaggcucccuuugug

SEQ ID NO: 197760 - RNA, 19 nt, Artificial Sequence
  Description of Artificial Sequence: Synthetic oligonucleotide
ugcauugugauggaagcug

SEQ ID NO: 197761 - RNA, 19 nt, Artificial Sequence
  Description of Artificial Sequence: Synthetic oligonucleotide
gacgcuuauuauuuccacc

SEQ ID NO: 197762 - RNA, 19 nt, Artificial Sequence
  Description of Artificial Sequence: Synthetic oligonucleotide
acagcuuuuaaugauugca

SEQ ID NO: 197763 - RNA, 19 nt, Artificial Sequence
  Description of Artificial Sequence: Synthetic oligonucleotide
agccaauaaaugaugauug

SEQ ID NO: 197764 - RNA, 19 nt, Artificial Sequence
  Description of Artificial Sequence: Synthetic oligonucleotide
ucucaugaacccaugcccu

SEQ ID NO: 197765 - RNA, 19 nt, Artificial Sequence
  Description of Artificial Sequence: Synthetic oligonucleotide
agacgcuuauuauuuccac

SEQ ID NO: 197766 - RNA, 19 nt, Artificial Sequence
  Description of Artificial Sequence: Synthetic oligonucleotide
caguacuugauuguugagg

SEQ ID NO: 197767 - RNA, 19 nt, Artificial Sequence
  Description of Artificial Sequence: Synthetic oligonucleotide
agagaauagccaauaaaug

SEQ ID NO: 197768 - RNA, 19 nt, Artificial Sequence
  Description of Artificial Sequence: Synthetic oligonucleotide
gaagauccgcaacaggcug

SEQ ID NO: 197769 - RNA, 19 nt, Artificial Sequence
  Description of Artificial Sequence: Synthetic oligonucleotide
aguuacaaagcaacaaucu

SEQ ID NO: 197770 - RNA, 19 nt, Artificial Sequence
  Description of Artificial Sequence: Synthetic oligonucleotide
gaaccucguuaucacaucc

SEQ ID NO: 197771 - RNA, 19 nt, Artificial Sequence
  Description of Artificial Sequence: Synthetic oligonucleotide
agguuaaaguuaaugguag

SEQ ID NO: 197772 - RNA, 19 nt, Artificial Sequence
  Description of Artificial Sequence: Synthetic oligonucleotide
aaacuuuaaucgagccgcc

SEQ ID NO: 197773 - RNA, 19 nt, Artificial Sequence
  Description of Artificial Sequence: Synthetic oligonucleotide
ugcacggagacuacaaguc

SEQ ID NO: 197774 - RNA, 19 nt, Artificial Sequence
  Description of Artificial Sequence: Synthetic oligonucleotide
auuggcugaaccgggacgg

SEQ ID NO: 197775 - RNA, 19 nt, Artificial Sequence
  Description of Artificial Sequence: Synthetic oligonucleotide
uuuauacucccguacccgu

SEQ ID NO: 197776 - RNA, 19 nt, Artificial Sequence
  Description of Artificial Sequence: Synthetic oligonucleotide
guuaaugguaguuuacaaa

SEQ ID NO: 197777 - RNA, 19 nt, Artificial Sequence
  Description of Artificial Sequence: Synthetic oligonucleotide
agaugacgaguucugagcu

SEQ ID NO: 197778 - RNA, 19 nt, Artificial Sequence
  Description of Artificial Sequence: Synthetic oligonucleotide
guuaccaauucccuucgug

SEQ ID NO: 197779 - RNA, 19 nt, Artificial Sequence
  Description of Artificial Sequence: Synthetic oligonucleotide
acuacaagucuggaguuuc

SEQ ID NO: 197780 - RNA, 19 nt, Artificial Sequence
  Description of Artificial Sequence: Synthetic oligonucleotide
aaccucguuaucacauccc

SEQ ID NO: 197781 - RNA, 19 nt, Artificial Sequence
  Description of Artificial Sequence: Synthetic oligonucleotide
gagguuuccgaaucuuuug

SEQ ID NO: 197782 - RNA, 19 nt, Artificial Sequence
  Description of Artificial Sequence: Synthetic oligonucleotide
acuuuaaucgagccgccga

SEQ ID NO: 197783 - RNA, 19 nt, Artificial Sequence
  Description of Artificial Sequence: Synthetic oligonucleotide
uggacaugauauucccggg

SEQ ID NO: 197784 - RNA, 19 nt, Artificial Sequence
  Description of Artificial Sequence: Synthetic oligonucleotide
uucauacuguucgugaccu

SEQ ID NO: 197785 - RNA, 19 nt, Artificial Sequence
  Description of Artificial Sequence: Synthetic oligonucleotide
aacuuuaaucgagccgccg

SEQ ID NO: 197786 - RNA, 19 nt, Artificial Sequence
  Description of Artificial Sequence: Synthetic oligonucleotide
uggaaccucguuaucacau

SEQ ID NO: 197787 - RNA, 19 nt, Artificial Sequence
  Description of Artificial Sequence: Synthetic oligonucleotide
uuaaucgagccgccgacaa

SEQ ID NO: 197788 - RNA, 19 nt, Artificial Sequence
  Description of Artificial Sequence: Synthetic oligonucleotide
uaugguggaagugcagucc

SEQ ID NO: 197789 - RNA, 19 nt, Artificial Sequence
  Description of Artificial Sequence: Synthetic oligonucleotide
uggccuaaaagaucacuga

SEQ ID NO: 197790 - RNA, 19 nt, Artificial Sequence
  Description of Artificial Sequence: Synthetic oligonucleotide
uguauuaaugaugcuuuau

SEQ ID NO: 197791 - RNA, 19 nt, Artificial Sequence
  Description of Artificial Sequence: Synthetic oligonucleotide
ccuuugugcauugugaugg

SEQ ID NO: 197792 - RNA, 19 nt, Artificial Sequence
  Description of Artificial Sequence: Synthetic oligonucleotide
gaccuuuauacucccguac

SEQ ID NO: 197793 - RNA, 19 nt, Artificial Sequence
  Description of Artificial Sequence: Synthetic oligonucleotide
gguaaggacuuccuugcgg

SEQ ID NO: 197794 - RNA, 19 nt, Artificial Sequence
  Description of Artificial Sequence: Synthetic oligonucleotide
ucuucgaaggucaguacuu

SEQ ID NO: 197795 - RNA, 19 nt, Artificial Sequence
  Description of Artificial Sequence: Synthetic oligonucleotide
gguauggaccucaagcugg

SEQ ID NO: 197796 - RNA, 19 nt, Artificial Sequence
  Description of Artificial Sequence: Synthetic oligonucleotide
accaaggagacgcuuauua

SEQ ID NO: 197797 - RNA, 19 nt, Artificial Sequence
  Description of Artificial Sequence: Synthetic oligonucleotide
aaggagacgcuuauuauuu

SEQ ID NO: 197798 - RNA, 19 nt, Artificial Sequence
  Description of Artificial Sequence: Synthetic oligonucleotide
uucguggaauaaacaaacu

SEQ ID NO: 197799 - RNA, 19 nt, Artificial Sequence
  Description of Artificial Sequence: Synthetic oligonucleotide
ggaggacucaaacaauucc

SEQ ID NO: 197800 - RNA, 19 nt, Artificial Sequence
  Description of Artificial Sequence: Synthetic oligonucleotide
acguguacuguucuacucu

SEQ ID NO: 197801 - RNA, 19 nt, Artificial Sequence
  Description of Artificial Sequence: Synthetic oligonucleotide
acaagugagggugccugcc

SEQ ID NO: 197802 - RNA, 19 nt, Artificial Sequence
  Description of Artificial Sequence: Synthetic oligonucleotide
cuuuaaucgagccgccgac

SEQ ID NO: 197803 - RNA, 19 nt, Artificial Sequence
  Description of Artificial Sequence: Synthetic oligonucleotide
uuuuaacguguaauacaaa

SEQ ID NO: 197804 - RNA, 19 nt, Artificial Sequence
  Description of Artificial Sequence: Synthetic oligonucleotide
caguauuggcugaaccggg

SEQ ID NO: 197805 - RNA, 19 nt, Artificial Sequence
  Description of Artificial Sequence: Synthetic oligonucleotide
auccgcaacaggcugggug

SEQ ID NO: 197806 - RNA, 19 nt, Artificial Sequence
  Description of Artificial Sequence: Synthetic oligonucleotide
uuugacuucgugugcccac

SEQ ID NO: 197807 - RNA, 19 nt, Artificial Sequence
  Description of Artificial Sequence: Synthetic oligonucleotide
agguuuccgaaucuuuugu

SEQ ID NO: 197808 - RNA, 19 nt, Artificial Sequence
  Description of Artificial Sequence: Synthetic oligonucleotide
aaccauacaaggccaccaa

SEQ ID NO: 197809 - RNA, 19 nt, Artificial Sequence
  Description of Artificial Sequence: Synthetic oligonucleotide
gaugacgaguucugagcug

SEQ ID NO: 197810 - RNA, 19 nt, Artificial Sequence
  Description of Artificial Sequence: Synthetic oligonucleotide
ggagaugacgaguucugag

SEQ ID NO: 197811 - RNA, 19 nt, Artificial Sequence
  Description of Artificial Sequence: Synthetic oligonucleotide
gccaauaaaugaugauugg

SEQ ID NO: 197812 - RNA, 19 nt, Artificial Sequence
  Description of Artificial Sequence: Synthetic oligonucleotide
gacuucgugugcccacucg

SEQ ID NO: 197813 - RNA, 19 nt, Artificial Sequence
  Description of Artificial Sequence: Synthetic oligonucleotide
ucuugggcuaaugcaguag

SEQ ID NO: 197814 - RNA, 19 nt, Artificial Sequence
  Description of Artificial Sequence: Synthetic oligonucleotide
aucacaucccauccuacaa

SEQ ID NO: 197815 - RNA, 19 nt, Artificial Sequence
  Description of Artificial Sequence: Synthetic oligonucleotide
aacgcuugguguauagcca

SEQ ID NO: 197816 - RNA, 19 nt, Artificial Sequence
  Description of Artificial Sequence: Synthetic oligonucleotide
cuugcacggagacuacaag

SEQ ID NO: 197817 - RNA, 19 nt, Artificial Sequence
  Description of Artificial Sequence: Synthetic oligonucleotide
ggcuaguaacucuucauac

SEQ ID NO: 197818 - RNA, 19 nt, Artificial Sequence
  Description of Artificial Sequence: Synthetic oligonucleotide
aaccgggacggccucuuug

SEQ ID NO: 197819 - RNA, 19 nt, Artificial Sequence
  Description of Artificial Sequence: Synthetic oligonucleotide
ugggcuaaugcaguaggcu

SEQ ID NO: 197820 - RNA, 19 nt, Artificial Sequence
  Description of Artificial Sequence: Synthetic oligonucleotide
aggccgagguuuccgaauc

SEQ ID NO: 197821 - RNA, 19 nt, Artificial Sequence
  Description of Artificial Sequence: Synthetic oligonucleotide
guuacuggaaccucguuau

SEQ ID NO: 197822 - RNA, 19 nt, Artificial Sequence
  Description of Artificial Sequence: Synthetic oligonucleotide
uggucuauuuugucccucu

SEQ ID NO: 197823 - RNA, 19 nt, Artificial Sequence
  Description of Artificial Sequence: Synthetic oligonucleotide
ucgccucaggagaugacga

SEQ ID NO: 197824 - RNA, 19 nt, Artificial Sequence
  Description of Artificial Sequence: Synthetic oligonucleotide
ugucccacugggcacguuc

SEQ ID NO: 197825 - RNA, 19 nt, Artificial Sequence
  Description of Artificial Sequence: Synthetic oligonucleotide
uuuaaucgagccgccgaca

SEQ ID NO: 197826 - RNA, 19 nt, Artificial Sequence
  Description of Artificial Sequence: Synthetic oligonucleotide
uauacucccguacccguuu

SEQ ID NO: 197827 - RNA, 19 nt, Artificial Sequence
  Description of Artificial Sequence: Synthetic oligonucleotide
uacaagugagggugccugc

SEQ ID NO: 197828 - RNA, 19 nt, Artificial Sequence
  Description of Artificial Sequence: Synthetic oligonucleotide
ucgaagggaaacacaggua

SEQ ID NO: 197829 - RNA, 19 nt, Artificial Sequence
  Description of Artificial Sequence: Synthetic oligonucleotide
gucgccucaggagaugacg

SEQ ID NO: 197830 - RNA, 19 nt, Artificial Sequence
  Description of Artificial Sequence: Synthetic oligonucleotide
ucggcuaguaacucuucau

SEQ ID NO: 197831 - RNA, 19 nt, Artificial Sequence
  Description of Artificial Sequence: Synthetic oligonucleotide
uucgugugcccacucgccu

SEQ ID NO: 197832 - RNA, 19 nt, Artificial Sequence
  Description of Artificial Sequence: Synthetic oligonucleotide
agugauugcuggcuuguuu

SEQ ID NO: 197833 - RNA, 19 nt, Artificial Sequence
  Description of Artificial Sequence: Synthetic oligonucleotide
aaggauagguucccaccuu

SEQ ID NO: 197834 - RNA, 19 nt, Artificial Sequence
  Description of Artificial Sequence: Synthetic oligonucleotide
ugaccuuuauacucccgua

SEQ ID NO: 197835 - RNA, 19 nt, Artificial Sequence
  Description of Artificial Sequence: Synthetic oligonucleotide
gaagugcaguccagaagag

SEQ ID NO: 197836 - RNA, 19 nt, Artificial Sequence
  Description of Artificial Sequence: Synthetic oligonucleotide
gggaaacacagguaccgcc

SEQ ID NO: 197837 - RNA, 19 nt, Artificial Sequence
  Description of Artificial Sequence: Synthetic oligonucleotide
gagacgcuuauuauuucca

SEQ ID NO: 197838 - RNA, 19 nt, Artificial Sequence
  Description of Artificial Sequence: Synthetic oligonucleotide
gauauucccgggcaccucu

SEQ ID NO: 197839 - RNA, 19 nt, Artificial Sequence
  Description of Artificial Sequence: Synthetic oligonucleotide
ucaugaacccaugcccucu

SEQ ID NO: 197840 - RNA, 19 nt, Artificial Sequence
  Description of Artificial Sequence: Synthetic oligonucleotide
uuauacucccguacccguu

SEQ ID NO: 197841 - RNA, 19 nt, Artificial Sequence
  Description of Artificial Sequence: Synthetic oligonucleotide
ucgccuggacuucauuuaa

SEQ ID NO: 197842 - RNA, 19 nt, Artificial Sequence
  Description of Artificial Sequence: Synthetic oligonucleotide
acucgccuggacuucauuu

SEQ ID NO: 197843 - RNA, 19 nt, Artificial Sequence
  Description of Artificial Sequence: Synthetic oligonucleotide
aauuaacaaggagguuuaa

SEQ ID NO: 197844 - RNA, 19 nt, Artificial Sequence
  Description of Artificial Sequence: Synthetic oligonucleotide
auacucccguacccguuuc

SEQ ID NO: 197845 - RNA, 19 nt, Artificial Sequence
  Description of Artificial Sequence: Synthetic oligonucleotide
uuccgaugaguuucugaaa

SEQ ID NO: 197846 - RNA, 19 nt, Artificial Sequence
  Description of Artificial Sequence: Synthetic oligonucleotide
caauauagaugaacgugua

SEQ ID NO: 197847 - RNA, 19 nt, Artificial Sequence
  Description of Artificial Sequence: Synthetic oligonucleotide
gccaauuccgaugaguuuc

SEQ ID NO: 197848 - RNA, 19 nt, Artificial Sequence
  Description of Artificial Sequence: Synthetic oligonucleotide
cuucgaaggucaguacuug

SEQ ID NO: 197849 - RNA, 19 nt, Artificial Sequence
  Description of Artificial Sequence: Synthetic oligonucleotide
gguugccucggcuaguaac

SEQ ID NO: 197850 - RNA, 19 nt, Artificial Sequence
  Description of Artificial Sequence: Synthetic oligonucleotide
acuucggucuuggagguaa

SEQ ID NO: 197851 - RNA, 19 nt, Artificial Sequence
  Description of Artificial Sequence: Synthetic oligonucleotide
agagugauugcuggcuugu

SEQ ID NO: 197852 - RNA, 19 nt, Artificial Sequence
  Description of Artificial Sequence: Synthetic oligonucleotide
acgaguucugagcuggcuu

SEQ ID NO: 197853 - RNA, 19 nt, Artificial Sequence
  Description of Artificial Sequence: Synthetic oligonucleotide
uguuaccaauucccuucgu

SEQ ID NO: 197854 - RNA, 19 nt, Artificial Sequence
  Description of Artificial Sequence: Synthetic oligonucleotide
aaguuugcacugaaugcuu

SEQ ID NO: 197855 - RNA, 19 nt, Artificial Sequence
  Description of Artificial Sequence: Synthetic oligonucleotide
uaacggcacuaauauuaaa

SEQ ID NO: 197856 - RNA, 19 nt, Artificial Sequence
  Description of Artificial Sequence: Synthetic oligonucleotide
uccauacaacaaacacuuc

SEQ ID NO: 197857 - RNA, 19 nt, Artificial Sequence
  Description of Artificial Sequence: Synthetic oligonucleotide
cucaugaacccaugcccuc

SEQ ID NO: 197858 - RNA, 19 nt, Artificial Sequence
  Description of Artificial Sequence: Synthetic oligonucleotide
gguccgucgacccuuucug

SEQ ID NO: 197859 - RNA, 19 nt, Artificial Sequence
  Description of Artificial Sequence: Synthetic oligonucleotide
auugugauggaagcuggua

SEQ ID NO: 197860 - RNA, 19 nt, Artificial Sequence
  Description of Artificial Sequence: Synthetic oligonucleotide
uaaucgagccgccgacaaa

SEQ ID NO: 197861 - RNA, 19 nt, Artificial Sequence
  Description of Artificial Sequence: Synthetic oligonucleotide
aauucccuucguggaauaa

SEQ ID NO: 197862 - RNA, 19 nt, Artificial Sequence
  Description of Artificial Sequence: Synthetic oligonucleotide
accgggacggccucuuuga

SEQ ID NO: 197863 - RNA, 19 nt, Artificial Sequence
  Description of Artificial Sequence: Synthetic oligonucleotide
uuugugcauugugauggaa

SEQ ID NO: 197864 - RNA, 19 nt, Artificial Sequence
  Description of Artificial Sequence: Synthetic oligonucleotide
ucgagccgccgacaaagaa

SEQ ID NO: 197865 - RNA, 19 nt, Artificial Sequence
  Description of Artificial Sequence: Synthetic oligonucleotide
uaauuuugguauggaccuc

SEQ ID NO: 197866 - RNA, 19 nt, Artificial Sequence
  Description of Artificial Sequence: Synthetic oligonucleotide
gggcuguuuggcaaaaccc

SEQ ID NO: 197867 - RNA, 19 nt, Artificial Sequence
  Description of Artificial Sequence: Synthetic oligonucleotide
ucccaccuuggaccaaaca

SEQ ID NO: 197868 - RNA, 19 nt, Artificial Sequence
  Description of Artificial Sequence: Synthetic oligonucleotide
auucccuucguggaauaaa

SEQ ID NO: 197869 - RNA, 19 nt, Artificial Sequence
  Description of Artificial Sequence: Synthetic oligonucleotide
uccgucgacccuuucugua

SEQ ID NO: 197870 - RNA, 19 nt, Artificial Sequence
  Description of Artificial Sequence: Synthetic oligonucleotide
gccgacaaagaaaucuugc

SEQ ID NO: 197871 - RNA, 19 nt, Artificial Sequence
  Description of Artificial Sequence: Synthetic oligonucleotide
aguauuggcugaaccggga

SEQ ID NO: 197872 - RNA, 19 nt, Artificial Sequence
  Description of Artificial Sequence: Synthetic oligonucleotide
ugacgaguucugagcuggc

SEQ ID NO: 197873 - RNA, 19 nt, Artificial Sequence
  Description of Artificial Sequence: Synthetic oligonucleotide
auauuuccuuggccuaaaa

SEQ ID NO: 197874 - RNA, 19 nt, Artificial Sequence
  Description of Artificial Sequence: Synthetic oligonucleotide
ggcuauuuuaacaggaggu

SEQ ID NO: 197875 - RNA, 19 nt, Artificial Sequence
  Description of Artificial Sequence: Synthetic oligonucleotide
ugccucggcuaguaacucu

SEQ ID NO: 197876 - RNA, 19 nt, Artificial Sequence
  Description of Artificial Sequence: Synthetic oligonucleotide
acaagaucaccaaccugga

SEQ ID NO: 197877 - RNA, 19 nt, Artificial Sequence
  Description of Artificial Sequence: Synthetic oligonucleotide
gaugucgccucaggagaug

SEQ ID NO: 197878 - RNA, 19 nt, Artificial Sequence
  Description of Artificial Sequence: Synthetic oligonucleotide
caaggauagguucccaccu

SEQ ID NO: 197879 - RNA, 19 nt, Artificial Sequence
  Description of Artificial Sequence: Synthetic oligonucleotide
uacucccguacccguuucu

SEQ ID NO: 197880 - RNA, 19 nt, Artificial Sequence
  Description of Artificial Sequence: Synthetic oligonucleotide
caaggagacgcuuauuauu

SEQ ID NO: 197881 - RNA, 19 nt, Artificial Sequence
  Description of Artificial Sequence: Synthetic oligonucleotide
cuuugugcauugugaugga

SEQ ID NO: 197882 - RNA, 19 nt, Artificial Sequence
  Description of Artificial Sequence: Synthetic oligonucleotide
ucgggcugcuugucaauau

SEQ ID NO: 197883 - RNA, 19 nt, Artificial Sequence
  Description of Artificial Sequence: Synthetic oligonucleotide
cucggcuaguaacucuuca

SEQ ID NO: 197884 - RNA, 19 nt, Artificial Sequence
  Description of Artificial Sequence: Synthetic oligonucleotide
ugacuucgugugcccacuc

SEQ ID NO: 197885 - RNA, 19 nt, Artificial Sequence
  Description of Artificial Sequence: Synthetic oligonucleotide
cugauucagaucgaguccu

SEQ ID NO: 197886 - RNA, 19 nt, Artificial Sequence
  Description of Artificial Sequence: Synthetic oligonucleotide
guugccucggcuaguaacu

SEQ ID NO: 197887 - RNA, 19 nt, Artificial Sequence
  Description of Artificial Sequence: Synthetic oligonucleotide
ucgggagacugcucggguu

SEQ ID NO: 197888 - RNA, 19 nt, Artificial Sequence
  Description of Artificial Sequence: Synthetic oligonucleotide
uccucgguccgucgacccu

SEQ ID NO: 197889 - RNA, 19 nt, Artificial Sequence
  Description of Artificial Sequence: Synthetic oligonucleotide
agacagccacggugaaaug

SEQ ID NO: 197890 - RNA, 19 nt, Artificial Sequence
  Description of Artificial Sequence: Synthetic oligonucleotide
cacggugaaaugugcagcu

SEQ ID NO: 197891 - RNA, 19 nt, Artificial Sequence
  Description of Artificial Sequence: Synthetic oligonucleotide
cucgccuggacuucauuua

SEQ ID NO: 197892 - RNA, 19 nt, Artificial Sequence
  Description of Artificial Sequence: Synthetic oligonucleotide
cgaugaguuucugaaaaug

SEQ ID NO: 197893 - RNA, 19 nt, Artificial Sequence
  Description of Artificial Sequence: Synthetic oligonucleotide
ugauauucccgggcaccuc

SEQ ID NO: 197894 - RNA, 19 nt, Artificial Sequence
  Description of Artificial Sequence: Synthetic oligonucleotide
ggucuguucuggcugacua

SEQ ID NO: 197895 - RNA, 19 nt, Artificial Sequence
  Description of Artificial Sequence: Synthetic oligonucleotide
uucgggcugcuugucaaua

SEQ ID NO: 197896 - RNA, 19 nt, Artificial Sequence
  Description of Artificial Sequence: Synthetic oligonucleotide
cuucggucuuggagguaac

SEQ ID NO: 197897 - RNA, 19 nt, Artificial Sequence
  Description of Artificial Sequence: Synthetic oligonucleotide
uucccaccuuggaccaaac

SEQ ID NO: 197898 - RNA, 19 nt, Artificial Sequence
  Description of Artificial Sequence: Synthetic oligonucleotide
gagccgccgacaaagaaau

SEQ ID NO: 197899 - RNA, 19 nt, Artificial Sequence
  Description of Artificial Sequence: Synthetic oligonucleotide
gggcacguucucucugagg

SEQ ID NO: 197900 - RNA, 19 nt, Artificial Sequence
  Description of Artificial Sequence: Synthetic oligonucleotide
cacuccucgguccgucgac

SEQ ID NO: 197901 - RNA, 19 nt, Artificial Sequence
  Description of Artificial Sequence: Synthetic oligonucleotide
ccacggugaaaugugcagc

SEQ ID NO: 197902 - RNA, 19 nt, Artificial Sequence
  Description of Artificial Sequence: Synthetic oligonucleotide
aguaggcuaugcagagaca

SEQ ID NO: 197903 - RNA, 19 nt, Artificial Sequence
  Description of Artificial Sequence: Synthetic oligonucleotide
agaugucgccucaggagau

SEQ ID NO: 197904 - RNA, 19 nt, Artificial Sequence
  Description of Artificial Sequence: Synthetic oligonucleotide
gucgacccuuucuguaauc

SEQ ID NO: 197905 - RNA, 19 nt, Artificial Sequence
  Description of Artificial Sequence: Synthetic oligonucleotide
uugccucggcuaguaacuc

SEQ ID NO: 197906 - RNA, 19 nt, Artificial Sequence
  Description of Artificial Sequence: Synthetic oligonucleotide
gggagcaacgcuuggugua

SEQ ID NO: 197907 - RNA, 19 nt, Artificial Sequence
  Description of Artificial Sequence: Synthetic oligonucleotide
augccucguguuuguugcu

SEQ ID NO: 197908 - RNA, 19 nt, Artificial Sequence
  Description of Artificial Sequence: Synthetic oligonucleotide
gggucacuugaaaccauac

SEQ ID NO: 197909 - RNA, 19 nt, Artificial Sequence
  Description of Artificial Sequence: Synthetic oligonucleotide
ugguugccucggcuaguaa

SEQ ID NO: 197910 - RNA, 19 nt, Artificial Sequence
  Description of Artificial Sequence: Synthetic oligonucleotide
cgaguucugagcuggcuuc

SEQ ID NO: 197911 - RNA, 19 nt, Artificial Sequence
  Description of Artificial Sequence: Synthetic oligonucleotide
agguaccgccaauuccgau

SEQ ID NO: 197912 - RNA, 19 nt, Artificial Sequence
  Description of Artificial Sequence: Synthetic oligonucleotide
caccaaccuggaacuuaac

SEQ ID NO: 197913 - RNA, 19 nt, Artificial Sequence
  Description of Artificial Sequence: Synthetic oligonucleotide
caauuccgaugaguuucug

SEQ ID NO: 197914 - RNA, 19 nt, Artificial Sequence
  Description of Artificial Sequence: Synthetic oligonucleotide
gcuuucgaagggaaacaca

SEQ ID NO: 197915 - RNA, 19 nt, Artificial Sequence
  Description of Artificial Sequence: Synthetic oligonucleotide
cgggguuucuuaacuucgg

SEQ ID NO: 197916 - RNA, 19 nt, Artificial Sequence
  Description of Artificial Sequence: Synthetic oligonucleotide
cagguaccgccaauuccga

SEQ ID NO: 197917 - RNA, 19 nt, Artificial Sequence
  Description of Artificial Sequence: Synthetic oligonucleotide
cauugugauggaagcuggu

SEQ ID NO: 197918 - RNA, 19 nt, Artificial Sequence
  Description of Artificial Sequence: Synthetic oligonucleotide
acuauucagcauagaucuu

SEQ ID NO: 197919 - RNA, 19 nt, Artificial Sequence
  Description of Artificial Sequence: Synthetic oligonucleotide
cucuugggcuaaugcagua

SEQ ID NO: 197920 - RNA, 19 nt, Artificial Sequence
  Description of Artificial Sequence: Synthetic oligonucleotide
gccgccgacaaagaaaucu

SEQ ID NO: 197921 - RNA, 19 nt, Artificial Sequence
  Description of Artificial Sequence: Synthetic oligonucleotide
gcuaugguggaagugcagu

SEQ ID NO: 197922 - RNA, 19 nt, Artificial Sequence
  Description of Artificial Sequence: Synthetic oligonucleotide
gacgaguucugagcuggcu

SEQ ID NO: 197923 - RNA, 19 nt, Artificial Sequence
  Description of Artificial Sequence: Synthetic oligonucleotide
gggugggagcaacgcuugg

SEQ ID NO: 197924 - RNA, 19 nt, Artificial Sequence
  Description of Artificial Sequence: Synthetic oligonucleotide
gacggccucuuugagcacu

SEQ ID NO: 197925 - RNA, 19 nt, Artificial Sequence
  Description of Artificial Sequence: Synthetic oligonucleotide
gugcauugugauggaagcu

SEQ ID NO: 197926 - RNA, 19 nt, Artificial Sequence
  Description of Artificial Sequence: Synthetic oligonucleotide
cgccgacaaagaaaucuug

SEQ ID NO: 197927 - RNA, 19 nt, Artificial Sequence
  Description of Artificial Sequence: Synthetic oligonucleotide
gggguuucuuaacuucggu

SEQ ID NO: 197928 - RNA, 19 nt, Artificial Sequence
  Description of Artificial Sequence: Synthetic oligonucleotide
cguuucucaugaacccaug

SEQ ID NO: 197929 - RNA, 19 nt, Artificial Sequence
  Description of Artificial Sequence: Synthetic oligonucleotide
gcccugcacuccucggucc

SEQ ID NO: 197930 - RNA, 19 nt, Artificial Sequence
  Description of Artificial Sequence: Synthetic oligonucleotide
ggcacaaccucaguggauu

SEQ ID NO: 197931 - RNA, 19 nt, Artificial Sequence
  Description of Artificial Sequence: Synthetic oligonucleotide
cgggacggccucuuugagc

SEQ ID NO: 197932 - RNA, 19 nt, Artificial Sequence
  Description of Artificial Sequence: Synthetic oligonucleotide
agccgccgacaaagaaauc

SEQ ID NO: 197933 - RNA, 19 nt, Artificial Sequence
  Description of Artificial Sequence: Synthetic oligonucleotide
cgauaccaaugucccacug

SEQ ID NO: 197934 - RNA, 19 nt, Artificial Sequence
  Description of Artificial Sequence: Synthetic oligonucleotide
gcugaaccgggacggccuc

SEQ ID NO: 197935 - RNA, 19 nt, Artificial Sequence
  Description of Artificial Sequence: Synthetic oligonucleotide
guccgucgacccuuucugu

SEQ ID NO: 197936 - RNA, 19 nt, Artificial Sequence
  Description of Artificial Sequence: Synthetic oligonucleotide
ucgguccgucgacccuuuc

SEQ ID NO: 197937 - RNA, 19 nt, Artificial Sequence
  Description of Artificial Sequence: Synthetic oligonucleotide
ccaaggagacgcuuauuau

SEQ ID NO: 197938 - RNA, 19 nt, Artificial Sequence
  Description of Artificial Sequence: Synthetic oligonucleotide
cucgggagacugcucgggu

SEQ ID NO: 197939 - RNA, 19 nt, Artificial Sequence
  Description of Artificial Sequence: Synthetic oligonucleotide
ccucggcuaguaacucuuc

SEQ ID NO: 197940 - RNA, 19 nt, Artificial Sequence
  Description of Artificial Sequence: Synthetic oligonucleotide
ccaauuccgaugaguuucu

SEQ ID NO: 197941 - RNA, 19 nt, Artificial Sequence
  Description of Artificial Sequence: Synthetic oligonucleotide
ccgucgacccuuucuguaa

SEQ ID NO: 197942 - RNA, 19 nt, Artificial Sequence
  Description of Artificial Sequence: Synthetic oligonucleotide
gagcaacgcuugguguaua

SEQ ID NO: 197943 - RNA, 19 nt, Artificial Sequence
  Description of Artificial Sequence: Synthetic oligonucleotide
cuucgggcugcuugucaau

SEQ ID NO: 197944 - RNA, 19 nt, Artificial Sequence
  Description of Artificial Sequence: Synthetic oligonucleotide
cggcuaguaacucuucaua

SEQ ID NO: 197945 - RNA, 19 nt, Artificial Sequence
  Description of Artificial Sequence: Synthetic oligonucleotide
gcgauaccaaugucccacu

SEQ ID NO: 197946 - RNA, 19 nt, Artificial Sequence
  Description of Artificial Sequence: Synthetic oligonucleotide
ggagcaacgcuugguguau

SEQ ID NO: 197947 - RNA, 19 nt, Artificial Sequence
  Description of Artificial Sequence: Synthetic oligonucleotide
ccgggacggccucuuugag

SEQ ID NO: 197948 - RNA, 19 nt, Artificial Sequence
  Description of Artificial Sequence: Synthetic oligonucleotide
gcuucucguuucucugacu

SEQ ID NO: 197949 - RNA, 19 nt, Artificial Sequence
  Description of Artificial Sequence: Synthetic oligonucleotide
ccguuucucaugaacccau

SEQ ID NO: 197950 - RNA, 19 nt, Artificial Sequence
  Description of Artificial Sequence: Synthetic oligonucleotide
gcuacaagugagggugccu

SEQ ID NO: 197951 - RNA, 19 nt, Artificial Sequence
  Description of Artificial Sequence: Synthetic oligonucleotide
cgagguuuccgaaucuuuu

SEQ ID NO: 197952 - RNA, 19 nt, Artificial Sequence
  Description of Artificial Sequence: Synthetic oligonucleotide
ccgaugaguuucugaaaau

SEQ ID NO: 197953 - RNA, 19 nt, Artificial Sequence
  Description of Artificial Sequence: Synthetic oligonucleotide
cuggauaguuuugguuauu

SEQ ID NO: 197954 - RNA, 19 nt, Artificial Sequence
  Description of Artificial Sequence: Synthetic oligonucleotide
gaaccgggacggccucuuu

SEQ ID NO: 197955 - RNA, 19 nt, Artificial Sequence
  Description of Artificial Sequence: Synthetic oligonucleotide
cccugacacuuauuucugu

SEQ ID NO: 197956 - RNA, 19 nt, Artificial Sequence
  Description of Artificial Sequence: Synthetic oligonucleotide
ccgccgacaaagaaaucuu

SEQ ID NO: 197957 - RNA, 19 nt, Artificial Sequence
  Description of Artificial Sequence: Synthetic oligonucleotide
gcccauguuaaugcugauu

SEQ ID NO: 197958 - RNA, 19 nt, Artificial Sequence
  Description of Artificial Sequence: Synthetic oligonucleotide
gccucggcuaguaacucuu

SEQ ID NO: 197959 - RNA, 19 nt, Artificial Sequence
  Description of Artificial Sequence: Synthetic oligonucleotide
cgggagacugcucggguua

SEQ ID NO: 197960 - RNA, 19 nt, Artificial Sequence
  Description of Artificial Sequence: Synthetic oligonucleotide
ccgagguuuccgaaucuuu

SEQ ID NO: 197961 - RNA, 19 nt, Artificial Sequence
  Description of Artificial Sequence: Synthetic oligonucleotide
cacucgccuggacuucauu

SEQ ID NO: 197962 - RNA, 19 nt, Artificial Sequence
  Description of Artificial Sequence: Synthetic oligonucleotide
gccgagguuuccgaaucuu

SEQ ID NO: 197963 - RNA, 19 nt, Artificial Sequence
  Description of Artificial Sequence: Synthetic oligonucleotide
cucgguccgucgacccuuu

SEQ ID NO: 197964 - RNA, 19 nt, Artificial Sequence
  Description of Artificial Sequence: Synthetic oligonucleotide
cggagacuacaagucugga

SEQ ID NO: 197965 - RNA, 19 nt, Artificial Sequence
  Description of Artificial Sequence: Synthetic oligonucleotide
cgguccgucgacccuuucu

SEQ ID NO: 197966 - RNA, 19 nt, Artificial Sequence
  Description of Artificial Sequence: Synthetic oligonucleotide
cgucgacccuuucuguaau

SEQ ID NO: 197967 - RNA, 19 nt, Artificial Sequence
  Description of Artificial Sequence: Synthetic oligonucleotide
cgccaauuccgaugaguuu

SEQ ID NO: 197968 - RNA, 19 nt, Artificial Sequence
  Description of Artificial Sequence: Synthetic oligonucleotide
ccucgguccgucgacccuu

SEQ ID NO: 197969 - RNA, 19 nt, Artificial Sequence
  Description of Artificial Sequence: Synthetic oligonucleotide
ccacucgccuggacuucau

SEQ ID NO: 197970 - RNA, 19 nt, Artificial Sequence
  Description of Artificial Sequence: Synthetic oligonucleotide
aauaucuuaaaccaaugcc

SEQ ID NO: 197971 - RNA, 19 nt, Artificial Sequence
  Description of Artificial Sequence: Synthetic oligonucleotide
aaagagguaaucccaaauc

SEQ ID NO: 197972 - RNA, 19 nt, Artificial Sequence
  Description of Artificial Sequence: Synthetic oligonucleotide
auaucuuaaaccaaugccc

SEQ ID NO: 197973 - RNA, 19 nt, Artificial Sequence
  Description of Artificial Sequence: Synthetic oligonucleotide
auuuucaauaccuggagag

SEQ ID NO: 197974 - RNA, 19 nt, Artificial Sequence
  Description of Artificial Sequence: Synthetic oligonucleotide
aguaguaguaucuaguuga

SEQ ID NO: 197975 - RNA, 19 nt, Artificial Sequence
  Description of Artificial Sequence: Synthetic oligonucleotide
uguaagauugucuggauca

SEQ ID NO: 197976 - RNA, 19 nt, Artificial Sequence
  Description of Artificial Sequence: Synthetic oligonucleotide
ugucuuauuucuuuaguag

SEQ ID NO: 197977 - RNA, 19 nt, Artificial Sequence
  Description of Artificial Sequence: Synthetic oligonucleotide
gacuuuaugauacacccug

SEQ ID NO: 197978 - RNA, 19 nt, Artificial Sequence
  Description of Artificial Sequence: Synthetic oligonucleotide
uuuaaaacguccauggcua

SEQ ID NO: 197979 - RNA, 19 nt, Artificial Sequence
  Description of Artificial Sequence: Synthetic oligonucleotide
aguaguucuaguuaucuca

SEQ ID NO: 197980 - RNA, 19 nt, Artificial Sequence
  Description of Artificial Sequence: Synthetic oligonucleotide
caaguaacagucucgaagc

SEQ ID NO: 197981 - RNA, 19 nt, Artificial Sequence
  Description of Artificial Sequence: Synthetic oligonucleotide
uaaauuagaugacugacuu

SEQ ID NO: 197982 - RNA, 19 nt, Artificial Sequence
  Description of Artificial Sequence: Synthetic oligonucleotide
uuuaacucgaggagcagcc

SEQ ID NO: 197983 - RNA, 19 nt, Artificial Sequence
  Description of Artificial Sequence: Synthetic oligonucleotide
ugaaacuugguuaucgagu

SEQ ID NO: 197984 - RNA, 19 nt, Artificial Sequence
  Description of Artificial Sequence: Synthetic oligonucleotide
guacugacaacccauuugg

SEQ ID NO: 197985 - RNA, 19 nt, Artificial Sequence
  Description of Artificial Sequence: Synthetic oligonucleotide
ucuaguuaucucaacucag

SEQ ID NO: 197986 - RNA, 19 nt, Artificial Sequence
  Description of Artificial Sequence: Synthetic oligonucleotide
agcacauugguugaacucc

SEQ ID NO: 197987 - RNA, 19 nt, Artificial Sequence
  Description of Artificial Sequence: Synthetic oligonucleotide
uuuacaauaaucggucccc

SEQ ID NO: 197988 - RNA, 19 nt, Artificial Sequence
  Description of Artificial Sequence: Synthetic oligonucleotide
uaucuuaaaccaaugcccu

SEQ ID NO: 197989 - RNA, 19 nt, Artificial Sequence
  Description of Artificial Sequence: Synthetic oligonucleotide
aaucucgaaaauguaaugu

SEQ ID NO: 197990 - RNA, 19 nt, Artificial Sequence
  Description of Artificial Sequence: Synthetic oligonucleotide
cucgaaaauguaauguuag

SEQ ID NO: 197991 - RNA, 19 nt, Artificial Sequence
  Description of Artificial Sequence: Synthetic oligonucleotide
aucuuaaaugccauguggc

SEQ ID NO: 197992 - RNA, 19 nt, Artificial Sequence
  Description of Artificial Sequence: Synthetic oligonucleotide
uucuaguuaucucaacuca

SEQ ID NO: 197993 - RNA, 19 nt, Artificial Sequence
  Description of Artificial Sequence: Synthetic oligonucleotide
aaacgaaaugacacaaggg

SEQ ID NO: 197994 - RNA, 19 nt, Artificial Sequence
  Description of Artificial Sequence: Synthetic oligonucleotide
aaggucgucauguuuaaaa

SEQ ID NO: 197995 - RNA, 19 nt, Artificial Sequence
  Description of Artificial Sequence: Synthetic oligonucleotide
uaucucaauuacaaaaguc

SEQ ID NO: 197996 - RNA, 19 nt, Artificial Sequence
  Description of Artificial Sequence: Synthetic oligonucleotide
auguuuacaauaaucgguc

SEQ ID NO: 197997 - RNA, 19 nt, Artificial Sequence
  Description of Artificial Sequence: Synthetic oligonucleotide
ucaagugaaggcuaaacuu

SEQ ID NO: 197998 - RNA, 19 nt, Artificial Sequence
  Description of Artificial Sequence: Synthetic oligonucleotide
uugaaacuugguuaucgag

SEQ ID NO: 197999 - RNA, 19 nt, Artificial Sequence
  Description of Artificial Sequence: Synthetic oligonucleotide
ucuucgaacgccuuucucu

SEQ ID NO: 198000 - RNA, 19 nt, Artificial Sequence
  Description of Artificial Sequence: Synthetic oligonucleotide
ucuuaacauaaucauguau

SEQ ID NO: 198001 - RNA, 19 nt, Artificial Sequence
  Description of Artificial Sequence: Synthetic oligonucleotide
uuaaaugccauguggcagu

SEQ ID NO: 198002 - RNA, 19 nt, Artificial Sequence
  Description of Artificial Sequence: Synthetic oligonucleotide
aucucaauuacaaaaguca

SEQ ID NO: 198003 - RNA, 19 nt, Artificial Sequence
  Description of Artificial Sequence: Synthetic oligonucleotide
uauuggcaaugauauaaag

SEQ ID NO: 198004 - RNA, 19 nt, Artificial Sequence
  Description of Artificial Sequence: Synthetic oligonucleotide
uguuaguaguucuaguuau

SEQ ID NO: 198005 - RNA, 19 nt, Artificial Sequence
  Description of Artificial Sequence: Synthetic oligonucleotide
guuuacaauaaucgguccc

SEQ ID NO: 198006 - RNA, 19 nt, Artificial Sequence
  Description of Artificial Sequence: Synthetic oligonucleotide
agauucugcgucuccacac

SEQ ID NO: 198007 - RNA, 19 nt, Artificial Sequence
  Description of Artificial Sequence: Synthetic oligonucleotide
ucuuaaaugccauguggca

SEQ ID NO: 198008 - RNA, 19 nt, Artificial Sequence
  Description of Artificial Sequence: Synthetic oligonucleotide
ucaugauuauacugaguag

SEQ ID NO: 198009 - RNA, 19 nt, Artificial Sequence
  Description of Artificial Sequence: Synthetic oligonucleotide
caagugaaggcuaaacuuc

SEQ ID NO: 198010 - RNA, 19 nt, Artificial Sequence
  Description of Artificial Sequence: Synthetic oligonucleotide
gcaaguaacagucucgaag

SEQ ID NO: 198011 - RNA, 19 nt, Artificial Sequence
  Description of Artificial Sequence: Synthetic oligonucleotide
uaguaguaguaucuaguug

SEQ ID NO: 198012 - RNA, 19 nt, Artificial Sequence
  Description of Artificial Sequence: Synthetic oligonucleotide
ucuuaaaccaaugcccuca

SEQ ID NO: 198013 - RNA, 19 nt, Artificial Sequence
  Description of Artificial Sequence: Synthetic oligonucleotide
ucugaguggaccuuugaaa

SEQ ID NO: 198014 - RNA, 19 nt, Artificial Sequence
  Description of Artificial Sequence: Synthetic oligonucleotide
ugaaaacgaaaugacacaa

SEQ ID NO: 198015 - RNA, 19 nt, Artificial Sequence
  Description of Artificial Sequence: Synthetic oligonucleotide
uguaauguuaguaguucua

SEQ ID NO: 198016 - RNA, 19 nt, Artificial Sequence
  Description of Artificial Sequence: Synthetic oligonucleotide
agaagcugaugcaaauucc

SEQ ID NO: 198017 - RNA, 19 nt, Artificial Sequence
  Description of Artificial Sequence: Synthetic oligonucleotide
acaugucguggccagcugc

SEQ ID NO: 198018 - RNA, 19 nt, Artificial Sequence
  Description of Artificial Sequence: Synthetic oligonucleotide
cuuaaaugccauguggcag

SEQ ID NO: 198019 - RNA, 19 nt, Artificial Sequence
  Description of Artificial Sequence: Synthetic oligonucleotide
guaauguuaguaguucuag

SEQ ID NO: 198020 - RNA, 19 nt, Artificial Sequence
  Description of Artificial Sequence: Synthetic oligonucleotide
acgugacuuuucaagaucc

SEQ ID NO: 198021 - RNA, 19 nt, Artificial Sequence
  Description of Artificial Sequence: Synthetic oligonucleotide
agcguucuccguuaggauc

SEQ ID NO: 198022 - RNA, 19 nt, Artificial Sequence
  Description of Artificial Sequence: Synthetic oligonucleotide
acgaaaugacacaagggcg

SEQ ID NO: 198023 - RNA, 19 nt, Artificial Sequence
  Description of Artificial Sequence: Synthetic oligonucleotide
gagauaacagcagugccug

SEQ ID NO: 198024 - RNA, 19 nt, Artificial Sequence
  Description of Artificial Sequence: Synthetic oligonucleotide
aagguagucaguuccugau

SEQ ID NO: 198025 - RNA, 19 nt, Artificial Sequence
  Description of Artificial Sequence: Synthetic oligonucleotide
gugccaaccacauugggac

SEQ ID NO: 198026 - RNA, 19 nt, Artificial Sequence
  Description of Artificial Sequence: Synthetic oligonucleotide
gaagacgcgaaguccagac

SEQ ID NO: 198027 - RNA, 19 nt, Artificial Sequence
  Description of Artificial Sequence: Synthetic oligonucleotide
uacagauauuccuguacug

SEQ ID NO: 198028 - RNA, 19 nt, Artificial Sequence
  Description of Artificial Sequence: Synthetic oligonucleotide
aguccagacaaacaaccca

SEQ ID NO: 198029 - RNA, 19 nt, Artificial Sequence
  Description of Artificial Sequence: Synthetic oligonucleotide
agauugucuggaucagaac

SEQ ID NO: 198030 - RNA, 19 nt, Artificial Sequence
  Description of Artificial Sequence: Synthetic oligonucleotide
auaaucaauauuccucuua

SEQ ID NO: 198031 - RNA, 19 nt, Artificial Sequence
  Description of Artificial Sequence: Synthetic oligonucleotide
aucgcagcuucuguaaagc

SEQ ID NO: 198032 - RNA, 19 nt, Artificial Sequence
  Description of Artificial Sequence: Synthetic oligonucleotide
uaauguuaguaguucuagu

SEQ ID NO: 198033 - RNA, 19 nt, Artificial Sequence
  Description of Artificial Sequence: Synthetic oligonucleotide
gcuauauucagcacauugg

SEQ ID NO: 198034 - RNA, 19 nt, Artificial Sequence
  Description of Artificial Sequence: Synthetic oligonucleotide
gaccuuugaaacuugguua

SEQ ID NO: 198035 - RNA, 19 nt, Artificial Sequence
  Description of Artificial Sequence: Synthetic oligonucleotide
auuccuguacugacaaccc

SEQ ID NO: 198036 - RNA, 19 nt, Artificial Sequence
  Description of Artificial Sequence: Synthetic oligonucleotide
aggcuaaacuuccggugcc

SEQ ID NO: 198037 - RNA, 19 nt, Artificial Sequence
  Description of Artificial Sequence: Synthetic oligonucleotide
cauugguugaacuccugug

SEQ ID NO: 198038 - RNA, 19 nt, Artificial Sequence
  Description of Artificial Sequence: Synthetic oligonucleotide
ugauuauacugaguagccc

SEQ ID NO: 198039 - RNA, 19 nt, Artificial Sequence
  Description of Artificial Sequence: Synthetic oligonucleotide
ucugucuuaucaguccucc

SEQ ID NO: 198040 - RNA, 19 nt, Artificial Sequence
  Description of Artificial Sequence: Synthetic oligonucleotide
gaucgcagcuucuguaaag

SEQ ID NO: 198041 - RNA, 19 nt, Artificial Sequence
  Description of Artificial Sequence: Synthetic oligonucleotide
aaaacguccauggcuauuu

SEQ ID NO: 198042 - RNA, 19 nt, Artificial Sequence
  Description of Artificial Sequence: Synthetic oligonucleotide
uccguuaggaucugcuucu

SEQ ID NO: 198043 - RNA, 19 nt, Artificial Sequence
  Description of Artificial Sequence: Synthetic oligonucleotide
uaaucgguccccugaaagu

SEQ ID NO: 198044 - RNA, 19 nt, Artificial Sequence
  Description of Artificial Sequence: Synthetic oligonucleotide
aaaccaaugcccucauauu

SEQ ID NO: 198045 - RNA, 19 nt, Artificial Sequence
  Description of Artificial Sequence: Synthetic oligonucleotide
cucgucuugagguuuccag

SEQ ID NO: 198046 - RNA, 19 nt, Artificial Sequence
  Description of Artificial Sequence: Synthetic oligonucleotide
auaccuggagaggaagccc

SEQ ID NO: 198047 - RNA, 19 nt, Artificial Sequence
  Description of Artificial Sequence: Synthetic oligonucleotide
cugacaacccauuugguaa

SEQ ID NO: 198048 - RNA, 19 nt, Artificial Sequence
  Description of Artificial Sequence: Synthetic oligonucleotide
auguuaguaguucuaguua

SEQ ID NO: 198049 - RNA, 19 nt, Artificial Sequence
  Description of Artificial Sequence: Synthetic oligonucleotide
aacccauuugguaaggaaa

SEQ ID NO: 198050 - RNA, 19 nt, Artificial Sequence
  Description of Artificial Sequence: Synthetic oligonucleotide
cuucaggagcuauauucag

SEQ ID NO: 198051 - RNA, 19 nt, Artificial Sequence
  Description of Artificial Sequence: Synthetic oligonucleotide
uauuccucuuagaaauuau

SEQ ID NO: 198052 - RNA, 19 nt, Artificial Sequence
  Description of Artificial Sequence: Synthetic oligonucleotide
ugacuuuaugauacacccu

SEQ ID NO: 198053 - RNA, 19 nt, Artificial Sequence
  Description of Artificial Sequence: Synthetic oligonucleotide
aauaaucgguccccugaaa

SEQ ID NO: 198054 - RNA, 19 nt, Artificial Sequence
  Description of Artificial Sequence: Synthetic oligonucleotide
agagauaacagcagugccu

SEQ ID NO: 198055 - RNA, 19 nt, Artificial Sequence
  Description of Artificial Sequence: Synthetic oligonucleotide
uaacucgaggagcagccac

SEQ ID NO: 198056 - RNA, 19 nt, Artificial Sequence
  Description of Artificial Sequence: Synthetic oligonucleotide
acugacaacccauuuggua

SEQ ID NO: 198057 - RNA, 19 nt, Artificial Sequence
  Description of Artificial Sequence: Synthetic oligonucleotide
guccagacaaacaacccag

SEQ ID NO: 198058 - RNA, 19 nt, Artificial Sequence
  Description of Artificial Sequence: Synthetic oligonucleotide
acaggaacgugucuggcaa

SEQ ID NO: 198059 - RNA, 19 nt, Artificial Sequence
  Description of Artificial Sequence: Synthetic oligonucleotide
cuaacgcaucuguaaacac

SEQ ID NO: 198060 - RNA, 19 nt, Artificial Sequence
  Description of Artificial Sequence: Synthetic oligonucleotide
uggcuauuaauguuuugua

SEQ ID NO: 198061 - RNA, 19 nt, Artificial Sequence
  Description of Artificial Sequence: Synthetic oligonucleotide
agagccuaagauuguucug

SEQ ID NO: 198062 - RNA, 19 nt, Artificial Sequence
  Description of Artificial Sequence: Synthetic oligonucleotide
guauucacgcucuuuucuc

SEQ ID NO: 198063 - RNA, 19 nt, Artificial Sequence
  Description of Artificial Sequence: Synthetic oligonucleotide
gagccuaagauuguucuga

SEQ ID NO: 198064 - RNA, 19 nt, Artificial Sequence
  Description of Artificial Sequence: Synthetic oligonucleotide
cuucgaacgccuuucucuc

SEQ ID NO: 198065 - RNA, 19 nt, Artificial Sequence
  Description of Artificial Sequence: Synthetic oligonucleotide
cuguuuaacucgaggagca

SEQ ID NO: 198066 - RNA, 19 nt, Artificial Sequence
  Description of Artificial Sequence: Synthetic oligonucleotide
ugcccuaacgcaucuguaa

SEQ ID NO: 198067 - RNA, 19 nt, Artificial Sequence
  Description of Artificial Sequence: Synthetic oligonucleotide
ugaguagcccgacuggcua

SEQ ID NO: 198068 - RNA, 19 nt, Artificial Sequence
  Description of Artificial Sequence: Synthetic oligonucleotide
uuguauucacgcucuuuuc

SEQ ID NO: 198069 - RNA, 19 nt, Artificial Sequence
  Description of Artificial Sequence: Synthetic oligonucleotide
gaaacuugguuaucgaguu

SEQ ID NO: 198070 - RNA, 19 nt, Artificial Sequence
  Description of Artificial Sequence: Synthetic oligonucleotide
ucuggggcgagagaagaga

SEQ ID NO: 198071 - RNA, 19 nt, Artificial Sequence
  Description of Artificial Sequence: Synthetic oligonucleotide
cauccucucgucacagacc

SEQ ID NO: 198072 - RNA, 19 nt, Artificial Sequence
  Description of Artificial Sequence: Synthetic oligonucleotide
cuccguuaggaucugcuuc

SEQ ID NO: 198073 - RNA, 19 nt, Artificial Sequence
  Description of Artificial Sequence: Synthetic oligonucleotide
agcuaucuuaaauuaucuu

SEQ ID NO: 198074 - RNA, 19 nt, Artificial Sequence
  Description of Artificial Sequence: Synthetic oligonucleotide
cugucgugagaugacgucc

SEQ ID NO: 198075 - RNA, 19 nt, Artificial Sequence
  Description of Artificial Sequence: Synthetic oligonucleotide
ugguccugucgugagauga

SEQ ID NO: 198076 - RNA, 19 nt, Artificial Sequence
  Description of Artificial Sequence: Synthetic oligonucleotide
cucugcucagcucuccaag

SEQ ID NO: 198077 - RNA, 19 nt, Artificial Sequence
  Description of Artificial Sequence: Synthetic oligonucleotide
uguuuaacucgaggagcag

SEQ ID NO: 198078 - RNA, 19 nt, Artificial Sequence
  Description of Artificial Sequence: Synthetic oligonucleotide
uccugucgugagaugacgu

SEQ ID NO: 198079 - RNA, 19 nt, Artificial Sequence
  Description of Artificial Sequence: Synthetic oligonucleotide
acgcgaaguccagacaaac

SEQ ID NO: 198080 - RNA, 19 nt, Artificial Sequence
  Description of Artificial Sequence: Synthetic oligonucleotide
gagacuuagccaguuuuga

SEQ ID NO: 198081 - RNA, 19 nt, Artificial Sequence
  Description of Artificial Sequence: Synthetic oligonucleotide
gaaccaggucuugacauca

SEQ ID NO: 198082 - RNA, 19 nt, Artificial Sequence
  Description of Artificial Sequence: Synthetic oligonucleotide
agacuuagccaguuuugau

SEQ ID NO: 198083 - RNA, 19 nt, Artificial Sequence
  Description of Artificial Sequence: Synthetic oligonucleotide
acuguaagauugucuggau

SEQ ID NO: 198084 - RNA, 19 nt, Artificial Sequence
  Description of Artificial Sequence: Synthetic oligonucleotide
ugacacaagggcguccaga

SEQ ID NO: 198085 - RNA, 19 nt, Artificial Sequence
  Description of Artificial Sequence: Synthetic oligonucleotide
ucaagcguugugugaaauu

SEQ ID NO: 198086 - RNA, 19 nt, Artificial Sequence
  Description of Artificial Sequence: Synthetic oligonucleotide
aaacuugguuaucgaguuu

SEQ ID NO: 198087 - RNA, 19 nt, Artificial Sequence
  Description of Artificial Sequence: Synthetic oligonucleotide
uaguucuaguuaucucaac

SEQ ID NO: 198088 - RNA, 19 nt, Artificial Sequence
  Description of Artificial Sequence: Synthetic oligonucleotide
ugguggucaaaggucguca

SEQ ID NO: 198089 - RNA, 19 nt, Artificial Sequence
  Description of Artificial Sequence: Synthetic oligonucleotide
uucgaacgccuuucucucc

SEQ ID NO: 198090 - RNA, 19 nt, Artificial Sequence
  Description of Artificial Sequence: Synthetic oligonucleotide
cacuguaagauugucugga

SEQ ID NO: 198091 - RNA, 19 nt, Artificial Sequence
  Description of Artificial Sequence: Synthetic oligonucleotide
ggcgagagaagagaaauca

SEQ ID NO: 198092 - RNA, 19 nt, Artificial Sequence
  Description of Artificial Sequence: Synthetic oligonucleotide
aaucuacaguauacauuca

SEQ ID NO: 198093 - RNA, 19 nt, Artificial Sequence
  Description of Artificial Sequence: Synthetic oligonucleotide
ggucuugacaucacacucc

SEQ ID NO: 198094 - RNA, 19 nt, Artificial Sequence
  Description of Artificial Sequence: Synthetic oligonucleotide
gcucggaucaucucuuuac

SEQ ID NO: 198095 - RNA, 19 nt, Artificial Sequence
  Description of Artificial Sequence: Synthetic oligonucleotide
cuggugccccauuagucac

SEQ ID NO: 198096 - RNA, 19 nt, Artificial Sequence
  Description of Artificial Sequence: Synthetic oligonucleotide
ucgguccccugaaagugcu

SEQ ID NO: 198097 - RNA, 19 nt, Artificial Sequence
  Description of Artificial Sequence: Synthetic oligonucleotide
gcacuguaagauugucugg

SEQ ID NO: 198098 - RNA, 19 nt, Artificial Sequence
  Description of Artificial Sequence: Synthetic oligonucleotide
uuaaaccaaugcccucaua

SEQ ID NO: 198099 - RNA, 19 nt, Artificial Sequence
  Description of Artificial Sequence: Synthetic oligonucleotide
aguauacauucaagugaag

SEQ ID NO: 198100 - RNA, 19 nt, Artificial Sequence
  Description of Artificial Sequence: Synthetic oligonucleotide
guaguucuaguuaucucaa

SEQ ID NO: 198101 - RNA, 19 nt, Artificial Sequence
  Description of Artificial Sequence: Synthetic oligonucleotide
agcccgacuggcuauuaau

SEQ ID NO: 198102 - RNA, 19 nt, Artificial Sequence
  Description of Artificial Sequence: Synthetic oligonucleotide
aguagcucauucauacaau

SEQ ID NO: 198103 - RNA, 19 nt, Artificial Sequence
  Description of Artificial Sequence: Synthetic oligonucleotide
acuaacuaccacacuccca

SEQ ID NO: 198104 - RNA, 19 nt, Artificial Sequence
  Description of Artificial Sequence: Synthetic oligonucleotide
uccccugaaagugcuauuu

SEQ ID NO: 198105 - RNA, 19 nt, Artificial Sequence
  Description of Artificial Sequence: Synthetic oligonucleotide
acuuuaugauacacccugu

SEQ ID NO: 198106 - RNA, 19 nt, Artificial Sequence
  Description of Artificial Sequence: Synthetic oligonucleotide
gcgucuuucucucucaaaa

SEQ ID NO: 198107 - RNA, 19 nt, Artificial Sequence
  Description of Artificial Sequence: Synthetic oligonucleotide
caacccauuugguaaggaa

SEQ ID NO: 198108 - RNA, 19 nt, Artificial Sequence
  Description of Artificial Sequence: Synthetic oligonucleotide
guugcccuaacgcaucugu

SEQ ID NO: 198109 - RNA, 19 nt, Artificial Sequence
  Description of Artificial Sequence: Synthetic oligonucleotide
gauucugcgucuccacacu

SEQ ID NO: 198110 - RNA, 19 nt, Artificial Sequence
  Description of Artificial Sequence: Synthetic oligonucleotide
uggggcgagagaagagaaa

SEQ ID NO: 198111 - RNA, 19 nt, Artificial Sequence
  Description of Artificial Sequence: Synthetic oligonucleotide
gccgugagugcacuguaag

SEQ ID NO: 198112 - RNA, 19 nt, Artificial Sequence
  Description of Artificial Sequence: Synthetic oligonucleotide
cacauugguugaacuccug

SEQ ID NO: 198113 - RNA, 19 nt, Artificial Sequence
  Description of Artificial Sequence: Synthetic oligonucleotide
gaacuccuguguucagaca

SEQ ID NO: 198114 - RNA, 19 nt, Artificial Sequence
  Description of Artificial Sequence: Synthetic oligonucleotide
uugcccuaacgcaucugua

SEQ ID NO: 198115 - RNA, 19 nt, Artificial Sequence
  Description of Artificial Sequence: Synthetic oligonucleotide
uaaaacguccauggcuauu

SEQ ID NO: 198116 - RNA, 19 nt, Artificial Sequence
  Description of Artificial Sequence: Synthetic oligonucleotide
caggagcuauauucagcac

SEQ ID NO: 198117 - RNA, 19 nt, Artificial Sequence
  Description of Artificial Sequence: Synthetic oligonucleotide
ccauaaucaauauuccucu

SEQ ID NO: 198118 - RNA, 19 nt, Artificial Sequence
  Description of Artificial Sequence: Synthetic oligonucleotide
aaaugccauguggcaguug

SEQ ID NO: 198119 - RNA, 19 nt, Artificial Sequence
  Description of Artificial Sequence: Synthetic oligonucleotide
cagcuaucuuaaauuaucu

SEQ ID NO: 198120 - RNA, 19 nt, Artificial Sequence
  Description of Artificial Sequence: Synthetic oligonucleotide
ccccauuacuccauaauca

SEQ ID NO: 198121 - RNA, 19 nt, Artificial Sequence
  Description of Artificial Sequence: Synthetic oligonucleotide
aaaggucgucauguuuaaa

SEQ ID NO: 198122 - RNA, 19 nt, Artificial Sequence
  Description of Artificial Sequence: Synthetic oligonucleotide
cucuuaacauaaucaugua

SEQ ID NO: 198123 - RNA, 19 nt, Artificial Sequence
  Description of Artificial Sequence: Synthetic oligonucleotide
uugcuuuagccagcuggcu

SEQ ID NO: 198124 - RNA, 19 nt, Artificial Sequence
  Description of Artificial Sequence: Synthetic oligonucleotide
guaguaguaucuaguugaa

SEQ ID NO: 198125 - RNA, 19 nt, Artificial Sequence
  Description of Artificial Sequence: Synthetic oligonucleotide
caaaggucgucauguuuaa

SEQ ID NO: 198126 - RNA, 19 nt, Artificial Sequence
  Description of Artificial Sequence: Synthetic oligonucleotide
guagcagccuucccgugaa

SEQ ID NO: 198127 - RNA, 19 nt, Artificial Sequence
  Description of Artificial Sequence: Synthetic oligonucleotide
aggaacgugucuggcaaau

SEQ ID NO: 198128 - RNA, 19 nt, Artificial Sequence
  Description of Artificial Sequence: Synthetic oligonucleotide
agcucagcguucuccguua

SEQ ID NO: 198129 - RNA, 19 nt, Artificial Sequence
  Description of Artificial Sequence: Synthetic oligonucleotide
acucaagcguugugugaaa

SEQ ID NO: 198130 - RNA, 19 nt, Artificial Sequence
  Description of Artificial Sequence: Synthetic oligonucleotide
ggaccuuugaaacuugguu

SEQ ID NO: 198131 - RNA, 19 nt, Artificial Sequence
  Description of Artificial Sequence: Synthetic oligonucleotide
cucgacccacauaauuuaa

SEQ ID NO: 198132 - RNA, 19 nt, Artificial Sequence
  Description of Artificial Sequence: Synthetic oligonucleotide
acgcucuuuucucuucaua

SEQ ID NO: 198133 - RNA, 19 nt, Artificial Sequence
  Description of Artificial Sequence: Synthetic oligonucleotide
cuuuaugauacacccuguu

SEQ ID NO: 198134 - RNA, 19 nt, Artificial Sequence
  Description of Artificial Sequence: Synthetic oligonucleotide
uggccgugagugcacugua

SEQ ID NO: 198135 - RNA, 19 nt, Artificial Sequence
  Description of Artificial Sequence: Synthetic oligonucleotide
ccuaacgcaucuguaaaca

SEQ ID NO: 198136 - RNA, 19 nt, Artificial Sequence
  Description of Artificial Sequence: Synthetic oligonucleotide
cccuaacgcaucuguaaac

SEQ ID NO: 198137 - RNA, 19 nt, Artificial Sequence
  Description of Artificial Sequence: Synthetic oligonucleotide
cuggggcgagagaagagaa

SEQ ID NO: 198138 - RNA, 19 nt, Artificial Sequence
  Description of Artificial Sequence: Synthetic oligonucleotide
cacaugucguggccagcug

SEQ ID NO: 198139 - RNA, 19 nt, Artificial Sequence
  Description of Artificial Sequence: Synthetic oligonucleotide
ggggaagacgcgaagucca

SEQ ID NO: 198140 - RNA, 19 nt, Artificial Sequence
  Description of Artificial Sequence: Synthetic oligonucleotide
gucaaaggucgucauguuu

SEQ ID NO: 198141 - RNA, 19 nt, Artificial Sequence
  Description of Artificial Sequence: Synthetic oligonucleotide
gcggcacucauagucauuc

SEQ ID NO: 198142 - RNA, 19 nt, Artificial Sequence
  Description of Artificial Sequence: Synthetic oligonucleotide
ccugucgugagaugacguc

SEQ ID NO: 198143 - RNA, 19 nt, Artificial Sequence
  Description of Artificial Sequence: Synthetic oligonucleotide
gcucgacccacauaauuua

SEQ ID NO: 198144 - RNA, 19 nt, Artificial Sequence
  Description of Artificial Sequence: Synthetic oligonucleotide
caugucguggccagcugcu

SEQ ID NO: 198145 - RNA, 19 nt, Artificial Sequence
  Description of Artificial Sequence: Synthetic oligonucleotide
gugagugcacuguaagauu

SEQ ID NO: 198146 - RNA, 19 nt, Artificial Sequence
  Description of Artificial Sequence: Synthetic oligonucleotide
gcccgacuggcuauuaaug

SEQ ID NO: 198147 - RNA, 19 nt, Artificial Sequence
  Description of Artificial Sequence: Synthetic oligonucleotide
ccagauggcuuaaaauaaa

SEQ ID NO: 198148 - RNA, 19 nt, Artificial Sequence
  Description of Artificial Sequence: Synthetic oligonucleotide
gccccaagcggaucgcagc

SEQ ID NO: 198149 - RNA, 19 nt, Artificial Sequence
  Description of Artificial Sequence: Synthetic oligonucleotide
gacgcgaaguccagacaaa

SEQ ID NO: 198150 - RNA, 19 nt, Artificial Sequence
  Description of Artificial Sequence: Synthetic oligonucleotide
augcccucauauuguuauu

SEQ ID NO: 198151 - RNA, 19 nt, Artificial Sequence
  Description of Artificial Sequence: Synthetic oligonucleotide
ccaagcggaucgcagcuuc

SEQ ID NO: 198152 - RNA, 19 nt, Artificial Sequence
  Description of Artificial Sequence: Synthetic oligonucleotide
gcccuaacgcaucuguaaa

SEQ ID NO: 198153 - RNA, 19 nt, Artificial Sequence
  Description of Artificial Sequence: Synthetic oligonucleotide
cugaguagcccgacuggcu

SEQ ID NO: 198154 - RNA, 19 nt, Artificial Sequence
  Description of Artificial Sequence: Synthetic oligonucleotide
gcguccagaaugucauauc

SEQ ID NO: 198155 - RNA, 19 nt, Artificial Sequence
  Description of Artificial Sequence: Synthetic oligonucleotide
ggaucgcagcuucuguaaa

SEQ ID NO: 198156 - RNA, 19 nt, Artificial Sequence
  Description of Artificial Sequence: Synthetic oligonucleotide
gaguagcccgacuggcuau

SEQ ID NO: 198157 - RNA, 19 nt, Artificial Sequence
  Description of Artificial Sequence: Synthetic oligonucleotide
cuucuucgaacgccuuucu

SEQ ID NO: 198158 - RNA, 19 nt, Artificial Sequence
  Description of Artificial Sequence: Synthetic oligonucleotide
uuccggugccaaccacauu

SEQ ID NO: 198159 - RNA, 19 nt, Artificial Sequence
  Description of Artificial Sequence: Synthetic oligonucleotide
ggaagacgcgaaguccaga

SEQ ID NO: 198160 - RNA, 19 nt, Artificial Sequence
  Description of Artificial Sequence: Synthetic oligonucleotide
gcguucuccguuaggaucu

SEQ ID NO: 198161 - RNA, 19 nt, Artificial Sequence
  Description of Artificial Sequence: Synthetic oligonucleotide
ccgugagugcacuguaaga

SEQ ID NO: 198162 - RNA, 19 nt, Artificial Sequence
  Description of Artificial Sequence: Synthetic oligonucleotide
gcuaaacuuccggugccaa

SEQ ID NO: 198163 - RNA, 19 nt, Artificial Sequence
  Description of Artificial Sequence: Synthetic oligonucleotide
cccgacuggcuauuaaugu

SEQ ID NO: 198164 - RNA, 19 nt, Artificial Sequence
  Description of Artificial Sequence: Synthetic oligonucleotide
gccccacgcgcucucucug

SEQ ID NO: 198165 - RNA, 19 nt, Artificial Sequence
  Description of Artificial Sequence: Synthetic oligonucleotide
ccccacgcgcucucucugc

SEQ ID NO: 198166 - RNA, 19 nt, Artificial Sequence
  Description of Artificial Sequence: Synthetic oligonucleotide
gguccccugaaagugcuau

SEQ ID NO: 198167 - RNA, 19 nt, Artificial Sequence
  Description of Artificial Sequence: Synthetic oligonucleotide
gcacauugguugaacuccu

SEQ ID NO: 198168 - RNA, 19 nt, Artificial Sequence
  Description of Artificial Sequence: Synthetic oligonucleotide
cgugagugcacuguaagau

SEQ ID NO: 198169 - RNA, 19 nt, Artificial Sequence
  Description of Artificial Sequence: Synthetic oligonucleotide
cgaacgccuuucucuccag

SEQ ID NO: 198170 - RNA, 19 nt, Artificial Sequence
  Description of Artificial Sequence: Synthetic oligonucleotide
gcgagagaagagaaaucau

SEQ ID NO: 198171 - RNA, 19 nt, Artificial Sequence
  Description of Artificial Sequence: Synthetic oligonucleotide
guagcccgacuggcuauua

SEQ ID NO: 198172 - RNA, 19 nt, Artificial Sequence
  Description of Artificial Sequence: Synthetic oligonucleotide
ccgacuggcuauuaauguu

SEQ ID NO: 198173 - RNA, 19 nt, Artificial Sequence
  Description of Artificial Sequence: Synthetic oligonucleotide
guccccugaaagugcuauu

SEQ ID NO: 198174 - RNA, 19 nt, Artificial Sequence
  Description of Artificial Sequence: Synthetic oligonucleotide
cgacuggcuauuaauguuu

SEQ ID NO: 198175 - RNA, 19 nt, Artificial Sequence
  Description of Artificial Sequence: Synthetic oligonucleotide
ccguuaggaucugcuucug

SEQ ID NO: 198176 - RNA, 19 nt, Artificial Sequence
  Description of Artificial Sequence: Synthetic oligonucleotide
cacgagccucguuuuccau

SEQ ID NO: 198177 - RNA, 19 nt, Artificial Sequence
  Description of Artificial Sequence: Synthetic oligonucleotide
cccgugaaccaggucuuga

SEQ ID NO: 198178 - RNA, 19 nt, Artificial Sequence
  Description of Artificial Sequence: Synthetic oligonucleotide
ggccccacgcgcucucucu

SEQ ID NO: 198179 - RNA, 19 nt, Artificial Sequence
  Description of Artificial Sequence: Synthetic oligonucleotide
ccccaagcggaucgcagcu

SEQ ID NO: 198180 - RNA, 19 nt, Artificial Sequence
  Description of Artificial Sequence: Synthetic oligonucleotide
ccaaccacauugggacaaa

SEQ ID NO: 198181 - RNA, 19 nt, Artificial Sequence
  Description of Artificial Sequence: Synthetic oligonucleotide
cgucacagacccagccgcu

SEQ ID NO: 198182 - RNA, 19 nt, Artificial Sequence
  Description of Artificial Sequence: Synthetic oligonucleotide
gccgcuccuuuaguuuauu

SEQ ID NO: 198183 - RNA, 19 nt, Artificial Sequence
  Description of Artificial Sequence: Synthetic oligonucleotide
cccaagcggaucgcagcuu

SEQ ID NO: 198184 - RNA, 19 nt, Artificial Sequence
  Description of Artificial Sequence: Synthetic oligonucleotide
aaggacaugacaccaaucc

SEQ ID NO: 198185 - RNA, 19 nt, Artificial Sequence
  Description of Artificial Sequence: Synthetic oligonucleotide
uccuuuacaacucagaaga

SEQ ID NO: 198186 - RNA, 19 nt, Artificial Sequence
  Description of Artificial Sequence: Synthetic oligonucleotide
aaaacgaguguuaagggcc

SEQ ID NO: 198187 - RNA, 19 nt, Artificial Sequence
  Description of Artificial Sequence: Synthetic oligonucleotide
cuucucgucacuaagaucc

SEQ ID NO: 198188 - RNA, 19 nt, Artificial Sequence
  Description of Artificial Sequence: Synthetic oligonucleotide
auuuuagccgcucaguggc

SEQ ID NO: 198189 - RNA, 19 nt, Artificial Sequence
  Description of Artificial Sequence: Synthetic oligonucleotide
uguuaagggccauagacgg

SEQ ID NO: 198190 - RNA, 19 nt, Artificial Sequence
  Description of Artificial Sequence: Synthetic oligonucleotide
agugcaacucaguaaaacc

SEQ ID NO: 198191 - RNA, 19 nt, Artificial Sequence
  Description of Artificial Sequence: Synthetic oligonucleotide
aagagugacacauaagccu

SEQ ID NO: 198192 - RNA, 19 nt, Artificial Sequence
  Description of Artificial Sequence: Synthetic oligonucleotide
aagaacaugcugccgagac

SEQ ID NO: 198193 - RNA, 19 nt, Artificial Sequence
  Description of Artificial Sequence: Synthetic oligonucleotide
guugccacgauucauuucg

SEQ ID NO: 198194 - RNA, 19 nt, Artificial Sequence
  Description of Artificial Sequence: Synthetic oligonucleotide
uguaagacugcauuggcug

SEQ ID NO: 198195 - RNA, 19 nt, Artificial Sequence
  Description of Artificial Sequence: Synthetic oligonucleotide
cuuaucuuuaucauuccgc

SEQ ID NO: 198196 - RNA, 19 nt, Artificial Sequence
  Description of Artificial Sequence: Synthetic oligonucleotide
agcaaaacgaguguuaagg

SEQ ID NO: 198197 - RNA, 19 nt, Artificial Sequence
  Description of Artificial Sequence: Synthetic oligonucleotide
uuuauucuuaaucucuaga

SEQ ID NO: 198198 - RNA, 19 nt, Artificial Sequence
  Description of Artificial Sequence: Synthetic oligonucleotide
auagccgugguuuauaaug

SEQ ID NO: 198199 - RNA, 19 nt, Artificial Sequence
  Description of Artificial Sequence: Synthetic oligonucleotide
uuauucuuaaucucuagaa

SEQ ID NO: 198200 - RNA, 19 nt, Artificial Sequence
  Description of Artificial Sequence: Synthetic oligonucleotide
ugccauaucgcauaauugc

SEQ ID NO: 198201 - RNA, 19 nt, Artificial Sequence
  Description of Artificial Sequence: Synthetic oligonucleotide
ucugacgagcauuaaaacc

SEQ ID NO: 198202 - RNA, 19 nt, Artificial Sequence
  Description of Artificial Sequence: Synthetic oligonucleotide
auggauaacacugcugucc

SEQ ID NO: 198203 - RNA, 19 nt, Artificial Sequence
  Description of Artificial Sequence: Synthetic oligonucleotide
uuaucuuuaucauuccgca

SEQ ID NO: 198204 - RNA, 19 nt, Artificial Sequence
  Description of Artificial Sequence: Synthetic oligonucleotide
uauuuuagccgcucagugg

SEQ ID NO: 198205 - RNA, 19 nt, Artificial Sequence
  Description of Artificial Sequence: Synthetic oligonucleotide
uaauggcuuaucuuuauca

SEQ ID NO: 198206 - RNA, 19 nt, Artificial Sequence
  Description of Artificial Sequence: Synthetic oligonucleotide
aguaagaacaugcugccga

SEQ ID NO: 198207 - RNA, 19 nt, Artificial Sequence
  Description of Artificial Sequence: Synthetic oligonucleotide
gagacaagccuucacgagg

SEQ ID NO: 198208 - RNA, 19 nt, Artificial Sequence
  Description of Artificial Sequence: Synthetic oligonucleotide
ugagcucaaauauucauuc

SEQ ID NO: 198209 - RNA, 19 nt, Artificial Sequence
  Description of Artificial Sequence: Synthetic oligonucleotide
ugacuugccucgaagaucu

SEQ ID NO: 198210 - RNA, 19 nt, Artificial Sequence
  Description of Artificial Sequence: Synthetic oligonucleotide
uucuuaguaacuguggcug

SEQ ID NO: 198211 - RNA, 19 nt, Artificial Sequence
  Description of Artificial Sequence: Synthetic oligonucleotide
ucucugacgagcauuaaaa

SEQ ID NO: 198212 - RNA, 19 nt, Artificial Sequence
  Description of Artificial Sequence: Synthetic oligonucleotide
aauggauaacacugcuguc

SEQ ID NO: 198213 - RNA, 19 nt, Artificial Sequence
  Description of Artificial Sequence: Synthetic oligonucleotide
uggcuuaucuuuaucauuc

SEQ ID NO: 198214 - RNA, 19 nt, Artificial Sequence
  Description of Artificial Sequence: Synthetic oligonucleotide
uucaagccuggcaaaaucc

SEQ ID NO: 198215 - RNA, 19 nt, Artificial Sequence
  Description of Artificial Sequence: Synthetic oligonucleotide
uguuuggacauugagccag

SEQ ID NO: 198216 - RNA, 19 nt, Artificial Sequence
  Description of Artificial Sequence: Synthetic oligonucleotide
uagucagucguucaauggc

SEQ ID NO: 198217 - RNA, 19 nt, Artificial Sequence
  Description of Artificial Sequence: Synthetic oligonucleotide
caaaacgaguguuaagggc

SEQ ID NO: 198218 - RNA, 19 nt, Artificial Sequence
  Description of Artificial Sequence: Synthetic oligonucleotide
ggccuuaucaucauaaugg

SEQ ID NO: 198219 - RNA, 19 nt, Artificial Sequence
  Description of Artificial Sequence: Synthetic oligonucleotide
cuugaauaguuccucagug

SEQ ID NO: 198220 - RNA, 19 nt, Artificial Sequence
  Description of Artificial Sequence: Synthetic oligonucleotide
ucagauaagcugcccuucg

SEQ ID NO: 198221 - RNA, 19 nt, Artificial Sequence
  Description of Artificial Sequence: Synthetic oligonucleotide
uguuuuaugauuucccguu

SEQ ID NO: 198222 - RNA, 19 nt, Artificial Sequence
  Description of Artificial Sequence: Synthetic oligonucleotide
uuguguaagacugcauugg

SEQ ID NO: 198223 - RNA, 19 nt, Artificial Sequence
  Description of Artificial Sequence: Synthetic oligonucleotide
gaaucuucgagccagaaau

SEQ ID NO: 198224 - RNA, 19 nt, Artificial Sequence
  Description of Artificial Sequence: Synthetic oligonucleotide
ucuauugcggacuucuccu

SEQ ID NO: 198225 - RNA, 19 nt, Artificial Sequence
  Description of Artificial Sequence: Synthetic oligonucleotide
ucaucauaauggauaacac

SEQ ID NO: 198226 - RNA, 19 nt, Artificial Sequence
  Description of Artificial Sequence: Synthetic oligonucleotide
uugaauaguuccucagugc

SEQ ID NO: 198227 - RNA, 19 nt, Artificial Sequence
  Description of Artificial Sequence: Synthetic oligonucleotide
uuauaaugccagccaacag

SEQ ID NO: 198228 - RNA, 19 nt, Artificial Sequence
  Description of Artificial Sequence: Synthetic oligonucleotide
agaaccuuuaggcuccauc

SEQ ID NO: 198229 - RNA, 19 nt, Artificial Sequence
  Description of Artificial Sequence: Synthetic oligonucleotide
uuuuaugauuucccguucu

SEQ ID NO: 198230 - RNA, 19 nt, Artificial Sequence
  Description of Artificial Sequence: Synthetic oligonucleotide
uguguaagacugcauuggc

SEQ ID NO: 198231 - RNA, 19 nt, Artificial Sequence
  Description of Artificial Sequence: Synthetic oligonucleotide
ugggagucgagucacguca

SEQ ID NO: 198232 - RNA, 19 nt, Artificial Sequence
  Description of Artificial Sequence: Synthetic oligonucleotide
uuacaacucagaagauggg

SEQ ID NO: 198233 - RNA, 19 nt, Artificial Sequence
  Description of Artificial Sequence: Synthetic oligonucleotide
uguucagauaagcugcccu

SEQ ID NO: 198234 - RNA, 19 nt, Artificial Sequence
  Description of Artificial Sequence: Synthetic oligonucleotide
guuuucgauuccuagucag

SEQ ID NO: 198235 - RNA, 19 nt, Artificial Sequence
  Description of Artificial Sequence: Synthetic oligonucleotide
aggaguauuggguugugug

SEQ ID NO: 198236 - RNA, 19 nt, Artificial Sequence
  Description of Artificial Sequence: Synthetic oligonucleotide
cuagucagucguucaaugg

SEQ ID NO: 198237 - RNA, 19 nt, Artificial Sequence
  Description of Artificial Sequence: Synthetic oligonucleotide
ucgcauaauugcauuaaga

SEQ ID NO: 198238 - RNA, 19 nt, Artificial Sequence
  Description of Artificial Sequence: Synthetic oligonucleotide
ugguuuucgauuccuaguc

SEQ ID NO: 198239 - RNA, 19 nt, Artificial Sequence
  Description of Artificial Sequence: Synthetic oligonucleotide
aagguguaggagucuuugg

SEQ ID NO: 198240 - RNA, 19 nt, Artificial Sequence
  Description of Artificial Sequence: Synthetic oligonucleotide
ccaacuuuauuuuagccgc

SEQ ID NO: 198241 - RNA, 19 nt, Artificial Sequence
  Description of Artificial Sequence: Synthetic oligonucleotide
auaggggucaggucuauug

SEQ ID NO: 198242 - RNA, 19 nt, Artificial Sequence
  Description of Artificial Sequence: Synthetic oligonucleotide
uaaucggacugguugucgg

SEQ ID NO: 198243 - RNA, 19 nt, Artificial Sequence
  Description of Artificial Sequence: Synthetic oligonucleotide
cauugagccagucuuggag

SEQ ID NO: 198244 - RNA, 19 nt, Artificial Sequence
  Description of Artificial Sequence: Synthetic oligonucleotide
uggccuuaucaucauaaug

SEQ ID NO: 198245 - RNA, 19 nt, Artificial Sequence
  Description of Artificial Sequence: Synthetic oligonucleotide
ugccagaucucauaagucu

SEQ ID NO: 198246 - RNA, 19 nt, Artificial Sequence
  Description of Artificial Sequence: Synthetic oligonucleotide
aguucgggcaugcuccagc

SEQ ID NO: 198247 - RNA, 19 nt, Artificial Sequence
  Description of Artificial Sequence: Synthetic oligonucleotide
aacacgggccagcagagga

SEQ ID NO: 198248 - RNA, 19 nt, Artificial Sequence
  Description of Artificial Sequence: Synthetic oligonucleotide
gaggccaccgaguaaucgg

SEQ ID NO: 198249 - RNA, 19 nt, Artificial Sequence
  Description of Artificial Sequence: Synthetic oligonucleotide
guaaccucacagcaacugg

SEQ ID NO: 198250 - RNA, 19 nt, Artificial Sequence
  Description of Artificial Sequence: Synthetic oligonucleotide
gauggcauaccguggauca

SEQ ID NO: 198251 - RNA, 19 nt, Artificial Sequence
  Description of Artificial Sequence: Synthetic oligonucleotide
uuacgacugggccugcggg

SEQ ID NO: 198252 - RNA, 19 nt, Artificial Sequence
  Description of Artificial Sequence: Synthetic oligonucleotide
gaaaugcuuuucucugacg

SEQ ID NO: 198253 - RNA, 19 nt, Artificial Sequence
  Description of Artificial Sequence: Synthetic oligonucleotide
ugcccuucgaagcugcucc

SEQ ID NO: 198254 - RNA, 19 nt, Artificial Sequence
  Description of Artificial Sequence: Synthetic oligonucleotide
cauaccguggaucauucug

SEQ ID NO: 198255 - RNA, 19 nt, Artificial Sequence
  Description of Artificial Sequence: Synthetic oligonucleotide
aacauuccaccucagcaaa

SEQ ID NO: 198256 - RNA, 19 nt, Artificial Sequence
  Description of Artificial Sequence: Synthetic oligonucleotide
uacaacucagaagaugggc

SEQ ID NO: 198257 - RNA, 19 nt, Artificial Sequence
  Description of Artificial Sequence: Synthetic oligonucleotide
uaucuuuaucauuccgcag

SEQ ID NO: 198258 - RNA, 19 nt, Artificial Sequence
  Description of Artificial Sequence: Synthetic oligonucleotide
ucauuucgcccuugaaagg

SEQ ID NO: 198259 - RNA, 19 nt, Artificial Sequence
  Description of Artificial Sequence: Synthetic oligonucleotide
agcucaaauauucauucau

SEQ ID NO: 198260 - RNA, 19 nt, Artificial Sequence
  Description of Artificial Sequence: Synthetic oligonucleotide
uaaucucuagaaaguugcc

SEQ ID NO: 198261 - RNA, 19 nt, Artificial Sequence
  Description of Artificial Sequence: Synthetic oligonucleotide
cauugaggauggcauaccg

SEQ ID NO: 198262 - RNA, 19 nt, Artificial Sequence
  Description of Artificial Sequence: Synthetic oligonucleotide
augauuucccguucuaccu

SEQ ID NO: 198263 - RNA, 19 nt, Artificial Sequence
  Description of Artificial Sequence: Synthetic oligonucleotide
agucagucguucaauggcc

SEQ ID NO: 198264 - RNA, 19 nt, Artificial Sequence
  Description of Artificial Sequence: Synthetic oligonucleotide
ucgggcuagaucuucuugc

SEQ ID NO: 198265 - RNA, 19 nt, Artificial Sequence
  Description of Artificial Sequence: Synthetic oligonucleotide
uguaaccucacagcaacug

SEQ ID NO: 198266 - RNA, 19 nt, Artificial Sequence
  Description of Artificial Sequence: Synthetic oligonucleotide
ucacaagccacugaguggu

SEQ ID NO: 198267 - RNA, 19 nt, Artificial Sequence
  Description of Artificial Sequence: Synthetic oligonucleotide
uucccguaccacauacugg

SEQ ID NO: 198268 - RNA, 19 nt, Artificial Sequence
  Description of Artificial Sequence: Synthetic oligonucleotide
guguuaagggccauagacg

SEQ ID NO: 198269 - RNA, 19 nt, Artificial Sequence
  Description of Artificial Sequence: Synthetic oligonucleotide
cuccuuuacaacucagaag

SEQ ID NO: 198270 - RNA, 19 nt, Artificial Sequence
  Description of Artificial Sequence: Synthetic oligonucleotide
uaggagucuuuggagacgg

SEQ ID NO: 198271 - RNA, 19 nt, Artificial Sequence
  Description of Artificial Sequence: Synthetic oligonucleotide
uuaagggccauagacgggu

SEQ ID NO: 198272 - RNA, 19 nt, Artificial Sequence
  Description of Artificial Sequence: Synthetic oligonucleotide
ucucauaagucuucuuagu

SEQ ID NO: 198273 - RNA, 19 nt, Artificial Sequence
  Description of Artificial Sequence: Synthetic oligonucleotide
cucauaauggugccgcagc

SEQ ID NO: 198274 - RNA, 19 nt, Artificial Sequence
  Description of Artificial Sequence: Synthetic oligonucleotide
gacaugacaccaauccuag

SEQ ID NO: 198275 - RNA, 19 nt, Artificial Sequence
  Description of Artificial Sequence: Synthetic oligonucleotide
uucauucccugcaauucug

SEQ ID NO: 198276 - RNA, 19 nt, Artificial Sequence
  Description of Artificial Sequence: Synthetic oligonucleotide
cucacaagccacugagugg

SEQ ID NO: 198277 - RNA, 19 nt, Artificial Sequence
  Description of Artificial Sequence: Synthetic oligonucleotide
caacaguuuguaacaggcg

SEQ ID NO: 198278 - RNA, 19 nt, Artificial Sequence
  Description of Artificial Sequence: Synthetic oligonucleotide
uauugcggacuucuccucc

SEQ ID NO: 198279 - RNA, 19 nt, Artificial Sequence
  Description of Artificial Sequence: Synthetic oligonucleotide
ucauaauggugccgcagca

SEQ ID NO: 198280 - RNA, 19 nt, Artificial Sequence
  Description of Artificial Sequence: Synthetic oligonucleotide
uaguaacuguggcugcccg

SEQ ID NO: 198281 - RNA, 19 nt, Artificial Sequence
  Description of Artificial Sequence: Synthetic oligonucleotide
ucgagccagaaauuuauuc

SEQ ID NO: 198282 - RNA, 19 nt, Artificial Sequence
  Description of Artificial Sequence: Synthetic oligonucleotide
uuggagacggugacccugg

SEQ ID NO: 198283 - RNA, 19 nt, Artificial Sequence
  Description of Artificial Sequence: Synthetic oligonucleotide
aucgcauaauugcauuaag

SEQ ID NO: 198284 - RNA, 19 nt, Artificial Sequence
  Description of Artificial Sequence: Synthetic oligonucleotide
uuuucgauuccuagucagu

SEQ ID NO: 198285 - RNA, 19 nt, Artificial Sequence
  Description of Artificial Sequence: Synthetic oligonucleotide
auuccaccucagcaaaacg

SEQ ID NO: 198286 - RNA, 19 nt, Artificial Sequence
  Description of Artificial Sequence: Synthetic oligonucleotide
gucuauugcggacuucucc

SEQ ID NO: 198287 - RNA, 19 nt, Artificial Sequence
  Description of Artificial Sequence: Synthetic oligonucleotide
cauucacaugcucaaacuc

SEQ ID NO: 198288 - RNA, 19 nt, Artificial Sequence
  Description of Artificial Sequence: Synthetic oligonucleotide
cugaucguucaucaaaguc

SEQ ID NO: 198289 - RNA, 19 nt, Artificial Sequence
  Description of Artificial Sequence: Synthetic oligonucleotide
ucugacuugccucgaagau

SEQ ID NO: 198290 - RNA, 19 nt, Artificial Sequence
  Description of Artificial Sequence: Synthetic oligonucleotide
cuucccguaccacauacug

SEQ ID NO: 198291 - RNA, 19 nt, Artificial Sequence
  Description of Artificial Sequence: Synthetic oligonucleotide
gaagguguaggagucuuug

SEQ ID NO: 198292 - RNA, 19 nt, Artificial Sequence
  Description of Artificial Sequence: Synthetic oligonucleotide
ucuuaguaacuguggcugc

SEQ ID NO: 198293 - RNA, 19 nt, Artificial Sequence
  Description of Artificial Sequence: Synthetic oligonucleotide
agccgugguuuauaaugcc

SEQ ID NO: 198294 - RNA, 19 nt, Artificial Sequence
  Description of Artificial Sequence: Synthetic oligonucleotide
cauuucgcccuugaaaggc

SEQ ID NO: 198295 - RNA, 19 nt, Artificial Sequence
  Description of Artificial Sequence: Synthetic oligonucleotide
gaaggcgaggaucucccag

SEQ ID NO: 198296 - RNA, 19 nt, Artificial Sequence
  Description of Artificial Sequence: Synthetic oligonucleotide
ugccgcagcaauuucuccc

SEQ ID NO: 198297 - RNA, 19 nt, Artificial Sequence
  Description of Artificial Sequence: Synthetic oligonucleotide
gaaccuuuaggcuccaucu

SEQ ID NO: 198298 - RNA, 19 nt, Artificial Sequence
  Description of Artificial Sequence: Synthetic oligonucleotide
ugaaucuucgagccagaaa

SEQ ID NO: 198299 - RNA, 19 nt, Artificial Sequence
  Description of Artificial Sequence: Synthetic oligonucleotide
caucaccuuccucugaggc

SEQ ID NO: 198300 - RNA, 19 nt, Artificial Sequence
  Description of Artificial Sequence: Synthetic oligonucleotide
uccugaaccuucuugcgaa

SEQ ID NO: 198301 - RNA, 19 nt, Artificial Sequence
  Description of Artificial Sequence: Synthetic oligonucleotide
ugggcuaccugcugugggg

SEQ ID NO: 198302 - RNA, 19 nt, Artificial Sequence
  Description of Artificial Sequence: Synthetic oligonucleotide
gcaaaacgaguguuaaggg

SEQ ID NO: 198303 - RNA, 19 nt, Artificial Sequence
  Description of Artificial Sequence: Synthetic oligonucleotide
ucugaggccaccgaguaau

SEQ ID NO: 198304 - RNA, 19 nt, Artificial Sequence
  Description of Artificial Sequence: Synthetic oligonucleotide
uuguaacaggcgcacggug

SEQ ID NO: 198305 - RNA, 19 nt, Artificial Sequence
  Description of Artificial Sequence: Synthetic oligonucleotide
cucacauaaaugccgcaug

SEQ ID NO: 198306 - RNA, 19 nt, Artificial Sequence
  Description of Artificial Sequence: Synthetic oligonucleotide
agaaaguugccacgauuca

SEQ ID NO: 198307 - RNA, 19 nt, Artificial Sequence
  Description of Artificial Sequence: Synthetic oligonucleotide
agacaagccuucacgaggg

SEQ ID NO: 198308 - RNA, 19 nt, Artificial Sequence
  Description of Artificial Sequence: Synthetic oligonucleotide
aaaugagcucaaauauuca

SEQ ID NO: 198309 - RNA, 19 nt, Artificial Sequence
  Description of Artificial Sequence: Synthetic oligonucleotide
acuuuauuuuagccgcuca

SEQ ID NO: 198310 - RNA, 19 nt, Artificial Sequence
  Description of Artificial Sequence: Synthetic oligonucleotide
ugcuucucgucacuaagau

SEQ ID NO: 198311 - RNA, 19 nt, Artificial Sequence
  Description of Artificial Sequence: Synthetic oligonucleotide
uucgggcuagaucuucuug

SEQ ID NO: 198312 - RNA, 19 nt, Artificial Sequence
  Description of Artificial Sequence: Synthetic oligonucleotide
uaucgcauaauugcauuaa

SEQ ID NO: 198313 - RNA, 19 nt, Artificial Sequence
  Description of Artificial Sequence: Synthetic oligonucleotide
ugcgaaucaaggacaugac

SEQ ID NO: 198314 - RNA, 19 nt, Artificial Sequence
  Description of Artificial Sequence: Synthetic oligonucleotide
auaauggauaacacugcug

SEQ ID NO: 198315 - RNA, 19 nt, Artificial Sequence
  Description of Artificial Sequence: Synthetic oligonucleotide
aggaaggcgaggaucuccc

SEQ ID NO: 198316 - RNA, 19 nt, Artificial Sequence
  Description of Artificial Sequence: Synthetic oligonucleotide
cuuaguaacuguggcugcc

SEQ ID NO: 198317 - RNA, 19 nt, Artificial Sequence
  Description of Artificial Sequence: Synthetic oligonucleotide
agagagagugaggaagguc

SEQ ID NO: 198318 - RNA, 19 nt, Artificial Sequence
  Description of Artificial Sequence: Synthetic oligonucleotide
aguugccacgauucauuuc

SEQ ID NO: 198319 - RNA, 19 nt, Artificial Sequence
  Description of Artificial Sequence: Synthetic oligonucleotide
caugacaccaauccuagua

SEQ ID NO: 198320 - RNA, 19 nt, Artificial Sequence
  Description of Artificial Sequence: Synthetic oligonucleotide
gagugcaacucaguaaaac

SEQ ID NO: 198321 - RNA, 19 nt, Artificial Sequence
  Description of Artificial Sequence: Synthetic oligonucleotide
caucauuguaguugaccug

SEQ ID NO: 198322 - RNA, 19 nt, Artificial Sequence
  Description of Artificial Sequence: Synthetic oligonucleotide
uuagccgcucaguggcugg

SEQ ID NO: 198323 - RNA, 19 nt, Artificial Sequence
  Description of Artificial Sequence: Synthetic oligonucleotide
guuuauaaugccagccaac

SEQ ID NO: 198324 - RNA, 19 nt, Artificial Sequence
  Description of Artificial Sequence: Synthetic oligonucleotide
ucugaucguucaucaaagu

SEQ ID NO: 198325 - RNA, 19 nt, Artificial Sequence
  Description of Artificial Sequence: Synthetic oligonucleotide
uuuguaacaggcgcacggu

SEQ ID NO: 198326 - RNA, 19 nt, Artificial Sequence
  Description of Artificial Sequence: Synthetic oligonucleotide
aguaaucggacugguuguc

SEQ ID NO: 198327 - RNA, 19 nt, Artificial Sequence
  Description of Artificial Sequence: Synthetic oligonucleotide
acgagcauuaaaaccaagu

SEQ ID NO: 198328 - RNA, 19 nt, Artificial Sequence
  Description of Artificial Sequence: Synthetic oligonucleotide
ucuagaaaguugccacgau

SEQ ID NO: 198329 - RNA, 19 nt, Artificial Sequence
  Description of Artificial Sequence: Synthetic oligonucleotide
ucauucugccaaagggagu

SEQ ID NO: 198330 - RNA, 19 nt, Artificial Sequence
  Description of Artificial Sequence: Synthetic oligonucleotide
cuucugaucguucaucaaa

SEQ ID NO: 198331 - RNA, 19 nt, Artificial Sequence
  Description of Artificial Sequence: Synthetic oligonucleotide
guucgggcaugcuccagcg

SEQ ID NO: 198332 - RNA, 19 nt, Artificial Sequence
  Description of Artificial Sequence: Synthetic oligonucleotide
cugcucauaauggugccgc

SEQ ID NO: 198333 - RNA, 19 nt, Artificial Sequence
  Description of Artificial Sequence: Synthetic oligonucleotide
auaucgcauaauugcauua

SEQ ID NO: 198334 - RNA, 19 nt, Artificial Sequence
  Description of Artificial Sequence: Synthetic oligonucleotide
guuuuaugauuucccguuc

SEQ ID NO: 198335 - RNA, 19 nt, Artificial Sequence
  Description of Artificial Sequence: Synthetic oligonucleotide
gccgagacaagccuucacg

SEQ ID NO: 198336 - RNA, 19 nt, Artificial Sequence
  Description of Artificial Sequence: Synthetic oligonucleotide
auacugggccacuuuaaau

SEQ ID NO: 198337 - RNA, 19 nt, Artificial Sequence
  Description of Artificial Sequence: Synthetic oligonucleotide
gguucuggugcccuguuug

SEQ ID NO: 198338 - RNA, 19 nt, Artificial Sequence
  Description of Artificial Sequence: Synthetic oligonucleotide
agugccaaauuugaggaua

SEQ ID NO: 198339 - RNA, 19 nt, Artificial Sequence
  Description of Artificial Sequence: Synthetic oligonucleotide
gauuccuagucagucguuc

SEQ ID NO: 198340 - RNA, 19 nt, Artificial Sequence
  Description of Artificial Sequence: Synthetic oligonucleotide
aggucuauugcggacuucu

SEQ ID NO: 198341 - RNA, 19 nt, Artificial Sequence
  Description of Artificial Sequence: Synthetic oligonucleotide
aucccugguuuucgauucc

SEQ ID NO: 198342 - RNA, 19 nt, Artificial Sequence
  Description of Artificial Sequence: Synthetic oligonucleotide
uuccuagucagucguucaa

SEQ ID NO: 198343 - RNA, 19 nt, Artificial Sequence
  Description of Artificial Sequence: Synthetic oligonucleotide
auuccgcaggcccuuacga

SEQ ID NO: 198344 - RNA, 19 nt, Artificial Sequence
  Description of Artificial Sequence: Synthetic oligonucleotide
auggcuuaucuuuaucauu

SEQ ID NO: 198345 - RNA, 19 nt, Artificial Sequence
  Description of Artificial Sequence: Synthetic oligonucleotide
agccaguagucaugccggc

SEQ ID NO: 198346 - RNA, 19 nt, Artificial Sequence
  Description of Artificial Sequence: Synthetic oligonucleotide
aaacgaguguuaagggcca

SEQ ID NO: 198347 - RNA, 19 nt, Artificial Sequence
  Description of Artificial Sequence: Synthetic oligonucleotide
cuagggcuuguuccaagag

SEQ ID NO: 198348 - RNA, 19 nt, Artificial Sequence
  Description of Artificial Sequence: Synthetic oligonucleotide
cauuccgcaggcccuuacg

SEQ ID NO: 198349 - RNA, 19 nt, Artificial Sequence
  Description of Artificial Sequence: Synthetic oligonucleotide
cgaguaaucggacugguug

SEQ ID NO: 198350 - RNA, 19 nt, Artificial Sequence
  Description of Artificial Sequence: Synthetic oligonucleotide
uggugccgcagcaauuucu

SEQ ID NO: 198351 - RNA, 19 nt, Artificial Sequence
  Description of Artificial Sequence: Synthetic oligonucleotide
gagcucaaauauucauuca

SEQ ID NO: 198352 - RNA, 19 nt, Artificial Sequence
  Description of Artificial Sequence: Synthetic oligonucleotide
cacauaagccuuaaauucu

SEQ ID NO: 198353 - RNA, 19 nt, Artificial Sequence
  Description of Artificial Sequence: Synthetic oligonucleotide
guagcugggagucgaguca

SEQ ID NO: 198354 - RNA, 19 nt, Artificial Sequence
  Description of Artificial Sequence: Synthetic oligonucleotide
ugccacgauucauuucgcc

SEQ ID NO: 198355 - RNA, 19 nt, Artificial Sequence
  Description of Artificial Sequence: Synthetic oligonucleotide
cacgauaggggucaggucu

SEQ ID NO: 198356 - RNA, 19 nt, Artificial Sequence
  Description of Artificial Sequence: Synthetic oligonucleotide
gccacgauucauuucgccc

SEQ ID NO: 198357 - RNA, 19 nt, Artificial Sequence
  Description of Artificial Sequence: Synthetic oligonucleotide
uuuagccgcucaguggcug

SEQ ID NO: 198358 - RNA, 19 nt, Artificial Sequence
  Description of Artificial Sequence: Synthetic oligonucleotide
cuucauccuugaauaguuc

SEQ ID NO: 198359 - RNA, 19 nt, Artificial Sequence
  Description of Artificial Sequence: Synthetic oligonucleotide
ccaaucucgguccuccugg

SEQ ID NO: 198360 - RNA, 19 nt, Artificial Sequence
  Description of Artificial Sequence: Synthetic oligonucleotide
guuaagggccauagacggg

SEQ ID NO: 198361 - RNA, 19 nt, Artificial Sequence
  Description of Artificial Sequence: Synthetic oligonucleotide
augccauaucgcauaauug

SEQ ID NO: 198362 - RNA, 19 nt, Artificial Sequence
  Description of Artificial Sequence: Synthetic oligonucleotide
acgucagcuuucaugucac

SEQ ID NO: 198363 - RNA, 19 nt, Artificial Sequence
  Description of Artificial Sequence: Synthetic oligonucleotide
auugcggacuucuccucca

SEQ ID NO: 198364 - RNA, 19 nt, Artificial Sequence
  Description of Artificial Sequence: Synthetic oligonucleotide
uaccguggaucauucugga

SEQ ID NO: 198365 - RNA, 19 nt, Artificial Sequence
  Description of Artificial Sequence: Synthetic oligonucleotide
aguaacuguggcugcccgu

SEQ ID NO: 198366 - RNA, 19 nt, Artificial Sequence
  Description of Artificial Sequence: Synthetic oligonucleotide
cacuacugcugcuugucuc

SEQ ID NO: 198367 - RNA, 19 nt, Artificial Sequence
  Description of Artificial Sequence: Synthetic oligonucleotide
gguuuauaaugccagccaa

SEQ ID NO: 198368 - RNA, 19 nt, Artificial Sequence
  Description of Artificial Sequence: Synthetic oligonucleotide
gaguaaucggacugguugu

SEQ ID NO: 198369 - RNA, 19 nt, Artificial Sequence
  Description of Artificial Sequence: Synthetic oligonucleotide
ucgggcauagccgugguuu

SEQ ID NO: 198370 - RNA, 19 nt, Artificial Sequence
  Description of Artificial Sequence: Synthetic oligonucleotide
agagugacacauaagccuu

SEQ ID NO: 198371 - RNA, 19 nt, Artificial Sequence
  Description of Artificial Sequence: Synthetic oligonucleotide
caaucucgguccuccuggg

SEQ ID NO: 198372 - RNA, 19 nt, Artificial Sequence
  Description of Artificial Sequence: Synthetic oligonucleotide
ccaguagucaugccggcgg

SEQ ID NO: 198373 - RNA, 19 nt, Artificial Sequence
  Description of Artificial Sequence: Synthetic oligonucleotide
uuuuagccgcucaguggcu

SEQ ID NO: 198374 - RNA, 19 nt, Artificial Sequence
  Description of Artificial Sequence: Synthetic oligonucleotide
auaggcuccucuguucucu

SEQ ID NO: 198375 - RNA, 19 nt, Artificial Sequence
  Description of Artificial Sequence: Synthetic oligonucleotide
acgggugcaggaguauugg

SEQ ID NO: 198376 - RNA, 19 nt, Artificial Sequence
  Description of Artificial Sequence: Synthetic oligonucleotide
caaggacaugacaccaauc

SEQ ID NO: 198377 - RNA, 19 nt, Artificial Sequence
  Description of Artificial Sequence: Synthetic oligonucleotide
auagacgggugagaggggu

SEQ ID NO: 198378 - RNA, 19 nt, Artificial Sequence
  Description of Artificial Sequence: Synthetic oligonucleotide
auauuuccaccaacacggg

SEQ ID NO: 198379 - RNA, 19 nt, Artificial Sequence
  Description of Artificial Sequence: Synthetic oligonucleotide
ugguugucggacuggucgu

SEQ ID NO: 198380 - RNA, 19 nt, Artificial Sequence
  Description of Artificial Sequence: Synthetic oligonucleotide
gaucucucacaagccacug

SEQ ID NO: 198381 - RNA, 19 nt, Artificial Sequence
  Description of Artificial Sequence: Synthetic oligonucleotide
uucuucaagccuggcaaaa

SEQ ID NO: 198382 - RNA, 19 nt, Artificial Sequence
  Description of Artificial Sequence: Synthetic oligonucleotide
uggucguccugccaaucuc

SEQ ID NO: 198383 - RNA, 19 nt, Artificial Sequence
  Description of Artificial Sequence: Synthetic oligonucleotide
caguuuguaacaggcgcac

SEQ ID NO: 198384 - RNA, 19 nt, Artificial Sequence
  Description of Artificial Sequence: Synthetic oligonucleotide
cacgggugcaggaguauug

SEQ ID NO: 198385 - RNA, 19 nt, Artificial Sequence
  Description of Artificial Sequence: Synthetic oligonucleotide
ucggcaggagucuuuucau

SEQ ID NO: 198386 - RNA, 19 nt, Artificial Sequence
  Description of Artificial Sequence: Synthetic oligonucleotide
uaucaucauaauggauaac

SEQ ID NO: 198387 - RNA, 19 nt, Artificial Sequence
  Description of Artificial Sequence: Synthetic oligonucleotide
cugacuugccucgaagauc

SEQ ID NO: 198388 - RNA, 19 nt, Artificial Sequence
  Description of Artificial Sequence: Synthetic oligonucleotide
ggucacugcucaguggugg

SEQ ID NO: 198389 - RNA, 19 nt, Artificial Sequence
  Description of Artificial Sequence: Synthetic oligonucleotide
uucucgucacuaagauccu

SEQ ID NO: 198390 - RNA, 19 nt, Artificial Sequence
  Description of Artificial Sequence: Synthetic oligonucleotide
augagcucaaauauucauu

SEQ ID NO: 198391 - RNA, 19 nt, Artificial Sequence
  Description of Artificial Sequence: Synthetic oligonucleotide
aggaaggucacugcucagu

SEQ ID NO: 198392 - RNA, 19 nt, Artificial Sequence
  Description of Artificial Sequence: Synthetic oligonucleotide
auugaggauggcauaccgu

SEQ ID NO: 198393 - RNA, 19 nt, Artificial Sequence
  Description of Artificial Sequence: Synthetic oligonucleotide
ccgugguuuauaaugccag

SEQ ID NO: 198394 - RNA, 19 nt, Artificial Sequence
  Description of Artificial Sequence: Synthetic oligonucleotide
agcgcccauucacaugcuc

SEQ ID NO: 198395 - RNA, 19 nt, Artificial Sequence
  Description of Artificial Sequence: Synthetic oligonucleotide
ugucggacuggucguccug

SEQ ID NO: 198396 - RNA, 19 nt, Artificial Sequence
  Description of Artificial Sequence: Synthetic oligonucleotide
uugccacgauucauuucgc

SEQ ID NO: 198397 - RNA, 19 nt, Artificial Sequence
  Description of Artificial Sequence: Synthetic oligonucleotide
uuccgcaggcccuuacgac

SEQ ID NO: 198398 - RNA, 19 nt, Artificial Sequence
  Description of Artificial Sequence: Synthetic oligonucleotide
gacgagcauuaaaaccaag

SEQ ID NO: 198399 - RNA, 19 nt, Artificial Sequence
  Description of Artificial Sequence: Synthetic oligonucleotide
cuucuuaguaacuguggcu

SEQ ID NO: 198400 - RNA, 19 nt, Artificial Sequence
  Description of Artificial Sequence: Synthetic oligonucleotide
cuauugcggacuucuccuc

SEQ ID NO: 198401 - RNA, 19 nt, Artificial Sequence
  Description of Artificial Sequence: Synthetic oligonucleotide
auggugccgcagcaauuuc

SEQ ID NO: 198402 - RNA, 19 nt, Artificial Sequence
  Description of Artificial Sequence: Synthetic oligonucleotide
gguagcugggagucgaguc

SEQ ID NO: 198403 - RNA, 19 nt, Artificial Sequence
  Description of Artificial Sequence: Synthetic oligonucleotide
acuugccucgaagaucucu

SEQ ID NO: 198404 - RNA, 19 nt, Artificial Sequence
  Description of Artificial Sequence: Synthetic oligonucleotide
aucuucgagccagaaauuu

SEQ ID NO: 198405 - RNA, 19 nt, Artificial Sequence
  Description of Artificial Sequence: Synthetic oligonucleotide
auucgggcaaugguagcug

SEQ ID NO: 198406 - RNA, 19 nt, Artificial Sequence
  Description of Artificial Sequence: Synthetic oligonucleotide
ccgucugcaauguugaaca

SEQ ID NO: 198407 - RNA, 19 nt, Artificial Sequence
  Description of Artificial Sequence: Synthetic oligonucleotide
cucuagaaaguugccacga

SEQ ID NO: 198408 - RNA, 19 nt, Artificial Sequence
  Description of Artificial Sequence: Synthetic oligonucleotide
agcuugaaucuucgagcca

SEQ ID NO: 198409 - RNA, 19 nt, Artificial Sequence
  Description of Artificial Sequence: Synthetic oligonucleotide
caccgaguaaucggacugg

SEQ ID NO: 198410 - RNA, 19 nt, Artificial Sequence
  Description of Artificial Sequence: Synthetic oligonucleotide
gccaguucgggcaugcucc

SEQ ID NO: 198411 - RNA, 19 nt, Artificial Sequence
  Description of Artificial Sequence: Synthetic oligonucleotide
gcuccuuuacaacucagaa

SEQ ID NO: 198412 - RNA, 19 nt, Artificial Sequence
  Description of Artificial Sequence: Synthetic oligonucleotide
ugcucauaauggugccgca

SEQ ID NO: 198413 - RNA, 19 nt, Artificial Sequence
  Description of Artificial Sequence: Synthetic oligonucleotide
aaucuucgagccagaaauu

SEQ ID NO: 198414 - RNA, 19 nt, Artificial Sequence
  Description of Artificial Sequence: Synthetic oligonucleotide
auguuccgcucugacaucu

SEQ ID NO: 198415 - RNA, 19 nt, Artificial Sequence
  Description of Artificial Sequence: Synthetic oligonucleotide
uaacaggcgcacggugggg

SEQ ID NO: 198416 - RNA, 19 nt, Artificial Sequence
  Description of Artificial Sequence: Synthetic oligonucleotide
ccuagucagucguucaaug

SEQ ID NO: 198417 - RNA, 19 nt, Artificial Sequence
  Description of Artificial Sequence: Synthetic oligonucleotide
ucauuccgcaggcccuuac

SEQ ID NO: 198418 - RNA, 19 nt, Artificial Sequence
  Description of Artificial Sequence: Synthetic oligonucleotide
ggagccgcuggguuccugg

SEQ ID NO: 198419 - RNA, 19 nt, Artificial Sequence
  Description of Artificial Sequence: Synthetic oligonucleotide
uccuagucagucguucaau

SEQ ID NO: 198420 - RNA, 19 nt, Artificial Sequence
  Description of Artificial Sequence: Synthetic oligonucleotide
ugccgagacaagccuucac

SEQ ID NO: 198421 - RNA, 19 nt, Artificial Sequence
  Description of Artificial Sequence: Synthetic oligonucleotide
ggggucaggucuauugcgg

SEQ ID NO: 198422 - RNA, 19 nt, Artificial Sequence
  Description of Artificial Sequence: Synthetic oligonucleotide
ggucguccugccaaucucg

SEQ ID NO: 198423 - RNA, 19 nt, Artificial Sequence
  Description of Artificial Sequence: Synthetic oligonucleotide
ugcggacuucuccuccacu

SEQ ID NO: 198424 - RNA, 19 nt, Artificial Sequence
  Description of Artificial Sequence: Synthetic oligonucleotide
ugaagcgcugcuugacguu

SEQ ID NO: 198425 - RNA, 19 nt, Artificial Sequence
  Description of Artificial Sequence: Synthetic oligonucleotide
ucagucguucaauggccuu

SEQ ID NO: 198426 - RNA, 19 nt, Artificial Sequence
  Description of Artificial Sequence: Synthetic oligonucleotide
uugucggacuggucguccu

SEQ ID NO: 198427 - RNA, 19 nt, Artificial Sequence
  Description of Artificial Sequence: Synthetic oligonucleotide
agugacacauaagccuuaa

SEQ ID NO: 198428 - RNA, 19 nt, Artificial Sequence
  Description of Artificial Sequence: Synthetic oligonucleotide
gguuuucgauuccuaguca

SEQ ID NO: 198429 - RNA, 19 nt, Artificial Sequence
  Description of Artificial Sequence: Synthetic oligonucleotide
uuucgggcuagaucuucuu

SEQ ID NO: 198430 - RNA, 19 nt, Artificial Sequence
  Description of Artificial Sequence: Synthetic oligonucleotide
acaugacaccaauccuagu

SEQ ID NO: 198431 - RNA, 19 nt, Artificial Sequence
  Description of Artificial Sequence: Synthetic oligonucleotide
gcaaugguagcugggaguc

SEQ ID NO: 198432 - RNA, 19 nt, Artificial Sequence
  Description of Artificial Sequence: Synthetic oligonucleotide
ucggacuggucguccugcc

SEQ ID NO: 198433 - RNA, 19 nt, Artificial Sequence
  Description of Artificial Sequence: Synthetic oligonucleotide
gccauagacgggugagagg

SEQ ID NO: 198434 - RNA, 19 nt, Artificial Sequence
  Description of Artificial Sequence: Synthetic oligonucleotide
gucguccugccaaucucgg

SEQ ID NO: 198435 - RNA, 19 nt, Artificial Sequence
  Description of Artificial Sequence: Synthetic oligonucleotide
uggcauaccguggaucauu

SEQ ID NO: 198436 - RNA, 19 nt, Artificial Sequence
  Description of Artificial Sequence: Synthetic oligonucleotide
cauaucgcauaauugcauu

SEQ ID NO: 198437 - RNA, 19 nt, Artificial Sequence
  Description of Artificial Sequence: Synthetic oligonucleotide
uaacuguggcugcccguuc

SEQ ID NO: 198438 - RNA, 19 nt, Artificial Sequence
  Description of Artificial Sequence: Synthetic oligonucleotide
acuggucguccugccaauc

SEQ ID NO: 198439 - RNA, 19 nt, Artificial Sequence
  Description of Artificial Sequence: Synthetic oligonucleotide
ccagaucucauaagucuuc

SEQ ID NO: 198440 - RNA, 19 nt, Artificial Sequence
  Description of Artificial Sequence: Synthetic oligonucleotide
ugcugccgagacaagccuu

SEQ ID NO: 198441 - RNA, 19 nt, Artificial Sequence
  Description of Artificial Sequence: Synthetic oligonucleotide
gcgaaucaaggacaugaca

SEQ ID NO: 198442 - RNA, 19 nt, Artificial Sequence
  Description of Artificial Sequence: Synthetic oligonucleotide
ccaccgaguaaucggacug

SEQ ID NO: 198443 - RNA, 19 nt, Artificial Sequence
  Description of Artificial Sequence: Synthetic oligonucleotide
uuuggacauugagccaguc

SEQ ID NO: 198444 - RNA, 19 nt, Artificial Sequence
  Description of Artificial Sequence: Synthetic oligonucleotide
aguagucaugccggcggug

SEQ ID NO: 198445 - RNA, 19 nt, Artificial Sequence
  Description of Artificial Sequence: Synthetic oligonucleotide
gcccacucugaauaacccc

SEQ ID NO: 198446 - RNA, 19 nt, Artificial Sequence
  Description of Artificial Sequence: Synthetic oligonucleotide
cuguuuggacauugagcca

SEQ ID NO: 198447 - RNA, 19 nt, Artificial Sequence
  Description of Artificial Sequence: Synthetic oligonucleotide
cuggguuccugguauuaaa

SEQ ID NO: 198448 - RNA, 19 nt, Artificial Sequence
  Description of Artificial Sequence: Synthetic oligonucleotide
gucggacuggucguccugc

SEQ ID NO: 198449 - RNA, 19 nt, Artificial Sequence
  Description of Artificial Sequence: Synthetic oligonucleotide
ucguccugccaaucucggu

SEQ ID NO: 198450 - RNA, 19 nt, Artificial Sequence
  Description of Artificial Sequence: Synthetic oligonucleotide
cucccugccccuagugcac

SEQ ID NO: 198451 - RNA, 19 nt, Artificial Sequence
  Description of Artificial Sequence: Synthetic oligonucleotide
ugguagcugggagucgagu

SEQ ID NO: 198452 - RNA, 19 nt, Artificial Sequence
  Description of Artificial Sequence: Synthetic oligonucleotide
gccauaucgcauaauugca

SEQ ID NO: 198453 - RNA, 19 nt, Artificial Sequence
  Description of Artificial Sequence: Synthetic oligonucleotide
gcucauaauggugccgcag

SEQ ID NO: 198454 - RNA, 19 nt, Artificial Sequence
  Description of Artificial Sequence: Synthetic oligonucleotide
ucacuagggcuuguuccaa

SEQ ID NO: 198455 - RNA, 19 nt, Artificial Sequence
  Description of Artificial Sequence: Synthetic oligonucleotide
accgaguaaucggacuggu

SEQ ID NO: 198456 - RNA, 19 nt, Artificial Sequence
  Description of Artificial Sequence: Synthetic oligonucleotide
ggugagagggguccucuga

SEQ ID NO: 198457 - RNA, 19 nt, Artificial Sequence
  Description of Artificial Sequence: Synthetic oligonucleotide
cagauaagcugcccuucga

SEQ ID NO: 198458 - RNA, 19 nt, Artificial Sequence
  Description of Artificial Sequence: Synthetic oligonucleotide
gugccgcagcaauuucucc

SEQ ID NO: 198459 - RNA, 19 nt, Artificial Sequence
  Description of Artificial Sequence: Synthetic oligonucleotide
ggcgccgcacuacugcugc

SEQ ID NO: 198460 - RNA, 19 nt, Artificial Sequence
  Description of Artificial Sequence: Synthetic oligonucleotide
uccgccucagcagaaccuu

SEQ ID NO: 198461 - RNA, 19 nt, Artificial Sequence
  Description of Artificial Sequence: Synthetic oligonucleotide
cuccuugcacauggcgccg

SEQ ID NO: 198462 - RNA, 19 nt, Artificial Sequence
  Description of Artificial Sequence: Synthetic oligonucleotide
accguggaucauucuggau

SEQ ID NO: 198463 - RNA, 19 nt, Artificial Sequence
  Description of Artificial Sequence: Synthetic oligonucleotide
cauaauggugccgcagcaa

SEQ ID NO: 198464 - RNA, 19 nt, Artificial Sequence
  Description of Artificial Sequence: Synthetic oligonucleotide
uucuccgccucagcagaac

SEQ ID NO: 198465 - RNA, 19 nt, Artificial Sequence
  Description of Artificial Sequence: Synthetic oligonucleotide
ugccaaauuugaggauauc

SEQ ID NO: 198466 - RNA, 19 nt, Artificial Sequence
  Description of Artificial Sequence: Synthetic oligonucleotide
ggacuggucguccugccaa

SEQ ID NO: 198467 - RNA, 19 nt, Artificial Sequence
  Description of Artificial Sequence: Synthetic oligonucleotide
gcuucucgucacuaagauc

SEQ ID NO: 198468 - RNA, 19 nt, Artificial Sequence
  Description of Artificial Sequence: Synthetic oligonucleotide
aggccaccgaguaaucgga

SEQ ID NO: 198469 - RNA, 19 nt, Artificial Sequence
  Description of Artificial Sequence: Synthetic oligonucleotide
guguaagacugcauuggcu

SEQ ID NO: 198470 - RNA, 19 nt, Artificial Sequence
  Description of Artificial Sequence: Synthetic oligonucleotide
cgaguguuaagggccauag

SEQ ID NO: 198471 - RNA, 19 nt, Artificial Sequence
  Description of Artificial Sequence: Synthetic oligonucleotide
ucccugcaauucugugucu

SEQ ID NO: 198472 - RNA, 19 nt, Artificial Sequence
  Description of Artificial Sequence: Synthetic oligonucleotide
gggcuagaucuucuugcug

SEQ ID NO: 198473 - RNA, 19 nt, Artificial Sequence
  Description of Artificial Sequence: Synthetic oligonucleotide
guaccacauacugggccac

SEQ ID NO: 198474 - RNA, 19 nt, Artificial Sequence
  Description of Artificial Sequence: Synthetic oligonucleotide
ucgaucacuagggcuuguu

SEQ ID NO: 198475 - RNA, 19 nt, Artificial Sequence
  Description of Artificial Sequence: Synthetic oligonucleotide
acgacugggccugcgggga

SEQ ID NO: 198476 - RNA, 19 nt, Artificial Sequence
  Description of Artificial Sequence: Synthetic oligonucleotide
ggcccacucugaauaaccc

SEQ ID NO: 198477 - RNA, 19 nt, Artificial Sequence
  Description of Artificial Sequence: Synthetic oligonucleotide
cguccugccaaucucgguc

SEQ ID NO: 198478 - RNA, 19 nt, Artificial Sequence
  Description of Artificial Sequence: Synthetic oligonucleotide
uucagccaguucgggcaug

SEQ ID NO: 198479 - RNA, 19 nt, Artificial Sequence
  Description of Artificial Sequence: Synthetic oligonucleotide
gccaguagucaugccggcg

SEQ ID NO: 198480 - RNA, 19 nt, Artificial Sequence
  Description of Artificial Sequence: Synthetic oligonucleotide
gggguuucuccauucugaa

SEQ ID NO: 198481 - RNA, 19 nt, Artificial Sequence
  Description of Artificial Sequence: Synthetic oligonucleotide
ccgcucaguggcuggagcc

SEQ ID NO: 198482 - RNA, 19 nt, Artificial Sequence
  Description of Artificial Sequence: Synthetic oligonucleotide
cgagcauuaaaaccaagua

SEQ ID NO: 198483 - RNA, 19 nt, Artificial Sequence
  Description of Artificial Sequence: Synthetic oligonucleotide
ccgagacaagccuucacga

SEQ ID NO: 198484 - RNA, 19 nt, Artificial Sequence
  Description of Artificial Sequence: Synthetic oligonucleotide
gugacacauaagccuuaaa

SEQ ID NO: 198485 - RNA, 19 nt, Artificial Sequence
  Description of Artificial Sequence: Synthetic oligonucleotide
acgauucauuucgcccuug

SEQ ID NO: 198486 - RNA, 19 nt, Artificial Sequence
  Description of Artificial Sequence: Synthetic oligonucleotide
gggucaggucuauugcgga

SEQ ID NO: 198487 - RNA, 19 nt, Artificial Sequence
  Description of Artificial Sequence: Synthetic oligonucleotide
ggggauucgggcaauggua

SEQ ID NO: 198488 - RNA, 19 nt, Artificial Sequence
  Description of Artificial Sequence: Synthetic oligonucleotide
gcccuuacgacugggccug

SEQ ID NO: 198489 - RNA, 19 nt, Artificial Sequence
  Description of Artificial Sequence: Synthetic oligonucleotide
ucgcccuugaaaggcucau

SEQ ID NO: 198490 - RNA, 19 nt, Artificial Sequence
  Description of Artificial Sequence: Synthetic oligonucleotide
gcauagccgugguuuauaa

SEQ ID NO: 198491 - RNA, 19 nt, Artificial Sequence
  Description of Artificial Sequence: Synthetic oligonucleotide
ggcauaccguggaucauuc

SEQ ID NO: 198492 - RNA, 19 nt, Artificial Sequence
  Description of Artificial Sequence: Synthetic oligonucleotide
gccgcacuacugcugcuug

SEQ ID NO: 198493 - RNA, 19 nt, Artificial Sequence
  Description of Artificial Sequence: Synthetic oligonucleotide
gccaacagagguagcugug

SEQ ID NO: 198494 - RNA, 19 nt, Artificial Sequence
  Description of Artificial Sequence: Synthetic oligonucleotide
cuagugcacagggcugcuc

SEQ ID NO: 198495 - RNA, 19 nt, Artificial Sequence
  Description of Artificial Sequence: Synthetic oligonucleotide
guaacuguggcugcccguu

SEQ ID NO: 198496 - RNA, 19 nt, Artificial Sequence
  Description of Artificial Sequence: Synthetic oligonucleotide
gggagucgagucacgucag

SEQ ID NO: 198497 - RNA, 19 nt, Artificial Sequence
  Description of Artificial Sequence: Synthetic oligonucleotide
gccgugguuuauaaugcca

SEQ ID NO: 198498 - RNA, 19 nt, Artificial Sequence
  Description of Artificial Sequence: Synthetic oligonucleotide
ccacgauucauuucgcccu

SEQ ID NO: 198499 - RNA, 19 nt, Artificial Sequence
  Description of Artificial Sequence: Synthetic oligonucleotide
uagccgcucaguggcugga

SEQ ID NO: 198500 - RNA, 19 nt, Artificial Sequence
  Description of Artificial Sequence: Synthetic oligonucleotide
agacugcauuggcuggcuu

SEQ ID NO: 198501 - RNA, 19 nt, Artificial Sequence
  Description of Artificial Sequence: Synthetic oligonucleotide
acgauaggggucaggucua

SEQ ID NO: 198502 - RNA, 19 nt, Artificial Sequence
  Description of Artificial Sequence: Synthetic oligonucleotide
ucccugccccuagugcaca

SEQ ID NO: 198503 - RNA, 19 nt, Artificial Sequence
  Description of Artificial Sequence: Synthetic oligonucleotide
ggcugcccguuccucauuc

SEQ ID NO: 198504 - RNA, 19 nt, Artificial Sequence
  Description of Artificial Sequence: Synthetic oligonucleotide
ggcucacauaaaugccgca

SEQ ID NO: 198505 - RNA, 19 nt, Artificial Sequence
  Description of Artificial Sequence: Synthetic oligonucleotide
auuucccguucuaccuccu

SEQ ID NO: 198506 - RNA, 19 nt, Artificial Sequence
  Description of Artificial Sequence: Synthetic oligonucleotide
auggcauaccguggaucau

SEQ ID NO: 198507 - RNA, 19 nt, Artificial Sequence
  Description of Artificial Sequence: Synthetic oligonucleotide
gcggugccagaucucauaa

SEQ ID NO: 198508 - RNA, 19 nt, Artificial Sequence
  Description of Artificial Sequence: Synthetic oligonucleotide
gucagucguucaauggccu

SEQ ID NO: 198509 - RNA, 19 nt, Artificial Sequence
  Description of Artificial Sequence: Synthetic oligonucleotide
cuggucguccugccaaucu

SEQ ID NO: 198510 - RNA, 19 nt, Artificial Sequence
  Description of Artificial Sequence: Synthetic oligonucleotide
gcugccgagacaagccuuc

SEQ ID NO: 198511 - RNA, 19 nt, Artificial Sequence
  Description of Artificial Sequence: Synthetic oligonucleotide
gggugagagggguccucug

SEQ ID NO: 198512 - RNA, 19 nt, Artificial Sequence
  Description of Artificial Sequence: Synthetic oligonucleotide
agccgcucaguggcuggag

SEQ ID NO: 198513 - RNA, 19 nt, Artificial Sequence
  Description of Artificial Sequence: Synthetic oligonucleotide
gcgcccauucacaugcuca

SEQ ID NO: 198514 - RNA, 19 nt, Artificial Sequence
  Description of Artificial Sequence: Synthetic oligonucleotide
cauagccgugguuuauaau

SEQ ID NO: 198515 - RNA, 19 nt, Artificial Sequence
  Description of Artificial Sequence: Synthetic oligonucleotide
aagcgcugcuugacguuuu

SEQ ID NO: 198516 - RNA, 19 nt, Artificial Sequence
  Description of Artificial Sequence: Synthetic oligonucleotide
ggcggcacgggugcaggag

SEQ ID NO: 198517 - RNA, 19 nt, Artificial Sequence
  Description of Artificial Sequence: Synthetic oligonucleotide
gugccaaauuugaggauau

SEQ ID NO: 198518 - RNA, 19 nt, Artificial Sequence
  Description of Artificial Sequence: Synthetic oligonucleotide
caguucgggcaugcuccag

SEQ ID NO: 198519 - RNA, 19 nt, Artificial Sequence
  Description of Artificial Sequence: Synthetic oligonucleotide
cgaucacuagggcuuguuc

SEQ ID NO: 198520 - RNA, 19 nt, Artificial Sequence
  Description of Artificial Sequence: Synthetic oligonucleotide
ggcggugccagaucucaua

SEQ ID NO: 198521 - RNA, 19 nt, Artificial Sequence
  Description of Artificial Sequence: Synthetic oligonucleotide
cccguaccacauacugggc

SEQ ID NO: 198522 - RNA, 19 nt, Artificial Sequence
  Description of Artificial Sequence: Synthetic oligonucleotide
cuuuaggcuccaucuccau

SEQ ID NO: 198523 - RNA, 19 nt, Artificial Sequence
  Description of Artificial Sequence: Synthetic oligonucleotide
ccacuuuaaaugagcucaa

SEQ ID NO: 198524 - RNA, 19 nt, Artificial Sequence
  Description of Artificial Sequence: Synthetic oligonucleotide
cuccgccucagcagaaccu

SEQ ID NO: 198525 - RNA, 19 nt, Artificial Sequence
  Description of Artificial Sequence: Synthetic oligonucleotide
gacuggucguccugccaau

SEQ ID NO: 198526 - RNA, 19 nt, Artificial Sequence
  Description of Artificial Sequence: Synthetic oligonucleotide
cguggaucauucuggaugu

SEQ ID NO: 198527 - RNA, 19 nt, Artificial Sequence
  Description of Artificial Sequence: Synthetic oligonucleotide
ccauaucgcauaauugcau

SEQ ID NO: 198528 - RNA, 19 nt, Artificial Sequence
  Description of Artificial Sequence: Synthetic oligonucleotide
ggucuauugcggacuucuc

SEQ ID NO: 198529 - RNA, 19 nt, Artificial Sequence
  Description of Artificial Sequence: Synthetic oligonucleotide
gcucacauaaaugccgcau

SEQ ID NO: 198530 - RNA, 19 nt, Artificial Sequence
  Description of Artificial Sequence: Synthetic oligonucleotide
gcccuguuugccaggcggc

SEQ ID NO: 198531 - RNA, 19 nt, Artificial Sequence
  Description of Artificial Sequence: Synthetic oligonucleotide
ccguuccucauucugccaa

SEQ ID NO: 198532 - RNA, 19 nt, Artificial Sequence
  Description of Artificial Sequence: Synthetic oligonucleotide
gguugucggacuggucguc

SEQ ID NO: 198533 - RNA, 19 nt, Artificial Sequence
  Description of Artificial Sequence: Synthetic oligonucleotide
ccuguuugccaggcggcug

SEQ ID NO: 198534 - RNA, 19 nt, Artificial Sequence
  Description of Artificial Sequence: Synthetic oligonucleotide
ggacaccaucagcaaaagu

SEQ ID NO: 198535 - RNA, 19 nt, Artificial Sequence
  Description of Artificial Sequence: Synthetic oligonucleotide
gcaggaguauuggguugug

SEQ ID NO: 198536 - RNA, 19 nt, Artificial Sequence
  Description of Artificial Sequence: Synthetic oligonucleotide
ggagguucggcaggagucu

SEQ ID NO: 198537 - RNA, 19 nt, Artificial Sequence
  Description of Artificial Sequence: Synthetic oligonucleotide
ggcauagccgugguuuaua

SEQ ID NO: 198538 - RNA, 19 nt, Artificial Sequence
  Description of Artificial Sequence: Synthetic oligonucleotide
caguagucaugccggcggu

SEQ ID NO: 198539 - RNA, 19 nt, Artificial Sequence
  Description of Artificial Sequence: Synthetic oligonucleotide
gcuggguuccugguauuaa

SEQ ID NO: 198540 - RNA, 19 nt, Artificial Sequence
  Description of Artificial Sequence: Synthetic oligonucleotide
agguucggcaggagucuuu

SEQ ID NO: 198541 - RNA, 19 nt, Artificial Sequence
  Description of Artificial Sequence: Synthetic oligonucleotide
gccgcuggguuccugguau

SEQ ID NO: 198542 - RNA, 19 nt, Artificial Sequence
  Description of Artificial Sequence: Synthetic oligonucleotide
cugccgagacaagccuuca

SEQ ID NO: 198543 - RNA, 19 nt, Artificial Sequence
  Description of Artificial Sequence: Synthetic oligonucleotide
cggugccagaucucauaag

SEQ ID NO: 198544 - RNA, 19 nt, Artificial Sequence
  Description of Artificial Sequence: Synthetic oligonucleotide
ggccaccgaguaaucggac

SEQ ID NO: 198545 - RNA, 19 nt, Artificial Sequence
  Description of Artificial Sequence: Synthetic oligonucleotide
cacgauucauuucgcccuu

SEQ ID NO: 198546 - RNA, 19 nt, Artificial Sequence
  Description of Artificial Sequence: Synthetic oligonucleotide
gacuugccucgaagaucuc

SEQ ID NO: 198547 - RNA, 19 nt, Artificial Sequence
  Description of Artificial Sequence: Synthetic oligonucleotide
gauaggggucaggucuauu

SEQ ID NO: 198548 - RNA, 19 nt, Artificial Sequence
  Description of Artificial Sequence: Synthetic oligonucleotide
cugagguggcaugccauau

SEQ ID NO: 198549 - RNA, 19 nt, Artificial Sequence
  Description of Artificial Sequence: Synthetic oligonucleotide
cgauucauuucgcccuuga

SEQ ID NO: 198550 - RNA, 19 nt, Artificial Sequence
  Description of Artificial Sequence: Synthetic oligonucleotide
caggaguauuggguugugu

SEQ ID NO: 198551 - RNA, 19 nt, Artificial Sequence
  Description of Artificial Sequence: Synthetic oligonucleotide
caucgggcauagccguggu

SEQ ID NO: 198552 - RNA, 19 nt, Artificial Sequence
  Description of Artificial Sequence: Synthetic oligonucleotide
ccugcggggagcuucugau

SEQ ID NO: 198553 - RNA, 19 nt, Artificial Sequence
  Description of Artificial Sequence: Synthetic oligonucleotide
gagguucggcaggagucuu

SEQ ID NO: 198554 - RNA, 19 nt, Artificial Sequence
  Description of Artificial Sequence: Synthetic oligonucleotide
gcauaccguggaucauucu

SEQ ID NO: 198555 - RNA, 19 nt, Artificial Sequence
  Description of Artificial Sequence: Synthetic oligonucleotide
gcggcacgggugcaggagu

SEQ ID NO: 198556 - RNA, 19 nt, Artificial Sequence
  Description of Artificial Sequence: Synthetic oligonucleotide
gggcccggcccacucugaa

SEQ ID NO: 198557 - RNA, 19 nt, Artificial Sequence
  Description of Artificial Sequence: Synthetic oligonucleotide
ccucagcaaaacgaguguu

SEQ ID NO: 198558 - RNA, 19 nt, Artificial Sequence
  Description of Artificial Sequence: Synthetic oligonucleotide
cggcugagaauguuccgcu

SEQ ID NO: 198559 - RNA, 19 nt, Artificial Sequence
  Description of Artificial Sequence: Synthetic oligonucleotide
gcccagauuucgggcuaga

SEQ ID NO: 198560 - RNA, 19 nt, Artificial Sequence
  Description of Artificial Sequence: Synthetic oligonucleotide
cccggcccacucugaauaa

SEQ ID NO: 198561 - RNA, 19 nt, Artificial Sequence
  Description of Artificial Sequence: Synthetic oligonucleotide
cagcgcccauucacaugcu

SEQ ID NO: 198562 - RNA, 19 nt, Artificial Sequence
  Description of Artificial Sequence: Synthetic oligonucleotide
ggcgcacgguggggagaag

SEQ ID NO: 198563 - RNA, 19 nt, Artificial Sequence
  Description of Artificial Sequence: Synthetic oligonucleotide
cgggcauagccgugguuua

SEQ ID NO: 198564 - RNA, 19 nt, Artificial Sequence
  Description of Artificial Sequence: Synthetic oligonucleotide
gggcauagccgugguuuau

SEQ ID NO: 198565 - RNA, 19 nt, Artificial Sequence
  Description of Artificial Sequence: Synthetic oligonucleotide
gcaugcuccagcgcccauu

SEQ ID NO: 198566 - RNA, 19 nt, Artificial Sequence
  Description of Artificial Sequence: Synthetic oligonucleotide
ccgaguaaucggacugguu

SEQ ID NO: 198567 - RNA, 19 nt, Artificial Sequence
  Description of Artificial Sequence: Synthetic oligonucleotide
gcacgggugcaggaguauu

SEQ ID NO: 198568 - RNA, 19 nt, Artificial Sequence
  Description of Artificial Sequence: Synthetic oligonucleotide
ggcacgggugcaggaguau

SEQ ID NO: 198569 - RNA, 19 nt, Artificial Sequence
  Description of Artificial Sequence: Synthetic oligonucleotide
ccgcacuacugcugcuugu

SEQ ID NO: 198570 - RNA, 19 nt, Artificial Sequence
  Description of Artificial Sequence: Synthetic oligonucleotide
ccccgucugcaauguugaa

SEQ ID NO: 198571 - RNA, 19 nt, Artificial Sequence
  Description of Artificial Sequence: Synthetic oligonucleotide
ggccugcggggagcuucug

SEQ ID NO: 198572 - RNA, 19 nt, Artificial Sequence
  Description of Artificial Sequence: Synthetic oligonucleotide
cccuguuugccaggcggcu

SEQ ID NO: 198573 - RNA, 19 nt, Artificial Sequence
  Description of Artificial Sequence: Synthetic oligonucleotide
cccagauuucgggcuagau

SEQ ID NO: 198574 - RNA, 19 nt, Artificial Sequence
  Description of Artificial Sequence: Synthetic oligonucleotide
gggccugcggggagcuucu

SEQ ID NO: 198575 - RNA, 19 nt, Artificial Sequence
  Description of Artificial Sequence: Synthetic oligonucleotide
ccuagugcacagggcugcu

SEQ ID NO: 198576 - RNA, 19 nt, Artificial Sequence
  Description of Artificial Sequence: Synthetic oligonucleotide
cggcacgggugcaggagua

SEQ ID NO: 198577 - RNA, 19 nt, Artificial Sequence
  Description of Artificial Sequence: Synthetic oligonucleotide
cgauaggggucaggucuau

SEQ ID NO: 198578 - RNA, 19 nt, Artificial Sequence
  Description of Artificial Sequence: Synthetic oligonucleotide
ccgcuggguuccugguauu

SEQ ID NO: 198579 - RNA, 19 nt, Artificial Sequence
  Description of Artificial Sequence: Synthetic oligonucleotide
ugaacuacuauccuggaag

SEQ ID NO: 198580 - RNA, 19 nt, Artificial Sequence
  Description of Artificial Sequence: Synthetic oligonucleotide
aauacuacuucccacacca

SEQ ID NO: 198581 - RNA, 19 nt, Artificial Sequence
  Description of Artificial Sequence: Synthetic oligonucleotide
uuuacaaucguuagaaggc

SEQ ID NO: 198582 - RNA, 19 nt, Artificial Sequence
  Description of Artificial Sequence: Synthetic oligonucleotide
uuuaguaacaucuucuucu

SEQ ID NO: 198583 - RNA, 19 nt, Artificial Sequence
  Description of Artificial Sequence: Synthetic oligonucleotide
aaaaucuagaguccauucg

SEQ ID NO: 198584 - RNA, 19 nt, Artificial Sequence
  Description of Artificial Sequence: Synthetic oligonucleotide
cuuuacaaucguuagaagg

SEQ ID NO: 198585 - RNA, 19 nt, Artificial Sequence
  Description of Artificial Sequence: Synthetic oligonucleotide
ugauugagaaggcauaccg

SEQ ID NO: 198586 - RNA, 19 nt, Artificial Sequence
  Description of Artificial Sequence: Synthetic oligonucleotide
auaaguuagaaccacgaag

SEQ ID NO: 198587 - RNA, 19 nt, Artificial Sequence
  Description of Artificial Sequence: Synthetic oligonucleotide
uaaguuagaaccacgaagu

SEQ ID NO: 198588 - RNA, 19 nt, Artificial Sequence
  Description of Artificial Sequence: Synthetic oligonucleotide
auagagacugccuauuccc

SEQ ID NO: 198589 - RNA, 19 nt, Artificial Sequence
  Description of Artificial Sequence: Synthetic oligonucleotide
uggaauuuuggcuuuaaag

SEQ ID NO: 198590 - RNA, 19 nt, Artificial Sequence
  Description of Artificial Sequence: Synthetic oligonucleotide
uucguuaucagaagcaaag

SEQ ID NO: 198591 - RNA, 19 nt, Artificial Sequence
  Description of Artificial Sequence: Synthetic oligonucleotide
aaguugauauucaaaacac

SEQ ID NO: 198592 - RNA, 19 nt, Artificial Sequence
  Description of Artificial Sequence: Synthetic oligonucleotide
gagaaugugaacccgcugg

SEQ ID NO: 198593 - RNA, 19 nt, Artificial Sequence
  Description of Artificial Sequence: Synthetic oligonucleotide
aauaugcacugauugaugu

SEQ ID NO: 198594 - RNA, 19 nt, Artificial Sequence
  Description of Artificial Sequence: Synthetic oligonucleotide
ugucaaaacuaguagagga

SEQ ID NO: 198595 - RNA, 19 nt, Artificial Sequence
  Description of Artificial Sequence: Synthetic oligonucleotide
gauucuauagguaucuucc

SEQ ID NO: 198596 - RNA, 19 nt, Artificial Sequence
  Description of Artificial Sequence: Synthetic oligonucleotide
ugagacugcaaauucauga

SEQ ID NO: 198597 - RNA, 19 nt, Artificial Sequence
  Description of Artificial Sequence: Synthetic oligonucleotide
uuucauugcgauaauuuca

SEQ ID NO: 198598 - RNA, 19 nt, Artificial Sequence
  Description of Artificial Sequence: Synthetic oligonucleotide
uugaugaccauccaaauuu

SEQ ID NO: 198599 - RNA, 19 nt, Artificial Sequence
  Description of Artificial Sequence: Synthetic oligonucleotide
uggaauaugucuuucaaau

SEQ ID NO: 198600 - RNA, 19 nt, Artificial Sequence
  Description of Artificial Sequence: Synthetic oligonucleotide
ugauccuuugcuaguaggg

SEQ ID NO: 198601 - RNA, 19 nt, Artificial Sequence
  Description of Artificial Sequence: Synthetic oligonucleotide
ugaugcguuacuaacagaa

SEQ ID NO: 198602 - RNA, 19 nt, Artificial Sequence
  Description of Artificial Sequence: Synthetic oligonucleotide
ucauaauguacaauguccu

SEQ ID NO: 198603 - RNA, 19 nt, Artificial Sequence
  Description of Artificial Sequence: Synthetic oligonucleotide
guagcgauguuauaauacg

SEQ ID NO: 198604 - RNA, 19 nt, Artificial Sequence
  Description of Artificial Sequence: Synthetic oligonucleotide
ucuuccgacaauccaaaag

SEQ ID NO: 198605 - RNA, 19 nt, Artificial Sequence
  Description of Artificial Sequence: Synthetic oligonucleotide
aaggcauaccgcuacguag

SEQ ID NO: 198606 - RNA, 19 nt, Artificial Sequence
  Description of Artificial Sequence: Synthetic oligonucleotide
acacuuuacuccaugaccc

SEQ ID NO: 198607 - RNA, 19 nt, Artificial Sequence
  Description of Artificial Sequence: Synthetic oligonucleotide
aaggagacuacuuguucgg

SEQ ID NO: 198608 - RNA, 19 nt, Artificial Sequence
  Description of Artificial Sequence: Synthetic oligonucleotide
cagauaauuucaaagucag

SEQ ID NO: 198609 - RNA, 19 nt, Artificial Sequence
  Description of Artificial Sequence: Synthetic oligonucleotide
auaauacgugucuugggac

SEQ ID NO: 198610 - RNA, 19 nt, Artificial Sequence
  Description of Artificial Sequence: Synthetic oligonucleotide
uuauuuuggaauaugucuu

SEQ ID NO: 198611 - RNA, 19 nt, Artificial Sequence
  Description of Artificial Sequence: Synthetic oligonucleotide
uuugcagcaucacugacgu

SEQ ID NO: 198612 - RNA, 19 nt, Artificial Sequence
  Description of Artificial Sequence: Synthetic oligonucleotide
ugugcuuuucugauuaucu

SEQ ID NO: 198613 - RNA, 19 nt, Artificial Sequence
  Description of Artificial Sequence: Synthetic oligonucleotide
uauuguuaaaggcaacagu

SEQ ID NO: 198614 - RNA, 19 nt, Artificial Sequence
  Description of Artificial Sequence: Synthetic oligonucleotide
aggacaaaugcacugucgg

SEQ ID NO: 198615 - RNA, 19 nt, Artificial Sequence
  Description of Artificial Sequence: Synthetic oligonucleotide
auugcgauaauuucaucug

SEQ ID NO: 198616 - RNA, 19 nt, Artificial Sequence
  Description of Artificial Sequence: Synthetic oligonucleotide
uccuugucaaaacuaguag

SEQ ID NO: 198617 - RNA, 19 nt, Artificial Sequence
  Description of Artificial Sequence: Synthetic oligonucleotide
uccuuuaugucuuuagugu

SEQ ID NO: 198618 - RNA, 19 nt, Artificial Sequence
  Description of Artificial Sequence: Synthetic oligonucleotide
uguuauaauacgugucuug

SEQ ID NO: 198619 - RNA, 19 nt, Artificial Sequence
  Description of Artificial Sequence: Synthetic oligonucleotide
uuaaguugauauucaaaac

SEQ ID NO: 198620 - RNA, 19 nt, Artificial Sequence
  Description of Artificial Sequence: Synthetic oligonucleotide
cauaccgcuacguaggggc

SEQ ID NO: 198621 - RNA, 19 nt, Artificial Sequence
  Description of Artificial Sequence: Synthetic oligonucleotide
uuaaagugguuuccucugg

SEQ ID NO: 198622 - RNA, 19 nt, Artificial Sequence
  Description of Artificial Sequence: Synthetic oligonucleotide
uuccuuuaugucuuuagug

SEQ ID NO: 198623 - RNA, 19 nt, Artificial Sequence
  Description of Artificial Sequence: Synthetic oligonucleotide
gucauaauguacaaugucc

SEQ ID NO: 198624 - RNA, 19 nt, Artificial Sequence
  Description of Artificial Sequence: Synthetic oligonucleotide
augcguuacuaacagaaag

SEQ ID NO: 198625 - RNA, 19 nt, Artificial Sequence
  Description of Artificial Sequence: Synthetic oligonucleotide
aauaaguuagaaccacgaa

SEQ ID NO: 198626 - RNA, 19 nt, Artificial Sequence
  Description of Artificial Sequence: Synthetic oligonucleotide
uacuuuacaaucguuagaa

SEQ ID NO: 198627 - RNA, 19 nt, Artificial Sequence
  Description of Artificial Sequence: Synthetic oligonucleotide
cuuccucuaaaagagaggc

SEQ ID NO: 198628 - RNA, 19 nt, Artificial Sequence
  Description of Artificial Sequence: Synthetic oligonucleotide
uuuuguacuuuacaaucgu

SEQ ID NO: 198629 - RNA, 19 nt, Artificial Sequence
  Description of Artificial Sequence: Synthetic oligonucleotide
ugagacacaccuuccgugg

SEQ ID NO: 198630 - RNA, 19 nt, Artificial Sequence
  Description of Artificial Sequence: Synthetic oligonucleotide
cugucaaacaacuucccag

SEQ ID NO: 198631 - RNA, 19 nt, Artificial Sequence
  Description of Artificial Sequence: Synthetic oligonucleotide
ugugguuugggcuauucac

SEQ ID NO: 198632 - RNA, 19 nt, Artificial Sequence
  Description of Artificial Sequence: Synthetic oligonucleotide
cugauugauguuuugugag

SEQ ID NO: 198633 - RNA, 19 nt, Artificial Sequence
  Description of Artificial Sequence: Synthetic oligonucleotide
aaguuagaaccacgaaguc

SEQ ID NO: 198634 - RNA, 19 nt, Artificial Sequence
  Description of Artificial Sequence: Synthetic oligonucleotide
acuacuauccuggaagcgg

SEQ ID NO: 198635 - RNA, 19 nt, Artificial Sequence
  Description of Artificial Sequence: Synthetic oligonucleotide
aauacgugucuugggacac

SEQ ID NO: 198636 - RNA, 19 nt, Artificial Sequence
  Description of Artificial Sequence: Synthetic oligonucleotide
uccuuauuuuggaauaugu

SEQ ID NO: 198637 - RNA, 19 nt, Artificial Sequence
  Description of Artificial Sequence: Synthetic oligonucleotide
ugcguuacuaacagaaagu

SEQ ID NO: 198638 - RNA, 19 nt, Artificial Sequence
  Description of Artificial Sequence: Synthetic oligonucleotide
uaauguugaaccuggugcu

SEQ ID NO: 198639 - RNA, 19 nt, Artificial Sequence
  Description of Artificial Sequence: Synthetic oligonucleotide
ucaaaacuaguagaggaca

SEQ ID NO: 198640 - RNA, 19 nt, Artificial Sequence
  Description of Artificial Sequence: Synthetic oligonucleotide
cacugauauuguuaaaggc

SEQ ID NO: 198641 - RNA, 19 nt, Artificial Sequence
  Description of Artificial Sequence: Synthetic oligonucleotide
ugagccauuagcacacuug

SEQ ID NO: 198642 - RNA, 19 nt, Artificial Sequence
  Description of Artificial Sequence: Synthetic oligonucleotide
cucuuuugcauagagacug

SEQ ID NO: 198643 - RNA, 19 nt, Artificial Sequence
  Description of Artificial Sequence: Synthetic oligonucleotide
acuaguagaggacacuacu

SEQ ID NO: 198644 - RNA, 19 nt, Artificial Sequence
  Description of Artificial Sequence: Synthetic oligonucleotide
uucauugcgauaauuucau

SEQ ID NO: 198645 - RNA, 19 nt, Artificial Sequence
  Description of Artificial Sequence: Synthetic oligonucleotide
guuucaaggaacucugaug

SEQ ID NO: 198646 - RNA, 19 nt, Artificial Sequence
  Description of Artificial Sequence: Synthetic oligonucleotide
ucaaacaacuucccagaug

SEQ ID NO: 198647 - RNA, 19 nt, Artificial Sequence
  Description of Artificial Sequence: Synthetic oligonucleotide
uccgacaauccaaaaggag

SEQ ID NO: 198648 - RNA, 19 nt, Artificial Sequence
  Description of Artificial Sequence: Synthetic oligonucleotide
aucguuagaaggcucuauc

SEQ ID NO: 198649 - RNA, 19 nt, Artificial Sequence
  Description of Artificial Sequence: Synthetic oligonucleotide
uauuaugaucuucauguuu

SEQ ID NO: 198650 - RNA, 19 nt, Artificial Sequence
  Description of Artificial Sequence: Synthetic oligonucleotide
aagaaugaaguuugugaau

SEQ ID NO: 198651 - RNA, 19 nt, Artificial Sequence
  Description of Artificial Sequence: Synthetic oligonucleotide
ucauaaauggcauggucau

SEQ ID NO: 198652 - RNA, 19 nt, Artificial Sequence
  Description of Artificial Sequence: Synthetic oligonucleotide
cagguuugcagcaucacug

SEQ ID NO: 198653 - RNA, 19 nt, Artificial Sequence
  Description of Artificial Sequence: Synthetic oligonucleotide
uaauacgugucuugggaca

SEQ ID NO: 198654 - RNA, 19 nt, Artificial Sequence
  Description of Artificial Sequence: Synthetic oligonucleotide
aacuucugcuaauacuacu

SEQ ID NO: 198655 - RNA, 19 nt, Artificial Sequence
  Description of Artificial Sequence: Synthetic oligonucleotide
ugcuuauaggcuguucugg

SEQ ID NO: 198656 - RNA, 19 nt, Artificial Sequence
  Description of Artificial Sequence: Synthetic oligonucleotide
cuagaguccauucggaauc

SEQ ID NO: 198657 - RNA, 19 nt, Artificial Sequence
  Description of Artificial Sequence: Synthetic oligonucleotide
ucggccauugugcagguca

SEQ ID NO: 198658 - RNA, 19 nt, Artificial Sequence
  Description of Artificial Sequence: Synthetic oligonucleotide
uuuguguccuuauuuugga

SEQ ID NO: 198659 - RNA, 19 nt, Artificial Sequence
  Description of Artificial Sequence: Synthetic oligonucleotide
ucugauuaucuucccugag

SEQ ID NO: 198660 - RNA, 19 nt, Artificial Sequence
  Description of Artificial Sequence: Synthetic oligonucleotide
uaguagaggacacuacuuc

SEQ ID NO: 198661 - RNA, 19 nt, Artificial Sequence
  Description of Artificial Sequence: Synthetic oligonucleotide
aguagaggacacuacuuca

SEQ ID NO: 198662 - RNA, 19 nt, Artificial Sequence
  Description of Artificial Sequence: Synthetic oligonucleotide
gaacuacuauccuggaagc

SEQ ID NO: 198663 - RNA, 19 nt, Artificial Sequence
  Description of Artificial Sequence: Synthetic oligonucleotide
cuacuauccuggaagcggg

SEQ ID NO: 198664 - RNA, 19 nt, Artificial Sequence
  Description of Artificial Sequence: Synthetic oligonucleotide
uguuucaaggaacucugau

SEQ ID NO: 198665 - RNA, 19 nt, Artificial Sequence
  Description of Artificial Sequence: Synthetic oligonucleotide
acuacuucccacaccacac

SEQ ID NO: 198666 - RNA, 19 nt, Artificial Sequence
  Description of Artificial Sequence: Synthetic oligonucleotide
gaauaaguuagaaccacga

SEQ ID NO: 198667 - RNA, 19 nt, Artificial Sequence
  Description of Artificial Sequence: Synthetic oligonucleotide
uuccuaacuuggcugaaga

SEQ ID NO: 198668 - RNA, 19 nt, Artificial Sequence
  Description of Artificial Sequence: Synthetic oligonucleotide
uaauacuacuucccacacc

SEQ ID NO: 198669 - RNA, 19 nt, Artificial Sequence
  Description of Artificial Sequence: Synthetic oligonucleotide
aaaacuaguagaggacacu

SEQ ID NO: 198670 - RNA, 19 nt, Artificial Sequence
  Description of Artificial Sequence: Synthetic oligonucleotide
aacuacuauccuggaagcg

SEQ ID NO: 198671 - RNA, 19 nt, Artificial Sequence
  Description of Artificial Sequence: Synthetic oligonucleotide
aacuaguagaggacacuac

SEQ ID NO: 198672 - RNA, 19 nt, Artificial Sequence
  Description of Artificial Sequence: Synthetic oligonucleotide
uguaucacuggagucauau

SEQ ID NO: 198673 - RNA, 19 nt, Artificial Sequence
  Description of Artificial Sequence: Synthetic oligonucleotide
cuucugaacuacuauccug

SEQ ID NO: 198674 - RNA, 19 nt, Artificial Sequence
  Description of Artificial Sequence: Synthetic oligonucleotide
ucuagaguccauucggaau

SEQ ID NO: 198675 - RNA, 19 nt, Artificial Sequence
  Description of Artificial Sequence: Synthetic oligonucleotide
aaggaacucugauguucac

SEQ ID NO: 198676 - RNA, 19 nt, Artificial Sequence
  Description of Artificial Sequence: Synthetic oligonucleotide
agaacuucugcuaauacua

SEQ ID NO: 198677 - RNA, 19 nt, Artificial Sequence
  Description of Artificial Sequence: Synthetic oligonucleotide
ucguuagaaggcucuaucu

SEQ ID NO: 198678 - RNA, 19 nt, Artificial Sequence
  Description of Artificial Sequence: Synthetic oligonucleotide
uuuuguucaugaguaggug

SEQ ID NO: 198679 - RNA, 19 nt, Artificial Sequence
  Description of Artificial Sequence: Synthetic oligonucleotide
uuuguugggucauaaugua

SEQ ID NO: 198680 - RNA, 19 nt, Artificial Sequence
  Description of Artificial Sequence: Synthetic oligonucleotide
ucuuucaaaucuguagcga

SEQ ID NO: 198681 - RNA, 19 nt, Artificial Sequence
  Description of Artificial Sequence: Synthetic oligonucleotide
agucauuuccuaacuuggc

SEQ ID NO: 198682 - RNA, 19 nt, Artificial Sequence
  Description of Artificial Sequence: Synthetic oligonucleotide
ucuguagcgauguuauaau

SEQ ID NO: 198683 - RNA, 19 nt, Artificial Sequence
  Description of Artificial Sequence: Synthetic oligonucleotide
uggcuaauuugcuuucacc

SEQ ID NO: 198684 - RNA, 19 nt, Artificial Sequence
  Description of Artificial Sequence: Synthetic oligonucleotide
gauugauguuuugugaguc

SEQ ID NO: 198685 - RNA, 19 nt, Artificial Sequence
  Description of Artificial Sequence: Synthetic oligonucleotide
gacagacuaucuucccacg

SEQ ID NO: 198686 - RNA, 19 nt, Artificial Sequence
  Description of Artificial Sequence: Synthetic oligonucleotide
gauugagaaggcauaccgc

SEQ ID NO: 198687 - RNA, 19 nt, Artificial Sequence
  Description of Artificial Sequence: Synthetic oligonucleotide
acaaggagugauugagaag

SEQ ID NO: 198688 - RNA, 19 nt, Artificial Sequence
  Description of Artificial Sequence: Synthetic oligonucleotide
cacuuucguuaucagaagc

SEQ ID NO: 198689 - RNA, 19 nt, Artificial Sequence
  Description of Artificial Sequence: Synthetic oligonucleotide
aaacuaguagaggacacua

SEQ ID NO: 198690 - RNA, 19 nt, Artificial Sequence
  Description of Artificial Sequence: Synthetic oligonucleotide
uucgggcuucccaagaacu

SEQ ID NO: 198691 - RNA, 19 nt, Artificial Sequence
  Description of Artificial Sequence: Synthetic oligonucleotide
uagcgauguuauaauacgu

SEQ ID NO: 198692 - RNA, 19 nt, Artificial Sequence
  Description of Artificial Sequence: Synthetic oligonucleotide
uugcgauaauuucaucugu

SEQ ID NO: 198693 - RNA, 19 nt, Artificial Sequence
  Description of Artificial Sequence: Synthetic oligonucleotide
cuacguaggggcuuucuug

SEQ ID NO: 198694 - RNA, 19 nt, Artificial Sequence
  Description of Artificial Sequence: Synthetic oligonucleotide
acuuuacaaucguuagaag

SEQ ID NO: 198695 - RNA, 19 nt, Artificial Sequence
  Description of Artificial Sequence: Synthetic oligonucleotide
ucuucccacguuucacugg

SEQ ID NO: 198696 - RNA, 19 nt, Artificial Sequence
  Description of Artificial Sequence: Synthetic oligonucleotide
cuaauacuacuucccacac

SEQ ID NO: 198697 - RNA, 19 nt, Artificial Sequence
  Description of Artificial Sequence: Synthetic oligonucleotide
uuccgacaauccaaaagga

SEQ ID NO: 198698 - RNA, 19 nt, Artificial Sequence
  Description of Artificial Sequence: Synthetic oligonucleotide
aaccacgaagucugucauc

SEQ ID NO: 198699 - RNA, 19 nt, Artificial Sequence
  Description of Artificial Sequence: Synthetic oligonucleotide
ugugaauaucugauuuaaa

SEQ ID NO: 198700 - RNA, 19 nt, Artificial Sequence
  Description of Artificial Sequence: Synthetic oligonucleotide
auuuuguucaugaguaggu

SEQ ID NO: 198701 - RNA, 19 nt, Artificial Sequence
  Description of Artificial Sequence: Synthetic oligonucleotide
acuaacagaaagugagaaa

SEQ ID NO: 198702 - RNA, 19 nt, Artificial Sequence
  Description of Artificial Sequence: Synthetic oligonucleotide
uacguaggggcuuucuugu

SEQ ID NO: 198703 - RNA, 19 nt, Artificial Sequence
  Description of Artificial Sequence: Synthetic oligonucleotide
uuacaaucguuagaaggcu

SEQ ID NO: 198704 - RNA, 19 nt, Artificial Sequence
  Description of Artificial Sequence: Synthetic oligonucleotide
ucuuuugcauagagacugc

SEQ ID NO: 198705 - RNA, 19 nt, Artificial Sequence
  Description of Artificial Sequence: Synthetic oligonucleotide
gaagcggggaucuuccuga

SEQ ID NO: 198706 - RNA, 19 nt, Artificial Sequence
  Description of Artificial Sequence: Synthetic oligonucleotide
auucuauagguaucuuccu

SEQ ID NO: 198707 - RNA, 19 nt, Artificial Sequence
  Description of Artificial Sequence: Synthetic oligonucleotide
uucuauagguaucuuccuu

SEQ ID NO: 198708 - RNA, 19 nt, Artificial Sequence
  Description of Artificial Sequence: Synthetic oligonucleotide
ugcgauaauuucaucugua

SEQ ID NO: 198709 - RNA, 19 nt, Artificial Sequence
  Description of Artificial Sequence: Synthetic oligonucleotide
caaauuugccaacgcacug

SEQ ID NO: 198710 - RNA, 19 nt, Artificial Sequence
  Description of Artificial Sequence: Synthetic oligonucleotide
ugccaacgcacugugaacc

SEQ ID NO: 198711 - RNA, 19 nt, Artificial Sequence
  Description of Artificial Sequence: Synthetic oligonucleotide
gagacugccuauucccuug

SEQ ID NO: 198712 - RNA, 19 nt, Artificial Sequence
  Description of Artificial Sequence: Synthetic oligonucleotide
cuggcucucaacaguaaac

SEQ ID NO: 198713 - RNA, 19 nt, Artificial Sequence
  Description of Artificial Sequence: Synthetic oligonucleotide
ugccaaggcggcuagucgc

SEQ ID NO: 198714 - RNA, 19 nt, Artificial Sequence
  Description of Artificial Sequence: Synthetic oligonucleotide
aucuguagcgauguuauaa

SEQ ID NO: 198715 - RNA, 19 nt, Artificial Sequence
  Description of Artificial Sequence: Synthetic oligonucleotide
caccagaauaaguuagaac

SEQ ID NO: 198716 - RNA, 19 nt, Artificial Sequence
  Description of Artificial Sequence: Synthetic oligonucleotide
cauucggaaucucucauca

SEQ ID NO: 198717 - RNA, 19 nt, Artificial Sequence
  Description of Artificial Sequence: Synthetic oligonucleotide
agcgauguuauaauacgug

SEQ ID NO: 198718 - RNA, 19 nt, Artificial Sequence
  Description of Artificial Sequence: Synthetic oligonucleotide
uacuucccacaccacacca

SEQ ID NO: 198719 - RNA, 19 nt, Artificial Sequence
  Description of Artificial Sequence: Synthetic oligonucleotide
cauugcgauaauuucaucu

SEQ ID NO: 198720 - RNA, 19 nt, Artificial Sequence
  Description of Artificial Sequence: Synthetic oligonucleotide
accacgaagucugucauca

SEQ ID NO: 198721 - RNA, 19 nt, Artificial Sequence
  Description of Artificial Sequence: Synthetic oligonucleotide
aaucuagaguccauucgga

SEQ ID NO: 198722 - RNA, 19 nt, Artificial Sequence
  Description of Artificial Sequence: Synthetic oligonucleotide
ugugcagucacuggcugug

SEQ ID NO: 198723 - RNA, 19 nt, Artificial Sequence
  Description of Artificial Sequence: Synthetic oligonucleotide
aguacuagaaguggacaca

SEQ ID NO: 198724 - RNA, 19 nt, Artificial Sequence
  Description of Artificial Sequence: Synthetic oligonucleotide
agaaugugaacccgcuggu

SEQ ID NO: 198725 - RNA, 19 nt, Artificial Sequence
  Description of Artificial Sequence: Synthetic oligonucleotide
agaaagugagaaacuagcu

SEQ ID NO: 198726 - RNA, 19 nt, Artificial Sequence
  Description of Artificial Sequence: Synthetic oligonucleotide
ggaaucucucaucacuucc

SEQ ID NO: 198727 - RNA, 19 nt, Artificial Sequence
  Description of Artificial Sequence: Synthetic oligonucleotide
uacuagaaguggacacaag

SEQ ID NO: 198728 - RNA, 19 nt, Artificial Sequence
  Description of Artificial Sequence: Synthetic oligonucleotide
uucaugaguaggugucucu

SEQ ID NO: 198729 - RNA, 19 nt, Artificial Sequence
  Description of Artificial Sequence: Synthetic oligonucleotide
gucaaaacuaguagaggac

SEQ ID NO: 198730 - RNA, 19 nt, Artificial Sequence
  Description of Artificial Sequence: Synthetic oligonucleotide
uugugugcagucacuggcu

SEQ ID NO: 198731 - RNA, 19 nt, Artificial Sequence
  Description of Artificial Sequence: Synthetic oligonucleotide
uacaaucguuagaaggcuc

SEQ ID NO: 198732 - RNA, 19 nt, Artificial Sequence
  Description of Artificial Sequence: Synthetic oligonucleotide
uacuauccuggaagcgggg

SEQ ID NO: 198733 - RNA, 19 nt, Artificial Sequence
  Description of Artificial Sequence: Synthetic oligonucleotide
acuuucguuaucagaagca

SEQ ID NO: 198734 - RNA, 19 nt, Artificial Sequence
  Description of Artificial Sequence: Synthetic oligonucleotide
acuaaggaaugccuaguuu

SEQ ID NO: 198735 - RNA, 19 nt, Artificial Sequence
  Description of Artificial Sequence: Synthetic oligonucleotide
gagaaggcauaccgcuacg

SEQ ID NO: 198736 - RNA, 19 nt, Artificial Sequence
  Description of Artificial Sequence: Synthetic oligonucleotide
uauagguaucuuccuuuau

SEQ ID NO: 198737 - RNA, 19 nt, Artificial Sequence
  Description of Artificial Sequence: Synthetic oligonucleotide
uuuccuaacuuggcugaag

SEQ ID NO: 198738 - RNA, 19 nt, Artificial Sequence
  Description of Artificial Sequence: Synthetic oligonucleotide
agagaaugugaacccgcug

SEQ ID NO: 198739 - RNA, 19 nt, Artificial Sequence
  Description of Artificial Sequence: Synthetic oligonucleotide
cuggaagcggggaucuucc

SEQ ID NO: 198740 - RNA, 19 nt, Artificial Sequence
  Description of Artificial Sequence: Synthetic oligonucleotide
ugggcuauucaccuucuuu

SEQ ID NO: 198741 - RNA, 19 nt, Artificial Sequence
  Description of Artificial Sequence: Synthetic oligonucleotide
ucuuccgauucacuuucgu

SEQ ID NO: 198742 - RNA, 19 nt, Artificial Sequence
  Description of Artificial Sequence: Synthetic oligonucleotide
uccauucggaaucucucau

SEQ ID NO: 198743 - RNA, 19 nt, Artificial Sequence
  Description of Artificial Sequence: Synthetic oligonucleotide
ucggaaucucucaucacuu

SEQ ID NO: 198744 - RNA, 19 nt, Artificial Sequence
  Description of Artificial Sequence: Synthetic oligonucleotide
ugcaacccucguuccaggg

SEQ ID NO: 198745 - RNA, 19 nt, Artificial Sequence
  Description of Artificial Sequence: Synthetic oligonucleotide
acugacguccccagucucc

SEQ ID NO: 198746 - RNA, 19 nt, Artificial Sequence
  Description of Artificial Sequence: Synthetic oligonucleotide
uugcuaguaggguuguuua

SEQ ID NO: 198747 - RNA, 19 nt, Artificial Sequence
  Description of Artificial Sequence: Synthetic oligonucleotide
gcauguuuauccuuugcac

SEQ ID NO: 198748 - RNA, 19 nt, Artificial Sequence
  Description of Artificial Sequence: Synthetic oligonucleotide
cauuuccuaacuuggcuga

SEQ ID NO: 198749 - RNA, 19 nt, Artificial Sequence
  Description of Artificial Sequence: Synthetic oligonucleotide
ugagauucacccggggaca

SEQ ID NO: 198750 - RNA, 19 nt, Artificial Sequence
  Description of Artificial Sequence: Synthetic oligonucleotide
gauuaucuucccugagaca

SEQ ID NO: 198751 - RNA, 19 nt, Artificial Sequence
  Description of Artificial Sequence: Synthetic oligonucleotide
ggucauaauguacaauguc

SEQ ID NO: 198752 - RNA, 19 nt, Artificial Sequence
  Description of Artificial Sequence: Synthetic oligonucleotide
acagacuaucuucccacgu

SEQ ID NO: 198753 - RNA, 19 nt, Artificial Sequence
  Description of Artificial Sequence: Synthetic oligonucleotide
ucguuaucagaagcaaaga

SEQ ID NO: 198754 - RNA, 19 nt, Artificial Sequence
  Description of Artificial Sequence: Synthetic oligonucleotide
aguugauauucaaaacacu

SEQ ID NO: 198755 - RNA, 19 nt, Artificial Sequence
  Description of Artificial Sequence: Synthetic oligonucleotide
cacaaggagugauugagaa

SEQ ID NO: 198756 - RNA, 19 nt, Artificial Sequence
  Description of Artificial Sequence: Synthetic oligonucleotide
acugcaacccucguuccag

SEQ ID NO: 198757 - RNA, 19 nt, Artificial Sequence
  Description of Artificial Sequence: Synthetic oligonucleotide
aagcggggaucuuccugac

SEQ ID NO: 198758 - RNA, 19 nt, Artificial Sequence
  Description of Artificial Sequence: Synthetic oligonucleotide
caaggaacucugauguuca

SEQ ID NO: 198759 - RNA, 19 nt, Artificial Sequence
  Description of Artificial Sequence: Synthetic oligonucleotide
acaaucguuagaaggcucu

SEQ ID NO: 198760 - RNA, 19 nt, Artificial Sequence
  Description of Artificial Sequence: Synthetic oligonucleotide
ccaaaucagccaaagugag

SEQ ID NO: 198761 - RNA, 19 nt, Artificial Sequence
  Description of Artificial Sequence: Synthetic oligonucleotide
aaucguuagaaggcucuau

SEQ ID NO: 198762 - RNA, 19 nt, Artificial Sequence
  Description of Artificial Sequence: Synthetic oligonucleotide
agguuugcagcaucacuga

SEQ ID NO: 198763 - RNA, 19 nt, Artificial Sequence
  Description of Artificial Sequence: Synthetic oligonucleotide
agacuaucuucccacguuu

SEQ ID NO: 198764 - RNA, 19 nt, Artificial Sequence
  Description of Artificial Sequence: Synthetic oligonucleotide
uuugggcuauucaccuucu

SEQ ID NO: 198765 - RNA, 19 nt, Artificial Sequence
  Description of Artificial Sequence: Synthetic oligonucleotide
uguucgggcuucccaagaa

SEQ ID NO: 198766 - RNA, 19 nt, Artificial Sequence
  Description of Artificial Sequence: Synthetic oligonucleotide
gagacuacuuguucgggcu

SEQ ID NO: 198767 - RNA, 19 nt, Artificial Sequence
  Description of Artificial Sequence: Synthetic oligonucleotide
aucuagaguccauucggaa

SEQ ID NO: 198768 - RNA, 19 nt, Artificial Sequence
  Description of Artificial Sequence: Synthetic oligonucleotide
cuuguucgggcuucccaag

SEQ ID NO: 198769 - RNA, 19 nt, Artificial Sequence
  Description of Artificial Sequence: Synthetic oligonucleotide
uugcuuguaucagugcccu

SEQ ID NO: 198770 - RNA, 19 nt, Artificial Sequence
  Description of Artificial Sequence: Synthetic oligonucleotide
ccagauaauuucaaaguca

SEQ ID NO: 198771 - RNA, 19 nt, Artificial Sequence
  Description of Artificial Sequence: Synthetic oligonucleotide
cuacuucccacaccacacc

SEQ ID NO: 198772 - RNA, 19 nt, Artificial Sequence
  Description of Artificial Sequence: Synthetic oligonucleotide
ucccacaccacaccagaau

SEQ ID NO: 198773 - RNA, 19 nt, Artificial Sequence
  Description of Artificial Sequence: Synthetic oligonucleotide
gcuaguaggguuguuuaag

SEQ ID NO: 198774 - RNA, 19 nt, Artificial Sequence
  Description of Artificial Sequence: Synthetic oligonucleotide
uaguaggguuguuuaaguu

SEQ ID NO: 198775 - RNA, 19 nt, Artificial Sequence
  Description of Artificial Sequence: Synthetic oligonucleotide
cuuuaugucuuuagugucu

SEQ ID NO: 198776 - RNA, 19 nt, Artificial Sequence
  Description of Artificial Sequence: Synthetic oligonucleotide
ggagacuacuuguucgggc

SEQ ID NO: 198777 - RNA, 19 nt, Artificial Sequence
  Description of Artificial Sequence: Synthetic oligonucleotide
uccuaacuuggcugaagaa

SEQ ID NO: 198778 - RNA, 19 nt, Artificial Sequence
  Description of Artificial Sequence: Synthetic oligonucleotide
ugcuaguaggguuguuuaa

SEQ ID NO: 198779 - RNA, 19 nt, Artificial Sequence
  Description of Artificial Sequence: Synthetic oligonucleotide
uuagaaccacgaagucugu

SEQ ID NO: 198780 - RNA, 19 nt, Artificial Sequence
  Description of Artificial Sequence: Synthetic oligonucleotide
ucguuaucgucuuguuuuc

SEQ ID NO: 198781 - RNA, 19 nt, Artificial Sequence
  Description of Artificial Sequence: Synthetic oligonucleotide
ccacuugucagguuugcag

SEQ ID NO: 198782 - RNA, 19 nt, Artificial Sequence
  Description of Artificial Sequence: Synthetic oligonucleotide
ugguuucucaaaagaugua

SEQ ID NO: 198783 - RNA, 19 nt, Artificial Sequence
  Description of Artificial Sequence: Synthetic oligonucleotide
ggugucggaguacuagaag

SEQ ID NO: 198784 - RNA, 19 nt, Artificial Sequence
  Description of Artificial Sequence: Synthetic oligonucleotide
acacuuugcacaacauuca

SEQ ID NO: 198785 - RNA, 19 nt, Artificial Sequence
  Description of Artificial Sequence: Synthetic oligonucleotide
aguaggugucucuuccgau

SEQ ID NO: 198786 - RNA, 19 nt, Artificial Sequence
  Description of Artificial Sequence: Synthetic oligonucleotide
gugucggaguacuagaagu

SEQ ID NO: 198787 - RNA, 19 nt, Artificial Sequence
  Description of Artificial Sequence: Synthetic oligonucleotide
ugguucgauucuauaggua

SEQ ID NO: 198788 - RNA, 19 nt, Artificial Sequence
  Description of Artificial Sequence: Synthetic oligonucleotide
uaccaagauuuaaggacuu

SEQ ID NO: 198789 - RNA, 19 nt, Artificial Sequence
  Description of Artificial Sequence: Synthetic oligonucleotide
gugauugagaaggcauacc

SEQ ID NO: 198790 - RNA, 19 nt, Artificial Sequence
  Description of Artificial Sequence: Synthetic oligonucleotide
aacuuggcugaagaaugaa

SEQ ID NO: 198791 - RNA, 19 nt, Artificial Sequence
  Description of Artificial Sequence: Synthetic oligonucleotide
cugccaaggcggcuagucg

SEQ ID NO: 198792 - RNA, 19 nt, Artificial Sequence
  Description of Artificial Sequence: Synthetic oligonucleotide
uguccuuauuuuggaauau

SEQ ID NO: 198793 - RNA, 19 nt, Artificial Sequence
  Description of Artificial Sequence: Synthetic oligonucleotide
aggagacuacuuguucggg

SEQ ID NO: 198794 - RNA, 19 nt, Artificial Sequence
  Description of Artificial Sequence: Synthetic oligonucleotide
ugcccucaaacugagguuu

SEQ ID NO: 198795 - RNA, 19 nt, Artificial Sequence
  Description of Artificial Sequence: Synthetic oligonucleotide
ccgacaauccaaaaggaga

SEQ ID NO: 198796 - RNA, 19 nt, Artificial Sequence
  Description of Artificial Sequence: Synthetic oligonucleotide
cgugguuucucaaaagaug

SEQ ID NO: 198797 - RNA, 19 nt, Artificial Sequence
  Description of Artificial Sequence: Synthetic oligonucleotide
uucacccggggacaguuuu

SEQ ID NO: 198798 - RNA, 19 nt, Artificial Sequence
  Description of Artificial Sequence: Synthetic oligonucleotide
ccuuuaugucuuuaguguc

SEQ ID NO: 198799 - RNA, 19 nt, Artificial Sequence
  Description of Artificial Sequence: Synthetic oligonucleotide
gaaggcauaccgcuacgua

SEQ ID NO: 198800 - RNA, 19 nt, Artificial Sequence
  Description of Artificial Sequence: Synthetic oligonucleotide
caaaucagccaaagugaga

SEQ ID NO: 198801 - RNA, 19 nt, Artificial Sequence
  Description of Artificial Sequence: Synthetic oligonucleotide
cuuucaaaucuguagcgau

SEQ ID NO: 198802 - RNA, 19 nt, Artificial Sequence
  Description of Artificial Sequence: Synthetic oligonucleotide
gguucgauucuauagguau

SEQ ID NO: 198803 - RNA, 19 nt, Artificial Sequence
  Description of Artificial Sequence: Synthetic oligonucleotide
cugacagacuaucuuccca

SEQ ID NO: 198804 - RNA, 19 nt, Artificial Sequence
  Description of Artificial Sequence: Synthetic oligonucleotide
cugcuaauacuacuuccca

SEQ ID NO: 198805 - RNA, 19 nt, Artificial Sequence
  Description of Artificial Sequence: Synthetic oligonucleotide
ucauugcgauaauuucauc

SEQ ID NO: 198806 - RNA, 19 nt, Artificial Sequence
  Description of Artificial Sequence: Synthetic oligonucleotide
acuuuccuugucaaaacua

SEQ ID NO: 198807 - RNA, 19 nt, Artificial Sequence
  Description of Artificial Sequence: Synthetic oligonucleotide
caacccucguuccagggca

SEQ ID NO: 198808 - RNA, 19 nt, Artificial Sequence
  Description of Artificial Sequence: Synthetic oligonucleotide
cuuucguuaucagaagcaa

SEQ ID NO: 198809 - RNA, 19 nt, Artificial Sequence
  Description of Artificial Sequence: Synthetic oligonucleotide
cauaaauggcauggucaug

SEQ ID NO: 198810 - RNA, 19 nt, Artificial Sequence
  Description of Artificial Sequence: Synthetic oligonucleotide
aguggacacaaggagugau

SEQ ID NO: 198811 - RNA, 19 nt, Artificial Sequence
  Description of Artificial Sequence: Synthetic oligonucleotide
agauaauuucaaagucaga

SEQ ID NO: 198812 - RNA, 19 nt, Artificial Sequence
  Description of Artificial Sequence: Synthetic oligonucleotide
aaccuucugaugacugcca

SEQ ID NO: 198813 - RNA, 19 nt, Artificial Sequence
  Description of Artificial Sequence: Synthetic oligonucleotide
ccauuagcacacuuggauc

SEQ ID NO: 198814 - RNA, 19 nt, Artificial Sequence
  Description of Artificial Sequence: Synthetic oligonucleotide
gaugcguuacuaacagaaa

SEQ ID NO: 198815 - RNA, 19 nt, Artificial Sequence
  Description of Artificial Sequence: Synthetic oligonucleotide
agaaacuagcugugcuuuu

SEQ ID NO: 198816 - RNA, 19 nt, Artificial Sequence
  Description of Artificial Sequence: Synthetic oligonucleotide
agaaggcauaccgcuacgu

SEQ ID NO: 198817 - RNA, 19 nt, Artificial Sequence
  Description of Artificial Sequence: Synthetic oligonucleotide
guacuagaaguggacacaa

SEQ ID NO: 198818 - RNA, 19 nt, Artificial Sequence
  Description of Artificial Sequence: Synthetic oligonucleotide
agcucugcccucaaacuga

SEQ ID NO: 198819 - RNA, 19 nt, Artificial Sequence
  Description of Artificial Sequence: Synthetic oligonucleotide
cuaguaggguuguuuaagu

SEQ ID NO: 198820 - RNA, 19 nt, Artificial Sequence
  Description of Artificial Sequence: Synthetic oligonucleotide
gcuuuaaagugguuuccuc

SEQ ID NO: 198821 - RNA, 19 nt, Artificial Sequence
  Description of Artificial Sequence: Synthetic oligonucleotide
acuauccuggaagcgggga

SEQ ID NO: 198822 - RNA, 19 nt, Artificial Sequence
  Description of Artificial Sequence: Synthetic oligonucleotide
gaaugugaacccgcugguc

SEQ ID NO: 198823 - RNA, 19 nt, Artificial Sequence
  Description of Artificial Sequence: Synthetic oligonucleotide
aacugucucuuuggaggcu

SEQ ID NO: 198824 - RNA, 19 nt, Artificial Sequence
  Description of Artificial Sequence: Synthetic oligonucleotide
cugcacuucucuagcuuuc

SEQ ID NO: 198825 - RNA, 19 nt, Artificial Sequence
  Description of Artificial Sequence: Synthetic oligonucleotide
acucacacaugaugcguua

SEQ ID NO: 198826 - RNA, 19 nt, Artificial Sequence
  Description of Artificial Sequence: Synthetic oligonucleotide
acuuugcacaacauucaau

SEQ ID NO: 198827 - RNA, 19 nt, Artificial Sequence
  Description of Artificial Sequence: Synthetic oligonucleotide
uucuacuuucaggcagaug

SEQ ID NO: 198828 - RNA, 19 nt, Artificial Sequence
  Description of Artificial Sequence: Synthetic oligonucleotide
gauccuuugcuaguagggu

SEQ ID NO: 198829 - RNA, 19 nt, Artificial Sequence
  Description of Artificial Sequence: Synthetic oligonucleotide
cuuccgugguuucucaaaa

SEQ ID NO: 198830 - RNA, 19 nt, Artificial Sequence
  Description of Artificial Sequence: Synthetic oligonucleotide
cugcaacccucguuccagg

SEQ ID NO: 198831 - RNA, 19 nt, Artificial Sequence
  Description of Artificial Sequence: Synthetic oligonucleotide
ucuugcuuauaggcuguuc

SEQ ID NO: 198832 - RNA, 19 nt, Artificial Sequence
  Description of Artificial Sequence: Synthetic oligonucleotide
gucgcuucugguugucuuc

SEQ ID NO: 198833 - RNA, 19 nt, Artificial Sequence
  Description of Artificial Sequence: Synthetic oligonucleotide
ucgggcuucccaagaacuu

SEQ ID NO: 198834 - RNA, 19 nt, Artificial Sequence
  Description of Artificial Sequence: Synthetic oligonucleotide
augagacugcaaauucaug

SEQ ID NO: 198835 - RNA, 19 nt, Artificial Sequence
  Description of Artificial Sequence: Synthetic oligonucleotide
ugaucaggugucggaguac

SEQ ID NO: 198836 - RNA, 19 nt, Artificial Sequence
  Description of Artificial Sequence: Synthetic oligonucleotide
uucuuccgacaauccaaaa

SEQ ID NO: 198837 - RNA, 19 nt, Artificial Sequence
  Description of Artificial Sequence: Synthetic oligonucleotide
gccuauucccuugaaggcc

SEQ ID NO: 198838 - RNA, 19 nt, Artificial Sequence
  Description of Artificial Sequence: Synthetic oligonucleotide
cugugcuuuucugauuauc

SEQ ID NO: 198839 - RNA, 19 nt, Artificial Sequence
  Description of Artificial Sequence: Synthetic oligonucleotide
cccacguuucacugguucg

SEQ ID NO: 198840 - RNA, 19 nt, Artificial Sequence
  Description of Artificial Sequence: Synthetic oligonucleotide
acuucccacaccacaccag

SEQ ID NO: 198841 - RNA, 19 nt, Artificial Sequence
  Description of Artificial Sequence: Synthetic oligonucleotide
auacuacuucccacaccac

SEQ ID NO: 198842 - RNA, 19 nt, Artificial Sequence
  Description of Artificial Sequence: Synthetic oligonucleotide
gucacugacguuggaguca

SEQ ID NO: 198843 - RNA, 19 nt, Artificial Sequence
  Description of Artificial Sequence: Synthetic oligonucleotide
gcugaaugugguuugggcu

SEQ ID NO: 198844 - RNA, 19 nt, Artificial Sequence
  Description of Artificial Sequence: Synthetic oligonucleotide
cgauaauuucaucuguauc

SEQ ID NO: 198845 - RNA, 19 nt, Artificial Sequence
  Description of Artificial Sequence: Synthetic oligonucleotide
cucuaaaagagaggccaca

SEQ ID NO: 198846 - RNA, 19 nt, Artificial Sequence
  Description of Artificial Sequence: Synthetic oligonucleotide
cacuuuacuccaugaccca

SEQ ID NO: 198847 - RNA, 19 nt, Artificial Sequence
  Description of Artificial Sequence: Synthetic oligonucleotide
gcuauucaccuucuuugca

SEQ ID NO: 198848 - RNA, 19 nt, Artificial Sequence
  Description of Artificial Sequence: Synthetic oligonucleotide
cugguucgauucuauaggu

SEQ ID NO: 198849 - RNA, 19 nt, Artificial Sequence
  Description of Artificial Sequence: Synthetic oligonucleotide
cugaacuacuauccuggaa

SEQ ID NO: 198850 - RNA, 19 nt, Artificial Sequence
  Description of Artificial Sequence: Synthetic oligonucleotide
cgauucuauagguaucuuc

SEQ ID NO: 198851 - RNA, 19 nt, Artificial Sequence
  Description of Artificial Sequence: Synthetic oligonucleotide
agaguccauucggaaucuc

SEQ ID NO: 198852 - RNA, 19 nt, Artificial Sequence
  Description of Artificial Sequence: Synthetic oligonucleotide
cuaguagaggacacuacuu

SEQ ID NO: 198853 - RNA, 19 nt, Artificial Sequence
  Description of Artificial Sequence: Synthetic oligonucleotide
agacuacuuguucgggcuu

SEQ ID NO: 198854 - RNA, 19 nt, Artificial Sequence
  Description of Artificial Sequence: Synthetic oligonucleotide
cuguagcgauguuauaaua

SEQ ID NO: 198855 - RNA, 19 nt, Artificial Sequence
  Description of Artificial Sequence: Synthetic oligonucleotide
ccucuaaaagagaggccac

SEQ ID NO: 198856 - RNA, 19 nt, Artificial Sequence
  Description of Artificial Sequence: Synthetic oligonucleotide
guuucacugguucgauucu

SEQ ID NO: 198857 - RNA, 19 nt, Artificial Sequence
  Description of Artificial Sequence: Synthetic oligonucleotide
gacguccccagucuccucu

SEQ ID NO: 198858 - RNA, 19 nt, Artificial Sequence
  Description of Artificial Sequence: Synthetic oligonucleotide
acugacucuuuugcauaga

SEQ ID NO: 198859 - RNA, 19 nt, Artificial Sequence
  Description of Artificial Sequence: Synthetic oligonucleotide
uacgugucuugggacacuu

SEQ ID NO: 198860 - RNA, 19 nt, Artificial Sequence
  Description of Artificial Sequence: Synthetic oligonucleotide
gcaacccucguuccagggc

SEQ ID NO: 198861 - RNA, 19 nt, Artificial Sequence
  Description of Artificial Sequence: Synthetic oligonucleotide
cuggaauuuuggcuuuaaa

SEQ ID NO: 198862 - RNA, 19 nt, Artificial Sequence
  Description of Artificial Sequence: Synthetic oligonucleotide
agucuaucuugugacucuu

SEQ ID NO: 198863 - RNA, 19 nt, Artificial Sequence
  Description of Artificial Sequence: Synthetic oligonucleotide
aacccucguuccagggcag

SEQ ID NO: 198864 - RNA, 19 nt, Artificial Sequence
  Description of Artificial Sequence: Synthetic oligonucleotide
guccuaggagucuuggaau

SEQ ID NO: 198865 - RNA, 19 nt, Artificial Sequence
  Description of Artificial Sequence: Synthetic oligonucleotide
cuguaaguguccucuuccu

SEQ ID NO: 198866 - RNA, 19 nt, Artificial Sequence
  Description of Artificial Sequence: Synthetic oligonucleotide
ucgauucuauagguaucuu

SEQ ID NO: 198867 - RNA, 19 nt, Artificial Sequence
  Description of Artificial Sequence: Synthetic oligonucleotide
acguuucacugguucgauu

SEQ ID NO: 198868 - RNA, 19 nt, Artificial Sequence
  Description of Artificial Sequence: Synthetic oligonucleotide
caucaucagacaugcuacu

SEQ ID NO: 198869 - RNA, 19 nt, Artificial Sequence
  Description of Artificial Sequence: Synthetic oligonucleotide
cacugacguccccagucuc

SEQ ID NO: 198870 - RNA, 19 nt, Artificial Sequence
  Description of Artificial Sequence: Synthetic oligonucleotide
ccauucggaaucucucauc

SEQ ID NO: 198871 - RNA, 19 nt, Artificial Sequence
  Description of Artificial Sequence: Synthetic oligonucleotide
ggagugauugagaaggcau

SEQ ID NO: 198872 - RNA, 19 nt, Artificial Sequence
  Description of Artificial Sequence: Synthetic oligonucleotide
gcuuauaggcuguucuggu

SEQ ID NO: 198873 - RNA, 19 nt, Artificial Sequence
  Description of Artificial Sequence: Synthetic oligonucleotide
cuuauaggcuguucugguu

SEQ ID NO: 198874 - RNA, 19 nt, Artificial Sequence
  Description of Artificial Sequence: Synthetic oligonucleotide
cucguuccagggcaggucu

SEQ ID NO: 198875 - RNA, 19 nt, Artificial Sequence
  Description of Artificial Sequence: Synthetic oligonucleotide
ugaacccgcuggucugcuc

SEQ ID NO: 198876 - RNA, 19 nt, Artificial Sequence
  Description of Artificial Sequence: Synthetic oligonucleotide
cuuccgauucacuuucguu

SEQ ID NO: 198877 - RNA, 19 nt, Artificial Sequence
  Description of Artificial Sequence: Synthetic oligonucleotide
caggucauaggaaguccua

SEQ ID NO: 198878 - RNA, 19 nt, Artificial Sequence
  Description of Artificial Sequence: Synthetic oligonucleotide
auacgugucuugggacacu

SEQ ID NO: 198879 - RNA, 19 nt, Artificial Sequence
  Description of Artificial Sequence: Synthetic oligonucleotide
gcuaauuugcuuucaccuu

SEQ ID NO: 198880 - RNA, 19 nt, Artificial Sequence
  Description of Artificial Sequence: Synthetic oligonucleotide
cuuccgucuugcuuuacuu

SEQ ID NO: 198881 - RNA, 19 nt, Artificial Sequence
  Description of Artificial Sequence: Synthetic oligonucleotide
cugucacagucuaucuugu

SEQ ID NO: 198882 - RNA, 19 nt, Artificial Sequence
  Description of Artificial Sequence: Synthetic oligonucleotide
caacgcacugugaaccagu

SEQ ID NO: 198883 - RNA, 19 nt, Artificial Sequence
  Description of Artificial Sequence: Synthetic oligonucleotide
gcgauaauuucaucuguau

SEQ ID NO: 198884 - RNA, 19 nt, Artificial Sequence
  Description of Artificial Sequence: Synthetic oligonucleotide
cacugcaacccucguucca

SEQ ID NO: 198885 - RNA, 19 nt, Artificial Sequence
  Description of Artificial Sequence: Synthetic oligonucleotide
auaccgcuacguaggggcu

SEQ ID NO: 198886 - RNA, 19 nt, Artificial Sequence
  Description of Artificial Sequence: Synthetic oligonucleotide
gcauaccgcuacguagggg

SEQ ID NO: 198887 - RNA, 19 nt, Artificial Sequence
  Description of Artificial Sequence: Synthetic oligonucleotide
acccucguuccagggcagg

SEQ ID NO: 198888 - RNA, 19 nt, Artificial Sequence
  Description of Artificial Sequence: Synthetic oligonucleotide
aucagacaugcuacuuuua

SEQ ID NO: 198889 - RNA, 19 nt, Artificial Sequence
  Description of Artificial Sequence: Synthetic oligonucleotide
agauucacccggggacagu

SEQ ID NO: 198890 - RNA, 19 nt, Artificial Sequence
  Description of Artificial Sequence: Synthetic oligonucleotide
acgcacugugaaccaguuu

SEQ ID NO: 198891 - RNA, 19 nt, Artificial Sequence
  Description of Artificial Sequence: Synthetic oligonucleotide
cagacuaucuucccacguu

SEQ ID NO: 198892 - RNA, 19 nt, Artificial Sequence
  Description of Artificial Sequence: Synthetic oligonucleotide
uccaugacccagggcugau

SEQ ID NO: 198893 - RNA, 19 nt, Artificial Sequence
  Description of Artificial Sequence: Synthetic oligonucleotide
caccuuccgugguuucuca

SEQ ID NO: 198894 - RNA, 19 nt, Artificial Sequence
  Description of Artificial Sequence: Synthetic oligonucleotide
cacccggggacaguuuuca

SEQ ID NO: 198895 - RNA, 19 nt, Artificial Sequence
  Description of Artificial Sequence: Synthetic oligonucleotide
ugacguccccagucuccuc

SEQ ID NO: 198896 - RNA, 19 nt, Artificial Sequence
  Description of Artificial Sequence: Synthetic oligonucleotide
ccuaacuuggcugaagaau

SEQ ID NO: 198897 - RNA, 19 nt, Artificial Sequence
  Description of Artificial Sequence: Synthetic oligonucleotide
ccuauucccuugaaggccu

SEQ ID NO: 198898 - RNA, 19 nt, Artificial Sequence
  Description of Artificial Sequence: Synthetic oligonucleotide
uaccgcuacguaggggcuu

SEQ ID NO: 198899 - RNA, 19 nt, Artificial Sequence
  Description of Artificial Sequence: Synthetic oligonucleotide
acacuacuucauggcucug

SEQ ID NO: 198900 - RNA, 19 nt, Artificial Sequence
  Description of Artificial Sequence: Synthetic oligonucleotide
caaucguuagaaggcucua

SEQ ID NO: 198901 - RNA, 19 nt, Artificial Sequence
  Description of Artificial Sequence: Synthetic oligonucleotide
ggcauggucaugcuuuguu

SEQ ID NO: 198902 - RNA, 19 nt, Artificial Sequence
  Description of Artificial Sequence: Synthetic oligonucleotide
accgcuacguaggggcuuu

SEQ ID NO: 198903 - RNA, 19 nt, Artificial Sequence
  Description of Artificial Sequence: Synthetic oligonucleotide
cgcacugugaaccaguuuu

SEQ ID NO: 198904 - RNA, 19 nt, Artificial Sequence
  Description of Artificial Sequence: Synthetic oligonucleotide
agguuggcaugaagucagu

SEQ ID NO: 198905 - RNA, 19 nt, Artificial Sequence
  Description of Artificial Sequence: Synthetic oligonucleotide
ccacguuucacugguucga

SEQ ID NO: 198906 - RNA, 19 nt, Artificial Sequence
  Description of Artificial Sequence: Synthetic oligonucleotide
gcuagucgcuucugguugu

SEQ ID NO: 198907 - RNA, 19 nt, Artificial Sequence
  Description of Artificial Sequence: Synthetic oligonucleotide
cugacguccccagucuccu

SEQ ID NO: 198908 - RNA, 19 nt, Artificial Sequence
  Description of Artificial Sequence: Synthetic oligonucleotide
ccaagauuuaaggacuuuu

SEQ ID NO: 198909 - RNA, 19 nt, Artificial Sequence
  Description of Artificial Sequence: Synthetic oligonucleotide
ccgugguuucucaaaagau

SEQ ID NO: 198910 - RNA, 19 nt, Artificial Sequence
  Description of Artificial Sequence: Synthetic oligonucleotide
gggcugauucuuguugucu

SEQ ID NO: 198911 - RNA, 19 nt, Artificial Sequence
  Description of Artificial Sequence: Synthetic oligonucleotide
auucacccggggacaguuu

SEQ ID NO: 198912 - RNA, 19 nt, Artificial Sequence
  Description of Artificial Sequence: Synthetic oligonucleotide
ccgauucacuuucguuauc

SEQ ID NO: 198913 - RNA, 19 nt, Artificial Sequence
  Description of Artificial Sequence: Synthetic oligonucleotide
gcuacguaggggcuuucuu

SEQ ID NO: 198914 - RNA, 19 nt, Artificial Sequence
  Description of Artificial Sequence: Synthetic oligonucleotide
ccucguuccagggcagguc

SEQ ID NO: 198915 - RNA, 19 nt, Artificial Sequence
  Description of Artificial Sequence: Synthetic oligonucleotide
cacguuucacugguucgau

SEQ ID NO: 198916 - RNA, 19 nt, Artificial Sequence
  Description of Artificial Sequence: Synthetic oligonucleotide
cguuagaaggcucuaucuu

SEQ ID NO: 198917 - RNA, 19 nt, Artificial Sequence
  Description of Artificial Sequence: Synthetic oligonucleotide
gucuaucuugugacucuuu

SEQ ID NO: 198918 - RNA, 19 nt, Artificial Sequence
  Description of Artificial Sequence: Synthetic oligonucleotide
cguaggggcuuucuugugu

SEQ ID NO: 198919 - RNA, 19 nt, Artificial Sequence
  Description of Artificial Sequence: Synthetic oligonucleotide
ggccuggaauuuuggcuuu

SEQ ID NO: 198920 - RNA, 19 nt, Artificial Sequence
  Description of Artificial Sequence: Synthetic oligonucleotide
gcccucaaacugagguuua

SEQ ID NO: 198921 - RNA, 19 nt, Artificial Sequence
  Description of Artificial Sequence: Synthetic oligonucleotide
cguuaucgucuuguuuucu

SEQ ID NO: 198922 - RNA, 19 nt, Artificial Sequence
  Description of Artificial Sequence: Synthetic oligonucleotide
cugccccacuugucagguu

SEQ ID NO: 198923 - RNA, 19 nt, Artificial Sequence
  Description of Artificial Sequence: Synthetic oligonucleotide
ccgcuacguaggggcuuuc

SEQ ID NO: 198924 - RNA, 19 nt, Artificial Sequence
  Description of Artificial Sequence: Synthetic oligonucleotide
cgcuacguaggggcuuucu

SEQ ID NO: 198925 - RNA, 19 nt, Artificial Sequence
  Description of Artificial Sequence: Synthetic oligonucleotide
aauauuaagagacauccug

SEQ ID NO: 198926 - RNA, 19 nt, Artificial Sequence
  Description of Artificial Sequence: Synthetic oligonucleotide
auugcguuguuucaaaucc

SEQ ID NO: 198927 - RNA, 19 nt, Artificial Sequence
  Description of Artificial Sequence: Synthetic oligonucleotide
uguuuaaugagacccacag

SEQ ID NO: 198928 - RNA, 19 nt, Artificial Sequence
  Description of Artificial Sequence: Synthetic oligonucleotide
uguaaugccaagaauguug

SEQ ID NO: 198929 - RNA, 19 nt, Artificial Sequence
  Description of Artificial Sequence: Synthetic oligonucleotide
ugugcaguauuucuaaggg

SEQ ID NO: 198930 - RNA, 19 nt, Artificial Sequence
  Description of Artificial Sequence: Synthetic oligonucleotide
agugaacggaaguaaagcc

SEQ ID NO: 198931 - RNA, 19 nt, Artificial Sequence
  Description of Artificial Sequence: Synthetic oligonucleotide
uguuguuacuuccacagag

SEQ ID NO: 198932 - RNA, 19 nt, Artificial Sequence
  Description of Artificial Sequence: Synthetic oligonucleotide
aauccaaugggacauaaaa

SEQ ID NO: 198933 - RNA, 19 nt, Artificial Sequence
  Description of Artificial Sequence: Synthetic oligonucleotide
uccaaugggacauaaaacu

SEQ ID NO: 198934 - RNA, 19 nt, Artificial Sequence
  Description of Artificial Sequence: Synthetic oligonucleotide
aagguauuacacuucagca

SEQ ID NO: 198935 - RNA, 19 nt, Artificial Sequence
  Description of Artificial Sequence: Synthetic oligonucleotide
cuuacuguuaccagaagag

SEQ ID NO: 198936 - RNA, 19 nt, Artificial Sequence
  Description of Artificial Sequence: Synthetic oligonucleotide
auauuaagggcagaaaagg

SEQ ID NO: 198937 - RNA, 19 nt, Artificial Sequence
  Description of Artificial Sequence: Synthetic oligonucleotide
caaauccuuaaauacgugg

SEQ ID NO: 198938 - RNA, 19 nt, Artificial Sequence
  Description of Artificial Sequence: Synthetic oligonucleotide
aaaguugucggcuguccac

SEQ ID NO: 198939 - RNA, 19 nt, Artificial Sequence
  Description of Artificial Sequence: Synthetic oligonucleotide
aaucacuaugcucucagca

SEQ ID NO: 198940 - RNA, 19 nt, Artificial Sequence
  Description of Artificial Sequence: Synthetic oligonucleotide
auauuaagagacauccugc

SEQ ID NO: 198941 - RNA, 19 nt, Artificial Sequence
  Description of Artificial Sequence: Synthetic oligonucleotide
caggaauugaacuaacagc

SEQ ID NO: 198942 - RNA, 19 nt, Artificial Sequence
  Description of Artificial Sequence: Synthetic oligonucleotide
uggaucggggcucaggucg

SEQ ID NO: 198943 - RNA, 19 nt, Artificial Sequence
  Description of Artificial Sequence: Synthetic oligonucleotide
ugaaacuaccugcugcagg

SEQ ID NO: 198944 - RNA, 19 nt, Artificial Sequence
  Description of Artificial Sequence: Synthetic oligonucleotide
acauagaaaguauuacaag

SEQ ID NO: 198945 - RNA, 19 nt, Artificial Sequence
  Description of Artificial Sequence: Synthetic oligonucleotide
agggaaguuuccuugcagc

SEQ ID NO: 198946 - RNA, 19 nt, Artificial Sequence
  Description of Artificial Sequence: Synthetic oligonucleotide
uugcgcuggacuaacaugc

SEQ ID NO: 198947 - RNA, 19 nt, Artificial Sequence
  Description of Artificial Sequence: Synthetic oligonucleotide
gaagucuccgcucagcagc

SEQ ID NO: 198948 - RNA, 19 nt, Artificial Sequence
  Description of Artificial Sequence: Synthetic oligonucleotide
uauuaagagacauccugca

SEQ ID NO: 198949 - RNA, 19 nt, Artificial Sequence
  Description of Artificial Sequence: Synthetic oligonucleotide
aauccguccuucuaagaug

SEQ ID NO: 198950 - RNA, 19 nt, Artificial Sequence
  Description of Artificial Sequence: Synthetic oligonucleotide
auauguuuagcauagccua

SEQ ID NO: 198951 - RNA, 19 nt, Artificial Sequence
  Description of Artificial Sequence: Synthetic oligonucleotide
augugcaguauuucuaagg

SEQ ID NO: 198952 - RNA, 19 nt, Artificial Sequence
  Description of Artificial Sequence: Synthetic oligonucleotide
auacauaagguauuacacu

SEQ ID NO: 198953 - RNA, 19 nt, Artificial Sequence
  Description of Artificial Sequence: Synthetic oligonucleotide
aauuaguucuuuauacaug

SEQ ID NO: 198954 - RNA, 19 nt, Artificial Sequence
  Description of Artificial Sequence: Synthetic oligonucleotide
guugcaacugcaaaccugg

SEQ ID NO: 198955 - RNA, 19 nt, Artificial Sequence
  Description of Artificial Sequence: Synthetic oligonucleotide
ugaauuugaugagccaugg

SEQ ID NO: 198956 - RNA, 19 nt, Artificial Sequence
  Description of Artificial Sequence: Synthetic oligonucleotide
aaauugaaacuaccugcug

SEQ ID NO: 198957 - RNA, 19 nt, Artificial Sequence
  Description of Artificial Sequence: Synthetic oligonucleotide
aggcuagccauagauaacc

SEQ ID NO: 198958 - RNA, 19 nt, Artificial Sequence
  Description of Artificial Sequence: Synthetic oligonucleotide
uucaagaaccgcuuccgag

SEQ ID NO: 198959 - RNA, 19 nt, Artificial Sequence
  Description of Artificial Sequence: Synthetic oligonucleotide
auugaaacuaccugcugca

SEQ ID NO: 198960 - RNA, 19 nt, Artificial Sequence
  Description of Artificial Sequence: Synthetic oligonucleotide
aagguaugcaugccauggg

SEQ ID NO: 198961 - RNA, 19 nt, Artificial Sequence
  Description of Artificial Sequence: Synthetic oligonucleotide
aauaguucuugugccgacg

SEQ ID NO: 198962 - RNA, 19 nt, Artificial Sequence
  Description of Artificial Sequence: Synthetic oligonucleotide
aaacuauguaaccuaugau

SEQ ID NO: 198963 - RNA, 19 nt, Artificial Sequence
  Description of Artificial Sequence: Synthetic oligonucleotide
cacaaggugauaugggacc

SEQ ID NO: 198964 - RNA, 19 nt, Artificial Sequence
  Description of Artificial Sequence: Synthetic oligonucleotide
caugccuagaguucaaaug

SEQ ID NO: 198965 - RNA, 19 nt, Artificial Sequence
  Description of Artificial Sequence: Synthetic oligonucleotide
uuaaauacguggagaauuu

SEQ ID NO: 198966 - RNA, 19 nt, Artificial Sequence
  Description of Artificial Sequence: Synthetic oligonucleotide
uaaccuaugauugcguugu

SEQ ID NO: 198967 - RNA, 19 nt, Artificial Sequence
  Description of Artificial Sequence: Synthetic oligonucleotide
acuuuuguucaagaaccgc

SEQ ID NO: 198968 - RNA, 19 nt, Artificial Sequence
  Description of Artificial Sequence: Synthetic oligonucleotide
gcuuaugugaugcaggagc

SEQ ID NO: 198969 - RNA, 19 nt, Artificial Sequence
  Description of Artificial Sequence: Synthetic oligonucleotide
caagguaugcaugccaugg

SEQ ID NO: 198970 - RNA, 19 nt, Artificial Sequence
  Description of Artificial Sequence: Synthetic oligonucleotide
ugggacauaaaacuaugua

SEQ ID NO: 198971 - RNA, 19 nt, Artificial Sequence
  Description of Artificial Sequence: Synthetic oligonucleotide
uguccuuacuguuaccaga

SEQ ID NO: 198972 - RNA, 19 nt, Artificial Sequence
  Description of Artificial Sequence: Synthetic oligonucleotide
uccacacacuauuaagacc

SEQ ID NO: 198973 - RNA, 19 nt, Artificial Sequence
  Description of Artificial Sequence: Synthetic oligonucleotide
acaugagcuguccuuacug

SEQ ID NO: 198974 - RNA, 19 nt, Artificial Sequence
  Description of Artificial Sequence: Synthetic oligonucleotide
cacauagaaaguauuacaa

SEQ ID NO: 198975 - RNA, 19 nt, Artificial Sequence
  Description of Artificial Sequence: Synthetic oligonucleotide
uugaauccguccuucuaag

SEQ ID NO: 198976 - RNA, 19 nt, Artificial Sequence
  Description of Artificial Sequence: Synthetic oligonucleotide
agccuaacaggguugacca

SEQ ID NO: 198977 - RNA, 19 nt, Artificial Sequence
  Description of Artificial Sequence: Synthetic oligonucleotide
gauugcguuguuucaaauc

SEQ ID NO: 198978 - RNA, 19 nt, Artificial Sequence
  Description of Artificial Sequence: Synthetic oligonucleotide
uaaaguugucggcugucca

SEQ ID NO: 198979 - RNA, 19 nt, Artificial Sequence
  Description of Artificial Sequence: Synthetic oligonucleotide
agagagugagcuccaugac

SEQ ID NO: 198980 - RNA, 19 nt, Artificial Sequence
  Description of Artificial Sequence: Synthetic oligonucleotide
ccauauauguuuagcauag

SEQ ID NO: 198981 - RNA, 19 nt, Artificial Sequence
  Description of Artificial Sequence: Synthetic oligonucleotide
agguauuacacuucagcaa

SEQ ID NO: 198982 - RNA, 19 nt, Artificial Sequence
  Description of Artificial Sequence: Synthetic oligonucleotide
cauggcauuuagcugggag

SEQ ID NO: 198983 - RNA, 19 nt, Artificial Sequence
  Description of Artificial Sequence: Synthetic oligonucleotide
agguacuugaauccguccu

SEQ ID NO: 198984 - RNA, 19 nt, Artificial Sequence
  Description of Artificial Sequence: Synthetic oligonucleotide
aacggaaguaaagccagcu

SEQ ID NO: 198985 - RNA, 19 nt, Artificial Sequence
  Description of Artificial Sequence: Synthetic oligonucleotide
auguuuagcauagccuaac

SEQ ID NO: 198986 - RNA, 19 nt, Artificial Sequence
  Description of Artificial Sequence: Synthetic oligonucleotide
caagaauguugguagugug

SEQ ID NO: 198987 - RNA, 19 nt, Artificial Sequence
  Description of Artificial Sequence: Synthetic oligonucleotide
aauccgggacccaucaaag

SEQ ID NO: 198988 - RNA, 19 nt, Artificial Sequence
  Description of Artificial Sequence: Synthetic oligonucleotide
auuaaaguugucggcuguc

SEQ ID NO: 198989 - RNA, 19 nt, Artificial Sequence
  Description of Artificial Sequence: Synthetic oligonucleotide
agcagacaacugccaaucc

SEQ ID NO: 198990 - RNA, 19 nt, Artificial Sequence
  Description of Artificial Sequence: Synthetic oligonucleotide
uauuucuaaggggaagaga

SEQ ID NO: 198991 - RNA, 19 nt, Artificial Sequence
  Description of Artificial Sequence: Synthetic oligonucleotide
aucacuaugcucucagcaa

SEQ ID NO: 198992 - RNA, 19 nt, Artificial Sequence
  Description of Artificial Sequence: Synthetic oligonucleotide
uugguagugugcaucacuu

SEQ ID NO: 198993 - RNA, 19 nt, Artificial Sequence
  Description of Artificial Sequence: Synthetic oligonucleotide
gggacauaaaacuauguaa

SEQ ID NO: 198994 - RNA, 19 nt, Artificial Sequence
  Description of Artificial Sequence: Synthetic oligonucleotide
gcaaauaguucuugugccg

SEQ ID NO: 198995 - RNA, 19 nt, Artificial Sequence
  Description of Artificial Sequence: Synthetic oligonucleotide
accuauccaaggaucaaac

SEQ ID NO: 198996 - RNA, 19 nt, Artificial Sequence
  Description of Artificial Sequence: Synthetic oligonucleotide
agugguacacgcuccgucu

SEQ ID NO: 198997 - RNA, 19 nt, Artificial Sequence
  Description of Artificial Sequence: Synthetic oligonucleotide
acccauauauguuuagcau

SEQ ID NO: 198998 - RNA, 19 nt, Artificial Sequence
  Description of Artificial Sequence: Synthetic oligonucleotide
cacgcaaauaguucuugug

SEQ ID NO: 198999 - RNA, 19 nt, Artificial Sequence
  Description of Artificial Sequence: Synthetic oligonucleotide
cauaccuauccaaggauca

SEQ ID NO: 199000 - RNA, 19 nt, Artificial Sequence
  Description of Artificial Sequence: Synthetic oligonucleotide
cuugcgcuggacuaacaug

SEQ ID NO: 199001 - RNA, 19 nt, Artificial Sequence
  Description of Artificial Sequence: Synthetic oligonucleotide
cuuaugugaugcaggagca

SEQ ID NO: 199002 - RNA, 19 nt, Artificial Sequence
  Description of Artificial Sequence: Synthetic oligonucleotide
uaaauacguggagaauuug

SEQ ID NO: 199003 - RNA, 19 nt, Artificial Sequence
  Description of Artificial Sequence: Synthetic oligonucleotide
uaccacacgcaaauaguuc

SEQ ID NO: 199004 - RNA, 19 nt, Artificial Sequence
  Description of Artificial Sequence: Synthetic oligonucleotide
aggaggucauccuugcgcu

SEQ ID NO: 199005 - RNA, 19 nt, Artificial Sequence
  Description of Artificial Sequence: Synthetic oligonucleotide
agguaugcaugccaugggu

SEQ ID NO: 199006 - RNA, 19 nt, Artificial Sequence
  Description of Artificial Sequence: Synthetic oligonucleotide
agcauagccuaacaggguu

SEQ ID NO: 199007 - RNA, 19 nt, Artificial Sequence
  Description of Artificial Sequence: Synthetic oligonucleotide
uucccaaaaggacuaccau

SEQ ID NO: 199008 - RNA, 19 nt, Artificial Sequence
  Description of Artificial Sequence: Synthetic oligonucleotide
ucaugccuagaguucaaau

SEQ ID NO: 199009 - RNA, 19 nt, Artificial Sequence
  Description of Artificial Sequence: Synthetic oligonucleotide
ccuaugauugcguuguuuc

SEQ ID NO: 199010 - RNA, 19 nt, Artificial Sequence
  Description of Artificial Sequence: Synthetic oligonucleotide
caaaccggucuuugcagag

SEQ ID NO: 199011 - RNA, 19 nt, Artificial Sequence
  Description of Artificial Sequence: Synthetic oligonucleotide
aaaaccgggacaggccucu

SEQ ID NO: 199012 - RNA, 19 nt, Artificial Sequence
  Description of Artificial Sequence: Synthetic oligonucleotide
cuaacagcaguucaaggua

SEQ ID NO: 199013 - RNA, 19 nt, Artificial Sequence
  Description of Artificial Sequence: Synthetic oligonucleotide
aaguugucggcuguccaca

SEQ ID NO: 199014 - RNA, 19 nt, Artificial Sequence
  Description of Artificial Sequence: Synthetic oligonucleotide
aguugucggcuguccacac

SEQ ID NO: 199015 - RNA, 19 nt, Artificial Sequence
  Description of Artificial Sequence: Synthetic oligonucleotide
ugaauccguccuucuaaga

SEQ ID NO: 199016 - RNA, 19 nt, Artificial Sequence
  Description of Artificial Sequence: Synthetic oligonucleotide
uguuaccagaagagacucu

SEQ ID NO: 199017 - RNA, 19 nt, Artificial Sequence
  Description of Artificial Sequence: Synthetic oligonucleotide
aguugcaacugcaaaccug

SEQ ID NO: 199018 - RNA, 19 nt, Artificial Sequence
  Description of Artificial Sequence: Synthetic oligonucleotide
caaguaacgaagcugcaua

SEQ ID NO: 199019 - RNA, 19 nt, Artificial Sequence
  Description of Artificial Sequence: Synthetic oligonucleotide
aaccggucuuugcagaguu

SEQ ID NO: 199020 - RNA, 19 nt, Artificial Sequence
  Description of Artificial Sequence: Synthetic oligonucleotide
cuaacaugcgcugucucuc

SEQ ID NO: 199021 - RNA, 19 nt, Artificial Sequence
  Description of Artificial Sequence: Synthetic oligonucleotide
uggcacgacuaccaucagc

SEQ ID NO: 199022 - RNA, 19 nt, Artificial Sequence
  Description of Artificial Sequence: Synthetic oligonucleotide
uagcauagccuaacagggu

SEQ ID NO: 199023 - RNA, 19 nt, Artificial Sequence
  Description of Artificial Sequence: Synthetic oligonucleotide
gugaacggaaguaaagcca

SEQ ID NO: 199024 - RNA, 19 nt, Artificial Sequence
  Description of Artificial Sequence: Synthetic oligonucleotide
gaauccguccuucuaagau

SEQ ID NO: 199025 - RNA, 19 nt, Artificial Sequence
  Description of Artificial Sequence: Synthetic oligonucleotide
aggaucaaacccauauaug

SEQ ID NO: 199026 - RNA, 19 nt, Artificial Sequence
  Description of Artificial Sequence: Synthetic oligonucleotide
uaacaugcgcugucucuca

SEQ ID NO: 199027 - RNA, 19 nt, Artificial Sequence
  Description of Artificial Sequence: Synthetic oligonucleotide
aguccagucaacaccagaa

SEQ ID NO: 199028 - RNA, 19 nt, Artificial Sequence
  Description of Artificial Sequence: Synthetic oligonucleotide
uuuaagcggggccugccuu

SEQ ID NO: 199029 - RNA, 19 nt, Artificial Sequence
  Description of Artificial Sequence: Synthetic oligonucleotide
augauugcguuguuucaaa

SEQ ID NO: 199030 - RNA, 19 nt, Artificial Sequence
  Description of Artificial Sequence: Synthetic oligonucleotide
agauugcacagucaucauu

SEQ ID NO: 199031 - RNA, 19 nt, Artificial Sequence
  Description of Artificial Sequence: Synthetic oligonucleotide
cuaugauugcguuguuuca

SEQ ID NO: 199032 - RNA, 19 nt, Artificial Sequence
  Description of Artificial Sequence: Synthetic oligonucleotide
cuacacaggaauugaacua

SEQ ID NO: 199033 - RNA, 19 nt, Artificial Sequence
  Description of Artificial Sequence: Synthetic oligonucleotide
gugauuguguugguuuaag

SEQ ID NO: 199034 - RNA, 19 nt, Artificial Sequence
  Description of Artificial Sequence: Synthetic oligonucleotide
ugagguccagugguacacg

SEQ ID NO: 199035 - RNA, 19 nt, Artificial Sequence
  Description of Artificial Sequence: Synthetic oligonucleotide
gguauuacacuucagcaau

SEQ ID NO: 199036 - RNA, 19 nt, Artificial Sequence
  Description of Artificial Sequence: Synthetic oligonucleotide
cagcaauguccccuaaaac

SEQ ID NO: 199037 - RNA, 19 nt, Artificial Sequence
  Description of Artificial Sequence: Synthetic oligonucleotide
cagagcgugucaucuggag

SEQ ID NO: 199038 - RNA, 19 nt, Artificial Sequence
  Description of Artificial Sequence: Synthetic oligonucleotide
ugauugcguuguuucaaau

SEQ ID NO: 199039 - RNA, 19 nt, Artificial Sequence
  Description of Artificial Sequence: Synthetic oligonucleotide
caauguccccuaaaacauc

SEQ ID NO: 199040 - RNA, 19 nt, Artificial Sequence
  Description of Artificial Sequence: Synthetic oligonucleotide
cgcaaauaguucuugugcc

SEQ ID NO: 199041 - RNA, 19 nt, Artificial Sequence
  Description of Artificial Sequence: Synthetic oligonucleotide
gagcgugucaucuggagau

SEQ ID NO: 199042 - RNA, 19 nt, Artificial Sequence
  Description of Artificial Sequence: Synthetic oligonucleotide
aacaaguaacgaagcugca

SEQ ID NO: 199043 - RNA, 19 nt, Artificial Sequence
  Description of Artificial Sequence: Synthetic oligonucleotide
ugguacacgcuccgucuga

SEQ ID NO: 199044 - RNA, 19 nt, Artificial Sequence
  Description of Artificial Sequence: Synthetic oligonucleotide
uagguucccuuuccuuccc

SEQ ID NO: 199045 - RNA, 19 nt, Artificial Sequence
  Description of Artificial Sequence: Synthetic oligonucleotide
cacaggaauugaacuaaca

SEQ ID NO: 199046 - RNA, 19 nt, Artificial Sequence
  Description of Artificial Sequence: Synthetic oligonucleotide
uaacagggucagaggacgu

SEQ ID NO: 199047 - RNA, 19 nt, Artificial Sequence
  Description of Artificial Sequence: Synthetic oligonucleotide
auguuggacaagagguguc

SEQ ID NO: 199048 - RNA, 19 nt, Artificial Sequence
  Description of Artificial Sequence: Synthetic oligonucleotide
gacuaacaugcgcugucuc

SEQ ID NO: 199049 - RNA, 19 nt, Artificial Sequence
  Description of Artificial Sequence: Synthetic oligonucleotide
ugccaagaauguugguagu

SEQ ID NO: 199050 - RNA, 19 nt, Artificial Sequence
  Description of Artificial Sequence: Synthetic oligonucleotide
aaaccggucuuugcagagu

SEQ ID NO: 199051 - RNA, 19 nt, Artificial Sequence
  Description of Artificial Sequence: Synthetic oligonucleotide
agcaggcaaaaccgggaca

SEQ ID NO: 199052 - RNA, 19 nt, Artificial Sequence
  Description of Artificial Sequence: Synthetic oligonucleotide
gaaagauacauaagguauu

SEQ ID NO: 199053 - RNA, 19 nt, Artificial Sequence
  Description of Artificial Sequence: Synthetic oligonucleotide
ccacauagaaaguauuaca

SEQ ID NO: 199054 - RNA, 19 nt, Artificial Sequence
  Description of Artificial Sequence: Synthetic oligonucleotide
aacaugcgcugucucucau

SEQ ID NO: 199055 - RNA, 19 nt, Artificial Sequence
  Description of Artificial Sequence: Synthetic oligonucleotide
caggcuagccauagauaac

SEQ ID NO: 199056 - RNA, 19 nt, Artificial Sequence
  Description of Artificial Sequence: Synthetic oligonucleotide
cagcucgcaauccgggacc

SEQ ID NO: 199057 - RNA, 19 nt, Artificial Sequence
  Description of Artificial Sequence: Synthetic oligonucleotide
gcauuuagcugggaguugc

SEQ ID NO: 199058 - RNA, 19 nt, Artificial Sequence
  Description of Artificial Sequence: Synthetic oligonucleotide
caaugggacauaaaacuau

SEQ ID NO: 199059 - RNA, 19 nt, Artificial Sequence
  Description of Artificial Sequence: Synthetic oligonucleotide
aggcccauaccuauccaag

SEQ ID NO: 199060 - RNA, 19 nt, Artificial Sequence
  Description of Artificial Sequence: Synthetic oligonucleotide
ccuggcacgacuaccauca

SEQ ID NO: 199061 - RNA, 19 nt, Artificial Sequence
  Description of Artificial Sequence: Synthetic oligonucleotide
ggaccaagucugcuugagg

SEQ ID NO: 199062 - RNA, 19 nt, Artificial Sequence
  Description of Artificial Sequence: Synthetic oligonucleotide
aggaccaagucugcuugag

SEQ ID NO: 199063 - RNA, 19 nt, Artificial Sequence
  Description of Artificial Sequence: Synthetic oligonucleotide
guugguagugugcaucacu

SEQ ID NO: 199064 - RNA, 19 nt, Artificial Sequence
  Description of Artificial Sequence: Synthetic oligonucleotide
cuaagauguugucuguugu

SEQ ID NO: 199065 - RNA, 19 nt, Artificial Sequence
  Description of Artificial Sequence: Synthetic oligonucleotide
cuaggcgaggacugagguc

SEQ ID NO: 199066 - RNA, 19 nt, Artificial Sequence
  Description of Artificial Sequence: Synthetic oligonucleotide
ugguagugugcaucacuuc

SEQ ID NO: 199067 - RNA, 19 nt, Artificial Sequence
  Description of Artificial Sequence: Synthetic oligonucleotide
ccgggacccaucaaagugg

SEQ ID NO: 199068 - RNA, 19 nt, Artificial Sequence
  Description of Artificial Sequence: Synthetic oligonucleotide
cacacgcaaauaguucuug

SEQ ID NO: 199069 - RNA, 19 nt, Artificial Sequence
  Description of Artificial Sequence: Synthetic oligonucleotide
augggacauaaaacuaugu

SEQ ID NO: 199070 - RNA, 19 nt, Artificial Sequence
  Description of Artificial Sequence: Synthetic oligonucleotide
gaacggaaguaaagccagc

SEQ ID NO: 199071 - RNA, 19 nt, Artificial Sequence
  Description of Artificial Sequence: Synthetic oligonucleotide
cagugguacacgcuccguc

SEQ ID NO: 199072 - RNA, 19 nt, Artificial Sequence
  Description of Artificial Sequence: Synthetic oligonucleotide
ugccgacggauucuccgcu

SEQ ID NO: 199073 - RNA, 19 nt, Artificial Sequence
  Description of Artificial Sequence: Synthetic oligonucleotide
gcagacaacugccaaucca

SEQ ID NO: 199074 - RNA, 19 nt, Artificial Sequence
  Description of Artificial Sequence: Synthetic oligonucleotide
auccgggacccaucaaagu

SEQ ID NO: 199075 - RNA, 19 nt, Artificial Sequence
  Description of Artificial Sequence: Synthetic oligonucleotide
gugccgacggauucuccgc

SEQ ID NO: 199076 - RNA, 19 nt, Artificial Sequence
  Description of Artificial Sequence: Synthetic oligonucleotide
gugguacacgcuccgucug

SEQ ID NO: 199077 - RNA, 19 nt, Artificial Sequence
  Description of Artificial Sequence: Synthetic oligonucleotide
ccaggcuagccauagauaa

SEQ ID NO: 199078 - RNA, 19 nt, Artificial Sequence
  Description of Artificial Sequence: Synthetic oligonucleotide
ccuagaguucaaaugugca

SEQ ID NO: 199079 - RNA, 19 nt, Artificial Sequence
  Description of Artificial Sequence: Synthetic oligonucleotide
auguaaccuaugauugcgu

SEQ ID NO: 199080 - RNA, 19 nt, Artificial Sequence
  Description of Artificial Sequence: Synthetic oligonucleotide
ugaugagccauggcauuua

SEQ ID NO: 199081 - RNA, 19 nt, Artificial Sequence
  Description of Artificial Sequence: Synthetic oligonucleotide
gccuagaguucaaaugugc

SEQ ID NO: 199082 - RNA, 19 nt, Artificial Sequence
  Description of Artificial Sequence: Synthetic oligonucleotide
cuauuaagaccacaugcuu

SEQ ID NO: 199083 - RNA, 19 nt, Artificial Sequence
  Description of Artificial Sequence: Synthetic oligonucleotide
uguugguagugugcaucac

SEQ ID NO: 199084 - RNA, 19 nt, Artificial Sequence
  Description of Artificial Sequence: Synthetic oligonucleotide
ccaggaccaagucugcuug

SEQ ID NO: 199085 - RNA, 19 nt, Artificial Sequence
  Description of Artificial Sequence: Synthetic oligonucleotide
gacuaccauaaaacuaugu

SEQ ID NO: 199086 - RNA, 19 nt, Artificial Sequence
  Description of Artificial Sequence: Synthetic oligonucleotide
ugguuuaagcggggccugc

SEQ ID NO: 199087 - RNA, 19 nt, Artificial Sequence
  Description of Artificial Sequence: Synthetic oligonucleotide
caagaacgaaggcaggagu

SEQ ID NO: 199088 - RNA, 19 nt, Artificial Sequence
  Description of Artificial Sequence: Synthetic oligonucleotide
agcgugucaucuggagauc

SEQ ID NO: 199089 - RNA, 19 nt, Artificial Sequence
  Description of Artificial Sequence: Synthetic oligonucleotide
aggcuaucugaccgcugug

SEQ ID NO: 199090 - RNA, 19 nt, Artificial Sequence
  Description of Artificial Sequence: Synthetic oligonucleotide
auuuagcugggaguugcuu

SEQ ID NO: 199091 - RNA, 19 nt, Artificial Sequence
  Description of Artificial Sequence: Synthetic oligonucleotide
ugucggcuguccacacacu

SEQ ID NO: 199092 - RNA, 19 nt, Artificial Sequence
  Description of Artificial Sequence: Synthetic oligonucleotide
ccaagaacgaaggcaggag

SEQ ID NO: 199093 - RNA, 19 nt, Artificial Sequence
  Description of Artificial Sequence: Synthetic oligonucleotide
uccuugcgcuggacuaaca

SEQ ID NO: 199094 - RNA, 19 nt, Artificial Sequence
  Description of Artificial Sequence: Synthetic oligonucleotide
gcacaaggugauaugggac

SEQ ID NO: 199095 - RNA, 19 nt, Artificial Sequence
  Description of Artificial Sequence: Synthetic oligonucleotide
cuugcaggcccauaccuau

SEQ ID NO: 199096 - RNA, 19 nt, Artificial Sequence
  Description of Artificial Sequence: Synthetic oligonucleotide
caugagcuguccuuacugu

SEQ ID NO: 199097 - RNA, 19 nt, Artificial Sequence
  Description of Artificial Sequence: Synthetic oligonucleotide
cuguuguuacuuccacaga

SEQ ID NO: 199098 - RNA, 19 nt, Artificial Sequence
  Description of Artificial Sequence: Synthetic oligonucleotide
ucgcaauccgggacccauc

SEQ ID NO: 199099 - RNA, 19 nt, Artificial Sequence
  Description of Artificial Sequence: Synthetic oligonucleotide
aagaaccgcuuccgagcuu

SEQ ID NO: 199100 - RNA, 19 nt, Artificial Sequence
  Description of Artificial Sequence: Synthetic oligonucleotide
accuaugauugcguuguuu

SEQ ID NO: 199101 - RNA, 19 nt, Artificial Sequence
  Description of Artificial Sequence: Synthetic oligonucleotide
caagaggugucuuguucua

SEQ ID NO: 199102 - RNA, 19 nt, Artificial Sequence
  Description of Artificial Sequence: Synthetic oligonucleotide
guugucggcuguccacaca

SEQ ID NO: 199103 - RNA, 19 nt, Artificial Sequence
  Description of Artificial Sequence: Synthetic oligonucleotide
ccaaugggacauaaaacua

SEQ ID NO: 199104 - RNA, 19 nt, Artificial Sequence
  Description of Artificial Sequence: Synthetic oligonucleotide
aggucauccuugcgcugga

SEQ ID NO: 199105 - RNA, 19 nt, Artificial Sequence
  Description of Artificial Sequence: Synthetic oligonucleotide
gucggcuguccacacacua

SEQ ID NO: 199106 - RNA, 19 nt, Artificial Sequence
  Description of Artificial Sequence: Synthetic oligonucleotide
caggcuaucugaccgcugu

SEQ ID NO: 199107 - RNA, 19 nt, Artificial Sequence
  Description of Artificial Sequence: Synthetic oligonucleotide
gacgugccuucagagggga

SEQ ID NO: 199108 - RNA, 19 nt, Artificial Sequence
  Description of Artificial Sequence: Synthetic oligonucleotide
gaauguugguagugugcau

SEQ ID NO: 199109 - RNA, 19 nt, Artificial Sequence
  Description of Artificial Sequence: Synthetic oligonucleotide
guuuaagcggggccugccu

SEQ ID NO: 199110 - RNA, 19 nt, Artificial Sequence
  Description of Artificial Sequence: Synthetic oligonucleotide
gguuuaagcggggccugcc

SEQ ID NO: 199111 - RNA, 19 nt, Artificial Sequence
  Description of Artificial Sequence: Synthetic oligonucleotide
ugcagucgcgggucuccac

SEQ ID NO: 199112 - RNA, 19 nt, Artificial Sequence
  Description of Artificial Sequence: Synthetic oligonucleotide
agcccugagcuuucccuuu

SEQ ID NO: 199113 - RNA, 19 nt, Artificial Sequence
  Description of Artificial Sequence: Synthetic oligonucleotide
guggaucggggcucagguc

SEQ ID NO: 199114 - RNA, 19 nt, Artificial Sequence
  Description of Artificial Sequence: Synthetic oligonucleotide
ccucaggcuaucugaccgc

SEQ ID NO: 199115 - RNA, 19 nt, Artificial Sequence
  Description of Artificial Sequence: Synthetic oligonucleotide
acagagcgugucaucugga

SEQ ID NO: 199116 - RNA, 19 nt, Artificial Sequence
  Description of Artificial Sequence: Synthetic oligonucleotide
gcgugucaucuggagaucc

SEQ ID NO: 199117 - RNA, 19 nt, Artificial Sequence
  Description of Artificial Sequence: Synthetic oligonucleotide
ccguccuucuaagauguug

SEQ ID NO: 199118 - RNA, 19 nt, Artificial Sequence
  Description of Artificial Sequence: Synthetic oligonucleotide
gcgcuggacuaacaugcgc

SEQ ID NO: 199119 - RNA, 19 nt, Artificial Sequence
  Description of Artificial Sequence: Synthetic oligonucleotide
ggaucggggcucaggucgg

SEQ ID NO: 199120 - RNA, 19 nt, Artificial Sequence
  Description of Artificial Sequence: Synthetic oligonucleotide
ggcaagcuuaugugaugca

SEQ ID NO: 199121 - RNA, 19 nt, Artificial Sequence
  Description of Artificial Sequence: Synthetic oligonucleotide
cuggcacgacuaccaucag

SEQ ID NO: 199122 - RNA, 19 nt, Artificial Sequence
  Description of Artificial Sequence: Synthetic oligonucleotide
gcuaucugaccgcugugua

SEQ ID NO: 199123 - RNA, 19 nt, Artificial Sequence
  Description of Artificial Sequence: Synthetic oligonucleotide
gguugaccaaggaaucaaa

SEQ ID NO: 199124 - RNA, 19 nt, Artificial Sequence
  Description of Artificial Sequence: Synthetic oligonucleotide
caggaccaagucugcuuga

SEQ ID NO: 199125 - RNA, 19 nt, Artificial Sequence
  Description of Artificial Sequence: Synthetic oligonucleotide
gaggugaauuacauaucuu

SEQ ID NO: 199126 - RNA, 19 nt, Artificial Sequence
  Description of Artificial Sequence: Synthetic oligonucleotide
ccgacggauucuccgcugc

SEQ ID NO: 199127 - RNA, 19 nt, Artificial Sequence
  Description of Artificial Sequence: Synthetic oligonucleotide
cucuuccgguagguagggc

SEQ ID NO: 199128 - RNA, 19 nt, Artificial Sequence
  Description of Artificial Sequence: Synthetic oligonucleotide
cucggcagccagcucgcaa

SEQ ID NO: 199129 - RNA, 19 nt, Artificial Sequence
  Description of Artificial Sequence: Synthetic oligonucleotide
ggcuagccauagauaacca

SEQ ID NO: 199130 - RNA, 19 nt, Artificial Sequence
  Description of Artificial Sequence: Synthetic oligonucleotide
ggggaacaucucuugaauu

SEQ ID NO: 199131 - RNA, 19 nt, Artificial Sequence
  Description of Artificial Sequence: Synthetic oligonucleotide
gccgacggauucuccgcug

SEQ ID NO: 199132 - RNA, 19 nt, Artificial Sequence
  Description of Artificial Sequence: Synthetic oligonucleotide
ggcuaucugaccgcugugu

SEQ ID NO: 199133 - RNA, 19 nt, Artificial Sequence
  Description of Artificial Sequence: Synthetic oligonucleotide
gguacacgcuccgucugaa

SEQ ID NO: 199134 - RNA, 19 nt, Artificial Sequence
  Description of Artificial Sequence: Synthetic oligonucleotide
aaaccgggacaggccucuu

SEQ ID NO: 199135 - RNA, 19 nt, Artificial Sequence
  Description of Artificial Sequence: Synthetic oligonucleotide
ggacuaacaugcgcugucu

SEQ ID NO: 199136 - RNA, 19 nt, Artificial Sequence
  Description of Artificial Sequence: Synthetic oligonucleotide
cgcuggacuaacaugcgcu

SEQ ID NO: 199137 - RNA, 19 nt, Artificial Sequence
  Description of Artificial Sequence: Synthetic oligonucleotide
cgguagguagggcuggaca

SEQ ID NO: 199138 - RNA, 19 nt, Artificial Sequence
  Description of Artificial Sequence: Synthetic oligonucleotide
gcguuguuucaaauccuua

SEQ ID NO: 199139 - RNA, 19 nt, Artificial Sequence
  Description of Artificial Sequence: Synthetic oligonucleotide
cugugguacugaccucacu

SEQ ID NO: 199140 - RNA, 19 nt, Artificial Sequence
  Description of Artificial Sequence: Synthetic oligonucleotide
gcgcaggguaacaggguca

SEQ ID NO: 199141 - RNA, 19 nt, Artificial Sequence
  Description of Artificial Sequence: Synthetic oligonucleotide
ccgcuguguaggaaaaggu

SEQ ID NO: 199142 - RNA, 19 nt, Artificial Sequence
  Description of Artificial Sequence: Synthetic oligonucleotide
ggcuguccacacacuauua

SEQ ID NO: 199143 - RNA, 19 nt, Artificial Sequence
  Description of Artificial Sequence: Synthetic oligonucleotide
cuugaggcauguggauuau

SEQ ID NO: 199144 - RNA, 19 nt, Artificial Sequence
  Description of Artificial Sequence: Synthetic oligonucleotide
ccgguagguagggcuggac

SEQ ID NO: 199145 - RNA, 19 nt, Artificial Sequence
  Description of Artificial Sequence: Synthetic oligonucleotide
gcgaggacugagguccagu

SEQ ID NO: 199146 - RNA, 19 nt, Artificial Sequence
  Description of Artificial Sequence: Synthetic oligonucleotide
ggagucucucugaggccau

SEQ ID NO: 199147 - RNA, 19 nt, Artificial Sequence
  Description of Artificial Sequence: Synthetic oligonucleotide
ugauguuuaaucgagaucc

SEQ ID NO: 199148 - RNA, 19 nt, Artificial Sequence
  Description of Artificial Sequence: Synthetic oligonucleotide
aaagccgccaaucaccagc

SEQ ID NO: 199149 - RNA, 19 nt, Artificial Sequence
  Description of Artificial Sequence: Synthetic oligonucleotide
auguuggaaacacugagcc

SEQ ID NO: 199150 - RNA, 19 nt, Artificial Sequence
  Description of Artificial Sequence: Synthetic oligonucleotide
aagucauggauguugaaag

SEQ ID NO: 199151 - RNA, 19 nt, Artificial Sequence
  Description of Artificial Sequence: Synthetic oligonucleotide
ucugugacgggacugaagg

SEQ ID NO: 199152 - RNA, 19 nt, Artificial Sequence
  Description of Artificial Sequence: Synthetic oligonucleotide
cauuauacgaugcagggcc

SEQ ID NO: 199153 - RNA, 19 nt, Artificial Sequence
  Description of Artificial Sequence: Synthetic oligonucleotide
uccucaaagacguaggcgg

SEQ ID NO: 199154 - RNA, 19 nt, Artificial Sequence
  Description of Artificial Sequence: Synthetic oligonucleotide
guugaaaggauccucaaag

SEQ ID NO: 199155 - RNA, 19 nt, Artificial Sequence
  Description of Artificial Sequence: Synthetic oligonucleotide
uguaguguaguguucgugg

SEQ ID NO: 199156 - RNA, 19 nt, Artificial Sequence
  Description of Artificial Sequence: Synthetic oligonucleotide
aaaucaguaucuuucuuga

SEQ ID NO: 199157 - RNA, 19 nt, Artificial Sequence
  Description of Artificial Sequence: Synthetic oligonucleotide
gaaaggauccucaaagacg

SEQ ID NO: 199158 - RNA, 19 nt, Artificial Sequence
  Description of Artificial Sequence: Synthetic oligonucleotide
uccacauuagccuuuaagu

SEQ ID NO: 199159 - RNA, 19 nt, Artificial Sequence
  Description of Artificial Sequence: Synthetic oligonucleotide
agucaggugaauuuauuuc

SEQ ID NO: 199160 - RNA, 19 nt, Artificial Sequence
  Description of Artificial Sequence: Synthetic oligonucleotide
uuugcgauagacaucgcga

SEQ ID NO: 199161 - RNA, 19 nt, Artificial Sequence
  Description of Artificial Sequence: Synthetic oligonucleotide
aauguuguaggugcggagg

SEQ ID NO: 199162 - RNA, 19 nt, Artificial Sequence
  Description of Artificial Sequence: Synthetic oligonucleotide
uuugucuaugcucaaggug

SEQ ID NO: 199163 - RNA, 19 nt, Artificial Sequence
  Description of Artificial Sequence: Synthetic oligonucleotide
uacaaugaacacacgacgc

SEQ ID NO: 199164 - RNA, 19 nt, Artificial Sequence
  Description of Artificial Sequence: Synthetic oligonucleotide
aacacacgacgcuucgucc

SEQ ID NO: 199165 - RNA, 19 nt, Artificial Sequence
  Description of Artificial Sequence: Synthetic oligonucleotide
ugugccgauggucaugucg

SEQ ID NO: 199166 - RNA, 19 nt, Artificial Sequence
  Description of Artificial Sequence: Synthetic oligonucleotide
acguaguuagacgagaugg

SEQ ID NO: 199167 - RNA, 19 nt, Artificial Sequence
  Description of Artificial Sequence: Synthetic oligonucleotide
gacgcugacugcuugaugc

SEQ ID NO: 199168 - RNA, 19 nt, Artificial Sequence
  Description of Artificial Sequence: Synthetic oligonucleotide
guuuaaucgagauccgcgg

SEQ ID NO: 199169 - RNA, 19 nt, Artificial Sequence
  Description of Artificial Sequence: Synthetic oligonucleotide
auggauguugaaaggaucc

SEQ ID NO: 199170 - RNA, 19 nt, Artificial Sequence
  Description of Artificial Sequence: Synthetic oligonucleotide
aggccaaucacacaggcug

SEQ ID NO: 199171 - RNA, 19 nt, Artificial Sequence
  Description of Artificial Sequence: Synthetic oligonucleotide
uuuuaguccauguggugag

SEQ ID NO: 199172 - RNA, 19 nt, Artificial Sequence
  Description of Artificial Sequence: Synthetic oligonucleotide
auaaugauguuuaaucgag

SEQ ID NO: 199173 - RNA, 19 nt, Artificial Sequence
  Description of Artificial Sequence: Synthetic oligonucleotide
uagucugccaugcugauuc

SEQ ID NO: 199174 - RNA, 19 nt, Artificial Sequence
  Description of Artificial Sequence: Synthetic oligonucleotide
gaugcucaaaaucaguauc

SEQ ID NO: 199175 - RNA, 19 nt, Artificial Sequence
  Description of Artificial Sequence: Synthetic oligonucleotide
agcauuggcgaacacccgc

SEQ ID NO: 199176 - RNA, 19 nt, Artificial Sequence
  Description of Artificial Sequence: Synthetic oligonucleotide
uuccgaggaauacagguug

SEQ ID NO: 199177 - RNA, 19 nt, Artificial Sequence
  Description of Artificial Sequence: Synthetic oligonucleotide
acaacucuccauugcagcg

SEQ ID NO: 199178 - RNA, 19 nt, Artificial Sequence
  Description of Artificial Sequence: Synthetic oligonucleotide
cuacggaagacauuggcac

SEQ ID NO: 199179 - RNA, 19 nt, Artificial Sequence
  Description of Artificial Sequence: Synthetic oligonucleotide
uuaucgauggagcccacca

SEQ ID NO: 199180 - RNA, 19 nt, Artificial Sequence
  Description of Artificial Sequence: Synthetic oligonucleotide
caugcgaugcucaaaauca

SEQ ID NO: 199181 - RNA, 19 nt, Artificial Sequence
  Description of Artificial Sequence: Synthetic oligonucleotide
uuuaaucgagauccgcggc

SEQ ID NO: 199182 - RNA, 19 nt, Artificial Sequence
  Description of Artificial Sequence: Synthetic oligonucleotide
aacucuguaguguaguguu

SEQ ID NO: 199183 - RNA, 19 nt, Artificial Sequence
  Description of Artificial Sequence: Synthetic oligonucleotide
augauguuuaaucgagauc

SEQ ID NO: 199184 - RNA, 19 nt, Artificial Sequence
  Description of Artificial Sequence: Synthetic oligonucleotide
acaacguacaccguguguc

SEQ ID NO: 199185 - RNA, 19 nt, Artificial Sequence
  Description of Artificial Sequence: Synthetic oligonucleotide
uggaguagauuguaggcug

SEQ ID NO: 199186 - RNA, 19 nt, Artificial Sequence
  Description of Artificial Sequence: Synthetic oligonucleotide
ucuugaaccugacccuugg

SEQ ID NO: 199187 - RNA, 19 nt, Artificial Sequence
  Description of Artificial Sequence: Synthetic oligonucleotide
acacacgacgcuucguccc

SEQ ID NO: 199188 - RNA, 19 nt, Artificial Sequence
  Description of Artificial Sequence: Synthetic oligonucleotide
uuaaucgagauccgcggcu

SEQ ID NO: 199189 - RNA, 19 nt, Artificial Sequence
  Description of Artificial Sequence: Synthetic oligonucleotide
aaucgagauccgcggcucc

SEQ ID NO: 199190 - RNA, 19 nt, Artificial Sequence
  Description of Artificial Sequence: Synthetic oligonucleotide
ucauuaucgauggagccca

SEQ ID NO: 199191 - RNA, 19 nt, Artificial Sequence
  Description of Artificial Sequence: Synthetic oligonucleotide
agaucuuaccuuccuucac

SEQ ID NO: 199192 - RNA, 19 nt, Artificial Sequence
  Description of Artificial Sequence: Synthetic oligonucleotide
ugucuaugcucaaggugcg

SEQ ID NO: 199193 - RNA, 19 nt, Artificial Sequence
  Description of Artificial Sequence: Synthetic oligonucleotide
ucucucguagugaaggccu

SEQ ID NO: 199194 - RNA, 19 nt, Artificial Sequence
  Description of Artificial Sequence: Synthetic oligonucleotide
uaguuagacgagaugggcu

SEQ ID NO: 199195 - RNA, 19 nt, Artificial Sequence
  Description of Artificial Sequence: Synthetic oligonucleotide
agcacacuagaccccagac

SEQ ID NO: 199196 - RNA, 19 nt, Artificial Sequence
  Description of Artificial Sequence: Synthetic oligonucleotide
gauguuggaaacacugagc

SEQ ID NO: 199197 - RNA, 19 nt, Artificial Sequence
  Description of Artificial Sequence: Synthetic oligonucleotide
auguuuaaucgagauccgc

SEQ ID NO: 199198 - RNA, 19 nt, Artificial Sequence
  Description of Artificial Sequence: Synthetic oligonucleotide
augaacagccagucagccc

SEQ ID NO: 199199 - RNA, 19 nt, Artificial Sequence
  Description of Artificial Sequence: Synthetic oligonucleotide
ugacacacaugacaaugca

SEQ ID NO: 199200 - RNA, 19 nt, Artificial Sequence
  Description of Artificial Sequence: Synthetic oligonucleotide
acaaugaacacacgacgcu

SEQ ID NO: 199201 - RNA, 19 nt, Artificial Sequence
  Description of Artificial Sequence: Synthetic oligonucleotide
uauaugcccauacgaguca

SEQ ID NO: 199202 - RNA, 19 nt, Artificial Sequence
  Description of Artificial Sequence: Synthetic oligonucleotide
cucgcuacggaagacauug

SEQ ID NO: 199203 - RNA, 19 nt, Artificial Sequence
  Description of Artificial Sequence: Synthetic oligonucleotide
uuagccuuuaagucaugga

SEQ ID NO: 199204 - RNA, 19 nt, Artificial Sequence
  Description of Artificial Sequence: Synthetic oligonucleotide
aggaagacuggugauggcg

SEQ ID NO: 199205 - RNA, 19 nt, Artificial Sequence
  Description of Artificial Sequence: Synthetic oligonucleotide
uacaagaacucuguagugu

SEQ ID NO: 199206 - RNA, 19 nt, Artificial Sequence
  Description of Artificial Sequence: Synthetic oligonucleotide
aauuggacuucuccuuaga

SEQ ID NO: 199207 - RNA, 19 nt, Artificial Sequence
  Description of Artificial Sequence: Synthetic oligonucleotide
aagacuggugauggcggcc

SEQ ID NO: 199208 - RNA, 19 nt, Artificial Sequence
  Description of Artificial Sequence: Synthetic oligonucleotide
cuaugcucaaggugcgucg

SEQ ID NO: 199209 - RNA, 19 nt, Artificial Sequence
  Description of Artificial Sequence: Synthetic oligonucleotide
cacaacucuccauugcagc

SEQ ID NO: 199210 - RNA, 19 nt, Artificial Sequence
  Description of Artificial Sequence: Synthetic oligonucleotide
gacacauagucugccaugc

SEQ ID NO: 199211 - RNA, 19 nt, Artificial Sequence
  Description of Artificial Sequence: Synthetic oligonucleotide
gcccauacgagucacagcc

SEQ ID NO: 199212 - RNA, 19 nt, Artificial Sequence
  Description of Artificial Sequence: Synthetic oligonucleotide
gauguuuaaucgagauccg

SEQ ID NO: 199213 - RNA, 19 nt, Artificial Sequence
  Description of Artificial Sequence: Synthetic oligonucleotide
cuccacauuagccuuuaag

SEQ ID NO: 199214 - RNA, 19 nt, Artificial Sequence
  Description of Artificial Sequence: Synthetic oligonucleotide
aaggagcuuguaaauuuuc

SEQ ID NO: 199215 - RNA, 19 nt, Artificial Sequence
  Description of Artificial Sequence: Synthetic oligonucleotide
ugucccucggagaugccag

SEQ ID NO: 199216 - RNA, 19 nt, Artificial Sequence
  Description of Artificial Sequence: Synthetic oligonucleotide
uuggaguagauuguaggcu

SEQ ID NO: 199217 - RNA, 19 nt, Artificial Sequence
  Description of Artificial Sequence: Synthetic oligonucleotide
ucuagucaggugaauuuau

SEQ ID NO: 199218 - RNA, 19 nt, Artificial Sequence
  Description of Artificial Sequence: Synthetic oligonucleotide
ugcgauagacaucgcgaag

SEQ ID NO: 199219 - RNA, 19 nt, Artificial Sequence
  Description of Artificial Sequence: Synthetic oligonucleotide
ugauggcggccuuagaaac

SEQ ID NO: 199220 - RNA, 19 nt, Artificial Sequence
  Description of Artificial Sequence: Synthetic oligonucleotide
ucuuccgcaggccaaucac

SEQ ID NO: 199221 - RNA, 19 nt, Artificial Sequence
  Description of Artificial Sequence: Synthetic oligonucleotide
aguuagacgagaugggcuu

SEQ ID NO: 199222 - RNA, 19 nt, Artificial Sequence
  Description of Artificial Sequence: Synthetic oligonucleotide
ugcgcaucgccaccgcugg

SEQ ID NO: 199223 - RNA, 19 nt, Artificial Sequence
  Description of Artificial Sequence: Synthetic oligonucleotide
uugaguucugugacgggac

SEQ ID NO: 199224 - RNA, 19 nt, Artificial Sequence
  Description of Artificial Sequence: Synthetic oligonucleotide
uaguuccggucaaagggag

SEQ ID NO: 199225 - RNA, 19 nt, Artificial Sequence
  Description of Artificial Sequence: Synthetic oligonucleotide
aaugccguguuggaguaga

SEQ ID NO: 199226 - RNA, 19 nt, Artificial Sequence
  Description of Artificial Sequence: Synthetic oligonucleotide
gaacacacgacgcuucguc

SEQ ID NO: 199227 - RNA, 19 nt, Artificial Sequence
  Description of Artificial Sequence: Synthetic oligonucleotide
cuauccuagagguggcgag

SEQ ID NO: 199228 - RNA, 19 nt, Artificial Sequence
  Description of Artificial Sequence: Synthetic oligonucleotide
agccgcacugacugguucc

SEQ ID NO: 199229 - RNA, 19 nt, Artificial Sequence
  Description of Artificial Sequence: Synthetic oligonucleotide
acguauaugcccauacgag

SEQ ID NO: 199230 - RNA, 19 nt, Artificial Sequence
  Description of Artificial Sequence: Synthetic oligonucleotide
guaguuagacgagaugggc

SEQ ID NO: 199231 - RNA, 19 nt, Artificial Sequence
  Description of Artificial Sequence: Synthetic oligonucleotide
ugaauguuguaggugcgga

SEQ ID NO: 199232 - RNA, 19 nt, Artificial Sequence
  Description of Artificial Sequence: Synthetic oligonucleotide
aggauccucaaagacguag

SEQ ID NO: 199233 - RNA, 19 nt, Artificial Sequence
  Description of Artificial Sequence: Synthetic oligonucleotide
uauccuagagguggcgagg

SEQ ID NO: 199234 - RNA, 19 nt, Artificial Sequence
  Description of Artificial Sequence: Synthetic oligonucleotide
uccggucaaagggaguugg

SEQ ID NO: 199235 - RNA, 19 nt, Artificial Sequence
  Description of Artificial Sequence: Synthetic oligonucleotide
acacagguugguaaugccg

SEQ ID NO: 199236 - RNA, 19 nt, Artificial Sequence
  Description of Artificial Sequence: Synthetic oligonucleotide
gccguguuggaguagauug

SEQ ID NO: 199237 - RNA, 19 nt, Artificial Sequence
  Description of Artificial Sequence: Synthetic oligonucleotide
ucaggugaauuuauuucua

SEQ ID NO: 199238 - RNA, 19 nt, Artificial Sequence
  Description of Artificial Sequence: Synthetic oligonucleotide
gagaucuuaccuuccuuca

SEQ ID NO: 199239 - RNA, 19 nt, Artificial Sequence
  Description of Artificial Sequence: Synthetic oligonucleotide
auuaucgauggagcccacc

SEQ ID NO: 199240 - RNA, 19 nt, Artificial Sequence
  Description of Artificial Sequence: Synthetic oligonucleotide
acccucguaggccucaaag

SEQ ID NO: 199241 - RNA, 19 nt, Artificial Sequence
  Description of Artificial Sequence: Synthetic oligonucleotide
agcguugacagcugugucu

SEQ ID NO: 199242 - RNA, 19 nt, Artificial Sequence
  Description of Artificial Sequence: Synthetic oligonucleotide
uaguguucguggcauuucu

SEQ ID NO: 199243 - RNA, 19 nt, Artificial Sequence
  Description of Artificial Sequence: Synthetic oligonucleotide
ugaccuccauuauacgaug

SEQ ID NO: 199244 - RNA, 19 nt, Artificial Sequence
  Description of Artificial Sequence: Synthetic oligonucleotide
ugcgaugcucaaaaucagu

SEQ ID NO: 199245 - RNA, 19 nt, Artificial Sequence
  Description of Artificial Sequence: Synthetic oligonucleotide
guauaugcccauacgaguc

SEQ ID NO: 199246 - RNA, 19 nt, Artificial Sequence
  Description of Artificial Sequence: Synthetic oligonucleotide
aggugaauuuauuucuaaa

SEQ ID NO: 199247 - RNA, 19 nt, Artificial Sequence
  Description of Artificial Sequence: Synthetic oligonucleotide
uuaguccauguggugaggc

SEQ ID NO: 199248 - RNA, 19 nt, Artificial Sequence
  Description of Artificial Sequence: Synthetic oligonucleotide
gaagacauuggcacccgug

SEQ ID NO: 199249 - RNA, 19 nt, Artificial Sequence
  Description of Artificial Sequence: Synthetic oligonucleotide
gugccgauggucaugucgg

SEQ ID NO: 199250 - RNA, 19 nt, Artificial Sequence
  Description of Artificial Sequence: Synthetic oligonucleotide
gauucgguagugugccagc

SEQ ID NO: 199251 - RNA, 19 nt, Artificial Sequence
  Description of Artificial Sequence: Synthetic oligonucleotide
uguucguggcauuucucgu

SEQ ID NO: 199252 - RNA, 19 nt, Artificial Sequence
  Description of Artificial Sequence: Synthetic oligonucleotide
agguagccgcaguagcccc

SEQ ID NO: 199253 - RNA, 19 nt, Artificial Sequence
  Description of Artificial Sequence: Synthetic oligonucleotide
uucacguaguuagacgaga

SEQ ID NO: 199254 - RNA, 19 nt, Artificial Sequence
  Description of Artificial Sequence: Synthetic oligonucleotide
gaagacuggugauggcggc

SEQ ID NO: 199255 - RNA, 19 nt, Artificial Sequence
  Description of Artificial Sequence: Synthetic oligonucleotide
gcgugaauguuguaggugc

SEQ ID NO: 199256 - RNA, 19 nt, Artificial Sequence
  Description of Artificial Sequence: Synthetic oligonucleotide
uugcgauagacaucgcgaa

SEQ ID NO: 199257 - RNA, 19 nt, Artificial Sequence
  Description of Artificial Sequence: Synthetic oligonucleotide
uuccgcaggccaaucacac

SEQ ID NO: 199258 - RNA, 19 nt, Artificial Sequence
  Description of Artificial Sequence: Synthetic oligonucleotide
uggcauuucucguuccgga

SEQ ID NO: 199259 - RNA, 19 nt, Artificial Sequence
  Description of Artificial Sequence: Synthetic oligonucleotide
uucguggcauuucucguuc

SEQ ID NO: 199260 - RNA, 19 nt, Artificial Sequence
  Description of Artificial Sequence: Synthetic oligonucleotide
uguucucaccuccuuccac

SEQ ID NO: 199261 - RNA, 19 nt, Artificial Sequence
  Description of Artificial Sequence: Synthetic oligonucleotide
gucaggugaauuuauuucu

SEQ ID NO: 199262 - RNA, 19 nt, Artificial Sequence
  Description of Artificial Sequence: Synthetic oligonucleotide
uuuaguccauguggugagg

SEQ ID NO: 199263 - RNA, 19 nt, Artificial Sequence
  Description of Artificial Sequence: Synthetic oligonucleotide
ucuauccuagagguggcga

SEQ ID NO: 199264 - RNA, 19 nt, Artificial Sequence
  Description of Artificial Sequence: Synthetic oligonucleotide
ucacguaguuagacgagau

SEQ ID NO: 199265 - RNA, 19 nt, Artificial Sequence
  Description of Artificial Sequence: Synthetic oligonucleotide
caacguacaccgugugucc

SEQ ID NO: 199266 - RNA, 19 nt, Artificial Sequence
  Description of Artificial Sequence: Synthetic oligonucleotide
uccgagaucuuaccuuccu

SEQ ID NO: 199267 - RNA, 19 nt, Artificial Sequence
  Description of Artificial Sequence: Synthetic oligonucleotide
ucuaugcucaaggugcguc

SEQ ID NO: 199268 - RNA, 19 nt, Artificial Sequence
  Description of Artificial Sequence: Synthetic oligonucleotide
ugaguucugugacgggacu

SEQ ID NO: 199269 - RNA, 19 nt, Artificial Sequence
  Description of Artificial Sequence: Synthetic oligonucleotide
auaugcccauacgagucac

SEQ ID NO: 199270 - RNA, 19 nt, Artificial Sequence
  Description of Artificial Sequence: Synthetic oligonucleotide
cagugcgcacugcugagcg

SEQ ID NO: 199271 - RNA, 19 nt, Artificial Sequence
  Description of Artificial Sequence: Synthetic oligonucleotide
acguaggcggcgucagccc

SEQ ID NO: 199272 - RNA, 19 nt, Artificial Sequence
  Description of Artificial Sequence: Synthetic oligonucleotide
ugguaaugccguguuggag

SEQ ID NO: 199273 - RNA, 19 nt, Artificial Sequence
  Description of Artificial Sequence: Synthetic oligonucleotide
ucggagaugccagugcgca

SEQ ID NO: 199274 - RNA, 19 nt, Artificial Sequence
  Description of Artificial Sequence: Synthetic oligonucleotide
cagucgaacacaccccggc

SEQ ID NO: 199275 - RNA, 19 nt, Artificial Sequence
  Description of Artificial Sequence: Synthetic oligonucleotide
cagggcgugaauguuguag

SEQ ID NO: 199276 - RNA, 19 nt, Artificial Sequence
  Description of Artificial Sequence: Synthetic oligonucleotide
gacauccgcaacuucucca

SEQ ID NO: 199277 - RNA, 19 nt, Artificial Sequence
  Description of Artificial Sequence: Synthetic oligonucleotide
cauugagccaccgcgcccc

SEQ ID NO: 199278 - RNA, 19 nt, Artificial Sequence
  Description of Artificial Sequence: Synthetic oligonucleotide
aacacccgcccuuugcgau

SEQ ID NO: 199279 - RNA, 19 nt, Artificial Sequence
  Description of Artificial Sequence: Synthetic oligonucleotide
uauacgaugcagggccgag

SEQ ID NO: 199280 - RNA, 19 nt, Artificial Sequence
  Description of Artificial Sequence: Synthetic oligonucleotide
uagacaucgcgaagcuucu

SEQ ID NO: 199281 - RNA, 19 nt, Artificial Sequence
  Description of Artificial Sequence: Synthetic oligonucleotide
uccgaguuccuugugaguu

SEQ ID NO: 199282 - RNA, 19 nt, Artificial Sequence
  Description of Artificial Sequence: Synthetic oligonucleotide
auuauacgaugcagggccg

SEQ ID NO: 199283 - RNA, 19 nt, Artificial Sequence
  Description of Artificial Sequence: Synthetic oligonucleotide
acaucgcgaagcuucucug

SEQ ID NO: 199284 - RNA, 19 nt, Artificial Sequence
  Description of Artificial Sequence: Synthetic oligonucleotide
caaggugcgucgugugacg

SEQ ID NO: 199285 - RNA, 19 nt, Artificial Sequence
  Description of Artificial Sequence: Synthetic oligonucleotide
auaguuccggucaaaggga

SEQ ID NO: 199286 - RNA, 19 nt, Artificial Sequence
  Description of Artificial Sequence: Synthetic oligonucleotide
ucugugccgauggucaugu

SEQ ID NO: 199287 - RNA, 19 nt, Artificial Sequence
  Description of Artificial Sequence: Synthetic oligonucleotide
cucaaagacguaggcggcg

SEQ ID NO: 199288 - RNA, 19 nt, Artificial Sequence
  Description of Artificial Sequence: Synthetic oligonucleotide
ugaaguucucccagccauc

SEQ ID NO: 199289 - RNA, 19 nt, Artificial Sequence
  Description of Artificial Sequence: Synthetic oligonucleotide
uuccaugccggucgauggc

SEQ ID NO: 199290 - RNA, 19 nt, Artificial Sequence
  Description of Artificial Sequence: Synthetic oligonucleotide
ugagccaccgcgccccagc

SEQ ID NO: 199291 - RNA, 19 nt, Artificial Sequence
  Description of Artificial Sequence: Synthetic oligonucleotide
aacacaccccggccuuccg

SEQ ID NO: 199292 - RNA, 19 nt, Artificial Sequence
  Description of Artificial Sequence: Synthetic oligonucleotide
caaagggaguuggagcacc

SEQ ID NO: 199293 - RNA, 19 nt, Artificial Sequence
  Description of Artificial Sequence: Synthetic oligonucleotide
gggugcucuauccuagagg

SEQ ID NO: 199294 - RNA, 19 nt, Artificial Sequence
  Description of Artificial Sequence: Synthetic oligonucleotide
uccgaggaauacagguugu

SEQ ID NO: 199295 - RNA, 19 nt, Artificial Sequence
  Description of Artificial Sequence: Synthetic oligonucleotide
ggugcuucagggaugaaca

SEQ ID NO: 199296 - RNA, 19 nt, Artificial Sequence
  Description of Artificial Sequence: Synthetic oligonucleotide
uggugugucggguguggcc

SEQ ID NO: 199297 - RNA, 19 nt, Artificial Sequence
  Description of Artificial Sequence: Synthetic oligonucleotide
ucaaagacguaggcggcgu

SEQ ID NO: 199298 - RNA, 19 nt, Artificial Sequence
  Description of Artificial Sequence: Synthetic oligonucleotide
gauggcggccuuagaaacc

SEQ ID NO: 199299 - RNA, 19 nt, Artificial Sequence
  Description of Artificial Sequence: Synthetic oligonucleotide
gcugauucgguagugugcc

SEQ ID NO: 199300 - RNA, 19 nt, Artificial Sequence
  Description of Artificial Sequence: Synthetic oligonucleotide
ggauccucaaagacguagg

SEQ ID NO: 199301 - RNA, 19 nt, Artificial Sequence
  Description of Artificial Sequence: Synthetic oligonucleotide
ucguagugaaggccuugca

SEQ ID NO: 199302 - RNA, 19 nt, Artificial Sequence
  Description of Artificial Sequence: Synthetic oligonucleotide
cacguaguuagacgagaug

SEQ ID NO: 199303 - RNA, 19 nt, Artificial Sequence
  Description of Artificial Sequence: Synthetic oligonucleotide
ucgcuacggaagacauugg

SEQ ID NO: 199304 - RNA, 19 nt, Artificial Sequence
  Description of Artificial Sequence: Synthetic oligonucleotide
uaugcccauacgagucaca

SEQ ID NO: 199305 - RNA, 19 nt, Artificial Sequence
  Description of Artificial Sequence: Synthetic oligonucleotide
uuauacgaugcagggccga

SEQ ID NO: 199306 - RNA, 19 nt, Artificial Sequence
  Description of Artificial Sequence: Synthetic oligonucleotide
cucguuccggagcaccagg

SEQ ID NO: 199307 - RNA, 19 nt, Artificial Sequence
  Description of Artificial Sequence: Synthetic oligonucleotide
agcacuccgauggccuugc

SEQ ID NO: 199308 - RNA, 19 nt, Artificial Sequence
  Description of Artificial Sequence: Synthetic oligonucleotide
gacucggucaaaggcugag

SEQ ID NO: 199309 - RNA, 19 nt, Artificial Sequence
  Description of Artificial Sequence: Synthetic oligonucleotide
guuuggucccauaguuccg

SEQ ID NO: 199310 - RNA, 19 nt, Artificial Sequence
  Description of Artificial Sequence: Synthetic oligonucleotide
cuugguccccagcauugag

SEQ ID NO: 199311 - RNA, 19 nt, Artificial Sequence
  Description of Artificial Sequence: Synthetic oligonucleotide
ugaugcggucacaacucuc

SEQ ID NO: 199312 - RNA, 19 nt, Artificial Sequence
  Description of Artificial Sequence: Synthetic oligonucleotide
ccauaguuccggucaaagg

SEQ ID NO: 199313 - RNA, 19 nt, Artificial Sequence
  Description of Artificial Sequence: Synthetic oligonucleotide
cucguagugaaggccuugc

SEQ ID NO: 199314 - RNA, 19 nt, Artificial Sequence
  Description of Artificial Sequence: Synthetic oligonucleotide
auuggcgaacacccgcccu

SEQ ID NO: 199315 - RNA, 19 nt, Artificial Sequence
  Description of Artificial Sequence: Synthetic oligonucleotide
gacaucgcgaagcuucucu

SEQ ID NO: 199316 - RNA, 19 nt, Artificial Sequence
  Description of Artificial Sequence: Synthetic oligonucleotide
auacgagucacagcccuga

SEQ ID NO: 199317 - RNA, 19 nt, Artificial Sequence
  Description of Artificial Sequence: Synthetic oligonucleotide
ggugauggcggccuuagaa

SEQ ID NO: 199318 - RNA, 19 nt, Artificial Sequence
  Description of Artificial Sequence: Synthetic oligonucleotide
gacgagaugggcuuuccau

SEQ ID NO: 199319 - RNA, 19 nt, Artificial Sequence
  Description of Artificial Sequence: Synthetic oligonucleotide
ggucacaacucuccauugc

SEQ ID NO: 199320 - RNA, 19 nt, Artificial Sequence
  Description of Artificial Sequence: Synthetic oligonucleotide
uaaucgagauccgcggcuc

SEQ ID NO: 199321 - RNA, 19 nt, Artificial Sequence
  Description of Artificial Sequence: Synthetic oligonucleotide
cauacgagucacagcccug

SEQ ID NO: 199322 - RNA, 19 nt, Artificial Sequence
  Description of Artificial Sequence: Synthetic oligonucleotide
gugauggcggccuuagaaa

SEQ ID NO: 199323 - RNA, 19 nt, Artificial Sequence
  Description of Artificial Sequence: Synthetic oligonucleotide
caauaauggugccgcccag

SEQ ID NO: 199324 - RNA, 19 nt, Artificial Sequence
  Description of Artificial Sequence: Synthetic oligonucleotide
cucggagaugccagugcgc

SEQ ID NO: 199325 - RNA, 19 nt, Artificial Sequence
  Description of Artificial Sequence: Synthetic oligonucleotide
gcaugcgaugcucaaaauc

SEQ ID NO: 199326 - RNA, 19 nt, Artificial Sequence
  Description of Artificial Sequence: Synthetic oligonucleotide
gaguucugugacgggacug

SEQ ID NO: 199327 - RNA, 19 nt, Artificial Sequence
  Description of Artificial Sequence: Synthetic oligonucleotide
cguaguuagacgagauggg

SEQ ID NO: 199328 - RNA, 19 nt, Artificial Sequence
  Description of Artificial Sequence: Synthetic oligonucleotide
cucgaagcuccugccacgg

SEQ ID NO: 199329 - RNA, 19 nt, Artificial Sequence
  Description of Artificial Sequence: Synthetic oligonucleotide
ggcauuucucguuccggag

SEQ ID NO: 199330 - RNA, 19 nt, Artificial Sequence
  Description of Artificial Sequence: Synthetic oligonucleotide
agauuguaggcugcugcca

SEQ ID NO: 199331 - RNA, 19 nt, Artificial Sequence
  Description of Artificial Sequence: Synthetic oligonucleotide
guguuggaguagauuguag

SEQ ID NO: 199332 - RNA, 19 nt, Artificial Sequence
  Description of Artificial Sequence: Synthetic oligonucleotide
cauuggcgaacacccgccc

SEQ ID NO: 199333 - RNA, 19 nt, Artificial Sequence
  Description of Artificial Sequence: Synthetic oligonucleotide
ggaauacagguuguacaag

SEQ ID NO: 199334 - RNA, 19 nt, Artificial Sequence
  Description of Artificial Sequence: Synthetic oligonucleotide
gaccuccauuauacgaugc

SEQ ID NO: 199335 - RNA, 19 nt, Artificial Sequence
  Description of Artificial Sequence: Synthetic oligonucleotide
aucgagauccgcggcuccg

SEQ ID NO: 199336 - RNA, 19 nt, Artificial Sequence
  Description of Artificial Sequence: Synthetic oligonucleotide
cacacgacgcuucgucccc

SEQ ID NO: 199337 - RNA, 19 nt, Artificial Sequence
  Description of Artificial Sequence: Synthetic oligonucleotide
ucgaacacaccccggccuu

SEQ ID NO: 199338 - RNA, 19 nt, Artificial Sequence
  Description of Artificial Sequence: Synthetic oligonucleotide
uucgguagugugccagcau

SEQ ID NO: 199339 - RNA, 19 nt, Artificial Sequence
  Description of Artificial Sequence: Synthetic oligonucleotide
augcgaugcucaaaaucag

SEQ ID NO: 199340 - RNA, 19 nt, Artificial Sequence
  Description of Artificial Sequence: Synthetic oligonucleotide
gagcauuggcgaacacccg

SEQ ID NO: 199341 - RNA, 19 nt, Artificial Sequence
  Description of Artificial Sequence: Synthetic oligonucleotide
agggcgucccuccucgcug

SEQ ID NO: 199342 - RNA, 19 nt, Artificial Sequence
  Description of Artificial Sequence: Synthetic oligonucleotide
cucuauccuagagguggcg

SEQ ID NO: 199343 - RNA, 19 nt, Artificial Sequence
  Description of Artificial Sequence: Synthetic oligonucleotide
aggggagaguccgggaaag

SEQ ID NO: 199344 - RNA, 19 nt, Artificial Sequence
  Description of Artificial Sequence: Synthetic oligonucleotide
agaccuucuggugggcaag

SEQ ID NO: 199345 - RNA, 19 nt, Artificial Sequence
  Description of Artificial Sequence: Synthetic oligonucleotide
guggcgaggggagugaaga

SEQ ID NO: 199346 - RNA, 19 nt, Artificial Sequence
  Description of Artificial Sequence: Synthetic oligonucleotide
agugagggagaggcaaugu

SEQ ID NO: 199347 - RNA, 19 nt, Artificial Sequence
  Description of Artificial Sequence: Synthetic oligonucleotide
uaggugcggagguucucca

SEQ ID NO: 199348 - RNA, 19 nt, Artificial Sequence
  Description of Artificial Sequence: Synthetic oligonucleotide
cggucaaaggcugagggcg

SEQ ID NO: 199349 - RNA, 19 nt, Artificial Sequence
  Description of Artificial Sequence: Synthetic oligonucleotide
gaacacccgcccuuugcga

SEQ ID NO: 199350 - RNA, 19 nt, Artificial Sequence
  Description of Artificial Sequence: Synthetic oligonucleotide
caggugaauuuauuucuaa

SEQ ID NO: 199351 - RNA, 19 nt, Artificial Sequence
  Description of Artificial Sequence: Synthetic oligonucleotide
uacgagucacagcccugac

SEQ ID NO: 199352 - RNA, 19 nt, Artificial Sequence
  Description of Artificial Sequence: Synthetic oligonucleotide
ugaacacacgacgcuucgu

SEQ ID NO: 199353 - RNA, 19 nt, Artificial Sequence
  Description of Artificial Sequence: Synthetic oligonucleotide
aaggugcgucgugugacgu

SEQ ID NO: 199354 - RNA, 19 nt, Artificial Sequence
  Description of Artificial Sequence: Synthetic oligonucleotide
gcggagguucuccacaaug

SEQ ID NO: 199355 - RNA, 19 nt, Artificial Sequence
  Description of Artificial Sequence: Synthetic oligonucleotide
uagacgagaugggcuuucc

SEQ ID NO: 199356 - RNA, 19 nt, Artificial Sequence
  Description of Artificial Sequence: Synthetic oligonucleotide
gaacacaccccggccuucc

SEQ ID NO: 199357 - RNA, 19 nt, Artificial Sequence
  Description of Artificial Sequence: Synthetic oligonucleotide
gguggugauggcaucgaug

SEQ ID NO: 199358 - RNA, 19 nt, Artificial Sequence
  Description of Artificial Sequence: Synthetic oligonucleotide
uucccggggcaugcgaugc

SEQ ID NO: 199359 - RNA, 19 nt, Artificial Sequence
  Description of Artificial Sequence: Synthetic oligonucleotide
gguccuacagucgaacaca

SEQ ID NO: 199360 - RNA, 19 nt, Artificial Sequence
  Description of Artificial Sequence: Synthetic oligonucleotide
acagucgaacacaccccgg

SEQ ID NO: 199361 - RNA, 19 nt, Artificial Sequence
  Description of Artificial Sequence: Synthetic oligonucleotide
auucgguagugugccagca

SEQ ID NO: 199362 - RNA, 19 nt, Artificial Sequence
  Description of Artificial Sequence: Synthetic oligonucleotide
ugucggguguggccuccag

SEQ ID NO: 199363 - RNA, 19 nt, Artificial Sequence
  Description of Artificial Sequence: Synthetic oligonucleotide
ggugcgucgugugacgugc

SEQ ID NO: 199364 - RNA, 19 nt, Artificial Sequence
  Description of Artificial Sequence: Synthetic oligonucleotide
cccucugcgaugauaauga

SEQ ID NO: 199365 - RNA, 19 nt, Artificial Sequence
  Description of Artificial Sequence: Synthetic oligonucleotide
cgagaucuuaccuuccuuc

SEQ ID NO: 199366 - RNA, 19 nt, Artificial Sequence
  Description of Artificial Sequence: Synthetic oligonucleotide
agacuggugauggcggccu

SEQ ID NO: 199367 - RNA, 19 nt, Artificial Sequence
  Description of Artificial Sequence: Synthetic oligonucleotide
gcgggcacugccaauaaug

SEQ ID NO: 199368 - RNA, 19 nt, Artificial Sequence
  Description of Artificial Sequence: Synthetic oligonucleotide
ugacgggacugaaggccac

SEQ ID NO: 199369 - RNA, 19 nt, Artificial Sequence
  Description of Artificial Sequence: Synthetic oligonucleotide
gcgaugauaaugauguuua

SEQ ID NO: 199370 - RNA, 19 nt, Artificial Sequence
  Description of Artificial Sequence: Synthetic oligonucleotide
ccuccauuauacgaugcag

SEQ ID NO: 199371 - RNA, 19 nt, Artificial Sequence
  Description of Artificial Sequence: Synthetic oligonucleotide
accgugugucccucggaga

SEQ ID NO: 199372 - RNA, 19 nt, Artificial Sequence
  Description of Artificial Sequence: Synthetic oligonucleotide
caucgcgaagcuucucuga

SEQ ID NO: 199373 - RNA, 19 nt, Artificial Sequence
  Description of Artificial Sequence: Synthetic oligonucleotide
ggccuuccgaggaauacag

SEQ ID NO: 199374 - RNA, 19 nt, Artificial Sequence
  Description of Artificial Sequence: Synthetic oligonucleotide
gcuacggaagacauuggca

SEQ ID NO: 199375 - RNA, 19 nt, Artificial Sequence
  Description of Artificial Sequence: Synthetic oligonucleotide
uuccggucaaagggaguug

SEQ ID NO: 199376 - RNA, 19 nt, Artificial Sequence
  Description of Artificial Sequence: Synthetic oligonucleotide
ugccaggcguccuucucuc

SEQ ID NO: 199377 - RNA, 19 nt, Artificial Sequence
  Description of Artificial Sequence: Synthetic oligonucleotide
ucugagccgugcucuccga

SEQ ID NO: 199378 - RNA, 19 nt, Artificial Sequence
  Description of Artificial Sequence: Synthetic oligonucleotide
guucccggggcaugcgaug

SEQ ID NO: 199379 - RNA, 19 nt, Artificial Sequence
  Description of Artificial Sequence: Synthetic oligonucleotide
ccauuauacgaugcagggc

SEQ ID NO: 199380 - RNA, 19 nt, Artificial Sequence
  Description of Artificial Sequence: Synthetic oligonucleotide
ggcgugaauguuguaggug

SEQ ID NO: 199381 - RNA, 19 nt, Artificial Sequence
  Description of Artificial Sequence: Synthetic oligonucleotide
gcccucguagaugaggaag

SEQ ID NO: 199382 - RNA, 19 nt, Artificial Sequence
  Description of Artificial Sequence: Synthetic oligonucleotide
ccucaaagacguaggcggc

SEQ ID NO: 199383 - RNA, 19 nt, Artificial Sequence
  Description of Artificial Sequence: Synthetic oligonucleotide
aggugcgucgugugacgug

SEQ ID NO: 199384 - RNA, 19 nt, Artificial Sequence
  Description of Artificial Sequence: Synthetic oligonucleotide
ggaguagauuguaggcugc

SEQ ID NO: 199385 - RNA, 19 nt, Artificial Sequence
  Description of Artificial Sequence: Synthetic oligonucleotide
ucccucggagaugccagug

SEQ ID NO: 199386 - RNA, 19 nt, Artificial Sequence
  Description of Artificial Sequence: Synthetic oligonucleotide
gguggccggaaugacacac

SEQ ID NO: 199387 - RNA, 19 nt, Artificial Sequence
  Description of Artificial Sequence: Synthetic oligonucleotide
ggcgaggggagugaagagc

SEQ ID NO: 199388 - RNA, 19 nt, Artificial Sequence
  Description of Artificial Sequence: Synthetic oligonucleotide
ugcgucgugugacgugcuc

SEQ ID NO: 199389 - RNA, 19 nt, Artificial Sequence
  Description of Artificial Sequence: Synthetic oligonucleotide
gggcaugcgaugcucaaaa

SEQ ID NO: 199390 - RNA, 19 nt, Artificial Sequence
  Description of Artificial Sequence: Synthetic oligonucleotide
cuccgauggccuugccagc

SEQ ID NO: 199391 - RNA, 19 nt, Artificial Sequence
  Description of Artificial Sequence: Synthetic oligonucleotide
agagaccuucuggugggca

SEQ ID NO: 199392 - RNA, 19 nt, Artificial Sequence
  Description of Artificial Sequence: Synthetic oligonucleotide
ucgaagcuccugccacgga

SEQ ID NO: 199393 - RNA, 19 nt, Artificial Sequence
  Description of Artificial Sequence: Synthetic oligonucleotide
cacuguucccggggcaugc

SEQ ID NO: 199394 - RNA, 19 nt, Artificial Sequence
  Description of Artificial Sequence: Synthetic oligonucleotide
ugugucggguguggccucc

SEQ ID NO: 199395 - RNA, 19 nt, Artificial Sequence
  Description of Artificial Sequence: Synthetic oligonucleotide
guccuacagucgaacacac

SEQ ID NO: 199396 - RNA, 19 nt, Artificial Sequence
  Description of Artificial Sequence: Synthetic oligonucleotide
gcguugacagcugugucug

SEQ ID NO: 199397 - RNA, 19 nt, Artificial Sequence
  Description of Artificial Sequence: Synthetic oligonucleotide
cauuaucgauggagcccac

SEQ ID NO: 199398 - RNA, 19 nt, Artificial Sequence
  Description of Artificial Sequence: Synthetic oligonucleotide
acacaccccggccuuccga

SEQ ID NO: 199399 - RNA, 19 nt, Artificial Sequence
  Description of Artificial Sequence: Synthetic oligonucleotide
cgaacacccgcccuuugcg

SEQ ID NO: 199400 - RNA, 19 nt, Artificial Sequence
  Description of Artificial Sequence: Synthetic oligonucleotide
gacgggacugaaggccacc

SEQ ID NO: 199401 - RNA, 19 nt, Artificial Sequence
  Description of Artificial Sequence: Synthetic oligonucleotide
gucgaacacaccccggccu

SEQ ID NO: 199402 - RNA, 19 nt, Artificial Sequence
  Description of Artificial Sequence: Synthetic oligonucleotide
gugacgggacugaaggcca

SEQ ID NO: 199403 - RNA, 19 nt, Artificial Sequence
  Description of Artificial Sequence: Synthetic oligonucleotide
cucuagucaggugaauuua

SEQ ID NO: 199404 - RNA, 19 nt, Artificial Sequence
  Description of Artificial Sequence: Synthetic oligonucleotide
auacgaugcagggccgagu

SEQ ID NO: 199405 - RNA, 19 nt, Artificial Sequence
  Description of Artificial Sequence: Synthetic oligonucleotide
caaagacguaggcggcguc

SEQ ID NO: 199406 - RNA, 19 nt, Artificial Sequence
  Description of Artificial Sequence: Synthetic oligonucleotide
gggugcuucagggaugaac

SEQ ID NO: 199407 - RNA, 19 nt, Artificial Sequence
  Description of Artificial Sequence: Synthetic oligonucleotide
agugcgcacugcugagcgu

SEQ ID NO: 199408 - RNA, 19 nt, Artificial Sequence
  Description of Artificial Sequence: Synthetic oligonucleotide
cacuagaccccagacccca

SEQ ID NO: 199409 - RNA, 19 nt, Artificial Sequence
  Description of Artificial Sequence: Synthetic oligonucleotide
cagcguugacagcuguguc

SEQ ID NO: 199410 - RNA, 19 nt, Artificial Sequence
  Description of Artificial Sequence: Synthetic oligonucleotide
gucgggagcauuggcgaac

SEQ ID NO: 199411 - RNA, 19 nt, Artificial Sequence
  Description of Artificial Sequence: Synthetic oligonucleotide
gacgccccaucaccuccag

SEQ ID NO: 199412 - RNA, 19 nt, Artificial Sequence
  Description of Artificial Sequence: Synthetic oligonucleotide
ugccgauggucaugucggu

SEQ ID NO: 199413 - RNA, 19 nt, Artificial Sequence
  Description of Artificial Sequence: Synthetic oligonucleotide
gcgaacacccgcccuuugc

SEQ ID NO: 199414 - RNA, 19 nt, Artificial Sequence
  Description of Artificial Sequence: Synthetic oligonucleotide
cccauaguuccggucaaag

SEQ ID NO: 199415 - RNA, 19 nt, Artificial Sequence
  Description of Artificial Sequence: Synthetic oligonucleotide
gcauuggcgaacacccgcc

SEQ ID NO: 199416 - RNA, 19 nt, Artificial Sequence
  Description of Artificial Sequence: Synthetic oligonucleotide
gcucaggacucggucaaag

SEQ ID NO: 199417 - RNA, 19 nt, Artificial Sequence
  Description of Artificial Sequence: Synthetic oligonucleotide
ucccggagaggcugaccac

SEQ ID NO: 199418 - RNA, 19 nt, Artificial Sequence
  Description of Artificial Sequence: Synthetic oligonucleotide
agggccgagucugugccga

SEQ ID NO: 199419 - RNA, 19 nt, Artificial Sequence
  Description of Artificial Sequence: Synthetic oligonucleotide
ccuuccgaggaauacaggu

SEQ ID NO: 199420 - RNA, 19 nt, Artificial Sequence
  Description of Artificial Sequence: Synthetic oligonucleotide
acacgacgcuucguccccg

SEQ ID NO: 199421 - RNA, 19 nt, Artificial Sequence
  Description of Artificial Sequence: Synthetic oligonucleotide
acgggacugaaggccacca

SEQ ID NO: 199422 - RNA, 19 nt, Artificial Sequence
  Description of Artificial Sequence: Synthetic oligonucleotide
gcauugagccaccgcgccc

SEQ ID NO: 199423 - RNA, 19 nt, Artificial Sequence
  Description of Artificial Sequence: Synthetic oligonucleotide
caucgccaccgcuggucag

SEQ ID NO: 199424 - RNA, 19 nt, Artificial Sequence
  Description of Artificial Sequence: Synthetic oligonucleotide
gcucaaggugcgucgugug

SEQ ID NO: 199425 - RNA, 19 nt, Artificial Sequence
  Description of Artificial Sequence: Synthetic oligonucleotide
cagguuguacaagaacucu

SEQ ID NO: 199426 - RNA, 19 nt, Artificial Sequence
  Description of Artificial Sequence: Synthetic oligonucleotide
ugagggcgucccuccucgc

SEQ ID NO: 199427 - RNA, 19 nt, Artificial Sequence
  Description of Artificial Sequence: Synthetic oligonucleotide
cuagucaggugaauuuauu

SEQ ID NO: 199428 - RNA, 19 nt, Artificial Sequence
  Description of Artificial Sequence: Synthetic oligonucleotide
cugacccuuggccaggccu

SEQ ID NO: 199429 - RNA, 19 nt, Artificial Sequence
  Description of Artificial Sequence: Synthetic oligonucleotide
gcgaugcucaaaaucagua

SEQ ID NO: 199430 - RNA, 19 nt, Artificial Sequence
  Description of Artificial Sequence: Synthetic oligonucleotide
guucguggcauuucucguu

SEQ ID NO: 199431 - RNA, 19 nt, Artificial Sequence
  Description of Artificial Sequence: Synthetic oligonucleotide
agcgggcacugccaauaau

SEQ ID NO: 199432 - RNA, 19 nt, Artificial Sequence
  Description of Artificial Sequence: Synthetic oligonucleotide
gccagugcgcacugcugag

SEQ ID NO: 199433 - RNA, 19 nt, Artificial Sequence
  Description of Artificial Sequence: Synthetic oligonucleotide
ucaugccagcucacuucuu

SEQ ID NO: 199434 - RNA, 19 nt, Artificial Sequence
  Description of Artificial Sequence: Synthetic oligonucleotide
gugcggagguucuccacaa

SEQ ID NO: 199435 - RNA, 19 nt, Artificial Sequence
  Description of Artificial Sequence: Synthetic oligonucleotide
cccgggugcucuauccuag

SEQ ID NO: 199436 - RNA, 19 nt, Artificial Sequence
  Description of Artificial Sequence: Synthetic oligonucleotide
cccauacgagucacagccc

SEQ ID NO: 199437 - RNA, 19 nt, Artificial Sequence
  Description of Artificial Sequence: Synthetic oligonucleotide
ccgacauccgcaacuucuc

SEQ ID NO: 199438 - RNA, 19 nt, Artificial Sequence
  Description of Artificial Sequence: Synthetic oligonucleotide
ucccauaguuccggucaaa

SEQ ID NO: 199439 - RNA, 19 nt, Artificial Sequence
  Description of Artificial Sequence: Synthetic oligonucleotide
caccgcaaugccugucaca

SEQ ID NO: 199440 - RNA, 19 nt, Artificial Sequence
  Description of Artificial Sequence: Synthetic oligonucleotide
gagccgugcucuccgagau

SEQ ID NO: 199441 - RNA, 19 nt, Artificial Sequence
  Description of Artificial Sequence: Synthetic oligonucleotide
acguggcccagcacgguca

SEQ ID NO: 199442 - RNA, 19 nt, Artificial Sequence
  Description of Artificial Sequence: Synthetic oligonucleotide
gugcucuauccuagaggug

SEQ ID NO: 199443 - RNA, 19 nt, Artificial Sequence
  Description of Artificial Sequence: Synthetic oligonucleotide
gucaaaggcugagggcguc

SEQ ID NO: 199444 - RNA, 19 nt, Artificial Sequence
  Description of Artificial Sequence: Synthetic oligonucleotide
ucgccaccgcuggucagca

SEQ ID NO: 199445 - RNA, 19 nt, Artificial Sequence
  Description of Artificial Sequence: Synthetic oligonucleotide
caaugaacacacgacgcuu

SEQ ID NO: 199446 - RNA, 19 nt, Artificial Sequence
  Description of Artificial Sequence: Synthetic oligonucleotide
gcggccuuagaaaccuuug

SEQ ID NO: 199447 - RNA, 19 nt, Artificial Sequence
  Description of Artificial Sequence: Synthetic oligonucleotide
acacccgcccuuugcgaua

SEQ ID NO: 199448 - RNA, 19 nt, Artificial Sequence
  Description of Artificial Sequence: Synthetic oligonucleotide
gcgucgugugacgugcucc

SEQ ID NO: 199449 - RNA, 19 nt, Artificial Sequence
  Description of Artificial Sequence: Synthetic oligonucleotide
cagcacuccgauggccuug

SEQ ID NO: 199450 - RNA, 19 nt, Artificial Sequence
  Description of Artificial Sequence: Synthetic oligonucleotide
cacucgcuacggaagacau

SEQ ID NO: 199451 - RNA, 19 nt, Artificial Sequence
  Description of Artificial Sequence: Synthetic oligonucleotide
gcucuagucaggugaauuu

SEQ ID NO: 199452 - RNA, 19 nt, Artificial Sequence
  Description of Artificial Sequence: Synthetic oligonucleotide
cuugugaguuccccucagu

SEQ ID NO: 199453 - RNA, 19 nt, Artificial Sequence
  Description of Artificial Sequence: Synthetic oligonucleotide
cguauaugcccauacgagu

SEQ ID NO: 199454 - RNA, 19 nt, Artificial Sequence
  Description of Artificial Sequence: Synthetic oligonucleotide
uccccgacgcugacugcuu

SEQ ID NO: 199455 - RNA, 19 nt, Artificial Sequence
  Description of Artificial Sequence: Synthetic oligonucleotide
ccggaaugacacacaugac

SEQ ID NO: 199456 - RNA, 19 nt, Artificial Sequence
  Description of Artificial Sequence: Synthetic oligonucleotide
cuucguccccgacgcugac

SEQ ID NO: 199457 - RNA, 19 nt, Artificial Sequence
  Description of Artificial Sequence: Synthetic oligonucleotide
cgacgcuucguccccgacg

SEQ ID NO: 199458 - RNA, 19 nt, Artificial Sequence
  Description of Artificial Sequence: Synthetic oligonucleotide
caccccggccuuccgagga

SEQ ID NO: 199459 - RNA, 19 nt, Artificial Sequence
  Description of Artificial Sequence: Synthetic oligonucleotide
ccgaguuccuugugaguuc

SEQ ID NO: 199460 - RNA, 19 nt, Artificial Sequence
  Description of Artificial Sequence: Synthetic oligonucleotide
auccgcggcuccgcgucuc

SEQ ID NO: 199461 - RNA, 19 nt, Artificial Sequence
  Description of Artificial Sequence: Synthetic oligonucleotide
aaggauccucaaagacgua

SEQ ID NO: 199462 - RNA, 19 nt, Artificial Sequence
  Description of Artificial Sequence: Synthetic oligonucleotide
gagggcgucccuccucgcu

SEQ ID NO: 199463 - RNA, 19 nt, Artificial Sequence
  Description of Artificial Sequence: Synthetic oligonucleotide
gugugacgugcuccagcuc

SEQ ID NO: 199464 - RNA, 19 nt, Artificial Sequence
  Description of Artificial Sequence: Synthetic oligonucleotide
cagugacgccccaucaccu

SEQ ID NO: 199465 - RNA, 19 nt, Artificial Sequence
  Description of Artificial Sequence: Synthetic oligonucleotide
cacccgugaggcugccguc

SEQ ID NO: 199466 - RNA, 19 nt, Artificial Sequence
  Description of Artificial Sequence: Synthetic oligonucleotide
ugccggucgauggcacccu

SEQ ID NO: 199467 - RNA, 19 nt, Artificial Sequence
  Description of Artificial Sequence: Synthetic oligonucleotide
gcaucgccaccgcugguca

SEQ ID NO: 199468 - RNA, 19 nt, Artificial Sequence
  Description of Artificial Sequence: Synthetic oligonucleotide
ggagacccggagcccgagc

SEQ ID NO: 199469 - RNA, 19 nt, Artificial Sequence
  Description of Artificial Sequence: Synthetic oligonucleotide
guggccggaaugacacaca

SEQ ID NO: 199470 - RNA, 19 nt, Artificial Sequence
  Description of Artificial Sequence: Synthetic oligonucleotide
gccuuccgaggaauacagg

SEQ ID NO: 199471 - RNA, 19 nt, Artificial Sequence
  Description of Artificial Sequence: Synthetic oligonucleotide
cccgacauccgcaacuucu

SEQ ID NO: 199472 - RNA, 19 nt, Artificial Sequence
  Description of Artificial Sequence: Synthetic oligonucleotide
acggagcuggauggccuca

SEQ ID NO: 199473 - RNA, 19 nt, Artificial Sequence
  Description of Artificial Sequence: Synthetic oligonucleotide
gagauccgcggcuccgcgu

SEQ ID NO: 199474 - RNA, 19 nt, Artificial Sequence
  Description of Artificial Sequence: Synthetic oligonucleotide
caguggcuagguagccgca

SEQ ID NO: 199475 - RNA, 19 nt, Artificial Sequence
  Description of Artificial Sequence: Synthetic oligonucleotide
cguuccggagcaccaggcc

SEQ ID NO: 199476 - RNA, 19 nt, Artificial Sequence
  Description of Artificial Sequence: Synthetic oligonucleotide
uggcgaacacccgcccuuu

SEQ ID NO: 199477 - RNA, 19 nt, Artificial Sequence
  Description of Artificial Sequence: Synthetic oligonucleotide
caccgcuggucagcacucc

SEQ ID NO: 199478 - RNA, 19 nt, Artificial Sequence
  Description of Artificial Sequence: Synthetic oligonucleotide
gcagcguugacagcugugu

SEQ ID NO: 199479 - RNA, 19 nt, Artificial Sequence
  Description of Artificial Sequence: Synthetic oligonucleotide
gcggucacaacucuccauu

SEQ ID NO: 199480 - RNA, 19 nt, Artificial Sequence
  Description of Artificial Sequence: Synthetic oligonucleotide
ccauacgagucacagcccu

SEQ ID NO: 199481 - RNA, 19 nt, Artificial Sequence
  Description of Artificial Sequence: Synthetic oligonucleotide
caggcguccuucucucgua

SEQ ID NO: 199482 - RNA, 19 nt, Artificial Sequence
  Description of Artificial Sequence: Synthetic oligonucleotide
ggcgaacacccgcccuuug

SEQ ID NO: 199483 - RNA, 19 nt, Artificial Sequence
  Description of Artificial Sequence: Synthetic oligonucleotide
caucgaugaccuccauuau

SEQ ID NO: 199484 - RNA, 19 nt, Artificial Sequence
  Description of Artificial Sequence: Synthetic oligonucleotide
ccagugcgcacugcugagc

SEQ ID NO: 199485 - RNA, 19 nt, Artificial Sequence
  Description of Artificial Sequence: Synthetic oligonucleotide
cacgacgcuucguccccga

SEQ ID NO: 199486 - RNA, 19 nt, Artificial Sequence
  Description of Artificial Sequence: Synthetic oligonucleotide
acucgcuacggaagacauu

SEQ ID NO: 199487 - RNA, 19 nt, Artificial Sequence
  Description of Artificial Sequence: Synthetic oligonucleotide
accccggccuuccgaggaa

SEQ ID NO: 199488 - RNA, 19 nt, Artificial Sequence
  Description of Artificial Sequence: Synthetic oligonucleotide
cugagcguacagcugcguu

SEQ ID NO: 199489 - RNA, 19 nt, Artificial Sequence
  Description of Artificial Sequence: Synthetic oligonucleotide
gcacccgugaggcugccgu

SEQ ID NO: 199490 - RNA, 19 nt, Artificial Sequence
  Description of Artificial Sequence: Synthetic oligonucleotide
gggcgugaauguuguaggu

SEQ ID NO: 199491 - RNA, 19 nt, Artificial Sequence
  Description of Artificial Sequence: Synthetic oligonucleotide
gcuucguccccgacgcuga

SEQ ID NO: 199492 - RNA, 19 nt, Artificial Sequence
  Description of Artificial Sequence: Synthetic oligonucleotide
uggcggccuuagaaaccuu

SEQ ID NO: 199493 - RNA, 19 nt, Artificial Sequence
  Description of Artificial Sequence: Synthetic oligonucleotide
cgggugcucuauccuagag

SEQ ID NO: 199494 - RNA, 19 nt, Artificial Sequence
  Description of Artificial Sequence: Synthetic oligonucleotide
ggcaaggagcuuguaaauu

SEQ ID NO: 199495 - RNA, 19 nt, Artificial Sequence
  Description of Artificial Sequence: Synthetic oligonucleotide
ccaccgcaaugccugucac

SEQ ID NO: 199496 - RNA, 19 nt, Artificial Sequence
  Description of Artificial Sequence: Synthetic oligonucleotide
cugugccgauggucauguc

SEQ ID NO: 199497 - RNA, 19 nt, Artificial Sequence
  Description of Artificial Sequence: Synthetic oligonucleotide
caccacccugcugcaggug

SEQ ID NO: 199498 - RNA, 19 nt, Artificial Sequence
  Description of Artificial Sequence: Synthetic oligonucleotide
ccggccuuccgaggaauac

SEQ ID NO: 199499 - RNA, 19 nt, Artificial Sequence
  Description of Artificial Sequence: Synthetic oligonucleotide
ggccgagucugugccgaug

SEQ ID NO: 199500 - RNA, 19 nt, Artificial Sequence
  Description of Artificial Sequence: Synthetic oligonucleotide
ccacucgcuacggaagaca

SEQ ID NO: 199501 - RNA, 19 nt, Artificial Sequence
  Description of Artificial Sequence: Synthetic oligonucleotide
cgucgugugacgugcucca

SEQ ID NO: 199502 - RNA, 19 nt, Artificial Sequence
  Description of Artificial Sequence: Synthetic oligonucleotide
gucuaugcucaaggugcgu

SEQ ID NO: 199503 - RNA, 19 nt, Artificial Sequence
  Description of Artificial Sequence: Synthetic oligonucleotide
gguagugugccagcauuuu

SEQ ID NO: 199504 - RNA, 19 nt, Artificial Sequence
  Description of Artificial Sequence: Synthetic oligonucleotide
augccguguuggaguagau

SEQ ID NO: 199505 - RNA, 19 nt, Artificial Sequence
  Description of Artificial Sequence: Synthetic oligonucleotide
gauccgcggcuccgcgucu

SEQ ID NO: 199506 - RNA, 19 nt, Artificial Sequence
  Description of Artificial Sequence: Synthetic oligonucleotide
gucccucggagaugccagu

SEQ ID NO: 199507 - RNA, 19 nt, Artificial Sequence
  Description of Artificial Sequence: Synthetic oligonucleotide
cucucguagugaaggccuu

SEQ ID NO: 199508 - RNA, 19 nt, Artificial Sequence
  Description of Artificial Sequence: Synthetic oligonucleotide
ggucaaaggcugagggcgu

SEQ ID NO: 199509 - RNA, 19 nt, Artificial Sequence
  Description of Artificial Sequence: Synthetic oligonucleotide
cugccccacucgcuacgga

SEQ ID NO: 199510 - RNA, 19 nt, Artificial Sequence
  Description of Artificial Sequence: Synthetic oligonucleotide
ccguguuggaguagauugu

SEQ ID NO: 199511 - RNA, 19 nt, Artificial Sequence
  Description of Artificial Sequence: Synthetic oligonucleotide
cccacucgcuacggaagac

SEQ ID NO: 199512 - RNA, 19 nt, Artificial Sequence
  Description of Artificial Sequence: Synthetic oligonucleotide
aggcugccguccccaccaa

SEQ ID NO: 199513 - RNA, 19 nt, Artificial Sequence
  Description of Artificial Sequence: Synthetic oligonucleotide
ggacucggucaaaggcuga

SEQ ID NO: 199514 - RNA, 19 nt, Artificial Sequence
  Description of Artificial Sequence: Synthetic oligonucleotide
ggcacccgugaggcugccg

SEQ ID NO: 199515 - RNA, 19 nt, Artificial Sequence
  Description of Artificial Sequence: Synthetic oligonucleotide
ggcaugcgaugcucaaaau

SEQ ID NO: 199516 - RNA, 19 nt, Artificial Sequence
  Description of Artificial Sequence: Synthetic oligonucleotide
cccgacgcugacugcuuga

SEQ ID NO: 199517 - RNA, 19 nt, Artificial Sequence
  Description of Artificial Sequence: Synthetic oligonucleotide
ccccgacgcugacugcuug

SEQ ID NO: 199518 - RNA, 19 nt, Artificial Sequence
  Description of Artificial Sequence: Synthetic oligonucleotide
ccgugugucccucggagau

SEQ ID NO: 199519 - RNA, 19 nt, Artificial Sequence
  Description of Artificial Sequence: Synthetic oligonucleotide
cgggacugaaggccaccac

SEQ ID NO: 199520 - RNA, 19 nt, Artificial Sequence
  Description of Artificial Sequence: Synthetic oligonucleotide
ccaggcguccuucucucgu

SEQ ID NO: 199521 - RNA, 19 nt, Artificial Sequence
  Description of Artificial Sequence: Synthetic oligonucleotide
cacccucguaggccucaaa

SEQ ID NO: 199522 - RNA, 19 nt, Artificial Sequence
  Description of Artificial Sequence: Synthetic oligonucleotide
cagcccugacagcagcauu

SEQ ID NO: 199523 - RNA, 19 nt, Artificial Sequence
  Description of Artificial Sequence: Synthetic oligonucleotide
gccggucgauggcacccuc

SEQ ID NO: 199524 - RNA, 19 nt, Artificial Sequence
  Description of Artificial Sequence: Synthetic oligonucleotide
cccggggcaugcgaugcuc

SEQ ID NO: 199525 - RNA, 19 nt, Artificial Sequence
  Description of Artificial Sequence: Synthetic oligonucleotide
ggcggccuuagaaaccuuu

SEQ ID NO: 199526 - RNA, 19 nt, Artificial Sequence
  Description of Artificial Sequence: Synthetic oligonucleotide
ccccgggugcucuauccua

SEQ ID NO: 199527 - RNA, 19 nt, Artificial Sequence
  Description of Artificial Sequence: Synthetic oligonucleotide
cggccuuccgaggaauaca

SEQ ID NO: 199528 - RNA, 19 nt, Artificial Sequence
  Description of Artificial Sequence: Synthetic oligonucleotide
cgugcucuccgagaucuua

SEQ ID NO: 199529 - RNA, 19 nt, Artificial Sequence
  Description of Artificial Sequence: Synthetic oligonucleotide
cguccccgacgcugacugc

SEQ ID NO: 199530 - RNA, 19 nt, Artificial Sequence
  Description of Artificial Sequence: Synthetic oligonucleotide
ggugggcaaggagcuugua

SEQ ID NO: 199531 - RNA, 19 nt, Artificial Sequence
  Description of Artificial Sequence: Synthetic oligonucleotide
ccgagaucuuaccuuccuu

SEQ ID NO: 199532 - RNA, 19 nt, Artificial Sequence
  Description of Artificial Sequence: Synthetic oligonucleotide
gugcgucgugugacgugcu

SEQ ID NO: 199533 - RNA, 19 nt, Artificial Sequence
  Description of Artificial Sequence: Synthetic oligonucleotide
ccucugcgaugauaaugau

SEQ ID NO: 199534 - RNA, 19 nt, Artificial Sequence
  Description of Artificial Sequence: Synthetic oligonucleotide
cccggccuuccgaggaaua

SEQ ID NO: 199535 - RNA, 19 nt, Artificial Sequence
  Description of Artificial Sequence: Synthetic oligonucleotide
gguccacgguggccauggu

SEQ ID NO: 199536 - RNA, 19 nt, Artificial Sequence
  Description of Artificial Sequence: Synthetic oligonucleotide
ccgacgcugacugcuugau

SEQ ID NO: 199537 - RNA, 19 nt, Artificial Sequence
  Description of Artificial Sequence: Synthetic oligonucleotide
gggccgagucugugccgau

SEQ ID NO: 199538 - RNA, 19 nt, Artificial Sequence
  Description of Artificial Sequence: Synthetic oligonucleotide
ggggugcuucagggaugaa

SEQ ID NO: 199539 - RNA, 19 nt, Artificial Sequence
  Description of Artificial Sequence: Synthetic oligonucleotide
gcgcaucgccaccgcuggu

SEQ ID NO: 199540 - RNA, 19 nt, Artificial Sequence
  Description of Artificial Sequence: Synthetic oligonucleotide
aaugauugaaaugugcucc

SEQ ID NO: 199541 - RNA, 19 nt, Artificial Sequence
  Description of Artificial Sequence: Synthetic oligonucleotide
acuuaaucauuauagagac

SEQ ID NO: 199542 - RNA, 19 nt, Artificial Sequence
  Description of Artificial Sequence: Synthetic oligonucleotide
aacaguuguaacuaagcac

SEQ ID NO: 199543 - RNA, 19 nt, Artificial Sequence
  Description of Artificial Sequence: Synthetic oligonucleotide
aauaacaacgcucuaucag

SEQ ID NO: 199544 - RNA, 19 nt, Artificial Sequence
  Description of Artificial Sequence: Synthetic oligonucleotide
agauuaucuacacuaauac

SEQ ID NO: 199545 - RNA, 19 nt, Artificial Sequence
  Description of Artificial Sequence: Synthetic oligonucleotide
aguguauuaaacaugaguc

SEQ ID NO: 199546 - RNA, 19 nt, Artificial Sequence
  Description of Artificial Sequence: Synthetic oligonucleotide
auaacuaucaaauucccca

SEQ ID NO: 199547 - RNA, 19 nt, Artificial Sequence
  Description of Artificial Sequence: Synthetic oligonucleotide
uuugacaauccuaaaauga

SEQ ID NO: 199548 - RNA, 19 nt, Artificial Sequence
  Description of Artificial Sequence: Synthetic oligonucleotide
aacugcauaagauguuugc

SEQ ID NO: 199549 - RNA, 19 nt, Artificial Sequence
  Description of Artificial Sequence: Synthetic oligonucleotide
ucuaaacuaaaucuauugc

SEQ ID NO: 199550 - RNA, 19 nt, Artificial Sequence
  Description of Artificial Sequence: Synthetic oligonucleotide
aacggcaauagccaauugg

SEQ ID NO: 199551 - RNA, 19 nt, Artificial Sequence
  Description of Artificial Sequence: Synthetic oligonucleotide
aauuguuacaaaaugggca

SEQ ID NO: 199552 - RNA, 19 nt, Artificial Sequence
  Description of Artificial Sequence: Synthetic oligonucleotide
uuagaaagcaauuguagcu

SEQ ID NO: 199553 - RNA, 19 nt, Artificial Sequence
  Description of Artificial Sequence: Synthetic oligonucleotide
aaucauuauagagacuaac

SEQ ID NO: 199554 - RNA, 19 nt, Artificial Sequence
  Description of Artificial Sequence: Synthetic oligonucleotide
uaugacggggagaauagcg

SEQ ID NO: 199555 - RNA, 19 nt, Artificial Sequence
  Description of Artificial Sequence: Synthetic oligonucleotide
aaauuagccauucuuccca

SEQ ID NO: 199556 - RNA, 19 nt, Artificial Sequence
  Description of Artificial Sequence: Synthetic oligonucleotide
guuuagauaaacuuuagaa

SEQ ID NO: 199557 - RNA, 19 nt, Artificial Sequence
  Description of Artificial Sequence: Synthetic oligonucleotide
caucuuauguacgagagcg

SEQ ID NO: 199558 - RNA, 19 nt, Artificial Sequence
  Description of Artificial Sequence: Synthetic oligonucleotide
auuauagagacuaacagga

SEQ ID NO: 199559 - RNA, 19 nt, Artificial Sequence
  Description of Artificial Sequence: Synthetic oligonucleotide
uauaaggucaauacugcca

SEQ ID NO: 199560 - RNA, 19 nt, Artificial Sequence
  Description of Artificial Sequence: Synthetic oligonucleotide
uaauuguuacaaaaugggc

SEQ ID NO: 199561 - RNA, 19 nt, Artificial Sequence
  Description of Artificial Sequence: Synthetic oligonucleotide
aacuuaaucauuauagaga

SEQ ID NO: 199562 - RNA, 19 nt, Artificial Sequence
  Description of Artificial Sequence: Synthetic oligonucleotide
aggaaaacuguauacaaca

SEQ ID NO: 199563 - RNA, 19 nt, Artificial Sequence
  Description of Artificial Sequence: Synthetic oligonucleotide
aacuguauacaacaugggu

SEQ ID NO: 199564 - RNA, 19 nt, Artificial Sequence
  Description of Artificial Sequence: Synthetic oligonucleotide
ugaguuaugucugucauca

SEQ ID NO: 199565 - RNA, 19 nt, Artificial Sequence
  Description of Artificial Sequence: Synthetic oligonucleotide
uccaucgugcaucuuaagg

SEQ ID NO: 199566 - RNA, 19 nt, Artificial Sequence
  Description of Artificial Sequence: Synthetic oligonucleotide
aucuuaagggcuccaaucg

SEQ ID NO: 199567 - RNA, 19 nt, Artificial Sequence
  Description of Artificial Sequence: Synthetic oligonucleotide
cugauuuacuauuuuaaac

SEQ ID NO: 199568 - RNA, 19 nt, Artificial Sequence
  Description of Artificial Sequence: Synthetic oligonucleotide
ucagauguuaugcaaagua

SEQ ID NO: 199569 - RNA, 19 nt, Artificial Sequence
  Description of Artificial Sequence: Synthetic oligonucleotide
agaaauaaccgauacacua

SEQ ID NO: 199570 - RNA, 19 nt, Artificial Sequence
  Description of Artificial Sequence: Synthetic oligonucleotide
aguauaaggucaauacugc

SEQ ID NO: 199571 - RNA, 19 nt, Artificial Sequence
  Description of Artificial Sequence: Synthetic oligonucleotide
aaauaaccgauacacuagu

SEQ ID NO: 199572 - RNA, 19 nt, Artificial Sequence
  Description of Artificial Sequence: Synthetic oligonucleotide
uguuuggaaauagacaccc

SEQ ID NO: 199573 - RNA, 19 nt, Artificial Sequence
  Description of Artificial Sequence: Synthetic oligonucleotide
uacaaauauccuaagggaa

SEQ ID NO: 199574 - RNA, 19 nt, Artificial Sequence
  Description of Artificial Sequence: Synthetic oligonucleotide
gacaauccuaaaaugauug

SEQ ID NO: 199575 - RNA, 19 nt, Artificial Sequence
  Description of Artificial Sequence: Synthetic oligonucleotide
auguuuaccaucuacucgu

SEQ ID NO: 199576 - RNA, 19 nt, Artificial Sequence
  Description of Artificial Sequence: Synthetic oligonucleotide
aagaacuuccccaaguaag

SEQ ID NO: 199577 - RNA, 19 nt, Artificial Sequence
  Description of Artificial Sequence: Synthetic oligonucleotide
aaaauccacacgaaugcgg

SEQ ID NO: 199578 - RNA, 19 nt, Artificial Sequence
  Description of Artificial Sequence: Synthetic oligonucleotide
uaaccgauacacuaguuac

SEQ ID NO: 199579 - RNA, 19 nt, Artificial Sequence
  Description of Artificial Sequence: Synthetic oligonucleotide
uuuaccaucuacucgugcu

SEQ ID NO: 199580 - RNA, 19 nt, Artificial Sequence
  Description of Artificial Sequence: Synthetic oligonucleotide
auugauauuauacucuguu

SEQ ID NO: 199581 - RNA, 19 nt, Artificial Sequence
  Description of Artificial Sequence: Synthetic oligonucleotide
ugucuuuuaguauaagguc

SEQ ID NO: 199582 - RNA, 19 nt, Artificial Sequence
  Description of Artificial Sequence: Synthetic oligonucleotide
gaaauaaccgauacacuag

SEQ ID NO: 199583 - RNA, 19 nt, Artificial Sequence
  Description of Artificial Sequence: Synthetic oligonucleotide
auuguuacaaaaugggcaa

SEQ ID NO: 199584 - RNA, 19 nt, Artificial Sequence
  Description of Artificial Sequence: Synthetic oligonucleotide
ccuacaaauauccuaaggg

SEQ ID NO: 199585 - RNA, 19 nt, Artificial Sequence
  Description of Artificial Sequence: Synthetic oligonucleotide
uucgagaucgagaucuucc

SEQ ID NO: 199586 - RNA, 19 nt, Artificial Sequence
  Description of Artificial Sequence: Synthetic oligonucleotide
uaacuaagcacugugacaa

SEQ ID NO: 199587 - RNA, 19 nt, Artificial Sequence
  Description of Artificial Sequence: Synthetic oligonucleotide
aauuccaucgugcaucuua

SEQ ID NO: 199588 - RNA, 19 nt, Artificial Sequence
  Description of Artificial Sequence: Synthetic oligonucleotide
aguuggguuauucaaucag

SEQ ID NO: 199589 - RNA, 19 nt, Artificial Sequence
  Description of Artificial Sequence: Synthetic oligonucleotide
aaauaacaacgcucuauca

SEQ ID NO: 199590 - RNA, 19 nt, Artificial Sequence
  Description of Artificial Sequence: Synthetic oligonucleotide
auagacacccuguacccac

SEQ ID NO: 199591 - RNA, 19 nt, Artificial Sequence
  Description of Artificial Sequence: Synthetic oligonucleotide
agcaauuuauauuuacagu

SEQ ID NO: 199592 - RNA, 19 nt, Artificial Sequence
  Description of Artificial Sequence: Synthetic oligonucleotide
accgauacacuaguuaccc

SEQ ID NO: 199593 - RNA, 19 nt, Artificial Sequence
  Description of Artificial Sequence: Synthetic oligonucleotide
ucuuauguacgagagcgag

SEQ ID NO: 199594 - RNA, 19 nt, Artificial Sequence
  Description of Artificial Sequence: Synthetic oligonucleotide
acaacgcucuaucagucac

SEQ ID NO: 199595 - RNA, 19 nt, Artificial Sequence
  Description of Artificial Sequence: Synthetic oligonucleotide
aaaauugaccuugaccaca

SEQ ID NO: 199596 - RNA, 19 nt, Artificial Sequence
  Description of Artificial Sequence: Synthetic oligonucleotide
guuguaacuaagcacugug

SEQ ID NO: 199597 - RNA, 19 nt, Artificial Sequence
  Description of Artificial Sequence: Synthetic oligonucleotide
cauuagucccuauuaaaac

SEQ ID NO: 199598 - RNA, 19 nt, Artificial Sequence
  Description of Artificial Sequence: Synthetic oligonucleotide
acgaaugcgguuugguugg

SEQ ID NO: 199599 - RNA, 19 nt, Artificial Sequence
  Description of Artificial Sequence: Synthetic oligonucleotide
auuuaaagaaauaaccgau

SEQ ID NO: 199600 - RNA, 19 nt, Artificial Sequence
  Description of Artificial Sequence: Synthetic oligonucleotide
uuaagugcuuucuugguua

SEQ ID NO: 199601 - RNA, 19 nt, Artificial Sequence
  Description of Artificial Sequence: Synthetic oligonucleotide
agccaauuaaguugaauga

SEQ ID NO: 199602 - RNA, 19 nt, Artificial Sequence
  Description of Artificial Sequence: Synthetic oligonucleotide
aacgcucuaucagucacac

SEQ ID NO: 199603 - RNA, 19 nt, Artificial Sequence
  Description of Artificial Sequence: Synthetic oligonucleotide
gauuaucuacacuaauaca

SEQ ID NO: 199604 - RNA, 19 nt, Artificial Sequence
  Description of Artificial Sequence: Synthetic oligonucleotide
aaccgauacacuaguuacc

SEQ ID NO: 199605 - RNA, 19 nt, Artificial Sequence
  Description of Artificial Sequence: Synthetic oligonucleotide
uuacuguacagguaucaca

SEQ ID NO: 199606 - RNA, 19 nt, Artificial Sequence
  Description of Artificial Sequence: Synthetic oligonucleotide
aguuauguaauugaaguuu

SEQ ID NO: 199607 - RNA, 19 nt, Artificial Sequence
  Description of Artificial Sequence: Synthetic oligonucleotide
uucaaucagauguuaugca

SEQ ID NO: 199608 - RNA, 19 nt, Artificial Sequence
  Description of Artificial Sequence: Synthetic oligonucleotide
agugagcccucuccaaucc

SEQ ID NO: 199609 - RNA, 19 nt, Artificial Sequence
  Description of Artificial Sequence: Synthetic oligonucleotide
uuauacucuguuuggaaau

SEQ ID NO: 199610 - RNA, 19 nt, Artificial Sequence
  Description of Artificial Sequence: Synthetic oligonucleotide
uuauguacgagagcgagau

SEQ ID NO: 199611 - RNA, 19 nt, Artificial Sequence
  Description of Artificial Sequence: Synthetic oligonucleotide
accuacuuauucuucaacu

SEQ ID NO: 199612 - RNA, 19 nt, Artificial Sequence
  Description of Artificial Sequence: Synthetic oligonucleotide
auugugaauugucaaucug

SEQ ID NO: 199613 - RNA, 19 nt, Artificial Sequence
  Description of Artificial Sequence: Synthetic oligonucleotide
agguuuagaaagcaauugu

SEQ ID NO: 199614 - RNA, 19 nt, Artificial Sequence
  Description of Artificial Sequence: Synthetic oligonucleotide
ugaaauaacaacgcucuau

SEQ ID NO: 199615 - RNA, 19 nt, Artificial Sequence
  Description of Artificial Sequence: Synthetic oligonucleotide
aauccugguaauucauccu

SEQ ID NO: 199616 - RNA, 19 nt, Artificial Sequence
  Description of Artificial Sequence: Synthetic oligonucleotide
auugcuccagcguauuauc

SEQ ID NO: 199617 - RNA, 19 nt, Artificial Sequence
  Description of Artificial Sequence: Synthetic oligonucleotide
cagauguuaugcaaaguac

SEQ ID NO: 199618 - RNA, 19 nt, Artificial Sequence
  Description of Artificial Sequence: Synthetic oligonucleotide
ucugcuaugacggggagaa

SEQ ID NO: 199619 - RNA, 19 nt, Artificial Sequence
  Description of Artificial Sequence: Synthetic oligonucleotide
uuaaacaauccugucuaug

SEQ ID NO: 199620 - RNA, 19 nt, Artificial Sequence
  Description of Artificial Sequence: Synthetic oligonucleotide
gaauugugaauugucaauc

SEQ ID NO: 199621 - RNA, 19 nt, Artificial Sequence
  Description of Artificial Sequence: Synthetic oligonucleotide
auguacgagagcgagaucu

SEQ ID NO: 199622 - RNA, 19 nt, Artificial Sequence
  Description of Artificial Sequence: Synthetic oligonucleotide
acugauuuacuauuuuaaa

SEQ ID NO: 199623 - RNA, 19 nt, Artificial Sequence
  Description of Artificial Sequence: Synthetic oligonucleotide
caucgugcaucuuaagggc

SEQ ID NO: 199624 - RNA, 19 nt, Artificial Sequence
  Description of Artificial Sequence: Synthetic oligonucleotide
ugacuuacugauuuacuau

SEQ ID NO: 199625 - RNA, 19 nt, Artificial Sequence
  Description of Artificial Sequence: Synthetic oligonucleotide
cacgaaugcgguuugguug

SEQ ID NO: 199626 - RNA, 19 nt, Artificial Sequence
  Description of Artificial Sequence: Synthetic oligonucleotide
uuaauccaaagcauucuua

SEQ ID NO: 199627 - RNA, 19 nt, Artificial Sequence
  Description of Artificial Sequence: Synthetic oligonucleotide
gagucaauuaugaauauua

SEQ ID NO: 199628 - RNA, 19 nt, Artificial Sequence
  Description of Artificial Sequence: Synthetic oligonucleotide
auauccuaagggaacagag

SEQ ID NO: 199629 - RNA, 19 nt, Artificial Sequence
  Description of Artificial Sequence: Synthetic oligonucleotide
aaggagauugcuccagcgu

SEQ ID NO: 199630 - RNA, 19 nt, Artificial Sequence
  Description of Artificial Sequence: Synthetic oligonucleotide
uacaccaacagcaggccac

SEQ ID NO: 199631 - RNA, 19 nt, Artificial Sequence
  Description of Artificial Sequence: Synthetic oligonucleotide
uuaccaucuacucgugcug

SEQ ID NO: 199632 - RNA, 19 nt, Artificial Sequence
  Description of Artificial Sequence: Synthetic oligonucleotide
aagacacaugaaaagcaag

SEQ ID NO: 199633 - RNA, 19 nt, Artificial Sequence
  Description of Artificial Sequence: Synthetic oligonucleotide
gaauagccaauuaaguuga

SEQ ID NO: 199634 - RNA, 19 nt, Artificial Sequence
  Description of Artificial Sequence: Synthetic oligonucleotide
aagauuguacugaguaaag

SEQ ID NO: 199635 - RNA, 19 nt, Artificial Sequence
  Description of Artificial Sequence: Synthetic oligonucleotide
uucugcuacgacuacggcu

SEQ ID NO: 199636 - RNA, 19 nt, Artificial Sequence
  Description of Artificial Sequence: Synthetic oligonucleotide
caguucaacugauaaugcc

SEQ ID NO: 199637 - RNA, 19 nt, Artificial Sequence
  Description of Artificial Sequence: Synthetic oligonucleotide
auaaccgauacacuaguua

SEQ ID NO: 199638 - RNA, 19 nt, Artificial Sequence
  Description of Artificial Sequence: Synthetic oligonucleotide
aauauccuaagggaacaga

SEQ ID NO: 199639 - RNA, 19 nt, Artificial Sequence
  Description of Artificial Sequence: Synthetic oligonucleotide
caucuuaagggcuccaauc

SEQ ID NO: 199640 - RNA, 19 nt, Artificial Sequence
  Description of Artificial Sequence: Synthetic oligonucleotide
guauaaggucaauacugcc

SEQ ID NO: 199641 - RNA, 19 nt, Artificial Sequence
  Description of Artificial Sequence: Synthetic oligonucleotide
aguucaacugauaaugcca

SEQ ID NO: 199642 - RNA, 19 nt, Artificial Sequence
  Description of Artificial Sequence: Synthetic oligonucleotide
acuaguuacccaguaaacu

SEQ ID NO: 199643 - RNA, 19 nt, Artificial Sequence
  Description of Artificial Sequence: Synthetic oligonucleotide
acugauaaugccaacacuu

SEQ ID NO: 199644 - RNA, 19 nt, Artificial Sequence
  Description of Artificial Sequence: Synthetic oligonucleotide
caaguuggguuauucaauc

SEQ ID NO: 199645 - RNA, 19 nt, Artificial Sequence
  Description of Artificial Sequence: Synthetic oligonucleotide
uuuuaguauaaggucaaua

SEQ ID NO: 199646 - RNA, 19 nt, Artificial Sequence
  Description of Artificial Sequence: Synthetic oligonucleotide
gaagggagcaaauaauugu

SEQ ID NO: 199647 - RNA, 19 nt, Artificial Sequence
  Description of Artificial Sequence: Synthetic oligonucleotide
aaguuggguuauucaauca

SEQ ID NO: 199648 - RNA, 19 nt, Artificial Sequence
  Description of Artificial Sequence: Synthetic oligonucleotide
aagucuaaacuaaaucuau

SEQ ID NO: 199649 - RNA, 19 nt, Artificial Sequence
  Description of Artificial Sequence: Synthetic oligonucleotide
cauguacaccaacagcagg

SEQ ID NO: 199650 - RNA, 19 nt, Artificial Sequence
  Description of Artificial Sequence: Synthetic oligonucleotide
gguaaucugaucccgcucc

SEQ ID NO: 199651 - RNA, 19 nt, Artificial Sequence
  Description of Artificial Sequence: Synthetic oligonucleotide
cugauaaugccaacacuug

SEQ ID NO: 199652 - RNA, 19 nt, Artificial Sequence
  Description of Artificial Sequence: Synthetic oligonucleotide
aauagcguggugauccucu

SEQ ID NO: 199653 - RNA, 19 nt, Artificial Sequence
  Description of Artificial Sequence: Synthetic oligonucleotide
augaguuaugucugucauc

SEQ ID NO: 199654 - RNA, 19 nt, Artificial Sequence
  Description of Artificial Sequence: Synthetic oligonucleotide
uacgacuacggcuucgaga

SEQ ID NO: 199655 - RNA, 19 nt, Artificial Sequence
  Description of Artificial Sequence: Synthetic oligonucleotide
uuuugugguugcaaaguua

SEQ ID NO: 199656 - RNA, 19 nt, Artificial Sequence
  Description of Artificial Sequence: Synthetic oligonucleotide
ucuuaagggcuccaaucgu

SEQ ID NO: 199657 - RNA, 19 nt, Artificial Sequence
  Description of Artificial Sequence: Synthetic oligonucleotide
agauguuaugcaaaguacu

SEQ ID NO: 199658 - RNA, 19 nt, Artificial Sequence
  Description of Artificial Sequence: Synthetic oligonucleotide
uggagucauaccauugccu

SEQ ID NO: 199659 - RNA, 19 nt, Artificial Sequence
  Description of Artificial Sequence: Synthetic oligonucleotide
caaggagauugcuccagcg

SEQ ID NO: 199660 - RNA, 19 nt, Artificial Sequence
  Description of Artificial Sequence: Synthetic oligonucleotide
gagcauggaaauuaacuaa

SEQ ID NO: 199661 - RNA, 19 nt, Artificial Sequence
  Description of Artificial Sequence: Synthetic oligonucleotide
uugauauuauacucuguuu

SEQ ID NO: 199662 - RNA, 19 nt, Artificial Sequence
  Description of Artificial Sequence: Synthetic oligonucleotide
ugacaauccuaaaaugauu

SEQ ID NO: 199663 - RNA, 19 nt, Artificial Sequence
  Description of Artificial Sequence: Synthetic oligonucleotide
acccuguacccacauguac

SEQ ID NO: 199664 - RNA, 19 nt, Artificial Sequence
  Description of Artificial Sequence: Synthetic oligonucleotide
cuuaagggcuccaaucguc

SEQ ID NO: 199665 - RNA, 19 nt, Artificial Sequence
  Description of Artificial Sequence: Synthetic oligonucleotide
acuguauacaacauggguu

SEQ ID NO: 199666 - RNA, 19 nt, Artificial Sequence
  Description of Artificial Sequence: Synthetic oligonucleotide
agaucgagaucuuccauaa

SEQ ID NO: 199667 - RNA, 19 nt, Artificial Sequence
  Description of Artificial Sequence: Synthetic oligonucleotide
guaacuaagcacugugaca

SEQ ID NO: 199668 - RNA, 19 nt, Artificial Sequence
  Description of Artificial Sequence: Synthetic oligonucleotide
uacucuguuuggaaauaga

SEQ ID NO: 199669 - RNA, 19 nt, Artificial Sequence
  Description of Artificial Sequence: Synthetic oligonucleotide
aauagccaauuggaaaccu

SEQ ID NO: 199670 - RNA, 19 nt, Artificial Sequence
  Description of Artificial Sequence: Synthetic oligonucleotide
aaaacggcaauagccaauu

SEQ ID NO: 199671 - RNA, 19 nt, Artificial Sequence
  Description of Artificial Sequence: Synthetic oligonucleotide
ucccaacuagauuaucuac

SEQ ID NO: 199672 - RNA, 19 nt, Artificial Sequence
  Description of Artificial Sequence: Synthetic oligonucleotide
ugaauccugguaauucauc

SEQ ID NO: 199673 - RNA, 19 nt, Artificial Sequence
  Description of Artificial Sequence: Synthetic oligonucleotide
aacccuugucuuuuaguau

SEQ ID NO: 199674 - RNA, 19 nt, Artificial Sequence
  Description of Artificial Sequence: Synthetic oligonucleotide
ucgagaucgagaucuucca

SEQ ID NO: 199675 - RNA, 19 nt, Artificial Sequence
  Description of Artificial Sequence: Synthetic oligonucleotide
uguacgagagcgagaucug

SEQ ID NO: 199676 - RNA, 19 nt, Artificial Sequence
  Description of Artificial Sequence: Synthetic oligonucleotide
ugugacaaauuagccauuc

SEQ ID NO: 199677 - RNA, 19 nt, Artificial Sequence
  Description of Artificial Sequence: Synthetic oligonucleotide
cucgcuuugcuccuuuuac

SEQ ID NO: 199678 - RNA, 19 nt, Artificial Sequence
  Description of Artificial Sequence: Synthetic oligonucleotide
uaguuacccaguaaacuuu

SEQ ID NO: 199679 - RNA, 19 nt, Artificial Sequence
  Description of Artificial Sequence: Synthetic oligonucleotide
uacgagagcgagaucugcu

SEQ ID NO: 199680 - RNA, 19 nt, Artificial Sequence
  Description of Artificial Sequence: Synthetic oligonucleotide
ugaucccgcuccaugaauc

SEQ ID NO: 199681 - RNA, 19 nt, Artificial Sequence
  Description of Artificial Sequence: Synthetic oligonucleotide
aaagaggaggcaaaauguu

SEQ ID NO: 199682 - RNA, 19 nt, Artificial Sequence
  Description of Artificial Sequence: Synthetic oligonucleotide
ucgcuuugcuccuuuuacc

SEQ ID NO: 199683 - RNA, 19 nt, Artificial Sequence
  Description of Artificial Sequence: Synthetic oligonucleotide
uuuaaacaauccugucuau

SEQ ID NO: 199684 - RNA, 19 nt, Artificial Sequence
  Description of Artificial Sequence: Synthetic oligonucleotide
acuaaaucuauugcuccca

SEQ ID NO: 199685 - RNA, 19 nt, Artificial Sequence
  Description of Artificial Sequence: Synthetic oligonucleotide
gcgagaucugcuaugacgg

SEQ ID NO: 199686 - RNA, 19 nt, Artificial Sequence
  Description of Artificial Sequence: Synthetic oligonucleotide
caugguucauagacagagc

SEQ ID NO: 199687 - RNA, 19 nt, Artificial Sequence
  Description of Artificial Sequence: Synthetic oligonucleotide
uuacugguauugcuaccca

SEQ ID NO: 199688 - RNA, 19 nt, Artificial Sequence
  Description of Artificial Sequence: Synthetic oligonucleotide
ccuaagucuaaacuaaauc

SEQ ID NO: 199689 - RNA, 19 nt, Artificial Sequence
  Description of Artificial Sequence: Synthetic oligonucleotide
uguuuaccaucuacucgug

SEQ ID NO: 199690 - RNA, 19 nt, Artificial Sequence
  Description of Artificial Sequence: Synthetic oligonucleotide
gguauugcuacccaccuaa

SEQ ID NO: 199691 - RNA, 19 nt, Artificial Sequence
  Description of Artificial Sequence: Synthetic oligonucleotide
cucccaucugcaauuuagc

SEQ ID NO: 199692 - RNA, 19 nt, Artificial Sequence
  Description of Artificial Sequence: Synthetic oligonucleotide
cauuauugaucugauccuc

SEQ ID NO: 199693 - RNA, 19 nt, Artificial Sequence
  Description of Artificial Sequence: Synthetic oligonucleotide
acggcaauagccaauugga

SEQ ID NO: 199694 - RNA, 19 nt, Artificial Sequence
  Description of Artificial Sequence: Synthetic oligonucleotide
gacggggagaauagcgugg

SEQ ID NO: 199695 - RNA, 19 nt, Artificial Sequence
  Description of Artificial Sequence: Synthetic oligonucleotide
gcguauuaucuccaggucc

SEQ ID NO: 199696 - RNA, 19 nt, Artificial Sequence
  Description of Artificial Sequence: Synthetic oligonucleotide
auggggucccuacaaauau

SEQ ID NO: 199697 - RNA, 19 nt, Artificial Sequence
  Description of Artificial Sequence: Synthetic oligonucleotide
aggagauugcuccagcgua

SEQ ID NO: 199698 - RNA, 19 nt, Artificial Sequence
  Description of Artificial Sequence: Synthetic oligonucleotide
gagcaaggggauauuacac

SEQ ID NO: 199699 - RNA, 19 nt, Artificial Sequence
  Description of Artificial Sequence: Synthetic oligonucleotide
gaauauuaaaagggaaggu

SEQ ID NO: 199700 - RNA, 19 nt, Artificial Sequence
  Description of Artificial Sequence: Synthetic oligonucleotide
ugcgguuugguuggggcag

SEQ ID NO: 199701 - RNA, 19 nt, Artificial Sequence
  Description of Artificial Sequence: Synthetic oligonucleotide
cugucuaugacaucacuua

SEQ ID NO: 199702 - RNA, 19 nt, Artificial Sequence
  Description of Artificial Sequence: Synthetic oligonucleotide
cauccucccuauccuaucc

SEQ ID NO: 199703 - RNA, 19 nt, Artificial Sequence
  Description of Artificial Sequence: Synthetic oligonucleotide
guuuaccaucuacucgugc

SEQ ID NO: 199704 - RNA, 19 nt, Artificial Sequence
  Description of Artificial Sequence: Synthetic oligonucleotide
acucccaacuagauuaucu

SEQ ID NO: 199705 - RNA, 19 nt, Artificial Sequence
  Description of Artificial Sequence: Synthetic oligonucleotide
ucuacucgugcugaauccu

SEQ ID NO: 199706 - RNA, 19 nt, Artificial Sequence
  Description of Artificial Sequence: Synthetic oligonucleotide
ggagcaaauaauuguuaca

SEQ ID NO: 199707 - RNA, 19 nt, Artificial Sequence
  Description of Artificial Sequence: Synthetic oligonucleotide
uccacacgaaugcgguuug

SEQ ID NO: 199708 - RNA, 19 nt, Artificial Sequence
  Description of Artificial Sequence: Synthetic oligonucleotide
ggagcaaggggauauuaca

SEQ ID NO: 199709 - RNA, 19 nt, Artificial Sequence
  Description of Artificial Sequence: Synthetic oligonucleotide
guuacuguacagguaucac

SEQ ID NO: 199710 - RNA, 19 nt, Artificial Sequence
  Description of Artificial Sequence: Synthetic oligonucleotide
ugguaaucugaucccgcuc

SEQ ID NO: 199711 - RNA, 19 nt, Artificial Sequence
  Description of Artificial Sequence: Synthetic oligonucleotide
ggcaauagccaauuggaaa

SEQ ID NO: 199712 - RNA, 19 nt, Artificial Sequence
  Description of Artificial Sequence: Synthetic oligonucleotide
cgauacacuaguuacccag

SEQ ID NO: 199713 - RNA, 19 nt, Artificial Sequence
  Description of Artificial Sequence: Synthetic oligonucleotide
agucaauuaugaauauuaa

SEQ ID NO: 199714 - RNA, 19 nt, Artificial Sequence
  Description of Artificial Sequence: Synthetic oligonucleotide
gccacaaguguuuaacaac

SEQ ID NO: 199715 - RNA, 19 nt, Artificial Sequence
  Description of Artificial Sequence: Synthetic oligonucleotide
aguuguaacuaagcacugu

SEQ ID NO: 199716 - RNA, 19 nt, Artificial Sequence
  Description of Artificial Sequence: Synthetic oligonucleotide
uacucgugcugaauccuuc

SEQ ID NO: 199717 - RNA, 19 nt, Artificial Sequence
  Description of Artificial Sequence: Synthetic oligonucleotide
cuaguuacccaguaaacuu

SEQ ID NO: 199718 - RNA, 19 nt, Artificial Sequence
  Description of Artificial Sequence: Synthetic oligonucleotide
caguuguaacuaagcacug

SEQ ID NO: 199719 - RNA, 19 nt, Artificial Sequence
  Description of Artificial Sequence: Synthetic oligonucleotide
ccaaguaagauaaccacaa

SEQ ID NO: 199720 - RNA, 19 nt, Artificial Sequence
  Description of Artificial Sequence: Synthetic oligonucleotide
aauaaccgauacacuaguu

SEQ ID NO: 199721 - RNA, 19 nt, Artificial Sequence
  Description of Artificial Sequence: Synthetic oligonucleotide
cuuauguacgagagcgaga

SEQ ID NO: 199722 - RNA, 19 nt, Artificial Sequence
  Description of Artificial Sequence: Synthetic oligonucleotide
guucaacugauaaugccaa

SEQ ID NO: 199723 - RNA, 19 nt, Artificial Sequence
  Description of Artificial Sequence: Synthetic oligonucleotide
gaguuaugucugucaucag

SEQ ID NO: 199724 - RNA, 19 nt, Artificial Sequence
  Description of Artificial Sequence: Synthetic oligonucleotide
cuuaaagcacucccaacua

SEQ ID NO: 199725 - RNA, 19 nt, Artificial Sequence
  Description of Artificial Sequence: Synthetic oligonucleotide
augcagauuuagcaguauu

SEQ ID NO: 199726 - RNA, 19 nt, Artificial Sequence
  Description of Artificial Sequence: Synthetic oligonucleotide
uaccaucuacucgugcuga

SEQ ID NO: 199727 - RNA, 19 nt, Artificial Sequence
  Description of Artificial Sequence: Synthetic oligonucleotide
ucccacauuagucccuauu

SEQ ID NO: 199728 - RNA, 19 nt, Artificial Sequence
  Description of Artificial Sequence: Synthetic oligonucleotide
acacgaaugcgguuugguu

SEQ ID NO: 199729 - RNA, 19 nt, Artificial Sequence
  Description of Artificial Sequence: Synthetic oligonucleotide
gaaugcgguuugguugggg

SEQ ID NO: 199730 - RNA, 19 nt, Artificial Sequence
  Description of Artificial Sequence: Synthetic oligonucleotide
gcuaugacggggagaauag

SEQ ID NO: 199731 - RNA, 19 nt, Artificial Sequence
  Description of Artificial Sequence: Synthetic oligonucleotide
guuauucaaucagauguua

SEQ ID NO: 199732 - RNA, 19 nt, Artificial Sequence
  Description of Artificial Sequence: Synthetic oligonucleotide
ugcuacgacuacggcuucg

SEQ ID NO: 199733 - RNA, 19 nt, Artificial Sequence
  Description of Artificial Sequence: Synthetic oligonucleotide
ggggucccuacaaauaucc

SEQ ID NO: 199734 - RNA, 19 nt, Artificial Sequence
  Description of Artificial Sequence: Synthetic oligonucleotide
uggggucccuacaaauauc

SEQ ID NO: 199735 - RNA, 19 nt, Artificial Sequence
  Description of Artificial Sequence: Synthetic oligonucleotide
cagcguauuaucuccaggu

SEQ ID NO: 199736 - RNA, 19 nt, Artificial Sequence
  Description of Artificial Sequence: Synthetic oligonucleotide
agaacucagucuaaugcuu

SEQ ID NO: 199737 - RNA, 19 nt, Artificial Sequence
  Description of Artificial Sequence: Synthetic oligonucleotide
cuucugcuacgacuacggc

SEQ ID NO: 199738 - RNA, 19 nt, Artificial Sequence
  Description of Artificial Sequence: Synthetic oligonucleotide
augacggggagaauagcgu

SEQ ID NO: 199739 - RNA, 19 nt, Artificial Sequence
  Description of Artificial Sequence: Synthetic oligonucleotide
augaaauaacaacgcucua

SEQ ID NO: 199740 - RNA, 19 nt, Artificial Sequence
  Description of Artificial Sequence: Synthetic oligonucleotide
agucuaaacuaaaucuauu

SEQ ID NO: 199741 - RNA, 19 nt, Artificial Sequence
  Description of Artificial Sequence: Synthetic oligonucleotide
cuaugacggggagaauagc

SEQ ID NO: 199742 - RNA, 19 nt, Artificial Sequence
  Description of Artificial Sequence: Synthetic oligonucleotide
gugagacuuaaagcacucc

SEQ ID NO: 199743 - RNA, 19 nt, Artificial Sequence
  Description of Artificial Sequence: Synthetic oligonucleotide
uauguacgagagcgagauc

SEQ ID NO: 199744 - RNA, 19 nt, Artificial Sequence
  Description of Artificial Sequence: Synthetic oligonucleotide
auccacacgaaugcgguuu

SEQ ID NO: 199745 - RNA, 19 nt, Artificial Sequence
  Description of Artificial Sequence: Synthetic oligonucleotide
guacgagagcgagaucugc

SEQ ID NO: 199746 - RNA, 19 nt, Artificial Sequence
  Description of Artificial Sequence: Synthetic oligonucleotide
cccaacuagauuaucuaca

SEQ ID NO: 199747 - RNA, 19 nt, Artificial Sequence
  Description of Artificial Sequence: Synthetic oligonucleotide
cucccaacuagauuaucua

SEQ ID NO: 199748 - RNA, 19 nt, Artificial Sequence
  Description of Artificial Sequence: Synthetic oligonucleotide
caagguuuagaaagcaauu

SEQ ID NO: 199749 - RNA, 19 nt, Artificial Sequence
  Description of Artificial Sequence: Synthetic oligonucleotide
uaggagcaaggggauauua

SEQ ID NO: 199750 - RNA, 19 nt, Artificial Sequence
  Description of Artificial Sequence: Synthetic oligonucleotide
cccaaguaagauaaccaca

SEQ ID NO: 199751 - RNA, 19 nt, Artificial Sequence
  Description of Artificial Sequence: Synthetic oligonucleotide
aucgugcaucuuaagggcu

SEQ ID NO: 199752 - RNA, 19 nt, Artificial Sequence
  Description of Artificial Sequence: Synthetic oligonucleotide
ccagcguauuaucuccagg

SEQ ID NO: 199753 - RNA, 19 nt, Artificial Sequence
  Description of Artificial Sequence: Synthetic oligonucleotide
aauagccaauuaaguugaa

SEQ ID NO: 199754 - RNA, 19 nt, Artificial Sequence
  Description of Artificial Sequence: Synthetic oligonucleotide
cuacgacuacggcuucgag

SEQ ID NO: 199755 - RNA, 19 nt, Artificial Sequence
  Description of Artificial Sequence: Synthetic oligonucleotide
uccuuccaaggagauugcu

SEQ ID NO: 199756 - RNA, 19 nt, Artificial Sequence
  Description of Artificial Sequence: Synthetic oligonucleotide
gaauagcguggugauccuc

SEQ ID NO: 199757 - RNA, 19 nt, Artificial Sequence
  Description of Artificial Sequence: Synthetic oligonucleotide
agauugcuccagcguauua

SEQ ID NO: 199758 - RNA, 19 nt, Artificial Sequence
  Description of Artificial Sequence: Synthetic oligonucleotide
caacgcucuaucagucaca

SEQ ID NO: 199759 - RNA, 19 nt, Artificial Sequence
  Description of Artificial Sequence: Synthetic oligonucleotide
ucccuauccuauccacauu

SEQ ID NO: 199760 - RNA, 19 nt, Artificial Sequence
  Description of Artificial Sequence: Synthetic oligonucleotide
ggugagacuuaaagcacuc

SEQ ID NO: 199761 - RNA, 19 nt, Artificial Sequence
  Description of Artificial Sequence: Synthetic oligonucleotide
uuaggagcaaggggauauu

SEQ ID NO: 199762 - RNA, 19 nt, Artificial Sequence
  Description of Artificial Sequence: Synthetic oligonucleotide
gcaagugucuuaagguaga

SEQ ID NO: 199763 - RNA, 19 nt, Artificial Sequence
  Description of Artificial Sequence: Synthetic oligonucleotide
caacuagauuaucuacacu

SEQ ID NO: 199764 - RNA, 19 nt, Artificial Sequence
  Description of Artificial Sequence: Synthetic oligonucleotide
cccacauuagucccuauua

SEQ ID NO: 199765 - RNA, 19 nt, Artificial Sequence
  Description of Artificial Sequence: Synthetic oligonucleotide
ggccacacauuaacaguug

SEQ ID NO: 199766 - RNA, 19 nt, Artificial Sequence
  Description of Artificial Sequence: Synthetic oligonucleotide
uucccacauuagucccuau

SEQ ID NO: 199767 - RNA, 19 nt, Artificial Sequence
  Description of Artificial Sequence: Synthetic oligonucleotide
guuacccaguaaacuuuua

SEQ ID NO: 199768 - RNA, 19 nt, Artificial Sequence
  Description of Artificial Sequence: Synthetic oligonucleotide
acuacggcuucgagaucga

SEQ ID NO: 199769 - RNA, 19 nt, Artificial Sequence
  Description of Artificial Sequence: Synthetic oligonucleotide
gcuacgacuacggcuucga

SEQ ID NO: 199770 - RNA, 19 nt, Artificial Sequence
  Description of Artificial Sequence: Synthetic oligonucleotide
cuucccacauuagucccua

SEQ ID NO: 199771 - RNA, 19 nt, Artificial Sequence
  Description of Artificial Sequence: Synthetic oligonucleotide
ccacaauccuuaauccaaa

SEQ ID NO: 199772 - RNA, 19 nt, Artificial Sequence
  Description of Artificial Sequence: Synthetic oligonucleotide
gccacacauuaacaguugu

SEQ ID NO: 199773 - RNA, 19 nt, Artificial Sequence
  Description of Artificial Sequence: Synthetic oligonucleotide
gccaagguuuagaaagcaa

SEQ ID NO: 199774 - RNA, 19 nt, Artificial Sequence
  Description of Artificial Sequence: Synthetic oligonucleotide
cacacgaaugcgguuuggu

SEQ ID NO: 199775 - RNA, 19 nt, Artificial Sequence
  Description of Artificial Sequence: Synthetic oligonucleotide
cuacucgugcugaauccuu

SEQ ID NO: 199776 - RNA, 19 nt, Artificial Sequence
  Description of Artificial Sequence: Synthetic oligonucleotide
caacuuuaacccggaugua

SEQ ID NO: 199777 - RNA, 19 nt, Artificial Sequence
  Description of Artificial Sequence: Synthetic oligonucleotide
ggagauugcuccagcguau

SEQ ID NO: 199778 - RNA, 19 nt, Artificial Sequence
  Description of Artificial Sequence: Synthetic oligonucleotide
ccacacgaaugcgguuugg

SEQ ID NO: 199779 - RNA, 19 nt, Artificial Sequence
  Description of Artificial Sequence: Synthetic oligonucleotide
ccgauacacuaguuaccca

SEQ ID NO: 199780 - RNA, 19 nt, Artificial Sequence
  Description of Artificial Sequence: Synthetic oligonucleotide
cggcaauagccaauuggaa

SEQ ID NO: 199781 - RNA, 19 nt, Artificial Sequence
  Description of Artificial Sequence: Synthetic oligonucleotide
ccuauccuauccacauuau

SEQ ID NO: 199782 - RNA, 19 nt, Artificial Sequence
  Description of Artificial Sequence: Synthetic oligonucleotide
gcuacccaccuaagucuaa

SEQ ID NO: 199783 - RNA, 19 nt, Artificial Sequence
  Description of Artificial Sequence: Synthetic oligonucleotide
cgaaugcgguuugguuggg

SEQ ID NO: 199784 - RNA, 19 nt, Artificial Sequence
  Description of Artificial Sequence: Synthetic oligonucleotide
gggucccuacaaauauccu

SEQ ID NO: 199785 - RNA, 19 nt, Artificial Sequence
  Description of Artificial Sequence: Synthetic oligonucleotide
ggacaaccaugcaucguuu

SEQ ID NO: 199786 - RNA, 19 nt, Artificial Sequence
  Description of Artificial Sequence: Synthetic oligonucleotide
guccucgcuuugcuccuuu

SEQ ID NO: 199787 - RNA, 19 nt, Artificial Sequence
  Description of Artificial Sequence: Synthetic oligonucleotide
ccacuccuauguuccuggu

SEQ ID NO: 199788 - RNA, 19 nt, Artificial Sequence
  Description of Artificial Sequence: Synthetic oligonucleotide
cuuggacuucugggcccau

SEQ ID NO: 199789 - RNA, 19 nt, Artificial Sequence
  Description of Artificial Sequence: Synthetic oligonucleotide
cugcuaugacggggagaau

SEQ ID NO: 199790 - RNA, 19 nt, Artificial Sequence
  Description of Artificial Sequence: Synthetic oligonucleotide
ucuacuaugauacaaagug

SEQ ID NO: 199791 - RNA, 19 nt, Artificial Sequence
  Description of Artificial Sequence: Synthetic oligonucleotide
aauuagaucacccucguug

SEQ ID NO: 199792 - RNA, 19 nt, Artificial Sequence
  Description of Artificial Sequence: Synthetic oligonucleotide
uggauuuugacacauauac

SEQ ID NO: 199793 - RNA, 19 nt, Artificial Sequence
  Description of Artificial Sequence: Synthetic oligonucleotide
auuuauaccaagaaguugg

SEQ ID NO: 199794 - RNA, 19 nt, Artificial Sequence
  Description of Artificial Sequence: Synthetic oligonucleotide
aguuauaggcuuuucaagg

SEQ ID NO: 199795 - RNA, 19 nt, Artificial Sequence
  Description of Artificial Sequence: Synthetic oligonucleotide
uguacuucaaagccuauag

SEQ ID NO: 199796 - RNA, 19 nt, Artificial Sequence
  Description of Artificial Sequence: Synthetic oligonucleotide
auauuguaaauguuccacc

SEQ ID NO: 199797 - RNA, 19 nt, Artificial Sequence
  Description of Artificial Sequence: Synthetic oligonucleotide
aggaaaauuuuacuucugc

SEQ ID NO: 199798 - RNA, 19 nt, Artificial Sequence
  Description of Artificial Sequence: Synthetic oligonucleotide
ucuuuuaucuaagaagggg

SEQ ID NO: 199799 - RNA, 19 nt, Artificial Sequence
  Description of Artificial Sequence: Synthetic oligonucleotide
aguaaugagguauagucug

SEQ ID NO: 199800 - RNA, 19 nt, Artificial Sequence
  Description of Artificial Sequence: Synthetic oligonucleotide
aauggaaccuucuggugcg

SEQ ID NO: 199801 - RNA, 19 nt, Artificial Sequence
  Description of Artificial Sequence: Synthetic oligonucleotide
guaguaaugagguauaguc

SEQ ID NO: 199802 - RNA, 19 nt, Artificial Sequence
  Description of Artificial Sequence: Synthetic oligonucleotide
gauaggaacuaccaggagc

SEQ ID NO: 199803 - RNA, 19 nt, Artificial Sequence
  Description of Artificial Sequence: Synthetic oligonucleotide
agugauaaguccugcaggg

SEQ ID NO: 199804 - RNA, 19 nt, Artificial Sequence
  Description of Artificial Sequence: Synthetic oligonucleotide
uccuguaucccuaggaagg

SEQ ID NO: 199805 - RNA, 19 nt, Artificial Sequence
  Description of Artificial Sequence: Synthetic oligonucleotide
auaggaacuaccaggagcc

SEQ ID NO: 199806 - RNA, 19 nt, Artificial Sequence
  Description of Artificial Sequence: Synthetic oligonucleotide
uauacugaagaguuaggcc

SEQ ID NO: 199807 - RNA, 19 nt, Artificial Sequence
  Description of Artificial Sequence: Synthetic oligonucleotide
ugucuuauaacugugucca

SEQ ID NO: 199808 - RNA, 19 nt, Artificial Sequence
  Description of Artificial Sequence: Synthetic oligonucleotide
augaugaagucguuaacgg

SEQ ID NO: 199809 - RNA, 19 nt, Artificial Sequence
  Description of Artificial Sequence: Synthetic oligonucleotide
gauggauccaauuggaaca

SEQ ID NO: 199810 - RNA, 19 nt, Artificial Sequence
  Description of Artificial Sequence: Synthetic oligonucleotide
uuuaauuuuagagggguac

SEQ ID NO: 199811 - RNA, 19 nt, Artificial Sequence
  Description of Artificial Sequence: Synthetic oligonucleotide
guaacagacaucaugcuag

SEQ ID NO: 199812 - RNA, 19 nt, Artificial Sequence
  Description of Artificial Sequence: Synthetic oligonucleotide
gauauuguaaauguuccac

SEQ ID NO: 199813 - RNA, 19 nt, Artificial Sequence
  Description of Artificial Sequence: Synthetic oligonucleotide
uguuccacccugaaacucg

SEQ ID NO: 199814 - RNA, 19 nt, Artificial Sequence
  Description of Artificial Sequence: Synthetic oligonucleotide
uucaagacugcccaccgag

SEQ ID NO: 199815 - RNA, 19 nt, Artificial Sequence
  Description of Artificial Sequence: Synthetic oligonucleotide
uucacuagggguauacagc

SEQ ID NO: 199816 - RNA, 19 nt, Artificial Sequence
  Description of Artificial Sequence: Synthetic oligonucleotide
uaguuauaggcuuuucaag

SEQ ID NO: 199817 - RNA, 19 nt, Artificial Sequence
  Description of Artificial Sequence: Synthetic oligonucleotide
auaguuauaggcuuuucaa

SEQ ID NO: 199818 - RNA, 19 nt, Artificial Sequence
  Description of Artificial Sequence: Synthetic oligonucleotide
agagggcuaacaaacaccc

SEQ ID NO: 199819 - RNA, 19 nt, Artificial Sequence
  Description of Artificial Sequence: Synthetic oligonucleotide
guugaguaaugacauuugg

SEQ ID NO: 199820 - RNA, 19 nt, Artificial Sequence
  Description of Artificial Sequence: Synthetic oligonucleotide
ugagguggguuaauaauug

SEQ ID NO: 199821 - RNA, 19 nt, Artificial Sequence
  Description of Artificial Sequence: Synthetic oligonucleotide
agggguacaauauuggggu

SEQ ID NO: 199822 - RNA, 19 nt, Artificial Sequence
  Description of Artificial Sequence: Synthetic oligonucleotide
uugaguaaugacauuuggu

SEQ ID NO: 199823 - RNA, 19 nt, Artificial Sequence
  Description of Artificial Sequence: Synthetic oligonucleotide
ugauggauccaauuggaac

SEQ ID NO: 199824 - RNA, 19 nt, Artificial Sequence
  Description of Artificial Sequence: Synthetic oligonucleotide
uugucuuauaacugugucc

SEQ ID NO: 199825 - RNA, 19 nt, Artificial Sequence
  Description of Artificial Sequence: Synthetic oligonucleotide
uuuuagagggguacaauau

SEQ ID NO: 199826 - RNA, 19 nt, Artificial Sequence
  Description of Artificial Sequence: Synthetic oligonucleotide
ugccagauaaccuucuucu

SEQ ID NO: 199827 - RNA, 19 nt, Artificial Sequence
  Description of Artificial Sequence: Synthetic oligonucleotide
auaacaguugguugaaccu

SEQ ID NO: 199828 - RNA, 19 nt, Artificial Sequence
  Description of Artificial Sequence: Synthetic oligonucleotide
aagcggaccccguagcucg

SEQ ID NO: 199829 - RNA, 19 nt, Artificial Sequence
  Description of Artificial Sequence: Synthetic oligonucleotide
uaguaaugagguauagucu

SEQ ID NO: 199830 - RNA, 19 nt, Artificial Sequence
  Description of Artificial Sequence: Synthetic oligonucleotide
cuuuuaucuaagaagggga

SEQ ID NO: 199831 - RNA, 19 nt, Artificial Sequence
  Description of Artificial Sequence: Synthetic oligonucleotide
aguuuauccucugaagcac

SEQ ID NO: 199832 - RNA, 19 nt, Artificial Sequence
  Description of Artificial Sequence: Synthetic oligonucleotide
uggguuaauaauugcugag

SEQ ID NO: 199833 - RNA, 19 nt, Artificial Sequence
  Description of Artificial Sequence: Synthetic oligonucleotide
agcuuuuaugaugaagucg

SEQ ID NO: 199834 - RNA, 19 nt, Artificial Sequence
  Description of Artificial Sequence: Synthetic oligonucleotide
aauuggagugauaaguccu

SEQ ID NO: 199835 - RNA, 19 nt, Artificial Sequence
  Description of Artificial Sequence: Synthetic oligonucleotide
uuaauuccaaacauuccua

SEQ ID NO: 199836 - RNA, 19 nt, Artificial Sequence
  Description of Artificial Sequence: Synthetic oligonucleotide
uaagcgguuaugcggugcg

SEQ ID NO: 199837 - RNA, 19 nt, Artificial Sequence
  Description of Artificial Sequence: Synthetic oligonucleotide
uguaacagacaucaugcua

SEQ ID NO: 199838 - RNA, 19 nt, Artificial Sequence
  Description of Artificial Sequence: Synthetic oligonucleotide
aacaguugguugaaccuac

SEQ ID NO: 199839 - RNA, 19 nt, Artificial Sequence
  Description of Artificial Sequence: Synthetic oligonucleotide
acaauauugggguguaacu

SEQ ID NO: 199840 - RNA, 19 nt, Artificial Sequence
  Description of Artificial Sequence: Synthetic oligonucleotide
ucacuagggguauacagcu

SEQ ID NO: 199841 - RNA, 19 nt, Artificial Sequence
  Description of Artificial Sequence: Synthetic oligonucleotide
gagggguacaauauugggg

SEQ ID NO: 199842 - RNA, 19 nt, Artificial Sequence
  Description of Artificial Sequence: Synthetic oligonucleotide
agcaacgcugacaucaacc

SEQ ID NO: 199843 - RNA, 19 nt, Artificial Sequence
  Description of Artificial Sequence: Synthetic oligonucleotide
uugguaauugggaucauuu

SEQ ID NO: 199844 - RNA, 19 nt, Artificial Sequence
  Description of Artificial Sequence: Synthetic oligonucleotide
uguaucccuaggaaggacu

SEQ ID NO: 199845 - RNA, 19 nt, Artificial Sequence
  Description of Artificial Sequence: Synthetic oligonucleotide
ggaacuuucagacaagcca

SEQ ID NO: 199846 - RNA, 19 nt, Artificial Sequence
  Description of Artificial Sequence: Synthetic oligonucleotide
gguauacagcuuuaaauug

SEQ ID NO: 199847 - RNA, 19 nt, Artificial Sequence
  Description of Artificial Sequence: Synthetic oligonucleotide
uauagugccugccugcauc

SEQ ID NO: 199848 - RNA, 19 nt, Artificial Sequence
  Description of Artificial Sequence: Synthetic oligonucleotide
uuaauuuuagagggguaca

SEQ ID NO: 199849 - RNA, 19 nt, Artificial Sequence
  Description of Artificial Sequence: Synthetic oligonucleotide
auggaaagguaguaaugag

SEQ ID NO: 199850 - RNA, 19 nt, Artificial Sequence
  Description of Artificial Sequence: Synthetic oligonucleotide
ugcaacgagccgcagcggg

SEQ ID NO: 199851 - RNA, 19 nt, Artificial Sequence
  Description of Artificial Sequence: Synthetic oligonucleotide
aaacucgugaggcuguaau

SEQ ID NO: 199852 - RNA, 19 nt, Artificial Sequence
  Description of Artificial Sequence: Synthetic oligonucleotide
aaauaacaguugguugaac

SEQ ID NO: 199853 - RNA, 19 nt, Artificial Sequence
  Description of Artificial Sequence: Synthetic oligonucleotide
uguaaauguuccacccuga

SEQ ID NO: 199854 - RNA, 19 nt, Artificial Sequence
  Description of Artificial Sequence: Synthetic oligonucleotide
gcaguaagcgguuaugcgg

SEQ ID NO: 199855 - RNA, 19 nt, Artificial Sequence
  Description of Artificial Sequence: Synthetic oligonucleotide
uuauuaagcuccuuccgua

SEQ ID NO: 199856 - RNA, 19 nt, Artificial Sequence
  Description of Artificial Sequence: Synthetic oligonucleotide
ugaugaagucguuaacgga

SEQ ID NO: 199857 - RNA, 19 nt, Artificial Sequence
  Description of Artificial Sequence: Synthetic oligonucleotide
augccuauuacaaauaaau

SEQ ID NO: 199858 - RNA, 19 nt, Artificial Sequence
  Description of Artificial Sequence: Synthetic oligonucleotide
acgaguuuauccucugaag

SEQ ID NO: 199859 - RNA, 19 nt, Artificial Sequence
  Description of Artificial Sequence: Synthetic oligonucleotide
uggacgaaacugcagaauu

SEQ ID NO: 199860 - RNA, 19 nt, Artificial Sequence
  Description of Artificial Sequence: Synthetic oligonucleotide
uuuagagggguacaauauu

SEQ ID NO: 199861 - RNA, 19 nt, Artificial Sequence
  Description of Artificial Sequence: Synthetic oligonucleotide
aaagauucauuaaugccua

SEQ ID NO: 199862 - RNA, 19 nt, Artificial Sequence
  Description of Artificial Sequence: Synthetic oligonucleotide
caauauugggguguaacug

SEQ ID NO: 199863 - RNA, 19 nt, Artificial Sequence
  Description of Artificial Sequence: Synthetic oligonucleotide
uggaccgugcccauaguca

SEQ ID NO: 199864 - RNA, 19 nt, Artificial Sequence
  Description of Artificial Sequence: Synthetic oligonucleotide
agccuuagaaggcacaaaa

SEQ ID NO: 199865 - RNA, 19 nt, Artificial Sequence
  Description of Artificial Sequence: Synthetic oligonucleotide
agguauagucugcuucgac

SEQ ID NO: 199866 - RNA, 19 nt, Artificial Sequence
  Description of Artificial Sequence: Synthetic oligonucleotide
agcaagcggaccccguagc

SEQ ID NO: 199867 - RNA, 19 nt, Artificial Sequence
  Description of Artificial Sequence: Synthetic oligonucleotide
agcaaugguuuccaguccu

SEQ ID NO: 199868 - RNA, 19 nt, Artificial Sequence
  Description of Artificial Sequence: Synthetic oligonucleotide
ggagugauaaguccugcag

SEQ ID NO: 199869 - RNA, 19 nt, Artificial Sequence
  Description of Artificial Sequence: Synthetic oligonucleotide
ucgugaggcuguaauuugc

SEQ ID NO: 199870 - RNA, 19 nt, Artificial Sequence
  Description of Artificial Sequence: Synthetic oligonucleotide
gcugcaacgagccgcagcg

SEQ ID NO: 199871 - RNA, 19 nt, Artificial Sequence
  Description of Artificial Sequence: Synthetic oligonucleotide
uaauuuuagagggguacaa

SEQ ID NO: 199872 - RNA, 19 nt, Artificial Sequence
  Description of Artificial Sequence: Synthetic oligonucleotide
uuuggacgaaacugcagaa

SEQ ID NO: 199873 - RNA, 19 nt, Artificial Sequence
  Description of Artificial Sequence: Synthetic oligonucleotide
acuagggguauacagcuuu

SEQ ID NO: 199874 - RNA, 19 nt, Artificial Sequence
  Description of Artificial Sequence: Synthetic oligonucleotide
ucccgucccuuuaacuugg

SEQ ID NO: 199875 - RNA, 19 nt, Artificial Sequence
  Description of Artificial Sequence: Synthetic oligonucleotide
ugcuucgggaacuuucaga

SEQ ID NO: 199876 - RNA, 19 nt, Artificial Sequence
  Description of Artificial Sequence: Synthetic oligonucleotide
gguaauugggaucauuuaa

SEQ ID NO: 199877 - RNA, 19 nt, Artificial Sequence
  Description of Artificial Sequence: Synthetic oligonucleotide
guuaauaauugcugagaaa

SEQ ID NO: 199878 - RNA, 19 nt, Artificial Sequence
  Description of Artificial Sequence: Synthetic oligonucleotide
gagguggguuaauaauugc

SEQ ID NO: 199879 - RNA, 19 nt, Artificial Sequence
  Description of Artificial Sequence: Synthetic oligonucleotide
aaggggaaagcuauuuuau

SEQ ID NO: 199880 - RNA, 19 nt, Artificial Sequence
  Description of Artificial Sequence: Synthetic oligonucleotide
gacgaguuuauccucugaa

SEQ ID NO: 199881 - RNA, 19 nt, Artificial Sequence
  Description of Artificial Sequence: Synthetic oligonucleotide
guggguuaauaauugcuga

SEQ ID NO: 199882 - RNA, 19 nt, Artificial Sequence
  Description of Artificial Sequence: Synthetic oligonucleotide
ucaagacugcccaccgagc

SEQ ID NO: 199883 - RNA, 19 nt, Artificial Sequence
  Description of Artificial Sequence: Synthetic oligonucleotide
cugcaauuagaucacccuc

SEQ ID NO: 199884 - RNA, 19 nt, Artificial Sequence
  Description of Artificial Sequence: Synthetic oligonucleotide
gcaccaauugccaaaauac

SEQ ID NO: 199885 - RNA, 19 nt, Artificial Sequence
  Description of Artificial Sequence: Synthetic oligonucleotide
uagcaaugguuuccagucc

SEQ ID NO: 199886 - RNA, 19 nt, Artificial Sequence
  Description of Artificial Sequence: Synthetic oligonucleotide
uguaagagcggcggccggg

SEQ ID NO: 199887 - RNA, 19 nt, Artificial Sequence
  Description of Artificial Sequence: Synthetic oligonucleotide
auaaguccugcagggguac

SEQ ID NO: 199888 - RNA, 19 nt, Artificial Sequence
  Description of Artificial Sequence: Synthetic oligonucleotide
uccguuggccuguagucug

SEQ ID NO: 199889 - RNA, 19 nt, Artificial Sequence
  Description of Artificial Sequence: Synthetic oligonucleotide
gguuaauaauugcugagaa

SEQ ID NO: 199890 - RNA, 19 nt, Artificial Sequence
  Description of Artificial Sequence: Synthetic oligonucleotide
ugggacgaguuuauccucu

SEQ ID NO: 199891 - RNA, 19 nt, Artificial Sequence
  Description of Artificial Sequence: Synthetic oligonucleotide
aagaaggggaaagcuauuu

SEQ ID NO: 199892 - RNA, 19 nt, Artificial Sequence
  Description of Artificial Sequence: Synthetic oligonucleotide
agaucacccucguugauuu

SEQ ID NO: 199893 - RNA, 19 nt, Artificial Sequence
  Description of Artificial Sequence: Synthetic oligonucleotide
ugguugaaccuaccccucc

SEQ ID NO: 199894 - RNA, 19 nt, Artificial Sequence
  Description of Artificial Sequence: Synthetic oligonucleotide
aucuggugaaaacuggauu

SEQ ID NO: 199895 - RNA, 19 nt, Artificial Sequence
  Description of Artificial Sequence: Synthetic oligonucleotide
uucaucuuagaaggaaaau

SEQ ID NO: 199896 - RNA, 19 nt, Artificial Sequence
  Description of Artificial Sequence: Synthetic oligonucleotide
aguugaguaaugacauuug

SEQ ID NO: 199897 - RNA, 19 nt, Artificial Sequence
  Description of Artificial Sequence: Synthetic oligonucleotide
gguggguuaauaauugcug

SEQ ID NO: 199898 - RNA, 19 nt, Artificial Sequence
  Description of Artificial Sequence: Synthetic oligonucleotide
uuaugcggugcgguguccg

SEQ ID NO: 199899 - RNA, 19 nt, Artificial Sequence
  Description of Artificial Sequence: Synthetic oligonucleotide
ugguaauugggaucauuua

SEQ ID NO: 199900 - RNA, 19 nt, Artificial Sequence
  Description of Artificial Sequence: Synthetic oligonucleotide
caguugguugaaccuaccc

SEQ ID NO: 199901 - RNA, 19 nt, Artificial Sequence
  Description of Artificial Sequence: Synthetic oligonucleotide
caucguaggggaaagggaa

SEQ ID NO: 199902 - RNA, 19 nt, Artificial Sequence
  Description of Artificial Sequence: Synthetic oligonucleotide
ggggauaucagugaagaca

SEQ ID NO: 199903 - RNA, 19 nt, Artificial Sequence
  Description of Artificial Sequence: Synthetic oligonucleotide
gcgaauguugcugaugggg

SEQ ID NO: 199904 - RNA, 19 nt, Artificial Sequence
  Description of Artificial Sequence: Synthetic oligonucleotide
cuaagaaggggaaagcuau

SEQ ID NO: 199905 - RNA, 19 nt, Artificial Sequence
  Description of Artificial Sequence: Synthetic oligonucleotide
aacgagccgcagcggggcc

SEQ ID NO: 199906 - RNA, 19 nt, Artificial Sequence
  Description of Artificial Sequence: Synthetic oligonucleotide
gguaaauuauaacaacaua

SEQ ID NO: 199907 - RNA, 19 nt, Artificial Sequence
  Description of Artificial Sequence: Synthetic oligonucleotide
cuucgacugcauuagccuc

SEQ ID NO: 199908 - RNA, 19 nt, Artificial Sequence
  Description of Artificial Sequence: Synthetic oligonucleotide
ugcauuagccucugugcaa

SEQ ID NO: 199909 - RNA, 19 nt, Artificial Sequence
  Description of Artificial Sequence: Synthetic oligonucleotide
guaaugagguauagucugc

SEQ ID NO: 199910 - RNA, 19 nt, Artificial Sequence
  Description of Artificial Sequence: Synthetic oligonucleotide
uaacaguugguugaaccua

SEQ ID NO: 199911 - RNA, 19 nt, Artificial Sequence
  Description of Artificial Sequence: Synthetic oligonucleotide
uuacaucaauggaaaggua

SEQ ID NO: 199912 - RNA, 19 nt, Artificial Sequence
  Description of Artificial Sequence: Synthetic oligonucleotide
guuauaggcuuuucaaggu

SEQ ID NO: 199913 - RNA, 19 nt, Artificial Sequence
  Description of Artificial Sequence: Synthetic oligonucleotide
cucuggaccgugcccauag

SEQ ID NO: 199914 - RNA, 19 nt, Artificial Sequence
  Description of Artificial Sequence: Synthetic oligonucleotide
guuuauccucugaagcacc

SEQ ID NO: 199915 - RNA, 19 nt, Artificial Sequence
  Description of Artificial Sequence: Synthetic oligonucleotide
caccaauugccaaaauaca

SEQ ID NO: 199916 - RNA, 19 nt, Artificial Sequence
  Description of Artificial Sequence: Synthetic oligonucleotide
aagauucauuaaugccuau

SEQ ID NO: 199917 - RNA, 19 nt, Artificial Sequence
  Description of Artificial Sequence: Synthetic oligonucleotide
aggaggauaggaacuacca

SEQ ID NO: 199918 - RNA, 19 nt, Artificial Sequence
  Description of Artificial Sequence: Synthetic oligonucleotide
agguggguuaauaauugcu

SEQ ID NO: 199919 - RNA, 19 nt, Artificial Sequence
  Description of Artificial Sequence: Synthetic oligonucleotide
cugccaacugcccaccaac

SEQ ID NO: 199920 - RNA, 19 nt, Artificial Sequence
  Description of Artificial Sequence: Synthetic oligonucleotide
gugauaaguccugcagggg

SEQ ID NO: 199921 - RNA, 19 nt, Artificial Sequence
  Description of Artificial Sequence: Synthetic oligonucleotide
gucccgucccuuuaacuug

SEQ ID NO: 199922 - RNA, 19 nt, Artificial Sequence
  Description of Artificial Sequence: Synthetic oligonucleotide
uugguugaaccuaccccuc

SEQ ID NO: 199923 - RNA, 19 nt, Artificial Sequence
  Description of Artificial Sequence: Synthetic oligonucleotide
uugccauauagcacuccuc

SEQ ID NO: 199924 - RNA, 19 nt, Artificial Sequence
  Description of Artificial Sequence: Synthetic oligonucleotide
agggguauacagcuuuaaa

SEQ ID NO: 199925 - RNA, 19 nt, Artificial Sequence
  Description of Artificial Sequence: Synthetic oligonucleotide
ugaaccuaccccuccugua

SEQ ID NO: 199926 - RNA, 19 nt, Artificial Sequence
  Description of Artificial Sequence: Synthetic oligonucleotide
acaguugguugaaccuacc

SEQ ID NO: 199927 - RNA, 19 nt, Artificial Sequence
  Description of Artificial Sequence: Synthetic oligonucleotide
uccacaacucgaugaucac

SEQ ID NO: 199928 - RNA, 19 nt, Artificial Sequence
  Description of Artificial Sequence: Synthetic oligonucleotide
acgccccaaaagcuccgcc

SEQ ID NO: 199929 - RNA, 19 nt, Artificial Sequence
  Description of Artificial Sequence: Synthetic oligonucleotide
acucgugaggcuguaauuu

SEQ ID NO: 199930 - RNA, 19 nt, Artificial Sequence
  Description of Artificial Sequence: Synthetic oligonucleotide
agguaguaaugagguauag

SEQ ID NO: 199931 - RNA, 19 nt, Artificial Sequence
  Description of Artificial Sequence: Synthetic oligonucleotide
uaagagcggcggccgggcg

SEQ ID NO: 199932 - RNA, 19 nt, Artificial Sequence
  Description of Artificial Sequence: Synthetic oligonucleotide
aggggaaagcuauuuuauu

SEQ ID NO: 199933 - RNA, 19 nt, Artificial Sequence
  Description of Artificial Sequence: Synthetic oligonucleotide
ucccuuuaacuugggugag

SEQ ID NO: 199934 - RNA, 19 nt, Artificial Sequence
  Description of Artificial Sequence: Synthetic oligonucleotide
gguauagucugcuucgacu

SEQ ID NO: 199935 - RNA, 19 nt, Artificial Sequence
  Description of Artificial Sequence: Synthetic oligonucleotide
acucggcgaauguugcuga

SEQ ID NO: 199936 - RNA, 19 nt, Artificial Sequence
  Description of Artificial Sequence: Synthetic oligonucleotide
aguaagcgguuaugcggug

SEQ ID NO: 199937 - RNA, 19 nt, Artificial Sequence
  Description of Artificial Sequence: Synthetic oligonucleotide
uuccguuggccuguagucu

SEQ ID NO: 199938 - RNA, 19 nt, Artificial Sequence
  Description of Artificial Sequence: Synthetic oligonucleotide
aucguaggggaaagggaag

SEQ ID NO: 199939 - RNA, 19 nt, Artificial Sequence
  Description of Artificial Sequence: Synthetic oligonucleotide
ugcggugcgguguccgagc

SEQ ID NO: 199940 - RNA, 19 nt, Artificial Sequence
  Description of Artificial Sequence: Synthetic oligonucleotide
aagcgguuaugcggugcgg

SEQ ID NO: 199941 - RNA, 19 nt, Artificial Sequence
  Description of Artificial Sequence: Synthetic oligonucleotide
cacucggcgaauguugcug

SEQ ID NO: 199942 - RNA, 19 nt, Artificial Sequence
  Description of Artificial Sequence: Synthetic oligonucleotide
ggaaggacuuuauacugaa

SEQ ID NO: 199943 - RNA, 19 nt, Artificial Sequence
  Description of Artificial Sequence: Synthetic oligonucleotide
gggguauacagcuuuaaau

SEQ ID NO: 199944 - RNA, 19 nt, Artificial Sequence
  Description of Artificial Sequence: Synthetic oligonucleotide
ggcuaacaaacacccuucc

SEQ ID NO: 199945 - RNA, 19 nt, Artificial Sequence
  Description of Artificial Sequence: Synthetic oligonucleotide
guaagcgguuaugcggugc

SEQ ID NO: 199946 - RNA, 19 nt, Artificial Sequence
  Description of Artificial Sequence: Synthetic oligonucleotide
cuggaccgugcccauaguc

SEQ ID NO: 199947 - RNA, 19 nt, Artificial Sequence
  Description of Artificial Sequence: Synthetic oligonucleotide
auaggcuuuucaagguacu

SEQ ID NO: 199948 - RNA, 19 nt, Artificial Sequence
  Description of Artificial Sequence: Synthetic oligonucleotide
cugggacgaguuuauccuc

SEQ ID NO: 199949 - RNA, 19 nt, Artificial Sequence
  Description of Artificial Sequence: Synthetic oligonucleotide
auacaaagugggguuccca

SEQ ID NO: 199950 - RNA, 19 nt, Artificial Sequence
  Description of Artificial Sequence: Synthetic oligonucleotide
ggguuaauaauugcugaga

SEQ ID NO: 199951 - RNA, 19 nt, Artificial Sequence
  Description of Artificial Sequence: Synthetic oligonucleotide
ggauaggaacuaccaggag

SEQ ID NO: 199952 - RNA, 19 nt, Artificial Sequence
  Description of Artificial Sequence: Synthetic oligonucleotide
cauauacauuccauacucu

SEQ ID NO: 199953 - RNA, 19 nt, Artificial Sequence
  Description of Artificial Sequence: Synthetic oligonucleotide
uaugcggugcgguguccga

SEQ ID NO: 199954 - RNA, 19 nt, Artificial Sequence
  Description of Artificial Sequence: Synthetic oligonucleotide
cagcaagcggaccccguag

SEQ ID NO: 199955 - RNA, 19 nt, Artificial Sequence
  Description of Artificial Sequence: Synthetic oligonucleotide
agccuauaguggccuuguc

SEQ ID NO: 199956 - RNA, 19 nt, Artificial Sequence
  Description of Artificial Sequence: Synthetic oligonucleotide
caucaaccacgugauuuug

SEQ ID NO: 199957 - RNA, 19 nt, Artificial Sequence
  Description of Artificial Sequence: Synthetic oligonucleotide
cggcgaauguugcugaugg

SEQ ID NO: 199958 - RNA, 19 nt, Artificial Sequence
  Description of Artificial Sequence: Synthetic oligonucleotide
caguaagcgguuaugcggu

SEQ ID NO: 199959 - RNA, 19 nt, Artificial Sequence
  Description of Artificial Sequence: Synthetic oligonucleotide
cagacgcgccacauccugc

SEQ ID NO: 199960 - RNA, 19 nt, Artificial Sequence
  Description of Artificial Sequence: Synthetic oligonucleotide
cuguaagagcggcggccgg

SEQ ID NO: 199961 - RNA, 19 nt, Artificial Sequence
  Description of Artificial Sequence: Synthetic oligonucleotide
uagggguauacagcuuuaa

SEQ ID NO: 199962 - RNA, 19 nt, Artificial Sequence
  Description of Artificial Sequence: Synthetic oligonucleotide
ucgacugcauuagccucug

SEQ ID NO: 199963 - RNA, 19 nt, Artificial Sequence
  Description of Artificial Sequence: Synthetic oligonucleotide
gggaacuuucagacaagcc

SEQ ID NO: 199964 - RNA, 19 nt, Artificial Sequence
  Description of Artificial Sequence: Synthetic oligonucleotide
agcgguuaugcggugcggu

SEQ ID NO: 199965 - RNA, 19 nt, Artificial Sequence
  Description of Artificial Sequence: Synthetic oligonucleotide
cgcaguaagcgguuaugcg

SEQ ID NO: 199966 - RNA, 19 nt, Artificial Sequence
  Description of Artificial Sequence: Synthetic oligonucleotide
guaagagcggcggccgggc

SEQ ID NO: 199967 - RNA, 19 nt, Artificial Sequence
  Description of Artificial Sequence: Synthetic oligonucleotide
ggggaaagcuauuuuauuu

SEQ ID NO: 199968 - RNA, 19 nt, Artificial Sequence
  Description of Artificial Sequence: Synthetic oligonucleotide
guguccgagccggagcucc

SEQ ID NO: 199969 - RNA, 19 nt, Artificial Sequence
  Description of Artificial Sequence: Synthetic oligonucleotide
gaggucaaucccucucucu

SEQ ID NO: 199970 - RNA, 19 nt, Artificial Sequence
  Description of Artificial Sequence: Synthetic oligonucleotide
cuguaucccuaggaaggac

SEQ ID NO: 199971 - RNA, 19 nt, Artificial Sequence
  Description of Artificial Sequence: Synthetic oligonucleotide
gcugggacgaguuuauccu

SEQ ID NO: 199972 - RNA, 19 nt, Artificial Sequence
  Description of Artificial Sequence: Synthetic oligonucleotide
uguccgagccggagcucca

SEQ ID NO: 199973 - RNA, 19 nt, Artificial Sequence
  Description of Artificial Sequence: Synthetic oligonucleotide
ggguaaauuauaacaacau

SEQ ID NO: 199974 - RNA, 19 nt, Artificial Sequence
  Description of Artificial Sequence: Synthetic oligonucleotide
gguuaugcggugcgguguc

SEQ ID NO: 199975 - RNA, 19 nt, Artificial Sequence
  Description of Artificial Sequence: Synthetic oligonucleotide
cuccaaccgcuccauccac

SEQ ID NO: 199976 - RNA, 19 nt, Artificial Sequence
  Description of Artificial Sequence: Synthetic oligonucleotide
aggaacuaccaggagccuu

SEQ ID NO: 199977 - RNA, 19 nt, Artificial Sequence
  Description of Artificial Sequence: Synthetic oligonucleotide
cagccgcacagcaagcgga

SEQ ID NO: 199978 - RNA, 19 nt, Artificial Sequence
  Description of Artificial Sequence: Synthetic oligonucleotide
caagcggaccccguagcuc

SEQ ID NO: 199979 - RNA, 19 nt, Artificial Sequence
  Description of Artificial Sequence: Synthetic oligonucleotide
gcuggugcggcgcuuggac

SEQ ID NO: 199980 - RNA, 19 nt, Artificial Sequence
  Description of Artificial Sequence: Synthetic oligonucleotide
gggguacaauauuggggug

SEQ ID NO: 199981 - RNA, 19 nt, Artificial Sequence
  Description of Artificial Sequence: Synthetic oligonucleotide
uaggaacuaccaggagccu

SEQ ID NO: 199982 - RNA, 19 nt, Artificial Sequence
  Description of Artificial Sequence: Synthetic oligonucleotide
cuucaagacugcccaccga

SEQ ID NO: 199983 - RNA, 19 nt, Artificial Sequence
  Description of Artificial Sequence: Synthetic oligonucleotide
acgcugacaucaaccacgu

SEQ ID NO: 199984 - RNA, 19 nt, Artificial Sequence
  Description of Artificial Sequence: Synthetic oligonucleotide
cugcaucguaggggaaagg

SEQ ID NO: 199985 - RNA, 19 nt, Artificial Sequence
  Description of Artificial Sequence: Synthetic oligonucleotide
ccgcacagcaagcggaccc

SEQ ID NO: 199986 - RNA, 19 nt, Artificial Sequence
  Description of Artificial Sequence: Synthetic oligonucleotide
cagcaacgcugacaucaac

SEQ ID NO: 199987 - RNA, 19 nt, Artificial Sequence
  Description of Artificial Sequence: Synthetic oligonucleotide
augcggugcgguguccgag

SEQ ID NO: 199988 - RNA, 19 nt, Artificial Sequence
  Description of Artificial Sequence: Synthetic oligonucleotide
agcagccuuagaaggcaca

SEQ ID NO: 199989 - RNA, 19 nt, Artificial Sequence
  Description of Artificial Sequence: Synthetic oligonucleotide
guuaugcggugcggugucc

SEQ ID NO: 199990 - RNA, 19 nt, Artificial Sequence
  Description of Artificial Sequence: Synthetic oligonucleotide
uggauccaauuggaacauc

SEQ ID NO: 199991 - RNA, 19 nt, Artificial Sequence
  Description of Artificial Sequence: Synthetic oligonucleotide
gcaacgagccgcagcgggg

SEQ ID NO: 199992 - RNA, 19 nt, Artificial Sequence
  Description of Artificial Sequence: Synthetic oligonucleotide
gcgguuaugcggugcggug

SEQ ID NO: 199993 - RNA, 19 nt, Artificial Sequence
  Description of Artificial Sequence: Synthetic oligonucleotide
cugaaacucgugaggcugu

SEQ ID NO: 199994 - RNA, 19 nt, Artificial Sequence
  Description of Artificial Sequence: Synthetic oligonucleotide
ccgcaguaagcgguuaugc

SEQ ID NO: 199995 - RNA, 19 nt, Artificial Sequence
  Description of Artificial Sequence: Synthetic oligonucleotide
caaccgcuccauccacaac

SEQ ID NO: 199996 - RNA, 19 nt, Artificial Sequence
  Description of Artificial Sequence: Synthetic oligonucleotide
cgccccaaaagcuccgccg

SEQ ID NO: 199997 - RNA, 19 nt, Artificial Sequence
  Description of Artificial Sequence: Synthetic oligonucleotide
gcaucguaggggaaaggga

SEQ ID NO: 199998 - RNA, 19 nt, Artificial Sequence
  Description of Artificial Sequence: Synthetic oligonucleotide
gcaauuagaucacccucgu

SEQ ID NO: 199999 - RNA, 19 nt, Artificial Sequence
  Description of Artificial Sequence: Synthetic oligonucleotide
caccgagccccgaguccgg

SEQ ID NO: 200000 - RNA, 19 nt, Artificial Sequence
  Description of Artificial Sequence: Synthetic oligonucleotide
auuugguaauugggaucau

SEQ ID NO: 200001 - RNA, 19 nt, Artificial Sequence
  Description of Artificial Sequence: Synthetic oligonucleotide
aggcuguaauuugcccucu

SEQ ID NO: 200002 - RNA, 19 nt, Artificial Sequence
  Description of Artificial Sequence: Synthetic oligonucleotide
gacgcgccacauccugcca

SEQ ID NO: 200003 - RNA, 19 nt, Artificial Sequence
  Description of Artificial Sequence: Synthetic oligonucleotide
cacgccccaaaagcuccgc

SEQ ID NO: 200004 - RNA, 19 nt, Artificial Sequence
  Description of Artificial Sequence: Synthetic oligonucleotide
ugccugcaucguaggggaa

SEQ ID NO: 200005 - RNA, 19 nt, Artificial Sequence
  Description of Artificial Sequence: Synthetic oligonucleotide
guaucccuaggaaggacuu

SEQ ID NO: 200006 - RNA, 19 nt, Artificial Sequence
  Description of Artificial Sequence: Synthetic oligonucleotide
ggugcggcgcuuggacccg

SEQ ID NO: 200007 - RNA, 19 nt, Artificial Sequence
  Description of Artificial Sequence: Synthetic oligonucleotide
guccgagccggagcuccag

SEQ ID NO: 200008 - RNA, 19 nt, Artificial Sequence
  Description of Artificial Sequence: Synthetic oligonucleotide
agucguuaacggagauuuu

SEQ ID NO: 200009 - RNA, 19 nt, Artificial Sequence
  Description of Artificial Sequence: Synthetic oligonucleotide
ccacgccccaaaagcuccg

SEQ ID NO: 200010 - RNA, 19 nt, Artificial Sequence
  Description of Artificial Sequence: Synthetic oligonucleotide
agcggaccccguagcucgg

SEQ ID NO: 200011 - RNA, 19 nt, Artificial Sequence
  Description of Artificial Sequence: Synthetic oligonucleotide
ccccacgccccaaaagcuc

SEQ ID NO: 200012 - RNA, 19 nt, Artificial Sequence
  Description of Artificial Sequence: Synthetic oligonucleotide
gcggugcgguguccgagcc

SEQ ID NO: 200013 - RNA, 19 nt, Artificial Sequence
  Description of Artificial Sequence: Synthetic oligonucleotide
ccaaccgcuccauccacaa

SEQ ID NO: 200014 - RNA, 19 nt, Artificial Sequence
  Description of Artificial Sequence: Synthetic oligonucleotide
gcgggcuauagugccugcc

SEQ ID NO: 200015 - RNA, 19 nt, Artificial Sequence
  Description of Artificial Sequence: Synthetic oligonucleotide
caauuagaucacccucguu

SEQ ID NO: 200016 - RNA, 19 nt, Artificial Sequence
  Description of Artificial Sequence: Synthetic oligonucleotide
ggguacugacagcaacgcu

SEQ ID NO: 200017 - RNA, 19 nt, Artificial Sequence
  Description of Artificial Sequence: Synthetic oligonucleotide
cuauagugccugccugcau

SEQ ID NO: 200018 - RNA, 19 nt, Artificial Sequence
  Description of Artificial Sequence: Synthetic oligonucleotide
gcaagcggaccccguagcu

SEQ ID NO: 200019 - RNA, 19 nt, Artificial Sequence
  Description of Artificial Sequence: Synthetic oligonucleotide
gccugcaucguaggggaaa

SEQ ID NO: 200020 - RNA, 19 nt, Artificial Sequence
  Description of Artificial Sequence: Synthetic oligonucleotide
ucccuucacuagggguaua

SEQ ID NO: 200021 - RNA, 19 nt, Artificial Sequence
  Description of Artificial Sequence: Synthetic oligonucleotide
caaagccuauaguggccuu

SEQ ID NO: 200022 - RNA, 19 nt, Artificial Sequence
  Description of Artificial Sequence: Synthetic oligonucleotide
gugcggcgcuuggacccgg

SEQ ID NO: 200023 - RNA, 19 nt, Artificial Sequence
  Description of Artificial Sequence: Synthetic oligonucleotide
ccccaaaagcuccgccguc

SEQ ID NO: 200024 - RNA, 19 nt, Artificial Sequence
  Description of Artificial Sequence: Synthetic oligonucleotide
gccgcacagcaagcggacc

SEQ ID NO: 200025 - RNA, 19 nt, Artificial Sequence
  Description of Artificial Sequence: Synthetic oligonucleotide
ggcgaccccaggagcugcc

SEQ ID NO: 200026 - RNA, 19 nt, Artificial Sequence
  Description of Artificial Sequence: Synthetic oligonucleotide
guuaggccacaugucccuu

SEQ ID NO: 200027 - RNA, 19 nt, Artificial Sequence
  Description of Artificial Sequence: Synthetic oligonucleotide
cucggcgaauguugcugau

SEQ ID NO: 200028 - RNA, 19 nt, Artificial Sequence
  Description of Artificial Sequence: Synthetic oligonucleotide
gcggccgggcgaccccagg

SEQ ID NO: 200029 - RNA, 19 nt, Artificial Sequence
  Description of Artificial Sequence: Synthetic oligonucleotide
cgcacagacgcgccacauc

SEQ ID NO: 200030 - RNA, 19 nt, Artificial Sequence
  Description of Artificial Sequence: Synthetic oligonucleotide
ccguagcucggggucccgc

SEQ ID NO: 200031 - RNA, 19 nt, Artificial Sequence
  Description of Artificial Sequence: Synthetic oligonucleotide
ccgcgcacagacgcgccac

SEQ ID NO: 200032 - RNA, 19 nt, Artificial Sequence
  Description of Artificial Sequence: Synthetic oligonucleotide
ccgucuccggagugaccuc

SEQ ID NO: 200033 - RNA, 19 nt, Artificial Sequence
  Description of Artificial Sequence: Synthetic oligonucleotide
ccagcgggcuauagugccu

SEQ ID NO: 200034 - RNA, 19 nt, Artificial Sequence
  Description of Artificial Sequence: Synthetic oligonucleotide
cgccgucuccggagugacc

SEQ ID NO: 200035 - RNA, 19 nt, Artificial Sequence
  Description of Artificial Sequence: Synthetic oligonucleotide
guccggcccuggggacugc

SEQ ID NO: 200036 - RNA, 19 nt, Artificial Sequence
  Description of Artificial Sequence: Synthetic oligonucleotide
ccgucccuuuaacuugggu

SEQ ID NO: 200037 - RNA, 19 nt, Artificial Sequence
  Description of Artificial Sequence: Synthetic oligonucleotide
cgguuaugcggugcggugu

SEQ ID NO: 200038 - RNA, 19 nt, Artificial Sequence
  Description of Artificial Sequence: Synthetic oligonucleotide
cgcgcacagacgcgccaca

SEQ ID NO: 200039 - RNA, 19 nt, Artificial Sequence
  Description of Artificial Sequence: Synthetic oligonucleotide
gcgcacagacgcgccacau

SEQ ID NO: 200040 - RNA, 19 nt, Artificial Sequence
  Description of Artificial Sequence: Synthetic oligonucleotide
ccgugcccauagucauggu

SEQ ID NO: 200041 - RNA, 19 nt, Artificial Sequence
  Description of Artificial Sequence: Synthetic oligonucleotide
auuuaugcagaacaaaucc

SEQ ID NO: 200042 - RNA, 19 nt, Artificial Sequence
  Description of Artificial Sequence: Synthetic oligonucleotide
uauaauuugaaccuaauaa

SEQ ID NO: 200043 - RNA, 19 nt, Artificial Sequence
  Description of Artificial Sequence: Synthetic oligonucleotide
uauauaucaacuaucauaa

SEQ ID NO: 200044 - RNA, 19 nt, Artificial Sequence
  Description of Artificial Sequence: Synthetic oligonucleotide
aauauuuaaaaccggcuug

SEQ ID NO: 200045 - RNA, 19 nt, Artificial Sequence
  Description of Artificial Sequence: Synthetic oligonucleotide
aaaucaagaagauuguuga

SEQ ID NO: 200046 - RNA, 19 nt, Artificial Sequence
  Description of Artificial Sequence: Synthetic oligonucleotide
auacuuacauuuuacuugc

SEQ ID NO: 200047 - RNA, 19 nt, Artificial Sequence
  Description of Artificial Sequence: Synthetic oligonucleotide
uuuaaaauggggaagccac

SEQ ID NO: 200048 - RNA, 19 nt, Artificial Sequence
  Description of Artificial Sequence: Synthetic oligonucleotide
aagauuguugauuacagau

SEQ ID NO: 200049 - RNA, 19 nt, Artificial Sequence
  Description of Artificial Sequence: Synthetic oligonucleotide
uuugcaagcagcaauacaa

SEQ ID NO: 200050 - RNA, 19 nt, Artificial Sequence
  Description of Artificial Sequence: Synthetic oligonucleotide
uaaacucuacuuuugcucg

SEQ ID NO: 200051 - RNA, 19 nt, Artificial Sequence
  Description of Artificial Sequence: Synthetic oligonucleotide
uaacuauuaggaauuaacc

SEQ ID NO: 200052 - RNA, 19 nt, Artificial Sequence
  Description of Artificial Sequence: Synthetic oligonucleotide
aaguuuaacuauuaggaau

SEQ ID NO: 200053 - RNA, 19 nt, Artificial Sequence
  Description of Artificial Sequence: Synthetic oligonucleotide
acuaucauaagaugugggg

SEQ ID NO: 200054 - RNA, 19 nt, Artificial Sequence
  Description of Artificial Sequence: Synthetic oligonucleotide
auuugaaccuaauaaacca

SEQ ID NO: 200055 - RNA, 19 nt, Artificial Sequence
  Description of Artificial Sequence: Synthetic oligonucleotide
aauaauuggucuaucaacu

SEQ ID NO: 200056 - RNA, 19 nt, Artificial Sequence
  Description of Artificial Sequence: Synthetic oligonucleotide
accaaauuaacuuacucca

SEQ ID NO: 200057 - RNA, 19 nt, Artificial Sequence
  Description of Artificial Sequence: Synthetic oligonucleotide
uuuaaaaccggcuuguaau

SEQ ID NO: 200058 - RNA, 19 nt, Artificial Sequence
  Description of Artificial Sequence: Synthetic oligonucleotide
ugauugauccaaaucacug

SEQ ID NO: 200059 - RNA, 19 nt, Artificial Sequence
  Description of Artificial Sequence: Synthetic oligonucleotide
uuaauucuuaguuguuugg

SEQ ID NO: 200060 - RNA, 19 nt, Artificial Sequence
  Description of Artificial Sequence: Synthetic oligonucleotide
auauaggugaaucagguau

SEQ ID NO: 200061 - RNA, 19 nt, Artificial Sequence
  Description of Artificial Sequence: Synthetic oligonucleotide
ugauuuaugcagaacaaau

SEQ ID NO: 200062 - RNA, 19 nt, Artificial Sequence
  Description of Artificial Sequence: Synthetic oligonucleotide
aaugcauauuugcaagcag

SEQ ID NO: 200063 - RNA, 19 nt, Artificial Sequence
  Description of Artificial Sequence: Synthetic oligonucleotide
ugccacgagaaucaaaucc

SEQ ID NO: 200064 - RNA, 19 nt, Artificial Sequence
  Description of Artificial Sequence: Synthetic oligonucleotide
ucauagguguacuacagca

SEQ ID NO: 200065 - RNA, 19 nt, Artificial Sequence
  Description of Artificial Sequence: Synthetic oligonucleotide
uuaugcagaacaaaucccu

SEQ ID NO: 200066 - RNA, 19 nt, Artificial Sequence
  Description of Artificial Sequence: Synthetic oligonucleotide
uccacuaugccuaucaaau

SEQ ID NO: 200067 - RNA, 19 nt, Artificial Sequence
  Description of Artificial Sequence: Synthetic oligonucleotide
uccacguuuguccucaugc

SEQ ID NO: 200068 - RNA, 19 nt, Artificial Sequence
  Description of Artificial Sequence: Synthetic oligonucleotide
aauacauagugguuaguau

SEQ ID NO: 200069 - RNA, 19 nt, Artificial Sequence
  Description of Artificial Sequence: Synthetic oligonucleotide
ucggauauuaaacucuacu

SEQ ID NO: 200070 - RNA, 19 nt, Artificial Sequence
  Description of Artificial Sequence: Synthetic oligonucleotide
agcaauuaggucauguugg

SEQ ID NO: 200071 - RNA, 19 nt, Artificial Sequence
  Description of Artificial Sequence: Synthetic oligonucleotide
ucaagaagauuguugauua

SEQ ID NO: 200072 - RNA, 19 nt, Artificial Sequence
  Description of Artificial Sequence: Synthetic oligonucleotide
aaguuuacaugucccagcu

SEQ ID NO: 200073 - RNA, 19 nt, Artificial Sequence
  Description of Artificial Sequence: Synthetic oligonucleotide
gagacguuauaucauuugc

SEQ ID NO: 200074 - RNA, 19 nt, Artificial Sequence
  Description of Artificial Sequence: Synthetic oligonucleotide
agucuuuaggugugaaugg

SEQ ID NO: 200075 - RNA, 19 nt, Artificial Sequence
  Description of Artificial Sequence: Synthetic oligonucleotide
aucucugaaaauuaugaaa

SEQ ID NO: 200076 - RNA, 19 nt, Artificial Sequence
  Description of Artificial Sequence: Synthetic oligonucleotide
uggucuaucaacugaaaau

SEQ ID NO: 200077 - RNA, 19 nt, Artificial Sequence
  Description of Artificial Sequence: Synthetic oligonucleotide
uugacaguuccccaguugu

SEQ ID NO: 200078 - RNA, 19 nt, Artificial Sequence
  Description of Artificial Sequence: Synthetic oligonucleotide
uuaggugugaaugguauga

SEQ ID NO: 200079 - RNA, 19 nt, Artificial Sequence
  Description of Artificial Sequence: Synthetic oligonucleotide
caaauagcuggucgaaucg

SEQ ID NO: 200080 - RNA, 19 nt, Artificial Sequence
  Description of Artificial Sequence: Synthetic oligonucleotide
uucaguaccucgaaagggu

SEQ ID NO: 200081 - RNA, 19 nt, Artificial Sequence
  Description of Artificial Sequence: Synthetic oligonucleotide
aaaaccggcuuguaauuga

SEQ ID NO: 200082 - RNA, 19 nt, Artificial Sequence
  Description of Artificial Sequence: Synthetic oligonucleotide
ugaagcauaaaaucuggua

SEQ ID NO: 200083 - RNA, 19 nt, Artificial Sequence
  Description of Artificial Sequence: Synthetic oligonucleotide
ugcuaaugcucuuaagaug

SEQ ID NO: 200084 - RNA, 19 nt, Artificial Sequence
  Description of Artificial Sequence: Synthetic oligonucleotide
cugucuuaccuuuaaaguc

SEQ ID NO: 200085 - RNA, 19 nt, Artificial Sequence
  Description of Artificial Sequence: Synthetic oligonucleotide
gaagaaugcauaaucucug

SEQ ID NO: 200086 - RNA, 19 nt, Artificial Sequence
  Description of Artificial Sequence: Synthetic oligonucleotide
ugaccaugugugaaaacgc

SEQ ID NO: 200087 - RNA, 19 nt, Artificial Sequence
  Description of Artificial Sequence: Synthetic oligonucleotide
uccauaaccgaaucuucag

SEQ ID NO: 200088 - RNA, 19 nt, Artificial Sequence
  Description of Artificial Sequence: Synthetic oligonucleotide
ugagacguuauaucauuug

SEQ ID NO: 200089 - RNA, 19 nt, Artificial Sequence
  Description of Artificial Sequence: Synthetic oligonucleotide
agugguuaguauuccauga

SEQ ID NO: 200090 - RNA, 19 nt, Artificial Sequence
  Description of Artificial Sequence: Synthetic oligonucleotide
acuaccugguuucuucaac

SEQ ID NO: 200091 - RNA, 19 nt, Artificial Sequence
  Description of Artificial Sequence: Synthetic oligonucleotide
uaggccguucaauaauugg

SEQ ID NO: 200092 - RNA, 19 nt, Artificial Sequence
  Description of Artificial Sequence: Synthetic oligonucleotide
auaauuggucuaucaacug

SEQ ID NO: 200093 - RNA, 19 nt, Artificial Sequence
  Description of Artificial Sequence: Synthetic oligonucleotide
aaaggguccgauucgucgu

SEQ ID NO: 200094 - RNA, 19 nt, Artificial Sequence
  Description of Artificial Sequence: Synthetic oligonucleotide
ucuaguugagacguuauau

SEQ ID NO: 200095 - RNA, 19 nt, Artificial Sequence
  Description of Artificial Sequence: Synthetic oligonucleotide
auuuaguauauaucaacua

SEQ ID NO: 200096 - RNA, 19 nt, Artificial Sequence
  Description of Artificial Sequence: Synthetic oligonucleotide
guguacuacagcaauuagg

SEQ ID NO: 200097 - RNA, 19 nt, Artificial Sequence
  Description of Artificial Sequence: Synthetic oligonucleotide
cuaguugagacguuauauc

SEQ ID NO: 200098 - RNA, 19 nt, Artificial Sequence
  Description of Artificial Sequence: Synthetic oligonucleotide
uuaaaauggggaagccaca

SEQ ID NO: 200099 - RNA, 19 nt, Artificial Sequence
  Description of Artificial Sequence: Synthetic oligonucleotide
uaucaaauucacguuugcc

SEQ ID NO: 200100 - RNA, 19 nt, Artificial Sequence
  Description of Artificial Sequence: Synthetic oligonucleotide
uaccaaauggccaggcucu

SEQ ID NO: 200101 - RNA, 19 nt, Artificial Sequence
  Description of Artificial Sequence: Synthetic oligonucleotide
acuauugcacugaacacag

SEQ ID NO: 200102 - RNA, 19 nt, Artificial Sequence
  Description of Artificial Sequence: Synthetic oligonucleotide
cugacuaacauauuuguua

SEQ ID NO: 200103 - RNA, 19 nt, Artificial Sequence
  Description of Artificial Sequence: Synthetic oligonucleotide
ugguaugaaugacaguccu

SEQ ID NO: 200104 - RNA, 19 nt, Artificial Sequence
  Description of Artificial Sequence: Synthetic oligonucleotide
cuuuacgcaacuguuugcc

SEQ ID NO: 200105 - RNA, 19 nt, Artificial Sequence
  Description of Artificial Sequence: Synthetic oligonucleotide
cacaagauaggccgggccg

SEQ ID NO: 200106 - RNA, 19 nt, Artificial Sequence
  Description of Artificial Sequence: Synthetic oligonucleotide
aauucagucuuuaggugug

SEQ ID NO: 200107 - RNA, 19 nt, Artificial Sequence
  Description of Artificial Sequence: Synthetic oligonucleotide
cuaccugguuucuucaacc

SEQ ID NO: 200108 - RNA, 19 nt, Artificial Sequence
  Description of Artificial Sequence: Synthetic oligonucleotide
aauauaggugaaucaggua

SEQ ID NO: 200109 - RNA, 19 nt, Artificial Sequence
  Description of Artificial Sequence: Synthetic oligonucleotide
cuucaguaccucgaaaggg

SEQ ID NO: 200110 - RNA, 19 nt, Artificial Sequence
  Description of Artificial Sequence: Synthetic oligonucleotide
uuccaacucgccuuauucc

SEQ ID NO: 200111 - RNA, 19 nt, Artificial Sequence
  Description of Artificial Sequence: Synthetic oligonucleotide
gaaucgguuggugaccacg

SEQ ID NO: 200112 - RNA, 19 nt, Artificial Sequence
  Description of Artificial Sequence: Synthetic oligonucleotide
uagugguuaguauuccaug

SEQ ID NO: 200113 - RNA, 19 nt, Artificial Sequence
  Description of Artificial Sequence: Synthetic oligonucleotide
uccgcuaccuccacguuug

SEQ ID NO: 200114 - RNA, 19 nt, Artificial Sequence
  Description of Artificial Sequence: Synthetic oligonucleotide
acaggcuauaucugucaac

SEQ ID NO: 200115 - RNA, 19 nt, Artificial Sequence
  Description of Artificial Sequence: Synthetic oligonucleotide
uuuaggugugaaugguaug

SEQ ID NO: 200116 - RNA, 19 nt, Artificial Sequence
  Description of Artificial Sequence: Synthetic oligonucleotide
uugagggaacaucuaaauc

SEQ ID NO: 200117 - RNA, 19 nt, Artificial Sequence
  Description of Artificial Sequence: Synthetic oligonucleotide
uauaggugaaucagguaua

SEQ ID NO: 200118 - RNA, 19 nt, Artificial Sequence
  Description of Artificial Sequence: Synthetic oligonucleotide
uuucggauauuaaacucua

SEQ ID NO: 200119 - RNA, 19 nt, Artificial Sequence
  Description of Artificial Sequence: Synthetic oligonucleotide
uccaacucgccuuauuccu

SEQ ID NO: 200120 - RNA, 19 nt, Artificial Sequence
  Description of Artificial Sequence: Synthetic oligonucleotide
aucauuugcuggcuuccgg

SEQ ID NO: 200121 - RNA, 19 nt, Artificial Sequence
  Description of Artificial Sequence: Synthetic oligonucleotide
augguaugaaugacagucc

SEQ ID NO: 200122 - RNA, 19 nt, Artificial Sequence
  Description of Artificial Sequence: Synthetic oligonucleotide
agcuggucgaaucgguugg

SEQ ID NO: 200123 - RNA, 19 nt, Artificial Sequence
  Description of Artificial Sequence: Synthetic oligonucleotide
caacuaucauaagaugugg

SEQ ID NO: 200124 - RNA, 19 nt, Artificial Sequence
  Description of Artificial Sequence: Synthetic oligonucleotide
aguaccucgaaaggguccg

SEQ ID NO: 200125 - RNA, 19 nt, Artificial Sequence
  Description of Artificial Sequence: Synthetic oligonucleotide
uaaaauggggaagccacac

SEQ ID NO: 200126 - RNA, 19 nt, Artificial Sequence
  Description of Artificial Sequence: Synthetic oligonucleotide
aucacaaggaauaugcaau

SEQ ID NO: 200127 - RNA, 19 nt, Artificial Sequence
  Description of Artificial Sequence: Synthetic oligonucleotide
ucuuuacgcaacuguuugc

SEQ ID NO: 200128 - RNA, 19 nt, Artificial Sequence
  Description of Artificial Sequence: Synthetic oligonucleotide
uuaaaaccggcuuguaauu

SEQ ID NO: 200129 - RNA, 19 nt, Artificial Sequence
  Description of Artificial Sequence: Synthetic oligonucleotide
gcuaccuccacguuugucc

SEQ ID NO: 200130 - RNA, 19 nt, Artificial Sequence
  Description of Artificial Sequence: Synthetic oligonucleotide
auugcagcggaccgcgccg

SEQ ID NO: 200131 - RNA, 19 nt, Artificial Sequence
  Description of Artificial Sequence: Synthetic oligonucleotide
uucuuaguuguuugggauc

SEQ ID NO: 200132 - RNA, 19 nt, Artificial Sequence
  Description of Artificial Sequence: Synthetic oligonucleotide
cuuccaacucgccuuauuc

SEQ ID NO: 200133 - RNA, 19 nt, Artificial Sequence
  Description of Artificial Sequence: Synthetic oligonucleotide
acaucccugcuaccaauac

SEQ ID NO: 200134 - RNA, 19 nt, Artificial Sequence
  Description of Artificial Sequence: Synthetic oligonucleotide
gguuaguauuccaugaagc

SEQ ID NO: 200135 - RNA, 19 nt, Artificial Sequence
  Description of Artificial Sequence: Synthetic oligonucleotide
agauccgcuaccuccacgu

SEQ ID NO: 200136 - RNA, 19 nt, Artificial Sequence
  Description of Artificial Sequence: Synthetic oligonucleotide
gagaguguggguagggaag

SEQ ID NO: 200137 - RNA, 19 nt, Artificial Sequence
  Description of Artificial Sequence: Synthetic oligonucleotide
agcauacuaaccaaugagu

SEQ ID NO: 200138 - RNA, 19 nt, Artificial Sequence
  Description of Artificial Sequence: Synthetic oligonucleotide
gauugcagcggaccgcgcc

SEQ ID NO: 200139 - RNA, 19 nt, Artificial Sequence
  Description of Artificial Sequence: Synthetic oligonucleotide
aauccaucgccucggccca

SEQ ID NO: 200140 - RNA, 19 nt, Artificial Sequence
  Description of Artificial Sequence: Synthetic oligonucleotide
aaggguccgauucgucguc

SEQ ID NO: 200141 - RNA, 19 nt, Artificial Sequence
  Description of Artificial Sequence: Synthetic oligonucleotide
ugccaacucccaaauaaaa

SEQ ID NO: 200142 - RNA, 19 nt, Artificial Sequence
  Description of Artificial Sequence: Synthetic oligonucleotide
cucgaaaggguccgauucg

SEQ ID NO: 200143 - RNA, 19 nt, Artificial Sequence
  Description of Artificial Sequence: Synthetic oligonucleotide
cuaauauuuaaaaccggcu

SEQ ID NO: 200144 - RNA, 19 nt, Artificial Sequence
  Description of Artificial Sequence: Synthetic oligonucleotide
acgcaaagcagauauuaaa

SEQ ID NO: 200145 - RNA, 19 nt, Artificial Sequence
  Description of Artificial Sequence: Synthetic oligonucleotide
uagcuggucgaaucgguug

SEQ ID NO: 200146 - RNA, 19 nt, Artificial Sequence
  Description of Artificial Sequence: Synthetic oligonucleotide
ugggagacucuguuaauuc

SEQ ID NO: 200147 - RNA, 19 nt, Artificial Sequence
  Description of Artificial Sequence: Synthetic oligonucleotide
cuaucauaagaugugggga

SEQ ID NO: 200148 - RNA, 19 nt, Artificial Sequence
  Description of Artificial Sequence: Synthetic oligonucleotide
aauagcuggucgaaucggu

SEQ ID NO: 200149 - RNA, 19 nt, Artificial Sequence
  Description of Artificial Sequence: Synthetic oligonucleotide
uuccacuaugccuaucaaa

SEQ ID NO: 200150 - RNA, 19 nt, Artificial Sequence
  Description of Artificial Sequence: Synthetic oligonucleotide
acgguuuggacguccacca

SEQ ID NO: 200151 - RNA, 19 nt, Artificial Sequence
  Description of Artificial Sequence: Synthetic oligonucleotide
ucggauaggccguucaaua

SEQ ID NO: 200152 - RNA, 19 nt, Artificial Sequence
  Description of Artificial Sequence: Synthetic oligonucleotide
ugcacugucuuaccuuuaa

SEQ ID NO: 200153 - RNA, 19 nt, Artificial Sequence
  Description of Artificial Sequence: Synthetic oligonucleotide
agcuagagaaguucguuuu

SEQ ID NO: 200154 - RNA, 19 nt, Artificial Sequence
  Description of Artificial Sequence: Synthetic oligonucleotide
gauucgucgucaaauagcu

SEQ ID NO: 200155 - RNA, 19 nt, Artificial Sequence
  Description of Artificial Sequence: Synthetic oligonucleotide
uucccacaagauaggccgg

SEQ ID NO: 200156 - RNA, 19 nt, Artificial Sequence
  Description of Artificial Sequence: Synthetic oligonucleotide
agacguuauaucauuugcu

SEQ ID NO: 200157 - RNA, 19 nt, Artificial Sequence
  Description of Artificial Sequence: Synthetic oligonucleotide
gcauacuaaccaaugagug

SEQ ID NO: 200158 - RNA, 19 nt, Artificial Sequence
  Description of Artificial Sequence: Synthetic oligonucleotide
caggcuauaucugucaaca

SEQ ID NO: 200159 - RNA, 19 nt, Artificial Sequence
  Description of Artificial Sequence: Synthetic oligonucleotide
uucggauauuaaacucuac

SEQ ID NO: 200160 - RNA, 19 nt, Artificial Sequence
  Description of Artificial Sequence: Synthetic oligonucleotide
gcuaccaauacauuucuaa

SEQ ID NO: 200161 - RNA, 19 nt, Artificial Sequence
  Description of Artificial Sequence: Synthetic oligonucleotide
auaauucuguauaaagauu

SEQ ID NO: 200162 - RNA, 19 nt, Artificial Sequence
  Description of Artificial Sequence: Synthetic oligonucleotide
caagaagauuguugauuac

SEQ ID NO: 200163 - RNA, 19 nt, Artificial Sequence
  Description of Artificial Sequence: Synthetic oligonucleotide
ucgucgucaaauagcuggu

SEQ ID NO: 200164 - RNA, 19 nt, Artificial Sequence
  Description of Artificial Sequence: Synthetic oligonucleotide
uugagacguuauaucauuu

SEQ ID NO: 200165 - RNA, 19 nt, Artificial Sequence
  Description of Artificial Sequence: Synthetic oligonucleotide
uagcuagagaaguucguuu

SEQ ID NO: 200166 - RNA, 19 nt, Artificial Sequence
  Description of Artificial Sequence: Synthetic oligonucleotide
caguaccucgaaagggucc

SEQ ID NO: 200167 - RNA, 19 nt, Artificial Sequence
  Description of Artificial Sequence: Synthetic oligonucleotide
ccuaauaaaccaugcauga

SEQ ID NO: 200168 - RNA, 19 nt, Artificial Sequence
  Description of Artificial Sequence: Synthetic oligonucleotide
aaccugcuaaugcucuuaa

SEQ ID NO: 200169 - RNA, 19 nt, Artificial Sequence
  Description of Artificial Sequence: Synthetic oligonucleotide
aguucguuuucaaaacaga

SEQ ID NO: 200170 - RNA, 19 nt, Artificial Sequence
  Description of Artificial Sequence: Synthetic oligonucleotide
cagauaacccucuugauuu

SEQ ID NO: 200171 - RNA, 19 nt, Artificial Sequence
  Description of Artificial Sequence: Synthetic oligonucleotide
guagcuuacacaaguucca

SEQ ID NO: 200172 - RNA, 19 nt, Artificial Sequence
  Description of Artificial Sequence: Synthetic oligonucleotide
cacgguuuggacguccacc

SEQ ID NO: 200173 - RNA, 19 nt, Artificial Sequence
  Description of Artificial Sequence: Synthetic oligonucleotide
aauucacguuugccacgag

SEQ ID NO: 200174 - RNA, 19 nt, Artificial Sequence
  Description of Artificial Sequence: Synthetic oligonucleotide
uggucuccuaucaauuauu

SEQ ID NO: 200175 - RNA, 19 nt, Artificial Sequence
  Description of Artificial Sequence: Synthetic oligonucleotide
gacaguuccccaguuguga

SEQ ID NO: 200176 - RNA, 19 nt, Artificial Sequence
  Description of Artificial Sequence: Synthetic oligonucleotide
uccgauucgucgucaaaua

SEQ ID NO: 200177 - RNA, 19 nt, Artificial Sequence
  Description of Artificial Sequence: Synthetic oligonucleotide
gcaauaaucucucuccaaa

SEQ ID NO: 200178 - RNA, 19 nt, Artificial Sequence
  Description of Artificial Sequence: Synthetic oligonucleotide
caauuaggucauguugggc

SEQ ID NO: 200179 - RNA, 19 nt, Artificial Sequence
  Description of Artificial Sequence: Synthetic oligonucleotide
aggccguucaauaauuggu

SEQ ID NO: 200180 - RNA, 19 nt, Artificial Sequence
  Description of Artificial Sequence: Synthetic oligonucleotide
gguguacuacagcaauuag

SEQ ID NO: 200181 - RNA, 19 nt, Artificial Sequence
  Description of Artificial Sequence: Synthetic oligonucleotide
ccugcuaaugcucuuaaga

SEQ ID NO: 200182 - RNA, 19 nt, Artificial Sequence
  Description of Artificial Sequence: Synthetic oligonucleotide
ucgaaucgguuggugacca

SEQ ID NO: 200183 - RNA, 19 nt, Artificial Sequence
  Description of Artificial Sequence: Synthetic oligonucleotide
gguaaaucagaaguuuaca

SEQ ID NO: 200184 - RNA, 19 nt, Artificial Sequence
  Description of Artificial Sequence: Synthetic oligonucleotide
caugagucaagaguuaaua

SEQ ID NO: 200185 - RNA, 19 nt, Artificial Sequence
  Description of Artificial Sequence: Synthetic oligonucleotide
gaccaugugugaaaacgca

SEQ ID NO: 200186 - RNA, 19 nt, Artificial Sequence
  Description of Artificial Sequence: Synthetic oligonucleotide
ugccuaucaaauucacguu

SEQ ID NO: 200187 - RNA, 19 nt, Artificial Sequence
  Description of Artificial Sequence: Synthetic oligonucleotide
uagguguacuacagcaauu

SEQ ID NO: 200188 - RNA, 19 nt, Artificial Sequence
  Description of Artificial Sequence: Synthetic oligonucleotide
gguuuucggauauuaaacu

SEQ ID NO: 200189 - RNA, 19 nt, Artificial Sequence
  Description of Artificial Sequence: Synthetic oligonucleotide
aguugagacguuauaucau

SEQ ID NO: 200190 - RNA, 19 nt, Artificial Sequence
  Description of Artificial Sequence: Synthetic oligonucleotide
uuugggagacucuguuaau

SEQ ID NO: 200191 - RNA, 19 nt, Artificial Sequence
  Description of Artificial Sequence: Synthetic oligonucleotide
cauagguguacuacagcaa

SEQ ID NO: 200192 - RNA, 19 nt, Artificial Sequence
  Description of Artificial Sequence: Synthetic oligonucleotide
ucacguuugccacgagaau

SEQ ID NO: 200193 - RNA, 19 nt, Artificial Sequence
  Description of Artificial Sequence: Synthetic oligonucleotide
ucgaaaggguccgauucgu

SEQ ID NO: 200194 - RNA, 19 nt, Artificial Sequence
  Description of Artificial Sequence: Synthetic oligonucleotide
caguugugagauccgcuac

SEQ ID NO: 200195 - RNA, 19 nt, Artificial Sequence
  Description of Artificial Sequence: Synthetic oligonucleotide
cgauucgucgucaaauagc

SEQ ID NO: 200196 - RNA, 19 nt, Artificial Sequence
  Description of Artificial Sequence: Synthetic oligonucleotide
cacgcagccgaacccuucc

SEQ ID NO: 200197 - RNA, 19 nt, Artificial Sequence
  Description of Artificial Sequence: Synthetic oligonucleotide
ugaaaacgcaaagcagaua

SEQ ID NO: 200198 - RNA, 19 nt, Artificial Sequence
  Description of Artificial Sequence: Synthetic oligonucleotide
guaugaaugacaguccuuu

SEQ ID NO: 200199 - RNA, 19 nt, Artificial Sequence
  Description of Artificial Sequence: Synthetic oligonucleotide
auaggccguucaauaauug

SEQ ID NO: 200200 - RNA, 19 nt, Artificial Sequence
  Description of Artificial Sequence: Synthetic oligonucleotide
guugagacguuauaucauu

SEQ ID NO: 200201 - RNA, 19 nt, Artificial Sequence
  Description of Artificial Sequence: Synthetic oligonucleotide
uagcuuacacaaguuccaa

SEQ ID NO: 200202 - RNA, 19 nt, Artificial Sequence
  Description of Artificial Sequence: Synthetic oligonucleotide
acuaaccaaugagugcccu

SEQ ID NO: 200203 - RNA, 19 nt, Artificial Sequence
  Description of Artificial Sequence: Synthetic oligonucleotide
gaccgcgccgagccaaaag

SEQ ID NO: 200204 - RNA, 19 nt, Artificial Sequence
  Description of Artificial Sequence: Synthetic oligonucleotide
cuuaagcgccaccggcggc

SEQ ID NO: 200205 - RNA, 19 nt, Artificial Sequence
  Description of Artificial Sequence: Synthetic oligonucleotide
cugggacucuuuacgcaac

SEQ ID NO: 200206 - RNA, 19 nt, Artificial Sequence
  Description of Artificial Sequence: Synthetic oligonucleotide
ugcuaccaauacauuucua

SEQ ID NO: 200207 - RNA, 19 nt, Artificial Sequence
  Description of Artificial Sequence: Synthetic oligonucleotide
gcaacuguuugcccgccgc

SEQ ID NO: 200208 - RNA, 19 nt, Artificial Sequence
  Description of Artificial Sequence: Synthetic oligonucleotide
aauggggaagccacacauu

SEQ ID NO: 200209 - RNA, 19 nt, Artificial Sequence
  Description of Artificial Sequence: Synthetic oligonucleotide
gauccaaaucacugcaauu

SEQ ID NO: 200210 - RNA, 19 nt, Artificial Sequence
  Description of Artificial Sequence: Synthetic oligonucleotide
gacuaacauauuuguuacu

SEQ ID NO: 200211 - RNA, 19 nt, Artificial Sequence
  Description of Artificial Sequence: Synthetic oligonucleotide
uuucccgagguggucgccu

SEQ ID NO: 200212 - RNA, 19 nt, Artificial Sequence
  Description of Artificial Sequence: Synthetic oligonucleotide
ucaaccugcuaaugcucuu

SEQ ID NO: 200213 - RNA, 19 nt, Artificial Sequence
  Description of Artificial Sequence: Synthetic oligonucleotide
acucuuuacgcaacuguuu

SEQ ID NO: 200214 - RNA, 19 nt, Artificial Sequence
  Description of Artificial Sequence: Synthetic oligonucleotide
uuugcccgccgcguuggag

SEQ ID NO: 200215 - RNA, 19 nt, Artificial Sequence
  Description of Artificial Sequence: Synthetic oligonucleotide
accuccacguuuguccuca

SEQ ID NO: 200216 - RNA, 19 nt, Artificial Sequence
  Description of Artificial Sequence: Synthetic oligonucleotide
caaaugagugaaagcuuua

SEQ ID NO: 200217 - RNA, 19 nt, Artificial Sequence
  Description of Artificial Sequence: Synthetic oligonucleotide
gccacgagaaucaaaucca

SEQ ID NO: 200218 - RNA, 19 nt, Artificial Sequence
  Description of Artificial Sequence: Synthetic oligonucleotide
guuauaucauuugcuggcu

SEQ ID NO: 200219 - RNA, 19 nt, Artificial Sequence
  Description of Artificial Sequence: Synthetic oligonucleotide
ugcuggcuuccggaaauga

SEQ ID NO: 200220 - RNA, 19 nt, Artificial Sequence
  Description of Artificial Sequence: Synthetic oligonucleotide
ugucaacaagaaguagcuu

SEQ ID NO: 200221 - RNA, 19 nt, Artificial Sequence
  Description of Artificial Sequence: Synthetic oligonucleotide
ccgauucgucgucaaauag

SEQ ID NO: 200222 - RNA, 19 nt, Artificial Sequence
  Description of Artificial Sequence: Synthetic oligonucleotide
cuguuugcccgccgcguug

SEQ ID NO: 200223 - RNA, 19 nt, Artificial Sequence
  Description of Artificial Sequence: Synthetic oligonucleotide
guuuaacuauuaggaauua

SEQ ID NO: 200224 - RNA, 19 nt, Artificial Sequence
  Description of Artificial Sequence: Synthetic oligonucleotide
augccaacucccaaauaaa

SEQ ID NO: 200225 - RNA, 19 nt, Artificial Sequence
  Description of Artificial Sequence: Synthetic oligonucleotide
ccuuaagcaugcaaaagcu

SEQ ID NO: 200226 - RNA, 19 nt, Artificial Sequence
  Description of Artificial Sequence: Synthetic oligonucleotide
ggagcagaagcacuugacu

SEQ ID NO: 200227 - RNA, 19 nt, Artificial Sequence
  Description of Artificial Sequence: Synthetic oligonucleotide
gacucuuuacgcaacuguu

SEQ ID NO: 200228 - RNA, 19 nt, Artificial Sequence
  Description of Artificial Sequence: Synthetic oligonucleotide
cuuaagcaugcaaaagcuu

SEQ ID NO: 200229 - RNA, 19 nt, Artificial Sequence
  Description of Artificial Sequence: Synthetic oligonucleotide
ggccguucaauaauugguc

SEQ ID NO: 200230 - RNA, 19 nt, Artificial Sequence
  Description of Artificial Sequence: Synthetic oligonucleotide
gauaggccguucaauaauu

SEQ ID NO: 200231 - RNA, 19 nt, Artificial Sequence
  Description of Artificial Sequence: Synthetic oligonucleotide
acgcaacuguuugcccgcc

SEQ ID NO: 200232 - RNA, 19 nt, Artificial Sequence
  Description of Artificial Sequence: Synthetic oligonucleotide
cucuaguugagacguuaua

SEQ ID NO: 200233 - RNA, 19 nt, Artificial Sequence
  Description of Artificial Sequence: Synthetic oligonucleotide
guuuggacguccaccacgu

SEQ ID NO: 200234 - RNA, 19 nt, Artificial Sequence
  Description of Artificial Sequence: Synthetic oligonucleotide
auucgucgucaaauagcug

SEQ ID NO: 200235 - RNA, 19 nt, Artificial Sequence
  Description of Artificial Sequence: Synthetic oligonucleotide
auagcuggucgaaucgguu

SEQ ID NO: 200236 - RNA, 19 nt, Artificial Sequence
  Description of Artificial Sequence: Synthetic oligonucleotide
uaccucgaaaggguccgau

SEQ ID NO: 200237 - RNA, 19 nt, Artificial Sequence
  Description of Artificial Sequence: Synthetic oligonucleotide
ucccugcuaccaauacauu

SEQ ID NO: 200238 - RNA, 19 nt, Artificial Sequence
  Description of Artificial Sequence: Synthetic oligonucleotide
ggcggcgcguuccuccacg

SEQ ID NO: 200239 - RNA, 19 nt, Artificial Sequence
  Description of Artificial Sequence: Synthetic oligonucleotide
gcaguguuuaguucuacuu

SEQ ID NO: 200240 - RNA, 19 nt, Artificial Sequence
  Description of Artificial Sequence: Synthetic oligonucleotide
guagcuagagaaguucguu

SEQ ID NO: 200241 - RNA, 19 nt, Artificial Sequence
  Description of Artificial Sequence: Synthetic oligonucleotide
ggauaggccguucaauaau

SEQ ID NO: 200242 - RNA, 19 nt, Artificial Sequence
  Description of Artificial Sequence: Synthetic oligonucleotide
acucgccuuauuccuucuu

SEQ ID NO: 200243 - RNA, 19 nt, Artificial Sequence
  Description of Artificial Sequence: Synthetic oligonucleotide
guccgauucgucgucaaau

SEQ ID NO: 200244 - RNA, 19 nt, Artificial Sequence
  Description of Artificial Sequence: Synthetic oligonucleotide
cuggucuccuaucaauuau

SEQ ID NO: 200245 - RNA, 19 nt, Artificial Sequence
  Description of Artificial Sequence: Synthetic oligonucleotide
ugucagccacgccgacgcu

SEQ ID NO: 200246 - RNA, 19 nt, Artificial Sequence
  Description of Artificial Sequence: Synthetic oligonucleotide
gccgcguuggaguuggucu

SEQ ID NO: 200247 - RNA, 19 nt, Artificial Sequence
  Description of Artificial Sequence: Synthetic oligonucleotide
gccguucaauaauuggucu

SEQ ID NO: 200248 - RNA, 19 nt, Artificial Sequence
  Description of Artificial Sequence: Synthetic oligonucleotide
cucggucuuuauuuugaau

SEQ ID NO: 200249 - RNA, 19 nt, Artificial Sequence
  Description of Artificial Sequence: Synthetic oligonucleotide
gguauaauuugaaccuaau

SEQ ID NO: 200250 - RNA, 19 nt, Artificial Sequence
  Description of Artificial Sequence: Synthetic oligonucleotide
caaccugcuaaugcucuua

SEQ ID NO: 200251 - RNA, 19 nt, Artificial Sequence
  Description of Artificial Sequence: Synthetic oligonucleotide
cggauugcagcggaccgcg

SEQ ID NO: 200252 - RNA, 19 nt, Artificial Sequence
  Description of Artificial Sequence: Synthetic oligonucleotide
gcgccgagccaaaagcgcc

SEQ ID NO: 200253 - RNA, 19 nt, Artificial Sequence
  Description of Artificial Sequence: Synthetic oligonucleotide
gcggccuaggucuccaaaa

SEQ ID NO: 200254 - RNA, 19 nt, Artificial Sequence
  Description of Artificial Sequence: Synthetic oligonucleotide
ccgcguuggaguuggucug

SEQ ID NO: 200255 - RNA, 19 nt, Artificial Sequence
  Description of Artificial Sequence: Synthetic oligonucleotide
ccguucaauaauuggucua

SEQ ID NO: 200256 - RNA, 19 nt, Artificial Sequence
  Description of Artificial Sequence: Synthetic oligonucleotide
ucccgagguggucgccuuu

SEQ ID NO: 200257 - RNA, 19 nt, Artificial Sequence
  Description of Artificial Sequence: Synthetic oligonucleotide
cacguccugggcggccuag

SEQ ID NO: 200258 - RNA, 19 nt, Artificial Sequence
  Description of Artificial Sequence: Synthetic oligonucleotide
accaaauggccaggcucuu

SEQ ID NO: 200259 - RNA, 19 nt, Artificial Sequence
  Description of Artificial Sequence: Synthetic oligonucleotide
ggccuuucauacacaaaua

SEQ ID NO: 200260 - RNA, 19 nt, Artificial Sequence
  Description of Artificial Sequence: Synthetic oligonucleotide
cagccgaacccuuccugua

SEQ ID NO: 200261 - RNA, 19 nt, Artificial Sequence
  Description of Artificial Sequence: Synthetic oligonucleotide
gcggcgcguuccuccacgg

SEQ ID NO: 200262 - RNA, 19 nt, Artificial Sequence
  Description of Artificial Sequence: Synthetic oligonucleotide
gguccgauucgucgucaaa

SEQ ID NO: 200263 - RNA, 19 nt, Artificial Sequence
  Description of Artificial Sequence: Synthetic oligonucleotide
ggcgcguuccuccacggau

SEQ ID NO: 200264 - RNA, 19 nt, Artificial Sequence
  Description of Artificial Sequence: Synthetic oligonucleotide
cucggauaggccguucaau

SEQ ID NO: 200265 - RNA, 19 nt, Artificial Sequence
  Description of Artificial Sequence: Synthetic oligonucleotide
ccucgaccccuuccaagac

SEQ ID NO: 200266 - RNA, 19 nt, Artificial Sequence
  Description of Artificial Sequence: Synthetic oligonucleotide
gcaugagccucuucgcuuu

SEQ ID NO: 200267 - RNA, 19 nt, Artificial Sequence
  Description of Artificial Sequence: Synthetic oligonucleotide
guaccucgaaaggguccga

SEQ ID NO: 200268 - RNA, 19 nt, Artificial Sequence
  Description of Artificial Sequence: Synthetic oligonucleotide
cagccacgccgacgcuggg

SEQ ID NO: 200269 - RNA, 19 nt, Artificial Sequence
  Description of Artificial Sequence: Synthetic oligonucleotide
gguaugaaugacaguccuu

SEQ ID NO: 200270 - RNA, 19 nt, Artificial Sequence
  Description of Artificial Sequence: Synthetic oligonucleotide
guuugcccgccgcguugga

SEQ ID NO: 200271 - RNA, 19 nt, Artificial Sequence
  Description of Artificial Sequence: Synthetic oligonucleotide
gauccgcuaccuccacguu

SEQ ID NO: 200272 - RNA, 19 nt, Artificial Sequence
  Description of Artificial Sequence: Synthetic oligonucleotide
ggcggccuaggucuccaaa

SEQ ID NO: 200273 - RNA, 19 nt, Artificial Sequence
  Description of Artificial Sequence: Synthetic oligonucleotide
cgcaacuguuugcccgccg

SEQ ID NO: 200274 - RNA, 19 nt, Artificial Sequence
  Description of Artificial Sequence: Synthetic oligonucleotide
ccacgguuuggacguccac

SEQ ID NO: 200275 - RNA, 19 nt, Artificial Sequence
  Description of Artificial Sequence: Synthetic oligonucleotide
gggcagcggguucuugcga

SEQ ID NO: 200276 - RNA, 19 nt, Artificial Sequence
  Description of Artificial Sequence: Synthetic oligonucleotide
gcaugagucaagaguuaau

SEQ ID NO: 200277 - RNA, 19 nt, Artificial Sequence
  Description of Artificial Sequence: Synthetic oligonucleotide
ggauugcagcggaccgcgc

SEQ ID NO: 200278 - RNA, 19 nt, Artificial Sequence
  Description of Artificial Sequence: Synthetic oligonucleotide
ccucggauaggccguucaa

SEQ ID NO: 200279 - RNA, 19 nt, Artificial Sequence
  Description of Artificial Sequence: Synthetic oligonucleotide
cccgagguggucgccuuuc

SEQ ID NO: 200280 - RNA, 19 nt, Artificial Sequence
  Description of Artificial Sequence: Synthetic oligonucleotide
cgucgucaaauagcugguc

SEQ ID NO: 200281 - RNA, 19 nt, Artificial Sequence
  Description of Artificial Sequence: Synthetic oligonucleotide
ccaucgccucggcccauuc

SEQ ID NO: 200282 - RNA, 19 nt, Artificial Sequence
  Description of Artificial Sequence: Synthetic oligonucleotide
ccugggcggccuaggucuc

SEQ ID NO: 200283 - RNA, 19 nt, Artificial Sequence
  Description of Artificial Sequence: Synthetic oligonucleotide
gcggaccgcgccgagccaa

SEQ ID NO: 200284 - RNA, 19 nt, Artificial Sequence
  Description of Artificial Sequence: Synthetic oligonucleotide
ccaaauggccaggcucuua

SEQ ID NO: 200285 - RNA, 19 nt, Artificial Sequence
  Description of Artificial Sequence: Synthetic oligonucleotide
cgcuaccuccacguuuguc

SEQ ID NO: 200286 - RNA, 19 nt, Artificial Sequence
  Description of Artificial Sequence: Synthetic oligonucleotide
gcgaucuuucugggacucu

SEQ ID NO: 200287 - RNA, 19 nt, Artificial Sequence
  Description of Artificial Sequence: Synthetic oligonucleotide
ggccucggauaggccguuc

SEQ ID NO: 200288 - RNA, 19 nt, Artificial Sequence
  Description of Artificial Sequence: Synthetic oligonucleotide
cggccuaggucuccaaaau

SEQ ID NO: 200289 - RNA, 19 nt, Artificial Sequence
  Description of Artificial Sequence: Synthetic oligonucleotide
gguggcucggcggcgcguu

SEQ ID NO: 200290 - RNA, 19 nt, Artificial Sequence
  Description of Artificial Sequence: Synthetic oligonucleotide
ggaccgcgccgagccaaaa

SEQ ID NO: 200291 - RNA, 19 nt, Artificial Sequence
  Description of Artificial Sequence: Synthetic oligonucleotide
gcgcguuccuccacggauu

SEQ ID NO: 200292 - RNA, 19 nt, Artificial Sequence
  Description of Artificial Sequence: Synthetic oligonucleotide
ccgcuaccuccacguuugu

SEQ ID NO: 200293 - RNA, 19 nt, Artificial Sequence
  Description of Artificial Sequence: Synthetic oligonucleotide
cggccucggauaggccguu

SEQ ID NO: 200294 - RNA, 19 nt, Artificial Sequence
  Description of Artificial Sequence: Synthetic oligonucleotide
uucuaugugaaaaggaugg

SEQ ID NO: 200295 - RNA, 19 nt, Artificial Sequence
  Description of Artificial Sequence: Synthetic oligonucleotide
agagaauucacccuagcgc

SEQ ID NO: 200296 - RNA, 19 nt, Artificial Sequence
  Description of Artificial Sequence: Synthetic oligonucleotide
aaccuaaguuuauucaugc

SEQ ID NO: 200297 - RNA, 19 nt, Artificial Sequence
  Description of Artificial Sequence: Synthetic oligonucleotide
aacgucaguaggcucaugc

SEQ ID NO: 200298 - RNA, 19 nt, Artificial Sequence
  Description of Artificial Sequence: Synthetic oligonucleotide
ucauccauaagcaaaauau

SEQ ID NO: 200299 - RNA, 19 nt, Artificial Sequence
  Description of Artificial Sequence: Synthetic oligonucleotide
aacuacaauaaugauguac

SEQ ID NO: 200300 - RNA, 19 nt, Artificial Sequence
  Description of Artificial Sequence: Synthetic oligonucleotide
ucuaauguaaacuggaauc

SEQ ID NO: 200301 - RNA, 19 nt, Artificial Sequence
  Description of Artificial Sequence: Synthetic oligonucleotide
acaauuaagacuucuagga

SEQ ID NO: 200302 - RNA, 19 nt, Artificial Sequence
  Description of Artificial Sequence: Synthetic oligonucleotide
gaacguaagaaucuguucc

SEQ ID NO: 200303 - RNA, 19 nt, Artificial Sequence
  Description of Artificial Sequence: Synthetic oligonucleotide
ucaagcaccuccaaaauac

SEQ ID NO: 200304 - RNA, 19 nt, Artificial Sequence
  Description of Artificial Sequence: Synthetic oligonucleotide
uuuucgaggaucaacuuga

SEQ ID NO: 200305 - RNA, 19 nt, Artificial Sequence
  Description of Artificial Sequence: Synthetic oligonucleotide
aguacuuuacuuaacguac

SEQ ID NO: 200306 - RNA, 19 nt, Artificial Sequence
  Description of Artificial Sequence: Synthetic oligonucleotide
auaguuuacuacgauaaac

SEQ ID NO: 200307 - RNA, 19 nt, Artificial Sequence
  Description of Artificial Sequence: Synthetic oligonucleotide
aagaucuauaauaaguuug

SEQ ID NO: 200308 - RNA, 19 nt, Artificial Sequence
  Description of Artificial Sequence: Synthetic oligonucleotide
guuaacguggccuggauag

SEQ ID NO: 200309 - RNA, 19 nt, Artificial Sequence
  Description of Artificial Sequence: Synthetic oligonucleotide
uagagaauucacccuagcg

SEQ ID NO: 200310 - RNA, 19 nt, Artificial Sequence
  Description of Artificial Sequence: Synthetic oligonucleotide
uuacuuaacguacauggac

SEQ ID NO: 200311 - RNA, 19 nt, Artificial Sequence
  Description of Artificial Sequence: Synthetic oligonucleotide
uuaugaauaggccagucau

SEQ ID NO: 200312 - RNA, 19 nt, Artificial Sequence
  Description of Artificial Sequence: Synthetic oligonucleotide
uugaaauuggcucauccgu

SEQ ID NO: 200313 - RNA, 19 nt, Artificial Sequence
  Description of Artificial Sequence: Synthetic oligonucleotide
ugaguuagcgguuugugug

SEQ ID NO: 200314 - RNA, 19 nt, Artificial Sequence
  Description of Artificial Sequence: Synthetic oligonucleotide
aaauccagugcuucucgac

SEQ ID NO: 200315 - RNA, 19 nt, Artificial Sequence
  Description of Artificial Sequence: Synthetic oligonucleotide
ucacuauaaagaaugaaua

SEQ ID NO: 200316 - RNA, 19 nt, Artificial Sequence
  Description of Artificial Sequence: Synthetic oligonucleotide
uuuguagauagaucaagca

SEQ ID NO: 200317 - RNA, 19 nt, Artificial Sequence
  Description of Artificial Sequence: Synthetic oligonucleotide
aguuguuaugaauaggcca

SEQ ID NO: 200318 - RNA, 19 nt, Artificial Sequence
  Description of Artificial Sequence: Synthetic oligonucleotide
uagcuagugucaaaggcgg

SEQ ID NO: 200319 - RNA, 19 nt, Artificial Sequence
  Description of Artificial Sequence: Synthetic oligonucleotide
uacuuaacguacauggaca

SEQ ID NO: 200320 - RNA, 19 nt, Artificial Sequence
  Description of Artificial Sequence: Synthetic oligonucleotide
aaauucggcauucguuuuc

SEQ ID NO: 200321 - RNA, 19 nt, Artificial Sequence
  Description of Artificial Sequence: Synthetic oligonucleotide
guagauaacacauguguac

SEQ ID NO: 200322 - RNA, 19 nt, Artificial Sequence
  Description of Artificial Sequence: Synthetic oligonucleotide
cacauguguaccaaauucg

SEQ ID NO: 200323 - RNA, 19 nt, Artificial Sequence
  Description of Artificial Sequence: Synthetic oligonucleotide
cuaaguaugacgaugaccu

SEQ ID NO: 200324 - RNA, 19 nt, Artificial Sequence
  Description of Artificial Sequence: Synthetic oligonucleotide
uauaaauggugaacgaguc

SEQ ID NO: 200325 - RNA, 19 nt, Artificial Sequence
  Description of Artificial Sequence: Synthetic oligonucleotide
uuaucuaaguaugacgaug

SEQ ID NO: 200326 - RNA, 19 nt, Artificial Sequence
  Description of Artificial Sequence: Synthetic oligonucleotide
uugucaacaacgucaguag

SEQ ID NO: 200327 - RNA, 19 nt, Artificial Sequence
  Description of Artificial Sequence: Synthetic oligonucleotide
agucaugucguuucuaaug

SEQ ID NO: 200328 - RNA, 19 nt, Artificial Sequence
  Description of Artificial Sequence: Synthetic oligonucleotide
aguuaucuaaguaugacga

SEQ ID NO: 200329 - RNA, 19 nt, Artificial Sequence
  Description of Artificial Sequence: Synthetic oligonucleotide
agugcauaugccguggagc

SEQ ID NO: 200330 - RNA, 19 nt, Artificial Sequence
  Description of Artificial Sequence: Synthetic oligonucleotide
uguguaaguuucaaggcaa

SEQ ID NO: 200331 - RNA, 19 nt, Artificial Sequence
  Description of Artificial Sequence: Synthetic oligonucleotide
ucgacuaauucccggaagc

SEQ ID NO: 200332 - RNA, 19 nt, Artificial Sequence
  Description of Artificial Sequence: Synthetic oligonucleotide
gagaauucacccuagcgca

SEQ ID NO: 200333 - RNA, 19 nt, Artificial Sequence
  Description of Artificial Sequence: Synthetic oligonucleotide
auuuucgaggaucaacuug

SEQ ID NO: 200334 - RNA, 19 nt, Artificial Sequence
  Description of Artificial Sequence: Synthetic oligonucleotide
uuuacuuaacguacaugga

SEQ ID NO: 200335 - RNA, 19 nt, Artificial Sequence
  Description of Artificial Sequence: Synthetic oligonucleotide
uuauguuucgccacauacu

SEQ ID NO: 200336 - RNA, 19 nt, Artificial Sequence
  Description of Artificial Sequence: Synthetic oligonucleotide
aacguaagaaucuguucca

SEQ ID NO: 200337 - RNA, 19 nt, Artificial Sequence
  Description of Artificial Sequence: Synthetic oligonucleotide
ucuaaguaugacgaugacc

SEQ ID NO: 200338 - RNA, 19 nt, Artificial Sequence
  Description of Artificial Sequence: Synthetic oligonucleotide
uaaauggugaacgagucuc

SEQ ID NO: 200339 - RNA, 19 nt, Artificial Sequence
  Description of Artificial Sequence: Synthetic oligonucleotide
uucuaauguaaacuggaau

SEQ ID NO: 200340 - RNA, 19 nt, Artificial Sequence
  Description of Artificial Sequence: Synthetic oligonucleotide
ugucaacaacgucaguagg

SEQ ID NO: 200341 - RNA, 19 nt, Artificial Sequence
  Description of Artificial Sequence: Synthetic oligonucleotide
ugugugugugugcaaauga

SEQ ID NO: 200342 - RNA, 19 nt, Artificial Sequence
  Description of Artificial Sequence: Synthetic oligonucleotide
aauaaugauguaccuuaau

SEQ ID NO: 200343 - RNA, 19 nt, Artificial Sequence
  Description of Artificial Sequence: Synthetic oligonucleotide
agaucaagcaccuccaaaa

SEQ ID NO: 200344 - RNA, 19 nt, Artificial Sequence
  Description of Artificial Sequence: Synthetic oligonucleotide
ucuagagaaugucuagaga

SEQ ID NO: 200345 - RNA, 19 nt, Artificial Sequence
  Description of Artificial Sequence: Synthetic oligonucleotide
aaguaugacgaugaccuug

SEQ ID NO: 200346 - RNA, 19 nt, Artificial Sequence
  Description of Artificial Sequence: Synthetic oligonucleotide
uacgauaaacgcuggcuag

SEQ ID NO: 200347 - RNA, 19 nt, Artificial Sequence
  Description of Artificial Sequence: Synthetic oligonucleotide
acuuaacguacauggacag

SEQ ID NO: 200348 - RNA, 19 nt, Artificial Sequence
  Description of Artificial Sequence: Synthetic oligonucleotide
aagguguuaacguggccug

SEQ ID NO: 200349 - RNA, 19 nt, Artificial Sequence
  Description of Artificial Sequence: Synthetic oligonucleotide
ucuagagaauucacccuag

SEQ ID NO: 200350 - RNA, 19 nt, Artificial Sequence
  Description of Artificial Sequence: Synthetic oligonucleotide
uggugaacgagucucaaua

SEQ ID NO: 200351 - RNA, 19 nt, Artificial Sequence
  Description of Artificial Sequence: Synthetic oligonucleotide
auagcggaagguguuaacg

SEQ ID NO: 200352 - RNA, 19 nt, Artificial Sequence
  Description of Artificial Sequence: Synthetic oligonucleotide
auaaguuugggcucauagu

SEQ ID NO: 200353 - RNA, 19 nt, Artificial Sequence
  Description of Artificial Sequence: Synthetic oligonucleotide
uggggaauagaucauucaa

SEQ ID NO: 200354 - RNA, 19 nt, Artificial Sequence
  Description of Artificial Sequence: Synthetic oligonucleotide
agggcaguugcaaauaaac

SEQ ID NO: 200355 - RNA, 19 nt, Artificial Sequence
  Description of Artificial Sequence: Synthetic oligonucleotide
ugaacgagucucaauaguu

SEQ ID NO: 200356 - RNA, 19 nt, Artificial Sequence
  Description of Artificial Sequence: Synthetic oligonucleotide
gucuagagaaugucuagag

SEQ ID NO: 200357 - RNA, 19 nt, Artificial Sequence
  Description of Artificial Sequence: Synthetic oligonucleotide
gaguuagcgguuugugugg

SEQ ID NO: 200358 - RNA, 19 nt, Artificial Sequence
  Description of Artificial Sequence: Synthetic oligonucleotide
uaccugacgaucuuccuca

SEQ ID NO: 200359 - RNA, 19 nt, Artificial Sequence
  Description of Artificial Sequence: Synthetic oligonucleotide
uguuucgccacauacuuuu

SEQ ID NO: 200360 - RNA, 19 nt, Artificial Sequence
  Description of Artificial Sequence: Synthetic oligonucleotide
uccggauacugccagcaag

SEQ ID NO: 200361 - RNA, 19 nt, Artificial Sequence
  Description of Artificial Sequence: Synthetic oligonucleotide
aaugcugcuguacgucuug

SEQ ID NO: 200362 - RNA, 19 nt, Artificial Sequence
  Description of Artificial Sequence: Synthetic oligonucleotide
ucauccguuggaaaagagu

SEQ ID NO: 200363 - RNA, 19 nt, Artificial Sequence
  Description of Artificial Sequence: Synthetic oligonucleotide
aguuccugcaaugaaggag

SEQ ID NO: 200364 - RNA, 19 nt, Artificial Sequence
  Description of Artificial Sequence: Synthetic oligonucleotide
ugaguacuuuacuuaacgu

SEQ ID NO: 200365 - RNA, 19 nt, Artificial Sequence
  Description of Artificial Sequence: Synthetic oligonucleotide
aaacuaacgcacauguaga

SEQ ID NO: 200366 - RNA, 19 nt, Artificial Sequence
  Description of Artificial Sequence: Synthetic oligonucleotide
uuauucaugcuugccuagg

SEQ ID NO: 200367 - RNA, 19 nt, Artificial Sequence
  Description of Artificial Sequence: Synthetic oligonucleotide
ugaauaguuccugcaauga

SEQ ID NO: 200368 - RNA, 19 nt, Artificial Sequence
  Description of Artificial Sequence: Synthetic oligonucleotide
acugauacaaggcuuccaa

SEQ ID NO: 200369 - RNA, 19 nt, Artificial Sequence
  Description of Artificial Sequence: Synthetic oligonucleotide
uuguguaugugugugugug

SEQ ID NO: 200370 - RNA, 19 nt, Artificial Sequence
  Description of Artificial Sequence: Synthetic oligonucleotide
ugaacguaagaaucuguuc

SEQ ID NO: 200371 - RNA, 19 nt, Artificial Sequence
  Description of Artificial Sequence: Synthetic oligonucleotide
uuccuauacacagugagua

SEQ ID NO: 200372 - RNA, 19 nt, Artificial Sequence
  Description of Artificial Sequence: Synthetic oligonucleotide
gacauuuauaaauggugaa

SEQ ID NO: 200373 - RNA, 19 nt, Artificial Sequence
  Description of Artificial Sequence: Synthetic oligonucleotide
gaguacuuuacuuaacgua

SEQ ID NO: 200374 - RNA, 19 nt, Artificial Sequence
  Description of Artificial Sequence: Synthetic oligonucleotide
acccuagcgcaucaucucc

SEQ ID NO: 200375 - RNA, 19 nt, Artificial Sequence
  Description of Artificial Sequence: Synthetic oligonucleotide
aacuaacgcacauguagaa

SEQ ID NO: 200376 - RNA, 19 nt, Artificial Sequence
  Description of Artificial Sequence: Synthetic oligonucleotide
ucaacaacgucaguaggcu

SEQ ID NO: 200377 - RNA, 19 nt, Artificial Sequence
  Description of Artificial Sequence: Synthetic oligonucleotide
uguaaacuggaaucacacu

SEQ ID NO: 200378 - RNA, 19 nt, Artificial Sequence
  Description of Artificial Sequence: Synthetic oligonucleotide
ucagucaugucguuucuaa

SEQ ID NO: 200379 - RNA, 19 nt, Artificial Sequence
  Description of Artificial Sequence: Synthetic oligonucleotide
cuaacgcacauguagaaaa

SEQ ID NO: 200380 - RNA, 19 nt, Artificial Sequence
  Description of Artificial Sequence: Synthetic oligonucleotide
aguaaugguuaacuucacu

SEQ ID NO: 200381 - RNA, 19 nt, Artificial Sequence
  Description of Artificial Sequence: Synthetic oligonucleotide
auaaauggugaacgagucu

SEQ ID NO: 200382 - RNA, 19 nt, Artificial Sequence
  Description of Artificial Sequence: Synthetic oligonucleotide
agaaugaauaccaggacau

SEQ ID NO: 200383 - RNA, 19 nt, Artificial Sequence
  Description of Artificial Sequence: Synthetic oligonucleotide
uuacuacgauaaacgcugg

SEQ ID NO: 200384 - RNA, 19 nt, Artificial Sequence
  Description of Artificial Sequence: Synthetic oligonucleotide
acuacgauaaacgcuggcu

SEQ ID NO: 200385 - RNA, 19 nt, Artificial Sequence
  Description of Artificial Sequence: Synthetic oligonucleotide
agcugaaccucaucgauau

SEQ ID NO: 200386 - RNA, 19 nt, Artificial Sequence
  Description of Artificial Sequence: Synthetic oligonucleotide
uguggcuacacuccagauc

SEQ ID NO: 200387 - RNA, 19 nt, Artificial Sequence
  Description of Artificial Sequence: Synthetic oligonucleotide
uccguuggaaaagaguaga

SEQ ID NO: 200388 - RNA, 19 nt, Artificial Sequence
  Description of Artificial Sequence: Synthetic oligonucleotide
uucucgacuaauucccgga

SEQ ID NO: 200389 - RNA, 19 nt, Artificial Sequence
  Description of Artificial Sequence: Synthetic oligonucleotide
aaccauagugccaaaugga

SEQ ID NO: 200390 - RNA, 19 nt, Artificial Sequence
  Description of Artificial Sequence: Synthetic oligonucleotide
acgcuggcuagauagaagu

SEQ ID NO: 200391 - RNA, 19 nt, Artificial Sequence
  Description of Artificial Sequence: Synthetic oligonucleotide
uagaagugcauaugccgug

SEQ ID NO: 200392 - RNA, 19 nt, Artificial Sequence
  Description of Artificial Sequence: Synthetic oligonucleotide
cacaagucuaacauuacaa

SEQ ID NO: 200393 - RNA, 19 nt, Artificial Sequence
  Description of Artificial Sequence: Synthetic oligonucleotide
ugguuuauguuucgccaca

SEQ ID NO: 200394 - RNA, 19 nt, Artificial Sequence
  Description of Artificial Sequence: Synthetic oligonucleotide
ugauaccuuucccaguuau

SEQ ID NO: 200395 - RNA, 19 nt, Artificial Sequence
  Description of Artificial Sequence: Synthetic oligonucleotide
gucaacaacgucaguaggc

SEQ ID NO: 200396 - RNA, 19 nt, Artificial Sequence
  Description of Artificial Sequence: Synthetic oligonucleotide
uaauguaaacuggaaucac

SEQ ID NO: 200397 - RNA, 19 nt, Artificial Sequence
  Description of Artificial Sequence: Synthetic oligonucleotide
ugcaaauuaaugacaccuu

SEQ ID NO: 200398 - RNA, 19 nt, Artificial Sequence
  Description of Artificial Sequence: Synthetic oligonucleotide
uagaucaagcaccuccaaa

SEQ ID NO: 200399 - RNA, 19 nt, Artificial Sequence
  Description of Artificial Sequence: Synthetic oligonucleotide
auagaagugcauaugccgu

SEQ ID NO: 200400 - RNA, 19 nt, Artificial Sequence
  Description of Artificial Sequence: Synthetic oligonucleotide
aauucggcauucguuuuca

SEQ ID NO: 200401 - RNA, 19 nt, Artificial Sequence
  Description of Artificial Sequence: Synthetic oligonucleotide
gauagaucaagcaccucca

SEQ ID NO: 200402 - RNA, 19 nt, Artificial Sequence
  Description of Artificial Sequence: Synthetic oligonucleotide
uaauuacuuccaugcacac

SEQ ID NO: 200403 - RNA, 19 nt, Artificial Sequence
  Description of Artificial Sequence: Synthetic oligonucleotide
auaccuuucccaguuauaa

SEQ ID NO: 200404 - RNA, 19 nt, Artificial Sequence
  Description of Artificial Sequence: Synthetic oligonucleotide
ugugagggauuugagggga

SEQ ID NO: 200405 - RNA, 19 nt, Artificial Sequence
  Description of Artificial Sequence: Synthetic oligonucleotide
uguaccaaauucggcauuc

SEQ ID NO: 200406 - RNA, 19 nt, Artificial Sequence
  Description of Artificial Sequence: Synthetic oligonucleotide
guuuauucaugcuugccua

SEQ ID NO: 200407 - RNA, 19 nt, Artificial Sequence
  Description of Artificial Sequence: Synthetic oligonucleotide
uacuacgauaaacgcuggc

SEQ ID NO: 200408 - RNA, 19 nt, Artificial Sequence
  Description of Artificial Sequence: Synthetic oligonucleotide
cugcaaagaggguuuuacc

SEQ ID NO: 200409 - RNA, 19 nt, Artificial Sequence
  Description of Artificial Sequence: Synthetic oligonucleotide
cuucucucggcucacugac

SEQ ID NO: 200410 - RNA, 19 nt, Artificial Sequence
  Description of Artificial Sequence: Synthetic oligonucleotide
uuuguguaugugugugugu

SEQ ID NO: 200411 - RNA, 19 nt, Artificial Sequence
  Description of Artificial Sequence: Synthetic oligonucleotide
uaccaaauucggcauucgu

SEQ ID NO: 200412 - RNA, 19 nt, Artificial Sequence
  Description of Artificial Sequence: Synthetic oligonucleotide
uucggcauucguuuucagu

SEQ ID NO: 200413 - RNA, 19 nt, Artificial Sequence
  Description of Artificial Sequence: Synthetic oligonucleotide
ugugugcaaaugacaugcc

SEQ ID NO: 200414 - RNA, 19 nt, Artificial Sequence
  Description of Artificial Sequence: Synthetic oligonucleotide
cuaggagcauuuuauaaua

SEQ ID NO: 200415 - RNA, 19 nt, Artificial Sequence
  Description of Artificial Sequence: Synthetic oligonucleotide
ggcgggauccuccagauac

SEQ ID NO: 200416 - RNA, 19 nt, Artificial Sequence
  Description of Artificial Sequence: Synthetic oligonucleotide
uccuauacacagugaguac

SEQ ID NO: 200417 - RNA, 19 nt, Artificial Sequence
  Description of Artificial Sequence: Synthetic oligonucleotide
guaugugugugugugugug

SEQ ID NO: 200418 - RNA, 19 nt, Artificial Sequence
  Description of Artificial Sequence: Synthetic oligonucleotide
aguuagcgguuuguguggc

SEQ ID NO: 200419 - RNA, 19 nt, Artificial Sequence
  Description of Artificial Sequence: Synthetic oligonucleotide
cacugaacuguucaaguca

SEQ ID NO: 200420 - RNA, 19 nt, Artificial Sequence
  Description of Artificial Sequence: Synthetic oligonucleotide
gauguaccuuaauuacuuc

SEQ ID NO: 200421 - RNA, 19 nt, Artificial Sequence
  Description of Artificial Sequence: Synthetic oligonucleotide
aauagcugguguauguguu

SEQ ID NO: 200422 - RNA, 19 nt, Artificial Sequence
  Description of Artificial Sequence: Synthetic oligonucleotide
acgagucucaauaguuuac

SEQ ID NO: 200423 - RNA, 19 nt, Artificial Sequence
  Description of Artificial Sequence: Synthetic oligonucleotide
uguaugugugugugugugu

SEQ ID NO: 200424 - RNA, 19 nt, Artificial Sequence
  Description of Artificial Sequence: Synthetic oligonucleotide
ggugaacgagucucaauag

SEQ ID NO: 200425 - RNA, 19 nt, Artificial Sequence
  Description of Artificial Sequence: Synthetic oligonucleotide
uguguaugugugugugugu

SEQ ID NO: 200426 - RNA, 19 nt, Artificial Sequence
  Description of Artificial Sequence: Synthetic oligonucleotide
uuuguguggcucagucaug

SEQ ID NO: 200427 - RNA, 19 nt, Artificial Sequence
  Description of Artificial Sequence: Synthetic oligonucleotide
uggcucauccguuggaaaa

SEQ ID NO: 200428 - RNA, 19 nt, Artificial Sequence
  Description of Artificial Sequence: Synthetic oligonucleotide
uguuaacguggccuggaua

SEQ ID NO: 200429 - RNA, 19 nt, Artificial Sequence
  Description of Artificial Sequence: Synthetic oligonucleotide
aguaugacgaugaccuugu

SEQ ID NO: 200430 - RNA, 19 nt, Artificial Sequence
  Description of Artificial Sequence: Synthetic oligonucleotide
ugugugugugugugugugc

SEQ ID NO: 200431 - RNA, 19 nt, Artificial Sequence
  Description of Artificial Sequence: Synthetic oligonucleotide
gaugaccuuguuuuguagu

SEQ ID NO: 200432 - RNA, 19 nt, Artificial Sequence
  Description of Artificial Sequence: Synthetic oligonucleotide
guuuguguggcucagucau

SEQ ID NO: 200433 - RNA, 19 nt, Artificial Sequence
  Description of Artificial Sequence: Synthetic oligonucleotide
uauuuucgaggaucaacuu

SEQ ID NO: 200434 - RNA, 19 nt, Artificial Sequence
  Description of Artificial Sequence: Synthetic oligonucleotide
cucgacuaauucccggaag

SEQ ID NO: 200435 - RNA, 19 nt, Artificial Sequence
  Description of Artificial Sequence: Synthetic oligonucleotide
ucucgacuaauucccggaa

SEQ ID NO: 200436 - RNA, 19 nt, Artificial Sequence
  Description of Artificial Sequence: Synthetic oligonucleotide
aaauggugaacgagucuca

SEQ ID NO: 200437 - RNA, 19 nt, Artificial Sequence
  Description of Artificial Sequence: Synthetic oligonucleotide
augauguaccuuaauuacu

SEQ ID NO: 200438 - RNA, 19 nt, Artificial Sequence
  Description of Artificial Sequence: Synthetic oligonucleotide
guguaugugugugugugug

SEQ ID NO: 200439 - RNA, 19 nt, Artificial Sequence
  Description of Artificial Sequence: Synthetic oligonucleotide
aggaaacauuccuccccac

SEQ ID NO: 200440 - RNA, 19 nt, Artificial Sequence
  Description of Artificial Sequence: Synthetic oligonucleotide
accuaaguuuauucaugcu

SEQ ID NO: 200441 - RNA, 19 nt, Artificial Sequence
  Description of Artificial Sequence: Synthetic oligonucleotide
uucacccuagcgcaucauc

SEQ ID NO: 200442 - RNA, 19 nt, Artificial Sequence
  Description of Artificial Sequence: Synthetic oligonucleotide
uggggcugaacguaagaau

SEQ ID NO: 200443 - RNA, 19 nt, Artificial Sequence
  Description of Artificial Sequence: Synthetic oligonucleotide
uugccguucagaagcccug

SEQ ID NO: 200444 - RNA, 19 nt, Artificial Sequence
  Description of Artificial Sequence: Synthetic oligonucleotide
aucaagcaccuccaaaaua

SEQ ID NO: 200445 - RNA, 19 nt, Artificial Sequence
  Description of Artificial Sequence: Synthetic oligonucleotide
ucucauggugauccggaua

SEQ ID NO: 200446 - RNA, 19 nt, Artificial Sequence
  Description of Artificial Sequence: Synthetic oligonucleotide
cuuaacguacauggacagc

SEQ ID NO: 200447 - RNA, 19 nt, Artificial Sequence
  Description of Artificial Sequence: Synthetic oligonucleotide
uaugugugugugugugugu

SEQ ID NO: 200448 - RNA, 19 nt, Artificial Sequence
  Description of Artificial Sequence: Synthetic oligonucleotide
guaguuacagguguggcua

SEQ ID NO: 200449 - RNA, 19 nt, Artificial Sequence
  Description of Artificial Sequence: Synthetic oligonucleotide
agugcuaucugcgcuuuga

SEQ ID NO: 200450 - RNA, 19 nt, Artificial Sequence
  Description of Artificial Sequence: Synthetic oligonucleotide
augugugugugugugugug

SEQ ID NO: 200451 - RNA, 19 nt, Artificial Sequence
  Description of Artificial Sequence: Synthetic oligonucleotide
auaccaggacauuuauaaa

SEQ ID NO: 200452 - RNA, 19 nt, Artificial Sequence
  Description of Artificial Sequence: Synthetic oligonucleotide
cucauccguuggaaaagag

SEQ ID NO: 200453 - RNA, 19 nt, Artificial Sequence
  Description of Artificial Sequence: Synthetic oligonucleotide
ccaguuauaaaugugacua

SEQ ID NO: 200454 - RNA, 19 nt, Artificial Sequence
  Description of Artificial Sequence: Synthetic oligonucleotide
gccuauggacucuagcugc

SEQ ID NO: 200455 - RNA, 19 nt, Artificial Sequence
  Description of Artificial Sequence: Synthetic oligonucleotide
gucguuucuaauguaaacu

SEQ ID NO: 200456 - RNA, 19 nt, Artificial Sequence
  Description of Artificial Sequence: Synthetic oligonucleotide
auaagaugugauguauuua

SEQ ID NO: 200457 - RNA, 19 nt, Artificial Sequence
  Description of Artificial Sequence: Synthetic oligonucleotide
acgaucuuccucaugcaca

SEQ ID NO: 200458 - RNA, 19 nt, Artificial Sequence
  Description of Artificial Sequence: Synthetic oligonucleotide
acgucaguaggcucaugcu

SEQ ID NO: 200459 - RNA, 19 nt, Artificial Sequence
  Description of Artificial Sequence: Synthetic oligonucleotide
caguuggaaagaucuauaa

SEQ ID NO: 200460 - RNA, 19 nt, Artificial Sequence
  Description of Artificial Sequence: Synthetic oligonucleotide
gacuauguguuucauccau

SEQ ID NO: 200461 - RNA, 19 nt, Artificial Sequence
  Description of Artificial Sequence: Synthetic oligonucleotide
cuagggauggggaauagau

SEQ ID NO: 200462 - RNA, 19 nt, Artificial Sequence
  Description of Artificial Sequence: Synthetic oligonucleotide
ugugugugugugugugugu

SEQ ID NO: 200463 - RNA, 19 nt, Artificial Sequence
  Description of Artificial Sequence: Synthetic oligonucleotide
ccggauacugccagcaagg

SEQ ID NO: 200464 - RNA, 19 nt, Artificial Sequence
  Description of Artificial Sequence: Synthetic oligonucleotide
ucgccacauacuuuuguua

SEQ ID NO: 200465 - RNA, 19 nt, Artificial Sequence
  Description of Artificial Sequence: Synthetic oligonucleotide
ugugugugugugugcaaau

SEQ ID NO: 200466 - RNA, 19 nt, Artificial Sequence
  Description of Artificial Sequence: Synthetic oligonucleotide
ugguaucaugugucuuaag

SEQ ID NO: 200467 - RNA, 19 nt, Artificial Sequence
  Description of Artificial Sequence: Synthetic oligonucleotide
gacuucuaggagcauuuua

SEQ ID NO: 200468 - RNA, 19 nt, Artificial Sequence
  Description of Artificial Sequence: Synthetic oligonucleotide
uccaaguauuuucgaggau

SEQ ID NO: 200469 - RNA, 19 nt, Artificial Sequence
  Description of Artificial Sequence: Synthetic oligonucleotide
ggcucggcagaguagcuag

SEQ ID NO: 200470 - RNA, 19 nt, Artificial Sequence
  Description of Artificial Sequence: Synthetic oligonucleotide
cagugaguacuuuacuuaa

SEQ ID NO: 200471 - RNA, 19 nt, Artificial Sequence
  Description of Artificial Sequence: Synthetic oligonucleotide
auagaucaagcaccuccaa

SEQ ID NO: 200472 - RNA, 19 nt, Artificial Sequence
  Description of Artificial Sequence: Synthetic oligonucleotide
acugaacuguucaagucau

SEQ ID NO: 200473 - RNA, 19 nt, Artificial Sequence
  Description of Artificial Sequence: Synthetic oligonucleotide
gaaaagaguagaugcucau

SEQ ID NO: 200474 - RNA, 19 nt, Artificial Sequence
  Description of Artificial Sequence: Synthetic oligonucleotide
cuacgauaaacgcuggcua

SEQ ID NO: 200475 - RNA, 19 nt, Artificial Sequence
  Description of Artificial Sequence: Synthetic oligonucleotide
guaccaaauucggcauucg

SEQ ID NO: 200476 - RNA, 19 nt, Artificial Sequence
  Description of Artificial Sequence: Synthetic oligonucleotide
auccguuggaaaagaguag

SEQ ID NO: 200477 - RNA, 19 nt, Artificial Sequence
  Description of Artificial Sequence: Synthetic oligonucleotide
gugugugugugugugugug

SEQ ID NO: 200478 - RNA, 19 nt, Artificial Sequence
  Description of Artificial Sequence: Synthetic oligonucleotide
uuguuaugaauaggccagu

SEQ ID NO: 200479 - RNA, 19 nt, Artificial Sequence
  Description of Artificial Sequence: Synthetic oligonucleotide
acuaacgcacauguagaaa

SEQ ID NO: 200480 - RNA, 19 nt, Artificial Sequence
  Description of Artificial Sequence: Synthetic oligonucleotide
caagccgacaucaagucau

SEQ ID NO: 200481 - RNA, 19 nt, Artificial Sequence
  Description of Artificial Sequence: Synthetic oligonucleotide
aaacuacaauaaugaugua

SEQ ID NO: 200482 - RNA, 19 nt, Artificial Sequence
  Description of Artificial Sequence: Synthetic oligonucleotide
gaauucacccuagcgcauc

SEQ ID NO: 200483 - RNA, 19 nt, Artificial Sequence
  Description of Artificial Sequence: Synthetic oligonucleotide
ggcaguugcaaauaaacuu

SEQ ID NO: 200484 - RNA, 19 nt, Artificial Sequence
  Description of Artificial Sequence: Synthetic oligonucleotide
uagugucaaaggcgggauc

SEQ ID NO: 200485 - RNA, 19 nt, Artificial Sequence
  Description of Artificial Sequence: Synthetic oligonucleotide
ggacacugaacuguucaag

SEQ ID NO: 200486 - RNA, 19 nt, Artificial Sequence
  Description of Artificial Sequence: Synthetic oligonucleotide
uaucugcgcuuugacuaag

SEQ ID NO: 200487 - RNA, 19 nt, Artificial Sequence
  Description of Artificial Sequence: Synthetic oligonucleotide
acgauaaacgcuggcuaga

SEQ ID NO: 200488 - RNA, 19 nt, Artificial Sequence
  Description of Artificial Sequence: Synthetic oligonucleotide
gcggaagguguuaacgugg

SEQ ID NO: 200489 - RNA, 19 nt, Artificial Sequence
  Description of Artificial Sequence: Synthetic oligonucleotide
gugugugugugugcaaaug

SEQ ID NO: 200490 - RNA, 19 nt, Artificial Sequence
  Description of Artificial Sequence: Synthetic oligonucleotide
ggggcugaacguaagaauc

SEQ ID NO: 200491 - RNA, 19 nt, Artificial Sequence
  Description of Artificial Sequence: Synthetic oligonucleotide
acaaaccauagugccaaau

SEQ ID NO: 200492 - RNA, 19 nt, Artificial Sequence
  Description of Artificial Sequence: Synthetic oligonucleotide
uaaguaugacgaugaccuu

SEQ ID NO: 200493 - RNA, 19 nt, Artificial Sequence
  Description of Artificial Sequence: Synthetic oligonucleotide
aagcugaaccucaucgaua

SEQ ID NO: 200494 - RNA, 19 nt, Artificial Sequence
  Description of Artificial Sequence: Synthetic oligonucleotide
gauaaacgcuggcuagaua

SEQ ID NO: 200495 - RNA, 19 nt, Artificial Sequence
  Description of Artificial Sequence: Synthetic oligonucleotide
ugugugugugugugugcaa

SEQ ID NO: 200496 - RNA, 19 nt, Artificial Sequence
  Description of Artificial Sequence: Synthetic oligonucleotide
ugguuugaaauuggcucau

SEQ ID NO: 200497 - RNA, 19 nt, Artificial Sequence
  Description of Artificial Sequence: Synthetic oligonucleotide
cacccuagcgcaucaucuc

SEQ ID NO: 200498 - RNA, 19 nt, Artificial Sequence
  Description of Artificial Sequence: Synthetic oligonucleotide
agguguuaacguggccugg

SEQ ID NO: 200499 - RNA, 19 nt, Artificial Sequence
  Description of Artificial Sequence: Synthetic oligonucleotide
guuaucuaaguaugacgau

SEQ ID NO: 200500 - RNA, 19 nt, Artificial Sequence
  Description of Artificial Sequence: Synthetic oligonucleotide
gugugugugugugugugca

SEQ ID NO: 200501 - RNA, 19 nt, Artificial Sequence
  Description of Artificial Sequence: Synthetic oligonucleotide
cucggcagaguagcuagug

SEQ ID NO: 200502 - RNA, 19 nt, Artificial Sequence
  Description of Artificial Sequence: Synthetic oligonucleotide
cuaucugcgcuuugacuaa

SEQ ID NO: 200503 - RNA, 19 nt, Artificial Sequence
  Description of Artificial Sequence: Synthetic oligonucleotide
cugaacguaagaaucuguu

SEQ ID NO: 200504 - RNA, 19 nt, Artificial Sequence
  Description of Artificial Sequence: Synthetic oligonucleotide
agacuugaguggggacccc

SEQ ID NO: 200505 - RNA, 19 nt, Artificial Sequence
  Description of Artificial Sequence: Synthetic oligonucleotide
gcuagauagaagugcauau

SEQ ID NO: 200506 - RNA, 19 nt, Artificial Sequence
  Description of Artificial Sequence: Synthetic oligonucleotide
ggaggcuuaucauguacaa

SEQ ID NO: 200507 - RNA, 19 nt, Artificial Sequence
  Description of Artificial Sequence: Synthetic oligonucleotide
gacgaugaccuuguuuugu

SEQ ID NO: 200508 - RNA, 19 nt, Artificial Sequence
  Description of Artificial Sequence: Synthetic oligonucleotide
ggucuagagaaugucuaga

SEQ ID NO: 200509 - RNA, 19 nt, Artificial Sequence
  Description of Artificial Sequence: Synthetic oligonucleotide
ccaaguuaucuaaguauga

SEQ ID NO: 200510 - RNA, 19 nt, Artificial Sequence
  Description of Artificial Sequence: Synthetic oligonucleotide
ggaacuaagcugaauaguu

SEQ ID NO: 200511 - RNA, 19 nt, Artificial Sequence
  Description of Artificial Sequence: Synthetic oligonucleotide
cauugccguucagaagccc

SEQ ID NO: 200512 - RNA, 19 nt, Artificial Sequence
  Description of Artificial Sequence: Synthetic oligonucleotide
ggcugaacguaagaaucug

SEQ ID NO: 200513 - RNA, 19 nt, Artificial Sequence
  Description of Artificial Sequence: Synthetic oligonucleotide
gaacuguggggugccuaug

SEQ ID NO: 200514 - RNA, 19 nt, Artificial Sequence
  Description of Artificial Sequence: Synthetic oligonucleotide
uaauaaguuugggcucaua

SEQ ID NO: 200515 - RNA, 19 nt, Artificial Sequence
  Description of Artificial Sequence: Synthetic oligonucleotide
aguguuuaguucagauguu

SEQ ID NO: 200516 - RNA, 19 nt, Artificial Sequence
  Description of Artificial Sequence: Synthetic oligonucleotide
acuauguguuucauccaua

SEQ ID NO: 200517 - RNA, 19 nt, Artificial Sequence
  Description of Artificial Sequence: Synthetic oligonucleotide
ccaagaggacugauacaag

SEQ ID NO: 200518 - RNA, 19 nt, Artificial Sequence
  Description of Artificial Sequence: Synthetic oligonucleotide
cucaauaguuuacuacgau

SEQ ID NO: 200519 - RNA, 19 nt, Artificial Sequence
  Description of Artificial Sequence: Synthetic oligonucleotide
guaccuuaauuacuuccau

SEQ ID NO: 200520 - RNA, 19 nt, Artificial Sequence
  Description of Artificial Sequence: Synthetic oligonucleotide
gugugugugugugugcaaa

SEQ ID NO: 200521 - RNA, 19 nt, Artificial Sequence
  Description of Artificial Sequence: Synthetic oligonucleotide
agaauucacccuagcgcau

SEQ ID NO: 200522 - RNA, 19 nt, Artificial Sequence
  Description of Artificial Sequence: Synthetic oligonucleotide
ccuaaguuuauucaugcuu

SEQ ID NO: 200523 - RNA, 19 nt, Artificial Sequence
  Description of Artificial Sequence: Synthetic oligonucleotide
ggcuagauagaagugcaua

SEQ ID NO: 200524 - RNA, 19 nt, Artificial Sequence
  Description of Artificial Sequence: Synthetic oligonucleotide
acaacgucaguaggcucau

SEQ ID NO: 200525 - RNA, 19 nt, Artificial Sequence
  Description of Artificial Sequence: Synthetic oligonucleotide
auccggauacugccagcaa

SEQ ID NO: 200526 - RNA, 19 nt, Artificial Sequence
  Description of Artificial Sequence: Synthetic oligonucleotide
gcugaauaguuccugcaau

SEQ ID NO: 200527 - RNA, 19 nt, Artificial Sequence
  Description of Artificial Sequence: Synthetic oligonucleotide
gguguuaacguggccugga

SEQ ID NO: 200528 - RNA, 19 nt, Artificial Sequence
  Description of Artificial Sequence: Synthetic oligonucleotide
cgaugaccuuguuuuguag

SEQ ID NO: 200529 - RNA, 19 nt, Artificial Sequence
  Description of Artificial Sequence: Synthetic oligonucleotide
ggugauccggauacugcca

SEQ ID NO: 200530 - RNA, 19 nt, Artificial Sequence
  Description of Artificial Sequence: Synthetic oligonucleotide
caaauucggcauucguuuu

SEQ ID NO: 200531 - RNA, 19 nt, Artificial Sequence
  Description of Artificial Sequence: Synthetic oligonucleotide
gcaggcaacaaaccauagu

SEQ ID NO: 200532 - RNA, 19 nt, Artificial Sequence
  Description of Artificial Sequence: Synthetic oligonucleotide
agacuucuaggagcauuuu

SEQ ID NO: 200533 - RNA, 19 nt, Artificial Sequence
  Description of Artificial Sequence: Synthetic oligonucleotide
ccaguuggaaagaucuaua

SEQ ID NO: 200534 - RNA, 19 nt, Artificial Sequence
  Description of Artificial Sequence: Synthetic oligonucleotide
ccauggggcugaacguaag

SEQ ID NO: 200535 - RNA, 19 nt, Artificial Sequence
  Description of Artificial Sequence: Synthetic oligonucleotide
gcacuaugggugguuuaug

SEQ ID NO: 200536 - RNA, 19 nt, Artificial Sequence
  Description of Artificial Sequence: Synthetic oligonucleotide
cuagugucaaaggcgggau

SEQ ID NO: 200537 - RNA, 19 nt, Artificial Sequence
  Description of Artificial Sequence: Synthetic oligonucleotide
ccuagcgcaucaucuccuc

SEQ ID NO: 200538 - RNA, 19 nt, Artificial Sequence
  Description of Artificial Sequence: Synthetic oligonucleotide
cucuugggucaagcugaac

SEQ ID NO: 200539 - RNA, 19 nt, Artificial Sequence
  Description of Artificial Sequence: Synthetic oligonucleotide
gcucauccguuggaaaaga

SEQ ID NO: 200540 - RNA, 19 nt, Artificial Sequence
  Description of Artificial Sequence: Synthetic oligonucleotide
guguuaacguggccuggau

SEQ ID NO: 200541 - RNA, 19 nt, Artificial Sequence
  Description of Artificial Sequence: Synthetic oligonucleotide
cucagucaugucguuucua

SEQ ID NO: 200542 - RNA, 19 nt, Artificial Sequence
  Description of Artificial Sequence: Synthetic oligonucleotide
gcuaccugacgaucuuccu

SEQ ID NO: 200543 - RNA, 19 nt, Artificial Sequence
  Description of Artificial Sequence: Synthetic oligonucleotide
caacgucaguaggcucaug

SEQ ID NO: 200544 - RNA, 19 nt, Artificial Sequence
  Description of Artificial Sequence: Synthetic oligonucleotide
caccgcucacaaacuggcu

SEQ ID NO: 200545 - RNA, 19 nt, Artificial Sequence
  Description of Artificial Sequence: Synthetic oligonucleotide
gggugccuauggacucuag

SEQ ID NO: 200546 - RNA, 19 nt, Artificial Sequence
  Description of Artificial Sequence: Synthetic oligonucleotide
caauucuagcugggacacu

SEQ ID NO: 200547 - RNA, 19 nt, Artificial Sequence
  Description of Artificial Sequence: Synthetic oligonucleotide
cgagucucaauaguuuacu

SEQ ID NO: 200548 - RNA, 19 nt, Artificial Sequence
  Description of Artificial Sequence: Synthetic oligonucleotide
guacgucuugugagggauu

SEQ ID NO: 200549 - RNA, 19 nt, Artificial Sequence
  Description of Artificial Sequence: Synthetic oligonucleotide
cccuagcgcaucaucuccu

SEQ ID NO: 200550 - RNA, 19 nt, Artificial Sequence
  Description of Artificial Sequence: Synthetic oligonucleotide
gcucggcagaguagcuagu

SEQ ID NO: 200551 - RNA, 19 nt, Artificial Sequence
  Description of Artificial Sequence: Synthetic oligonucleotide
aaguccauaacuuauagca

SEQ ID NO: 200552 - RNA, 19 nt, Artificial Sequence
  Description of Artificial Sequence: Synthetic oligonucleotide
uguaaucuaaacuuguagg

SEQ ID NO: 200553 - RNA, 19 nt, Artificial Sequence
  Description of Artificial Sequence: Synthetic oligonucleotide
ugauaagcaaauaaggugc

SEQ ID NO: 200554 - RNA, 19 nt, Artificial Sequence
  Description of Artificial Sequence: Synthetic oligonucleotide
auacauaugucucacacgg

SEQ ID NO: 200555 - RNA, 19 nt, Artificial Sequence
  Description of Artificial Sequence: Synthetic oligonucleotide
uguccaaucauacaaauaa

SEQ ID NO: 200556 - RNA, 19 nt, Artificial Sequence
  Description of Artificial Sequence: Synthetic oligonucleotide
uagaccauuacaaauauaa

SEQ ID NO: 200557 - RNA, 19 nt, Artificial Sequence
  Description of Artificial Sequence: Synthetic oligonucleotide
uaugauaagcaaauaaggu

SEQ ID NO: 200558 - RNA, 19 nt, Artificial Sequence
  Description of Artificial Sequence: Synthetic oligonucleotide
aaucuaaacuuguagggug

SEQ ID NO: 200559 - RNA, 19 nt, Artificial Sequence
  Description of Artificial Sequence: Synthetic oligonucleotide
ugugaauuggcuaauugca

SEQ ID NO: 200560 - RNA, 19 nt, Artificial Sequence
  Description of Artificial Sequence: Synthetic oligonucleotide
uuucugauagccuacauuc

SEQ ID NO: 200561 - RNA, 19 nt, Artificial Sequence
  Description of Artificial Sequence: Synthetic oligonucleotide
guuaccuagacuuugcaag

SEQ ID NO: 200562 - RNA, 19 nt, Artificial Sequence
  Description of Artificial Sequence: Synthetic oligonucleotide
aauucuagagaaaauguug

SEQ ID NO: 200563 - RNA, 19 nt, Artificial Sequence
  Description of Artificial Sequence: Synthetic oligonucleotide
ucuauaauguguaaucuaa

SEQ ID NO: 200564 - RNA, 19 nt, Artificial Sequence
  Description of Artificial Sequence: Synthetic oligonucleotide
aagcaguuggaauaauuuc

SEQ ID NO: 200565 - RNA, 19 nt, Artificial Sequence
  Description of Artificial Sequence: Synthetic oligonucleotide
cuaagcgucagcauuacag

SEQ ID NO: 200566 - RNA, 19 nt, Artificial Sequence
  Description of Artificial Sequence: Synthetic oligonucleotide
uuacguagaacacaaaaua

SEQ ID NO: 200567 - RNA, 19 nt, Artificial Sequence
  Description of Artificial Sequence: Synthetic oligonucleotide
uauacauaugucucacacg

SEQ ID NO: 200568 - RNA, 19 nt, Artificial Sequence
  Description of Artificial Sequence: Synthetic oligonucleotide
uuaaaguauguccucguca

SEQ ID NO: 200569 - RNA, 19 nt, Artificial Sequence
  Description of Artificial Sequence: Synthetic oligonucleotide
acaacuuagccauaugaag

SEQ ID NO: 200570 - RNA, 19 nt, Artificial Sequence
  Description of Artificial Sequence: Synthetic oligonucleotide
acagauacggucucucacc

SEQ ID NO: 200571 - RNA, 19 nt, Artificial Sequence
  Description of Artificial Sequence: Synthetic oligonucleotide
acuauaaccacagagauuu

SEQ ID NO: 200572 - RNA, 19 nt, Artificial Sequence
  Description of Artificial Sequence: Synthetic oligonucleotide
cuaccuguguacuauaacc

SEQ ID NO: 200573 - RNA, 19 nt, Artificial Sequence
  Description of Artificial Sequence: Synthetic oligonucleotide
uaacuuauagcaucuuucc

SEQ ID NO: 200574 - RNA, 19 nt, Artificial Sequence
  Description of Artificial Sequence: Synthetic oligonucleotide
acuacaaacaacccugcag

SEQ ID NO: 200575 - RNA, 19 nt, Artificial Sequence
  Description of Artificial Sequence: Synthetic oligonucleotide
uuuacguagaacacaaaau

SEQ ID NO: 200576 - RNA, 19 nt, Artificial Sequence
  Description of Artificial Sequence: Synthetic oligonucleotide
cuaccccuuaccaagaucc

SEQ ID NO: 200577 - RNA, 19 nt, Artificial Sequence
  Description of Artificial Sequence: Synthetic oligonucleotide
uggcauguuauucugaagu

SEQ ID NO: 200578 - RNA, 19 nt, Artificial Sequence
  Description of Artificial Sequence: Synthetic oligonucleotide
auuaaacuugucucacccc

SEQ ID NO: 200579 - RNA, 19 nt, Artificial Sequence
  Description of Artificial Sequence: Synthetic oligonucleotide
uuaccauacuuauaagugc

SEQ ID NO: 200580 - RNA, 19 nt, Artificial Sequence
  Description of Artificial Sequence: Synthetic oligonucleotide
caaggaucuacuuuguaag

SEQ ID NO: 200581 - RNA, 19 nt, Artificial Sequence
  Description of Artificial Sequence: Synthetic oligonucleotide
ucuuaccauacuuauaagu

SEQ ID NO: 200582 - RNA, 19 nt, Artificial Sequence
  Description of Artificial Sequence: Synthetic oligonucleotide
auaacuuauagcaucuuuc

SEQ ID NO: 200583 - RNA, 19 nt, Artificial Sequence
  Description of Artificial Sequence: Synthetic oligonucleotide
aaauucuacauaccagacu

SEQ ID NO: 200584 - RNA, 19 nt, Artificial Sequence
  Description of Artificial Sequence: Synthetic oligonucleotide
aaguacacuacguguguuc

SEQ ID NO: 200585 - RNA, 19 nt, Artificial Sequence
  Description of Artificial Sequence: Synthetic oligonucleotide
aagcaaauaaggugcuuag

SEQ ID NO: 200586 - RNA, 19 nt, Artificial Sequence
  Description of Artificial Sequence: Synthetic oligonucleotide
guguacuauaaccacagag

SEQ ID NO: 200587 - RNA, 19 nt, Artificial Sequence
  Description of Artificial Sequence: Synthetic oligonucleotide
auuuacguagaacacaaaa

SEQ ID NO: 200588 - RNA, 19 nt, Artificial Sequence
  Description of Artificial Sequence: Synthetic oligonucleotide
agucuaaaucaccauguuc

SEQ ID NO: 200589 - RNA, 19 nt, Artificial Sequence
  Description of Artificial Sequence: Synthetic oligonucleotide
aguuaaauuuacguagaac

SEQ ID NO: 200590 - RNA, 19 nt, Artificial Sequence
  Description of Artificial Sequence: Synthetic oligonucleotide
uuugcaugggugaaucugc

SEQ ID NO: 200591 - RNA, 19 nt, Artificial Sequence
  Description of Artificial Sequence: Synthetic oligonucleotide
ugauaguuaaauuuacgua

SEQ ID NO: 200592 - RNA, 19 nt, Artificial Sequence
  Description of Artificial Sequence: Synthetic oligonucleotide
auaauuucuuaaacugucc

SEQ ID NO: 200593 - RNA, 19 nt, Artificial Sequence
  Description of Artificial Sequence: Synthetic oligonucleotide
ugaguagcuaauauuuacu

SEQ ID NO: 200594 - RNA, 19 nt, Artificial Sequence
  Description of Artificial Sequence: Synthetic oligonucleotide
gacgagugcuuucuaagcg

SEQ ID NO: 200595 - RNA, 19 nt, Artificial Sequence
  Description of Artificial Sequence: Synthetic oligonucleotide
uuaacucugccaaacuaca

SEQ ID NO: 200596 - RNA, 19 nt, Artificial Sequence
  Description of Artificial Sequence: Synthetic oligonucleotide
aacucucaacuacuacccc

SEQ ID NO: 200597 - RNA, 19 nt, Artificial Sequence
  Description of Artificial Sequence: Synthetic oligonucleotide
cucggaaauacccuguugc

SEQ ID NO: 200598 - RNA, 19 nt, Artificial Sequence
  Description of Artificial Sequence: Synthetic oligonucleotide
auucauaugcuaugggucu

SEQ ID NO: 200599 - RNA, 19 nt, Artificial Sequence
  Description of Artificial Sequence: Synthetic oligonucleotide
guguaaucuaaacuuguag

SEQ ID NO: 200600 - RNA, 19 nt, Artificial Sequence
  Description of Artificial Sequence: Synthetic oligonucleotide
ucagauuggagguacucca

SEQ ID NO: 200601 - RNA, 19 nt, Artificial Sequence
  Description of Artificial Sequence: Synthetic oligonucleotide
ugcauauuugaguagcuaa

SEQ ID NO: 200602 - RNA, 19 nt, Artificial Sequence
  Description of Artificial Sequence: Synthetic oligonucleotide
auuaaggagucuaaaucac

SEQ ID NO: 200603 - RNA, 19 nt, Artificial Sequence
  Description of Artificial Sequence: Synthetic oligonucleotide
caauuaacuaccuguguac

SEQ ID NO: 200604 - RNA, 19 nt, Artificial Sequence
  Description of Artificial Sequence: Synthetic oligonucleotide
acuuauaagugcuccaagu

SEQ ID NO: 200605 - RNA, 19 nt, Artificial Sequence
  Description of Artificial Sequence: Synthetic oligonucleotide
uacaacuuagccauaugaa

SEQ ID NO: 200606 - RNA, 19 nt, Artificial Sequence
  Description of Artificial Sequence: Synthetic oligonucleotide
acuuugcaagauuaaucac

SEQ ID NO: 200607 - RNA, 19 nt, Artificial Sequence
  Description of Artificial Sequence: Synthetic oligonucleotide
uuacagcggauccugcugg

SEQ ID NO: 200608 - RNA, 19 nt, Artificial Sequence
  Description of Artificial Sequence: Synthetic oligonucleotide
uagcuuaugcccaaggauc

SEQ ID NO: 200609 - RNA, 19 nt, Artificial Sequence
  Description of Artificial Sequence: Synthetic oligonucleotide
aguacacuacguguguucc

SEQ ID NO: 200610 - RNA, 19 nt, Artificial Sequence
  Description of Artificial Sequence: Synthetic oligonucleotide
caugccuaaguacacuacg

SEQ ID NO: 200611 - RNA, 19 nt, Artificial Sequence
  Description of Artificial Sequence: Synthetic oligonucleotide
uaccuguguacuauaacca

SEQ ID NO: 200612 - RNA, 19 nt, Artificial Sequence
  Description of Artificial Sequence: Synthetic oligonucleotide
ugcccaaggaucuacuuug

SEQ ID NO: 200613 - RNA, 19 nt, Artificial Sequence
  Description of Artificial Sequence: Synthetic oligonucleotide
cauaaggugaguugaucag

SEQ ID NO: 200614 - RNA, 19 nt, Artificial Sequence
  Description of Artificial Sequence: Synthetic oligonucleotide
acuaccuguguacuauaac

SEQ ID NO: 200615 - RNA, 19 nt, Artificial Sequence
  Description of Artificial Sequence: Synthetic oligonucleotide
ugaguguugcacuucaauc

SEQ ID NO: 200616 - RNA, 19 nt, Artificial Sequence
  Description of Artificial Sequence: Synthetic oligonucleotide
acaauuaacuaccugugua

SEQ ID NO: 200617 - RNA, 19 nt, Artificial Sequence
  Description of Artificial Sequence: Synthetic oligonucleotide
agacuuugcaagauuaauc

SEQ ID NO: 200618 - RNA, 19 nt, Artificial Sequence
  Description of Artificial Sequence: Synthetic oligonucleotide
aauuaacuaccuguguacu

SEQ ID NO: 200619 - RNA, 19 nt, Artificial Sequence
  Description of Artificial Sequence: Synthetic oligonucleotide
uuuaaaguauguccucguc

SEQ ID NO: 200620 - RNA, 19 nt, Artificial Sequence
  Description of Artificial Sequence: Synthetic oligonucleotide
ugccaauguauuuugucca

SEQ ID NO: 200621 - RNA, 19 nt, Artificial Sequence
  Description of Artificial Sequence: Synthetic oligonucleotide
uggcaauaugcacugaaaa

SEQ ID NO: 200622 - RNA, 19 nt, Artificial Sequence
  Description of Artificial Sequence: Synthetic oligonucleotide
ugggaauguaacuguaaug

SEQ ID NO: 200623 - RNA, 19 nt, Artificial Sequence
  Description of Artificial Sequence: Synthetic oligonucleotide
auagcuaaacaagcaguac

SEQ ID NO: 200624 - RNA, 19 nt, Artificial Sequence
  Description of Artificial Sequence: Synthetic oligonucleotide
uuaccuagacuuugcaaga

SEQ ID NO: 200625 - RNA, 19 nt, Artificial Sequence
  Description of Artificial Sequence: Synthetic oligonucleotide
aaggaucuacuuuguaagu

SEQ ID NO: 200626 - RNA, 19 nt, Artificial Sequence
  Description of Artificial Sequence: Synthetic oligonucleotide
gauguuacagcggauccug

SEQ ID NO: 200627 - RNA, 19 nt, Artificial Sequence
  Description of Artificial Sequence: Synthetic oligonucleotide
acuuuguaaguaugcuggg

SEQ ID NO: 200628 - RNA, 19 nt, Artificial Sequence
  Description of Artificial Sequence: Synthetic oligonucleotide
aucuaaacuuguagggugc

SEQ ID NO: 200629 - RNA, 19 nt, Artificial Sequence
  Description of Artificial Sequence: Synthetic oligonucleotide
aauagcuaaacaagcagua

SEQ ID NO: 200630 - RNA, 19 nt, Artificial Sequence
  Description of Artificial Sequence: Synthetic oligonucleotide
uaucucagaagccugcaua

SEQ ID NO: 200631 - RNA, 19 nt, Artificial Sequence
  Description of Artificial Sequence: Synthetic oligonucleotide
uaacacaccucaaauuuua

SEQ ID NO: 200632 - RNA, 19 nt, Artificial Sequence
  Description of Artificial Sequence: Synthetic oligonucleotide
uugggaauguaacuguaau

SEQ ID NO: 200633 - RNA, 19 nt, Artificial Sequence
  Description of Artificial Sequence: Synthetic oligonucleotide
guguuuacaguacugucac

SEQ ID NO: 200634 - RNA, 19 nt, Artificial Sequence
  Description of Artificial Sequence: Synthetic oligonucleotide
uaagcgucagcauuacagu

SEQ ID NO: 200635 - RNA, 19 nt, Artificial Sequence
  Description of Artificial Sequence: Synthetic oligonucleotide
ugggcaguacuuuuguaca

SEQ ID NO: 200636 - RNA, 19 nt, Artificial Sequence
  Description of Artificial Sequence: Synthetic oligonucleotide
ugccuaaguacacuacgug

SEQ ID NO: 200637 - RNA, 19 nt, Artificial Sequence
  Description of Artificial Sequence: Synthetic oligonucleotide
aguguugcacuucaaucca

SEQ ID NO: 200638 - RNA, 19 nt, Artificial Sequence
  Description of Artificial Sequence: Synthetic oligonucleotide
ugacgagugcuuucuaagc

SEQ ID NO: 200639 - RNA, 19 nt, Artificial Sequence
  Description of Artificial Sequence: Synthetic oligonucleotide
guuaacucugccaaacuac

SEQ ID NO: 200640 - RNA, 19 nt, Artificial Sequence
  Description of Artificial Sequence: Synthetic oligonucleotide
uguguaaucuaaacuugua

SEQ ID NO: 200641 - RNA, 19 nt, Artificial Sequence
  Description of Artificial Sequence: Synthetic oligonucleotide
guguuuaacugauaguuaa

SEQ ID NO: 200642 - RNA, 19 nt, Artificial Sequence
  Description of Artificial Sequence: Synthetic oligonucleotide
uucacacuagcgcuucuca

SEQ ID NO: 200643 - RNA, 19 nt, Artificial Sequence
  Description of Artificial Sequence: Synthetic oligonucleotide
aacuacuaccccuuaccaa

SEQ ID NO: 200644 - RNA, 19 nt, Artificial Sequence
  Description of Artificial Sequence: Synthetic oligonucleotide
ucauaacacaccucaaauu

SEQ ID NO: 200645 - RNA, 19 nt, Artificial Sequence
  Description of Artificial Sequence: Synthetic oligonucleotide
aauaagcuuggcauguuau

SEQ ID NO: 200646 - RNA, 19 nt, Artificial Sequence
  Description of Artificial Sequence: Synthetic oligonucleotide
augcuaugggucucuuacc

SEQ ID NO: 200647 - RNA, 19 nt, Artificial Sequence
  Description of Artificial Sequence: Synthetic oligonucleotide
ugggugaaucugcuuaggc

SEQ ID NO: 200648 - RNA, 19 nt, Artificial Sequence
  Description of Artificial Sequence: Synthetic oligonucleotide
  modified_base (4)..(4): a, c, u, g, unknown or other
uccngaucagccuucugaa

SEQ ID NO: 200649 - RNA, 19 nt, Artificial Sequence
  Description of Artificial Sequence: Synthetic oligonucleotide
gugacgagugcuuucuaag

SEQ ID NO: 200650 - RNA, 19 nt, Artificial Sequence
  Description of Artificial Sequence: Synthetic oligonucleotide
acuacguguguuccacaac

SEQ ID NO: 200651 - RNA, 19 nt, Artificial Sequence
  Description of Artificial Sequence: Synthetic oligonucleotide
cauaccagacuacaaauaa

SEQ ID NO: 200652 - RNA, 19 nt, Artificial Sequence
  Description of Artificial Sequence: Synthetic oligonucleotide
uaguuaaauuuacguagaa

SEQ ID NO: 200653 - RNA, 19 nt, Artificial Sequence
  Description of Artificial Sequence: Synthetic oligonucleotide
auagccuacauucucuaua

SEQ ID NO: 200654 - RNA, 19 nt, Artificial Sequence
  Description of Artificial Sequence: Synthetic oligonucleotide
uucaaauuguacugcuguc

SEQ ID NO: 200655 - RNA, 19 nt, Artificial Sequence
  Description of Artificial Sequence: Synthetic oligonucleotide
auaguuaaauuuacguaga

SEQ ID NO: 200656 - RNA, 19 nt, Artificial Sequence
  Description of Artificial Sequence: Synthetic oligonucleotide
uuaccaagauccucaaaua

SEQ ID NO: 200657 - RNA, 19 nt, Artificial Sequence
  Description of Artificial Sequence: Synthetic oligonucleotide
cuuugcaagauuaaucacu

SEQ ID NO: 200658 - RNA, 19 nt, Artificial Sequence
  Description of Artificial Sequence: Synthetic oligonucleotide
ucggaaauacccuguugca

SEQ ID NO: 200659 - RNA, 19 nt, Artificial Sequence
  Description of Artificial Sequence: Synthetic oligonucleotide
uucuagagaaaauguugaa

SEQ ID NO: 200660 - RNA, 19 nt, Artificial Sequence
  Description of Artificial Sequence: Synthetic oligonucleotide
uugucucaccccaugucug

SEQ ID NO: 200661 - RNA, 19 nt, Artificial Sequence
  Description of Artificial Sequence: Synthetic oligonucleotide
uagucacacagauacgguc

SEQ ID NO: 200662 - RNA, 19 nt, Artificial Sequence
  Description of Artificial Sequence: Synthetic oligonucleotide
guuugcaugggugaaucug

SEQ ID NO: 200663 - RNA, 19 nt, Artificial Sequence
  Description of Artificial Sequence: Synthetic oligonucleotide
acuaccccuuaccaagauc

SEQ ID NO: 200664 - RNA, 19 nt, Artificial Sequence
  Description of Artificial Sequence: Synthetic oligonucleotide
acuagcgcuucucaagaca

SEQ ID NO: 200665 - RNA, 19 nt, Artificial Sequence
  Description of Artificial Sequence: Synthetic oligonucleotide
guuacagcggauccugcug

SEQ ID NO: 200666 - RNA, 19 nt, Artificial Sequence
  Description of Artificial Sequence: Synthetic oligonucleotide
cuuuguaaguaugcugggc

SEQ ID NO: 200667 - RNA, 19 nt, Artificial Sequence
  Description of Artificial Sequence: Synthetic oligonucleotide
aaagugcuuccugugagaa

SEQ ID NO: 200668 - RNA, 19 nt, Artificial Sequence
  Description of Artificial Sequence: Synthetic oligonucleotide
aaaugguuuugaaccacca

SEQ ID NO: 200669 - RNA, 19 nt, Artificial Sequence
  Description of Artificial Sequence: Synthetic oligonucleotide
uuauugggcaugcuauuuu

SEQ ID NO: 200670 - RNA, 19 nt, Artificial Sequence
  Description of Artificial Sequence: Synthetic oligonucleotide
guacugaugaguguugcac

SEQ ID NO: 200671 - RNA, 19 nt, Artificial Sequence
  Description of Artificial Sequence: Synthetic oligonucleotide
guacauagcuuauauuaaa

SEQ ID NO: 200672 - RNA, 19 nt, Artificial Sequence
  Description of Artificial Sequence: Synthetic oligonucleotide
ccuaaguacacuacgugug

SEQ ID NO: 200673 - RNA, 19 nt, Artificial Sequence
  Description of Artificial Sequence: Synthetic oligonucleotide
augaguguugcacuucaau

SEQ ID NO: 200674 - RNA, 19 nt, Artificial Sequence
  Description of Artificial Sequence: Synthetic oligonucleotide
ugguuugacaaaagucauc

SEQ ID NO: 200675 - RNA, 19 nt, Artificial Sequence
  Description of Artificial Sequence: Synthetic oligonucleotide
acuacaacuuagccauaug

SEQ ID NO: 200676 - RNA, 19 nt, Artificial Sequence
  Description of Artificial Sequence: Synthetic oligonucleotide
cauacuaacauacacuguu

SEQ ID NO: 200677 - RNA, 19 nt, Artificial Sequence
  Description of Artificial Sequence: Synthetic oligonucleotide
uuaugcccaaggaucuacu

SEQ ID NO: 200678 - RNA, 19 nt, Artificial Sequence
  Description of Artificial Sequence: Synthetic oligonucleotide
uguugcacuucaauccaua

SEQ ID NO: 200679 - RNA, 19 nt, Artificial Sequence
  Description of Artificial Sequence: Synthetic oligonucleotide
cuagacuuauugggcaugc

SEQ ID NO: 200680 - RNA, 19 nt, Artificial Sequence
  Description of Artificial Sequence: Synthetic oligonucleotide
cagguuaccuagacuuugc

SEQ ID NO: 200681 - RNA, 19 nt, Artificial Sequence
  Description of Artificial Sequence: Synthetic oligonucleotide
accucaaauuuuagaugcc

SEQ ID NO: 200682 - RNA, 19 nt, Artificial Sequence
  Description of Artificial Sequence: Synthetic oligonucleotide
agucacacagauacggucu

SEQ ID NO: 200683 - RNA, 19 nt, Artificial Sequence
  Description of Artificial Sequence: Synthetic oligonucleotide
  modified_base (5)..(5): a, c, u, g, unknown or other
cuccngaucagccuucuga

SEQ ID NO: 200684 - RNA, 19 nt, Artificial Sequence
  Description of Artificial Sequence: Synthetic oligonucleotide
ugcguugcucucuccagca

SEQ ID NO: 200685 - RNA, 19 nt, Artificial Sequence
  Description of Artificial Sequence: Synthetic oligonucleotide
uccaugccuaaguacacua

SEQ ID NO: 200686 - RNA, 19 nt, Artificial Sequence
  Description of Artificial Sequence: Synthetic oligonucleotide
agugacgagugcuuucuaa

SEQ ID NO: 200687 - RNA, 19 nt, Artificial Sequence
  Description of Artificial Sequence: Synthetic oligonucleotide
uuuggcuauuuguaccaau

SEQ ID NO: 200688 - RNA, 19 nt, Artificial Sequence
  Description of Artificial Sequence: Synthetic oligonucleotide
ggugcuuuggacaguggcg

SEQ ID NO: 200689 - RNA, 19 nt, Artificial Sequence
  Description of Artificial Sequence: Synthetic oligonucleotide
auaagcuuggcauguuauu

SEQ ID NO: 200690 - RNA, 19 nt, Artificial Sequence
  Description of Artificial Sequence: Synthetic oligonucleotide
cucuuaccauacuuauaag

SEQ ID NO: 200691 - RNA, 19 nt, Artificial Sequence
  Description of Artificial Sequence: Synthetic oligonucleotide
guaaauauggaggcuucca

SEQ ID NO: 200692 - RNA, 19 nt, Artificial Sequence
  Description of Artificial Sequence: Synthetic oligonucleotide
cacacggcccgcuucagug

SEQ ID NO: 200693 - RNA, 19 nt, Artificial Sequence
  Description of Artificial Sequence: Synthetic oligonucleotide
uuagaccauuacaaauaua

SEQ ID NO: 200694 - RNA, 19 nt, Artificial Sequence
  Description of Artificial Sequence: Synthetic oligonucleotide
caaucucauuacagggccc

SEQ ID NO: 200695 - RNA, 19 nt, Artificial Sequence
  Description of Artificial Sequence: Synthetic oligonucleotide
ccuauuacuuugaagucuc

SEQ ID NO: 200696 - RNA, 19 nt, Artificial Sequence
  Description of Artificial Sequence: Synthetic oligonucleotide
cuuaugcccaaggaucuac

SEQ ID NO: 200697 - RNA, 19 nt, Artificial Sequence
  Description of Artificial Sequence: Synthetic oligonucleotide
gcaaauaaggugcuuagcu

SEQ ID NO: 200698 - RNA, 19 nt, Artificial Sequence
  Description of Artificial Sequence: Synthetic oligonucleotide
auguguaaucuaaacuugu

SEQ ID NO: 200699 - RNA, 19 nt, Artificial Sequence
  Description of Artificial Sequence: Synthetic oligonucleotide
ugauagccuacauucucua

SEQ ID NO: 200700 - RNA, 19 nt, Artificial Sequence
  Description of Artificial Sequence: Synthetic oligonucleotide
ucuaagcgucagcauuaca

SEQ ID NO: 200701 - RNA, 19 nt, Artificial Sequence
  Description of Artificial Sequence: Synthetic oligonucleotide
ugucucaccccaugucuga

SEQ ID NO: 200702 - RNA, 19 nt, Artificial Sequence
  Description of Artificial Sequence: Synthetic oligonucleotide
ucuaaacuuguagggugcu

SEQ ID NO: 200703 - RNA, 19 nt, Artificial Sequence
  Description of Artificial Sequence: Synthetic oligonucleotide
aaaguauguccucgucaua

SEQ ID NO: 200704 - RNA, 19 nt, Artificial Sequence
  Description of Artificial Sequence: Synthetic oligonucleotide
uguuuacaguacugucaca

SEQ ID NO: 200705 - RNA, 19 nt, Artificial Sequence
  Description of Artificial Sequence: Synthetic oligonucleotide
cucuauaauguguaaucua

SEQ ID NO: 200706 - RNA, 19 nt, Artificial Sequence
  Description of Artificial Sequence: Synthetic oligonucleotide
caugcuauuuugcaauuua

SEQ ID NO: 200707 - RNA, 19 nt, Artificial Sequence
  Description of Artificial Sequence: Synthetic oligonucleotide
gaauuggcuaauugcauuu

SEQ ID NO: 200708 - RNA, 19 nt, Artificial Sequence
  Description of Artificial Sequence: Synthetic oligonucleotide
ucaucagauuggagguacu

SEQ ID NO: 200709 - RNA, 19 nt, Artificial Sequence
  Description of Artificial Sequence: Synthetic oligonucleotide
acuuauugggcaugcuauu

SEQ ID NO: 200710 - RNA, 19 nt, Artificial Sequence
  Description of Artificial Sequence: Synthetic oligonucleotide
ucacacuagcgcuucucaa

SEQ ID NO: 200711 - RNA, 19 nt, Artificial Sequence
  Description of Artificial Sequence: Synthetic oligonucleotide
agggugcuaucucaacuca

SEQ ID NO: 200712 - RNA, 19 nt, Artificial Sequence
  Description of Artificial Sequence: Synthetic oligonucleotide
ucauaugcuaugggucucu

SEQ ID NO: 200713 - RNA, 19 nt, Artificial Sequence
  Description of Artificial Sequence: Synthetic oligonucleotide
aaauacccuguugcagaug

SEQ ID NO: 200714 - RNA, 19 nt, Artificial Sequence
  Description of Artificial Sequence: Synthetic oligonucleotide
ccuacauucucuauaaugu

SEQ ID NO: 200715 - RNA, 19 nt, Artificial Sequence
  Description of Artificial Sequence: Synthetic oligonucleotide
gccuaugauaagcaaauaa

SEQ ID NO: 200716 - RNA, 19 nt, Artificial Sequence
  Description of Artificial Sequence: Synthetic oligonucleotide
acuuuacagaggaauucca

SEQ ID NO: 200717 - RNA, 19 nt, Artificial Sequence
  Description of Artificial Sequence: Synthetic oligonucleotide
  modified_base (2)..(2): a, c, u, g, unknown or other
cngaucagccuucugaacu

SEQ ID NO: 200718 - RNA, 19 nt, Artificial Sequence
  Description of Artificial Sequence: Synthetic oligonucleotide
agauguuacagcggauccu

SEQ ID NO: 200719 - RNA, 19 nt, Artificial Sequence
  Description of Artificial Sequence: Synthetic oligonucleotide
uacccuguugcagauguua

SEQ ID NO: 200720 - RNA, 19 nt, Artificial Sequence
  Description of Artificial Sequence: Synthetic oligonucleotide
agcuuaugcccaaggaucu

SEQ ID NO: 200721 - RNA, 19 nt, Artificial Sequence
  Description of Artificial Sequence: Synthetic oligonucleotide
gacuuauugggcaugcuau

SEQ ID NO: 200722 - RNA, 19 nt, Artificial Sequence
  Description of Artificial Sequence: Synthetic oligonucleotide
aacuaccuguguacuauaa

SEQ ID NO: 200723 - RNA, 19 nt, Artificial Sequence
  Description of Artificial Sequence: Synthetic oligonucleotide
cuacguguguuccacaacu

SEQ ID NO: 200724 - RNA, 19 nt, Artificial Sequence
  Description of Artificial Sequence: Synthetic oligonucleotide
gcauuaaacuugucucacc

SEQ ID NO: 200725 - RNA, 19 nt, Artificial Sequence
  Description of Artificial Sequence: Synthetic oligonucleotide
uccaaauaguuggccugcc

SEQ ID NO: 200726 - RNA, 19 nt, Artificial Sequence
  Description of Artificial Sequence: Synthetic oligonucleotide
augggugaaucugcuuagg

SEQ ID NO: 200727 - RNA, 19 nt, Artificial Sequence
  Description of Artificial Sequence: Synthetic oligonucleotide
cauccacuaauaauagcua

SEQ ID NO: 200728 - RNA, 19 nt, Artificial Sequence
  Description of Artificial Sequence: Synthetic oligonucleotide
augccuaaguacacuacgu

SEQ ID NO: 200729 - RNA, 19 nt, Artificial Sequence
  Description of Artificial Sequence: Synthetic oligonucleotide
uccaaguacauagcuuaua

SEQ ID NO: 200730 - RNA, 19 nt, Artificial Sequence
  Description of Artificial Sequence: Synthetic oligonucleotide
cuuauaagugcuccaaguu

SEQ ID NO: 200731 - RNA, 19 nt, Artificial Sequence
  Description of Artificial Sequence: Synthetic oligonucleotide
ggagugacuucucccucgg

SEQ ID NO: 200732 - RNA, 19 nt, Artificial Sequence
  Description of Artificial Sequence: Synthetic oligonucleotide
cuuucuaagcgucagcauu

SEQ ID NO: 200733 - RNA, 19 nt, Artificial Sequence
  Description of Artificial Sequence: Synthetic oligonucleotide
gugcaaaaguccccaguca

SEQ ID NO: 200734 - RNA, 19 nt, Artificial Sequence
  Description of Artificial Sequence: Synthetic oligonucleotide
cuugucucaccccaugucu

SEQ ID NO: 200735 - RNA, 19 nt, Artificial Sequence
  Description of Artificial Sequence: Synthetic oligonucleotide
aguccauaacuuauagcau

SEQ ID NO: 200736 - RNA, 19 nt, Artificial Sequence
  Description of Artificial Sequence: Synthetic oligonucleotide
acauacuaacauacacugu

SEQ ID NO: 200737 - RNA, 19 nt, Artificial Sequence
  Description of Artificial Sequence: Synthetic oligonucleotide
auaccagacuacaaauaaa

SEQ ID NO: 200738 - RNA, 19 nt, Artificial Sequence
  Description of Artificial Sequence: Synthetic oligonucleotide
guagggugcuaucucaacu

SEQ ID NO: 200739 - RNA, 19 nt, Artificial Sequence
  Description of Artificial Sequence: Synthetic oligonucleotide
uucuaagcgucagcauuac

SEQ ID NO: 200740 - RNA, 19 nt, Artificial Sequence
  Description of Artificial Sequence: Synthetic oligonucleotide
uacguguguuccacaacuu

SEQ ID NO: 200741 - RNA, 19 nt, Artificial Sequence
  Description of Artificial Sequence: Synthetic oligonucleotide
uaacuaccuguguacuaua

SEQ ID NO: 200742 - RNA, 19 nt, Artificial Sequence
  Description of Artificial Sequence: Synthetic oligonucleotide
uaccccuuaccaagauccu

SEQ ID NO: 200743 - RNA, 19 nt, Artificial Sequence
  Description of Artificial Sequence: Synthetic oligonucleotide
uaaguacacuacguguguu

SEQ ID NO: 200744 - RNA, 19 nt, Artificial Sequence
  Description of Artificial Sequence: Synthetic oligonucleotide
gcuauuuguaccaaucugu

SEQ ID NO: 200745 - RNA, 19 nt, Artificial Sequence
  Description of Artificial Sequence: Synthetic oligonucleotide
gaucuguaauugacuuuac

SEQ ID NO: 200746 - RNA, 19 nt, Artificial Sequence
  Description of Artificial Sequence: Synthetic oligonucleotide
accuagacuuugcaagauu

SEQ ID NO: 200747 - RNA, 19 nt, Artificial Sequence
  Description of Artificial Sequence: Synthetic oligonucleotide
ggguaagacucauuuuaca

SEQ ID NO: 200748 - RNA, 19 nt, Artificial Sequence
  Description of Artificial Sequence: Synthetic oligonucleotide
gugcuuucuaagcgucagc

SEQ ID NO: 200749 - RNA, 19 nt, Artificial Sequence
  Description of Artificial Sequence: Synthetic oligonucleotide
ucucaacuacuaccccuua

SEQ ID NO: 200750 - RNA, 19 nt, Artificial Sequence
  Description of Artificial Sequence: Synthetic oligonucleotide
ggcaauaugcacugaaaau

SEQ ID NO: 200751 - RNA, 19 nt, Artificial Sequence
  Description of Artificial Sequence: Synthetic oligonucleotide
cagccuaugauaagcaaau

SEQ ID NO: 200752 - RNA, 19 nt, Artificial Sequence
  Description of Artificial Sequence: Synthetic oligonucleotide
cacuagcgcuucucaagac

SEQ ID NO: 200753 - RNA, 19 nt, Artificial Sequence
  Description of Artificial Sequence: Synthetic oligonucleotide
auaugcuaugggucucuua

SEQ ID NO: 200754 - RNA, 19 nt, Artificial Sequence
  Description of Artificial Sequence: Synthetic oligonucleotide
cuccaauuaaggagucuaa

SEQ ID NO: 200755 - RNA, 19 nt, Artificial Sequence
  Description of Artificial Sequence: Synthetic oligonucleotide
uaccuagacuuugcaagau

SEQ ID NO: 200756 - RNA, 19 nt, Artificial Sequence
  Description of Artificial Sequence: Synthetic oligonucleotide
gcacacaauuaacuaccug

SEQ ID NO: 200757 - RNA, 19 nt, Artificial Sequence
  Description of Artificial Sequence: Synthetic oligonucleotide
ggagucuaaaucaccaugu

SEQ ID NO: 200758 - RNA, 19 nt, Artificial Sequence
  Description of Artificial Sequence: Synthetic oligonucleotide
acacaagugccaaucucau

SEQ ID NO: 200759 - RNA, 19 nt, Artificial Sequence
  Description of Artificial Sequence: Synthetic oligonucleotide
uagacuuauugggcaugcu

SEQ ID NO: 200760 - RNA, 19 nt, Artificial Sequence
  Description of Artificial Sequence: Synthetic oligonucleotide
  modified_base (7)..(7): a, c, u, g, unknown or other
ugcuccngaucagccuucu

SEQ ID NO: 200761 - RNA, 19 nt, Artificial Sequence
  Description of Artificial Sequence: Synthetic oligonucleotide
ggaauguaacuguaauggu

SEQ ID NO: 200762 - RNA, 19 nt, Artificial Sequence
  Description of Artificial Sequence: Synthetic oligonucleotide
ugaguccuuuugugagccu

SEQ ID NO: 200763 - RNA, 19 nt, Artificial Sequence
  Description of Artificial Sequence: Synthetic oligonucleotide
gauagccuacauucucuau

SEQ ID NO: 200764 - RNA, 19 nt, Artificial Sequence
  Description of Artificial Sequence: Synthetic oligonucleotide
agaugccaauguauuuugu

SEQ ID NO: 200765 - RNA, 19 nt, Artificial Sequence
  Description of Artificial Sequence: Synthetic oligonucleotide
gccuaaguacacuacgugu

SEQ ID NO: 200766 - RNA, 19 nt, Artificial Sequence
  Description of Artificial Sequence: Synthetic oligonucleotide
acacggcccgcuucagugu

SEQ ID NO: 200767 - RNA, 19 nt, Artificial Sequence
  Description of Artificial Sequence: Synthetic oligonucleotide
guacugucacacauacuaa

SEQ ID NO: 200768 - RNA, 19 nt, Artificial Sequence
  Description of Artificial Sequence: Synthetic oligonucleotide
gagucuaaaucaccauguu

SEQ ID NO: 200769 - RNA, 19 nt, Artificial Sequence
  Description of Artificial Sequence: Synthetic oligonucleotide
ccaaugguaagcaguugga

SEQ ID NO: 200770 - RNA, 19 nt, Artificial Sequence
  Description of Artificial Sequence: Synthetic oligonucleotide
ggucucuuaccauacuuau

SEQ ID NO: 200771 - RNA, 19 nt, Artificial Sequence
  Description of Artificial Sequence: Synthetic oligonucleotide
ccccuuaccaagauccuca

SEQ ID NO: 200772 - RNA, 19 nt, Artificial Sequence
  Description of Artificial Sequence: Synthetic oligonucleotide
  modified_base (3)..(3): a, c, u, g, unknown or other
ccngaucagccuucugaac

SEQ ID NO: 200773 - RNA, 19 nt, Artificial Sequence
  Description of Artificial Sequence: Synthetic oligonucleotide
  modified_base (8)..(8): a, c, u, g, unknown or other
cugcuccngaucagccuuc

SEQ ID NO: 200774 - RNA, 19 nt, Artificial Sequence
  Description of Artificial Sequence: Synthetic oligonucleotide
gugaauuggcuaauugcau

SEQ ID NO: 200775 - RNA, 19 nt, Artificial Sequence
  Description of Artificial Sequence: Synthetic oligonucleotide
ccucaaauuuuagaugcca

SEQ ID NO: 200776 - RNA, 19 nt, Artificial Sequence
  Description of Artificial Sequence: Synthetic oligonucleotide
gggugcguugcucucucca

SEQ ID NO: 200777 - RNA, 19 nt, Artificial Sequence
  Description of Artificial Sequence: Synthetic oligonucleotide
agaccccuaaagaucugua

SEQ ID NO: 200778 - RNA, 19 nt, Artificial Sequence
  Description of Artificial Sequence: Synthetic oligonucleotide
gcaccaguugccagguuac

SEQ ID NO: 200779 - RNA, 19 nt, Artificial Sequence
  Description of Artificial Sequence: Synthetic oligonucleotide
agccuaugauaagcaaaua

SEQ ID NO: 200780 - RNA, 19 nt, Artificial Sequence
  Description of Artificial Sequence: Synthetic oligonucleotide
cuaaacuuguagggugcua

SEQ ID NO: 200781 - RNA, 19 nt, Artificial Sequence
  Description of Artificial Sequence: Synthetic oligonucleotide
gagugacgagugcuuucua

SEQ ID NO: 200782 - RNA, 19 nt, Artificial Sequence
  Description of Artificial Sequence: Synthetic oligonucleotide
cucacacggcccgcuucag

SEQ ID NO: 200783 - RNA, 19 nt, Artificial Sequence
  Description of Artificial Sequence: Synthetic oligonucleotide
guccaugccuaaguacacu

SEQ ID NO: 200784 - RNA, 19 nt, Artificial Sequence
  Description of Artificial Sequence: Synthetic oligonucleotide
  modified_base (6)..(6): a, c, u, g, unknown or other
gcuccngaucagccuucug

SEQ ID NO: 200785 - RNA, 19 nt, Artificial Sequence
  Description of Artificial Sequence: Synthetic oligonucleotide
guccaaguacauagcuuau

SEQ ID NO: 200786 - RNA, 19 nt, Artificial Sequence
  Description of Artificial Sequence: Synthetic oligonucleotide
gcuaugggucucuuaccau

SEQ ID NO: 200787 - RNA, 19 nt, Artificial Sequence
  Description of Artificial Sequence: Synthetic oligonucleotide
gggugcuaucucaacucaa

SEQ ID NO: 200788 - RNA, 19 nt, Artificial Sequence
  Description of Artificial Sequence: Synthetic oligonucleotide
ggcaugcuauuuugcaauu

SEQ ID NO: 200789 - RNA, 19 nt, Artificial Sequence
  Description of Artificial Sequence: Synthetic oligonucleotide
gcugggcaguacuuuugua

SEQ ID NO: 200790 - RNA, 19 nt, Artificial Sequence
  Description of Artificial Sequence: Synthetic oligonucleotide
ggggugcguugcucucucc

SEQ ID NO: 200791 - RNA, 19 nt, Artificial Sequence
  Description of Artificial Sequence: Synthetic oligonucleotide
cccuuaccaagauccucaa

SEQ ID NO: 200792 - RNA, 19 nt, Artificial Sequence
  Description of Artificial Sequence: Synthetic oligonucleotide
gcuuaugcccaaggaucua

SEQ ID NO: 200793 - RNA, 19 nt, Artificial Sequence
  Description of Artificial Sequence: Synthetic oligonucleotide
cccaaggaucuacuuugua

SEQ ID NO: 200794 - RNA, 19 nt, Artificial Sequence
  Description of Artificial Sequence: Synthetic oligonucleotide
cauaugcuaugggucucuu

SEQ ID NO: 200795 - RNA, 19 nt, Artificial Sequence
  Description of Artificial Sequence: Synthetic oligonucleotide
gcaugcuauuuugcaauuu

SEQ ID NO: 200796 - RNA, 19 nt, Artificial Sequence
  Description of Artificial Sequence: Synthetic oligonucleotide
ccaucggauccugcugcuc

SEQ ID NO: 200797 - RNA, 19 nt, Artificial Sequence
  Description of Artificial Sequence: Synthetic oligonucleotide
cugcuuaggcagccauuuu

SEQ ID NO: 200798 - RNA, 19 nt, Artificial Sequence
  Description of Artificial Sequence: Synthetic oligonucleotide
cacggcccgcuucaguguu

SEQ ID NO: 200799 - RNA, 19 nt, Artificial Sequence
  Description of Artificial Sequence: Synthetic oligonucleotide
ggcccgcuucaguguuuac

SEQ ID NO: 200800 - RNA, 19 nt, Artificial Sequence
  Description of Artificial Sequence: Synthetic oligonucleotide
ccucgucauacacauuauu

SEQ ID NO: 200801 - RNA, 19 nt, Artificial Sequence
  Description of Artificial Sequence: Synthetic oligonucleotide
acggcccgcuucaguguuu

SEQ ID NO: 200802 - RNA, 19 nt, Artificial Sequence
  Description of Artificial Sequence: Synthetic oligonucleotide
gccagguuaccuagacuuu

SEQ ID NO: 200803 - RNA, 19 nt, Artificial Sequence
  Description of Artificial Sequence: Synthetic oligonucleotide
gcgguuugcaugggugaau

SEQ ID NO: 200804 - RNA, 19 nt, Artificial Sequence
  Description of Artificial Sequence: Synthetic oligonucleotide
gcgccacucuucucaucgu

SEQ ID NO: 200805 - RNA, 19 nt, Artificial Sequence
  Description of Artificial Sequence: Synthetic oligonucleotide
  modified_base (1)..(1): a, c, u, g, unknown or other
ngaucagccuucugaacua

SEQ ID NO: 200806 - RNA, 19 nt, Artificial Sequence
  Description of Artificial Sequence: Synthetic oligonucleotide
aaacugucaacauaugggc

SEQ ID NO: 200807 - RNA, 19 nt, Artificial Sequence
  Description of Artificial Sequence: Synthetic oligonucleotide
uauguuaccaguaaacucc

SEQ ID NO: 200808 - RNA, 19 nt, Artificial Sequence
  Description of Artificial Sequence: Synthetic oligonucleotide
uauucuguaagaauuagac

SEQ ID NO: 200809 - RNA, 19 nt, Artificial Sequence
  Description of Artificial Sequence: Synthetic oligonucleotide
uuagacauaaucuuagaug

SEQ ID NO: 200810 - RNA, 19 nt, Artificial Sequence
  Description of Artificial Sequence: Synthetic oligonucleotide
aagaauggaauacuacacg

SEQ ID NO: 200811 - RNA, 19 nt, Artificial Sequence
  Description of Artificial Sequence: Synthetic oligonucleotide
uuauauaacauucacuaua

SEQ ID NO: 200812 - RNA, 19 nt, Artificial Sequence
  Description of Artificial Sequence: Synthetic oligonucleotide
ugaaucagagucauuagug

SEQ ID NO: 200813 - RNA, 19 nt, Artificial Sequence
  Description of Artificial Sequence: Synthetic oligonucleotide
ugaauggucagaaucaaac

SEQ ID NO: 200814 - RNA, 19 nt, Artificial Sequence
  Description of Artificial Sequence: Synthetic oligonucleotide
aacaaaggcggauacgauc

SEQ ID NO: 200815 - RNA, 19 nt, Artificial Sequence
  Description of Artificial Sequence: Synthetic oligonucleotide
aaacacgcugcaaacaucc

SEQ ID NO: 200816 - RNA, 19 nt, Artificial Sequence
  Description of Artificial Sequence: Synthetic oligonucleotide
aguugcaugcauuucaguc

SEQ ID NO: 200817 - RNA, 19 nt, Artificial Sequence
  Description of Artificial Sequence: Synthetic oligonucleotide
ugauauuaaugauacaggu

SEQ ID NO: 200818 - RNA, 19 nt, Artificial Sequence
  Description of Artificial Sequence: Synthetic oligonucleotide
uuauacuguaucuugaauc

SEQ ID NO: 200819 - RNA, 19 nt, Artificial Sequence
  Description of Artificial Sequence: Synthetic oligonucleotide
auauguuaccaguaaacuc

SEQ ID NO: 200820 - RNA, 19 nt, Artificial Sequence
  Description of Artificial Sequence: Synthetic oligonucleotide
ucagaaucaaacacgcugc

SEQ ID NO: 200821 - RNA, 19 nt, Artificial Sequence
  Description of Artificial Sequence: Synthetic oligonucleotide
uuaacaaacauguaugguu

SEQ ID NO: 200822 - RNA, 19 nt, Artificial Sequence
  Description of Artificial Sequence: Synthetic oligonucleotide
uauuuguuagacucagagg

SEQ ID NO: 200823 - RNA, 19 nt, Artificial Sequence
  Description of Artificial Sequence: Synthetic oligonucleotide
aagaauuagacacccauuu

SEQ ID NO: 200824 - RNA, 19 nt, Artificial Sequence
  Description of Artificial Sequence: Synthetic oligonucleotide
ucuuccgucauguuaauga

SEQ ID NO: 200825 - RNA, 19 nt, Artificial Sequence
  Description of Artificial Sequence: Synthetic oligonucleotide
aacaugaauagugucagug

SEQ ID NO: 200826 - RNA, 19 nt, Artificial Sequence
  Description of Artificial Sequence: Synthetic oligonucleotide
gacauaaucuuagaugggg

SEQ ID NO: 200827 - RNA, 19 nt, Artificial Sequence
  Description of Artificial Sequence: Synthetic oligonucleotide
uacuacacgguucacagac

SEQ ID NO: 200828 - RNA, 19 nt, Artificial Sequence
  Description of Artificial Sequence: Synthetic oligonucleotide
agaguaauacaacuuuguc

SEQ ID NO: 200829 - RNA, 19 nt, Artificial Sequence
  Description of Artificial Sequence: Synthetic oligonucleotide
uuuaaugauaaagauuacu

SEQ ID NO: 200830 - RNA, 19 nt, Artificial Sequence
  Description of Artificial Sequence: Synthetic oligonucleotide
ugcuuagacauaaucuuag

SEQ ID NO: 200831 - RNA, 19 nt, Artificial Sequence
  Description of Artificial Sequence: Synthetic oligonucleotide
ugauaucugacuccacccg

SEQ ID NO: 200832 - RNA, 19 nt, Artificial Sequence
  Description of Artificial Sequence: Synthetic oligonucleotide
ucuaagaauggaauacuac

SEQ ID NO: 200833 - RNA, 19 nt, Artificial Sequence
  Description of Artificial Sequence: Synthetic oligonucleotide
acaaaggcggauacgaucc

SEQ ID NO: 200834 - RNA, 19 nt, Artificial Sequence
  Description of Artificial Sequence: Synthetic oligonucleotide
uauuucuagggauuuguug

SEQ ID NO: 200835 - RNA, 19 nt, Artificial Sequence
  Description of Artificial Sequence: Synthetic oligonucleotide
uauagaugagacagaagca

SEQ ID NO: 200836 - RNA, 19 nt, Artificial Sequence
  Description of Artificial Sequence: Synthetic oligonucleotide
aauggaauacuacacgguu

SEQ ID NO: 200837 - RNA, 19 nt, Artificial Sequence
  Description of Artificial Sequence: Synthetic oligonucleotide
guaauggugagcuugagaa

SEQ ID NO: 200838 - RNA, 19 nt, Artificial Sequence
  Description of Artificial Sequence: Synthetic oligonucleotide
aaauaguauacuugacagu

SEQ ID NO: 200839 - RNA, 19 nt, Artificial Sequence
  Description of Artificial Sequence: Synthetic oligonucleotide
agagugaguaucuugguga

SEQ ID NO: 200840 - RNA, 19 nt, Artificial Sequence
  Description of Artificial Sequence: Synthetic oligonucleotide
aagugcaugauauuuugau

SEQ ID NO: 200841 - RNA, 19 nt, Artificial Sequence
  Description of Artificial Sequence: Synthetic oligonucleotide
cuuugucuauucaaguugc

SEQ ID NO: 200842 - RNA, 19 nt, Artificial Sequence
  Description of Artificial Sequence: Synthetic oligonucleotide
gucuauucaaguugcaugc

SEQ ID NO: 200843 - RNA, 19 nt, Artificial Sequence
  Description of Artificial Sequence: Synthetic oligonucleotide
ugucagguauauuauauaa

SEQ ID NO: 200844 - RNA, 19 nt, Artificial Sequence
  Description of Artificial Sequence: Synthetic oligonucleotide
uaguauacuugacaguuac

SEQ ID NO: 200845 - RNA, 19 nt, Artificial Sequence
  Description of Artificial Sequence: Synthetic oligonucleotide
acauaguggagaguaauac

SEQ ID NO: 200846 - RNA, 19 nt, Artificial Sequence
  Description of Artificial Sequence: Synthetic oligonucleotide
augauuuaggcaauaaaag

SEQ ID NO: 200847 - RNA, 19 nt, Artificial Sequence
  Description of Artificial Sequence: Synthetic oligonucleotide
cuauacaucccagacagag

SEQ ID NO: 200848 - RNA, 19 nt, Artificial Sequence
  Description of Artificial Sequence: Synthetic oligonucleotide
uuuguuagacucagaggag

SEQ ID NO: 200849 - RNA, 19 nt, Artificial Sequence
  Description of Artificial Sequence: Synthetic oligonucleotide
uggucagaaucaaacacgc

SEQ ID NO: 200850 - RNA, 19 nt, Artificial Sequence
  Description of Artificial Sequence: Synthetic oligonucleotide
augauauuaaugauacagg

SEQ ID NO: 200851 - RNA, 19 nt, Artificial Sequence
  Description of Artificial Sequence: Synthetic oligonucleotide
uaaucuuagauggggauga

SEQ ID NO: 200852 - RNA, 19 nt, Artificial Sequence
  Description of Artificial Sequence: Synthetic oligonucleotide
aggaggaugacagucuagc

SEQ ID NO: 200853 - RNA, 19 nt, Artificial Sequence
  Description of Artificial Sequence: Synthetic oligonucleotide
ucaaacacgcugcaaacau

SEQ ID NO: 200854 - RNA, 19 nt, Artificial Sequence
  Description of Artificial Sequence: Synthetic oligonucleotide
agugcuuagacauaaucuu

SEQ ID NO: 200855 - RNA, 19 nt, Artificial Sequence
  Description of Artificial Sequence: Synthetic oligonucleotide
ucuccuaaguguaaauagu

SEQ ID NO: 200856 - RNA, 19 nt, Artificial Sequence
  Description of Artificial Sequence: Synthetic oligonucleotide
agcauagauuaacagucuc

SEQ ID NO: 200857 - RNA, 19 nt, Artificial Sequence
  Description of Artificial Sequence: Synthetic oligonucleotide
uccgucauguuaaugacau

SEQ ID NO: 200858 - RNA, 19 nt, Artificial Sequence
  Description of Artificial Sequence: Synthetic oligonucleotide
aauaccgucuuauucugua

SEQ ID NO: 200859 - RNA, 19 nt, Artificial Sequence
  Description of Artificial Sequence: Synthetic oligonucleotide
agaccugucagguauauua

SEQ ID NO: 200860 - RNA, 19 nt, Artificial Sequence
  Description of Artificial Sequence: Synthetic oligonucleotide
gaggcuuaggguuccgugg

SEQ ID NO: 200861 - RNA, 19 nt, Artificial Sequence
  Description of Artificial Sequence: Synthetic oligonucleotide
ugccuauuggccagaaaag

SEQ ID NO: 200862 - RNA, 19 nt, Artificial Sequence
  Description of Artificial Sequence: Synthetic oligonucleotide
uaaguaugcugacuacuca

SEQ ID NO: 200863 - RNA, 19 nt, Artificial Sequence
  Description of Artificial Sequence: Synthetic oligonucleotide
gauuuaggcaauaaaaggu

SEQ ID NO: 200864 - RNA, 19 nt, Artificial Sequence
  Description of Artificial Sequence: Synthetic oligonucleotide
cuaaguaugcugacuacuc

SEQ ID NO: 200865 - RNA, 19 nt, Artificial Sequence
  Description of Artificial Sequence: Synthetic oligonucleotide
uguuagacucagaggagca

SEQ ID NO: 200866 - RNA, 19 nt, Artificial Sequence
  Description of Artificial Sequence: Synthetic oligonucleotide
aguaugguuagagggacag

SEQ ID NO: 200867 - RNA, 19 nt, Artificial Sequence
  Description of Artificial Sequence: Synthetic oligonucleotide
uccucacagguucucgugg

SEQ ID NO: 200868 - RNA, 19 nt, Artificial Sequence
  Description of Artificial Sequence: Synthetic oligonucleotide
ugcccaucccauuuuaagc

SEQ ID NO: 200869 - RNA, 19 nt, Artificial Sequence
  Description of Artificial Sequence: Synthetic oligonucleotide
ucuaaguaugcugacuacu

SEQ ID NO: 200870 - RNA, 19 nt, Artificial Sequence
  Description of Artificial Sequence: Synthetic oligonucleotide
ugaguaucuuggugaauag

SEQ ID NO: 200871 - RNA, 19 nt, Artificial Sequence
  Description of Artificial Sequence: Synthetic oligonucleotide
ucgguacccauucaauuca

SEQ ID NO: 200872 - RNA, 19 nt, Artificial Sequence
  Description of Artificial Sequence: Synthetic oligonucleotide
acaugaauagugucaguga

SEQ ID NO: 200873 - RNA, 19 nt, Artificial Sequence
  Description of Artificial Sequence: Synthetic oligonucleotide
uuggguuuguacgggacgg

SEQ ID NO: 200874 - RNA, 19 nt, Artificial Sequence
  Description of Artificial Sequence: Synthetic oligonucleotide
uaccaguaaacuccuguga

SEQ ID NO: 200875 - RNA, 19 nt, Artificial Sequence
  Description of Artificial Sequence: Synthetic oligonucleotide
ucuaagcuggaauaccguc

SEQ ID NO: 200876 - RNA, 19 nt, Artificial Sequence
  Description of Artificial Sequence: Synthetic oligonucleotide
uccacccguaaacaguaag

SEQ ID NO: 200877 - RNA, 19 nt, Artificial Sequence
  Description of Artificial Sequence: Synthetic oligonucleotide
uccuaaguguaaauaguau

SEQ ID NO: 200878 - RNA, 19 nt, Artificial Sequence
  Description of Artificial Sequence: Synthetic oligonucleotide
uauucaaguugcaugcauu

SEQ ID NO: 200879 - RNA, 19 nt, Artificial Sequence
  Description of Artificial Sequence: Synthetic oligonucleotide
aaaugaggacucuugccua

SEQ ID NO: 200880 - RNA, 19 nt, Artificial Sequence
  Description of Artificial Sequence: Synthetic oligonucleotide
cuuggguuuguacgggacg

SEQ ID NO: 200881 - RNA, 19 nt, Artificial Sequence
  Description of Artificial Sequence: Synthetic oligonucleotide
uaugcugacuacucaacua

SEQ ID NO: 200882 - RNA, 19 nt, Artificial Sequence
  Description of Artificial Sequence: Synthetic oligonucleotide
uggugaauaggcuuuugau

SEQ ID NO: 200883 - RNA, 19 nt, Artificial Sequence
  Description of Artificial Sequence: Synthetic oligonucleotide
cuuggcuaaacuuauagau

SEQ ID NO: 200884 - RNA, 19 nt, Artificial Sequence
  Description of Artificial Sequence: Synthetic oligonucleotide
uacgggacgggacacccag

SEQ ID NO: 200885 - RNA, 19 nt, Artificial Sequence
  Description of Artificial Sequence: Synthetic oligonucleotide
acagacauaguggagagua

SEQ ID NO: 200886 - RNA, 19 nt, Artificial Sequence
  Description of Artificial Sequence: Synthetic oligonucleotide
aguaugcugacuacucaac

SEQ ID NO: 200887 - RNA, 19 nt, Artificial Sequence
  Description of Artificial Sequence: Synthetic oligonucleotide
cucgguacccauucaauuc

SEQ ID NO: 200888 - RNA, 19 nt, Artificial Sequence
  Description of Artificial Sequence: Synthetic oligonucleotide
uccaugcuauuucccauug

SEQ ID NO: 200889 - RNA, 19 nt, Artificial Sequence
  Description of Artificial Sequence: Synthetic oligonucleotide
cccguaaacaguaaggcug

SEQ ID NO: 200890 - RNA, 19 nt, Artificial Sequence
  Description of Artificial Sequence: Synthetic oligonucleotide
uagcauagauuaacagucu

SEQ ID NO: 200891 - RNA, 19 nt, Artificial Sequence
  Description of Artificial Sequence: Synthetic oligonucleotide
uccgugguucuauuucuag

SEQ ID NO: 200892 - RNA, 19 nt, Artificial Sequence
  Description of Artificial Sequence: Synthetic oligonucleotide
auggaauacuacacgguuc

SEQ ID NO: 200893 - RNA, 19 nt, Artificial Sequence
  Description of Artificial Sequence: Synthetic oligonucleotide
uugaugagcucuucccaug

SEQ ID NO: 200894 - RNA, 19 nt, Artificial Sequence
  Description of Artificial Sequence: Synthetic oligonucleotide
gaagccucgguacccauuc

SEQ ID NO: 200895 - RNA, 19 nt, Artificial Sequence
  Description of Artificial Sequence: Synthetic oligonucleotide
uggggcuaggaaacuauac

SEQ ID NO: 200896 - RNA, 19 nt, Artificial Sequence
  Description of Artificial Sequence: Synthetic oligonucleotide
gacauauguuaccaguaaa

SEQ ID NO: 200897 - RNA, 19 nt, Artificial Sequence
  Description of Artificial Sequence: Synthetic oligonucleotide
ugacuccacccguaaacag

SEQ ID NO: 200898 - RNA, 19 nt, Artificial Sequence
  Description of Artificial Sequence: Synthetic oligonucleotide
cagucuagcauagauuaac

SEQ ID NO: 200899 - RNA, 19 nt, Artificial Sequence
  Description of Artificial Sequence: Synthetic oligonucleotide
accgucuuauucuguaaug

SEQ ID NO: 200900 - RNA, 19 nt, Artificial Sequence
  Description of Artificial Sequence: Synthetic oligonucleotide
uucuaaguaugcugacuac

SEQ ID NO: 200901 - RNA, 19 nt, Artificial Sequence
  Description of Artificial Sequence: Synthetic oligonucleotide
aaagaccuuacaagugucu

SEQ ID NO: 200902 - RNA, 19 nt, Artificial Sequence
  Description of Artificial Sequence: Synthetic oligonucleotide
cauaguggagaguaauaca

SEQ ID NO: 200903 - RNA, 19 nt, Artificial Sequence
  Description of Artificial Sequence: Synthetic oligonucleotide
auuuaggcaauaaaaggua

SEQ ID NO: 200904 - RNA, 19 nt, Artificial Sequence
  Description of Artificial Sequence: Synthetic oligonucleotide
uacgaucccuguuuaagau

SEQ ID NO: 200905 - RNA, 19 nt, Artificial Sequence
  Description of Artificial Sequence: Synthetic oligonucleotide
ugaggacucuugccuauug

SEQ ID NO: 200906 - RNA, 19 nt, Artificial Sequence
  Description of Artificial Sequence: Synthetic oligonucleotide
aaguugcaugcauuucagu

SEQ ID NO: 200907 - RNA, 19 nt, Artificial Sequence
  Description of Artificial Sequence: Synthetic oligonucleotide
agaauuagacacccauuuu

SEQ ID NO: 200908 - RNA, 19 nt, Artificial Sequence
  Description of Artificial Sequence: Synthetic oligonucleotide
ugagagugaguaucuuggu

SEQ ID NO: 200909 - RNA, 19 nt, Artificial Sequence
  Description of Artificial Sequence: Synthetic oligonucleotide
caucagguguccucacagg

SEQ ID NO: 200910 - RNA, 19 nt, Artificial Sequence
  Description of Artificial Sequence: Synthetic oligonucleotide
ucccauuuuaagccaguau

SEQ ID NO: 200911 - RNA, 19 nt, Artificial Sequence
  Description of Artificial Sequence: Synthetic oligonucleotide
uacacaugauuuaggcaau

SEQ ID NO: 200912 - RNA, 19 nt, Artificial Sequence
  Description of Artificial Sequence: Synthetic oligonucleotide
ucauugucuuauacuguau

SEQ ID NO: 200913 - RNA, 19 nt, Artificial Sequence
  Description of Artificial Sequence: Synthetic oligonucleotide
gucagguauauuauauaac

SEQ ID NO: 200914 - RNA, 19 nt, Artificial Sequence
  Description of Artificial Sequence: Synthetic oligonucleotide
uguacgggacgggacaccc

SEQ ID NO: 200915 - RNA, 19 nt, Artificial Sequence
  Description of Artificial Sequence: Synthetic oligonucleotide
ucuauucaaguugcaugca

SEQ ID NO: 200916 - RNA, 19 nt, Artificial Sequence
  Description of Artificial Sequence: Synthetic oligonucleotide
ggaauaccgucuuauucug

SEQ ID NO: 200917 - RNA, 19 nt, Artificial Sequence
  Description of Artificial Sequence: Synthetic oligonucleotide
aguaaacuccugugagaca

SEQ ID NO: 200918 - RNA, 19 nt, Artificial Sequence
  Description of Artificial Sequence: Synthetic oligonucleotide
caugaauaaccacaugaua

SEQ ID NO: 200919 - RNA, 19 nt, Artificial Sequence
  Description of Artificial Sequence: Synthetic oligonucleotide
acauaaucuuagaugggga

SEQ ID NO: 200920 - RNA, 19 nt, Artificial Sequence
  Description of Artificial Sequence: Synthetic oligonucleotide
uguccucacagguucucgu

SEQ ID NO: 200921 - RNA, 19 nt, Artificial Sequence
  Description of Artificial Sequence: Synthetic oligonucleotide
auugccaugaucacucuuu

SEQ ID NO: 200922 - RNA, 19 nt, Artificial Sequence
  Description of Artificial Sequence: Synthetic oligonucleotide
agacauaguggagaguaau

SEQ ID NO: 200923 - RNA, 19 nt, Artificial Sequence
  Description of Artificial Sequence: Synthetic oligonucleotide
gagaguaauacaacuuugu

SEQ ID NO: 200924 - RNA, 19 nt, Artificial Sequence
  Description of Artificial Sequence: Synthetic oligonucleotide
aacacgcugcaaacauccg

SEQ ID NO: 200925 - RNA, 19 nt, Artificial Sequence
  Description of Artificial Sequence: Synthetic oligonucleotide
cauagauuaacagucuccu

SEQ ID NO: 200926 - RNA, 19 nt, Artificial Sequence
  Description of Artificial Sequence: Synthetic oligonucleotide
ccguaaacaguaaggcugg

SEQ ID NO: 200927 - RNA, 19 nt, Artificial Sequence
  Description of Artificial Sequence: Synthetic oligonucleotide
auagauuaacagucuccua

SEQ ID NO: 200928 - RNA, 19 nt, Artificial Sequence
  Description of Artificial Sequence: Synthetic oligonucleotide
uuuguacgggacgggacac

SEQ ID NO: 200929 - RNA, 19 nt, Artificial Sequence
  Description of Artificial Sequence: Synthetic oligonucleotide
ccuauuggccagaaaaguc

SEQ ID NO: 200930 - RNA, 19 nt, Artificial Sequence
  Description of Artificial Sequence: Synthetic oligonucleotide
aguacaaugcugggccuug

SEQ ID NO: 200931 - RNA, 19 nt, Artificial Sequence
  Description of Artificial Sequence: Synthetic oligonucleotide
agaccuuacaagugucuuu

SEQ ID NO: 200932 - RNA, 19 nt, Artificial Sequence
  Description of Artificial Sequence: Synthetic oligonucleotide
aggcuuaggguuccguggu

SEQ ID NO: 200933 - RNA, 19 nt, Artificial Sequence
  Description of Artificial Sequence: Synthetic oligonucleotide
gguuccgugguucuauuuc

SEQ ID NO: 200934 - RNA, 19 nt, Artificial Sequence
  Description of Artificial Sequence: Synthetic oligonucleotide
aaacaaaggcggauacgau

SEQ ID NO: 200935 - RNA, 19 nt, Artificial Sequence
  Description of Artificial Sequence: Synthetic oligonucleotide
cccuuggcuaaacuuauag

SEQ ID NO: 200936 - RNA, 19 nt, Artificial Sequence
  Description of Artificial Sequence: Synthetic oligonucleotide
cuaagcuggaauaccgucu

SEQ ID NO: 200937 - RNA, 19 nt, Artificial Sequence
  Description of Artificial Sequence: Synthetic oligonucleotide
gguagacauucucuaagga

SEQ ID NO: 200938 - RNA, 19 nt, Artificial Sequence
  Description of Artificial Sequence: Synthetic oligonucleotide
uggcguucuuggagaauug

SEQ ID NO: 200939 - RNA, 19 nt, Artificial Sequence
  Description of Artificial Sequence: Synthetic oligonucleotide
gcaguacaaggcuucauga

SEQ ID NO: 200940 - RNA, 19 nt, Artificial Sequence
  Description of Artificial Sequence: Synthetic oligonucleotide
gugguucuauuucuaggga

SEQ ID NO: 200941 - RNA, 19 nt, Artificial Sequence
  Description of Artificial Sequence: Synthetic oligonucleotide
uggguuuguacgggacggg

SEQ ID NO: 200942 - RNA, 19 nt, Artificial Sequence
  Description of Artificial Sequence: Synthetic oligonucleotide
cugcaguacaaugcugggc

SEQ ID NO: 200943 - RNA, 19 nt, Artificial Sequence
  Description of Artificial Sequence: Synthetic oligonucleotide
guuagagggacagccacaa

SEQ ID NO: 200944 - RNA, 19 nt, Artificial Sequence
  Description of Artificial Sequence: Synthetic oligonucleotide
gaauggaauacuacacggu

SEQ ID NO: 200945 - RNA, 19 nt, Artificial Sequence
  Description of Artificial Sequence: Synthetic oligonucleotide
agucuccuaaguguaaaua

SEQ ID NO: 200946 - RNA, 19 nt, Artificial Sequence
  Description of Artificial Sequence: Synthetic oligonucleotide
guaccucuuuggugaagcc

SEQ ID NO: 200947 - RNA, 19 nt, Artificial Sequence
  Description of Artificial Sequence: Synthetic oligonucleotide
gcuauuugggaagaaggca

SEQ ID NO: 200948 - RNA, 19 nt, Artificial Sequence
  Description of Artificial Sequence: Synthetic oligonucleotide
gggauaaguugagaagugc

SEQ ID NO: 200949 - RNA, 19 nt, Artificial Sequence
  Description of Artificial Sequence: Synthetic oligonucleotide
gacauaguggagaguaaua

SEQ ID NO: 200950 - RNA, 19 nt, Artificial Sequence
  Description of Artificial Sequence: Synthetic oligonucleotide
ugcuuaaaauaugcccauc

SEQ ID NO: 200951 - RNA, 19 nt, Artificial Sequence
  Description of Artificial Sequence: Synthetic oligonucleotide
guaugcugacuacucaacu

SEQ ID NO: 200952 - RNA, 19 nt, Artificial Sequence
  Description of Artificial Sequence: Synthetic oligonucleotide
ugaaaagggcuugcugaau

SEQ ID NO: 200953 - RNA, 19 nt, Artificial Sequence
  Description of Artificial Sequence: Synthetic oligonucleotide
aggacauauguuaccagua

SEQ ID NO: 200954 - RNA, 19 nt, Artificial Sequence
  Description of Artificial Sequence: Synthetic oligonucleotide
cagagucauuaguguuugg

SEQ ID NO: 200955 - RNA, 19 nt, Artificial Sequence
  Description of Artificial Sequence: Synthetic oligonucleotide
accugucagguauauuaua

SEQ ID NO: 200956 - RNA, 19 nt, Artificial Sequence
  Description of Artificial Sequence: Synthetic oligonucleotide
acgaucccuguuuaagauu

SEQ ID NO: 200957 - RNA, 19 nt, Artificial Sequence
  Description of Artificial Sequence: Synthetic oligonucleotide
uggguugccuaggaggaau

SEQ ID NO: 200958 - RNA, 19 nt, Artificial Sequence
  Description of Artificial Sequence: Synthetic oligonucleotide
aagaggcuuaggguuccgu

SEQ ID NO: 200959 - RNA, 19 nt, Artificial Sequence
  Description of Artificial Sequence: Synthetic oligonucleotide
gggacgggcacuucaucag

SEQ ID NO: 200960 - RNA, 19 nt, Artificial Sequence
  Description of Artificial Sequence: Synthetic oligonucleotide
ggacauauguuaccaguaa

SEQ ID NO: 200961 - RNA, 19 nt, Artificial Sequence
  Description of Artificial Sequence: Synthetic oligonucleotide
ggugguguaaagggagaag

SEQ ID NO: 200962 - RNA, 19 nt, Artificial Sequence
  Description of Artificial Sequence: Synthetic oligonucleotide
ugaagccucgguacccauu

SEQ ID NO: 200963 - RNA, 19 nt, Artificial Sequence
  Description of Artificial Sequence: Synthetic oligonucleotide
cagaaucaaacacgcugca

SEQ ID NO: 200964 - RNA, 19 nt, Artificial Sequence
  Description of Artificial Sequence: Synthetic oligonucleotide
gucuaagaauggaauacua

SEQ ID NO: 200965 - RNA, 19 nt, Artificial Sequence
  Description of Artificial Sequence: Synthetic oligonucleotide
ggcguucuuggagaauugg

SEQ ID NO: 200966 - RNA, 19 nt, Artificial Sequence
  Description of Artificial Sequence: Synthetic oligonucleotide
aaucuuagauggggaugau

SEQ ID NO: 200967 - RNA, 19 nt, Artificial Sequence
  Description of Artificial Sequence: Synthetic oligonucleotide
cagguauauuauauaacau

SEQ ID NO: 200968 - RNA, 19 nt, Artificial Sequence
  Description of Artificial Sequence: Synthetic oligonucleotide
ggucugauacagagguccg

SEQ ID NO: 200969 - RNA, 19 nt, Artificial Sequence
  Description of Artificial Sequence: Synthetic oligonucleotide
uccgugguacuggaagcac

SEQ ID NO: 200970 - RNA, 19 nt, Artificial Sequence
  Description of Artificial Sequence: Synthetic oligonucleotide
cugaauggucagaaucaaa

SEQ ID NO: 200971 - RNA, 19 nt, Artificial Sequence
  Description of Artificial Sequence: Synthetic oligonucleotide
guaacaagggagggcuuuc

SEQ ID NO: 200972 - RNA, 19 nt, Artificial Sequence
  Description of Artificial Sequence: Synthetic oligonucleotide
gaccuuacaagugucuuuu

SEQ ID NO: 200973 - RNA, 19 nt, Artificial Sequence
  Description of Artificial Sequence: Synthetic oligonucleotide
gauagucuguaaauucuuu

SEQ ID NO: 200974 - RNA, 19 nt, Artificial Sequence
  Description of Artificial Sequence: Synthetic oligonucleotide
uuguacgggacgggacacc

SEQ ID NO: 200975 - RNA, 19 nt, Artificial Sequence
  Description of Artificial Sequence: Synthetic oligonucleotide
ggcuaaacuuauagaugag

SEQ ID NO: 200976 - RNA, 19 nt, Artificial Sequence
  Description of Artificial Sequence: Synthetic oligonucleotide
cugacuccacccguaaaca

SEQ ID NO: 200977 - RNA, 19 nt, Artificial Sequence
  Description of Artificial Sequence: Synthetic oligonucleotide
gugcuuagacauaaucuua

SEQ ID NO: 200978 - RNA, 19 nt, Artificial Sequence
  Description of Artificial Sequence: Synthetic oligonucleotide
ggggacgggcacuucauca

SEQ ID NO: 200979 - RNA, 19 nt, Artificial Sequence
  Description of Artificial Sequence: Synthetic oligonucleotide
uucagggauccugcuguaa

SEQ ID NO: 200980 - RNA, 19 nt, Artificial Sequence
  Description of Artificial Sequence: Synthetic oligonucleotide
ggaaguuuagggauaaguu

SEQ ID NO: 200981 - RNA, 19 nt, Artificial Sequence
  Description of Artificial Sequence: Synthetic oligonucleotide
gggcuaggaaacuauacau

SEQ ID NO: 200982 - RNA, 19 nt, Artificial Sequence
  Description of Artificial Sequence: Synthetic oligonucleotide
auaucugacuccacccgua

SEQ ID NO: 200983 - RNA, 19 nt, Artificial Sequence
  Description of Artificial Sequence: Synthetic oligonucleotide
gaauggagguccacguccu

SEQ ID NO: 200984 - RNA, 19 nt, Artificial Sequence
  Description of Artificial Sequence: Synthetic oligonucleotide
ugucaacauaugggccugu

SEQ ID NO: 200985 - RNA, 19 nt, Artificial Sequence
  Description of Artificial Sequence: Synthetic oligonucleotide
acuacacgguucacagaca

SEQ ID NO: 200986 - RNA, 19 nt, Artificial Sequence
  Description of Artificial Sequence: Synthetic oligonucleotide
ucuugccuauuggccagaa

SEQ ID NO: 200987 - RNA, 19 nt, Artificial Sequence
  Description of Artificial Sequence: Synthetic oligonucleotide
uuaggguuccgugguucua

SEQ ID NO: 200988 - RNA, 19 nt, Artificial Sequence
  Description of Artificial Sequence: Synthetic oligonucleotide
acagucuagcauagauuaa

SEQ ID NO: 200989 - RNA, 19 nt, Artificial Sequence
  Description of Artificial Sequence: Synthetic oligonucleotide
ccaugcuauuucccauugg

SEQ ID NO: 200990 - RNA, 19 nt, Artificial Sequence
  Description of Artificial Sequence: Synthetic oligonucleotide
agugaguaucuuggugaau

SEQ ID NO: 200991 - RNA, 19 nt, Artificial Sequence
  Description of Artificial Sequence: Synthetic oligonucleotide
cagacauaguggagaguaa

SEQ ID NO: 200992 - RNA, 19 nt, Artificial Sequence
  Description of Artificial Sequence: Synthetic oligonucleotide
acuauacaucccagacaga

SEQ ID NO: 200993 - RNA, 19 nt, Artificial Sequence
  Description of Artificial Sequence: Synthetic oligonucleotide
acacaugauuuaggcaaua

SEQ ID NO: 200994 - RNA, 19 nt, Artificial Sequence
  Description of Artificial Sequence: Synthetic oligonucleotide
ccugucagguauauuauau

SEQ ID NO: 200995 - RNA, 19 nt, Artificial Sequence
  Description of Artificial Sequence: Synthetic oligonucleotide
gaauaccgucuuauucugu

SEQ ID NO: 200996 - RNA, 19 nt, Artificial Sequence
  Description of Artificial Sequence: Synthetic oligonucleotide
ccgucuuauucuguaauga

SEQ ID NO: 200997 - RNA, 19 nt, Artificial Sequence
  Description of Artificial Sequence: Synthetic oligonucleotide
aggguuccgugguucuauu

SEQ ID NO: 200998 - RNA, 19 nt, Artificial Sequence
  Description of Artificial Sequence: Synthetic oligonucleotide
guggcguucuuggagaauu

SEQ ID NO: 200999 - RNA, 19 nt, Artificial Sequence
  Description of Artificial Sequence: Synthetic oligonucleotide
ggauacgaucccuguuuaa

SEQ ID NO: 201000 - RNA, 19 nt, Artificial Sequence
  Description of Artificial Sequence: Synthetic oligonucleotide
gcugaauggucagaaucaa

SEQ ID NO: 201001 - RNA, 19 nt, Artificial Sequence
  Description of Artificial Sequence: Synthetic oligonucleotide
ggaaggaggaugacagucu

SEQ ID NO: 201002 - RNA, 19 nt, Artificial Sequence
  Description of Artificial Sequence: Synthetic oligonucleotide
cuugccuauuggccagaaa

SEQ ID NO: 201003 - RNA, 19 nt, Artificial Sequence
  Description of Artificial Sequence: Synthetic oligonucleotide
ggaauacuacacgguucac

SEQ ID NO: 201004 - RNA, 19 nt, Artificial Sequence
  Description of Artificial Sequence: Synthetic oligonucleotide
cgggcacuucaucagugcc

SEQ ID NO: 201005 - RNA, 19 nt, Artificial Sequence
  Description of Artificial Sequence: Synthetic oligonucleotide
gcggauacgaucccuguuu

SEQ ID NO: 201006 - RNA, 19 nt, Artificial Sequence
  Description of Artificial Sequence: Synthetic oligonucleotide
caaagaccuuaagcaaagu

SEQ ID NO: 201007 - RNA, 19 nt, Artificial Sequence
  Description of Artificial Sequence: Synthetic oligonucleotide
ccugugucagcgguggcga

SEQ ID NO: 201008 - RNA, 19 nt, Artificial Sequence
  Description of Artificial Sequence: Synthetic oligonucleotide
ccgucauguuaaugacaug

SEQ ID NO: 201009 - RNA, 19 nt, Artificial Sequence
  Description of Artificial Sequence: Synthetic oligonucleotide
ggacgggcacuucaucagu

SEQ ID NO: 201010 - RNA, 19 nt, Artificial Sequence
  Description of Artificial Sequence: Synthetic oligonucleotide
guacgggacgggacaccca

SEQ ID NO: 201011 - RNA, 19 nt, Artificial Sequence
  Description of Artificial Sequence: Synthetic oligonucleotide
gagcaguacaaggcuucau

SEQ ID NO: 201012 - RNA, 19 nt, Artificial Sequence
  Description of Artificial Sequence: Synthetic oligonucleotide
gcaguacaaugcugggccu

SEQ ID NO: 201013 - RNA, 19 nt, Artificial Sequence
  Description of Artificial Sequence: Synthetic oligonucleotide
ggucagaaucaaacacgcu

SEQ ID NO: 201014 - RNA, 19 nt, Artificial Sequence
  Description of Artificial Sequence: Synthetic oligonucleotide
ccucgguacccauucaauu

SEQ ID NO: 201015 - RNA, 19 nt, Artificial Sequence
  Description of Artificial Sequence: Synthetic oligonucleotide
caguacaaugcugggccuu

SEQ ID NO: 201016 - RNA, 19 nt, Artificial Sequence
  Description of Artificial Sequence: Synthetic oligonucleotide
cccguuaucucugccacuu

SEQ ID NO: 201017 - RNA, 19 nt, Artificial Sequence
  Description of Artificial Sequence: Synthetic oligonucleotide
ggguuccgugguucuauuu

SEQ ID NO: 201018 - RNA, 19 nt, Artificial Sequence
  Description of Artificial Sequence: Synthetic oligonucleotide
gccucgguacccauucaau

SEQ ID NO: 201019 - RNA, 19 nt, Artificial Sequence
  Description of Artificial Sequence: Synthetic oligonucleotide
ccggacgcaggaggaggug

SEQ ID NO: 201020 - RNA, 19 nt, Artificial Sequence
  Description of Artificial Sequence: Synthetic oligonucleotide
ggcuuaggguuccgugguu

SEQ ID NO: 201021 - RNA, 19 nt, Artificial Sequence
  Description of Artificial Sequence: Synthetic oligonucleotide
gcccuuggcuaaacuuaua

SEQ ID NO: 201022 - RNA, 19 nt, Artificial Sequence
  Description of Artificial Sequence: Synthetic oligonucleotide
ccccguuaucucugccacu

SEQ ID NO: 201023 - RNA, 19 nt, Artificial Sequence
  Description of Artificial Sequence: Synthetic oligonucleotide
cgguacccauucaauucau

SEQ ID NO: 201024 - RNA, 19 nt, Artificial Sequence
  Description of Artificial Sequence: Synthetic oligonucleotide
aauaauucccuuuagggcc

SEQ ID NO: 201025 - RNA, 19 nt, Artificial Sequence
  Description of Artificial Sequence: Synthetic oligonucleotide
aaacaaagcacuuugagga

SEQ ID NO: 201026 - RNA, 19 nt, Artificial Sequence
  Description of Artificial Sequence: Synthetic oligonucleotide
agauuaugcuauuagaagc

SEQ ID NO: 201027 - RNA, 19 nt, Artificial Sequence
  Description of Artificial Sequence: Synthetic oligonucleotide
uauauucaggcaaucaggg

SEQ ID NO: 201028 - RNA, 19 nt, Artificial Sequence
  Description of Artificial Sequence: Synthetic oligonucleotide
agaaaugucagcuguauag

SEQ ID NO: 201029 - RNA, 19 nt, Artificial Sequence
  Description of Artificial Sequence: Synthetic oligonucleotide
ucuauauucaggcaaucag

SEQ ID NO: 201030 - RNA, 19 nt, Artificial Sequence
  Description of Artificial Sequence: Synthetic oligonucleotide
aauugugcuacaccacacc

SEQ ID NO: 201031 - RNA, 19 nt, Artificial Sequence
  Description of Artificial Sequence: Synthetic oligonucleotide
uauucaggcaaucagggug

SEQ ID NO: 201032 - RNA, 19 nt, Artificial Sequence
  Description of Artificial Sequence: Synthetic oligonucleotide
ugacccuucgccaacaccg

SEQ ID NO: 201033 - RNA, 19 nt, Artificial Sequence
  Description of Artificial Sequence: Synthetic oligonucleotide
uuaaucuaaaauggaaacg

SEQ ID NO: 201034 - RNA, 19 nt, Artificial Sequence
  Description of Artificial Sequence: Synthetic oligonucleotide
gaauaauucccuuuagggc

SEQ ID NO: 201035 - RNA, 19 nt, Artificial Sequence
  Description of Artificial Sequence: Synthetic oligonucleotide
auaguugaaagucagcucu

SEQ ID NO: 201036 - RNA, 19 nt, Artificial Sequence
  Description of Artificial Sequence: Synthetic oligonucleotide
ucaaguguagcagugaugc

SEQ ID NO: 201037 - RNA, 19 nt, Artificial Sequence
  Description of Artificial Sequence: Synthetic oligonucleotide
aaaagcguuucacauacca

SEQ ID NO: 201038 - RNA, 19 nt, Artificial Sequence
  Description of Artificial Sequence: Synthetic oligonucleotide
ugaacaaugcccauuuccc

SEQ ID NO: 201039 - RNA, 19 nt, Artificial Sequence
  Description of Artificial Sequence: Synthetic oligonucleotide
aaugaguuggggcacaggu

SEQ ID NO: 201040 - RNA, 19 nt, Artificial Sequence
  Description of Artificial Sequence: Synthetic oligonucleotide
aguucuuuggucugucucc

SEQ ID NO: 201041 - RNA, 19 nt, Artificial Sequence
  Description of Artificial Sequence: Synthetic oligonucleotide
auaaucuuuagacccaaag

SEQ ID NO: 201042 - RNA, 19 nt, Artificial Sequence
  Description of Artificial Sequence: Synthetic oligonucleotide
uuugggauggcaaacuucu

SEQ ID NO: 201043 - RNA, 19 nt, Artificial Sequence
  Description of Artificial Sequence: Synthetic oligonucleotide
agguuugccacauacauca

SEQ ID NO: 201044 - RNA, 19 nt, Artificial Sequence
  Description of Artificial Sequence: Synthetic oligonucleotide
uugacuucauuaaaacgag

SEQ ID NO: 201045 - RNA, 19 nt, Artificial Sequence
  Description of Artificial Sequence: Synthetic oligonucleotide
aagcguuucacauaccagu

SEQ ID NO: 201046 - RNA, 19 nt, Artificial Sequence
  Description of Artificial Sequence: Synthetic oligonucleotide
uccucuacugacaugcuag

SEQ ID NO: 201047 - RNA, 19 nt, Artificial Sequence
  Description of Artificial Sequence: Synthetic oligonucleotide
uugaagacucuuccgaucc

SEQ ID NO: 201048 - RNA, 19 nt, Artificial Sequence
  Description of Artificial Sequence: Synthetic oligonucleotide
auugacguggguguggugc

SEQ ID NO: 201049 - RNA, 19 nt, Artificial Sequence
  Description of Artificial Sequence: Synthetic oligonucleotide
auagaucuggacuuuacca

SEQ ID NO: 201050 - RNA, 19 nt, Artificial Sequence
  Description of Artificial Sequence: Synthetic oligonucleotide
ucugaugucccuuuuggca

SEQ ID NO: 201051 - RNA, 19 nt, Artificial Sequence
  Description of Artificial Sequence: Synthetic oligonucleotide
uauagaucuggacuuuacc

SEQ ID NO: 201052 - RNA, 19 nt, Artificial Sequence
  Description of Artificial Sequence: Synthetic oligonucleotide
gacaucagagaaaacagcc

SEQ ID NO: 201053 - RNA, 19 nt, Artificial Sequence
  Description of Artificial Sequence: Synthetic oligonucleotide
uaccauauggcuuauucac

SEQ ID NO: 201054 - RNA, 19 nt, Artificial Sequence
  Description of Artificial Sequence: Synthetic oligonucleotide
uuugacuucagugauucug

SEQ ID NO: 201055 - RNA, 19 nt, Artificial Sequence
  Description of Artificial Sequence: Synthetic oligonucleotide
aaacaaucgagguuauagu

SEQ ID NO: 201056 - RNA, 19 nt, Artificial Sequence
  Description of Artificial Sequence: Synthetic oligonucleotide
cuuccgaucccucugaccc

SEQ ID NO: 201057 - RNA, 19 nt, Artificial Sequence
  Description of Artificial Sequence: Synthetic oligonucleotide
cuugauauguuuguauggg

SEQ ID NO: 201058 - RNA, 19 nt, Artificial Sequence
  Description of Artificial Sequence: Synthetic oligonucleotide
uugauauguuuguaugggg

SEQ ID NO: 201059 - RNA, 19 nt, Artificial Sequence
  Description of Artificial Sequence: Synthetic oligonucleotide
uggacuuuaccauauggcu

SEQ ID NO: 201060 - RNA, 19 nt, Artificial Sequence
  Description of Artificial Sequence: Synthetic oligonucleotide
aacaaucgagguuauaguu

SEQ ID NO: 201061 - RNA, 19 nt, Artificial Sequence
  Description of Artificial Sequence: Synthetic oligonucleotide
gagguuauaguugaaaguc

SEQ ID NO: 201062 - RNA, 19 nt, Artificial Sequence
  Description of Artificial Sequence: Synthetic oligonucleotide
cagggcaucggacacaucg

SEQ ID NO: 201063 - RNA, 19 nt, Artificial Sequence
  Description of Artificial Sequence: Synthetic oligonucleotide
aguaggauugcccauccug

SEQ ID NO: 201064 - RNA, 19 nt, Artificial Sequence
  Description of Artificial Sequence: Synthetic oligonucleotide
cucacaauuggguuggcag

SEQ ID NO: 201065 - RNA, 19 nt, Artificial Sequence
  Description of Artificial Sequence: Synthetic oligonucleotide
gaugcguccaguaauaauc

SEQ ID NO: 201066 - RNA, 19 nt, Artificial Sequence
  Description of Artificial Sequence: Synthetic oligonucleotide
gaggaauugugcuacacca

SEQ ID NO: 201067 - RNA, 19 nt, Artificial Sequence
  Description of Artificial Sequence: Synthetic oligonucleotide
aaguguagcagugaugcug

SEQ ID NO: 201068 - RNA, 19 nt, Artificial Sequence
  Description of Artificial Sequence: Synthetic oligonucleotide
cauuuuaccuuugauggcc

SEQ ID NO: 201069 - RNA, 19 nt, Artificial Sequence
  Description of Artificial Sequence: Synthetic oligonucleotide
cauuaaaacgagcuucagc

SEQ ID NO: 201070 - RNA, 19 nt, Artificial Sequence
  Description of Artificial Sequence: Synthetic oligonucleotide
ugaccaagggcuauuugcc

SEQ ID NO: 201071 - RNA, 19 nt, Artificial Sequence
  Description of Artificial Sequence: Synthetic oligonucleotide
uccuuacagaaugaguugg

SEQ ID NO: 201072 - RNA, 19 nt, Artificial Sequence
  Description of Artificial Sequence: Synthetic oligonucleotide
ugcauauuugauucuugcc

SEQ ID NO: 201073 - RNA, 19 nt, Artificial Sequence
  Description of Artificial Sequence: Synthetic oligonucleotide
caugaaucuugaauaauuc

SEQ ID NO: 201074 - RNA, 19 nt, Artificial Sequence
  Description of Artificial Sequence: Synthetic oligonucleotide
cuggacuuuaccauauggc

SEQ ID NO: 201075 - RNA, 19 nt, Artificial Sequence
  Description of Artificial Sequence: Synthetic oligonucleotide
augagaggaauugugcuac

SEQ ID NO: 201076 - RNA, 19 nt, Artificial Sequence
  Description of Artificial Sequence: Synthetic oligonucleotide
aggagcaaaauaaaugauc

SEQ ID NO: 201077 - RNA, 19 nt, Artificial Sequence
  Description of Artificial Sequence: Synthetic oligonucleotide
aauggaaacgggagggcac

SEQ ID NO: 201078 - RNA, 19 nt, Artificial Sequence
  Description of Artificial Sequence: Synthetic oligonucleotide
ugggauggcaaacuucugc

SEQ ID NO: 201079 - RNA, 19 nt, Artificial Sequence
  Description of Artificial Sequence: Synthetic oligonucleotide
gacguugggucucagauuc

SEQ ID NO: 201080 - RNA, 19 nt, Artificial Sequence
  Description of Artificial Sequence: Synthetic oligonucleotide
uugacguugggucucagau

SEQ ID NO: 201081 - RNA, 19 nt, Artificial Sequence
  Description of Artificial Sequence: Synthetic oligonucleotide
uuaacaaauucucccuuuc

SEQ ID NO: 201082 - RNA, 19 nt, Artificial Sequence
  Description of Artificial Sequence: Synthetic oligonucleotide
cuaagggugaccuuuaaaa

SEQ ID NO: 201083 - RNA, 19 nt, Artificial Sequence
  Description of Artificial Sequence: Synthetic oligonucleotide
ugaaacacugguucuggca

SEQ ID NO: 201084 - RNA, 19 nt, Artificial Sequence
  Description of Artificial Sequence: Synthetic oligonucleotide
ugaggauugagguguagcu

SEQ ID NO: 201085 - RNA, 19 nt, Artificial Sequence
  Description of Artificial Sequence: Synthetic oligonucleotide
accaguuaaucuucaauca

SEQ ID NO: 201086 - RNA, 19 nt, Artificial Sequence
  Description of Artificial Sequence: Synthetic oligonucleotide
acaugucauagcauuaugg

SEQ ID NO: 201087 - RNA, 19 nt, Artificial Sequence
  Description of Artificial Sequence: Synthetic oligonucleotide
ucccuuuuggcaaccaggc

SEQ ID NO: 201088 - RNA, 19 nt, Artificial Sequence
  Description of Artificial Sequence: Synthetic oligonucleotide
uguuccuuacagaaugagu

SEQ ID NO: 201089 - RNA, 19 nt, Artificial Sequence
  Description of Artificial Sequence: Synthetic oligonucleotide
ucccauuauaggcagggcu

SEQ ID NO: 201090 - RNA, 19 nt, Artificial Sequence
  Description of Artificial Sequence: Synthetic oligonucleotide
gguaaauuuggcuuuccgc

SEQ ID NO: 201091 - RNA, 19 nt, Artificial Sequence
  Description of Artificial Sequence: Synthetic oligonucleotide
uucaccuugauauguuugu

SEQ ID NO: 201092 - RNA, 19 nt, Artificial Sequence
  Description of Artificial Sequence: Synthetic oligonucleotide
aguuugacccaaaugaugu

SEQ ID NO: 201093 - RNA, 19 nt, Artificial Sequence
  Description of Artificial Sequence: Synthetic oligonucleotide
caaaucaugcucacagcag

SEQ ID NO: 201094 - RNA, 19 nt, Artificial Sequence
  Description of Artificial Sequence: Synthetic oligonucleotide
ucuugguacuucuugcgga

SEQ ID NO: 201095 - RNA, 19 nt, Artificial Sequence
  Description of Artificial Sequence: Synthetic oligonucleotide
aacuuuaaucuaaaaugga

SEQ ID NO: 201096 - RNA, 19 nt, Artificial Sequence
  Description of Artificial Sequence: Synthetic oligonucleotide
cuuuuggcaaccaggcccc

SEQ ID NO: 201097 - RNA, 19 nt, Artificial Sequence
  Description of Artificial Sequence: Synthetic oligonucleotide
uuugacccaaaugaugucu

SEQ ID NO: 201098 - RNA, 19 nt, Artificial Sequence
  Description of Artificial Sequence: Synthetic oligonucleotide
aaagcucuauacauuucag

SEQ ID NO: 201099 - RNA, 19 nt, Artificial Sequence
  Description of Artificial Sequence: Synthetic oligonucleotide
gaagcacucauccucugac

SEQ ID NO: 201100 - RNA, 19 nt, Artificial Sequence
  Description of Artificial Sequence: Synthetic oligonucleotide
aagguaaauuuggcuuucc

SEQ ID NO: 201101 - RNA, 19 nt, Artificial Sequence
  Description of Artificial Sequence: Synthetic oligonucleotide
aaguuugacccaaaugaug

SEQ ID NO: 201102 - RNA, 19 nt, Artificial Sequence
  Description of Artificial Sequence: Synthetic oligonucleotide
acacgaagcaccaacucac

SEQ ID NO: 201103 - RNA, 19 nt, Artificial Sequence
  Description of Artificial Sequence: Synthetic oligonucleotide
ggauuugaaggguuugugg

SEQ ID NO: 201104 - RNA, 19 nt, Artificial Sequence
  Description of Artificial Sequence: Synthetic oligonucleotide
ucagcuguauagaucugga

SEQ ID NO: 201105 - RNA, 19 nt, Artificial Sequence
  Description of Artificial Sequence: Synthetic oligonucleotide
gagugugcagcugacaagc

SEQ ID NO: 201106 - RNA, 19 nt, Artificial Sequence
  Description of Artificial Sequence: Synthetic oligonucleotide
auugugcuacaccacacca

SEQ ID NO: 201107 - RNA, 19 nt, Artificial Sequence
  Description of Artificial Sequence: Synthetic oligonucleotide
ucaauuauucgguccuugu

SEQ ID NO: 201108 - RNA, 19 nt, Artificial Sequence
  Description of Artificial Sequence: Synthetic oligonucleotide
aacgaaaggcagucccauc

SEQ ID NO: 201109 - RNA, 19 nt, Artificial Sequence
  Description of Artificial Sequence: Synthetic oligonucleotide
ccaaguuugacccaaauga

SEQ ID NO: 201110 - RNA, 19 nt, Artificial Sequence
  Description of Artificial Sequence: Synthetic oligonucleotide
aaagcguuucacauaccag

SEQ ID NO: 201111 - RNA, 19 nt, Artificial Sequence
  Description of Artificial Sequence: Synthetic oligonucleotide
acgaaaggcagucccaucu

SEQ ID NO: 201112 - RNA, 19 nt, Artificial Sequence
  Description of Artificial Sequence: Synthetic oligonucleotide
uuuugggauggcaaacuuc

SEQ ID NO: 201113 - RNA, 19 nt, Artificial Sequence
  Description of Artificial Sequence: Synthetic oligonucleotide
ggucaaguccacaaaaggg

SEQ ID NO: 201114 - RNA, 19 nt, Artificial Sequence
  Description of Artificial Sequence: Synthetic oligonucleotide
uauggcuuauucaccuuga

SEQ ID NO: 201115 - RNA, 19 nt, Artificial Sequence
  Description of Artificial Sequence: Synthetic oligonucleotide
auucgguccuugucuaugg

SEQ ID NO: 201116 - RNA, 19 nt, Artificial Sequence
  Description of Artificial Sequence: Synthetic oligonucleotide
agugaaacacugguucugg

SEQ ID NO: 201117 - RNA, 19 nt, Artificial Sequence
  Description of Artificial Sequence: Synthetic oligonucleotide
ugccauacacuccucuuca

SEQ ID NO: 201118 - RNA, 19 nt, Artificial Sequence
  Description of Artificial Sequence: Synthetic oligonucleotide
uagaucuggacuuuaccau

SEQ ID NO: 201119 - RNA, 19 nt, Artificial Sequence
  Description of Artificial Sequence: Synthetic oligonucleotide
ugacgaguccaccauuucu

SEQ ID NO: 201120 - RNA, 19 nt, Artificial Sequence
  Description of Artificial Sequence: Synthetic oligonucleotide
uugcagugcguucuugaag

SEQ ID NO: 201121 - RNA, 19 nt, Artificial Sequence
  Description of Artificial Sequence: Synthetic oligonucleotide
ucucaugugcauauuugau

SEQ ID NO: 201122 - RNA, 19 nt, Artificial Sequence
  Description of Artificial Sequence: Synthetic oligonucleotide
ucgugcuucauuuucugaa

SEQ ID NO: 201123 - RNA, 19 nt, Artificial Sequence
  Description of Artificial Sequence: Synthetic oligonucleotide
uaaauuuggcuuuccgcuc

SEQ ID NO: 201124 - RNA, 19 nt, Artificial Sequence
  Description of Artificial Sequence: Synthetic oligonucleotide
gguucaugaaucuugaaua

SEQ ID NO: 201125 - RNA, 19 nt, Artificial Sequence
  Description of Artificial Sequence: Synthetic oligonucleotide
uuuagacacucagaaucag

SEQ ID NO: 201126 - RNA, 19 nt, Artificial Sequence
  Description of Artificial Sequence: Synthetic oligonucleotide
uguacaugucauagcauua

SEQ ID NO: 201127 - RNA, 19 nt, Artificial Sequence
  Description of Artificial Sequence: Synthetic oligonucleotide
aagguuugccacauacauc

SEQ ID NO: 201128 - RNA, 19 nt, Artificial Sequence
  Description of Artificial Sequence: Synthetic oligonucleotide
ugacuucauuaaaacgagc

SEQ ID NO: 201129 - RNA, 19 nt, Artificial Sequence
  Description of Artificial Sequence: Synthetic oligonucleotide
gugcagauuaugcuauuag

SEQ ID NO: 201130 - RNA, 19 nt, Artificial Sequence
  Description of Artificial Sequence: Synthetic oligonucleotide
cuucuugcggauucugccc

SEQ ID NO: 201131 - RNA, 19 nt, Artificial Sequence
  Description of Artificial Sequence: Synthetic oligonucleotide
accauauggcuuauucacc

SEQ ID NO: 201132 - RNA, 19 nt, Artificial Sequence
  Description of Artificial Sequence: Synthetic oligonucleotide
ugagugugcagcugacaag

SEQ ID NO: 201133 - RNA, 19 nt, Artificial Sequence
  Description of Artificial Sequence: Synthetic oligonucleotide
acggguucucaucuguggg

SEQ ID NO: 201134 - RNA, 19 nt, Artificial Sequence
  Description of Artificial Sequence: Synthetic oligonucleotide
ccuuuuggcaaccaggccc

SEQ ID NO: 201135 - RNA, 19 nt, Artificial Sequence
  Description of Artificial Sequence: Synthetic oligonucleotide
acaaucgagguuauaguug

SEQ ID NO: 201136 - RNA, 19 nt, Artificial Sequence
  Description of Artificial Sequence: Synthetic oligonucleotide
cacaucgcaucauuuuacc

SEQ ID NO: 201137 - RNA, 19 nt, Artificial Sequence
  Description of Artificial Sequence: Synthetic oligonucleotide
caaucgagguuauaguuga

SEQ ID NO: 201138 - RNA, 19 nt, Artificial Sequence
  Description of Artificial Sequence: Synthetic oligonucleotide
gauugcccauccugggugg

SEQ ID NO: 201139 - RNA, 19 nt, Artificial Sequence
  Description of Artificial Sequence: Synthetic oligonucleotide
cacagcaguaggauugccc

SEQ ID NO: 201140 - RNA, 19 nt, Artificial Sequence
  Description of Artificial Sequence: Synthetic oligonucleotide
gauucuugccauacacucc

SEQ ID NO: 201141 - RNA, 19 nt, Artificial Sequence
  Description of Artificial Sequence: Synthetic oligonucleotide
ugugcuugccuucccauua

SEQ ID NO: 201142 - RNA, 19 nt, Artificial Sequence
  Description of Artificial Sequence: Synthetic oligonucleotide
aucaaauccugacugggua

SEQ ID NO: 201143 - RNA, 19 nt, Artificial Sequence
  Description of Artificial Sequence: Synthetic oligonucleotide
auagagcuaagggugaccu

SEQ ID NO: 201144 - RNA, 19 nt, Artificial Sequence
  Description of Artificial Sequence: Synthetic oligonucleotide
auuggguuggcagcugugg

SEQ ID NO: 201145 - RNA, 19 nt, Artificial Sequence
  Description of Artificial Sequence: Synthetic oligonucleotide
ggcuuauucaccuugauau

SEQ ID NO: 201146 - RNA, 19 nt, Artificial Sequence
  Description of Artificial Sequence: Synthetic oligonucleotide
ucuugaagacucuuccgau

SEQ ID NO: 201147 - RNA, 19 nt, Artificial Sequence
  Description of Artificial Sequence: Synthetic oligonucleotide
auggaaacgggagggcacc

SEQ ID NO: 201148 - RNA, 19 nt, Artificial Sequence
  Description of Artificial Sequence: Synthetic oligonucleotide
gacuucauuaaaacgagcu

SEQ ID NO: 201149 - RNA, 19 nt, Artificial Sequence
  Description of Artificial Sequence: Synthetic oligonucleotide
agaaucagagccacacggg

SEQ ID NO: 201150 - RNA, 19 nt, Artificial Sequence
  Description of Artificial Sequence: Synthetic oligonucleotide
cuugaagacucuuccgauc

SEQ ID NO: 201151 - RNA, 19 nt, Artificial Sequence
  Description of Artificial Sequence: Synthetic oligonucleotide
uuauucaccuugauauguu

SEQ ID NO: 201152 - RNA, 19 nt, Artificial Sequence
  Description of Artificial Sequence: Synthetic oligonucleotide
caauuauucgguccuuguc

SEQ ID NO: 201153 - RNA, 19 nt, Artificial Sequence
  Description of Artificial Sequence: Synthetic oligonucleotide
uucacuggcuccugacgag

SEQ ID NO: 201154 - RNA, 19 nt, Artificial Sequence
  Description of Artificial Sequence: Synthetic oligonucleotide
uuuacccuuuuccucugaa

SEQ ID NO: 201155 - RNA, 19 nt, Artificial Sequence
  Description of Artificial Sequence: Synthetic oligonucleotide
auuauucgguccuugucua

SEQ ID NO: 201156 - RNA, 19 nt, Artificial Sequence
  Description of Artificial Sequence: Synthetic oligonucleotide
uauucgguccuugucuaug

SEQ ID NO: 201157 - RNA, 19 nt, Artificial Sequence
  Description of Artificial Sequence: Synthetic oligonucleotide
ucucgugcuucauuuucug

SEQ ID NO: 201158 - RNA, 19 nt, Artificial Sequence
  Description of Artificial Sequence: Synthetic oligonucleotide
aucgcaucauuuuaccuuu

SEQ ID NO: 201159 - RNA, 19 nt, Artificial Sequence
  Description of Artificial Sequence: Synthetic oligonucleotide
cacggguucucaucugugg

SEQ ID NO: 201160 - RNA, 19 nt, Artificial Sequence
  Description of Artificial Sequence: Synthetic oligonucleotide
auacaucacagugaugcca

SEQ ID NO: 201161 - RNA, 19 nt, Artificial Sequence
  Description of Artificial Sequence: Synthetic oligonucleotide
uuaugggcuggguccuugg

SEQ ID NO: 201162 - RNA, 19 nt, Artificial Sequence
  Description of Artificial Sequence: Synthetic oligonucleotide
cauagcauuaugggcuggg

SEQ ID NO: 201163 - RNA, 19 nt, Artificial Sequence
  Description of Artificial Sequence: Synthetic oligonucleotide
caacucacauugacguggg

SEQ ID NO: 201164 - RNA, 19 nt, Artificial Sequence
  Description of Artificial Sequence: Synthetic oligonucleotide
ucugaccaagggcuauuug

SEQ ID NO: 201165 - RNA, 19 nt, Artificial Sequence
  Description of Artificial Sequence: Synthetic oligonucleotide
gguacuggcgcuuagugaa

SEQ ID NO: 201166 - RNA, 19 nt, Artificial Sequence
  Description of Artificial Sequence: Synthetic oligonucleotide
ucugcccucaaaucaugcu

SEQ ID NO: 201167 - RNA, 19 nt, Artificial Sequence
  Description of Artificial Sequence: Synthetic oligonucleotide
guaugggaauacucgugcc

SEQ ID NO: 201168 - RNA, 19 nt, Artificial Sequence
  Description of Artificial Sequence: Synthetic oligonucleotide
ucuugguguuccuuacaga

SEQ ID NO: 201169 - RNA, 19 nt, Artificial Sequence
  Description of Artificial Sequence: Synthetic oligonucleotide
aucuauauucaggcaauca

SEQ ID NO: 201170 - RNA, 19 nt, Artificial Sequence
  Description of Artificial Sequence: Synthetic oligonucleotide
ucccgcugaaguuugacuu

SEQ ID NO: 201171 - RNA, 19 nt, Artificial Sequence
  Description of Artificial Sequence: Synthetic oligonucleotide
aggguacuggcgcuuagug

SEQ ID NO: 201172 - RNA, 19 nt, Artificial Sequence
  Description of Artificial Sequence: Synthetic oligonucleotide
caucaggauagagcuaagg

SEQ ID NO: 201173 - RNA, 19 nt, Artificial Sequence
  Description of Artificial Sequence: Synthetic oligonucleotide
acaucgcaucauuuuaccu

SEQ ID NO: 201174 - RNA, 19 nt, Artificial Sequence
  Description of Artificial Sequence: Synthetic oligonucleotide
aaggagcaaaauaaaugau

SEQ ID NO: 201175 - RNA, 19 nt, Artificial Sequence
  Description of Artificial Sequence: Synthetic oligonucleotide
guuuagacacucagaauca

SEQ ID NO: 201176 - RNA, 19 nt, Artificial Sequence
  Description of Artificial Sequence: Synthetic oligonucleotide
agaacauaggcuguuucaa

SEQ ID NO: 201177 - RNA, 19 nt, Artificial Sequence
  Description of Artificial Sequence: Synthetic oligonucleotide
uggcuuauucaccuugaua

SEQ ID NO: 201178 - RNA, 19 nt, Artificial Sequence
  Description of Artificial Sequence: Synthetic oligonucleotide
ggauucugcccucaaauca

SEQ ID NO: 201179 - RNA, 19 nt, Artificial Sequence
  Description of Artificial Sequence: Synthetic oligonucleotide
ucugccggccaccaucugu

SEQ ID NO: 201180 - RNA, 19 nt, Artificial Sequence
  Description of Artificial Sequence: Synthetic oligonucleotide
gacgaguccaccauuucuc

SEQ ID NO: 201181 - RNA, 19 nt, Artificial Sequence
  Description of Artificial Sequence: Synthetic oligonucleotide
aggaauugugcuacaccac

SEQ ID NO: 201182 - RNA, 19 nt, Artificial Sequence
  Description of Artificial Sequence: Synthetic oligonucleotide
auaucuauauucaggcaau

SEQ ID NO: 201183 - RNA, 19 nt, Artificial Sequence
  Description of Artificial Sequence: Synthetic oligonucleotide
acaaugcccauuucccacu

SEQ ID NO: 201184 - RNA, 19 nt, Artificial Sequence
  Description of Artificial Sequence: Synthetic oligonucleotide
agcucaccaacauauucau

SEQ ID NO: 201185 - RNA, 19 nt, Artificial Sequence
  Description of Artificial Sequence: Synthetic oligonucleotide
aucaauuauucgguccuug

SEQ ID NO: 201186 - RNA, 19 nt, Artificial Sequence
  Description of Artificial Sequence: Synthetic oligonucleotide
gguacagaacuuucgguca

SEQ ID NO: 201187 - RNA, 19 nt, Artificial Sequence
  Description of Artificial Sequence: Synthetic oligonucleotide
ccaacucacauugacgugg

SEQ ID NO: 201188 - RNA, 19 nt, Artificial Sequence
  Description of Artificial Sequence: Synthetic oligonucleotide
auaggcaacagggcaucgg

SEQ ID NO: 201189 - RNA, 19 nt, Artificial Sequence
  Description of Artificial Sequence: Synthetic oligonucleotide
cacugaacauccugcugcc

SEQ ID NO: 201190 - RNA, 19 nt, Artificial Sequence
  Description of Artificial Sequence: Synthetic oligonucleotide
agagcuaagggugaccuuu

SEQ ID NO: 201191 - RNA, 19 nt, Artificial Sequence
  Description of Artificial Sequence: Synthetic oligonucleotide
uugacguggguguggugcc

SEQ ID NO: 201192 - RNA, 19 nt, Artificial Sequence
  Description of Artificial Sequence: Synthetic oligonucleotide
cugcccucaaaucaugcuc

SEQ ID NO: 201193 - RNA, 19 nt, Artificial Sequence
  Description of Artificial Sequence: Synthetic oligonucleotide
ugaugcguccaguaauaau

SEQ ID NO: 201194 - RNA, 19 nt, Artificial Sequence
  Description of Artificial Sequence: Synthetic oligonucleotide
uucgccaacaccgccuucu

SEQ ID NO: 201195 - RNA, 19 nt, Artificial Sequence
  Description of Artificial Sequence: Synthetic oligonucleotide
ucugugacccuucgccaac

SEQ ID NO: 201196 - RNA, 19 nt, Artificial Sequence
  Description of Artificial Sequence: Synthetic oligonucleotide
agggccgcuugcccaagcc

SEQ ID NO: 201197 - RNA, 19 nt, Artificial Sequence
  Description of Artificial Sequence: Synthetic oligonucleotide
agccacacggguucucauc

SEQ ID NO: 201198 - RNA, 19 nt, Artificial Sequence
  Description of Artificial Sequence: Synthetic oligonucleotide
uggcgcuuagugaaacacu

SEQ ID NO: 201199 - RNA, 19 nt, Artificial Sequence
  Description of Artificial Sequence: Synthetic oligonucleotide
uuuuacccuuuuccucuga

SEQ ID NO: 201200 - RNA, 19 nt, Artificial Sequence
  Description of Artificial Sequence: Synthetic oligonucleotide
uucugugacccuucgccaa

SEQ ID NO: 201201 - RNA, 19 nt, Artificial Sequence
  Description of Artificial Sequence: Synthetic oligonucleotide
aggguuuguggcauggcag

SEQ ID NO: 201202 - RNA, 19 nt, Artificial Sequence
  Description of Artificial Sequence: Synthetic oligonucleotide
gaaucagagccacacgggu

SEQ ID NO: 201203 - RNA, 19 nt, Artificial Sequence
  Description of Artificial Sequence: Synthetic oligonucleotide
uuagcuacuugaggauuga

SEQ ID NO: 201204 - RNA, 19 nt, Artificial Sequence
  Description of Artificial Sequence: Synthetic oligonucleotide
cagggaauucuccaaucuc

SEQ ID NO: 201205 - RNA, 19 nt, Artificial Sequence
  Description of Artificial Sequence: Synthetic oligonucleotide
acgggagggcaccuugacg

SEQ ID NO: 201206 - RNA, 19 nt, Artificial Sequence
  Description of Artificial Sequence: Synthetic oligonucleotide
ugccaucaggcauaucuau

SEQ ID NO: 201207 - RNA, 19 nt, Artificial Sequence
  Description of Artificial Sequence: Synthetic oligonucleotide
accaacucacauugacgug

SEQ ID NO: 201208 - RNA, 19 nt, Artificial Sequence
  Description of Artificial Sequence: Synthetic oligonucleotide
auuauaggcagggcuggcu

SEQ ID NO: 201209 - RNA, 19 nt, Artificial Sequence
  Description of Artificial Sequence: Synthetic oligonucleotide
acccuucgccaacaccgcc

SEQ ID NO: 201210 - RNA, 19 nt, Artificial Sequence
  Description of Artificial Sequence: Synthetic oligonucleotide
accgacagacugucuuuuc

SEQ ID NO: 201211 - RNA, 19 nt, Artificial Sequence
  Description of Artificial Sequence: Synthetic oligonucleotide
uuugauggccguggauuug

SEQ ID NO: 201212 - RNA, 19 nt, Artificial Sequence
  Description of Artificial Sequence: Synthetic oligonucleotide
caccaacucacauugacgu

SEQ ID NO: 201213 - RNA, 19 nt, Artificial Sequence
  Description of Artificial Sequence: Synthetic oligonucleotide
gaaacccacuacaauugga

SEQ ID NO: 201214 - RNA, 19 nt, Artificial Sequence
  Description of Artificial Sequence: Synthetic oligonucleotide
uccgcuccucuacugacau

SEQ ID NO: 201215 - RNA, 19 nt, Artificial Sequence
  Description of Artificial Sequence: Synthetic oligonucleotide
uugggauggcaaacuucug

SEQ ID NO: 201216 - RNA, 19 nt, Artificial Sequence
  Description of Artificial Sequence: Synthetic oligonucleotide
ugugcagauuaugcuauua

SEQ ID NO: 201217 - RNA, 19 nt, Artificial Sequence
  Description of Artificial Sequence: Synthetic oligonucleotide
cuggcgcuuagugaaacac

SEQ ID NO: 201218 - RNA, 19 nt, Artificial Sequence
  Description of Artificial Sequence: Synthetic oligonucleotide
auaauucccuuuagggcca

SEQ ID NO: 201219 - RNA, 19 nt, Artificial Sequence
  Description of Artificial Sequence: Synthetic oligonucleotide
aucgagguuauaguugaaa

SEQ ID NO: 201220 - RNA, 19 nt, Artificial Sequence
  Description of Artificial Sequence: Synthetic oligonucleotide
aauaaucuuuagacccaaa

SEQ ID NO: 201221 - RNA, 19 nt, Artificial Sequence
  Description of Artificial Sequence: Synthetic oligonucleotide
cuuauucaccuugauaugu

SEQ ID NO: 201222 - RNA, 19 nt, Artificial Sequence
  Description of Artificial Sequence: Synthetic oligonucleotide
uggcaguauucaccugcag

SEQ ID NO: 201223 - RNA, 19 nt, Artificial Sequence
  Description of Artificial Sequence: Synthetic oligonucleotide
cauguaugggaauacucgu

SEQ ID NO: 201224 - RNA, 19 nt, Artificial Sequence
  Description of Artificial Sequence: Synthetic oligonucleotide
uuccgcuccucuacugaca

SEQ ID NO: 201225 - RNA, 19 nt, Artificial Sequence
  Description of Artificial Sequence: Synthetic oligonucleotide
ggcgcuuagugaaacacug

SEQ ID NO: 201226 - RNA, 19 nt, Artificial Sequence
  Description of Artificial Sequence: Synthetic oligonucleotide
auacacuccucuucaucaa

SEQ ID NO: 201227 - RNA, 19 nt, Artificial Sequence
  Description of Artificial Sequence: Synthetic oligonucleotide
gcuauuagaagcaaucacu

SEQ ID NO: 201228 - RNA, 19 nt, Artificial Sequence
  Description of Artificial Sequence: Synthetic oligonucleotide
ucggacacaucgcaucauu

SEQ ID NO: 201229 - RNA, 19 nt, Artificial Sequence
  Description of Artificial Sequence: Synthetic oligonucleotide
guaguaaggcuuguuuguc

SEQ ID NO: 201230 - RNA, 19 nt, Artificial Sequence
  Description of Artificial Sequence: Synthetic oligonucleotide
guuuguggcauggcagacc

SEQ ID NO: 201231 - RNA, 19 nt, Artificial Sequence
  Description of Artificial Sequence: Synthetic oligonucleotide
uacucgugccugaugcguc

SEQ ID NO: 201232 - RNA, 19 nt, Artificial Sequence
  Description of Artificial Sequence: Synthetic oligonucleotide
guuugacccaaaugauguc

SEQ ID NO: 201233 - RNA, 19 nt, Artificial Sequence
  Description of Artificial Sequence: Synthetic oligonucleotide
ugccugaugcguccaguaa

SEQ ID NO: 201234 - RNA, 19 nt, Artificial Sequence
  Description of Artificial Sequence: Synthetic oligonucleotide
ggcaauaugugagcagaag

SEQ ID NO: 201235 - RNA, 19 nt, Artificial Sequence
  Description of Artificial Sequence: Synthetic oligonucleotide
uucgguccuugucuauggu

SEQ ID NO: 201236 - RNA, 19 nt, Artificial Sequence
  Description of Artificial Sequence: Synthetic oligonucleotide
ugcggauucugcccucaaa

SEQ ID NO: 201237 - RNA, 19 nt, Artificial Sequence
  Description of Artificial Sequence: Synthetic oligonucleotide
acgaagcaccaacucacau

SEQ ID NO: 201238 - RNA, 19 nt, Artificial Sequence
  Description of Artificial Sequence: Synthetic oligonucleotide
cagagucucacaauugggu

SEQ ID NO: 201239 - RNA, 19 nt, Artificial Sequence
  Description of Artificial Sequence: Synthetic oligonucleotide
uuccgaucccucugacccc

SEQ ID NO: 201240 - RNA, 19 nt, Artificial Sequence
  Description of Artificial Sequence: Synthetic oligonucleotide
ugugacccuucgccaacac

SEQ ID NO: 201241 - RNA, 19 nt, Artificial Sequence
  Description of Artificial Sequence: Synthetic oligonucleotide
ggcaacagggcaucggaca

SEQ ID NO: 201242 - RNA, 19 nt, Artificial Sequence
  Description of Artificial Sequence: Synthetic oligonucleotide
augcguccaguaauaaucu

SEQ ID NO: 201243 - RNA, 19 nt, Artificial Sequence
  Description of Artificial Sequence: Synthetic oligonucleotide
cuugaacaaugcccauuuc

SEQ ID NO: 201244 - RNA, 19 nt, Artificial Sequence
  Description of Artificial Sequence: Synthetic oligonucleotide
ugacguugggucucagauu

SEQ ID NO: 201245 - RNA, 19 nt, Artificial Sequence
  Description of Artificial Sequence: Synthetic oligonucleotide
ucgcaucauuuuaccuuug

SEQ ID NO: 201246 - RNA, 19 nt, Artificial Sequence
  Description of Artificial Sequence: Synthetic oligonucleotide
acauugacguggguguggu

SEQ ID NO: 201247 - RNA, 19 nt, Artificial Sequence
  Description of Artificial Sequence: Synthetic oligonucleotide
cauuauaggcagggcuggc

SEQ ID NO: 201248 - RNA, 19 nt, Artificial Sequence
  Description of Artificial Sequence: Synthetic oligonucleotide
auagcauuaugggcugggu

SEQ ID NO: 201249 - RNA, 19 nt, Artificial Sequence
  Description of Artificial Sequence: Synthetic oligonucleotide
uucccauuauaggcagggc

SEQ ID NO: 201250 - RNA, 19 nt, Artificial Sequence
  Description of Artificial Sequence: Synthetic oligonucleotide
caaguuugacccaaaugau

SEQ ID NO: 201251 - RNA, 19 nt, Artificial Sequence
  Description of Artificial Sequence: Synthetic oligonucleotide
ggugguaggccuugguaca

SEQ ID NO: 201252 - RNA, 19 nt, Artificial Sequence
  Description of Artificial Sequence: Synthetic oligonucleotide
ggaauacucgugccugaug

SEQ ID NO: 201253 - RNA, 19 nt, Artificial Sequence
  Description of Artificial Sequence: Synthetic oligonucleotide
uacuggcgcuuagugaaac

SEQ ID NO: 201254 - RNA, 19 nt, Artificial Sequence
  Description of Artificial Sequence: Synthetic oligonucleotide
cacagcggaagcacucauc

SEQ ID NO: 201255 - RNA, 19 nt, Artificial Sequence
  Description of Artificial Sequence: Synthetic oligonucleotide
gcaacagggcaucggacac

SEQ ID NO: 201256 - RNA, 19 nt, Artificial Sequence
  Description of Artificial Sequence: Synthetic oligonucleotide
caaguccacaaaagggaaa

SEQ ID NO: 201257 - RNA, 19 nt, Artificial Sequence
  Description of Artificial Sequence: Synthetic oligonucleotide
cucaugugcauauuugauu

SEQ ID NO: 201258 - RNA, 19 nt, Artificial Sequence
  Description of Artificial Sequence: Synthetic oligonucleotide
ugacguggguguggugccg

SEQ ID NO: 201259 - RNA, 19 nt, Artificial Sequence
  Description of Artificial Sequence: Synthetic oligonucleotide
gcaucggacacaucgcauc

SEQ ID NO: 201260 - RNA, 19 nt, Artificial Sequence
  Description of Artificial Sequence: Synthetic oligonucleotide
gcaguaggauugcccaucc

SEQ ID NO: 201261 - RNA, 19 nt, Artificial Sequence
  Description of Artificial Sequence: Synthetic oligonucleotide
ucgugccugaugcguccag

SEQ ID NO: 201262 - RNA, 19 nt, Artificial Sequence
  Description of Artificial Sequence: Synthetic oligonucleotide
ggggcaauaugugagcaga

SEQ ID NO: 201263 - RNA, 19 nt, Artificial Sequence
  Description of Artificial Sequence: Synthetic oligonucleotide
gccuucccauuauaggcag

SEQ ID NO: 201264 - RNA, 19 nt, Artificial Sequence
  Description of Artificial Sequence: Synthetic oligonucleotide
acaauuggguuggcagcug

SEQ ID NO: 201265 - RNA, 19 nt, Artificial Sequence
  Description of Artificial Sequence: Synthetic oligonucleotide
cugacgaguccaccauuuc

SEQ ID NO: 201266 - RNA, 19 nt, Artificial Sequence
  Description of Artificial Sequence: Synthetic oligonucleotide
agcguuucacauaccaguu

SEQ ID NO: 201267 - RNA, 19 nt, Artificial Sequence
  Description of Artificial Sequence: Synthetic oligonucleotide
gugaaguggccugugcaga

SEQ ID NO: 201268 - RNA, 19 nt, Artificial Sequence
  Description of Artificial Sequence: Synthetic oligonucleotide
acccgaguguccccauuca

SEQ ID NO: 201269 - RNA, 19 nt, Artificial Sequence
  Description of Artificial Sequence: Synthetic oligonucleotide
gacccuucgccaacaccgc

SEQ ID NO: 201270 - RNA, 19 nt, Artificial Sequence
  Description of Artificial Sequence: Synthetic oligonucleotide
ugcguccaguaauaaucuu

SEQ ID NO: 201271 - RNA, 19 nt, Artificial Sequence
  Description of Artificial Sequence: Synthetic oligonucleotide
cucgugcuucauuuucuga

SEQ ID NO: 201272 - RNA, 19 nt, Artificial Sequence
  Description of Artificial Sequence: Synthetic oligonucleotide
gcccaaacaaucgagguua

SEQ ID NO: 201273 - RNA, 19 nt, Artificial Sequence
  Description of Artificial Sequence: Synthetic oligonucleotide
agcuaagggugaccuuuaa

SEQ ID NO: 201274 - RNA, 19 nt, Artificial Sequence
  Description of Artificial Sequence: Synthetic oligonucleotide
ccucuacugacaugcuagc

SEQ ID NO: 201275 - RNA, 19 nt, Artificial Sequence
  Description of Artificial Sequence: Synthetic oligonucleotide
gacguggguguggugccgc

SEQ ID NO: 201276 - RNA, 19 nt, Artificial Sequence
  Description of Artificial Sequence: Synthetic oligonucleotide
cacuggcuccugacgaguc

SEQ ID NO: 201277 - RNA, 19 nt, Artificial Sequence
  Description of Artificial Sequence: Synthetic oligonucleotide
cauucucaugugcauauuu

SEQ ID NO: 201278 - RNA, 19 nt, Artificial Sequence
  Description of Artificial Sequence: Synthetic oligonucleotide
uagagcuaagggugaccuu

SEQ ID NO: 201279 - RNA, 19 nt, Artificial Sequence
  Description of Artificial Sequence: Synthetic oligonucleotide
cuugguacuucuugcggau

SEQ ID NO: 201280 - RNA, 19 nt, Artificial Sequence
  Description of Artificial Sequence: Synthetic oligonucleotide
guacaugucauagcauuau

SEQ ID NO: 201281 - RNA, 19 nt, Artificial Sequence
  Description of Artificial Sequence: Synthetic oligonucleotide
gcaaacaggccaacccgag

SEQ ID NO: 201282 - RNA, 19 nt, Artificial Sequence
  Description of Artificial Sequence: Synthetic oligonucleotide
accuguggauggcacucaa

SEQ ID NO: 201283 - RNA, 19 nt, Artificial Sequence
  Description of Artificial Sequence: Synthetic oligonucleotide
cagcccggcagucauugca

SEQ ID NO: 201284 - RNA, 19 nt, Artificial Sequence
  Description of Artificial Sequence: Synthetic oligonucleotide
acacggguucucaucugug

SEQ ID NO: 201285 - RNA, 19 nt, Artificial Sequence
  Description of Artificial Sequence: Synthetic oligonucleotide
cagaaaugucagcuguaua

SEQ ID NO: 201286 - RNA, 19 nt, Artificial Sequence
  Description of Artificial Sequence: Synthetic oligonucleotide
guuucucgagcuucccgcu

SEQ ID NO: 201287 - RNA, 19 nt, Artificial Sequence
  Description of Artificial Sequence: Synthetic oligonucleotide
cauugacguggguguggug

SEQ ID NO: 201288 - RNA, 19 nt, Artificial Sequence
  Description of Artificial Sequence: Synthetic oligonucleotide
ggaacgaaaggcaguccca

SEQ ID NO: 201289 - RNA, 19 nt, Artificial Sequence
  Description of Artificial Sequence: Synthetic oligonucleotide
uggcuccugacgaguccac

SEQ ID NO: 201290 - RNA, 19 nt, Artificial Sequence
  Description of Artificial Sequence: Synthetic oligonucleotide
uggaaacgggagggcaccu

SEQ ID NO: 201291 - RNA, 19 nt, Artificial Sequence
  Description of Artificial Sequence: Synthetic oligonucleotide
uugcggauucugcccucaa

SEQ ID NO: 201292 - RNA, 19 nt, Artificial Sequence
  Description of Artificial Sequence: Synthetic oligonucleotide
gcuaagggugaccuuuaaa

SEQ ID NO: 201293 - RNA, 19 nt, Artificial Sequence
  Description of Artificial Sequence: Synthetic oligonucleotide
aaccaucaggauagagcua

SEQ ID NO: 201294 - RNA, 19 nt, Artificial Sequence
  Description of Artificial Sequence: Synthetic oligonucleotide
gggaggcuuucucucacuc

SEQ ID NO: 201295 - RNA, 19 nt, Artificial Sequence
  Description of Artificial Sequence: Synthetic oligonucleotide
gcgcuuagugaaacacugg

SEQ ID NO: 201296 - RNA, 19 nt, Artificial Sequence
  Description of Artificial Sequence: Synthetic oligonucleotide
guaggccuugguacagaac

SEQ ID NO: 201297 - RNA, 19 nt, Artificial Sequence
  Description of Artificial Sequence: Synthetic oligonucleotide
uucugccggccaccaucug

SEQ ID NO: 201298 - RNA, 19 nt, Artificial Sequence
  Description of Artificial Sequence: Synthetic oligonucleotide
gggcaucggacacaucgca

SEQ ID NO: 201299 - RNA, 19 nt, Artificial Sequence
  Description of Artificial Sequence: Synthetic oligonucleotide
caccuugacguugggucuc

SEQ ID NO: 201300 - RNA, 19 nt, Artificial Sequence
  Description of Artificial Sequence: Synthetic oligonucleotide
cuugccauacacuccucuu

SEQ ID NO: 201301 - RNA, 19 nt, Artificial Sequence
  Description of Artificial Sequence: Synthetic oligonucleotide
gcagugaugcuguguagua

SEQ ID NO: 201302 - RNA, 19 nt, Artificial Sequence
  Description of Artificial Sequence: Synthetic oligonucleotide
ucaggcaaucaggguggaa

SEQ ID NO: 201303 - RNA, 19 nt, Artificial Sequence
  Description of Artificial Sequence: Synthetic oligonucleotide
ugccgcuucccuuccccuu

SEQ ID NO: 201304 - RNA, 19 nt, Artificial Sequence
  Description of Artificial Sequence: Synthetic oligonucleotide
ccaacucaaaguggaaaca

SEQ ID NO: 201305 - RNA, 19 nt, Artificial Sequence
  Description of Artificial Sequence: Synthetic oligonucleotide
ccaucaccacagcggaagc

SEQ ID NO: 201306 - RNA, 19 nt, Artificial Sequence
  Description of Artificial Sequence: Synthetic oligonucleotide
ggagggcaccuugacguug

SEQ ID NO: 201307 - RNA, 19 nt, Artificial Sequence
  Description of Artificial Sequence: Synthetic oligonucleotide
gggccgcuugcccaagccc

SEQ ID NO: 201308 - RNA, 19 nt, Artificial Sequence
  Description of Artificial Sequence: Synthetic oligonucleotide
ggugcucccucccacccaa

SEQ ID NO: 201309 - RNA, 19 nt, Artificial Sequence
  Description of Artificial Sequence: Synthetic oligonucleotide
cucgagcuucccgcugaag

SEQ ID NO: 201310 - RNA, 19 nt, Artificial Sequence
  Description of Artificial Sequence: Synthetic oligonucleotide
cugaauauuuggggaacau

SEQ ID NO: 201311 - RNA, 19 nt, Artificial Sequence
  Description of Artificial Sequence: Synthetic oligonucleotide
gagcuaagggugaccuuua

SEQ ID NO: 201312 - RNA, 19 nt, Artificial Sequence
  Description of Artificial Sequence: Synthetic oligonucleotide
ccacauacaucacagugau

SEQ ID NO: 201313 - RNA, 19 nt, Artificial Sequence
  Description of Artificial Sequence: Synthetic oligonucleotide
ccaacaccgccuucucuuc

SEQ ID NO: 201314 - RNA, 19 nt, Artificial Sequence
  Description of Artificial Sequence: Synthetic oligonucleotide
ucuucgccuucugguuuuc

SEQ ID NO: 201315 - RNA, 19 nt, Artificial Sequence
  Description of Artificial Sequence: Synthetic oligonucleotide
ccugaugcguccaguaaua

SEQ ID NO: 201316 - RNA, 19 nt, Artificial Sequence
  Description of Artificial Sequence: Synthetic oligonucleotide
gcauccccuccaugauagg

SEQ ID NO: 201317 - RNA, 19 nt, Artificial Sequence
  Description of Artificial Sequence: Synthetic oligonucleotide
ccaucaggauagagcuaag

SEQ ID NO: 201318 - RNA, 19 nt, Artificial Sequence
  Description of Artificial Sequence: Synthetic oligonucleotide
cugaugcguccaguaauaa

SEQ ID NO: 201319 - RNA, 19 nt, Artificial Sequence
  Description of Artificial Sequence: Synthetic oligonucleotide
gcaaucaggguggaaggcu

SEQ ID NO: 201320 - RNA, 19 nt, Artificial Sequence
  Description of Artificial Sequence: Synthetic oligonucleotide
gacaugcuagcagcuuccu

SEQ ID NO: 201321 - RNA, 19 nt, Artificial Sequence
  Description of Artificial Sequence: Synthetic oligonucleotide
caaguguagcagugaugcu

SEQ ID NO: 201322 - RNA, 19 nt, Artificial Sequence
  Description of Artificial Sequence: Synthetic oligonucleotide
cgagguuauaguugaaagu

SEQ ID NO: 201323 - RNA, 19 nt, Artificial Sequence
  Description of Artificial Sequence: Synthetic oligonucleotide
ggccgcuugcccaagccca

SEQ ID NO: 201324 - RNA, 19 nt, Artificial Sequence
  Description of Artificial Sequence: Synthetic oligonucleotide
caagugcugugcuugccuu

SEQ ID NO: 201325 - RNA, 19 nt, Artificial Sequence
  Description of Artificial Sequence: Synthetic oligonucleotide
gcccucaaaucaugcucac

SEQ ID NO: 201326 - RNA, 19 nt, Artificial Sequence
  Description of Artificial Sequence: Synthetic oligonucleotide
cuccauguaugggaauacu

SEQ ID NO: 201327 - RNA, 19 nt, Artificial Sequence
  Description of Artificial Sequence: Synthetic oligonucleotide
gcguuucacauaccaguua

SEQ ID NO: 201328 - RNA, 19 nt, Artificial Sequence
  Description of Artificial Sequence: Synthetic oligonucleotide
gaucugaccaagggcuauu

SEQ ID NO: 201329 - RNA, 19 nt, Artificial Sequence
  Description of Artificial Sequence: Synthetic oligonucleotide
guacuggcgcuuagugaaa

SEQ ID NO: 201330 - RNA, 19 nt, Artificial Sequence
  Description of Artificial Sequence: Synthetic oligonucleotide
cugugacccuucgccaaca

SEQ ID NO: 201331 - RNA, 19 nt, Artificial Sequence
  Description of Artificial Sequence: Synthetic oligonucleotide
cccagcccggcagucauug

SEQ ID NO: 201332 - RNA, 19 nt, Artificial Sequence
  Description of Artificial Sequence: Synthetic oligonucleotide
cagugcguucuugaagacu

SEQ ID NO: 201333 - RNA, 19 nt, Artificial Sequence
  Description of Artificial Sequence: Synthetic oligonucleotide
cgggagggcaccuugacgu

SEQ ID NO: 201334 - RNA, 19 nt, Artificial Sequence
  Description of Artificial Sequence: Synthetic oligonucleotide
acguugggucucagauuca

SEQ ID NO: 201335 - RNA, 19 nt, Artificial Sequence
  Description of Artificial Sequence: Synthetic oligonucleotide
ccgaguguccccauucacu

SEQ ID NO: 201336 - RNA, 19 nt, Artificial Sequence
  Description of Artificial Sequence: Synthetic oligonucleotide
cucuucgccuucugguuuu

SEQ ID NO: 201337 - RNA, 19 nt, Artificial Sequence
  Description of Artificial Sequence: Synthetic oligonucleotide
gugcuugccuucccauuau

SEQ ID NO: 201338 - RNA, 19 nt, Artificial Sequence
  Description of Artificial Sequence: Synthetic oligonucleotide
acagggcaucggacacauc

SEQ ID NO: 201339 - RNA, 19 nt, Artificial Sequence
  Description of Artificial Sequence: Synthetic oligonucleotide
caccuguggauggcacuca

SEQ ID NO: 201340 - RNA, 19 nt, Artificial Sequence
  Description of Artificial Sequence: Synthetic oligonucleotide
cuguauagaucuggacuuu

SEQ ID NO: 201341 - RNA, 19 nt, Artificial Sequence
  Description of Artificial Sequence: Synthetic oligonucleotide
gcauuaugggcuggguccu

SEQ ID NO: 201342 - RNA, 19 nt, Artificial Sequence
  Description of Artificial Sequence: Synthetic oligonucleotide
cagcggaagcacucauccu

SEQ ID NO: 201343 - RNA, 19 nt, Artificial Sequence
  Description of Artificial Sequence: Synthetic oligonucleotide
ggcucuucgccuucugguu

SEQ ID NO: 201344 - RNA, 19 nt, Artificial Sequence
  Description of Artificial Sequence: Synthetic oligonucleotide
cucgugccugaugcgucca

SEQ ID NO: 201345 - RNA, 19 nt, Artificial Sequence
  Description of Artificial Sequence: Synthetic oligonucleotide
caucaauuauucgguccuu

SEQ ID NO: 201346 - RNA, 19 nt, Artificial Sequence
  Description of Artificial Sequence: Synthetic oligonucleotide
gcggaagcacucauccucu

SEQ ID NO: 201347 - RNA, 19 nt, Artificial Sequence
  Description of Artificial Sequence: Synthetic oligonucleotide
ccugacgaguccaccauuu

SEQ ID NO: 201348 - RNA, 19 nt, Artificial Sequence
  Description of Artificial Sequence: Synthetic oligonucleotide
ccuguggauggcacucaaa

SEQ ID NO: 201349 - RNA, 19 nt, Artificial Sequence
  Description of Artificial Sequence: Synthetic oligonucleotide
caguaggauugcccauccu

SEQ ID NO: 201350 - RNA, 19 nt, Artificial Sequence
  Description of Artificial Sequence: Synthetic oligonucleotide
caggguacuggcgcuuagu

SEQ ID NO: 201351 - RNA, 19 nt, Artificial Sequence
  Description of Artificial Sequence: Synthetic oligonucleotide
ggaucugaccaagggcuau

SEQ ID NO: 201352 - RNA, 19 nt, Artificial Sequence
  Description of Artificial Sequence: Synthetic oligonucleotide
cugugcagauuaugcuauu

SEQ ID NO: 201353 - RNA, 19 nt, Artificial Sequence
  Description of Artificial Sequence: Synthetic oligonucleotide
ccagcccggcagucauugc

SEQ ID NO: 201354 - RNA, 19 nt, Artificial Sequence
  Description of Artificial Sequence: Synthetic oligonucleotide
cgaagcaccaacucacauu

SEQ ID NO: 201355 - RNA, 19 nt, Artificial Sequence
  Description of Artificial Sequence: Synthetic oligonucleotide
cugccgcuucccuuccccu

SEQ ID NO: 201356 - RNA, 19 nt, Artificial Sequence
  Description of Artificial Sequence: Synthetic oligonucleotide
ccgcuuccccuuccgagca

SEQ ID NO: 201357 - RNA, 19 nt, Artificial Sequence
  Description of Artificial Sequence: Synthetic oligonucleotide
gggaauacucgugccugau

SEQ ID NO: 201358 - RNA, 19 nt, Artificial Sequence
  Description of Artificial Sequence: Synthetic oligonucleotide
ggccguggauuugaagggu

SEQ ID NO: 201359 - RNA, 19 nt, Artificial Sequence
  Description of Artificial Sequence: Synthetic oligonucleotide
cccucaaaucaugcucaca

SEQ ID NO: 201360 - RNA, 19 nt, Artificial Sequence
  Description of Artificial Sequence: Synthetic oligonucleotide
gcugugguucaugaaucuu

SEQ ID NO: 201361 - RNA, 19 nt, Artificial Sequence
  Description of Artificial Sequence: Synthetic oligonucleotide
cuuuaccauauggcuuauu

SEQ ID NO: 201362 - RNA, 19 nt, Artificial Sequence
  Description of Artificial Sequence: Synthetic oligonucleotide
ccgcuccucuacugacaug

SEQ ID NO: 201363 - RNA, 19 nt, Artificial Sequence
  Description of Artificial Sequence: Synthetic oligonucleotide
ccuuagcuacuugaggauu

SEQ ID NO: 201364 - RNA, 19 nt, Artificial Sequence
  Description of Artificial Sequence: Synthetic oligonucleotide
gccggccaccaucuguagu

SEQ ID NO: 201365 - RNA, 19 nt, Artificial Sequence
  Description of Artificial Sequence: Synthetic oligonucleotide
ccaaacaaucgagguuaua

SEQ ID NO: 201366 - RNA, 19 nt, Artificial Sequence
  Description of Artificial Sequence: Synthetic oligonucleotide
gccguggauuugaaggguu

SEQ ID NO: 201367 - RNA, 19 nt, Artificial Sequence
  Description of Artificial Sequence: Synthetic oligonucleotide
cccaaacaaucgagguuau

SEQ ID NO: 201368 - RNA, 19 nt, Artificial Sequence
  Description of Artificial Sequence: Synthetic oligonucleotide
ccguggauuugaaggguuu

SEQ ID NO: 201369 - RNA, 19 nt, Artificial Sequence
  Description of Artificial Sequence: Synthetic oligonucleotide
ccacaccgacagacugucu

SEQ ID NO: 201370 - RNA, 19 nt, Artificial Sequence
  Description of Artificial Sequence: Synthetic oligonucleotide
ccaacccgaguguccccau

SEQ ID NO: 201371 - RNA, 19 nt, Artificial Sequence
  Description of Artificial Sequence: Synthetic oligonucleotide
ccccuccauguaugggaau

SEQ ID NO: 201372 - RNA, 19 nt, Artificial Sequence
  Description of Artificial Sequence: Synthetic oligonucleotide
aacgaugacaacuugauac

SEQ ID NO: 201373 - RNA, 19 nt, Artificial Sequence
  Description of Artificial Sequence: Synthetic oligonucleotide
aaguuaucaucacagagcc

SEQ ID NO: 201374 - RNA, 19 nt, Artificial Sequence
  Description of Artificial Sequence: Synthetic oligonucleotide
aaaccuaaauccucuaugc

SEQ ID NO: 201375 - RNA, 19 nt, Artificial Sequence
  Description of Artificial Sequence: Synthetic oligonucleotide
aaaacucuaaagugggucc

SEQ ID NO: 201376 - RNA, 19 nt, Artificial Sequence
  Description of Artificial Sequence: Synthetic oligonucleotide
aauugauuauuguugagca

SEQ ID NO: 201377 - RNA, 19 nt, Artificial Sequence
  Description of Artificial Sequence: Synthetic oligonucleotide
aacacucuauguuuuacgg

SEQ ID NO: 201378 - RNA, 19 nt, Artificial Sequence
  Description of Artificial Sequence: Synthetic oligonucleotide
gaaaauuccaaggaagugg

SEQ ID NO: 201379 - RNA, 19 nt, Artificial Sequence
  Description of Artificial Sequence: Synthetic oligonucleotide
aauggacacaaguauugac

SEQ ID NO: 201380 - RNA, 19 nt, Artificial Sequence
  Description of Artificial Sequence: Synthetic oligonucleotide
auaaggaucacuugcaacu

SEQ ID NO: 201381 - RNA, 19 nt, Artificial Sequence
  Description of Artificial Sequence: Synthetic oligonucleotide
aaauccucuaugcuaagug

SEQ ID NO: 201382 - RNA, 19 nt, Artificial Sequence
  Description of Artificial Sequence: Synthetic oligonucleotide
ugguauuuaggaaaggaca

SEQ ID NO: 201383 - RNA, 19 nt, Artificial Sequence
  Description of Artificial Sequence: Synthetic oligonucleotide
ugauuuacgaucugcaugu

SEQ ID NO: 201384 - RNA, 19 nt, Artificial Sequence
  Description of Artificial Sequence: Synthetic oligonucleotide
uguauagccaagcuuaggu

SEQ ID NO: 201385 - RNA, 19 nt, Artificial Sequence
  Description of Artificial Sequence: Synthetic oligonucleotide
uaaaccuaaauccucuaug

SEQ ID NO: 201386 - RNA, 19 nt, Artificial Sequence
  Description of Artificial Sequence: Synthetic oligonucleotide
agaguauucaggcaacuuc

SEQ ID NO: 201387 - RNA, 19 nt, Artificial Sequence
  Description of Artificial Sequence: Synthetic oligonucleotide
ucaauugagaugaaagccu

SEQ ID NO: 201388 - RNA, 19 nt, Artificial Sequence
  Description of Artificial Sequence: Synthetic oligonucleotide
uuuacgucaaacugcaaca

SEQ ID NO: 201389 - RNA, 19 nt, Artificial Sequence
  Description of Artificial Sequence: Synthetic oligonucleotide
aguauugacugauggauag

SEQ ID NO: 201390 - RNA, 19 nt, Artificial Sequence
  Description of Artificial Sequence: Synthetic oligonucleotide
uuugugauccuuucgagcu

SEQ ID NO: 201391 - RNA, 19 nt, Artificial Sequence
  Description of Artificial Sequence: Synthetic oligonucleotide
aaauagguaaguccaccag

SEQ ID NO: 201392 - RNA, 19 nt, Artificial Sequence
  Description of Artificial Sequence: Synthetic oligonucleotide
aauagguaaguccaccagu

SEQ ID NO: 201393 - RNA, 19 nt, Artificial Sequence
  Description of Artificial Sequence: Synthetic oligonucleotide
ugauggauagcuugcgucg

SEQ ID NO: 201394 - RNA, 19 nt, Artificial Sequence
  Description of Artificial Sequence: Synthetic oligonucleotide
uaauugauuauuguugagc

SEQ ID NO: 201395 - RNA, 19 nt, Artificial Sequence
  Description of Artificial Sequence: Synthetic oligonucleotide
uuacuaguaaauucaucag

SEQ ID NO: 201396 - RNA, 19 nt, Artificial Sequence
  Description of Artificial Sequence: Synthetic oligonucleotide
gacgagauucaucaucugg

SEQ ID NO: 201397 - RNA, 19 nt, Artificial Sequence
  Description of Artificial Sequence: Synthetic oligonucleotide
uauguuuuacggaagcagu

SEQ ID NO: 201398 - RNA, 19 nt, Artificial Sequence
  Description of Artificial Sequence: Synthetic oligonucleotide
augcacauaagcuuaaaga

SEQ ID NO: 201399 - RNA, 19 nt, Artificial Sequence
  Description of Artificial Sequence: Synthetic oligonucleotide
acaaauagagaacacugga

SEQ ID NO: 201400 - RNA, 19 nt, Artificial Sequence
  Description of Artificial Sequence: Synthetic oligonucleotide
cuguggaacaguuaggcag

SEQ ID NO: 201401 - RNA, 19 nt, Artificial Sequence
  Description of Artificial Sequence: Synthetic oligonucleotide
acacuaucgcucuggaugc

SEQ ID NO: 201402 - RNA, 19 nt, Artificial Sequence
  Description of Artificial Sequence: Synthetic oligonucleotide
cugagauagagucauggcc

SEQ ID NO: 201403 - RNA, 19 nt, Artificial Sequence
  Description of Artificial Sequence: Synthetic oligonucleotide
aggacugucacguguauag

SEQ ID NO: 201404 - RNA, 19 nt, Artificial Sequence
  Description of Artificial Sequence: Synthetic oligonucleotide
aaacucuaaaguggguccc

SEQ ID NO: 201405 - RNA, 19 nt, Artificial Sequence
  Description of Artificial Sequence: Synthetic oligonucleotide
ugauucaccacguggaacu

SEQ ID NO: 201406 - RNA, 19 nt, Artificial Sequence
  Description of Artificial Sequence: Synthetic oligonucleotide
uauugccuaaaaucuggcg

SEQ ID NO: 201407 - RNA, 19 nt, Artificial Sequence
  Description of Artificial Sequence: Synthetic oligonucleotide
cuagaacugauuuacgauc

SEQ ID NO: 201408 - RNA, 19 nt, Artificial Sequence
  Description of Artificial Sequence: Synthetic oligonucleotide
gauaauguccucugcugcc

SEQ ID NO: 201409 - RNA, 19 nt, Artificial Sequence
  Description of Artificial Sequence: Synthetic oligonucleotide
auaaaacccucacaaaccu

SEQ ID NO: 201410 - RNA, 19 nt, Artificial Sequence
  Description of Artificial Sequence: Synthetic oligonucleotide
uaugaaacgaugacaacuu

SEQ ID NO: 201411 - RNA, 19 nt, Artificial Sequence
  Description of Artificial Sequence: Synthetic oligonucleotide
uagaacugauuuacgaucu

SEQ ID NO: 201412 - RNA, 19 nt, Artificial Sequence
  Description of Artificial Sequence: Synthetic oligonucleotide
uuaauugauuauuguugag

SEQ ID NO: 201413 - RNA, 19 nt, Artificial Sequence
  Description of Artificial Sequence: Synthetic oligonucleotide
uacaguguaagucucuguc

SEQ ID NO: 201414 - RNA, 19 nt, Artificial Sequence
  Description of Artificial Sequence: Synthetic oligonucleotide
aggacggugacugauugcc

SEQ ID NO: 201415 - RNA, 19 nt, Artificial Sequence
  Description of Artificial Sequence: Synthetic oligonucleotide
uuccuacugagauagaguc

SEQ ID NO: 201416 - RNA, 19 nt, Artificial Sequence
  Description of Artificial Sequence: Synthetic oligonucleotide
ugagaugaaagccuuucuc

SEQ ID NO: 201417 - RNA, 19 nt, Artificial Sequence
  Description of Artificial Sequence: Synthetic oligonucleotide
uugccuaaaaucuggcgcc

SEQ ID NO: 201418 - RNA, 19 nt, Artificial Sequence
  Description of Artificial Sequence: Synthetic oligonucleotide
ugucauuagcagcuaagga

SEQ ID NO: 201419 - RNA, 19 nt, Artificial Sequence
  Description of Artificial Sequence: Synthetic oligonucleotide
cuucugaauacccguaugc

SEQ ID NO: 201420 - RNA, 19 nt, Artificial Sequence
  Description of Artificial Sequence: Synthetic oligonucleotide
acacucuaggauuucaucu

SEQ ID NO: 201421 - RNA, 19 nt, Artificial Sequence
  Description of Artificial Sequence: Synthetic oligonucleotide
acuaguaaauucaucaggu

SEQ ID NO: 201422 - RNA, 19 nt, Artificial Sequence
  Description of Artificial Sequence: Synthetic oligonucleotide
aauacccguaugcauacaa

SEQ ID NO: 201423 - RNA, 19 nt, Artificial Sequence
  Description of Artificial Sequence: Synthetic oligonucleotide
ugcgcguuaacacucuaug

SEQ ID NO: 201424 - RNA, 19 nt, Artificial Sequence
  Description of Artificial Sequence: Synthetic oligonucleotide
uguggaacaguuaggcaga

SEQ ID NO: 201425 - RNA, 19 nt, Artificial Sequence
  Description of Artificial Sequence: Synthetic oligonucleotide
gucauuagcagcuaaggaa

SEQ ID NO: 201426 - RNA, 19 nt, Artificial Sequence
  Description of Artificial Sequence: Synthetic oligonucleotide
uguagcagcuagcaagcgc

SEQ ID NO: 201427 - RNA, 19 nt, Artificial Sequence
  Description of Artificial Sequence: Synthetic oligonucleotide
ucaaccuuucgaacaacug

SEQ ID NO: 201428 - RNA, 19 nt, Artificial Sequence
  Description of Artificial Sequence: Synthetic oligonucleotide
uugagaugcgcguuaacac

SEQ ID NO: 201429 - RNA, 19 nt, Artificial Sequence
  Description of Artificial Sequence: Synthetic oligonucleotide
auuauccauuguuaucauc

SEQ ID NO: 201430 - RNA, 19 nt, Artificial Sequence
  Description of Artificial Sequence: Synthetic oligonucleotide
cuauguuuuacggaagcag

SEQ ID NO: 201431 - RNA, 19 nt, Artificial Sequence
  Description of Artificial Sequence: Synthetic oligonucleotide
accuagaccaguguuuccc

SEQ ID NO: 201432 - RNA, 19 nt, Artificial Sequence
  Description of Artificial Sequence: Synthetic oligonucleotide
uuaaaccuaaauccucuau

SEQ ID NO: 201433 - RNA, 19 nt, Artificial Sequence
  Description of Artificial Sequence: Synthetic oligonucleotide
ugcgucgguagcaucaacc

SEQ ID NO: 201434 - RNA, 19 nt, Artificial Sequence
  Description of Artificial Sequence: Synthetic oligonucleotide
ugcugaacaaauagagaac

SEQ ID NO: 201435 - RNA, 19 nt, Artificial Sequence
  Description of Artificial Sequence: Synthetic oligonucleotide
auagguaaguccaccaguc

SEQ ID NO: 201436 - RNA, 19 nt, Artificial Sequence
  Description of Artificial Sequence: Synthetic oligonucleotide
aucgcgaaaggcuuccauc

SEQ ID NO: 201437 - RNA, 19 nt, Artificial Sequence
  Description of Artificial Sequence: Synthetic oligonucleotide
acaaguauugacugaugga

SEQ ID NO: 201438 - RNA, 19 nt, Artificial Sequence
  Description of Artificial Sequence: Synthetic oligonucleotide
ugagaugcgcguuaacacu

SEQ ID NO: 201439 - RNA, 19 nt, Artificial Sequence
  Description of Artificial Sequence: Synthetic oligonucleotide
uuuuacggaagcaguauuu

SEQ ID NO: 201440 - RNA, 19 nt, Artificial Sequence
  Description of Artificial Sequence: Synthetic oligonucleotide
ugaauacccguaugcauac

SEQ ID NO: 201441 - RNA, 19 nt, Artificial Sequence
  Description of Artificial Sequence: Synthetic oligonucleotide
ucugaauacccguaugcau

SEQ ID NO: 201442 - RNA, 19 nt, Artificial Sequence
  Description of Artificial Sequence: Synthetic oligonucleotide
ugccacaagugcauaaaac

SEQ ID NO: 201443 - RNA, 19 nt, Artificial Sequence
  Description of Artificial Sequence: Synthetic oligonucleotide
uaaggaacuuauuccacau

SEQ ID NO: 201444 - RNA, 19 nt, Artificial Sequence
  Description of Artificial Sequence: Synthetic oligonucleotide
cucugugcggauuuacuag

SEQ ID NO: 201445 - RNA, 19 nt, Artificial Sequence
  Description of Artificial Sequence: Synthetic oligonucleotide
cagucuauugucuugaaua

SEQ ID NO: 201446 - RNA, 19 nt, Artificial Sequence
  Description of Artificial Sequence: Synthetic oligonucleotide
gauagcuugcgucgguagc

SEQ ID NO: 201447 - RNA, 19 nt, Artificial Sequence
  Description of Artificial Sequence: Synthetic oligonucleotide
acaugaucgcuguacauaa

SEQ ID NO: 201448 - RNA, 19 nt, Artificial Sequence
  Description of Artificial Sequence: Synthetic oligonucleotide
aguuugcucauauugcuuu

SEQ ID NO: 201449 - RNA, 19 nt, Artificial Sequence
  Description of Artificial Sequence: Synthetic oligonucleotide
aguucuggccauugcccgc

SEQ ID NO: 201450 - RNA, 19 nt, Artificial Sequence
  Description of Artificial Sequence: Synthetic oligonucleotide
auauaucuuuauuguugag

SEQ ID NO: 201451 - RNA, 19 nt, Artificial Sequence
  Description of Artificial Sequence: Synthetic oligonucleotide
ugaucgcuguacauaauau

SEQ ID NO: 201452 - RNA, 19 nt, Artificial Sequence
  Description of Artificial Sequence: Synthetic oligonucleotide
acgaugacaacuugauaca

SEQ ID NO: 201453 - RNA, 19 nt, Artificial Sequence
  Description of Artificial Sequence: Synthetic oligonucleotide
ucgcgaaaggcuuccaucu

SEQ ID NO: 201454 - RNA, 19 nt, Artificial Sequence
  Description of Artificial Sequence: Synthetic oligonucleotide
gaucgcuguacauaauauc

SEQ ID NO: 201455 - RNA, 19 nt, Artificial Sequence
  Description of Artificial Sequence: Synthetic oligonucleotide
ccaucagugauucaccacg

SEQ ID NO: 201456 - RNA, 19 nt, Artificial Sequence
  Description of Artificial Sequence: Synthetic oligonucleotide
ucgcuguacauaauaucca

SEQ ID NO: 201457 - RNA, 19 nt, Artificial Sequence
  Description of Artificial Sequence: Synthetic oligonucleotide
uuugagccgaccaacucua

SEQ ID NO: 201458 - RNA, 19 nt, Artificial Sequence
  Description of Artificial Sequence: Synthetic oligonucleotide
uuaacacucuauguuuuac

SEQ ID NO: 201459 - RNA, 19 nt, Artificial Sequence
  Description of Artificial Sequence: Synthetic oligonucleotide
ugcauguauuugcaugaca

SEQ ID NO: 201460 - RNA, 19 nt, Artificial Sequence
  Description of Artificial Sequence: Synthetic oligonucleotide
accacguggaacuuuuacu

SEQ ID NO: 201461 - RNA, 19 nt, Artificial Sequence
  Description of Artificial Sequence: Synthetic oligonucleotide
ugauggauucuugagcacu

SEQ ID NO: 201462 - RNA, 19 nt, Artificial Sequence
  Description of Artificial Sequence: Synthetic oligonucleotide
ugucauuagugugaggguc

SEQ ID NO: 201463 - RNA, 19 nt, Artificial Sequence
  Description of Artificial Sequence: Synthetic oligonucleotide
agauuagccaguccaccug

SEQ ID NO: 201464 - RNA, 19 nt, Artificial Sequence
  Description of Artificial Sequence: Synthetic oligonucleotide
ucaguacaguguaagucuc

SEQ ID NO: 201465 - RNA, 19 nt, Artificial Sequence
  Description of Artificial Sequence: Synthetic oligonucleotide
cagagaaucaucuggaccu

SEQ ID NO: 201466 - RNA, 19 nt, Artificial Sequence
  Description of Artificial Sequence: Synthetic oligonucleotide
cucuagaacugauuuacga

SEQ ID NO: 201467 - RNA, 19 nt, Artificial Sequence
  Description of Artificial Sequence: Synthetic oligonucleotide
gauggauagcuugcgucgg

SEQ ID NO: 201468 - RNA, 19 nt, Artificial Sequence
  Description of Artificial Sequence: Synthetic oligonucleotide
cacucuauguuuuacggaa

SEQ ID NO: 201469 - RNA, 19 nt, Artificial Sequence
  Description of Artificial Sequence: Synthetic oligonucleotide
gguauuuaggaaaggacac

SEQ ID NO: 201470 - RNA, 19 nt, Artificial Sequence
  Description of Artificial Sequence: Synthetic oligonucleotide
acugauuuacgaucugcau

SEQ ID NO: 201471 - RNA, 19 nt, Artificial Sequence
  Description of Artificial Sequence: Synthetic oligonucleotide
ucugguagugcaggcauca

SEQ ID NO: 201472 - RNA, 19 nt, Artificial Sequence
  Description of Artificial Sequence: Synthetic oligonucleotide
guaugaaacgaugacaacu

SEQ ID NO: 201473 - RNA, 19 nt, Artificial Sequence
  Description of Artificial Sequence: Synthetic oligonucleotide
uuguucgcuccacuguggc

SEQ ID NO: 201474 - RNA, 19 nt, Artificial Sequence
  Description of Artificial Sequence: Synthetic oligonucleotide
cuuguucgcuccacugugg

SEQ ID NO: 201475 - RNA, 19 nt, Artificial Sequence
  Description of Artificial Sequence: Synthetic oligonucleotide
auugauuauuguugagcau

SEQ ID NO: 201476 - RNA, 19 nt, Artificial Sequence
  Description of Artificial Sequence: Synthetic oligonucleotide
gucgccucgugacucauag

SEQ ID NO: 201477 - RNA, 19 nt, Artificial Sequence
  Description of Artificial Sequence: Synthetic oligonucleotide
gacggugacugauugccac

SEQ ID NO: 201478 - RNA, 19 nt, Artificial Sequence
  Description of Artificial Sequence: Synthetic oligonucleotide
acgagauucaucaucugga

SEQ ID NO: 201479 - RNA, 19 nt, Artificial Sequence
  Description of Artificial Sequence: Synthetic oligonucleotide
ugucacguguauagccaag

SEQ ID NO: 201480 - RNA, 19 nt, Artificial Sequence
  Description of Artificial Sequence: Synthetic oligonucleotide
aaacgaugacaacuugaua

SEQ ID NO: 201481 - RNA, 19 nt, Artificial Sequence
  Description of Artificial Sequence: Synthetic oligonucleotide
ugcggauuuacuaguucaa

SEQ ID NO: 201482 - RNA, 19 nt, Artificial Sequence
  Description of Artificial Sequence: Synthetic oligonucleotide
ugugcggauuuacuaguuc

SEQ ID NO: 201483 - RNA, 19 nt, Artificial Sequence
  Description of Artificial Sequence: Synthetic oligonucleotide
gauuuugaauccucuucaa

SEQ ID NO: 201484 - RNA, 19 nt, Artificial Sequence
  Description of Artificial Sequence: Synthetic oligonucleotide
acacucuauguuuuacgga

SEQ ID NO: 201485 - RNA, 19 nt, Artificial Sequence
  Description of Artificial Sequence: Synthetic oligonucleotide
acguguauagccaagcuua

SEQ ID NO: 201486 - RNA, 19 nt, Artificial Sequence
  Description of Artificial Sequence: Synthetic oligonucleotide
aaccucuagaacugauuua

SEQ ID NO: 201487 - RNA, 19 nt, Artificial Sequence
  Description of Artificial Sequence: Synthetic oligonucleotide
caagcuuagguucagugua

SEQ ID NO: 201488 - RNA, 19 nt, Artificial Sequence
  Description of Artificial Sequence: Synthetic oligonucleotide
uaacuccuguaacuuugug

SEQ ID NO: 201489 - RNA, 19 nt, Artificial Sequence
  Description of Artificial Sequence: Synthetic oligonucleotide
guuagaacuuccagugagc

SEQ ID NO: 201490 - RNA, 19 nt, Artificial Sequence
  Description of Artificial Sequence: Synthetic oligonucleotide
cugguuaguuguucacacc

SEQ ID NO: 201491 - RNA, 19 nt, Artificial Sequence
  Description of Artificial Sequence: Synthetic oligonucleotide
cugaauacccguaugcaua

SEQ ID NO: 201492 - RNA, 19 nt, Artificial Sequence
  Description of Artificial Sequence: Synthetic oligonucleotide
cuaucgcucuggaugcacc

SEQ ID NO: 201493 - RNA, 19 nt, Artificial Sequence
  Description of Artificial Sequence: Synthetic oligonucleotide
gugcggauuuacuaguuca

SEQ ID NO: 201494 - RNA, 19 nt, Artificial Sequence
  Description of Artificial Sequence: Synthetic oligonucleotide
agguaaguccaccagucua

SEQ ID NO: 201495 - RNA, 19 nt, Artificial Sequence
  Description of Artificial Sequence: Synthetic oligonucleotide
gaccacaugaucgcuguac

SEQ ID NO: 201496 - RNA, 19 nt, Artificial Sequence
  Description of Artificial Sequence: Synthetic oligonucleotide
cacacucuaggauuucauc

SEQ ID NO: 201497 - RNA, 19 nt, Artificial Sequence
  Description of Artificial Sequence: Synthetic oligonucleotide
uguggaaauggcgcuguga

SEQ ID NO: 201498 - RNA, 19 nt, Artificial Sequence
  Description of Artificial Sequence: Synthetic oligonucleotide
ugcuucugaauacccguau

SEQ ID NO: 201499 - RNA, 19 nt, Artificial Sequence
  Description of Artificial Sequence: Synthetic oligonucleotide
auagcuugcgucgguagca

SEQ ID NO: 201500 - RNA, 19 nt, Artificial Sequence
  Description of Artificial Sequence: Synthetic oligonucleotide
cuaaauccucuaugcuaag

SEQ ID NO: 201501 - RNA, 19 nt, Artificial Sequence
  Description of Artificial Sequence: Synthetic oligonucleotide
gcugaacaaauagagaaca

SEQ ID NO: 201502 - RNA, 19 nt, Artificial Sequence
  Description of Artificial Sequence: Synthetic oligonucleotide
cuugcugguuaguuguuca

SEQ ID NO: 201503 - RNA, 19 nt, Artificial Sequence
  Description of Artificial Sequence: Synthetic oligonucleotide
agugauucaccacguggaa

SEQ ID NO: 201504 - RNA, 19 nt, Artificial Sequence
  Description of Artificial Sequence: Synthetic oligonucleotide
uagguucaguguaauugau

SEQ ID NO: 201505 - RNA, 19 nt, Artificial Sequence
  Description of Artificial Sequence: Synthetic oligonucleotide
aaguauugacugauggaua

SEQ ID NO: 201506 - RNA, 19 nt, Artificial Sequence
  Description of Artificial Sequence: Synthetic oligonucleotide
gaaacgaugacaacuugau

SEQ ID NO: 201507 - RNA, 19 nt, Artificial Sequence
  Description of Artificial Sequence: Synthetic oligonucleotide
ugagccgaccaacucuaaa

SEQ ID NO: 201508 - RNA, 19 nt, Artificial Sequence
  Description of Artificial Sequence: Synthetic oligonucleotide
aacagaccacaugaucgcu

SEQ ID NO: 201509 - RNA, 19 nt, Artificial Sequence
  Description of Artificial Sequence: Synthetic oligonucleotide
augcaccaaaaugcgguac

SEQ ID NO: 201510 - RNA, 19 nt, Artificial Sequence
  Description of Artificial Sequence: Synthetic oligonucleotide
acuugcaacuauauacaga

SEQ ID NO: 201511 - RNA, 19 nt, Artificial Sequence
  Description of Artificial Sequence: Synthetic oligonucleotide
acuggaaauuuaaaccuaa

SEQ ID NO: 201512 - RNA, 19 nt, Artificial Sequence
  Description of Artificial Sequence: Synthetic oligonucleotide
cauugcccgcuuuagccug

SEQ ID NO: 201513 - RNA, 19 nt, Artificial Sequence
  Description of Artificial Sequence: Synthetic oligonucleotide
aacucuaaaguggguccca

SEQ ID NO: 201514 - RNA, 19 nt, Artificial Sequence
  Description of Artificial Sequence: Synthetic oligonucleotide
uguucgcuccacuguggcc

SEQ ID NO: 201515 - RNA, 19 nt, Artificial Sequence
  Description of Artificial Sequence: Synthetic oligonucleotide
acugucacguguauagcca

SEQ ID NO: 201516 - RNA, 19 nt, Artificial Sequence
  Description of Artificial Sequence: Synthetic oligonucleotide
gagaugcgcguuaacacuc

SEQ ID NO: 201517 - RNA, 19 nt, Artificial Sequence
  Description of Artificial Sequence: Synthetic oligonucleotide
cucuaaagugggucccaag

SEQ ID NO: 201518 - RNA, 19 nt, Artificial Sequence
  Description of Artificial Sequence: Synthetic oligonucleotide
uaguuaagggauguacuuu

SEQ ID NO: 201519 - RNA, 19 nt, Artificial Sequence
  Description of Artificial Sequence: Synthetic oligonucleotide
guuugagccgaccaacucu

SEQ ID NO: 201520 - RNA, 19 nt, Artificial Sequence
  Description of Artificial Sequence: Synthetic oligonucleotide
ucgugacucauagaucagu

SEQ ID NO: 201521 - RNA, 19 nt, Artificial Sequence
  Description of Artificial Sequence: Synthetic oligonucleotide
gcuuccuacugagauagag

SEQ ID NO: 201522 - RNA, 19 nt, Artificial Sequence
  Description of Artificial Sequence: Synthetic oligonucleotide
ggaauaaggaucacuugca

SEQ ID NO: 201523 - RNA, 19 nt, Artificial Sequence
  Description of Artificial Sequence: Synthetic oligonucleotide
ugacgagauucaucaucug

SEQ ID NO: 201524 - RNA, 19 nt, Artificial Sequence
  Description of Artificial Sequence: Synthetic oligonucleotide
ucuaugcuaaguggagguc

SEQ ID NO: 201525 - RNA, 19 nt, Artificial Sequence
  Description of Artificial Sequence: Synthetic oligonucleotide
gcccgcuuuagccugaggc

SEQ ID NO: 201526 - RNA, 19 nt, Artificial Sequence
  Description of Artificial Sequence: Synthetic oligonucleotide
ccuaaauccucuaugcuaa

SEQ ID NO: 201527 - RNA, 19 nt, Artificial Sequence
  Description of Artificial Sequence: Synthetic oligonucleotide
ccguaugcauacaaaaguc

SEQ ID NO: 201528 - RNA, 19 nt, Artificial Sequence
  Description of Artificial Sequence: Synthetic oligonucleotide
acucuauguuuuacggaag

SEQ ID NO: 201529 - RNA, 19 nt, Artificial Sequence
  Description of Artificial Sequence: Synthetic oligonucleotide
gacacaaguauugacugau

SEQ ID NO: 201530 - RNA, 19 nt, Artificial Sequence
  Description of Artificial Sequence: Synthetic oligonucleotide
guauugacugauggauagc

SEQ ID NO: 201531 - RNA, 19 nt, Artificial Sequence
  Description of Artificial Sequence: Synthetic oligonucleotide
agaucaacaugacgagauu

SEQ ID NO: 201532 - RNA, 19 nt, Artificial Sequence
  Description of Artificial Sequence: Synthetic oligonucleotide
agccgaccaacucuaaauu

SEQ ID NO: 201533 - RNA, 19 nt, Artificial Sequence
  Description of Artificial Sequence: Synthetic oligonucleotide
guagcagcuagcaagcgcu

SEQ ID NO: 201534 - RNA, 19 nt, Artificial Sequence
  Description of Artificial Sequence: Synthetic oligonucleotide
ucgguagcaucaaccuuuc

SEQ ID NO: 201535 - RNA, 19 nt, Artificial Sequence
  Description of Artificial Sequence: Synthetic oligonucleotide
gucauuagugugaggguca

SEQ ID NO: 201536 - RNA, 19 nt, Artificial Sequence
  Description of Artificial Sequence: Synthetic oligonucleotide
gcugugaacagaccacaug

SEQ ID NO: 201537 - RNA, 19 nt, Artificial Sequence
  Description of Artificial Sequence: Synthetic oligonucleotide
agcuagcaagcgcucccuc

SEQ ID NO: 201538 - RNA, 19 nt, Artificial Sequence
  Description of Artificial Sequence: Synthetic oligonucleotide
cauaauauccaggaggcuu

SEQ ID NO: 201539 - RNA, 19 nt, Artificial Sequence
  Description of Artificial Sequence: Synthetic oligonucleotide
gagccgaccaacucuaaau

SEQ ID NO: 201540 - RNA, 19 nt, Artificial Sequence
  Description of Artificial Sequence: Synthetic oligonucleotide
aaaugcgguacaggugaaa

SEQ ID NO: 201541 - RNA, 19 nt, Artificial Sequence
  Description of Artificial Sequence: Synthetic oligonucleotide
acagaccacaugaucgcug

SEQ ID NO: 201542 - RNA, 19 nt, Artificial Sequence
  Description of Artificial Sequence: Synthetic oligonucleotide
gcuucugaauacccguaug

SEQ ID NO: 201543 - RNA, 19 nt, Artificial Sequence
  Description of Artificial Sequence: Synthetic oligonucleotide
acggugacugauugccaca

SEQ ID NO: 201544 - RNA, 19 nt, Artificial Sequence
  Description of Artificial Sequence: Synthetic oligonucleotide
aaauggcgcugugaacaga

SEQ ID NO: 201545 - RNA, 19 nt, Artificial Sequence
  Description of Artificial Sequence: Synthetic oligonucleotide
aagcuuagguucaguguaa

SEQ ID NO: 201546 - RNA, 19 nt, Artificial Sequence
  Description of Artificial Sequence: Synthetic oligonucleotide
cuuccuacugagauagagu

SEQ ID NO: 201547 - RNA, 19 nt, Artificial Sequence
  Description of Artificial Sequence: Synthetic oligonucleotide
cucggcaaacaaagcaaga

SEQ ID NO: 201548 - RNA, 19 nt, Artificial Sequence
  Description of Artificial Sequence: Synthetic oligonucleotide
acauaauauccaggaggcu

SEQ ID NO: 201549 - RNA, 19 nt, Artificial Sequence
  Description of Artificial Sequence: Synthetic oligonucleotide
ccuuucgaacaacugugag

SEQ ID NO: 201550 - RNA, 19 nt, Artificial Sequence
  Description of Artificial Sequence: Synthetic oligonucleotide
agugugagggucacacacu

SEQ ID NO: 201551 - RNA, 19 nt, Artificial Sequence
  Description of Artificial Sequence: Synthetic oligonucleotide
agcuugcgucgguagcauc

SEQ ID NO: 201552 - RNA, 19 nt, Artificial Sequence
  Description of Artificial Sequence: Synthetic oligonucleotide
caagaucaacaugacgaga

SEQ ID NO: 201553 - RNA, 19 nt, Artificial Sequence
  Description of Artificial Sequence: Synthetic oligonucleotide
auguuugagccgaccaacu

SEQ ID NO: 201554 - RNA, 19 nt, Artificial Sequence
  Description of Artificial Sequence: Synthetic oligonucleotide
cuacugagauagagucaug

SEQ ID NO: 201555 - RNA, 19 nt, Artificial Sequence
  Description of Artificial Sequence: Synthetic oligonucleotide
acacaaguauugacugaug

SEQ ID NO: 201556 - RNA, 19 nt, Artificial Sequence
  Description of Artificial Sequence: Synthetic oligonucleotide
uucgaacaacugugagccu

SEQ ID NO: 201557 - RNA, 19 nt, Artificial Sequence
  Description of Artificial Sequence: Synthetic oligonucleotide
cacaugaucgcuguacaua

SEQ ID NO: 201558 - RNA, 19 nt, Artificial Sequence
  Description of Artificial Sequence: Synthetic oligonucleotide
aaaaugcgguacaggugaa

SEQ ID NO: 201559 - RNA, 19 nt, Artificial Sequence
  Description of Artificial Sequence: Synthetic oligonucleotide
caaccucuagaacugauuu

SEQ ID NO: 201560 - RNA, 19 nt, Artificial Sequence
  Description of Artificial Sequence: Synthetic oligonucleotide
auggcgcugugaacagacc

SEQ ID NO: 201561 - RNA, 19 nt, Artificial Sequence
  Description of Artificial Sequence: Synthetic oligonucleotide
ccuuguucgcuccacugug

SEQ ID NO: 201562 - RNA, 19 nt, Artificial Sequence
  Description of Artificial Sequence: Synthetic oligonucleotide
acccaugcacauaagcuua

SEQ ID NO: 201563 - RNA, 19 nt, Artificial Sequence
  Description of Artificial Sequence: Synthetic oligonucleotide
accuuucgaacaacuguga

SEQ ID NO: 201564 - RNA, 19 nt, Artificial Sequence
  Description of Artificial Sequence: Synthetic oligonucleotide
caaggcaagugucauuagu

SEQ ID NO: 201565 - RNA, 19 nt, Artificial Sequence
  Description of Artificial Sequence: Synthetic oligonucleotide
ggaaaggacacuugcuggu

SEQ ID NO: 201566 - RNA, 19 nt, Artificial Sequence
  Description of Artificial Sequence: Synthetic oligonucleotide
aggcugugcaugauugugu

SEQ ID NO: 201567 - RNA, 19 nt, Artificial Sequence
  Description of Artificial Sequence: Synthetic oligonucleotide
gcuuaagauccacagcugu

SEQ ID NO: 201568 - RNA, 19 nt, Artificial Sequence
  Description of Artificial Sequence: Synthetic oligonucleotide
gccgaccaacucuaaauuc

SEQ ID NO: 201569 - RNA, 19 nt, Artificial Sequence
  Description of Artificial Sequence: Synthetic oligonucleotide
gucgguagcaucaaccuuu

SEQ ID NO: 201570 - RNA, 19 nt, Artificial Sequence
  Description of Artificial Sequence: Synthetic oligonucleotide
gcauguauuugcaugacau

SEQ ID NO: 201571 - RNA, 19 nt, Artificial Sequence
  Description of Artificial Sequence: Synthetic oligonucleotide
auacccguaugcauacaaa

SEQ ID NO: 201572 - RNA, 19 nt, Artificial Sequence
  Description of Artificial Sequence: Synthetic oligonucleotide
uugcgucgguagcaucaac

SEQ ID NO: 201573 - RNA, 19 nt, Artificial Sequence
  Description of Artificial Sequence: Synthetic oligonucleotide
guagugcaggcaucauuaa

SEQ ID NO: 201574 - RNA, 19 nt, Artificial Sequence
  Description of Artificial Sequence: Synthetic oligonucleotide
gugucauuagugugagggu

SEQ ID NO: 201575 - RNA, 19 nt, Artificial Sequence
  Description of Artificial Sequence: Synthetic oligonucleotide
acucuaaagugggucccaa

SEQ ID NO: 201576 - RNA, 19 nt, Artificial Sequence
  Description of Artificial Sequence: Synthetic oligonucleotide
ugguccuuguucgcuccac

SEQ ID NO: 201577 - RNA, 19 nt, Artificial Sequence
  Description of Artificial Sequence: Synthetic oligonucleotide
agccaucgcgaaaggcuuc

SEQ ID NO: 201578 - RNA, 19 nt, Artificial Sequence
  Description of Artificial Sequence: Synthetic oligonucleotide
gcuuaaagaaaggcuuaga

SEQ ID NO: 201579 - RNA, 19 nt, Artificial Sequence
  Description of Artificial Sequence: Synthetic oligonucleotide
agaugcgcguuaacacucu

SEQ ID NO: 201580 - RNA, 19 nt, Artificial Sequence
  Description of Artificial Sequence: Synthetic oligonucleotide
cguguauagccaagcuuag

SEQ ID NO: 201581 - RNA, 19 nt, Artificial Sequence
  Description of Artificial Sequence: Synthetic oligonucleotide
caucagugauucaccacgu

SEQ ID NO: 201582 - RNA, 19 nt, Artificial Sequence
  Description of Artificial Sequence: Synthetic oligonucleotide
gaauacccguaugcauaca

SEQ ID NO: 201583 - RNA, 19 nt, Artificial Sequence
  Description of Artificial Sequence: Synthetic oligonucleotide
gcuugcgucgguagcauca

SEQ ID NO: 201584 - RNA, 19 nt, Artificial Sequence
  Description of Artificial Sequence: Synthetic oligonucleotide
gaugcgcguuaacacucua

SEQ ID NO: 201585 - RNA, 19 nt, Artificial Sequence
  Description of Artificial Sequence: Synthetic oligonucleotide
gcucugugcggauuuacua

SEQ ID NO: 201586 - RNA, 19 nt, Artificial Sequence
  Description of Artificial Sequence: Synthetic oligonucleotide
agagccccacucgccaaug

SEQ ID NO: 201587 - RNA, 19 nt, Artificial Sequence
  Description of Artificial Sequence: Synthetic oligonucleotide
gucgaggaugaauucugau

SEQ ID NO: 201588 - RNA, 19 nt, Artificial Sequence
  Description of Artificial Sequence: Synthetic oligonucleotide
ucgccucgugacucauaga

SEQ ID NO: 201589 - RNA, 19 nt, Artificial Sequence
  Description of Artificial Sequence: Synthetic oligonucleotide
cugcuucugaauacccgua

SEQ ID NO: 201590 - RNA, 19 nt, Artificial Sequence
  Description of Artificial Sequence: Synthetic oligonucleotide
ccgaggacaugccacauaa

SEQ ID NO: 201591 - RNA, 19 nt, Artificial Sequence
  Description of Artificial Sequence: Synthetic oligonucleotide
cuagcaagcgcucccucau

SEQ ID NO: 201592 - RNA, 19 nt, Artificial Sequence
  Description of Artificial Sequence: Synthetic oligonucleotide
gcguuaacacucuauguuu

SEQ ID NO: 201593 - RNA, 19 nt, Artificial Sequence
  Description of Artificial Sequence: Synthetic oligonucleotide
ccaccuagaccaguguuuc

SEQ ID NO: 201594 - RNA, 19 nt, Artificial Sequence
  Description of Artificial Sequence: Synthetic oligonucleotide
augcgcguuaacacucuau

SEQ ID NO: 201595 - RNA, 19 nt, Artificial Sequence
  Description of Artificial Sequence: Synthetic oligonucleotide
gccuuacugguggaaaaca

SEQ ID NO: 201596 - RNA, 19 nt, Artificial Sequence
  Description of Artificial Sequence: Synthetic oligonucleotide
gcgccucuugauagcaagg

SEQ ID NO: 201597 - RNA, 19 nt, Artificial Sequence
  Description of Artificial Sequence: Synthetic oligonucleotide
ccgcuuuagccugaggcug

SEQ ID NO: 201598 - RNA, 19 nt, Artificial Sequence
  Description of Artificial Sequence: Synthetic oligonucleotide
aucgcucuggaugcaccaa

SEQ ID NO: 201599 - RNA, 19 nt, Artificial Sequence
  Description of Artificial Sequence: Synthetic oligonucleotide
uugcccgcuuuagccugag

SEQ ID NO: 201600 - RNA, 19 nt, Artificial Sequence
  Description of Artificial Sequence: Synthetic oligonucleotide
gccaucgcgaaaggcuucc

SEQ ID NO: 201601 - RNA, 19 nt, Artificial Sequence
  Description of Artificial Sequence: Synthetic oligonucleotide
ccuacugagauagagucau

SEQ ID NO: 201602 - RNA, 19 nt, Artificial Sequence
  Description of Artificial Sequence: Synthetic oligonucleotide
cuguagccacacuaucgcu

SEQ ID NO: 201603 - RNA, 19 nt, Artificial Sequence
  Description of Artificial Sequence: Synthetic oligonucleotide
ggcuuagaaauagguaagu

SEQ ID NO: 201604 - RNA, 19 nt, Artificial Sequence
  Description of Artificial Sequence: Synthetic oligonucleotide
cuugcgucgguagcaucaa

SEQ ID NO: 201605 - RNA, 19 nt, Artificial Sequence
  Description of Artificial Sequence: Synthetic oligonucleotide
gcggauuuacuaguucaaa

SEQ ID NO: 201606 - RNA, 19 nt, Artificial Sequence
  Description of Artificial Sequence: Synthetic oligonucleotide
gccacacuaucgcucugga

SEQ ID NO: 201607 - RNA, 19 nt, Artificial Sequence
  Description of Artificial Sequence: Synthetic oligonucleotide
gcgcguuaacacucuaugu

SEQ ID NO: 201608 - RNA, 19 nt, Artificial Sequence
  Description of Artificial Sequence: Synthetic oligonucleotide
ccuaaaaucuggcgccucu

SEQ ID NO: 201609 - RNA, 19 nt, Artificial Sequence
  Description of Artificial Sequence: Synthetic oligonucleotide
caugaucgcuguacauaau

SEQ ID NO: 201610 - RNA, 19 nt, Artificial Sequence
  Description of Artificial Sequence: Synthetic oligonucleotide
gcgcugugaacagaccaca

SEQ ID NO: 201611 - RNA, 19 nt, Artificial Sequence
  Description of Artificial Sequence: Synthetic oligonucleotide
caucgcgaaaggcuuccau

SEQ ID NO: 201612 - RNA, 19 nt, Artificial Sequence
  Description of Artificial Sequence: Synthetic oligonucleotide
gggugcagauuagccaguc

SEQ ID NO: 201613 - RNA, 19 nt, Artificial Sequence
  Description of Artificial Sequence: Synthetic oligonucleotide
cggugacugauugccacag

SEQ ID NO: 201614 - RNA, 19 nt, Artificial Sequence
  Description of Artificial Sequence: Synthetic oligonucleotide
gauucaccacguggaacuu

SEQ ID NO: 201615 - RNA, 19 nt, Artificial Sequence
  Description of Artificial Sequence: Synthetic oligonucleotide
gccucgugacucauagauc

SEQ ID NO: 201616 - RNA, 19 nt, Artificial Sequence
  Description of Artificial Sequence: Synthetic oligonucleotide
caggacugucacguguaua

SEQ ID NO: 201617 - RNA, 19 nt, Artificial Sequence
  Description of Artificial Sequence: Synthetic oligonucleotide
cugugcggauuuacuaguu

SEQ ID NO: 201618 - RNA, 19 nt, Artificial Sequence
  Description of Artificial Sequence: Synthetic oligonucleotide
gccugguuucaaaauggua

SEQ ID NO: 201619 - RNA, 19 nt, Artificial Sequence
  Description of Artificial Sequence: Synthetic oligonucleotide
cccgcuuuagccugaggcu

SEQ ID NO: 201620 - RNA, 19 nt, Artificial Sequence
  Description of Artificial Sequence: Synthetic oligonucleotide
ggacggugacugauugcca

SEQ ID NO: 201621 - RNA, 19 nt, Artificial Sequence
  Description of Artificial Sequence: Synthetic oligonucleotide
agcuuccuacugagauaga

SEQ ID NO: 201622 - RNA, 19 nt, Artificial Sequence
  Description of Artificial Sequence: Synthetic oligonucleotide
cacuaucgcucuggaugca

SEQ ID NO: 201623 - RNA, 19 nt, Artificial Sequence
  Description of Artificial Sequence: Synthetic oligonucleotide
cgcguuaacacucuauguu

SEQ ID NO: 201624 - RNA, 19 nt, Artificial Sequence
  Description of Artificial Sequence: Synthetic oligonucleotide
gccuaaaaucuggcgccuc

SEQ ID NO: 201625 - RNA, 19 nt, Artificial Sequence
  Description of Artificial Sequence: Synthetic oligonucleotide
ccuagaccaguguuucccu

SEQ ID NO: 201626 - RNA, 19 nt, Artificial Sequence
  Description of Artificial Sequence: Synthetic oligonucleotide
gcgguacaggugaaauaaa

SEQ ID NO: 201627 - RNA, 19 nt, Artificial Sequence
  Description of Artificial Sequence: Synthetic oligonucleotide
cgguagcaucaaccuuucg

SEQ ID NO: 201628 - RNA, 19 nt, Artificial Sequence
  Description of Artificial Sequence: Synthetic oligonucleotide
gccucucgucgguucugua

SEQ ID NO: 201629 - RNA, 19 nt, Artificial Sequence
  Description of Artificial Sequence: Synthetic oligonucleotide
cgccucuugauagcaaggu

SEQ ID NO: 201630 - RNA, 19 nt, Artificial Sequence
  Description of Artificial Sequence: Synthetic oligonucleotide
ccacacuaucgcucuggau

SEQ ID NO: 201631 - RNA, 19 nt, Artificial Sequence
  Description of Artificial Sequence: Synthetic oligonucleotide
ccaucgcgaaaggcuucca

SEQ ID NO: 201632 - RNA, 19 nt, Artificial Sequence
  Description of Artificial Sequence: Synthetic oligonucleotide
cugucgccucgugacucau

SEQ ID NO: 201633 - RNA, 19 nt, Artificial Sequence
  Description of Artificial Sequence: Synthetic oligonucleotide
uauauauauauauauaugc

SEQ ID NO: 201634 - RNA, 19 nt, Artificial Sequence
  Description of Artificial Sequence: Synthetic oligonucleotide
aauauauauauauauauau

SEQ ID NO: 201635 - RNA, 19 nt, Artificial Sequence
  Description of Artificial Sequence: Synthetic oligonucleotide
aaaauauauauauauauau

SEQ ID NO: 201636 - RNA, 19 nt, Artificial Sequence
  Description of Artificial Sequence: Synthetic oligonucleotide
ugaucaaucaccuugcggg

SEQ ID NO: 201637 - RNA, 19 nt, Artificial Sequence
  Description of Artificial Sequence: Synthetic oligonucleotide
uuauaagaaaccucgaugc

SEQ ID NO: 201638 - RNA, 19 nt, Artificial Sequence
  Description of Artificial Sequence: Synthetic oligonucleotide
uauauauauauauauauau

SEQ ID NO: 201639 - RNA, 19 nt, Artificial Sequence
  Description of Artificial Sequence: Synthetic oligonucleotide
gaugcuaagaagaaguucg

SEQ ID NO: 201640 - RNA, 19 nt, Artificial Sequence
  Description of Artificial Sequence: Synthetic oligonucleotide
uauauauauauauaugccu

SEQ ID NO: 201641 - RNA, 19 nt, Artificial Sequence
  Description of Artificial Sequence: Synthetic oligonucleotide
auauauauauauauaugcc

SEQ ID NO: 201642 - RNA, 19 nt, Artificial Sequence
  Description of Artificial Sequence: Synthetic oligonucleotide
auuauaagaaaccucgaug

SEQ ID NO: 201643 - RNA, 19 nt, Artificial Sequence
  Description of Artificial Sequence: Synthetic oligonucleotide
acauauugaacucucuaac

SEQ ID NO: 201644 - RNA, 19 nt, Artificial Sequence
  Description of Artificial Sequence: Synthetic oligonucleotide
uucaauacgugcaauguca

SEQ ID NO: 201645 - RNA, 19 nt, Artificial Sequence
  Description of Artificial Sequence: Synthetic oligonucleotide
auauauauauauaugccuc

SEQ ID NO: 201646 - RNA, 19 nt, Artificial Sequence
  Description of Artificial Sequence: Synthetic oligonucleotide
aacucucuaaccuggcugg

SEQ ID NO: 201647 - RNA, 19 nt, Artificial Sequence
  Description of Artificial Sequence: Synthetic oligonucleotide
uguaguaucuucugggcag

SEQ ID NO: 201648 - RNA, 19 nt, Artificial Sequence
  Description of Artificial Sequence: Synthetic oligonucleotide
uuguacagggcccaugugg

SEQ ID NO: 201649 - RNA, 19 nt, Artificial Sequence
  Description of Artificial Sequence: Synthetic oligonucleotide
guugauauuucuucgggag

SEQ ID NO: 201650 - RNA, 19 nt, Artificial Sequence
  Description of Artificial Sequence: Synthetic oligonucleotide
aaacuucacacuuccuaac

SEQ ID NO: 201651 - RNA, 19 nt, Artificial Sequence
  Description of Artificial Sequence: Synthetic oligonucleotide
aagaguccuagcauguucc

SEQ ID NO: 201652 - RNA, 19 nt, Artificial Sequence
  Description of Artificial Sequence: Synthetic oligonucleotide
cauauugaacucucuaacc

SEQ ID NO: 201653 - RNA, 19 nt, Artificial Sequence
  Description of Artificial Sequence: Synthetic oligonucleotide
ucaccacuuacuuuguagg

SEQ ID NO: 201654 - RNA, 19 nt, Artificial Sequence
  Description of Artificial Sequence: Synthetic oligonucleotide
uauauauauauaugccucu

SEQ ID NO: 201655 - RNA, 19 nt, Artificial Sequence
  Description of Artificial Sequence: Synthetic oligonucleotide
ggcauuauaagaaaccucg

SEQ ID NO: 201656 - RNA, 19 nt, Artificial Sequence
  Description of Artificial Sequence: Synthetic oligonucleotide
uauaagaaaccucgaugcc

SEQ ID NO: 201657 - RNA, 19 nt, Artificial Sequence
  Description of Artificial Sequence: Synthetic oligonucleotide
uacuuuguaggcuggaaug

SEQ ID NO: 201658 - RNA, 19 nt, Artificial Sequence
  Description of Artificial Sequence: Synthetic oligonucleotide
auauauauauauauauaug

SEQ ID NO: 201659 - RNA, 19 nt, Artificial Sequence
  Description of Artificial Sequence: Synthetic oligonucleotide
cucggaauuggucagguag

SEQ ID NO: 201660 - RNA, 19 nt, Artificial Sequence
  Description of Artificial Sequence: Synthetic oligonucleotide
acagaauuagaggcaagcc

SEQ ID NO: 201661 - RNA, 19 nt, Artificial Sequence
  Description of Artificial Sequence: Synthetic oligonucleotide
aaauauauauauauauaua

SEQ ID NO: 201662 - RNA, 19 nt, Artificial Sequence
  Description of Artificial Sequence: Synthetic oligonucleotide
gacacucacagaauuagag

SEQ ID NO: 201663 - RNA, 19 nt, Artificial Sequence
  Description of Artificial Sequence: Synthetic oligonucleotide
aaaccucgaugccaucggc

SEQ ID NO: 201664 - RNA, 19 nt, Artificial Sequence
  Description of Artificial Sequence: Synthetic oligonucleotide
uaugccucuaucuggacgu

SEQ ID NO: 201665 - RNA, 19 nt, Artificial Sequence
  Description of Artificial Sequence: Synthetic oligonucleotide
aguucugaccaucucuggg

SEQ ID NO: 201666 - RNA, 19 nt, Artificial Sequence
  Description of Artificial Sequence: Synthetic oligonucleotide
ucgaacaugaugugggaca

SEQ ID NO: 201667 - RNA, 19 nt, Artificial Sequence
  Description of Artificial Sequence: Synthetic oligonucleotide
auaugccucuaucuggacg

SEQ ID NO: 201668 - RNA, 19 nt, Artificial Sequence
  Description of Artificial Sequence: Synthetic oligonucleotide
cuaagaagaaguucguuca

SEQ ID NO: 201669 - RNA, 19 nt, Artificial Sequence
  Description of Artificial Sequence: Synthetic oligonucleotide
uggauggccgcccacauac

SEQ ID NO: 201670 - RNA, 19 nt, Artificial Sequence
  Description of Artificial Sequence: Synthetic oligonucleotide
cucucuauaguuacugcag

SEQ ID NO: 201671 - RNA, 19 nt, Artificial Sequence
  Description of Artificial Sequence: Synthetic oligonucleotide
agcgcuaucaccaucaccu

SEQ ID NO: 201672 - RNA, 19 nt, Artificial Sequence
  Description of Artificial Sequence: Synthetic oligonucleotide
gaacucucuaaccuggcug

SEQ ID NO: 201673 - RNA, 19 nt, Artificial Sequence
  Description of Artificial Sequence: Synthetic oligonucleotide
cauguuuggcagaaggggc

SEQ ID NO: 201674 - RNA, 19 nt, Artificial Sequence
  Description of Artificial Sequence: Synthetic oligonucleotide
aagcgcuaucaccaucacc

SEQ ID NO: 201675 - RNA, 19 nt, Artificial Sequence
  Description of Artificial Sequence: Synthetic oligonucleotide
ucuauaguuacugcaguga

SEQ ID NO: 201676 - RNA, 19 nt, Artificial Sequence
  Description of Artificial Sequence: Synthetic oligonucleotide
uacgugcaaugucaaauag

SEQ ID NO: 201677 - RNA, 19 nt, Artificial Sequence
  Description of Artificial Sequence: Synthetic oligonucleotide
guaacaucuuacucucugg

SEQ ID NO: 201678 - RNA, 19 nt, Artificial Sequence
  Description of Artificial Sequence: Synthetic oligonucleotide
uaagaaaccucgaugccau

SEQ ID NO: 201679 - RNA, 19 nt, Artificial Sequence
  Description of Artificial Sequence: Synthetic oligonucleotide
aaugugugugaggcgacac

SEQ ID NO: 201680 - RNA, 19 nt, Artificial Sequence
  Description of Artificial Sequence: Synthetic oligonucleotide
aguggggccggucuuaauc

SEQ ID NO: 201681 - RNA, 19 nt, Artificial Sequence
  Description of Artificial Sequence: Synthetic oligonucleotide
uugaggaacaucucgcagu

SEQ ID NO: 201682 - RNA, 19 nt, Artificial Sequence
  Description of Artificial Sequence: Synthetic oligonucleotide
uuguaguaucuucugggca

SEQ ID NO: 201683 - RNA, 19 nt, Artificial Sequence
  Description of Artificial Sequence: Synthetic oligonucleotide
gaagacgcugaugaacugg

SEQ ID NO: 201684 - RNA, 19 nt, Artificial Sequence
  Description of Artificial Sequence: Synthetic oligonucleotide
aaguucguucacccggcgg

SEQ ID NO: 201685 - RNA, 19 nt, Artificial Sequence
  Description of Artificial Sequence: Synthetic oligonucleotide
gacaccccaaaguacagac

SEQ ID NO: 201686 - RNA, 19 nt, Artificial Sequence
  Description of Artificial Sequence: Synthetic oligonucleotide
ucucuauaguuacugcagu

SEQ ID NO: 201687 - RNA, 19 nt, Artificial Sequence
  Description of Artificial Sequence: Synthetic oligonucleotide
aucagcgaugcugagcagc

SEQ ID NO: 201688 - RNA, 19 nt, Artificial Sequence
  Description of Artificial Sequence: Synthetic oligonucleotide
aguggaauugccucugagu

SEQ ID NO: 201689 - RNA, 19 nt, Artificial Sequence
  Description of Artificial Sequence: Synthetic oligonucleotide
uugauauuucuucgggagu

SEQ ID NO: 201690 - RNA, 19 nt, Artificial Sequence
  Description of Artificial Sequence: Synthetic oligonucleotide
auaagaaaccucgaugcca

SEQ ID NO: 201691 - RNA, 19 nt, Artificial Sequence
  Description of Artificial Sequence: Synthetic oligonucleotide
uggaaugugugugaggcga

SEQ ID NO: 201692 - RNA, 19 nt, Artificial Sequence
  Description of Artificial Sequence: Synthetic oligonucleotide
ucucuaaccuggcugggga

SEQ ID NO: 201693 - RNA, 19 nt, Artificial Sequence
  Description of Artificial Sequence: Synthetic oligonucleotide
uauaguuacugcagugauc

SEQ ID NO: 201694 - RNA, 19 nt, Artificial Sequence
  Description of Artificial Sequence: Synthetic oligonucleotide
ucagcgaugcugagcagcc

SEQ ID NO: 201695 - RNA, 19 nt, Artificial Sequence
  Description of Artificial Sequence: Synthetic oligonucleotide
aauccccaagcgcuaucac

SEQ ID NO: 201696 - RNA, 19 nt, Artificial Sequence
  Description of Artificial Sequence: Synthetic oligonucleotide
auuacacaagugcacggca

SEQ ID NO: 201697 - RNA, 19 nt, Artificial Sequence
  Description of Artificial Sequence: Synthetic oligonucleotide
gaaaggagggacuaaggua

SEQ ID NO: 201698 - RNA, 19 nt, Artificial Sequence
  Description of Artificial Sequence: Synthetic oligonucleotide
agacuguuuccuuuggaga

SEQ ID NO: 201699 - RNA, 19 nt, Artificial Sequence
  Description of Artificial Sequence: Synthetic oligonucleotide
ucggaauuggucagguaga

SEQ ID NO: 201700 - RNA, 19 nt, Artificial Sequence
  Description of Artificial Sequence: Synthetic oligonucleotide
gaucaaucaccuugcgggc

SEQ ID NO: 201701 - RNA, 19 nt, Artificial Sequence
  Description of Artificial Sequence: Synthetic oligonucleotide
aguucguucacccggcggu

SEQ ID NO: 201702 - RNA, 19 nt, Artificial Sequence
  Description of Artificial Sequence: Synthetic oligonucleotide
auauauauauauauauaua

SEQ ID NO: 201703 - RNA, 19 nt, Artificial Sequence
  Description of Artificial Sequence: Synthetic oligonucleotide
cuucaacauggucacgacg

SEQ ID NO: 201704 - RNA, 19 nt, Artificial Sequence
  Description of Artificial Sequence: Synthetic oligonucleotide
guaguagcuggagaggcgg

SEQ ID NO: 201705 - RNA, 19 nt, Artificial Sequence
  Description of Artificial Sequence: Synthetic oligonucleotide
aaugcgcuggauugacuca

SEQ ID NO: 201706 - RNA, 19 nt, Artificial Sequence
  Description of Artificial Sequence: Synthetic oligonucleotide
auagcagcacggccaaagg

SEQ ID NO: 201707 - RNA, 19 nt, Artificial Sequence
  Description of Artificial Sequence: Synthetic oligonucleotide
cagugaucaaucaccuugc

SEQ ID NO: 201708 - RNA, 19 nt, Artificial Sequence
  Description of Artificial Sequence: Synthetic oligonucleotide
guagacagacacgagguug

SEQ ID NO: 201709 - RNA, 19 nt, Artificial Sequence
  Description of Artificial Sequence: Synthetic oligonucleotide
gcuaagaagaaguucguuc

SEQ ID NO: 201710 - RNA, 19 nt, Artificial Sequence
  Description of Artificial Sequence: Synthetic oligonucleotide
cucuauaguuacugcagug

SEQ ID NO: 201711 - RNA, 19 nt, Artificial Sequence
  Description of Artificial Sequence: Synthetic oligonucleotide
ucaauacgugcaaugucaa

SEQ ID NO: 201712 - RNA, 19 nt, Artificial Sequence
  Description of Artificial Sequence: Synthetic oligonucleotide
caaugcgcuggauugacuc

SEQ ID NO: 201713 - RNA, 19 nt, Artificial Sequence
  Description of Artificial Sequence: Synthetic oligonucleotide
uccaggagaacuccaugac

SEQ ID NO: 201714 - RNA, 19 nt, Artificial Sequence
  Description of Artificial Sequence: Synthetic oligonucleotide
augaugugggacaggacac

SEQ ID NO: 201715 - RNA, 19 nt, Artificial Sequence
  Description of Artificial Sequence: Synthetic oligonucleotide
cacaggcauuauaagaaac

SEQ ID NO: 201716 - RNA, 19 nt, Artificial Sequence
  Description of Artificial Sequence: Synthetic oligonucleotide
agaaguucguucacccggc

SEQ ID NO: 201717 - RNA, 19 nt, Artificial Sequence
  Description of Artificial Sequence: Synthetic oligonucleotide
aguugaggaacaucucgca

SEQ ID NO: 201718 - RNA, 19 nt, Artificial Sequence
  Description of Artificial Sequence: Synthetic oligonucleotide
uuacacaagugcacggcaa

SEQ ID NO: 201719 - RNA, 19 nt, Artificial Sequence
  Description of Artificial Sequence: Synthetic oligonucleotide
cauuacacaagugcacggc

SEQ ID NO: 201720 - RNA, 19 nt, Artificial Sequence
  Description of Artificial Sequence: Synthetic oligonucleotide
cuuggaggcgggcuaagag

SEQ ID NO: 201721 - RNA, 19 nt, Artificial Sequence
  Description of Artificial Sequence: Synthetic oligonucleotide
aagugcacggcaaugcgcu

SEQ ID NO: 201722 - RNA, 19 nt, Artificial Sequence
  Description of Artificial Sequence: Synthetic oligonucleotide
aaagcuuggaggcgggcua

SEQ ID NO: 201723 - RNA, 19 nt, Artificial Sequence
  Description of Artificial Sequence: Synthetic oligonucleotide
acuaagguagggaagcaca

SEQ ID NO: 201724 - RNA, 19 nt, Artificial Sequence
  Description of Artificial Sequence: Synthetic oligonucleotide
aucgaacaugaugugggac

SEQ ID NO: 201725 - RNA, 19 nt, Artificial Sequence
  Description of Artificial Sequence: Synthetic oligonucleotide
ugaacgguacucggaauug

SEQ ID NO: 201726 - RNA, 19 nt, Artificial Sequence
  Description of Artificial Sequence: Synthetic oligonucleotide
uuggaggcgggcuaagagu

SEQ ID NO: 201727 - RNA, 19 nt, Artificial Sequence
  Description of Artificial Sequence: Synthetic oligonucleotide
cauagcagcacggccaaag

SEQ ID NO: 201728 - RNA, 19 nt, Artificial Sequence
  Description of Artificial Sequence: Synthetic oligonucleotide
uaggacuccaugccauuca

SEQ ID NO: 201729 - RNA, 19 nt, Artificial Sequence
  Description of Artificial Sequence: Synthetic oligonucleotide
cacauauugaacucucuaa

SEQ ID NO: 201730 - RNA, 19 nt, Artificial Sequence
  Description of Artificial Sequence: Synthetic oligonucleotide
caccacuuacuuuguaggc

SEQ ID NO: 201731 - RNA, 19 nt, Artificial Sequence
  Description of Artificial Sequence: Synthetic oligonucleotide
agaguccuagcauguuccg

SEQ ID NO: 201732 - RNA, 19 nt, Artificial Sequence
  Description of Artificial Sequence: Synthetic oligonucleotide
caaagacucaggagaaguc

SEQ ID NO: 201733 - RNA, 19 nt, Artificial Sequence
  Description of Artificial Sequence: Synthetic oligonucleotide
ugguaaagcaaugggcugu

SEQ ID NO: 201734 - RNA, 19 nt, Artificial Sequence
  Description of Artificial Sequence: Synthetic oligonucleotide
uuugcucugaacgguacuc

SEQ ID NO: 201735 - RNA, 19 nt, Artificial Sequence
  Description of Artificial Sequence: Synthetic oligonucleotide
gcuggaaugugugugaggc

SEQ ID NO: 201736 - RNA, 19 nt, Artificial Sequence
  Description of Artificial Sequence: Synthetic oligonucleotide
agaccagggcauuacacaa

SEQ ID NO: 201737 - RNA, 19 nt, Artificial Sequence
  Description of Artificial Sequence: Synthetic oligonucleotide
ggucuuaauccccaagcgc

SEQ ID NO: 201738 - RNA, 19 nt, Artificial Sequence
  Description of Artificial Sequence: Synthetic oligonucleotide
gaacgguacucggaauugg

SEQ ID NO: 201739 - RNA, 19 nt, Artificial Sequence
  Description of Artificial Sequence: Synthetic oligonucleotide
acauacguuccuccaccuc

SEQ ID NO: 201740 - RNA, 19 nt, Artificial Sequence
  Description of Artificial Sequence: Synthetic oligonucleotide
caagaguccuagcauguuc

SEQ ID NO: 201741 - RNA, 19 nt, Artificial Sequence
  Description of Artificial Sequence: Synthetic oligonucleotide
gcuaagaguggcaaggagc

SEQ ID NO: 201742 - RNA, 19 nt, Artificial Sequence
  Description of Artificial Sequence: Synthetic oligonucleotide
gagggacuaagguagggaa

SEQ ID NO: 201743 - RNA, 19 nt, Artificial Sequence
  Description of Artificial Sequence: Synthetic oligonucleotide
ugaggcgacacagggaggu

SEQ ID NO: 201744 - RNA, 19 nt, Artificial Sequence
  Description of Artificial Sequence: Synthetic oligonucleotide
auggucacgacgaagccca

SEQ ID NO: 201745 - RNA, 19 nt, Artificial Sequence
  Description of Artificial Sequence: Synthetic oligonucleotide
cacgacgaagcccaucuug

SEQ ID NO: 201746 - RNA, 19 nt, Artificial Sequence
  Description of Artificial Sequence: Synthetic oligonucleotide
gaaguucguucacccggcg

SEQ ID NO: 201747 - RNA, 19 nt, Artificial Sequence
  Description of Artificial Sequence: Synthetic oligonucleotide
ucucuaggaucauguggcc

SEQ ID NO: 201748 - RNA, 19 nt, Artificial Sequence
  Description of Artificial Sequence: Synthetic oligonucleotide
uggaauugccucugaguuc

SEQ ID NO: 201749 - RNA, 19 nt, Artificial Sequence
  Description of Artificial Sequence: Synthetic oligonucleotide
ucuuaauccccaagcgcua

SEQ ID NO: 201750 - RNA, 19 nt, Artificial Sequence
  Description of Artificial Sequence: Synthetic oligonucleotide
augaacugggaggucauca

SEQ ID NO: 201751 - RNA, 19 nt, Artificial Sequence
  Description of Artificial Sequence: Synthetic oligonucleotide
agacacgagguuguacagg

SEQ ID NO: 201752 - RNA, 19 nt, Artificial Sequence
  Description of Artificial Sequence: Synthetic oligonucleotide
uccuagcauguuccggugc

SEQ ID NO: 201753 - RNA, 19 nt, Artificial Sequence
  Description of Artificial Sequence: Synthetic oligonucleotide
accacuuacuuuguaggcu

SEQ ID NO: 201754 - RNA, 19 nt, Artificial Sequence
  Description of Artificial Sequence: Synthetic oligonucleotide
cauggucacgacgaagccc

SEQ ID NO: 201755 - RNA, 19 nt, Artificial Sequence
  Description of Artificial Sequence: Synthetic oligonucleotide
ugguaggacuccaugccau

SEQ ID NO: 201756 - RNA, 19 nt, Artificial Sequence
  Description of Artificial Sequence: Synthetic oligonucleotide
cuggaaugugugugaggcg

SEQ ID NO: 201757 - RNA, 19 nt, Artificial Sequence
  Description of Artificial Sequence: Synthetic oligonucleotide
guggggccggucuuaaucc

SEQ ID NO: 201758 - RNA, 19 nt, Artificial Sequence
  Description of Artificial Sequence: Synthetic oligonucleotide
auauauauauaugccucua

SEQ ID NO: 201759 - RNA, 19 nt, Artificial Sequence
  Description of Artificial Sequence: Synthetic oligonucleotide
agcaagacccugguccugg

SEQ ID NO: 201760 - RNA, 19 nt, Artificial Sequence
  Description of Artificial Sequence: Synthetic oligonucleotide
ucaacauggucacgacgaa

SEQ ID NO: 201761 - RNA, 19 nt, Artificial Sequence
  Description of Artificial Sequence: Synthetic oligonucleotide
gaccuggucacacgucuug

SEQ ID NO: 201762 - RNA, 19 nt, Artificial Sequence
  Description of Artificial Sequence: Synthetic oligonucleotide
cacuuacuuuguaggcugg

SEQ ID NO: 201763 - RNA, 19 nt, Artificial Sequence
  Description of Artificial Sequence: Synthetic oligonucleotide
agccccaaggaacugcagu

SEQ ID NO: 201764 - RNA, 19 nt, Artificial Sequence
  Description of Artificial Sequence: Synthetic oligonucleotide
uacuuugcucugaacggua

SEQ ID NO: 201765 - RNA, 19 nt, Artificial Sequence
  Description of Artificial Sequence: Synthetic oligonucleotide
ugagcagaugaggacugca

SEQ ID NO: 201766 - RNA, 19 nt, Artificial Sequence
  Description of Artificial Sequence: Synthetic oligonucleotide
aacgguacucggaauuggu

SEQ ID NO: 201767 - RNA, 19 nt, Artificial Sequence
  Description of Artificial Sequence: Synthetic oligonucleotide
aggucgguguucuguguag

SEQ ID NO: 201768 - RNA, 19 nt, Artificial Sequence
  Description of Artificial Sequence: Synthetic oligonucleotide
gggacuaagguagggaagc

SEQ ID NO: 201769 - RNA, 19 nt, Artificial Sequence
  Description of Artificial Sequence: Synthetic oligonucleotide
cgugcaaugucaaauagca

SEQ ID NO: 201770 - RNA, 19 nt, Artificial Sequence
  Description of Artificial Sequence: Synthetic oligonucleotide
aaggcaugaugcgcugguc

SEQ ID NO: 201771 - RNA, 19 nt, Artificial Sequence
  Description of Artificial Sequence: Synthetic oligonucleotide
ucgggugucucaucuguaa

SEQ ID NO: 201772 - RNA, 19 nt, Artificial Sequence
  Description of Artificial Sequence: Synthetic oligonucleotide
cagugggccaacacagccc

SEQ ID NO: 201773 - RNA, 19 nt, Artificial Sequence
  Description of Artificial Sequence: Synthetic oligonucleotide
gagaaucggcucaaaggac

SEQ ID NO: 201774 - RNA, 19 nt, Artificial Sequence
  Description of Artificial Sequence: Synthetic oligonucleotide
uauaugccucuaucuggac

SEQ ID NO: 201775 - RNA, 19 nt, Artificial Sequence
  Description of Artificial Sequence: Synthetic oligonucleotide
gacuaagguagggaagcac

SEQ ID NO: 201776 - RNA, 19 nt, Artificial Sequence
  Description of Artificial Sequence: Synthetic oligonucleotide
agcccggaaaggcaugaug

SEQ ID NO: 201777 - RNA, 19 nt, Artificial Sequence
  Description of Artificial Sequence: Synthetic oligonucleotide
ucgggaguugaugucccag

SEQ ID NO: 201778 - RNA, 19 nt, Artificial Sequence
  Description of Artificial Sequence: Synthetic oligonucleotide
guggaauugccucugaguu

SEQ ID NO: 201779 - RNA, 19 nt, Artificial Sequence
  Description of Artificial Sequence: Synthetic oligonucleotide
ggcauguuuggcagaaggg

SEQ ID NO: 201780 - RNA, 19 nt, Artificial Sequence
  Description of Artificial Sequence: Synthetic oligonucleotide
gucgguguucuguguaggc

SEQ ID NO: 201781 - RNA, 19 nt, Artificial Sequence
  Description of Artificial Sequence: Synthetic oligonucleotide
gaugccaucggccuugcuu

SEQ ID NO: 201782 - RNA, 19 nt, Artificial Sequence
  Description of Artificial Sequence: Synthetic oligonucleotide
cauuauaagaaaccucgau

SEQ ID NO: 201783 - RNA, 19 nt, Artificial Sequence
  Description of Artificial Sequence: Synthetic oligonucleotide
guagggaagcacauauuga

SEQ ID NO: 201784 - RNA, 19 nt, Artificial Sequence
  Description of Artificial Sequence: Synthetic oligonucleotide
ucucgcaguugucgggugu

SEQ ID NO: 201785 - RNA, 19 nt, Artificial Sequence
  Description of Artificial Sequence: Synthetic oligonucleotide
aguugucgggugucucauc

SEQ ID NO: 201786 - RNA, 19 nt, Artificial Sequence
  Description of Artificial Sequence: Synthetic oligonucleotide
ucugaacgguacucggaau

SEQ ID NO: 201787 - RNA, 19 nt, Artificial Sequence
  Description of Artificial Sequence: Synthetic oligonucleotide
ugcauagccugaggccugg

SEQ ID NO: 201788 - RNA, 19 nt, Artificial Sequence
  Description of Artificial Sequence: Synthetic oligonucleotide
gucacgacgaagcccaucu

SEQ ID NO: 201789 - RNA, 19 nt, Artificial Sequence
  Description of Artificial Sequence: Synthetic oligonucleotide
gggcccaucgaacaugaug

SEQ ID NO: 201790 - RNA, 19 nt, Artificial Sequence
  Description of Artificial Sequence: Synthetic oligonucleotide
caguggaauugccucugag

SEQ ID NO: 201791 - RNA, 19 nt, Artificial Sequence
  Description of Artificial Sequence: Synthetic oligonucleotide
gaagcacauauugaacucu

SEQ ID NO: 201792 - RNA, 19 nt, Artificial Sequence
  Description of Artificial Sequence: Synthetic oligonucleotide
caacauggucacgacgaag

SEQ ID NO: 201793 - RNA, 19 nt, Artificial Sequence
  Description of Artificial Sequence: Synthetic oligonucleotide
ccacuuacuuuguaggcug

SEQ ID NO: 201794 - RNA, 19 nt, Artificial Sequence
  Description of Artificial Sequence: Synthetic oligonucleotide
uggccgcccacauacguuc

SEQ ID NO: 201795 - RNA, 19 nt, Artificial Sequence
  Description of Artificial Sequence: Synthetic oligonucleotide
uacucggaauuggucaggu

SEQ ID NO: 201796 - RNA, 19 nt, Artificial Sequence
  Description of Artificial Sequence: Synthetic oligonucleotide
ccggucuuaauccccaagc

SEQ ID NO: 201797 - RNA, 19 nt, Artificial Sequence
  Description of Artificial Sequence: Synthetic oligonucleotide
ugaggccgcagcuccuuca

SEQ ID NO: 201798 - RNA, 19 nt, Artificial Sequence
  Description of Artificial Sequence: Synthetic oligonucleotide
cagcccaccuucuuugauc

SEQ ID NO: 201799 - RNA, 19 nt, Artificial Sequence
  Description of Artificial Sequence: Synthetic oligonucleotide
ggcuaagaguggcaaggag

SEQ ID NO: 201800 - RNA, 19 nt, Artificial Sequence
  Description of Artificial Sequence: Synthetic oligonucleotide
acacaagugcacggcaaug

SEQ ID NO: 201801 - RNA, 19 nt, Artificial Sequence
  Description of Artificial Sequence: Synthetic oligonucleotide
guuguacagggcccaugug

SEQ ID NO: 201802 - RNA, 19 nt, Artificial Sequence
  Description of Artificial Sequence: Synthetic oligonucleotide
cucugaacgguacucggaa

SEQ ID NO: 201803 - RNA, 19 nt, Artificial Sequence
  Description of Artificial Sequence: Synthetic oligonucleotide
cugacugacuggagagaug

SEQ ID NO: 201804 - RNA, 19 nt, Artificial Sequence
  Description of Artificial Sequence: Synthetic oligonucleotide
ccacauacguuccuccacc

SEQ ID NO: 201805 - RNA, 19 nt, Artificial Sequence
  Description of Artificial Sequence: Synthetic oligonucleotide
gaggcgggcuaagaguggc

SEQ ID NO: 201806 - RNA, 19 nt, Artificial Sequence
  Description of Artificial Sequence: Synthetic oligonucleotide
guacucggaauuggucagg

SEQ ID NO: 201807 - RNA, 19 nt, Artificial Sequence
  Description of Artificial Sequence: Synthetic oligonucleotide
ugcuaagaagaaguucguu

SEQ ID NO: 201808 - RNA, 19 nt, Artificial Sequence
  Description of Artificial Sequence: Synthetic oligonucleotide
ggaagugaucucaggucgg

SEQ ID NO: 201809 - RNA, 19 nt, Artificial Sequence
  Description of Artificial Sequence: Synthetic oligonucleotide
ugaaagcuuggaggcgggc

SEQ ID NO: 201810 - RNA, 19 nt, Artificial Sequence
  Description of Artificial Sequence: Synthetic oligonucleotide
aggagugaacauggcagca

SEQ ID NO: 201811 - RNA, 19 nt, Artificial Sequence
  Description of Artificial Sequence: Synthetic oligonucleotide
acggucuggcagcugccag

SEQ ID NO: 201812 - RNA, 19 nt, Artificial Sequence
  Description of Artificial Sequence: Synthetic oligonucleotide
uaagaguggcaaggagcug

SEQ ID NO: 201813 - RNA, 19 nt, Artificial Sequence
  Description of Artificial Sequence: Synthetic oligonucleotide
acuuacuuuguaggcugga

SEQ ID NO: 201814 - RNA, 19 nt, Artificial Sequence
  Description of Artificial Sequence: Synthetic oligonucleotide
cuggacguguccauguucu

SEQ ID NO: 201815 - RNA, 19 nt, Artificial Sequence
  Description of Artificial Sequence: Synthetic oligonucleotide
guacagggcccauguggcc

SEQ ID NO: 201816 - RNA, 19 nt, Artificial Sequence
  Description of Artificial Sequence: Synthetic oligonucleotide
cacccggcgguacuggaac

SEQ ID NO: 201817 - RNA, 19 nt, Artificial Sequence
  Description of Artificial Sequence: Synthetic oligonucleotide
guccuagcauguuccggug

SEQ ID NO: 201818 - RNA, 19 nt, Artificial Sequence
  Description of Artificial Sequence: Synthetic oligonucleotide
agcacccaugcuucuggga

SEQ ID NO: 201819 - RNA, 19 nt, Artificial Sequence
  Description of Artificial Sequence: Synthetic oligonucleotide
cucuaucuggacgugucca

SEQ ID NO: 201820 - RNA, 19 nt, Artificial Sequence
  Description of Artificial Sequence: Synthetic oligonucleotide
aaucaccuugcgggccauc

SEQ ID NO: 201821 - RNA, 19 nt, Artificial Sequence
  Description of Artificial Sequence: Synthetic oligonucleotide
ucguucacccggcgguacu

SEQ ID NO: 201822 - RNA, 19 nt, Artificial Sequence
  Description of Artificial Sequence: Synthetic oligonucleotide
ccaaggaacugcaguggcc

SEQ ID NO: 201823 - RNA, 19 nt, Artificial Sequence
  Description of Artificial Sequence: Synthetic oligonucleotide
ucacccggcgguacuggaa

SEQ ID NO: 201824 - RNA, 19 nt, Artificial Sequence
  Description of Artificial Sequence: Synthetic oligonucleotide
gcggagaaucggcucaaag

SEQ ID NO: 201825 - RNA, 19 nt, Artificial Sequence
  Description of Artificial Sequence: Synthetic oligonucleotide
cuuccgugucagcuugaac

SEQ ID NO: 201826 - RNA, 19 nt, Artificial Sequence
  Description of Artificial Sequence: Synthetic oligonucleotide
gaaagcuuggaggcgggcu

SEQ ID NO: 201827 - RNA, 19 nt, Artificial Sequence
  Description of Artificial Sequence: Synthetic oligonucleotide
cccaucgaacaugaugugg

SEQ ID NO: 201828 - RNA, 19 nt, Artificial Sequence
  Description of Artificial Sequence: Synthetic oligonucleotide
ccucucuauaguuacugca

SEQ ID NO: 201829 - RNA, 19 nt, Artificial Sequence
  Description of Artificial Sequence: Synthetic oligonucleotide
augcuaagaagaaguucgu

SEQ ID NO: 201830 - RNA, 19 nt, Artificial Sequence
  Description of Artificial Sequence: Synthetic oligonucleotide
ggcccaucgaacaugaugu

SEQ ID NO: 201831 - RNA, 19 nt, Artificial Sequence
  Description of Artificial Sequence: Synthetic oligonucleotide
gauggccgcccacauacgu

SEQ ID NO: 201832 - RNA, 19 nt, Artificial Sequence
  Description of Artificial Sequence: Synthetic oligonucleotide
ccaagcgcuaucaccauca

SEQ ID NO: 201833 - RNA, 19 nt, Artificial Sequence
  Description of Artificial Sequence: Synthetic oligonucleotide
agugcacggcaaugcgcug

SEQ ID NO: 201834 - RNA, 19 nt, Artificial Sequence
  Description of Artificial Sequence: Synthetic oligonucleotide
cuccgggaugcugaaguug

SEQ ID NO: 201835 - RNA, 19 nt, Artificial Sequence
  Description of Artificial Sequence: Synthetic oligonucleotide
cggucuuaauccccaagcg

SEQ ID NO: 201836 - RNA, 19 nt, Artificial Sequence
  Description of Artificial Sequence: Synthetic oligonucleotide
gcacauauugaacucucua

SEQ ID NO: 201837 - RNA, 19 nt, Artificial Sequence
  Description of Artificial Sequence: Synthetic oligonucleotide
gaccuguaguugauauuuc

SEQ ID NO: 201838 - RNA, 19 nt, Artificial Sequence
  Description of Artificial Sequence: Synthetic oligonucleotide
caagcgcuaucaccaucac

SEQ ID NO: 201839 - RNA, 19 nt, Artificial Sequence
  Description of Artificial Sequence: Synthetic oligonucleotide
ggucgguguucuguguagg

SEQ ID NO: 201840 - RNA, 19 nt, Artificial Sequence
  Description of Artificial Sequence: Synthetic oligonucleotide
ugggaguaccugggcacug

SEQ ID NO: 201841 - RNA, 19 nt, Artificial Sequence
  Description of Artificial Sequence: Synthetic oligonucleotide
cccagugcugacugacugg

SEQ ID NO: 201842 - RNA, 19 nt, Artificial Sequence
  Description of Artificial Sequence: Synthetic oligonucleotide
caggacacucacagaauua

SEQ ID NO: 201843 - RNA, 19 nt, Artificial Sequence
  Description of Artificial Sequence: Synthetic oligonucleotide
gaucucaggucgguguucu

SEQ ID NO: 201844 - RNA, 19 nt, Artificial Sequence
  Description of Artificial Sequence: Synthetic oligonucleotide
gaaucggcucaaaggaccu

SEQ ID NO: 201845 - RNA, 19 nt, Artificial Sequence
  Description of Artificial Sequence: Synthetic oligonucleotide
uucguucacccggcgguac

SEQ ID NO: 201846 - RNA, 19 nt, Artificial Sequence
  Description of Artificial Sequence: Synthetic oligonucleotide
cacuggggugcugugagca

SEQ ID NO: 201847 - RNA, 19 nt, Artificial Sequence
  Description of Artificial Sequence: Synthetic oligonucleotide
ucggcucaaaggaccugua

SEQ ID NO: 201848 - RNA, 19 nt, Artificial Sequence
  Description of Artificial Sequence: Synthetic oligonucleotide
caucggccuugcuuuccag

SEQ ID NO: 201849 - RNA, 19 nt, Artificial Sequence
  Description of Artificial Sequence: Synthetic oligonucleotide
gcccagugcugacugacug

SEQ ID NO: 201850 - RNA, 19 nt, Artificial Sequence
  Description of Artificial Sequence: Synthetic oligonucleotide
ucgagguggcugcccgcug

SEQ ID NO: 201851 - RNA, 19 nt, Artificial Sequence
  Description of Artificial Sequence: Synthetic oligonucleotide
ggugucucaucuguaaugu

SEQ ID NO: 201852 - RNA, 19 nt, Artificial Sequence
  Description of Artificial Sequence: Synthetic oligonucleotide
ggucucgggagauguccag

SEQ ID NO: 201853 - RNA, 19 nt, Artificial Sequence
  Description of Artificial Sequence: Synthetic oligonucleotide
uugacucauccugccgggu

SEQ ID NO: 201854 - RNA, 19 nt, Artificial Sequence
  Description of Artificial Sequence: Synthetic oligonucleotide
uggacguguccauguucuc

SEQ ID NO: 201855 - RNA, 19 nt, Artificial Sequence
  Description of Artificial Sequence: Synthetic oligonucleotide
augcgcuggauugacucau

SEQ ID NO: 201856 - RNA, 19 nt, Artificial Sequence
  Description of Artificial Sequence: Synthetic oligonucleotide
gaagugaucucaggucggu

SEQ ID NO: 201857 - RNA, 19 nt, Artificial Sequence
  Description of Artificial Sequence: Synthetic oligonucleotide
acggccaaaggcaggccug

SEQ ID NO: 201858 - RNA, 19 nt, Artificial Sequence
  Description of Artificial Sequence: Synthetic oligonucleotide
caucagcgaugcugagcag

SEQ ID NO: 201859 - RNA, 19 nt, Artificial Sequence
  Description of Artificial Sequence: Synthetic oligonucleotide
cucgcaguugucggguguc

SEQ ID NO: 201860 - RNA, 19 nt, Artificial Sequence
  Description of Artificial Sequence: Synthetic oligonucleotide
ccggaaaggcaugaugcgc

SEQ ID NO: 201861 - RNA, 19 nt, Artificial Sequence
  Description of Artificial Sequence: Synthetic oligonucleotide
ccucuaucuggacgugucc

SEQ ID NO: 201862 - RNA, 19 nt, Artificial Sequence
  Description of Artificial Sequence: Synthetic oligonucleotide
ggagggacuaagguaggga

SEQ ID NO: 201863 - RNA, 19 nt, Artificial Sequence
  Description of Artificial Sequence: Synthetic oligonucleotide
gcauuauaagaaaccucga

SEQ ID NO: 201864 - RNA, 19 nt, Artificial Sequence
  Description of Artificial Sequence: Synthetic oligonucleotide
gggaguaccugggcacugg

SEQ ID NO: 201865 - RNA, 19 nt, Artificial Sequence
  Description of Artificial Sequence: Synthetic oligonucleotide
cgcuaucaccaucaccugg

SEQ ID NO: 201866 - RNA, 19 nt, Artificial Sequence
  Description of Artificial Sequence: Synthetic oligonucleotide
ucacgacgaagcccaucuu

SEQ ID NO: 201867 - RNA, 19 nt, Artificial Sequence
  Description of Artificial Sequence: Synthetic oligonucleotide
cugaacgguacucggaauu

SEQ ID NO: 201868 - RNA, 19 nt, Artificial Sequence
  Description of Artificial Sequence: Synthetic oligonucleotide
gcggucucgggagaugucc

SEQ ID NO: 201869 - RNA, 19 nt, Artificial Sequence
  Description of Artificial Sequence: Synthetic oligonucleotide
gaccaucucugggcuggag

SEQ ID NO: 201870 - RNA, 19 nt, Artificial Sequence
  Description of Artificial Sequence: Synthetic oligonucleotide
gugaggcgacacagggagg

SEQ ID NO: 201871 - RNA, 19 nt, Artificial Sequence
  Description of Artificial Sequence: Synthetic oligonucleotide
ggcaaugcgcuggauugac

SEQ ID NO: 201872 - RNA, 19 nt, Artificial Sequence
  Description of Artificial Sequence: Synthetic oligonucleotide
acucggaauuggucaggua

SEQ ID NO: 201873 - RNA, 19 nt, Artificial Sequence
  Description of Artificial Sequence: Synthetic oligonucleotide
ccuagcauguuccggugca

SEQ ID NO: 201874 - RNA, 19 nt, Artificial Sequence
  Description of Artificial Sequence: Synthetic oligonucleotide
cgguacucggaauugguca

SEQ ID NO: 201875 - RNA, 19 nt, Artificial Sequence
  Description of Artificial Sequence: Synthetic oligonucleotide
cuuugcucugaacgguacu

SEQ ID NO: 201876 - RNA, 19 nt, Artificial Sequence
  Description of Artificial Sequence: Synthetic oligonucleotide
gagaggcggucucgggaga

SEQ ID NO: 201877 - RNA, 19 nt, Artificial Sequence
  Description of Artificial Sequence: Synthetic oligonucleotide
gcgaugcugagcagccugg

SEQ ID NO: 201878 - RNA, 19 nt, Artificial Sequence
  Description of Artificial Sequence: Synthetic oligonucleotide
ugccaucggccuugcuuuc

SEQ ID NO: 201879 - RNA, 19 nt, Artificial Sequence
  Description of Artificial Sequence: Synthetic oligonucleotide
ggaaugugugugaggcgac

SEQ ID NO: 201880 - RNA, 19 nt, Artificial Sequence
  Description of Artificial Sequence: Synthetic oligonucleotide
gcgggcuaagaguggcaag

SEQ ID NO: 201881 - RNA, 19 nt, Artificial Sequence
  Description of Artificial Sequence: Synthetic oligonucleotide
ugccggucacuugaauguu

SEQ ID NO: 201882 - RNA, 19 nt, Artificial Sequence
  Description of Artificial Sequence: Synthetic oligonucleotide
ggagugaacauggcagcaa

SEQ ID NO: 201883 - RNA, 19 nt, Artificial Sequence
  Description of Artificial Sequence: Synthetic oligonucleotide
gggaguugaugucccagcu

SEQ ID NO: 201884 - RNA, 19 nt, Artificial Sequence
  Description of Artificial Sequence: Synthetic oligonucleotide
augccucuaucuggacgug

SEQ ID NO: 201885 - RNA, 19 nt, Artificial Sequence
  Description of Artificial Sequence: Synthetic oligonucleotide
gcgcuaucaccaucaccug

SEQ ID NO: 201886 - RNA, 19 nt, Artificial Sequence
  Description of Artificial Sequence: Synthetic oligonucleotide
ggacuaagguagggaagca

SEQ ID NO: 201887 - RNA, 19 nt, Artificial Sequence
  Description of Artificial Sequence: Synthetic oligonucleotide
cacggccaaaggcaggccu

SEQ ID NO: 201888 - RNA, 19 nt, Artificial Sequence
  Description of Artificial Sequence: Synthetic oligonucleotide
cugcccgcugccacucuga

SEQ ID NO: 201889 - RNA, 19 nt, Artificial Sequence
  Description of Artificial Sequence: Synthetic oligonucleotide
gcucugaacgguacucgga

SEQ ID NO: 201890 - RNA, 19 nt, Artificial Sequence
  Description of Artificial Sequence: Synthetic oligonucleotide
ggauggccgcccacauacg

SEQ ID NO: 201891 - RNA, 19 nt, Artificial Sequence
  Description of Artificial Sequence: Synthetic oligonucleotide
ggacaccacaggcauuaua

SEQ ID NO: 201892 - RNA, 19 nt, Artificial Sequence
  Description of Artificial Sequence: Synthetic oligonucleotide
cuuaauccccaagcgcuau

SEQ ID NO: 201893 - RNA, 19 nt, Artificial Sequence
  Description of Artificial Sequence: Synthetic oligonucleotide
auggccgcccacauacguu

SEQ ID NO: 201894 - RNA, 19 nt, Artificial Sequence
  Description of Artificial Sequence: Synthetic oligonucleotide
cagacaccccaggccucgg

SEQ ID NO: 201895 - RNA, 19 nt, Artificial Sequence
  Description of Artificial Sequence: Synthetic oligonucleotide
uggucacgacgaagcccau

SEQ ID NO: 201896 - RNA, 19 nt, Artificial Sequence
  Description of Artificial Sequence: Synthetic oligonucleotide
gguggaaaggagggacuaa

SEQ ID NO: 201897 - RNA, 19 nt, Artificial Sequence
  Description of Artificial Sequence: Synthetic oligonucleotide
cacggcaaugcgcuggauu

SEQ ID NO: 201898 - RNA, 19 nt, Artificial Sequence
  Description of Artificial Sequence: Synthetic oligonucleotide
caguuccgcugcaccguca

SEQ ID NO: 201899 - RNA, 19 nt, Artificial Sequence
  Description of Artificial Sequence: Synthetic oligonucleotide
ggucucgagguggcugccc

SEQ ID NO: 201900 - RNA, 19 nt, Artificial Sequence
  Description of Artificial Sequence: Synthetic oligonucleotide
gccguagagcagugggcca

SEQ ID NO: 201901 - RNA, 19 nt, Artificial Sequence
  Description of Artificial Sequence: Synthetic oligonucleotide
guucguucacccggcggua

SEQ ID NO: 201902 - RNA, 19 nt, Artificial Sequence
  Description of Artificial Sequence: Synthetic oligonucleotide
ccgcgcaguggccaucuug

SEQ ID NO: 201903 - RNA, 19 nt, Artificial Sequence
  Description of Artificial Sequence: Synthetic oligonucleotide
ggcgggcuaagaguggcaa

SEQ ID NO: 201904 - RNA, 19 nt, Artificial Sequence
  Description of Artificial Sequence: Synthetic oligonucleotide
cccaagaguccuagcaugu

SEQ ID NO: 201905 - RNA, 19 nt, Artificial Sequence
  Description of Artificial Sequence: Synthetic oligonucleotide
ccgcugccacucugaaggg

SEQ ID NO: 201906 - RNA, 19 nt, Artificial Sequence
  Description of Artificial Sequence: Synthetic oligonucleotide
aggcgggcuaagaguggca

SEQ ID NO: 201907 - RNA, 19 nt, Artificial Sequence
  Description of Artificial Sequence: Synthetic oligonucleotide
ggucacgacgaagcccauc

SEQ ID NO: 201908 - RNA, 19 nt, Artificial Sequence
  Description of Artificial Sequence: Synthetic oligonucleotide
ccggucacuugaauguucu

SEQ ID NO: 201909 - RNA, 19 nt, Artificial Sequence
  Description of Artificial Sequence: Synthetic oligonucleotide
cguucaauacgugcaaugu

SEQ ID NO: 201910 - RNA, 19 nt, Artificial Sequence
  Description of Artificial Sequence: Synthetic oligonucleotide
ccgugucagcuugaacuug

SEQ ID NO: 201911 - RNA, 19 nt, Artificial Sequence
  Description of Artificial Sequence: Synthetic oligonucleotide
gcgcaguggccaucuugac

SEQ ID NO: 201912 - RNA, 19 nt, Artificial Sequence
  Description of Artificial Sequence: Synthetic oligonucleotide
cucgagguggcugcccgcu

SEQ ID NO: 201913 - RNA, 19 nt, Artificial Sequence
  Description of Artificial Sequence: Synthetic oligonucleotide
ccaucggccuugcuuucca

SEQ ID NO: 201914 - RNA, 19 nt, Artificial Sequence
  Description of Artificial Sequence: Synthetic oligonucleotide
gcuuggaggcgggcuaaga

SEQ ID NO: 201915 - RNA, 19 nt, Artificial Sequence
  Description of Artificial Sequence: Synthetic oligonucleotide
cguucacccggcgguacug

SEQ ID NO: 201916 - RNA, 19 nt, Artificial Sequence
  Description of Artificial Sequence: Synthetic oligonucleotide
cugccgcgcaguggccauc

SEQ ID NO: 201917 - RNA, 19 nt, Artificial Sequence
  Description of Artificial Sequence: Synthetic oligonucleotide
gagacucaguggggccggu

SEQ ID NO: 201918 - RNA, 19 nt, Artificial Sequence
  Description of Artificial Sequence: Synthetic oligonucleotide
ggcggucucgggagauguc

SEQ ID NO: 201919 - RNA, 19 nt, Artificial Sequence
  Description of Artificial Sequence: Synthetic oligonucleotide
cacugccggucacuugaau

SEQ ID NO: 201920 - RNA, 19 nt, Artificial Sequence
  Description of Artificial Sequence: Synthetic oligonucleotide
gcaaugcgcuggauugacu

SEQ ID NO: 201921 - RNA, 19 nt, Artificial Sequence
  Description of Artificial Sequence: Synthetic oligonucleotide
cgcaguugucgggugucuc

SEQ ID NO: 201922 - RNA, 19 nt, Artificial Sequence
  Description of Artificial Sequence: Synthetic oligonucleotide
cugccgccgcagcuugaua

SEQ ID NO: 201923 - RNA, 19 nt, Artificial Sequence
  Description of Artificial Sequence: Synthetic oligonucleotide
ggguuuccugccgcgcagu

SEQ ID NO: 201924 - RNA, 19 nt, Artificial Sequence
  Description of Artificial Sequence: Synthetic oligonucleotide
gcacugccggucacuugaa

SEQ ID NO: 201925 - RNA, 19 nt, Artificial Sequence
  Description of Artificial Sequence: Synthetic oligonucleotide
ggucugcccugcuccucau

SEQ ID NO: 201926 - RNA, 19 nt, Artificial Sequence
  Description of Artificial Sequence: Synthetic oligonucleotide
cggcaaugcgcuggauuga

SEQ ID NO: 201927 - RNA, 19 nt, Artificial Sequence
  Description of Artificial Sequence: Synthetic oligonucleotide
ccaagaguccuagcauguu

SEQ ID NO: 201928 - RNA, 19 nt, Artificial Sequence
  Description of Artificial Sequence: Synthetic oligonucleotide
ccucgaugccaucggccuu

SEQ ID NO: 201929 - RNA, 19 nt, Artificial Sequence
  Description of Artificial Sequence: Synthetic oligonucleotide
ccauagcagcacggccaaa

SEQ ID NO: 201930 - RNA, 19 nt, Artificial Sequence
  Description of Artificial Sequence: Synthetic oligonucleotide
cgccgcagcuugauacuuu

SEQ ID NO: 201931 - RNA, 19 nt, Artificial Sequence
  Description of Artificial Sequence: Synthetic oligonucleotide
gccgcgcaguggccaucuu

SEQ ID NO: 201932 - RNA, 19 nt, Artificial Sequence
  Description of Artificial Sequence: Synthetic oligonucleotide
aauuguuugccauugcagc

SEQ ID NO: 201933 - RNA, 19 nt, Artificial Sequence
  Description of Artificial Sequence: Synthetic oligonucleotide
aauagguucccucacaggg

SEQ ID NO: 201934 - RNA, 19 nt, Artificial Sequence
  Description of Artificial Sequence: Synthetic oligonucleotide
uaugcaaccagacaaaacc

SEQ ID NO: 201935 - RNA, 19 nt, Artificial Sequence
  Description of Artificial Sequence: Synthetic oligonucleotide
acuauaucuuccuucaucg

SEQ ID NO: 201936 - RNA, 19 nt, Artificial Sequence
  Description of Artificial Sequence: Synthetic oligonucleotide
uuaauuugaugcuaugagg

SEQ ID NO: 201937 - RNA, 19 nt, Artificial Sequence
  Description of Artificial Sequence: Synthetic oligonucleotide
auuauaugcaaccagacaa

SEQ ID NO: 201938 - RNA, 19 nt, Artificial Sequence
  Description of Artificial Sequence: Synthetic oligonucleotide
ugucauagaaucaggaaag

SEQ ID NO: 201939 - RNA, 19 nt, Artificial Sequence
  Description of Artificial Sequence: Synthetic oligonucleotide
agagaauuuuauuugagug

SEQ ID NO: 201940 - RNA, 19 nt, Artificial Sequence
  Description of Artificial Sequence: Synthetic oligonucleotide
uguuacaucaaccaucuuc

SEQ ID NO: 201941 - RNA, 19 nt, Artificial Sequence
  Description of Artificial Sequence: Synthetic oligonucleotide
aagcgaaucuaaaagaaac

SEQ ID NO: 201942 - RNA, 19 nt, Artificial Sequence
  Description of Artificial Sequence: Synthetic oligonucleotide
aauaugaauaacuccucca

SEQ ID NO: 201943 - RNA, 19 nt, Artificial Sequence
  Description of Artificial Sequence: Synthetic oligonucleotide
uguaauuuucuacauggac

SEQ ID NO: 201944 - RNA, 19 nt, Artificial Sequence
  Description of Artificial Sequence: Synthetic oligonucleotide
aaauguaaugaauccauau

SEQ ID NO: 201945 - RNA, 19 nt, Artificial Sequence
  Description of Artificial Sequence: Synthetic oligonucleotide
uccuaaaacacguuggcca

SEQ ID NO: 201946 - RNA, 19 nt, Artificial Sequence
  Description of Artificial Sequence: Synthetic oligonucleotide
aguuagauuaucaauaggu

SEQ ID NO: 201947 - RNA, 19 nt, Artificial Sequence
  Description of Artificial Sequence: Synthetic oligonucleotide
cuuccaaaucccuuggucg

SEQ ID NO: 201948 - RNA, 19 nt, Artificial Sequence
  Description of Artificial Sequence: Synthetic oligonucleotide
acuguuaaauuuugguccg

SEQ ID NO: 201949 - RNA, 19 nt, Artificial Sequence
  Description of Artificial Sequence: Synthetic oligonucleotide
aacuguuacaucaaccauc

SEQ ID NO: 201950 - RNA, 19 nt, Artificial Sequence
  Description of Artificial Sequence: Synthetic oligonucleotide
ugaaauaccuucuugccaa

SEQ ID NO: 201951 - RNA, 19 nt, Artificial Sequence
  Description of Artificial Sequence: Synthetic oligonucleotide
ucaucgucuacuuggaacc

SEQ ID NO: 201952 - RNA, 19 nt, Artificial Sequence
  Description of Artificial Sequence: Synthetic oligonucleotide
aauagaugggcacuucaca

SEQ ID NO: 201953 - RNA, 19 nt, Artificial Sequence
  Description of Artificial Sequence: Synthetic oligonucleotide
acuccuaaaacacguuggc

SEQ ID NO: 201954 - RNA, 19 nt, Artificial Sequence
  Description of Artificial Sequence: Synthetic oligonucleotide
aaaacggcagaacaagcga

SEQ ID NO: 201955 - RNA, 19 nt, Artificial Sequence
  Description of Artificial Sequence: Synthetic oligonucleotide
caaaagagaauucugccac

SEQ ID NO: 201956 - RNA, 19 nt, Artificial Sequence
  Description of Artificial Sequence: Synthetic oligonucleotide
uuguauacaaaugacagua

SEQ ID NO: 201957 - RNA, 19 nt, Artificial Sequence
  Description of Artificial Sequence: Synthetic oligonucleotide
uguuugaggguuaaacaug

SEQ ID NO: 201958 - RNA, 19 nt, Artificial Sequence
  Description of Artificial Sequence: Synthetic oligonucleotide
uguacuauaauuggcacuc

SEQ ID NO: 201959 - RNA, 19 nt, Artificial Sequence
  Description of Artificial Sequence: Synthetic oligonucleotide
agacuauucauacacugug

SEQ ID NO: 201960 - RNA, 19 nt, Artificial Sequence
  Description of Artificial Sequence: Synthetic oligonucleotide
aauuggcacuccuaaaaca

SEQ ID NO: 201961 - RNA, 19 nt, Artificial Sequence
  Description of Artificial Sequence: Synthetic oligonucleotide
cuaguuagggagaaugagc

SEQ ID NO: 201962 - RNA, 19 nt, Artificial Sequence
  Description of Artificial Sequence: Synthetic oligonucleotide
aaauuguuugccauugcag

SEQ ID NO: 201963 - RNA, 19 nt, Artificial Sequence
  Description of Artificial Sequence: Synthetic oligonucleotide
cucaagaugaauucucaag

SEQ ID NO: 201964 - RNA, 19 nt, Artificial Sequence
  Description of Artificial Sequence: Synthetic oligonucleotide
gaugcuaugaggcaaccca

SEQ ID NO: 201965 - RNA, 19 nt, Artificial Sequence
  Description of Artificial Sequence: Synthetic oligonucleotide
aguucguucaguaacauga

SEQ ID NO: 201966 - RNA, 19 nt, Artificial Sequence
  Description of Artificial Sequence: Synthetic oligonucleotide
ucuacuucgcuuccguucc

SEQ ID NO: 201967 - RNA, 19 nt, Artificial Sequence
  Description of Artificial Sequence: Synthetic oligonucleotide
uguauacaaaugacaguag

SEQ ID NO: 201968 - RNA, 19 nt, Artificial Sequence
  Description of Artificial Sequence: Synthetic oligonucleotide
aauaucgggccccgagggc

SEQ ID NO: 201969 - RNA, 19 nt, Artificial Sequence
  Description of Artificial Sequence: Synthetic oligonucleotide
gaauaucgggccccgaggg

SEQ ID NO: 201970 - RNA, 19 nt, Artificial Sequence
  Description of Artificial Sequence: Synthetic oligonucleotide
uucguuuccguucacggcu

SEQ ID NO: 201971 - RNA, 19 nt, Artificial Sequence
  Description of Artificial Sequence: Synthetic oligonucleotide
aaaucccuuggucgaauuc

SEQ ID NO: 201972 - RNA, 19 nt, Artificial Sequence
  Description of Artificial Sequence: Synthetic oligonucleotide
auuggcacuccuaaaacac

SEQ ID NO: 201973 - RNA, 19 nt, Artificial Sequence
  Description of Artificial Sequence: Synthetic oligonucleotide
uuuccuauaucuugcccag

SEQ ID NO: 201974 - RNA, 19 nt, Artificial Sequence
  Description of Artificial Sequence: Synthetic oligonucleotide
uaucucgacuucgugagcg

SEQ ID NO: 201975 - RNA, 19 nt, Artificial Sequence
  Description of Artificial Sequence: Synthetic oligonucleotide
caaacuguuacaucaacca

SEQ ID NO: 201976 - RNA, 19 nt, Artificial Sequence
  Description of Artificial Sequence: Synthetic oligonucleotide
aauuuugguccggaguagg

SEQ ID NO: 201977 - RNA, 19 nt, Artificial Sequence
  Description of Artificial Sequence: Synthetic oligonucleotide
aaacacguuggccaguuaa

SEQ ID NO: 201978 - RNA, 19 nt, Artificial Sequence
  Description of Artificial Sequence: Synthetic oligonucleotide
gaguuagauuaucaauagg

SEQ ID NO: 201979 - RNA, 19 nt, Artificial Sequence
  Description of Artificial Sequence: Synthetic oligonucleotide
auaagggacuauaucuucc

SEQ ID NO: 201980 - RNA, 19 nt, Artificial Sequence
  Description of Artificial Sequence: Synthetic oligonucleotide
aguagggacuucuguagcg

SEQ ID NO: 201981 - RNA, 19 nt, Artificial Sequence
  Description of Artificial Sequence: Synthetic oligonucleotide
cucgccauuaacuggagac

SEQ ID NO: 201982 - RNA, 19 nt, Artificial Sequence
  Description of Artificial Sequence: Synthetic oligonucleotide
gauuauaugcaaccagaca

SEQ ID NO: 201983 - RNA, 19 nt, Artificial Sequence
  Description of Artificial Sequence: Synthetic oligonucleotide
auuaaaggagcccgcgcgg

SEQ ID NO: 201984 - RNA, 19 nt, Artificial Sequence
  Description of Artificial Sequence: Synthetic oligonucleotide
uuauaugcaaccagacaaa

SEQ ID NO: 201985 - RNA, 19 nt, Artificial Sequence
  Description of Artificial Sequence: Synthetic oligonucleotide
aguuaauccaauugcuaga

SEQ ID NO: 201986 - RNA, 19 nt, Artificial Sequence
  Description of Artificial Sequence: Synthetic oligonucleotide
caucaguucguucaguaac

SEQ ID NO: 201987 - RNA, 19 nt, Artificial Sequence
  Description of Artificial Sequence: Synthetic oligonucleotide
aaccuguacccucugcaag

SEQ ID NO: 201988 - RNA, 19 nt, Artificial Sequence
  Description of Artificial Sequence: Synthetic oligonucleotide
gacuauaucuuccuucauc

SEQ ID NO: 201989 - RNA, 19 nt, Artificial Sequence
  Description of Artificial Sequence: Synthetic oligonucleotide
aaaagagaauucugccaca

SEQ ID NO: 201990 - RNA, 19 nt, Artificial Sequence
  Description of Artificial Sequence: Synthetic oligonucleotide
agagguugugguaaguugg

SEQ ID NO: 201991 - RNA, 19 nt, Artificial Sequence
  Description of Artificial Sequence: Synthetic oligonucleotide
uuugaugcuaugaggcaac

SEQ ID NO: 201992 - RNA, 19 nt, Artificial Sequence
  Description of Artificial Sequence: Synthetic oligonucleotide
uccuauaucuugcccagac

SEQ ID NO: 201993 - RNA, 19 nt, Artificial Sequence
  Description of Artificial Sequence: Synthetic oligonucleotide
aagauaacaggaguuguau

SEQ ID NO: 201994 - RNA, 19 nt, Artificial Sequence
  Description of Artificial Sequence: Synthetic oligonucleotide
uugcuaguuagggagaaug

SEQ ID NO: 201995 - RNA, 19 nt, Artificial Sequence
  Description of Artificial Sequence: Synthetic oligonucleotide
uuuggaacgucuugaauuu

SEQ ID NO: 201996 - RNA, 19 nt, Artificial Sequence
  Description of Artificial Sequence: Synthetic oligonucleotide
aaacauuguguugcaagug

SEQ ID NO: 201997 - RNA, 19 nt, Artificial Sequence
  Description of Artificial Sequence: Synthetic oligonucleotide
uuggucgaauucuugcugc

SEQ ID NO: 201998 - RNA, 19 nt, Artificial Sequence
  Description of Artificial Sequence: Synthetic oligonucleotide
uauacguugcccugagcug

SEQ ID NO: 201999 - RNA, 19 nt, Artificial Sequence
  Description of Artificial Sequence: Synthetic oligonucleotide
aacaagcgaacagcuuugc

SEQ ID NO: 202000 - RNA, 19 nt, Artificial Sequence
  Description of Artificial Sequence: Synthetic oligonucleotide
uuagcacugcucaacuugu

SEQ ID NO: 202001 - RNA, 19 nt, Artificial Sequence
  Description of Artificial Sequence: Synthetic oligonucleotide
ugguugaacagacgcagcu

SEQ ID NO: 202002 - RNA, 19 nt, Artificial Sequence
  Description of Artificial Sequence: Synthetic oligonucleotide
ugucgcuacuguuaagccc

SEQ ID NO: 202003 - RNA, 19 nt, Artificial Sequence
  Description of Artificial Sequence: Synthetic oligonucleotide
uaccugucugccuuuauac

SEQ ID NO: 202004 - RNA, 19 nt, Artificial Sequence
  Description of Artificial Sequence: Synthetic oligonucleotide
aacccgaauaucgggcccc

SEQ ID NO: 202005 - RNA, 19 nt, Artificial Sequence
  Description of Artificial Sequence: Synthetic oligonucleotide
uggaacgucuugaauuucu

SEQ ID NO: 202006 - RNA, 19 nt, Artificial Sequence
  Description of Artificial Sequence: Synthetic oligonucleotide
auugcuagaggcacugaac

SEQ ID NO: 202007 - RNA, 19 nt, Artificial Sequence
  Description of Artificial Sequence: Synthetic oligonucleotide
uaucaagcugucuugucaa

SEQ ID NO: 202008 - RNA, 19 nt, Artificial Sequence
  Description of Artificial Sequence: Synthetic oligonucleotide
agggagaaugagcacacug

SEQ ID NO: 202009 - RNA, 19 nt, Artificial Sequence
  Description of Artificial Sequence: Synthetic oligonucleotide
aguuagggagaaugagcac

SEQ ID NO: 202010 - RNA, 19 nt, Artificial Sequence
  Description of Artificial Sequence: Synthetic oligonucleotide
ucgcucaugacuacgacuu

SEQ ID NO: 202011 - RNA, 19 nt, Artificial Sequence
  Description of Artificial Sequence: Synthetic oligonucleotide
aauccaauugcuagaggca

SEQ ID NO: 202012 - RNA, 19 nt, Artificial Sequence
  Description of Artificial Sequence: Synthetic oligonucleotide
uauaauuggcacuccuaaa

SEQ ID NO: 202013 - RNA, 19 nt, Artificial Sequence
  Description of Artificial Sequence: Synthetic oligonucleotide
gaaaggacauuuguucccc

SEQ ID NO: 202014 - RNA, 19 nt, Artificial Sequence
  Description of Artificial Sequence: Synthetic oligonucleotide
aacggcagaacaagcgaac

SEQ ID NO: 202015 - RNA, 19 nt, Artificial Sequence
  Description of Artificial Sequence: Synthetic oligonucleotide
gucgcuacuguuaagcccc

SEQ ID NO: 202016 - RNA, 19 nt, Artificial Sequence
  Description of Artificial Sequence: Synthetic oligonucleotide
uucgugagcggcuucgucu

SEQ ID NO: 202017 - RNA, 19 nt, Artificial Sequence
  Description of Artificial Sequence: Synthetic oligonucleotide
uuccaaaucccuuggucga

SEQ ID NO: 202018 - RNA, 19 nt, Artificial Sequence
  Description of Artificial Sequence: Synthetic oligonucleotide
ucaagauaacaggaguugu

SEQ ID NO: 202019 - RNA, 19 nt, Artificial Sequence
  Description of Artificial Sequence: Synthetic oligonucleotide
cauaagggacuauaucuuc

SEQ ID NO: 202020 - RNA, 19 nt, Artificial Sequence
  Description of Artificial Sequence: Synthetic oligonucleotide
acuauucauacacugugua

SEQ ID NO: 202021 - RNA, 19 nt, Artificial Sequence
  Description of Artificial Sequence: Synthetic oligonucleotide
ucauccucacaucucgaac

SEQ ID NO: 202022 - RNA, 19 nt, Artificial Sequence
  Description of Artificial Sequence: Synthetic oligonucleotide
aucgccucaauaucaauau

SEQ ID NO: 202023 - RNA, 19 nt, Artificial Sequence
  Description of Artificial Sequence: Synthetic oligonucleotide
uguuaagccccuaggccca

SEQ ID NO: 202024 - RNA, 19 nt, Artificial Sequence
  Description of Artificial Sequence: Synthetic oligonucleotide
ugccuguacuauaauuggc

SEQ ID NO: 202025 - RNA, 19 nt, Artificial Sequence
  Description of Artificial Sequence: Synthetic oligonucleotide
uucgggaacgucuucugcu

SEQ ID NO: 202026 - RNA, 19 nt, Artificial Sequence
  Description of Artificial Sequence: Synthetic oligonucleotide
uacaugaaugaaugugaac

SEQ ID NO: 202027 - RNA, 19 nt, Artificial Sequence
  Description of Artificial Sequence: Synthetic oligonucleotide
uuaaaggagcccgcgcggg

SEQ ID NO: 202028 - RNA, 19 nt, Artificial Sequence
  Description of Artificial Sequence: Synthetic oligonucleotide
uucuguagcggccucggaa

SEQ ID NO: 202029 - RNA, 19 nt, Artificial Sequence
  Description of Artificial Sequence: Synthetic oligonucleotide
acauauacguugcccugag

SEQ ID NO: 202030 - RNA, 19 nt, Artificial Sequence
  Description of Artificial Sequence: Synthetic oligonucleotide
gucuacuuggaaccaguag

SEQ ID NO: 202031 - RNA, 19 nt, Artificial Sequence
  Description of Artificial Sequence: Synthetic oligonucleotide
cuauaauuggcacuccuaa

SEQ ID NO: 202032 - RNA, 19 nt, Artificial Sequence
  Description of Artificial Sequence: Synthetic oligonucleotide
ucggaaucuucuaucucga

SEQ ID NO: 202033 - RNA, 19 nt, Artificial Sequence
  Description of Artificial Sequence: Synthetic oligonucleotide
uagagcuauucuauagauc

SEQ ID NO: 202034 - RNA, 19 nt, Artificial Sequence
  Description of Artificial Sequence: Synthetic oligonucleotide
uucuaucagaaaucauccu

SEQ ID NO: 202035 - RNA, 19 nt, Artificial Sequence
  Description of Artificial Sequence: Synthetic oligonucleotide
acguuggccaguuaaucca

SEQ ID NO: 202036 - RNA, 19 nt, Artificial Sequence
  Description of Artificial Sequence: Synthetic oligonucleotide
cuuggucgaauucuugcug

SEQ ID NO: 202037 - RNA, 19 nt, Artificial Sequence
  Description of Artificial Sequence: Synthetic oligonucleotide
gccuagacuauucauacac

SEQ ID NO: 202038 - RNA, 19 nt, Artificial Sequence
  Description of Artificial Sequence: Synthetic oligonucleotide
agauaacucaagaugaauu

SEQ ID NO: 202039 - RNA, 19 nt, Artificial Sequence
  Description of Artificial Sequence: Synthetic oligonucleotide
ggaguagggacuucuguag

SEQ ID NO: 202040 - RNA, 19 nt, Artificial Sequence
  Description of Artificial Sequence: Synthetic oligonucleotide
cucuacuucgcuuccguuc

SEQ ID NO: 202041 - RNA, 19 nt, Artificial Sequence
  Description of Artificial Sequence: Synthetic oligonucleotide
aucaauagguucccucaca

SEQ ID NO: 202042 - RNA, 19 nt, Artificial Sequence
  Description of Artificial Sequence: Synthetic oligonucleotide
ucuguagcggccucggaau

SEQ ID NO: 202043 - RNA, 19 nt, Artificial Sequence
  Description of Artificial Sequence: Synthetic oligonucleotide
cuucguuuccguucacggc

SEQ ID NO: 202044 - RNA, 19 nt, Artificial Sequence
  Description of Artificial Sequence: Synthetic oligonucleotide
agcaaaccaccugccaugc

SEQ ID NO: 202045 - RNA, 19 nt, Artificial Sequence
  Description of Artificial Sequence: Synthetic oligonucleotide
ggaaacucaagacacacua

SEQ ID NO: 202046 - RNA, 19 nt, Artificial Sequence
  Description of Artificial Sequence: Synthetic oligonucleotide
ucugcuuaauuugaugcua

SEQ ID NO: 202047 - RNA, 19 nt, Artificial Sequence
  Description of Artificial Sequence: Synthetic oligonucleotide
ccaaucuuuccucggaugg

SEQ ID NO: 202048 - RNA, 19 nt, Artificial Sequence
  Description of Artificial Sequence: Synthetic oligonucleotide
aacuagcacuagaagcauc

SEQ ID NO: 202049 - RNA, 19 nt, Artificial Sequence
  Description of Artificial Sequence: Synthetic oligonucleotide
auaucuugcccagacuucu

SEQ ID NO: 202050 - RNA, 19 nt, Artificial Sequence
  Description of Artificial Sequence: Synthetic oligonucleotide
ucaaggugagaugcuaaac

SEQ ID NO: 202051 - RNA, 19 nt, Artificial Sequence
  Description of Artificial Sequence: Synthetic oligonucleotide
cucuacacgccugugcggg

SEQ ID NO: 202052 - RNA, 19 nt, Artificial Sequence
  Description of Artificial Sequence: Synthetic oligonucleotide
aaaggacauuuguuccccu

SEQ ID NO: 202053 - RNA, 19 nt, Artificial Sequence
  Description of Artificial Sequence: Synthetic oligonucleotide
uugggaaagucguguuugc

SEQ ID NO: 202054 - RNA, 19 nt, Artificial Sequence
  Description of Artificial Sequence: Synthetic oligonucleotide
ucgucuacuuggaaccagu

SEQ ID NO: 202055 - RNA, 19 nt, Artificial Sequence
  Description of Artificial Sequence: Synthetic oligonucleotide
guagggacuucuguagcgg

SEQ ID NO: 202056 - RNA, 19 nt, Artificial Sequence
  Description of Artificial Sequence: Synthetic oligonucleotide
uuucgcucaugacuacgac

SEQ ID NO: 202057 - RNA, 19 nt, Artificial Sequence
  Description of Artificial Sequence: Synthetic oligonucleotide
cugucgcuacuguuaagcc

SEQ ID NO: 202058 - RNA, 19 nt, Artificial Sequence
  Description of Artificial Sequence: Synthetic oligonucleotide
aucaaggugagaugcuaaa

SEQ ID NO: 202059 - RNA, 19 nt, Artificial Sequence
  Description of Artificial Sequence: Synthetic oligonucleotide
agcgaaucuaaaagaaaca

SEQ ID NO: 202060 - RNA, 19 nt, Artificial Sequence
  Description of Artificial Sequence: Synthetic oligonucleotide
aaggacauuuguuccccua

SEQ ID NO: 202061 - RNA, 19 nt, Artificial Sequence
  Description of Artificial Sequence: Synthetic oligonucleotide
cuuugcucaaacuguuaca

SEQ ID NO: 202062 - RNA, 19 nt, Artificial Sequence
  Description of Artificial Sequence: Synthetic oligonucleotide
aaacggcagaacaagcgaa

SEQ ID NO: 202063 - RNA, 19 nt, Artificial Sequence
  Description of Artificial Sequence: Synthetic oligonucleotide
ugucugccuuuauacagaa

SEQ ID NO: 202064 - RNA, 19 nt, Artificial Sequence
  Description of Artificial Sequence: Synthetic oligonucleotide
auacguugcccugagcuga

SEQ ID NO: 202065 - RNA, 19 nt, Artificial Sequence
  Description of Artificial Sequence: Synthetic oligonucleotide
aucucgaaccuuuccuacu

SEQ ID NO: 202066 - RNA, 19 nt, Artificial Sequence
  Description of Artificial Sequence: Synthetic oligonucleotide
aaguaggauuugcuaguua

SEQ ID NO: 202067 - RNA, 19 nt, Artificial Sequence
  Description of Artificial Sequence: Synthetic oligonucleotide
acaucucgaaccuuuccua

SEQ ID NO: 202068 - RNA, 19 nt, Artificial Sequence
  Description of Artificial Sequence: Synthetic oligonucleotide
ugcugaaccaugagccaaa

SEQ ID NO: 202069 - RNA, 19 nt, Artificial Sequence
  Description of Artificial Sequence: Synthetic oligonucleotide
gcuaguuagggagaaugag

SEQ ID NO: 202070 - RNA, 19 nt, Artificial Sequence
  Description of Artificial Sequence: Synthetic oligonucleotide
ugaugcuaugaggcaaccc

SEQ ID NO: 202071 - RNA, 19 nt, Artificial Sequence
  Description of Artificial Sequence: Synthetic oligonucleotide
agagguacauaugcagcug

SEQ ID NO: 202072 - RNA, 19 nt, Artificial Sequence
  Description of Artificial Sequence: Synthetic oligonucleotide
acaagcgaacagcuuugca

SEQ ID NO: 202073 - RNA, 19 nt, Artificial Sequence
  Description of Artificial Sequence: Synthetic oligonucleotide
cuucuaucucgacuucgug

SEQ ID NO: 202074 - RNA, 19 nt, Artificial Sequence
  Description of Artificial Sequence: Synthetic oligonucleotide
caaucuuuccucggauggc

SEQ ID NO: 202075 - RNA, 19 nt, Artificial Sequence
  Description of Artificial Sequence: Synthetic oligonucleotide
uaaaacacguuggccaguu

SEQ ID NO: 202076 - RNA, 19 nt, Artificial Sequence
  Description of Artificial Sequence: Synthetic oligonucleotide
gcugucgcuacuguuaagc

SEQ ID NO: 202077 - RNA, 19 nt, Artificial Sequence
  Description of Artificial Sequence: Synthetic oligonucleotide
cuguuugaggguuaaacau

SEQ ID NO: 202078 - RNA, 19 nt, Artificial Sequence
  Description of Artificial Sequence: Synthetic oligonucleotide
cuauaucuugcccagacuu

SEQ ID NO: 202079 - RNA, 19 nt, Artificial Sequence
  Description of Artificial Sequence: Synthetic oligonucleotide
aacacguuggccaguuaau

SEQ ID NO: 202080 - RNA, 19 nt, Artificial Sequence
  Description of Artificial Sequence: Synthetic oligonucleotide
uuuucucuacacgccugug

SEQ ID NO: 202081 - RNA, 19 nt, Artificial Sequence
  Description of Artificial Sequence: Synthetic oligonucleotide
gacuucuguagcggccucg

SEQ ID NO: 202082 - RNA, 19 nt, Artificial Sequence
  Description of Artificial Sequence: Synthetic oligonucleotide
caagauaacaggaguugua

SEQ ID NO: 202083 - RNA, 19 nt, Artificial Sequence
  Description of Artificial Sequence: Synthetic oligonucleotide
agcuauucuauagauccuu

SEQ ID NO: 202084 - RNA, 19 nt, Artificial Sequence
  Description of Artificial Sequence: Synthetic oligonucleotide
augcaaccagacaaaaccu

SEQ ID NO: 202085 - RNA, 19 nt, Artificial Sequence
  Description of Artificial Sequence: Synthetic oligonucleotide
ucucgccauuaacuggaga

SEQ ID NO: 202086 - RNA, 19 nt, Artificial Sequence
  Description of Artificial Sequence: Synthetic oligonucleotide
caucgccucaauaucaaua

SEQ ID NO: 202087 - RNA, 19 nt, Artificial Sequence
  Description of Artificial Sequence: Synthetic oligonucleotide
caagcgaacagcuuugcau

SEQ ID NO: 202088 - RNA, 19 nt, Artificial Sequence
  Description of Artificial Sequence: Synthetic oligonucleotide
acuauaauuggcacuccua

SEQ ID NO: 202089 - RNA, 19 nt, Artificial Sequence
  Description of Artificial Sequence: Synthetic oligonucleotide
aguuaccaucaagaaauau

SEQ ID NO: 202090 - RNA, 19 nt, Artificial Sequence
  Description of Artificial Sequence: Synthetic oligonucleotide
caacccgaauaucgggccc

SEQ ID NO: 202091 - RNA, 19 nt, Artificial Sequence
  Description of Artificial Sequence: Synthetic oligonucleotide
uaggcccaagcgaaucuaa

SEQ ID NO: 202092 - RNA, 19 nt, Artificial Sequence
  Description of Artificial Sequence: Synthetic oligonucleotide
ucuuagcugccuagacuau

SEQ ID NO: 202093 - RNA, 19 nt, Artificial Sequence
  Description of Artificial Sequence: Synthetic oligonucleotide
cccuagagcuauucuauag

SEQ ID NO: 202094 - RNA, 19 nt, Artificial Sequence
  Description of Artificial Sequence: Synthetic oligonucleotide
cugucugccuuuauacaga

SEQ ID NO: 202095 - RNA, 19 nt, Artificial Sequence
  Description of Artificial Sequence: Synthetic oligonucleotide
cugguggaaucugcaaacc

SEQ ID NO: 202096 - RNA, 19 nt, Artificial Sequence
  Description of Artificial Sequence: Synthetic oligonucleotide
ccuuagaccggccuguuuc

SEQ ID NO: 202097 - RNA, 19 nt, Artificial Sequence
  Description of Artificial Sequence: Synthetic oligonucleotide
cuagagcuauucuauagau

SEQ ID NO: 202098 - RNA, 19 nt, Artificial Sequence
  Description of Artificial Sequence: Synthetic oligonucleotide
agaccggccuguuucacua

SEQ ID NO: 202099 - RNA, 19 nt, Artificial Sequence
  Description of Artificial Sequence: Synthetic oligonucleotide
ccgcccaacccgaauaucg

SEQ ID NO: 202100 - RNA, 19 nt, Artificial Sequence
  Description of Artificial Sequence: Synthetic oligonucleotide
ucucgacuucgugagcggc

SEQ ID NO: 202101 - RNA, 19 nt, Artificial Sequence
  Description of Artificial Sequence: Synthetic oligonucleotide
uuggccaguuaauccaauu

SEQ ID NO: 202102 - RNA, 19 nt, Artificial Sequence
  Description of Artificial Sequence: Synthetic oligonucleotide
uagaccggccuguuucacu

SEQ ID NO: 202103 - RNA, 19 nt, Artificial Sequence
  Description of Artificial Sequence: Synthetic oligonucleotide
ucgccucaauaucaauauc

SEQ ID NO: 202104 - RNA, 19 nt, Artificial Sequence
  Description of Artificial Sequence: Synthetic oligonucleotide
aucgucuacuuggaaccag

SEQ ID NO: 202105 - RNA, 19 nt, Artificial Sequence
  Description of Artificial Sequence: Synthetic oligonucleotide
cuaucucgacuucgugagc

SEQ ID NO: 202106 - RNA, 19 nt, Artificial Sequence
  Description of Artificial Sequence: Synthetic oligonucleotide
ggacuuuugcuucgggaac

SEQ ID NO: 202107 - RNA, 19 nt, Artificial Sequence
  Description of Artificial Sequence: Synthetic oligonucleotide
cuuagaccggccuguuuca

SEQ ID NO: 202108 - RNA, 19 nt, Artificial Sequence
  Description of Artificial Sequence: Synthetic oligonucleotide
uauauacauaagggacuau

SEQ ID NO: 202109 - RNA, 19 nt, Artificial Sequence
  Description of Artificial Sequence: Synthetic oligonucleotide
agcgaacagcuuugcauaa

SEQ ID NO: 202110 - RNA, 19 nt, Artificial Sequence
  Description of Artificial Sequence: Synthetic oligonucleotide
uagacccuugccucuuuau

SEQ ID NO: 202111 - RNA, 19 nt, Artificial Sequence
  Description of Artificial Sequence: Synthetic oligonucleotide
ucuacacgccugugcgggc

SEQ ID NO: 202112 - RNA, 19 nt, Artificial Sequence
  Description of Artificial Sequence: Synthetic oligonucleotide
ucaguucguucaguaacau

SEQ ID NO: 202113 - RNA, 19 nt, Artificial Sequence
  Description of Artificial Sequence: Synthetic oligonucleotide
gcgaaucuaaaagaaacaa

SEQ ID NO: 202114 - RNA, 19 nt, Artificial Sequence
  Description of Artificial Sequence: Synthetic oligonucleotide
aaaacacguuggccaguua

SEQ ID NO: 202115 - RNA, 19 nt, Artificial Sequence
  Description of Artificial Sequence: Synthetic oligonucleotide
gggaaagucguguuugcaa

SEQ ID NO: 202116 - RNA, 19 nt, Artificial Sequence
  Description of Artificial Sequence: Synthetic oligonucleotide
ucgggaacgucuucugcuu

SEQ ID NO: 202117 - RNA, 19 nt, Artificial Sequence
  Description of Artificial Sequence: Synthetic oligonucleotide
cccaacccgaauaucgggc

SEQ ID NO: 202118 - RNA, 19 nt, Artificial Sequence
  Description of Artificial Sequence: Synthetic oligonucleotide
gucauagaaucaggaaaga

SEQ ID NO: 202119 - RNA, 19 nt, Artificial Sequence
  Description of Artificial Sequence: Synthetic oligonucleotide
ccaacccgaauaucgggcc

SEQ ID NO: 202120 - RNA, 19 nt, Artificial Sequence
  Description of Artificial Sequence: Synthetic oligonucleotide
gacccuugccucuuuauuu

SEQ ID NO: 202121 - RNA, 19 nt, Artificial Sequence
  Description of Artificial Sequence: Synthetic oligonucleotide
uaccgcccaacccgaauau

SEQ ID NO: 202122 - RNA, 19 nt, Artificial Sequence
  Description of Artificial Sequence: Synthetic oligonucleotide
gacuauucauacacugugu

SEQ ID NO: 202123 - RNA, 19 nt, Artificial Sequence
  Description of Artificial Sequence: Synthetic oligonucleotide
guacuauaauuggcacucc

SEQ ID NO: 202124 - RNA, 19 nt, Artificial Sequence
  Description of Artificial Sequence: Synthetic oligonucleotide
aucaagcugucuugucaaa

SEQ ID NO: 202125 - RNA, 19 nt, Artificial Sequence
  Description of Artificial Sequence: Synthetic oligonucleotide
ugcugucgcuacuguuaag

SEQ ID NO: 202126 - RNA, 19 nt, Artificial Sequence
  Description of Artificial Sequence: Synthetic oligonucleotide
acggcagaacaagcgaaca

SEQ ID NO: 202127 - RNA, 19 nt, Artificial Sequence
  Description of Artificial Sequence: Synthetic oligonucleotide
gccuguacuauaauuggca

SEQ ID NO: 202128 - RNA, 19 nt, Artificial Sequence
  Description of Artificial Sequence: Synthetic oligonucleotide
uuugcuaguuagggagaau

SEQ ID NO: 202129 - RNA, 19 nt, Artificial Sequence
  Description of Artificial Sequence: Synthetic oligonucleotide
gcccaacccgaauaucggg

SEQ ID NO: 202130 - RNA, 19 nt, Artificial Sequence
  Description of Artificial Sequence: Synthetic oligonucleotide
cccaagcgaaucuaaaaga

SEQ ID NO: 202131 - RNA, 19 nt, Artificial Sequence
  Description of Artificial Sequence: Synthetic oligonucleotide
gggaucauuuuguuuggaa

SEQ ID NO: 202132 - RNA, 19 nt, Artificial Sequence
  Description of Artificial Sequence: Synthetic oligonucleotide
uuagaccggccuguuucac

SEQ ID NO: 202133 - RNA, 19 nt, Artificial Sequence
  Description of Artificial Sequence: Synthetic oligonucleotide
ccuagagcuauucuauaga

SEQ ID NO: 202134 - RNA, 19 nt, Artificial Sequence
  Description of Artificial Sequence: Synthetic oligonucleotide
cacauauacguugcccuga

SEQ ID NO: 202135 - RNA, 19 nt, Artificial Sequence
  Description of Artificial Sequence: Synthetic oligonucleotide
ucucuacuucgcuuccguu

SEQ ID NO: 202136 - RNA, 19 nt, Artificial Sequence
  Description of Artificial Sequence: Synthetic oligonucleotide
aaguuaccaucaagaaaua

SEQ ID NO: 202137 - RNA, 19 nt, Artificial Sequence
  Description of Artificial Sequence: Synthetic oligonucleotide
uugcuacguucuucauggc

SEQ ID NO: 202138 - RNA, 19 nt, Artificial Sequence
  Description of Artificial Sequence: Synthetic oligonucleotide
uuggaacgucuugaauuuc

SEQ ID NO: 202139 - RNA, 19 nt, Artificial Sequence
  Description of Artificial Sequence: Synthetic oligonucleotide
ggcgucuaggcccaagcga

SEQ ID NO: 202140 - RNA, 19 nt, Artificial Sequence
  Description of Artificial Sequence: Synthetic oligonucleotide
cugugcgggcuuccgcgcg

SEQ ID NO: 202141 - RNA, 19 nt, Artificial Sequence
  Description of Artificial Sequence: Synthetic oligonucleotide
cgaauaucgggccccgagg

SEQ ID NO: 202142 - RNA, 19 nt, Artificial Sequence
  Description of Artificial Sequence: Synthetic oligonucleotide
cgcgguaccgcccaacccg

SEQ ID NO: 202143 - RNA, 19 nt, Artificial Sequence
  Description of Artificial Sequence: Synthetic oligonucleotide
cuucgugagcggcuucguc

SEQ ID NO: 202144 - RNA, 19 nt, Artificial Sequence
  Description of Artificial Sequence: Synthetic oligonucleotide
ggacauuuguuccccuaga

SEQ ID NO: 202145 - RNA, 19 nt, Artificial Sequence
  Description of Artificial Sequence: Synthetic oligonucleotide
guaccgcccaacccgaaua

SEQ ID NO: 202146 - RNA, 19 nt, Artificial Sequence
  Description of Artificial Sequence: Synthetic oligonucleotide
ccgaauaucgggccccgag

SEQ ID NO: 202147 - RNA, 19 nt, Artificial Sequence
  Description of Artificial Sequence: Synthetic oligonucleotide
uuccuauaucuugcccaga

SEQ ID NO: 202148 - RNA, 19 nt, Artificial Sequence
  Description of Artificial Sequence: Synthetic oligonucleotide
ccaauugcuagaggcacug

SEQ ID NO: 202149 - RNA, 19 nt, Artificial Sequence
  Description of Artificial Sequence: Synthetic oligonucleotide
agucguguuugcaaaucua

SEQ ID NO: 202150 - RNA, 19 nt, Artificial Sequence
  Description of Artificial Sequence: Synthetic oligonucleotide
aaggggccucaagcaucgc

SEQ ID NO: 202151 - RNA, 19 nt, Artificial Sequence
  Description of Artificial Sequence: Synthetic oligonucleotide
gauuaucaauagguucccu

SEQ ID NO: 202152 - RNA, 19 nt, Artificial Sequence
  Description of Artificial Sequence: Synthetic oligonucleotide
uggagacgaccaguuguuc

SEQ ID NO: 202153 - RNA, 19 nt, Artificial Sequence
  Description of Artificial Sequence: Synthetic oligonucleotide
accgcccaacccgaauauc

SEQ ID NO: 202154 - RNA, 19 nt, Artificial Sequence
  Description of Artificial Sequence: Synthetic oligonucleotide
acccgaauaucgggccccg

SEQ ID NO: 202155 - RNA, 19 nt, Artificial Sequence
  Description of Artificial Sequence: Synthetic oligonucleotide
ucgcuacuguuaagccccu

SEQ ID NO: 202156 - RNA, 19 nt, Artificial Sequence
  Description of Artificial Sequence: Synthetic oligonucleotide
ccagaaaccuuugcugaac

SEQ ID NO: 202157 - RNA, 19 nt, Artificial Sequence
  Description of Artificial Sequence: Synthetic oligonucleotide
gaacuagcacuagaagcau

SEQ ID NO: 202158 - RNA, 19 nt, Artificial Sequence
  Description of Artificial Sequence: Synthetic oligonucleotide
aguagacccuugccucuuu

SEQ ID NO: 202159 - RNA, 19 nt, Artificial Sequence
  Description of Artificial Sequence: Synthetic oligonucleotide
gauccaccccugcgacagc

SEQ ID NO: 202160 - RNA, 19 nt, Artificial Sequence
  Description of Artificial Sequence: Synthetic oligonucleotide
gagcccgcgcgggagagca

SEQ ID NO: 202161 - RNA, 19 nt, Artificial Sequence
  Description of Artificial Sequence: Synthetic oligonucleotide
gccguuagcacugcucaac

SEQ ID NO: 202162 - RNA, 19 nt, Artificial Sequence
  Description of Artificial Sequence: Synthetic oligonucleotide
gagcuauucuauagauccu

SEQ ID NO: 202163 - RNA, 19 nt, Artificial Sequence
  Description of Artificial Sequence: Synthetic oligonucleotide
ugguccggaguagggacuu

SEQ ID NO: 202164 - RNA, 19 nt, Artificial Sequence
  Description of Artificial Sequence: Synthetic oligonucleotide
gucucgccauuaacuggag

SEQ ID NO: 202165 - RNA, 19 nt, Artificial Sequence
  Description of Artificial Sequence: Synthetic oligonucleotide
gagggcgucuaggcccaag

SEQ ID NO: 202166 - RNA, 19 nt, Artificial Sequence
  Description of Artificial Sequence: Synthetic oligonucleotide
caucgucuacuuggaacca

SEQ ID NO: 202167 - RNA, 19 nt, Artificial Sequence
  Description of Artificial Sequence: Synthetic oligonucleotide
guagacccuugccucuuua

SEQ ID NO: 202168 - RNA, 19 nt, Artificial Sequence
  Description of Artificial Sequence: Synthetic oligonucleotide
cgcccaacccgaauaucgg

SEQ ID NO: 202169 - RNA, 19 nt, Artificial Sequence
  Description of Artificial Sequence: Synthetic oligonucleotide
cuuccgcgcgccugugcuc

SEQ ID NO: 202170 - RNA, 19 nt, Artificial Sequence
  Description of Artificial Sequence: Synthetic oligonucleotide
gcgucuaggcccaagcgaa

SEQ ID NO: 202171 - RNA, 19 nt, Artificial Sequence
  Description of Artificial Sequence: Synthetic oligonucleotide
gccgcgguaccgcccaacc

SEQ ID NO: 202172 - RNA, 19 nt, Artificial Sequence
  Description of Artificial Sequence: Synthetic oligonucleotide
gcuauucuauagauccuua

SEQ ID NO: 202173 - RNA, 19 nt, Artificial Sequence
  Description of Artificial Sequence: Synthetic oligonucleotide
cugcaagucucgccauuaa

SEQ ID NO: 202174 - RNA, 19 nt, Artificial Sequence
  Description of Artificial Sequence: Synthetic oligonucleotide
ggcaauuccuuuggaacgu

SEQ ID NO: 202175 - RNA, 19 nt, Artificial Sequence
  Description of Artificial Sequence: Synthetic oligonucleotide
gccucggaaucuucuaucu

SEQ ID NO: 202176 - RNA, 19 nt, Artificial Sequence
  Description of Artificial Sequence: Synthetic oligonucleotide
gugagaugcuaaacagccu

SEQ ID NO: 202177 - RNA, 19 nt, Artificial Sequence
  Description of Artificial Sequence: Synthetic oligonucleotide
aggccgccgccgccgccgc

SEQ ID NO: 202178 - RNA, 19 nt, Artificial Sequence
  Description of Artificial Sequence: Synthetic oligonucleotide
gcucaugacuacgacuucu

SEQ ID NO: 202179 - RNA, 19 nt, Artificial Sequence
  Description of Artificial Sequence: Synthetic oligonucleotide
uuguuccccuagagcuauu

SEQ ID NO: 202180 - RNA, 19 nt, Artificial Sequence
  Description of Artificial Sequence: Synthetic oligonucleotide
ccuagacuauucauacacu

SEQ ID NO: 202181 - RNA, 19 nt, Artificial Sequence
  Description of Artificial Sequence: Synthetic oligonucleotide
ccuuggucgaauucuugcu

SEQ ID NO: 202182 - RNA, 19 nt, Artificial Sequence
  Description of Artificial Sequence: Synthetic oligonucleotide
cucgaaccuuuccuacugu

SEQ ID NO: 202183 - RNA, 19 nt, Artificial Sequence
  Description of Artificial Sequence: Synthetic oligonucleotide
gggccucaagcaucgccuc

SEQ ID NO: 202184 - RNA, 19 nt, Artificial Sequence
  Description of Artificial Sequence: Synthetic oligonucleotide
cuuagcugccuagacuauu

SEQ ID NO: 202185 - RNA, 19 nt, Artificial Sequence
  Description of Artificial Sequence: Synthetic oligonucleotide
ggcacugaacuaacaucaa

SEQ ID NO: 202186 - RNA, 19 nt, Artificial Sequence
  Description of Artificial Sequence: Synthetic oligonucleotide
gcccacguagagccucaug

SEQ ID NO: 202187 - RNA, 19 nt, Artificial Sequence
  Description of Artificial Sequence: Synthetic oligonucleotide
gggauccaccccugcgaca

SEQ ID NO: 202188 - RNA, 19 nt, Artificial Sequence
  Description of Artificial Sequence: Synthetic oligonucleotide
ccuauaucuugcccagacu

SEQ ID NO: 202189 - RNA, 19 nt, Artificial Sequence
  Description of Artificial Sequence: Synthetic oligonucleotide
ccgcgguaccgcccaaccc

SEQ ID NO: 202190 - RNA, 19 nt, Artificial Sequence
  Description of Artificial Sequence: Synthetic oligonucleotide
cgggauccaccccugcgac

SEQ ID NO: 202191 - RNA, 19 nt, Artificial Sequence
  Description of Artificial Sequence: Synthetic oligonucleotide
gcggcuucgucuccuuucu

SEQ ID NO: 202192 - RNA, 19 nt, Artificial Sequence
  Description of Artificial Sequence: Synthetic oligonucleotide
cuacacgccugugcgggcu

SEQ ID NO: 202193 - RNA, 19 nt, Artificial Sequence
  Description of Artificial Sequence: Synthetic oligonucleotide
gccgccgccgccgccgccg

SEQ ID NO: 202194 - RNA, 19 nt, Artificial Sequence
  Description of Artificial Sequence: Synthetic oligonucleotide
cguuggccaguuaauccaa

SEQ ID NO: 202195 - RNA, 19 nt, Artificial Sequence
  Description of Artificial Sequence: Synthetic oligonucleotide
gaccggccuguuucacuau

SEQ ID NO: 202196 - RNA, 19 nt, Artificial Sequence
  Description of Artificial Sequence: Synthetic oligonucleotide
cuacuucgcuuccguuccu

SEQ ID NO: 202197 - RNA, 19 nt, Artificial Sequence
  Description of Artificial Sequence: Synthetic oligonucleotide
cauuggccuuccagcuagu

SEQ ID NO: 202198 - RNA, 19 nt, Artificial Sequence
  Description of Artificial Sequence: Synthetic oligonucleotide
gcggccucggaaucuucua

SEQ ID NO: 202199 - RNA, 19 nt, Artificial Sequence
  Description of Artificial Sequence: Synthetic oligonucleotide
cguucacggcuuuugcucu

SEQ ID NO: 202200 - RNA, 19 nt, Artificial Sequence
  Description of Artificial Sequence: Synthetic oligonucleotide
ccgagggcgucuaggccca

SEQ ID NO: 202201 - RNA, 19 nt, Artificial Sequence
  Description of Artificial Sequence: Synthetic oligonucleotide
cgugagcggcuucgucucc

SEQ ID NO: 202202 - RNA, 19 nt, Artificial Sequence
  Description of Artificial Sequence: Synthetic oligonucleotide
gcgguaccgcccaacccga

SEQ ID NO: 202203 - RNA, 19 nt, Artificial Sequence
  Description of Artificial Sequence: Synthetic oligonucleotide
cgcucaugacuacgacuuc

SEQ ID NO: 202204 - RNA, 19 nt, Artificial Sequence
  Description of Artificial Sequence: Synthetic oligonucleotide
cgucuacuuggaaccagua

SEQ ID NO: 202205 - RNA, 19 nt, Artificial Sequence
  Description of Artificial Sequence: Synthetic oligonucleotide
caauaucgucugccauuuu

SEQ ID NO: 202206 - RNA, 19 nt, Artificial Sequence
  Description of Artificial Sequence: Synthetic oligonucleotide
gccgccgccgccgccgcug

SEQ ID NO: 202207 - RNA, 19 nt, Artificial Sequence
  Description of Artificial Sequence: Synthetic oligonucleotide
cccgaauaucgggccccga

SEQ ID NO: 202208 - RNA, 19 nt, Artificial Sequence
  Description of Artificial Sequence: Synthetic oligonucleotide
ggccgccgccgccgccgcc

SEQ ID NO: 202209 - RNA, 19 nt, Artificial Sequence
  Description of Artificial Sequence: Synthetic oligonucleotide
cgucuaggcccaagcgaau

SEQ ID NO: 202210 - RNA, 19 nt, Artificial Sequence
  Description of Artificial Sequence: Synthetic oligonucleotide
ccgccgccgccgccgccgc

SEQ ID NO: 202211 - RNA, 19 nt, Artificial Sequence
  Description of Artificial Sequence: Synthetic oligonucleotide
cgguaccgcccaacccgaa

SEQ ID NO: 202212 - RNA, 19 nt, Artificial Sequence
  Description of Artificial Sequence: Synthetic oligonucleotide
cgccgccgccgccgccgcc

SEQ ID NO: 202213 - RNA, 19 nt, Artificial Sequence
  Description of Artificial Sequence: Synthetic oligonucleotide
cgagggcgucuaggcccaa

SEQ ID NO: 202214 - RNA, 19 nt, Artificial Sequence
  Description of Artificial Sequence: Synthetic oligonucleotide
cgccgccgccgccgccgcu

SEQ ID NO: 202215 - RNA, 19 nt, Artificial Sequence
  Description of Artificial Sequence: Synthetic oligonucleotide
aacuauuucagcucguucc

SEQ ID NO: 202216 - RNA, 19 nt, Artificial Sequence
  Description of Artificial Sequence: Synthetic oligonucleotide
uuauauaccacuaugauau

SEQ ID NO: 202217 - RNA, 19 nt, Artificial Sequence
  Description of Artificial Sequence: Synthetic oligonucleotide
uauauauauauauauauac

SEQ ID NO: 202218 - RNA, 19 nt, Artificial Sequence
  Description of Artificial Sequence: Synthetic oligonucleotide
aauguauauauauauauau

SEQ ID NO: 202219 - RNA, 19 nt, Artificial Sequence
  Description of Artificial Sequence: Synthetic oligonucleotide
uauauauauauauauauau

SEQ ID NO: 202220 - RNA, 19 nt, Artificial Sequence
  Description of Artificial Sequence: Synthetic oligonucleotide
aauaacuaacuucugacca

SEQ ID NO: 202221 - RNA, 19 nt, Artificial Sequence
  Description of Artificial Sequence: Synthetic oligonucleotide
uauauauauauauauacaa

SEQ ID NO: 202222 - RNA, 19 nt, Artificial Sequence
  Description of Artificial Sequence: Synthetic oligonucleotide
uguauauauauauauauau

SEQ ID NO: 202223 - RNA, 19 nt, Artificial Sequence
  Description of Artificial Sequence: Synthetic oligonucleotide
uguaauuucaagaucgugu

SEQ ID NO: 202224 - RNA, 19 nt, Artificial Sequence
  Description of Artificial Sequence: Synthetic oligonucleotide
agaaucauuauauacauaa

SEQ ID NO: 202225 - RNA, 19 nt, Artificial Sequence
  Description of Artificial Sequence: Synthetic oligonucleotide
cuaaacauaauaugguucc

SEQ ID NO: 202226 - RNA, 19 nt, Artificial Sequence
  Description of Artificial Sequence: Synthetic oligonucleotide
uauauauauauauacaauu

SEQ ID NO: 202227 - RNA, 19 nt, Artificial Sequence
  Description of Artificial Sequence: Synthetic oligonucleotide
uguucuugaaaucucaaga

SEQ ID NO: 202228 - RNA, 19 nt, Artificial Sequence
  Description of Artificial Sequence: Synthetic oligonucleotide
aauaacaucauuaccacgu

SEQ ID NO: 202229 - RNA, 19 nt, Artificial Sequence
  Description of Artificial Sequence: Synthetic oligonucleotide
uaaauaauccacuggagga

SEQ ID NO: 202230 - RNA, 19 nt, Artificial Sequence
  Description of Artificial Sequence: Synthetic oligonucleotide
aaguuuuauaccucacugg

SEQ ID NO: 202231 - RNA, 19 nt, Artificial Sequence
  Description of Artificial Sequence: Synthetic oligonucleotide
auaauguauauauauauau

SEQ ID NO: 202232 - RNA, 19 nt, Artificial Sequence
  Description of Artificial Sequence: Synthetic oligonucleotide
ucuaugaaacuucucagug

SEQ ID NO: 202233 - RNA, 19 nt, Artificial Sequence
  Description of Artificial Sequence: Synthetic oligonucleotide
uauauauauauacaauuau

SEQ ID NO: 202234 - RNA, 19 nt, Artificial Sequence
  Description of Artificial Sequence: Synthetic oligonucleotide
aucauuaccacguugauua

SEQ ID NO: 202235 - RNA, 19 nt, Artificial Sequence
  Description of Artificial Sequence: Synthetic oligonucleotide
uauagacagaauaugccgc

SEQ ID NO: 202236 - RNA, 19 nt, Artificial Sequence
  Description of Artificial Sequence: Synthetic oligonucleotide
aauuguacagcuugguccu

SEQ ID NO: 202237 - RNA, 19 nt, Artificial Sequence
  Description of Artificial Sequence: Synthetic oligonucleotide
aaaugugcgguucacguca

SEQ ID NO: 202238 - RNA, 19 nt, Artificial Sequence
  Description of Artificial Sequence: Synthetic oligonucleotide
ucuaaacauaauaugguuc

SEQ ID NO: 202239 - RNA, 19 nt, Artificial Sequence
  Description of Artificial Sequence: Synthetic oligonucleotide
ugugaagggaguucgauca

SEQ ID NO: 202240 - RNA, 19 nt, Artificial Sequence
  Description of Artificial Sequence: Synthetic oligonucleotide
ucgucuaugaaacuucuca

SEQ ID NO: 202241 - RNA, 19 nt, Artificial Sequence
  Description of Artificial Sequence: Synthetic oligonucleotide
uguaaacaagauaaucagc

SEQ ID NO: 202242 - RNA, 19 nt, Artificial Sequence
  Description of Artificial Sequence: Synthetic oligonucleotide
uugauuaaauuacauuaga

SEQ ID NO: 202243 - RNA, 19 nt, Artificial Sequence
  Description of Artificial Sequence: Synthetic oligonucleotide
uucaagaucguguaagaca

SEQ ID NO: 202244 - RNA, 19 nt, Artificial Sequence
  Description of Artificial Sequence: Synthetic oligonucleotide
ucaagaucguguaagacau

SEQ ID NO: 202245 - RNA, 19 nt, Artificial Sequence
  Description of Artificial Sequence: Synthetic oligonucleotide
uucaauucgacuagauggc

SEQ ID NO: 202246 - RNA, 19 nt, Artificial Sequence
  Description of Artificial Sequence: Synthetic oligonucleotide
ucucuaaacauaauauggu

SEQ ID NO: 202247 - RNA, 19 nt, Artificial Sequence
  Description of Artificial Sequence: Synthetic oligonucleotide
aguuuuauaccucacugga

SEQ ID NO: 202248 - RNA, 19 nt, Artificial Sequence
  Description of Artificial Sequence: Synthetic oligonucleotide
ucgcuaacuaaacaaaugu

SEQ ID NO: 202249 - RNA, 19 nt, Artificial Sequence
  Description of Artificial Sequence: Synthetic oligonucleotide
auaagucacagagucauac

SEQ ID NO: 202250 - RNA, 19 nt, Artificial Sequence
  Description of Artificial Sequence: Synthetic oligonucleotide
uauaauguauauauauaua

SEQ ID NO: 202251 - RNA, 19 nt, Artificial Sequence
  Description of Artificial Sequence: Synthetic oligonucleotide
aagaucguguaagacauag

SEQ ID NO: 202252 - RNA, 19 nt, Artificial Sequence
  Description of Artificial Sequence: Synthetic oligonucleotide
ucuuaagauauauucuugu

SEQ ID NO: 202253 - RNA, 19 nt, Artificial Sequence
  Description of Artificial Sequence: Synthetic oligonucleotide
uaucguaugguuucuauuc

SEQ ID NO: 202254 - RNA, 19 nt, Artificial Sequence
  Description of Artificial Sequence: Synthetic oligonucleotide
ugcauugugauaugggagc

SEQ ID NO: 202255 - RNA, 19 nt, Artificial Sequence
  Description of Artificial Sequence: Synthetic oligonucleotide
uaaggauuguugcuuaaca

SEQ ID NO: 202256 - RNA, 19 nt, Artificial Sequence
  Description of Artificial Sequence: Synthetic oligonucleotide
uucgugagaauccaagugu

SEQ ID NO: 202257 - RNA, 19 nt, Artificial Sequence
  Description of Artificial Sequence: Synthetic oligonucleotide
guaauuaauauccucaacu

SEQ ID NO: 202258 - RNA, 19 nt, Artificial Sequence
  Description of Artificial Sequence: Synthetic oligonucleotide
ucuuacauggcugggauug

SEQ ID NO: 202259 - RNA, 19 nt, Artificial Sequence
  Description of Artificial Sequence: Synthetic oligonucleotide
aacauaauaugguuccuaa

SEQ ID NO: 202260 - RNA, 19 nt, Artificial Sequence
  Description of Artificial Sequence: Synthetic oligonucleotide
ggagaucuaauuuugcccg

SEQ ID NO: 202261 - RNA, 19 nt, Artificial Sequence
  Description of Artificial Sequence: Synthetic oligonucleotide
aaaucaagagccugguuau

SEQ ID NO: 202262 - RNA, 19 nt, Artificial Sequence
  Description of Artificial Sequence: Synthetic oligonucleotide
aauucgacuagauggcaga

SEQ ID NO: 202263 - RNA, 19 nt, Artificial Sequence
  Description of Artificial Sequence: Synthetic oligonucleotide
uaauguauauauauauaua

SEQ ID NO: 202264 - RNA, 19 nt, Artificial Sequence
  Description of Artificial Sequence: Synthetic oligonucleotide
uucgcuaacuaaacaaaug

SEQ ID NO: 202265 - RNA, 19 nt, Artificial Sequence
  Description of Artificial Sequence: Synthetic oligonucleotide
acuuguguagauuucguga

SEQ ID NO: 202266 - RNA, 19 nt, Artificial Sequence
  Description of Artificial Sequence: Synthetic oligonucleotide
uugcauugugauaugggag

SEQ ID NO: 202267 - RNA, 19 nt, Artificial Sequence
  Description of Artificial Sequence: Synthetic oligonucleotide
guugauuaaauuacauuag

SEQ ID NO: 202268 - RNA, 19 nt, Artificial Sequence
  Description of Artificial Sequence: Synthetic oligonucleotide
uauuuugguuagcagcugc

SEQ ID NO: 202269 - RNA, 19 nt, Artificial Sequence
  Description of Artificial Sequence: Synthetic oligonucleotide
ugggauugggcauaaauuc

SEQ ID NO: 202270 - RNA, 19 nt, Artificial Sequence
  Description of Artificial Sequence: Synthetic oligonucleotide
uucauuagauguuuucugu

SEQ ID NO: 202271 - RNA, 19 nt, Artificial Sequence
  Description of Artificial Sequence: Synthetic oligonucleotide
ugcguauuuugguaaauug

SEQ ID NO: 202272 - RNA, 19 nt, Artificial Sequence
  Description of Artificial Sequence: Synthetic oligonucleotide
auacgcagcccugugaucc

SEQ ID NO: 202273 - RNA, 19 nt, Artificial Sequence
  Description of Artificial Sequence: Synthetic oligonucleotide
aauaugguuccuaaaugug

SEQ ID NO: 202274 - RNA, 19 nt, Artificial Sequence
  Description of Artificial Sequence: Synthetic oligonucleotide
uguaauuaauauccucaac

SEQ ID NO: 202275 - RNA, 19 nt, Artificial Sequence
  Description of Artificial Sequence: Synthetic oligonucleotide
aauaauccacuggaggaag

SEQ ID NO: 202276 - RNA, 19 nt, Artificial Sequence
  Description of Artificial Sequence: Synthetic oligonucleotide
aagaagauaacgaugcgau

SEQ ID NO: 202277 - RNA, 19 nt, Artificial Sequence
  Description of Artificial Sequence: Synthetic oligonucleotide
augacauaagaaaauagug

SEQ ID NO: 202278 - RNA, 19 nt, Artificial Sequence
  Description of Artificial Sequence: Synthetic oligonucleotide
uguuaucuggcucaucccu

SEQ ID NO: 202279 - RNA, 19 nt, Artificial Sequence
  Description of Artificial Sequence: Synthetic oligonucleotide
auauauauauauauauaca

SEQ ID NO: 202280 - RNA, 19 nt, Artificial Sequence
  Description of Artificial Sequence: Synthetic oligonucleotide
auuuugcccguuuuaguuc

SEQ ID NO: 202281 - RNA, 19 nt, Artificial Sequence
  Description of Artificial Sequence: Synthetic oligonucleotide
aggucuauuugucugauau

SEQ ID NO: 202282 - RNA, 19 nt, Artificial Sequence
  Description of Artificial Sequence: Synthetic oligonucleotide
ugguccguauucaugacug

SEQ ID NO: 202283 - RNA, 19 nt, Artificial Sequence
  Description of Artificial Sequence: Synthetic oligonucleotide
aguggcuccggcuagcauc

SEQ ID NO: 202284 - RNA, 19 nt, Artificial Sequence
  Description of Artificial Sequence: Synthetic oligonucleotide
aguguaugauagcauaugu

SEQ ID NO: 202285 - RNA, 19 nt, Artificial Sequence
  Description of Artificial Sequence: Synthetic oligonucleotide
aauuauuuauauaccacua

SEQ ID NO: 202286 - RNA, 19 nt, Artificial Sequence
  Description of Artificial Sequence: Synthetic oligonucleotide
ggcuauaagauuucucugg

SEQ ID NO: 202287 - RNA, 19 nt, Artificial Sequence
  Description of Artificial Sequence: Synthetic oligonucleotide
ugggagaucuaauuuugcc

SEQ ID NO: 202288 - RNA, 19 nt, Artificial Sequence
  Description of Artificial Sequence: Synthetic oligonucleotide
auuagugucuugguaacag

SEQ ID NO: 202289 - RNA, 19 nt, Artificial Sequence
  Description of Artificial Sequence: Synthetic oligonucleotide
gaucguguaagacauagcu

SEQ ID NO: 202290 - RNA, 19 nt, Artificial Sequence
  Description of Artificial Sequence: Synthetic oligonucleotide
gauauauucuuguaccuua

SEQ ID NO: 202291 - RNA, 19 nt, Artificial Sequence
  Description of Artificial Sequence: Synthetic oligonucleotide
agaauaugccgcaagaaca

SEQ ID NO: 202292 - RNA, 19 nt, Artificial Sequence
  Description of Artificial Sequence: Synthetic oligonucleotide
uguugcuuaacaccguauc

SEQ ID NO: 202293 - RNA, 19 nt, Artificial Sequence
  Description of Artificial Sequence: Synthetic oligonucleotide
cucgaguccaugauugucc

SEQ ID NO: 202294 - RNA, 19 nt, Artificial Sequence
  Description of Artificial Sequence: Synthetic oligonucleotide
caucucgaguccaugauug

SEQ ID NO: 202295 - RNA, 19 nt, Artificial Sequence
  Description of Artificial Sequence: Synthetic oligonucleotide
gaguagggcuguuaucugg

SEQ ID NO: 202296 - RNA, 19 nt, Artificial Sequence
  Description of Artificial Sequence: Synthetic oligonucleotide
auauauauauauacaauua

SEQ ID NO: 202297 - RNA, 19 nt, Artificial Sequence
  Description of Artificial Sequence: Synthetic oligonucleotide
uuguaaauucgucuaugaa

SEQ ID NO: 202298 - RNA, 19 nt, Artificial Sequence
  Description of Artificial Sequence: Synthetic oligonucleotide
auauauauauauauacaau

SEQ ID NO: 202299 - RNA, 19 nt, Artificial Sequence
  Description of Artificial Sequence: Synthetic oligonucleotide
uccccaacgugcaggaggg

SEQ ID NO: 202300 - RNA, 19 nt, Artificial Sequence
  Description of Artificial Sequence: Synthetic oligonucleotide
uugguaacaguaguguaug

SEQ ID NO: 202301 - RNA, 19 nt, Artificial Sequence
  Description of Artificial Sequence: Synthetic oligonucleotide
auaaggauuguugcuuaac

SEQ ID NO: 202302 - RNA, 19 nt, Artificial Sequence
  Description of Artificial Sequence: Synthetic oligonucleotide
auaaucagcgucuucccaa

SEQ ID NO: 202303 - RNA, 19 nt, Artificial Sequence
  Description of Artificial Sequence: Synthetic oligonucleotide
uugcuuaacaccguaucug

SEQ ID NO: 202304 - RNA, 19 nt, Artificial Sequence
  Description of Artificial Sequence: Synthetic oligonucleotide
ucauuagugucuugguaac

SEQ ID NO: 202305 - RNA, 19 nt, Artificial Sequence
  Description of Artificial Sequence: Synthetic oligonucleotide
gauggcagaacaacaggag

SEQ ID NO: 202306 - RNA, 19 nt, Artificial Sequence
  Description of Artificial Sequence: Synthetic oligonucleotide
auagacagaauaugccgca

SEQ ID NO: 202307 - RNA, 19 nt, Artificial Sequence
  Description of Artificial Sequence: Synthetic oligonucleotide
guugcucuauuacaaaauc

SEQ ID NO: 202308 - RNA, 19 nt, Artificial Sequence
  Description of Artificial Sequence: Synthetic oligonucleotide
ugcuuaacaccguaucugu

SEQ ID NO: 202309 - RNA, 19 nt, Artificial Sequence
  Description of Artificial Sequence: Synthetic oligonucleotide
ucgaguccaugauuguccg

SEQ ID NO: 202310 - RNA, 19 nt, Artificial Sequence
  Description of Artificial Sequence: Synthetic oligonucleotide
aauaaggauuguugcuuaa

SEQ ID NO: 202311 - RNA, 19 nt, Artificial Sequence
  Description of Artificial Sequence: Synthetic oligonucleotide
auaugccgcaagaacaugg

SEQ ID NO: 202312 - RNA, 19 nt, Artificial Sequence
  Description of Artificial Sequence: Synthetic oligonucleotide
uuaacaccguaucugucuc

SEQ ID NO: 202313 - RNA, 19 nt, Artificial Sequence
  Description of Artificial Sequence: Synthetic oligonucleotide
ugauaugggagcucuuccu

SEQ ID NO: 202314 - RNA, 19 nt, Artificial Sequence
  Description of Artificial Sequence: Synthetic oligonucleotide
guaauuucaagaucgugua

SEQ ID NO: 202315 - RNA, 19 nt, Artificial Sequence
  Description of Artificial Sequence: Synthetic oligonucleotide
auauauauauauauauaua

SEQ ID NO: 202316 - RNA, 19 nt, Artificial Sequence
  Description of Artificial Sequence: Synthetic oligonucleotide
auaacuaacuucugaccau

SEQ ID NO: 202317 - RNA, 19 nt, Artificial Sequence
  Description of Artificial Sequence: Synthetic oligonucleotide
gcuuaaauccccaacgugc

SEQ ID NO: 202318 - RNA, 19 nt, Artificial Sequence
  Description of Artificial Sequence: Synthetic oligonucleotide
caauucgacuagauggcag

SEQ ID NO: 202319 - RNA, 19 nt, Artificial Sequence
  Description of Artificial Sequence: Synthetic oligonucleotide
acguucgcuaacuaaacaa

SEQ ID NO: 202320 - RNA, 19 nt, Artificial Sequence
  Description of Artificial Sequence: Synthetic oligonucleotide
gggagaucuaauuuugccc

SEQ ID NO: 202321 - RNA, 19 nt, Artificial Sequence
  Description of Artificial Sequence: Synthetic oligonucleotide
ugguccuuauaagucacag

SEQ ID NO: 202322 - RNA, 19 nt, Artificial Sequence
  Description of Artificial Sequence: Synthetic oligonucleotide
gauaugggagcucuuccuc

SEQ ID NO: 202323 - RNA, 19 nt, Artificial Sequence
  Description of Artificial Sequence: Synthetic oligonucleotide
aguugcauugugauauggg

SEQ ID NO: 202324 - RNA, 19 nt, Artificial Sequence
  Description of Artificial Sequence: Synthetic oligonucleotide
gauaacgaugcgaugggca

SEQ ID NO: 202325 - RNA, 19 nt, Artificial Sequence
  Description of Artificial Sequence: Synthetic oligonucleotide
cuugaauagaaagucccuc

SEQ ID NO: 202326 - RNA, 19 nt, Artificial Sequence
  Description of Artificial Sequence: Synthetic oligonucleotide
uggaguggaauuccuuugu

SEQ ID NO: 202327 - RNA, 19 nt, Artificial Sequence
  Description of Artificial Sequence: Synthetic oligonucleotide
uccguauucaugacuggaa

SEQ ID NO: 202328 - RNA, 19 nt, Artificial Sequence
  Description of Artificial Sequence: Synthetic oligonucleotide
aaggcugcguauuuuggua

SEQ ID NO: 202329 - RNA, 19 nt, Artificial Sequence
  Description of Artificial Sequence: Synthetic oligonucleotide
agauuaauuugagucccag

SEQ ID NO: 202330 - RNA, 19 nt, Artificial Sequence
  Description of Artificial Sequence: Synthetic oligonucleotide
uugggcggcuauaagauuu

SEQ ID NO: 202331 - RNA, 19 nt, Artificial Sequence
  Description of Artificial Sequence: Synthetic oligonucleotide
auaacgaugcgaugggcau

SEQ ID NO: 202332 - RNA, 19 nt, Artificial Sequence
  Description of Artificial Sequence: Synthetic oligonucleotide
caucccuugacaguacccg

SEQ ID NO: 202333 - RNA, 19 nt, Artificial Sequence
  Description of Artificial Sequence: Synthetic oligonucleotide
agggaguucgaucaagaaa

SEQ ID NO: 202334 - RNA, 19 nt, Artificial Sequence
  Description of Artificial Sequence: Synthetic oligonucleotide
gaguugggcggcuauaaga

SEQ ID NO: 202335 - RNA, 19 nt, Artificial Sequence
  Description of Artificial Sequence: Synthetic oligonucleotide
caugcauagcauguuuggg

SEQ ID NO: 202336 - RNA, 19 nt, Artificial Sequence
  Description of Artificial Sequence: Synthetic oligonucleotide
agauaacgaugcgaugggc

SEQ ID NO: 202337 - RNA, 19 nt, Artificial Sequence
  Description of Artificial Sequence: Synthetic oligonucleotide
ucacguucgcuaacuaaac

SEQ ID NO: 202338 - RNA, 19 nt, Artificial Sequence
  Description of Artificial Sequence: Synthetic oligonucleotide
gauaaucagcgucuuccca

SEQ ID NO: 202339 - RNA, 19 nt, Artificial Sequence
  Description of Artificial Sequence: Synthetic oligonucleotide
ugugauaugggagcucuuc

SEQ ID NO: 202340 - RNA, 19 nt, Artificial Sequence
  Description of Artificial Sequence: Synthetic oligonucleotide
guauauauauauauauaua

SEQ ID NO: 202341 - RNA, 19 nt, Artificial Sequence
  Description of Artificial Sequence: Synthetic oligonucleotide
acguugauuaaauuacauu

SEQ ID NO: 202342 - RNA, 19 nt, Artificial Sequence
  Description of Artificial Sequence: Synthetic oligonucleotide
gcgaugggcauccacauag

SEQ ID NO: 202343 - RNA, 19 nt, Artificial Sequence
  Description of Artificial Sequence: Synthetic oligonucleotide
gugauaugggagcucuucc

SEQ ID NO: 202344 - RNA, 19 nt, Artificial Sequence
  Description of Artificial Sequence: Synthetic oligonucleotide
gauagcauauguuuacaau

SEQ ID NO: 202345 - RNA, 19 nt, Artificial Sequence
  Description of Artificial Sequence: Synthetic oligonucleotide
uaaaugugcgguucacguc

SEQ ID NO: 202346 - RNA, 19 nt, Artificial Sequence
  Description of Artificial Sequence: Synthetic oligonucleotide
agcaaugugguuaucguau

SEQ ID NO: 202347 - RNA, 19 nt, Artificial Sequence
  Description of Artificial Sequence: Synthetic oligonucleotide
aagggaguucgaucaagaa

SEQ ID NO: 202348 - RNA, 19 nt, Artificial Sequence
  Description of Artificial Sequence: Synthetic oligonucleotide
ugacaguacccgacuuccg

SEQ ID NO: 202349 - RNA, 19 nt, Artificial Sequence
  Description of Artificial Sequence: Synthetic oligonucleotide
gcuggugaaguuuuauacc

SEQ ID NO: 202350 - RNA, 19 nt, Artificial Sequence
  Description of Artificial Sequence: Synthetic oligonucleotide
ugucacguucgcuaacuaa

SEQ ID NO: 202351 - RNA, 19 nt, Artificial Sequence
  Description of Artificial Sequence: Synthetic oligonucleotide
cagagucauacuuuaagaa

SEQ ID NO: 202352 - RNA, 19 nt, Artificial Sequence
  Description of Artificial Sequence: Synthetic oligonucleotide
gggaguucgaucaagaaaa

SEQ ID NO: 202353 - RNA, 19 nt, Artificial Sequence
  Description of Artificial Sequence: Synthetic oligonucleotide
gguaaauaauccacuggag

SEQ ID NO: 202354 - RNA, 19 nt, Artificial Sequence
  Description of Artificial Sequence: Synthetic oligonucleotide
uguucaccuuuaauauacu

SEQ ID NO: 202355 - RNA, 19 nt, Artificial Sequence
  Description of Artificial Sequence: Synthetic oligonucleotide
acauaauaugguuccuaaa

SEQ ID NO: 202356 - RNA, 19 nt, Artificial Sequence
  Description of Artificial Sequence: Synthetic oligonucleotide
ucgugagaauccaaguguu

SEQ ID NO: 202357 - RNA, 19 nt, Artificial Sequence
  Description of Artificial Sequence: Synthetic oligonucleotide
uagcaucucgaguccauga

SEQ ID NO: 202358 - RNA, 19 nt, Artificial Sequence
  Description of Artificial Sequence: Synthetic oligonucleotide
ucaauucgacuagauggca

SEQ ID NO: 202359 - RNA, 19 nt, Artificial Sequence
  Description of Artificial Sequence: Synthetic oligonucleotide
gaauagaaagucccucucu

SEQ ID NO: 202360 - RNA, 19 nt, Artificial Sequence
  Description of Artificial Sequence: Synthetic oligonucleotide
agaaaauaguguguguaua

SEQ ID NO: 202361 - RNA, 19 nt, Artificial Sequence
  Description of Artificial Sequence: Synthetic oligonucleotide
auguauauauauauauaua

SEQ ID NO: 202362 - RNA, 19 nt, Artificial Sequence
  Description of Artificial Sequence: Synthetic oligonucleotide
agaucguguaagacauagc

SEQ ID NO: 202363 - RNA, 19 nt, Artificial Sequence
  Description of Artificial Sequence: Synthetic oligonucleotide
caaagauauagauguccca

SEQ ID NO: 202364 - RNA, 19 nt, Artificial Sequence
  Description of Artificial Sequence: Synthetic oligonucleotide
auugucacguucgcuaacu

SEQ ID NO: 202365 - RNA, 19 nt, Artificial Sequence
  Description of Artificial Sequence: Synthetic oligonucleotide
cacugauucuugaauagaa

SEQ ID NO: 202366 - RNA, 19 nt, Artificial Sequence
  Description of Artificial Sequence: Synthetic oligonucleotide
uagauguuuucuguguaau

SEQ ID NO: 202367 - RNA, 19 nt, Artificial Sequence
  Description of Artificial Sequence: Synthetic oligonucleotide
guacaugaggaguagggcu

SEQ ID NO: 202368 - RNA, 19 nt, Artificial Sequence
  Description of Artificial Sequence: Synthetic oligonucleotide
cguugauuaaauuacauua

SEQ ID NO: 202369 - RNA, 19 nt, Artificial Sequence
  Description of Artificial Sequence: Synthetic oligonucleotide
gaggcacccucucuuggag

SEQ ID NO: 202370 - RNA, 19 nt, Artificial Sequence
  Description of Artificial Sequence: Synthetic oligonucleotide
auaauccacuggaggaagg

SEQ ID NO: 202371 - RNA, 19 nt, Artificial Sequence
  Description of Artificial Sequence: Synthetic oligonucleotide
guguaauuucaagaucgug

SEQ ID NO: 202372 - RNA, 19 nt, Artificial Sequence
  Description of Artificial Sequence: Synthetic oligonucleotide
cccgacuuccguauuauag

SEQ ID NO: 202373 - RNA, 19 nt, Artificial Sequence
  Description of Artificial Sequence: Synthetic oligonucleotide
ugcuuaaguuuggacagaa

SEQ ID NO: 202374 - RNA, 19 nt, Artificial Sequence
  Description of Artificial Sequence: Synthetic oligonucleotide
guuuuauaccucacuggac

SEQ ID NO: 202375 - RNA, 19 nt, Artificial Sequence
  Description of Artificial Sequence: Synthetic oligonucleotide
gcguauuuugguaaauugc

SEQ ID NO: 202376 - RNA, 19 nt, Artificial Sequence
  Description of Artificial Sequence: Synthetic oligonucleotide
uuguugcuuaacaccguau

SEQ ID NO: 202377 - RNA, 19 nt, Artificial Sequence
  Description of Artificial Sequence: Synthetic oligonucleotide
gggaccaucacuguuggac

SEQ ID NO: 202378 - RNA, 19 nt, Artificial Sequence
  Description of Artificial Sequence: Synthetic oligonucleotide
aguugcucuauuacaaaau

SEQ ID NO: 202379 - RNA, 19 nt, Artificial Sequence
  Description of Artificial Sequence: Synthetic oligonucleotide
augauuguccgugcaucuc

SEQ ID NO: 202380 - RNA, 19 nt, Artificial Sequence
  Description of Artificial Sequence: Synthetic oligonucleotide
guugcuuaacaccguaucu

SEQ ID NO: 202381 - RNA, 19 nt, Artificial Sequence
  Description of Artificial Sequence: Synthetic oligonucleotide
aguugggcggcuauaagau

SEQ ID NO: 202382 - RNA, 19 nt, Artificial Sequence
  Description of Artificial Sequence: Synthetic oligonucleotide
uccggcuagcaucucgagu

SEQ ID NO: 202383 - RNA, 19 nt, Artificial Sequence
  Description of Artificial Sequence: Synthetic oligonucleotide
gaagggaguucgaucaaga

SEQ ID NO: 202384 - RNA, 19 nt, Artificial Sequence
  Description of Artificial Sequence: Synthetic oligonucleotide
uucgucuaugaaacuucuc

SEQ ID NO: 202385 - RNA, 19 nt, Artificial Sequence
  Description of Artificial Sequence: Synthetic oligonucleotide
agcaaguuugagugcuaca

SEQ ID NO: 202386 - RNA, 19 nt, Artificial Sequence
  Description of Artificial Sequence: Synthetic oligonucleotide
ucuaacugggauggguauc

SEQ ID NO: 202387 - RNA, 19 nt, Artificial Sequence
  Description of Artificial Sequence: Synthetic oligonucleotide
caguugcauugugauaugg

SEQ ID NO: 202388 - RNA, 19 nt, Artificial Sequence
  Description of Artificial Sequence: Synthetic oligonucleotide
ugguaacaguaguguauga

SEQ ID NO: 202389 - RNA, 19 nt, Artificial Sequence
  Description of Artificial Sequence: Synthetic oligonucleotide
gucacguucgcuaacuaaa

SEQ ID NO: 202390 - RNA, 19 nt, Artificial Sequence
  Description of Artificial Sequence: Synthetic oligonucleotide
agcaucucgaguccaugau

SEQ ID NO: 202391 - RNA, 19 nt, Artificial Sequence
  Description of Artificial Sequence: Synthetic oligonucleotide
uauugauacccaggaggac

SEQ ID NO: 202392 - RNA, 19 nt, Artificial Sequence
  Description of Artificial Sequence: Synthetic oligonucleotide
gggaucucaagaagaagag

SEQ ID NO: 202393 - RNA, 19 nt, Artificial Sequence
  Description of Artificial Sequence: Synthetic oligonucleotide
uuuggggccugagaagagu

SEQ ID NO: 202394 - RNA, 19 nt, Artificial Sequence
  Description of Artificial Sequence: Synthetic oligonucleotide
gucuaugaaacuucucagu

SEQ ID NO: 202395 - RNA, 19 nt, Artificial Sequence
  Description of Artificial Sequence: Synthetic oligonucleotide
gugugaagggaguucgauc

SEQ ID NO: 202396 - RNA, 19 nt, Artificial Sequence
  Description of Artificial Sequence: Synthetic oligonucleotide
ucucgaguccaugauuguc

SEQ ID NO: 202397 - RNA, 19 nt, Artificial Sequence
  Description of Artificial Sequence: Synthetic oligonucleotide
acacugauucuugaauaga

SEQ ID NO: 202398 - RNA, 19 nt, Artificial Sequence
  Description of Artificial Sequence: Synthetic oligonucleotide
ccggcuagcaucucgaguc

SEQ ID NO: 202399 - RNA, 19 nt, Artificial Sequence
  Description of Artificial Sequence: Synthetic oligonucleotide
guaucuuacauggcuggga

SEQ ID NO: 202400 - RNA, 19 nt, Artificial Sequence
  Description of Artificial Sequence: Synthetic oligonucleotide
auagcuguaagaacucguu

SEQ ID NO: 202401 - RNA, 19 nt, Artificial Sequence
  Description of Artificial Sequence: Synthetic oligonucleotide
cuaugaaacuucucagugu

SEQ ID NO: 202402 - RNA, 19 nt, Artificial Sequence
  Description of Artificial Sequence: Synthetic oligonucleotide
gagcaaguuugagugcuac

SEQ ID NO: 202403 - RNA, 19 nt, Artificial Sequence
  Description of Artificial Sequence: Synthetic oligonucleotide
aguguugcuuaaguuugga

SEQ ID NO: 202404 - RNA, 19 nt, Artificial Sequence
  Description of Artificial Sequence: Synthetic oligonucleotide
aucccuugacaguacccga

SEQ ID NO: 202405 - RNA, 19 nt, Artificial Sequence
  Description of Artificial Sequence: Synthetic oligonucleotide
agugugaagggaguucgau

SEQ ID NO: 202406 - RNA, 19 nt, Artificial Sequence
  Description of Artificial Sequence: Synthetic oligonucleotide
uaacaccguaucugucucu

SEQ ID NO: 202407 - RNA, 19 nt, Artificial Sequence
  Description of Artificial Sequence: Synthetic oligonucleotide
accauauggucuccuggaa

SEQ ID NO: 202408 - RNA, 19 nt, Artificial Sequence
  Description of Artificial Sequence: Synthetic oligonucleotide
gacaguacccgacuuccgu

SEQ ID NO: 202409 - RNA, 19 nt, Artificial Sequence
  Description of Artificial Sequence: Synthetic oligonucleotide
gcggcuauaagauuucucu

SEQ ID NO: 202410 - RNA, 19 nt, Artificial Sequence
  Description of Artificial Sequence: Synthetic oligonucleotide
gaauaugccgcaagaacau

SEQ ID NO: 202411 - RNA, 19 nt, Artificial Sequence
  Description of Artificial Sequence: Synthetic oligonucleotide
uccuaaaugugcgguucac

SEQ ID NO: 202412 - RNA, 19 nt, Artificial Sequence
  Description of Artificial Sequence: Synthetic oligonucleotide
uggcucaucccuugacagu

SEQ ID NO: 202413 - RNA, 19 nt, Artificial Sequence
  Description of Artificial Sequence: Synthetic oligonucleotide
cgucuaugaaacuucucag

SEQ ID NO: 202414 - RNA, 19 nt, Artificial Sequence
  Description of Artificial Sequence: Synthetic oligonucleotide
ucauuaccacguugauuaa

SEQ ID NO: 202415 - RNA, 19 nt, Artificial Sequence
  Description of Artificial Sequence: Synthetic oligonucleotide
acaguacccgacuuccgua

SEQ ID NO: 202416 - RNA, 19 nt, Artificial Sequence
  Description of Artificial Sequence: Synthetic oligonucleotide
augcgaugggcauccacau

SEQ ID NO: 202417 - RNA, 19 nt, Artificial Sequence
  Description of Artificial Sequence: Synthetic oligonucleotide
uugucccaauccaguauua

SEQ ID NO: 202418 - RNA, 19 nt, Artificial Sequence
  Description of Artificial Sequence: Synthetic oligonucleotide
cauagcuguaagaacucgu

SEQ ID NO: 202419 - RNA, 19 nt, Artificial Sequence
  Description of Artificial Sequence: Synthetic oligonucleotide
ccguauuauagacagaaua

SEQ ID NO: 202420 - RNA, 19 nt, Artificial Sequence
  Description of Artificial Sequence: Synthetic oligonucleotide
gguguugaaaggcugcgua

SEQ ID NO: 202421 - RNA, 19 nt, Artificial Sequence
  Description of Artificial Sequence: Synthetic oligonucleotide
agaguuugaccaaggccca

SEQ ID NO: 202422 - RNA, 19 nt, Artificial Sequence
  Description of Artificial Sequence: Synthetic oligonucleotide
gguccguauucaugacugg

SEQ ID NO: 202423 - RNA, 19 nt, Artificial Sequence
  Description of Artificial Sequence: Synthetic oligonucleotide
ugguuaucguaugguuucu

SEQ ID NO: 202424 - RNA, 19 nt, Artificial Sequence
  Description of Artificial Sequence: Synthetic oligonucleotide
uuggagaacccagcauuuc

SEQ ID NO: 202425 - RNA, 19 nt, Artificial Sequence
  Description of Artificial Sequence: Synthetic oligonucleotide
ccuaaaugugcgguucacg

SEQ ID NO: 202426 - RNA, 19 nt, Artificial Sequence
  Description of Artificial Sequence: Synthetic oligonucleotide
uugucacguucgcuaacua

SEQ ID NO: 202427 - RNA, 19 nt, Artificial Sequence
  Description of Artificial Sequence: Synthetic oligonucleotide
cacguucgcuaacuaaaca

SEQ ID NO: 202428 - RNA, 19 nt, Artificial Sequence
  Description of Artificial Sequence: Synthetic oligonucleotide
acaggaguugggcggcuau

SEQ ID NO: 202429 - RNA, 19 nt, Artificial Sequence
  Description of Artificial Sequence: Synthetic oligonucleotide
guccguauucaugacugga

SEQ ID NO: 202430 - RNA, 19 nt, Artificial Sequence
  Description of Artificial Sequence: Synthetic oligonucleotide
gcaugguuguagugccugg

SEQ ID NO: 202431 - RNA, 19 nt, Artificial Sequence
  Description of Artificial Sequence: Synthetic oligonucleotide
caugauuguccgugcaucu

SEQ ID NO: 202432 - RNA, 19 nt, Artificial Sequence
  Description of Artificial Sequence: Synthetic oligonucleotide
ggaguugggcggcuauaag

SEQ ID NO: 202433 - RNA, 19 nt, Artificial Sequence
  Description of Artificial Sequence: Synthetic oligonucleotide
ugcgaugggcauccacaua

SEQ ID NO: 202434 - RNA, 19 nt, Artificial Sequence
  Description of Artificial Sequence: Synthetic oligonucleotide
ggcuccggcuagcaucucg

SEQ ID NO: 202435 - RNA, 19 nt, Artificial Sequence
  Description of Artificial Sequence: Synthetic oligonucleotide
caccguaucugucucuaaa

SEQ ID NO: 202436 - RNA, 19 nt, Artificial Sequence
  Description of Artificial Sequence: Synthetic oligonucleotide
auucgacuagauggcagaa

SEQ ID NO: 202437 - RNA, 19 nt, Artificial Sequence
  Description of Artificial Sequence: Synthetic oligonucleotide
augccgcaagaacauggaa

SEQ ID NO: 202438 - RNA, 19 nt, Artificial Sequence
  Description of Artificial Sequence: Synthetic oligonucleotide
aucuuacauggcugggauu

SEQ ID NO: 202439 - RNA, 19 nt, Artificial Sequence
  Description of Artificial Sequence: Synthetic oligonucleotide
cccaaggcucaauuucugc

SEQ ID NO: 202440 - RNA, 19 nt, Artificial Sequence
  Description of Artificial Sequence: Synthetic oligonucleotide
cgacuuccguauuauagac

SEQ ID NO: 202441 - RNA, 19 nt, Artificial Sequence
  Description of Artificial Sequence: Synthetic oligonucleotide
gccauuugguaguucuuuc

SEQ ID NO: 202442 - RNA, 19 nt, Artificial Sequence
  Description of Artificial Sequence: Synthetic oligonucleotide
uacgcagcccugugauccu

SEQ ID NO: 202443 - RNA, 19 nt, Artificial Sequence
  Description of Artificial Sequence: Synthetic oligonucleotide
cugggauggguaucuuaca

SEQ ID NO: 202444 - RNA, 19 nt, Artificial Sequence
  Description of Artificial Sequence: Synthetic oligonucleotide
gaggguggauacgcagccc

SEQ ID NO: 202445 - RNA, 19 nt, Artificial Sequence
  Description of Artificial Sequence: Synthetic oligonucleotide
uacccgacuuccguauuau

SEQ ID NO: 202446 - RNA, 19 nt, Artificial Sequence
  Description of Artificial Sequence: Synthetic oligonucleotide
ccgacuuccguauuauaga

SEQ ID NO: 202447 - RNA, 19 nt, Artificial Sequence
  Description of Artificial Sequence: Synthetic oligonucleotide
agguguugaaaggcugcgu

SEQ ID NO: 202448 - RNA, 19 nt, Artificial Sequence
  Description of Artificial Sequence: Synthetic oligonucleotide
aaugugcgguucacgucaa

SEQ ID NO: 202449 - RNA, 19 nt, Artificial Sequence
  Description of Artificial Sequence: Synthetic oligonucleotide
ccacauagacagaggcacc

SEQ ID NO: 202450 - RNA, 19 nt, Artificial Sequence
  Description of Artificial Sequence: Synthetic oligonucleotide
guucgcuaacuaaacaaau

SEQ ID NO: 202451 - RNA, 19 nt, Artificial Sequence
  Description of Artificial Sequence: Synthetic oligonucleotide
guaguguaugauagcauau

SEQ ID NO: 202452 - RNA, 19 nt, Artificial Sequence
  Description of Artificial Sequence: Synthetic oligonucleotide
uugugauaugggagcucuu

SEQ ID NO: 202453 - RNA, 19 nt, Artificial Sequence
  Description of Artificial Sequence: Synthetic oligonucleotide
ccauuugguaguucuuuca

SEQ ID NO: 202454 - RNA, 19 nt, Artificial Sequence
  Description of Artificial Sequence: Synthetic oligonucleotide
uggggccugagaagaguuu

SEQ ID NO: 202455 - RNA, 19 nt, Artificial Sequence
  Description of Artificial Sequence: Synthetic oligonucleotide
cuccggcuagcaucucgag

SEQ ID NO: 202456 - RNA, 19 nt, Artificial Sequence
  Description of Artificial Sequence: Synthetic oligonucleotide
aguacccgacuuccguauu

SEQ ID NO: 202457 - RNA, 19 nt, Artificial Sequence
  Description of Artificial Sequence: Synthetic oligonucleotide
cauagcauguuuggggccu

SEQ ID NO: 202458 - RNA, 19 nt, Artificial Sequence
  Description of Artificial Sequence: Synthetic oligonucleotide
ggaguuggcguuucagugu

SEQ ID NO: 202459 - RNA, 19 nt, Artificial Sequence
  Description of Artificial Sequence: Synthetic oligonucleotide
guacccgacuuccguauua

SEQ ID NO: 202460 - RNA, 19 nt, Artificial Sequence
  Description of Artificial Sequence: Synthetic oligonucleotide
ccaugauuguccgugcauc

SEQ ID NO: 202461 - RNA, 19 nt, Artificial Sequence
  Description of Artificial Sequence: Synthetic oligonucleotide
agcaacuauuucagcucgu

SEQ ID NO: 202462 - RNA, 19 nt, Artificial Sequence
  Description of Artificial Sequence: Synthetic oligonucleotide
gguaacaguaguguaugau

SEQ ID NO: 202463 - RNA, 19 nt, Artificial Sequence
  Description of Artificial Sequence: Synthetic oligonucleotide
acaccguaucugucucuaa

SEQ ID NO: 202464 - RNA, 19 nt, Artificial Sequence
  Description of Artificial Sequence: Synthetic oligonucleotide
ggaguucgaucaagaaaac

SEQ ID NO: 202465 - RNA, 19 nt, Artificial Sequence
  Description of Artificial Sequence: Synthetic oligonucleotide
cggcuauaagauuucucug

SEQ ID NO: 202466 - RNA, 19 nt, Artificial Sequence
  Description of Artificial Sequence: Synthetic oligonucleotide
guuggcguuucaguguggu

SEQ ID NO: 202467 - RNA, 19 nt, Artificial Sequence
  Description of Artificial Sequence: Synthetic oligonucleotide
cguucgcuaacuaaacaaa

SEQ ID NO: 202468 - RNA, 19 nt, Artificial Sequence
  Description of Artificial Sequence: Synthetic oligonucleotide
cugguccguauucaugacu

SEQ ID NO: 202469 - RNA, 19 nt, Artificial Sequence
  Description of Artificial Sequence: Synthetic oligonucleotide
gauugggcauaaauuccuu

SEQ ID NO: 202470 - RNA, 19 nt, Artificial Sequence
  Description of Artificial Sequence: Synthetic oligonucleotide
ccguauucaugacuggaaa

SEQ ID NO: 202471 - RNA, 19 nt, Artificial Sequence
  Description of Artificial Sequence: Synthetic oligonucleotide
ccauauggucuccuggaaa

SEQ ID NO: 202472 - RNA, 19 nt, Artificial Sequence
  Description of Artificial Sequence: Synthetic oligonucleotide
ggcggcuauaagauuucuc

SEQ ID NO: 202473 - RNA, 19 nt, Artificial Sequence
  Description of Artificial Sequence: Synthetic oligonucleotide
acccgacuuccguauuaua

SEQ ID NO: 202474 - RNA, 19 nt, Artificial Sequence
  Description of Artificial Sequence: Synthetic oligonucleotide
gugcaucucaggucuguau

SEQ ID NO: 202475 - RNA, 19 nt, Artificial Sequence
  Description of Artificial Sequence: Synthetic oligonucleotide
caagaucguguaagacaua

SEQ ID NO: 202476 - RNA, 19 nt, Artificial Sequence
  Description of Artificial Sequence: Synthetic oligonucleotide
cagaaggcgucuuccucgu

SEQ ID NO: 202477 - RNA, 19 nt, Artificial Sequence
  Description of Artificial Sequence: Synthetic oligonucleotide
caguacccgacuuccguau

SEQ ID NO: 202478 - RNA, 19 nt, Artificial Sequence
  Description of Artificial Sequence: Synthetic oligonucleotide
guugggcggcuauaagauu

SEQ ID NO: 202479 - RNA, 19 nt, Artificial Sequence
  Description of Artificial Sequence: Synthetic oligonucleotide
gcuccggcuagcaucucga

SEQ ID NO: 202480 - RNA, 19 nt, Artificial Sequence
  Description of Artificial Sequence: Synthetic oligonucleotide
caaggucuauuugucugau

SEQ ID NO: 202481 - RNA, 19 nt, Artificial Sequence
  Description of Artificial Sequence: Synthetic oligonucleotide
gcaucucgaguccaugauu

SEQ ID NO: 202482 - RNA, 19 nt, Artificial Sequence
  Description of Artificial Sequence: Synthetic oligonucleotide
ccuucuaacugggaugggu

SEQ ID NO: 202483 - RNA, 19 nt, Artificial Sequence
  Description of Artificial Sequence: Synthetic oligonucleotide
cugcaugguuguagugccu

SEQ ID NO: 202484 - RNA, 19 nt, Artificial Sequence
  Description of Artificial Sequence: Synthetic oligonucleotide
caggaguugggcggcuaua

SEQ ID NO: 202485 - RNA, 19 nt, Artificial Sequence
  Description of Artificial Sequence: Synthetic oligonucleotide
ccguuuuaguucugacaua

SEQ ID NO: 202486 - RNA, 19 nt, Artificial Sequence
  Description of Artificial Sequence: Synthetic oligonucleotide
ggcuguuaucuggcucauc

SEQ ID NO: 202487 - RNA, 19 nt, Artificial Sequence
  Description of Artificial Sequence: Synthetic oligonucleotide
cgaugggcauccacauaga

SEQ ID NO: 202488 - RNA, 19 nt, Artificial Sequence
  Description of Artificial Sequence: Synthetic oligonucleotide
uggcuccggcuagcaucuc

SEQ ID NO: 202489 - RNA, 19 nt, Artificial Sequence
  Description of Artificial Sequence: Synthetic oligonucleotide
ccuugacaguacccgacuu

SEQ ID NO: 202490 - RNA, 19 nt, Artificial Sequence
  Description of Artificial Sequence: Synthetic oligonucleotide
gggcggcuauaagauuucu

SEQ ID NO: 202491 - RNA, 19 nt, Artificial Sequence
  Description of Artificial Sequence: Synthetic oligonucleotide
cccgugcucuguguuuuaa

SEQ ID NO: 202492 - RNA, 19 nt, Artificial Sequence
  Description of Artificial Sequence: Synthetic oligonucleotide
gcccgugcucuguguuuua

SEQ ID NO: 202493 - RNA, 19 nt, Artificial Sequence
  Description of Artificial Sequence: Synthetic oligonucleotide
gguucacgucaaggucuau

SEQ ID NO: 202494 - RNA, 19 nt, Artificial Sequence
  Description of Artificial Sequence: Synthetic oligonucleotide
aauguugucuuguaggugg

SEQ ID NO: 202495 - RNA, 19 nt, Artificial Sequence
  Description of Artificial Sequence: Synthetic oligonucleotide
auugaugcaaucuaggcac

SEQ ID NO: 202496 - RNA, 19 nt, Artificial Sequence
  Description of Artificial Sequence: Synthetic oligonucleotide
gaaaagcuaaguuaguccg

SEQ ID NO: 202497 - RNA, 19 nt, Artificial Sequence
  Description of Artificial Sequence: Synthetic oligonucleotide
ugauaugugacucaaaauc

SEQ ID NO: 202498 - RNA, 19 nt, Artificial Sequence
  Description of Artificial Sequence: Synthetic oligonucleotide
uaaauuucgcaacagaccu

SEQ ID NO: 202499 - RNA, 19 nt, Artificial Sequence
  Description of Artificial Sequence: Synthetic oligonucleotide
ucgggcaucacucucaugg

SEQ ID NO: 202500 - RNA, 19 nt, Artificial Sequence
  Description of Artificial Sequence: Synthetic oligonucleotide
auuaagauaguccuccagg

SEQ ID NO: 202501 - RNA, 19 nt, Artificial Sequence
  Description of Artificial Sequence: Synthetic oligonucleotide
agaguuaggaugcagccgc

SEQ ID NO: 202502 - RNA, 19 nt, Artificial Sequence
  Description of Artificial Sequence: Synthetic oligonucleotide
uuuugcauuauuuugguaa

SEQ ID NO: 202503 - RNA, 19 nt, Artificial Sequence
  Description of Artificial Sequence: Synthetic oligonucleotide
aguuaguccgaucacaggg

SEQ ID NO: 202504 - RNA, 19 nt, Artificial Sequence
  Description of Artificial Sequence: Synthetic oligonucleotide
augauauugaacuugauuu

SEQ ID NO: 202505 - RNA, 19 nt, Artificial Sequence
  Description of Artificial Sequence: Synthetic oligonucleotide
auaugcuuuucccaggagc

SEQ ID NO: 202506 - RNA, 19 nt, Artificial Sequence
  Description of Artificial Sequence: Synthetic oligonucleotide
agcaauucaaucugggugg

SEQ ID NO: 202507 - RNA, 19 nt, Artificial Sequence
  Description of Artificial Sequence: Synthetic oligonucleotide
auuauucucgacuaggcug

SEQ ID NO: 202508 - RNA, 19 nt, Artificial Sequence
  Description of Artificial Sequence: Synthetic oligonucleotide
ugaaaagcuaaguuagucc

SEQ ID NO: 202509 - RNA, 19 nt, Artificial Sequence
  Description of Artificial Sequence: Synthetic oligonucleotide
uguaguuugugauauguga

SEQ ID NO: 202510 - RNA, 19 nt, Artificial Sequence
  Description of Artificial Sequence: Synthetic oligonucleotide
uagcaauucaaucugggug

SEQ ID NO: 202511 - RNA, 19 nt, Artificial Sequence
  Description of Artificial Sequence: Synthetic oligonucleotide
gugaacaguagguagaucc

SEQ ID NO: 202512 - RNA, 19 nt, Artificial Sequence
  Description of Artificial Sequence: Synthetic oligonucleotide
acaucucgaaucuucaugg

SEQ ID NO: 202513 - RNA, 19 nt, Artificial Sequence
  Description of Artificial Sequence: Synthetic oligonucleotide
uuaggaaugaaaagcuaag

SEQ ID NO: 202514 - RNA, 19 nt, Artificial Sequence
  Description of Artificial Sequence: Synthetic oligonucleotide
uugaggacccuucaggagg

SEQ ID NO: 202515 - RNA, 19 nt, Artificial Sequence
  Description of Artificial Sequence: Synthetic oligonucleotide
cugaauguugucuuguagg

SEQ ID NO: 202516 - RNA, 19 nt, Artificial Sequence
  Description of Artificial Sequence: Synthetic oligonucleotide
agcaugaugguagauaugg

SEQ ID NO: 202517 - RNA, 19 nt, Artificial Sequence
  Description of Artificial Sequence: Synthetic oligonucleotide
uguagcaauucaaucuggg

SEQ ID NO: 202518 - RNA, 19 nt, Artificial Sequence
  Description of Artificial Sequence: Synthetic oligonucleotide
gaugaaagggcaccugucg

SEQ ID NO: 202519 - RNA, 19 nt, Artificial Sequence
  Description of Artificial Sequence: Synthetic oligonucleotide
uucggauauagaaucgggg

SEQ ID NO: 202520 - RNA, 19 nt, Artificial Sequence
  Description of Artificial Sequence: Synthetic oligonucleotide
aguagguagauccagcuca

SEQ ID NO: 202521 - RNA, 19 nt, Artificial Sequence
  Description of Artificial Sequence: Synthetic oligonucleotide
ucuucuagacacuugguga

SEQ ID NO: 202522 - RNA, 19 nt, Artificial Sequence
  Description of Artificial Sequence: Synthetic oligonucleotide
uaaguuaguccgaucacag

SEQ ID NO: 202523 - RNA, 19 nt, Artificial Sequence
  Description of Artificial Sequence: Synthetic oligonucleotide
cugauugagucauagacac

SEQ ID NO: 202524 - RNA, 19 nt, Artificial Sequence
  Description of Artificial Sequence: Synthetic oligonucleotide
uuauucucgacuaggcugc

SEQ ID NO: 202525 - RNA, 19 nt, Artificial Sequence
  Description of Artificial Sequence: Synthetic oligonucleotide
caugguacgguuauacagg

SEQ ID NO: 202526 - RNA, 19 nt, Artificial Sequence
  Description of Artificial Sequence: Synthetic oligonucleotide
uucauuauucucgacuagg

SEQ ID NO: 202527 - RNA, 19 nt, Artificial Sequence
  Description of Artificial Sequence: Synthetic oligonucleotide
uugaugugcagaugaaagg

SEQ ID NO: 202528 - RNA, 19 nt, Artificial Sequence
  Description of Artificial Sequence: Synthetic oligonucleotide
ugugcaaccaagauaucca

SEQ ID NO: 202529 - RNA, 19 nt, Artificial Sequence
  Description of Artificial Sequence: Synthetic oligonucleotide
gauaaacacacuccagaag

SEQ ID NO: 202530 - RNA, 19 nt, Artificial Sequence
  Description of Artificial Sequence: Synthetic oligonucleotide
auuuucggaucuuuuggcg

SEQ ID NO: 202531 - RNA, 19 nt, Artificial Sequence
  Description of Artificial Sequence: Synthetic oligonucleotide
gaugguucguauaagguug

SEQ ID NO: 202532 - RNA, 19 nt, Artificial Sequence
  Description of Artificial Sequence: Synthetic oligonucleotide
uacggauccggucuguacg

SEQ ID NO: 202533 - RNA, 19 nt, Artificial Sequence
  Description of Artificial Sequence: Synthetic oligonucleotide
auugugugcauccuuuguc

SEQ ID NO: 202534 - RNA, 19 nt, Artificial Sequence
  Description of Artificial Sequence: Synthetic oligonucleotide
guucguauaagguugguca

SEQ ID NO: 202535 - RNA, 19 nt, Artificial Sequence
  Description of Artificial Sequence: Synthetic oligonucleotide
uagauauggcagaggaugg

SEQ ID NO: 202536 - RNA, 19 nt, Artificial Sequence
  Description of Artificial Sequence: Synthetic oligonucleotide
caugaguaaucucaguacc

SEQ ID NO: 202537 - RNA, 19 nt, Artificial Sequence
  Description of Artificial Sequence: Synthetic oligonucleotide
guaaccauccuuuugaucu

SEQ ID NO: 202538 - RNA, 19 nt, Artificial Sequence
  Description of Artificial Sequence: Synthetic oligonucleotide
uuaagauaguccuccaggu

SEQ ID NO: 202539 - RNA, 19 nt, Artificial Sequence
  Description of Artificial Sequence: Synthetic oligonucleotide
agcuaaguuaguccgauca

SEQ ID NO: 202540 - RNA, 19 nt, Artificial Sequence
  Description of Artificial Sequence: Synthetic oligonucleotide
cuaucaugcuucuucuugg

SEQ ID NO: 202541 - RNA, 19 nt, Artificial Sequence
  Description of Artificial Sequence: Synthetic oligonucleotide
guugaugugcagaugaaag

SEQ ID NO: 202542 - RNA, 19 nt, Artificial Sequence
  Description of Artificial Sequence: Synthetic oligonucleotide
auuaaugaugaaacugugg

SEQ ID NO: 202543 - RNA, 19 nt, Artificial Sequence
  Description of Artificial Sequence: Synthetic oligonucleotide
gacaucucgaaucuucaug

SEQ ID NO: 202544 - RNA, 19 nt, Artificial Sequence
  Description of Artificial Sequence: Synthetic oligonucleotide
uuaacaagugguacgccac

SEQ ID NO: 202545 - RNA, 19 nt, Artificial Sequence
  Description of Artificial Sequence: Synthetic oligonucleotide
aaguuaguccgaucacagg

SEQ ID NO: 202546 - RNA, 19 nt, Artificial Sequence
  Description of Artificial Sequence: Synthetic oligonucleotide
cuccuuauccacaauacuc

SEQ ID NO: 202547 - RNA, 19 nt, Artificial Sequence
  Description of Artificial Sequence: Synthetic oligonucleotide
gaggucacgggccugauac

SEQ ID NO: 202548 - RNA, 19 nt, Artificial Sequence
  Description of Artificial Sequence: Synthetic oligonucleotide
gauucggauauagaaucgg

SEQ ID NO: 202549 - RNA, 19 nt, Artificial Sequence
  Description of Artificial Sequence: Synthetic oligonucleotide
cagaggauggcacagguac

SEQ ID NO: 202550 - RNA, 19 nt, Artificial Sequence
  Description of Artificial Sequence: Synthetic oligonucleotide
uuuaggaacuuucggcugu

SEQ ID NO: 202551 - RNA, 19 nt, Artificial Sequence
  Description of Artificial Sequence: Synthetic oligonucleotide
uugaucucggaaauagcca

SEQ ID NO: 202552 - RNA, 19 nt, Artificial Sequence
  Description of Artificial Sequence: Synthetic oligonucleotide
uguucucuccaacaaagau

SEQ ID NO: 202553 - RNA, 19 nt, Artificial Sequence
  Description of Artificial Sequence: Synthetic oligonucleotide
ucugacagugucuccauac

SEQ ID NO: 202554 - RNA, 19 nt, Artificial Sequence
  Description of Artificial Sequence: Synthetic oligonucleotide
caaucuaggcacaucugcc

SEQ ID NO: 202555 - RNA, 19 nt, Artificial Sequence
  Description of Artificial Sequence: Synthetic oligonucleotide
cuccuuaacaagugguacg

SEQ ID NO: 202556 - RNA, 19 nt, Artificial Sequence
  Description of Artificial Sequence: Synthetic oligonucleotide
ugggcuuaggaaugaaaag

SEQ ID NO: 202557 - RNA, 19 nt, Artificial Sequence
  Description of Artificial Sequence: Synthetic oligonucleotide
uucguauaagguuggucag

SEQ ID NO: 202558 - RNA, 19 nt, Artificial Sequence
  Description of Artificial Sequence: Synthetic oligonucleotide
augaaagggcaccugucgg

SEQ ID NO: 202559 - RNA, 19 nt, Artificial Sequence
  Description of Artificial Sequence: Synthetic oligonucleotide
acggaugguucguauaagg

SEQ ID NO: 202560 - RNA, 19 nt, Artificial Sequence
  Description of Artificial Sequence: Synthetic oligonucleotide
ugaacaguagguagaucca

SEQ ID NO: 202561 - RNA, 19 nt, Artificial Sequence
  Description of Artificial Sequence: Synthetic oligonucleotide
augaguaaucucaguaccc

SEQ ID NO: 202562 - RNA, 19 nt, Artificial Sequence
  Description of Artificial Sequence: Synthetic oligonucleotide
augcaaucuaggcacaucu

SEQ ID NO: 202563 - RNA, 19 nt, Artificial Sequence
  Description of Artificial Sequence: Synthetic oligonucleotide
uggcauuacggaugguucg

SEQ ID NO: 202564 - RNA, 19 nt, Artificial Sequence
  Description of Artificial Sequence: Synthetic oligonucleotide
uuacggaugguucguauaa

SEQ ID NO: 202565 - RNA, 19 nt, Artificial Sequence
  Description of Artificial Sequence: Synthetic oligonucleotide
ucgcaacagaccuuuaaug

SEQ ID NO: 202566 - RNA, 19 nt, Artificial Sequence
  Description of Artificial Sequence: Synthetic oligonucleotide
uggagaacucaguaggcug

SEQ ID NO: 202567 - RNA, 19 nt, Artificial Sequence
  Description of Artificial Sequence: Synthetic oligonucleotide
aucucgguuguauuuucgg

SEQ ID NO: 202568 - RNA, 19 nt, Artificial Sequence
  Description of Artificial Sequence: Synthetic oligonucleotide
caccagauaaacacacucc

SEQ ID NO: 202569 - RNA, 19 nt, Artificial Sequence
  Description of Artificial Sequence: Synthetic oligonucleotide
acagguacggauccggucu

SEQ ID NO: 202570 - RNA, 19 nt, Artificial Sequence
  Description of Artificial Sequence: Synthetic oligonucleotide
uuguaguuugugauaugug

SEQ ID NO: 202571 - RNA, 19 nt, Artificial Sequence
  Description of Artificial Sequence: Synthetic oligonucleotide
ugguacgccaccacggacc

SEQ ID NO: 202572 - RNA, 19 nt, Artificial Sequence
  Description of Artificial Sequence: Synthetic oligonucleotide
aaacacccguucauuauuc

SEQ ID NO: 202573 - RNA, 19 nt, Artificial Sequence
  Description of Artificial Sequence: Synthetic oligonucleotide
uggauccgcaugcugaaug

SEQ ID NO: 202574 - RNA, 19 nt, Artificial Sequence
  Description of Artificial Sequence: Synthetic oligonucleotide
ugaaagggcaccugucggc

SEQ ID NO: 202575 - RNA, 19 nt, Artificial Sequence
  Description of Artificial Sequence: Synthetic oligonucleotide
aauuucgcaacagaccuuu

SEQ ID NO: 202576 - RNA, 19 nt, Artificial Sequence
  Description of Artificial Sequence: Synthetic oligonucleotide
uacugguggauccgcaugc

SEQ ID NO: 202577 - RNA, 19 nt, Artificial Sequence
  Description of Artificial Sequence: Synthetic oligonucleotide
uccgaacuagcauggugcg

SEQ ID NO: 202578 - RNA, 19 nt, Artificial Sequence
  Description of Artificial Sequence: Synthetic oligonucleotide
uucgcaacagaccuuuaau

SEQ ID NO: 202579 - RNA, 19 nt, Artificial Sequence
  Description of Artificial Sequence: Synthetic oligonucleotide
cucaguacccuuagcaaac

SEQ ID NO: 202580 - RNA, 19 nt, Artificial Sequence
  Description of Artificial Sequence: Synthetic oligonucleotide
uuaggaugcagccgcguac

SEQ ID NO: 202581 - RNA, 19 nt, Artificial Sequence
  Description of Artificial Sequence: Synthetic oligonucleotide
ugguggauccgcaugcuga

SEQ ID NO: 202582 - RNA, 19 nt, Artificial Sequence
  Description of Artificial Sequence: Synthetic oligonucleotide
cuuaacaagugguacgcca

SEQ ID NO: 202583 - RNA, 19 nt, Artificial Sequence
  Description of Artificial Sequence: Synthetic oligonucleotide
ugaguaaucucaguacccu

SEQ ID NO: 202584 - RNA, 19 nt, Artificial Sequence
  Description of Artificial Sequence: Synthetic oligonucleotide
ucuuuuggcgcaagguacu

SEQ ID NO: 202585 - RNA, 19 nt, Artificial Sequence
  Description of Artificial Sequence: Synthetic oligonucleotide
cagguuaggguuguagucg

SEQ ID NO: 202586 - RNA, 19 nt, Artificial Sequence
  Description of Artificial Sequence: Synthetic oligonucleotide
uuaaugacuggggugggcu

SEQ ID NO: 202587 - RNA, 19 nt, Artificial Sequence
  Description of Artificial Sequence: Synthetic oligonucleotide
gguacgguuauacaggauc

SEQ ID NO: 202588 - RNA, 19 nt, Artificial Sequence
  Description of Artificial Sequence: Synthetic oligonucleotide
uuguccuuugcacuucgga

SEQ ID NO: 202589 - RNA, 19 nt, Artificial Sequence
  Description of Artificial Sequence: Synthetic oligonucleotide
aaagcuaaguuaguccgau

SEQ ID NO: 202590 - RNA, 19 nt, Artificial Sequence
  Description of Artificial Sequence: Synthetic oligonucleotide
uaacaagugguacgccacc

SEQ ID NO: 202591 - RNA, 19 nt, Artificial Sequence
  Description of Artificial Sequence: Synthetic oligonucleotide
auggugcgaacuuugucag

SEQ ID NO: 202592 - RNA, 19 nt, Artificial Sequence
  Description of Artificial Sequence: Synthetic oligonucleotide
gaggauggcacagguacgg

SEQ ID NO: 202593 - RNA, 19 nt, Artificial Sequence
  Description of Artificial Sequence: Synthetic oligonucleotide
cuuggcacgaccacuugac

SEQ ID NO: 202594 - RNA, 19 nt, Artificial Sequence
  Description of Artificial Sequence: Synthetic oligonucleotide
cucaguucggugcaucacc

SEQ ID NO: 202595 - RNA, 19 nt, Artificial Sequence
  Description of Artificial Sequence: Synthetic oligonucleotide
uuucgcaacagaccuuuaa

SEQ ID NO: 202596 - RNA, 19 nt, Artificial Sequence
  Description of Artificial Sequence: Synthetic oligonucleotide
aaucucgguuguauuuucg

SEQ ID NO: 202597 - RNA, 19 nt, Artificial Sequence
  Description of Artificial Sequence: Synthetic oligonucleotide
cauugaugcaaucuaggca

SEQ ID NO: 202598 - RNA, 19 nt, Artificial Sequence
  Description of Artificial Sequence: Synthetic oligonucleotide
augaaacuguggcaggucu

SEQ ID NO: 202599 - RNA, 19 nt, Artificial Sequence
  Description of Artificial Sequence: Synthetic oligonucleotide
aacagaccuuuaaugacug

SEQ ID NO: 202600 - RNA, 19 nt, Artificial Sequence
  Description of Artificial Sequence: Synthetic oligonucleotide
ugcucagacuuugaggacc

SEQ ID NO: 202601 - RNA, 19 nt, Artificial Sequence
  Description of Artificial Sequence: Synthetic oligonucleotide
uuaguccgaucacagggac

SEQ ID NO: 202602 - RNA, 19 nt, Artificial Sequence
  Description of Artificial Sequence: Synthetic oligonucleotide
uggcacgaccacuugacug

SEQ ID NO: 202603 - RNA, 19 nt, Artificial Sequence
  Description of Artificial Sequence: Synthetic oligonucleotide
aucucgaaucuucauggca

SEQ ID NO: 202604 - RNA, 19 nt, Artificial Sequence
  Description of Artificial Sequence: Synthetic oligonucleotide
agugaggaucaguauuuug

SEQ ID NO: 202605 - RNA, 19 nt, Artificial Sequence
  Description of Artificial Sequence: Synthetic oligonucleotide
guaguuugugauaugugac

SEQ ID NO: 202606 - RNA, 19 nt, Artificial Sequence
  Description of Artificial Sequence: Synthetic oligonucleotide
ucuccuuaacaagugguac

SEQ ID NO: 202607 - RNA, 19 nt, Artificial Sequence
  Description of Artificial Sequence: Synthetic oligonucleotide
auucggauauagaaucggg

SEQ ID NO: 202608 - RNA, 19 nt, Artificial Sequence
  Description of Artificial Sequence: Synthetic oligonucleotide
agccauguaggggaucucc

SEQ ID NO: 202609 - RNA, 19 nt, Artificial Sequence
  Description of Artificial Sequence: Synthetic oligonucleotide
caucuucgucugaagagcc

SEQ ID NO: 202610 - RNA, 19 nt, Artificial Sequence
  Description of Artificial Sequence: Synthetic oligonucleotide
ucucgguuguauuuucgga

SEQ ID NO: 202611 - RNA, 19 nt, Artificial Sequence
  Description of Artificial Sequence: Synthetic oligonucleotide
aagcuaaguuaguccgauc

SEQ ID NO: 202612 - RNA, 19 nt, Artificial Sequence
  Description of Artificial Sequence: Synthetic oligonucleotide
uacacgcaguggcugauca

SEQ ID NO: 202613 - RNA, 19 nt, Artificial Sequence
  Description of Artificial Sequence: Synthetic oligonucleotide
ccugauaccagcgugagug

SEQ ID NO: 202614 - RNA, 19 nt, Artificial Sequence
  Description of Artificial Sequence: Synthetic oligonucleotide
acgcugaugggccuuguag

SEQ ID NO: 202615 - RNA, 19 nt, Artificial Sequence
  Description of Artificial Sequence: Synthetic oligonucleotide
uccgguaaccauccuuuug

SEQ ID NO: 202616 - RNA, 19 nt, Artificial Sequence
  Description of Artificial Sequence: Synthetic oligonucleotide
guuaggguuguagucguag

SEQ ID NO: 202617 - RNA, 19 nt, Artificial Sequence
  Description of Artificial Sequence: Synthetic oligonucleotide
ugcaccaugguacgguuau

SEQ ID NO: 202618 - RNA, 19 nt, Artificial Sequence
  Description of Artificial Sequence: Synthetic oligonucleotide
ugaucaugcgucgucgggc

SEQ ID NO: 202619 - RNA, 19 nt, Artificial Sequence
  Description of Artificial Sequence: Synthetic oligonucleotide
ugcaaucuaggcacaucug

SEQ ID NO: 202620 - RNA, 19 nt, Artificial Sequence
  Description of Artificial Sequence: Synthetic oligonucleotide
ggcacgaccacuugacugg

SEQ ID NO: 202621 - RNA, 19 nt, Artificial Sequence
  Description of Artificial Sequence: Synthetic oligonucleotide
uucucgacuaggcugccaa

SEQ ID NO: 202622 - RNA, 19 nt, Artificial Sequence
  Description of Artificial Sequence: Synthetic oligonucleotide
aacuuguaguaagugugca

SEQ ID NO: 202623 - RNA, 19 nt, Artificial Sequence
  Description of Artificial Sequence: Synthetic oligonucleotide
ggguuguagucguagagag

SEQ ID NO: 202624 - RNA, 19 nt, Artificial Sequence
  Description of Artificial Sequence: Synthetic oligonucleotide
uccgcaugcugaauguugu

SEQ ID NO: 202625 - RNA, 19 nt, Artificial Sequence
  Description of Artificial Sequence: Synthetic oligonucleotide
ccucaaguagauuuggcag

SEQ ID NO: 202626 - RNA, 19 nt, Artificial Sequence
  Description of Artificial Sequence: Synthetic oligonucleotide
uccauacugauugagucau

SEQ ID NO: 202627 - RNA, 19 nt, Artificial Sequence
  Description of Artificial Sequence: Synthetic oligonucleotide
ugcuugcugaucaugcguc

SEQ ID NO: 202628 - RNA, 19 nt, Artificial Sequence
  Description of Artificial Sequence: Synthetic oligonucleotide
uuaggguuguagucguaga

SEQ ID NO: 202629 - RNA, 19 nt, Artificial Sequence
  Description of Artificial Sequence: Synthetic oligonucleotide
ugcgccucaaguagauuug

SEQ ID NO: 202630 - RNA, 19 nt, Artificial Sequence
  Description of Artificial Sequence: Synthetic oligonucleotide
gcaaucuaggcacaucugc

SEQ ID NO: 202631 - RNA, 19 nt, Artificial Sequence
  Description of Artificial Sequence: Synthetic oligonucleotide
uagcauggugcgaacuuug

SEQ ID NO: 202632 - RNA, 19 nt, Artificial Sequence
  Description of Artificial Sequence: Synthetic oligonucleotide
ccaugguacgguuauacag

SEQ ID NO: 202633 - RNA, 19 nt, Artificial Sequence
  Description of Artificial Sequence: Synthetic oligonucleotide
uucguuccaccagaguuag

SEQ ID NO: 202634 - RNA, 19 nt, Artificial Sequence
  Description of Artificial Sequence: Synthetic oligonucleotide
gaggaguaagcugacgcug

SEQ ID NO: 202635 - RNA, 19 nt, Artificial Sequence
  Description of Artificial Sequence: Synthetic oligonucleotide
cucgccuacccgcaguugg

SEQ ID NO: 202636 - RNA, 19 nt, Artificial Sequence
  Description of Artificial Sequence: Synthetic oligonucleotide
ggacuuugaggccagaaca

SEQ ID NO: 202637 - RNA, 19 nt, Artificial Sequence
  Description of Artificial Sequence: Synthetic oligonucleotide
ucgacuaggcugccaagcu

SEQ ID NO: 202638 - RNA, 19 nt, Artificial Sequence
  Description of Artificial Sequence: Synthetic oligonucleotide
uuauggucaaacacccguu

SEQ ID NO: 202639 - RNA, 19 nt, Artificial Sequence
  Description of Artificial Sequence: Synthetic oligonucleotide
cucaugagcaugaggucac

SEQ ID NO: 202640 - RNA, 19 nt, Artificial Sequence
  Description of Artificial Sequence: Synthetic oligonucleotide
ggaaauagccaccauaggu

SEQ ID NO: 202641 - RNA, 19 nt, Artificial Sequence
  Description of Artificial Sequence: Synthetic oligonucleotide
cagacuuugaggacccuuc

SEQ ID NO: 202642 - RNA, 19 nt, Artificial Sequence
  Description of Artificial Sequence: Synthetic oligonucleotide
cugcacacguucaaugaug

SEQ ID NO: 202643 - RNA, 19 nt, Artificial Sequence
  Description of Artificial Sequence: Synthetic oligonucleotide
cauccauucguuccaccag

SEQ ID NO: 202644 - RNA, 19 nt, Artificial Sequence
  Description of Artificial Sequence: Synthetic oligonucleotide
cagguugaugugcagauga

SEQ ID NO: 202645 - RNA, 19 nt, Artificial Sequence
  Description of Artificial Sequence: Synthetic oligonucleotide
acggauccggucuguacgg

SEQ ID NO: 202646 - RNA, 19 nt, Artificial Sequence
  Description of Artificial Sequence: Synthetic oligonucleotide
augguacgguuauacagga

SEQ ID NO: 202647 - RNA, 19 nt, Artificial Sequence
  Description of Artificial Sequence: Synthetic oligonucleotide
uuuaaugacuggggugggc

SEQ ID NO: 202648 - RNA, 19 nt, Artificial Sequence
  Description of Artificial Sequence: Synthetic oligonucleotide
gcuguagguaaagagguag

SEQ ID NO: 202649 - RNA, 19 nt, Artificial Sequence
  Description of Artificial Sequence: Synthetic oligonucleotide
cuuauggucaaacacccgu

SEQ ID NO: 202650 - RNA, 19 nt, Artificial Sequence
  Description of Artificial Sequence: Synthetic oligonucleotide
gauccggucuguacggucc

SEQ ID NO: 202651 - RNA, 19 nt, Artificial Sequence
  Description of Artificial Sequence: Synthetic oligonucleotide
agaugaaagggcaccuguc

SEQ ID NO: 202652 - RNA, 19 nt, Artificial Sequence
  Description of Artificial Sequence: Synthetic oligonucleotide
cugaucaugcgucgucggg

SEQ ID NO: 202653 - RNA, 19 nt, Artificial Sequence
  Description of Artificial Sequence: Synthetic oligonucleotide
ggggacacccuccuuaucc

SEQ ID NO: 202654 - RNA, 19 nt, Artificial Sequence
  Description of Artificial Sequence: Synthetic oligonucleotide
uguagaacuggugucccau

SEQ ID NO: 202655 - RNA, 19 nt, Artificial Sequence
  Description of Artificial Sequence: Synthetic oligonucleotide
ugcaaccaagauauccauc

SEQ ID NO: 202656 - RNA, 19 nt, Artificial Sequence
  Description of Artificial Sequence: Synthetic oligonucleotide
auagauguauuugcagagu

SEQ ID NO: 202657 - RNA, 19 nt, Artificial Sequence
  Description of Artificial Sequence: Synthetic oligonucleotide
ucguauaagguuggucagc

SEQ ID NO: 202658 - RNA, 19 nt, Artificial Sequence
  Description of Artificial Sequence: Synthetic oligonucleotide
accagcgugaguggagagc

SEQ ID NO: 202659 - RNA, 19 nt, Artificial Sequence
  Description of Artificial Sequence: Synthetic oligonucleotide
gauggagugaacaguaggu

SEQ ID NO: 202660 - RNA, 19 nt, Artificial Sequence
  Description of Artificial Sequence: Synthetic oligonucleotide
acccucauuuucugcuugg

SEQ ID NO: 202661 - RNA, 19 nt, Artificial Sequence
  Description of Artificial Sequence: Synthetic oligonucleotide
ugucggcugguccagggaa

SEQ ID NO: 202662 - RNA, 19 nt, Artificial Sequence
  Description of Artificial Sequence: Synthetic oligonucleotide
auuacggaugguucguaua

SEQ ID NO: 202663 - RNA, 19 nt, Artificial Sequence
  Description of Artificial Sequence: Synthetic oligonucleotide
aucuuccgaacuagcaugg

SEQ ID NO: 202664 - RNA, 19 nt, Artificial Sequence
  Description of Artificial Sequence: Synthetic oligonucleotide
ggugcgaacuuugucagcc

SEQ ID NO: 202665 - RNA, 19 nt, Artificial Sequence
  Description of Artificial Sequence: Synthetic oligonucleotide
acuagcauggugcgaacuu

SEQ ID NO: 202666 - RNA, 19 nt, Artificial Sequence
  Description of Artificial Sequence: Synthetic oligonucleotide
ugauugagucauagacacu

SEQ ID NO: 202667 - RNA, 19 nt, Artificial Sequence
  Description of Artificial Sequence: Synthetic oligonucleotide
gaucaugcgucgucgggca

SEQ ID NO: 202668 - RNA, 19 nt, Artificial Sequence
  Description of Artificial Sequence: Synthetic oligonucleotide
ugcgaacuuugucagccuc

SEQ ID NO: 202669 - RNA, 19 nt, Artificial Sequence
  Description of Artificial Sequence: Synthetic oligonucleotide
cuaaguuaguccgaucaca

SEQ ID NO: 202670 - RNA, 19 nt, Artificial Sequence
  Description of Artificial Sequence: Synthetic oligonucleotide
caucucgaaucuucauggc

SEQ ID NO: 202671 - RNA, 19 nt, Artificial Sequence
  Description of Artificial Sequence: Synthetic oligonucleotide
cugauaccagcgugagugg

SEQ ID NO: 202672 - RNA, 19 nt, Artificial Sequence
  Description of Artificial Sequence: Synthetic oligonucleotide
uccuguagacugcgcagca

SEQ ID NO: 202673 - RNA, 19 nt, Artificial Sequence
  Description of Artificial Sequence: Synthetic oligonucleotide
uugaugcaaucuaggcaca

SEQ ID NO: 202674 - RNA, 19 nt, Artificial Sequence
  Description of Artificial Sequence: Synthetic oligonucleotide
ugcagccgcguacacgcag

SEQ ID NO: 202675 - RNA, 19 nt, Artificial Sequence
  Description of Artificial Sequence: Synthetic oligonucleotide
gcugaauguugucuuguag

SEQ ID NO: 202676 - RNA, 19 nt, Artificial Sequence
  Description of Artificial Sequence: Synthetic oligonucleotide
ugcgucgucgggcaucacu

SEQ ID NO: 202677 - RNA, 19 nt, Artificial Sequence
  Description of Artificial Sequence: Synthetic oligonucleotide
ccagaguuaggaugcagcc

SEQ ID NO: 202678 - RNA, 19 nt, Artificial Sequence
  Description of Artificial Sequence: Synthetic oligonucleotide
guagguaaagagguagguc

SEQ ID NO: 202679 - RNA, 19 nt, Artificial Sequence
  Description of Artificial Sequence: Synthetic oligonucleotide
agguuaggguuguagucgu

SEQ ID NO: 202680 - RNA, 19 nt, Artificial Sequence
  Description of Artificial Sequence: Synthetic oligonucleotide
cucgacuaggcugccaagc

SEQ ID NO: 202681 - RNA, 19 nt, Artificial Sequence
  Description of Artificial Sequence: Synthetic oligonucleotide
guacugguggauccgcaug

SEQ ID NO: 202682 - RNA, 19 nt, Artificial Sequence
  Description of Artificial Sequence: Synthetic oligonucleotide
cugaugggccuuguagucg

SEQ ID NO: 202683 - RNA, 19 nt, Artificial Sequence
  Description of Artificial Sequence: Synthetic oligonucleotide
caaccaagauauccaucag

SEQ ID NO: 202684 - RNA, 19 nt, Artificial Sequence
  Description of Artificial Sequence: Synthetic oligonucleotide
ucacgggccugauaccagc

SEQ ID NO: 202685 - RNA, 19 nt, Artificial Sequence
  Description of Artificial Sequence: Synthetic oligonucleotide
gaucucggaaauagccacc

SEQ ID NO: 202686 - RNA, 19 nt, Artificial Sequence
  Description of Artificial Sequence: Synthetic oligonucleotide
aacuagcauggugcgaacu

SEQ ID NO: 202687 - RNA, 19 nt, Artificial Sequence
  Description of Artificial Sequence: Synthetic oligonucleotide
cauccuuuugaucucggaa

SEQ ID NO: 202688 - RNA, 19 nt, Artificial Sequence
  Description of Artificial Sequence: Synthetic oligonucleotide
cagcuguagcaauucaauc

SEQ ID NO: 202689 - RNA, 19 nt, Artificial Sequence
  Description of Artificial Sequence: Synthetic oligonucleotide
acgguuauacaggaucugu

SEQ ID NO: 202690 - RNA, 19 nt, Artificial Sequence
  Description of Artificial Sequence: Synthetic oligonucleotide
ugaaacuguggcaggucuu

SEQ ID NO: 202691 - RNA, 19 nt, Artificial Sequence
  Description of Artificial Sequence: Synthetic oligonucleotide
uacggaugguucguauaag

SEQ ID NO: 202692 - RNA, 19 nt, Artificial Sequence
  Description of Artificial Sequence: Synthetic oligonucleotide
aggucacgggccugauacc

SEQ ID NO: 202693 - RNA, 19 nt, Artificial Sequence
  Description of Artificial Sequence: Synthetic oligonucleotide
cuccauacugauugaguca

SEQ ID NO: 202694 - RNA, 19 nt, Artificial Sequence
  Description of Artificial Sequence: Synthetic oligonucleotide
uuucggcuguccccagaag

SEQ ID NO: 202695 - RNA, 19 nt, Artificial Sequence
  Description of Artificial Sequence: Synthetic oligonucleotide
caugagcaugaggucacgg

SEQ ID NO: 202696 - RNA, 19 nt, Artificial Sequence
  Description of Artificial Sequence: Synthetic oligonucleotide
ucguagagagaggcaauga

SEQ ID NO: 202697 - RNA, 19 nt, Artificial Sequence
  Description of Artificial Sequence: Synthetic oligonucleotide
guucggugcaucaccacug

SEQ ID NO: 202698 - RNA, 19 nt, Artificial Sequence
  Description of Artificial Sequence: Synthetic oligonucleotide
ugauaccagcgugagugga

SEQ ID NO: 202699 - RNA, 19 nt, Artificial Sequence
  Description of Artificial Sequence: Synthetic oligonucleotide
guaccuuucuccuccaggu

SEQ ID NO: 202700 - RNA, 19 nt, Artificial Sequence
  Description of Artificial Sequence: Synthetic oligonucleotide
gaugaaacuguggcagguc

SEQ ID NO: 202701 - RNA, 19 nt, Artificial Sequence
  Description of Artificial Sequence: Synthetic oligonucleotide
cauccaggcgcuuagauuu

SEQ ID NO: 202702 - RNA, 19 nt, Artificial Sequence
  Description of Artificial Sequence: Synthetic oligonucleotide
uaguccgaucacagggaca

SEQ ID NO: 202703 - RNA, 19 nt, Artificial Sequence
  Description of Artificial Sequence: Synthetic oligonucleotide
augguucguauaagguugg

SEQ ID NO: 202704 - RNA, 19 nt, Artificial Sequence
  Description of Artificial Sequence: Synthetic oligonucleotide
uagguucccugcuuauggu

SEQ ID NO: 202705 - RNA, 19 nt, Artificial Sequence
  Description of Artificial Sequence: Synthetic oligonucleotide
agaggauggcacagguacg

SEQ ID NO: 202706 - RNA, 19 nt, Artificial Sequence
  Description of Artificial Sequence: Synthetic oligonucleotide
ucucgacuaggcugccaag

SEQ ID NO: 202707 - RNA, 19 nt, Artificial Sequence
  Description of Artificial Sequence: Synthetic oligonucleotide
ucugugucggcugguccag

SEQ ID NO: 202708 - RNA, 19 nt, Artificial Sequence
  Description of Artificial Sequence: Synthetic oligonucleotide
gaccuuuaaugacuggggu

SEQ ID NO: 202709 - RNA, 19 nt, Artificial Sequence
  Description of Artificial Sequence: Synthetic oligonucleotide
caacagaccuuuaaugacu

SEQ ID NO: 202710 - RNA, 19 nt, Artificial Sequence
  Description of Artificial Sequence: Synthetic oligonucleotide
gaugcaaucuaggcacauc

SEQ ID NO: 202711 - RNA, 19 nt, Artificial Sequence
  Description of Artificial Sequence: Synthetic oligonucleotide
auaagguuggucagcuccu

SEQ ID NO: 202712 - RNA, 19 nt, Artificial Sequence
  Description of Artificial Sequence: Synthetic oligonucleotide
ucggcgucgcucuaccuuc

SEQ ID NO: 202713 - RNA, 19 nt, Artificial Sequence
  Description of Artificial Sequence: Synthetic oligonucleotide
uuuuggcgcaagguacuca

SEQ ID NO: 202714 - RNA, 19 nt, Artificial Sequence
  Description of Artificial Sequence: Synthetic oligonucleotide
ccagauaaacacacuccag

SEQ ID NO: 202715 - RNA, 19 nt, Artificial Sequence
  Description of Artificial Sequence: Synthetic oligonucleotide
uuggcacgaccacuugacu

SEQ ID NO: 202716 - RNA, 19 nt, Artificial Sequence
  Description of Artificial Sequence: Synthetic oligonucleotide
guagcaauucaaucugggu

SEQ ID NO: 202717 - RNA, 19 nt, Artificial Sequence
  Description of Artificial Sequence: Synthetic oligonucleotide
cauagguucccugcuuaug

SEQ ID NO: 202718 - RNA, 19 nt, Artificial Sequence
  Description of Artificial Sequence: Synthetic oligonucleotide
guggcugaucaaaauugug

SEQ ID NO: 202719 - RNA, 19 nt, Artificial Sequence
  Description of Artificial Sequence: Synthetic oligonucleotide
acccuccuuauccacaaua

SEQ ID NO: 202720 - RNA, 19 nt, Artificial Sequence
  Description of Artificial Sequence: Synthetic oligonucleotide
guuaguccgaucacaggga

SEQ ID NO: 202721 - RNA, 19 nt, Artificial Sequence
  Description of Artificial Sequence: Synthetic oligonucleotide
ugcugaauguugucuugua

SEQ ID NO: 202722 - RNA, 19 nt, Artificial Sequence
  Description of Artificial Sequence: Synthetic oligonucleotide
uacgguccuuggcauagau

SEQ ID NO: 202723 - RNA, 19 nt, Artificial Sequence
  Description of Artificial Sequence: Synthetic oligonucleotide
agcgugaguggagagcaug

SEQ ID NO: 202724 - RNA, 19 nt, Artificial Sequence
  Description of Artificial Sequence: Synthetic oligonucleotide
ugguaccuuucuccuccag

SEQ ID NO: 202725 - RNA, 19 nt, Artificial Sequence
  Description of Artificial Sequence: Synthetic oligonucleotide
acuugacuggauauccaga

SEQ ID NO: 202726 - RNA, 19 nt, Artificial Sequence
  Description of Artificial Sequence: Synthetic oligonucleotide
auccgcaugcugaauguug

SEQ ID NO: 202727 - RNA, 19 nt, Artificial Sequence
  Description of Artificial Sequence: Synthetic oligonucleotide
cacgggccugauaccagcg

SEQ ID NO: 202728 - RNA, 19 nt, Artificial Sequence
  Description of Artificial Sequence: Synthetic oligonucleotide
uucgucugaagagccuucu

SEQ ID NO: 202729 - RNA, 19 nt, Artificial Sequence
  Description of Artificial Sequence: Synthetic oligonucleotide
agucauagacacugcugua

SEQ ID NO: 202730 - RNA, 19 nt, Artificial Sequence
  Description of Artificial Sequence: Synthetic oligonucleotide
gcuaaguuaguccgaucac

SEQ ID NO: 202731 - RNA, 19 nt, Artificial Sequence
  Description of Artificial Sequence: Synthetic oligonucleotide
gccgcguacacgcaguggc

SEQ ID NO: 202732 - RNA, 19 nt, Artificial Sequence
  Description of Artificial Sequence: Synthetic oligonucleotide
aguacccuuagcaaacauu

SEQ ID NO: 202733 - RNA, 19 nt, Artificial Sequence
  Description of Artificial Sequence: Synthetic oligonucleotide
cacagguacggauccgguc

SEQ ID NO: 202734 - RNA, 19 nt, Artificial Sequence
  Description of Artificial Sequence: Synthetic oligonucleotide
guacucagagccuuggcau

SEQ ID NO: 202735 - RNA, 19 nt, Artificial Sequence
  Description of Artificial Sequence: Synthetic oligonucleotide
guacggauccggucuguac

SEQ ID NO: 202736 - RNA, 19 nt, Artificial Sequence
  Description of Artificial Sequence: Synthetic oligonucleotide
gaacuagcauggugcgaac

SEQ ID NO: 202737 - RNA, 19 nt, Artificial Sequence
  Description of Artificial Sequence: Synthetic oligonucleotide
gaguuaggaugcagccgcg

SEQ ID NO: 202738 - RNA, 19 nt, Artificial Sequence
  Description of Artificial Sequence: Synthetic oligonucleotide
aaauuucgcaacagaccuu

SEQ ID NO: 202739 - RNA, 19 nt, Artificial Sequence
  Description of Artificial Sequence: Synthetic oligonucleotide
auguagaacugguguccca

SEQ ID NO: 202740 - RNA, 19 nt, Artificial Sequence
  Description of Artificial Sequence: Synthetic oligonucleotide
ggcgcuuagauuuccuauc

SEQ ID NO: 202741 - RNA, 19 nt, Artificial Sequence
  Description of Artificial Sequence: Synthetic oligonucleotide
cuucgucugaagagccuuc

SEQ ID NO: 202742 - RNA, 19 nt, Artificial Sequence
  Description of Artificial Sequence: Synthetic oligonucleotide
cugccgcucgccuacccgc

SEQ ID NO: 202743 - RNA, 19 nt, Artificial Sequence
  Description of Artificial Sequence: Synthetic oligonucleotide
acggacccuuucccacucc

SEQ ID NO: 202744 - RNA, 19 nt, Artificial Sequence
  Description of Artificial Sequence: Synthetic oligonucleotide
auggagugaacaguaggua

SEQ ID NO: 202745 - RNA, 19 nt, Artificial Sequence
  Description of Artificial Sequence: Synthetic oligonucleotide
gguaaccauccuuuugauc

SEQ ID NO: 202746 - RNA, 19 nt, Artificial Sequence
  Description of Artificial Sequence: Synthetic oligonucleotide
agacugcgcagcagcagac

SEQ ID NO: 202747 - RNA, 19 nt, Artificial Sequence
  Description of Artificial Sequence: Synthetic oligonucleotide
uggugcgaacuuugucagc

SEQ ID NO: 202748 - RNA, 19 nt, Artificial Sequence
  Description of Artificial Sequence: Synthetic oligonucleotide
gcugaucaugcgucgucgg

SEQ ID NO: 202749 - RNA, 19 nt, Artificial Sequence
  Description of Artificial Sequence: Synthetic oligonucleotide
cauuauucucgacuaggcu

SEQ ID NO: 202750 - RNA, 19 nt, Artificial Sequence
  Description of Artificial Sequence: Synthetic oligonucleotide
uacgccaccacggacccuu

SEQ ID NO: 202751 - RNA, 19 nt, Artificial Sequence
  Description of Artificial Sequence: Synthetic oligonucleotide
aggaguaagcugacgcuga

SEQ ID NO: 202752 - RNA, 19 nt, Artificial Sequence
  Description of Artificial Sequence: Synthetic oligonucleotide
gucgcucuaccuucuccug

SEQ ID NO: 202753 - RNA, 19 nt, Artificial Sequence
  Description of Artificial Sequence: Synthetic oligonucleotide
gugauaugugacucaaaau

SEQ ID NO: 202754 - RNA, 19 nt, Artificial Sequence
  Description of Artificial Sequence: Synthetic oligonucleotide
cugguugcgcuccuguaga

SEQ ID NO: 202755 - RNA, 19 nt, Artificial Sequence
  Description of Artificial Sequence: Synthetic oligonucleotide
cccuccuuauccacaauac

SEQ ID NO: 202756 - RNA, 19 nt, Artificial Sequence
  Description of Artificial Sequence: Synthetic oligonucleotide
gagcaugaugguagauaug

SEQ ID NO: 202757 - RNA, 19 nt, Artificial Sequence
  Description of Artificial Sequence: Synthetic oligonucleotide
cauccuuugucaggccuug

SEQ ID NO: 202758 - RNA, 19 nt, Artificial Sequence
  Description of Artificial Sequence: Synthetic oligonucleotide
ucgccuacccgcaguuggu

SEQ ID NO: 202759 - RNA, 19 nt, Artificial Sequence
  Description of Artificial Sequence: Synthetic oligonucleotide
ucgaaucuucauggcauua

SEQ ID NO: 202760 - RNA, 19 nt, Artificial Sequence
  Description of Artificial Sequence: Synthetic oligonucleotide
gguacgccaccacggaccc

SEQ ID NO: 202761 - RNA, 19 nt, Artificial Sequence
  Description of Artificial Sequence: Synthetic oligonucleotide
gauuuccuaucaugcuucu

SEQ ID NO: 202762 - RNA, 19 nt, Artificial Sequence
  Description of Artificial Sequence: Synthetic oligonucleotide
ggcgcaagguacucagagc

SEQ ID NO: 202763 - RNA, 19 nt, Artificial Sequence
  Description of Artificial Sequence: Synthetic oligonucleotide
cucgguuguauuuucggau

SEQ ID NO: 202764 - RNA, 19 nt, Artificial Sequence
  Description of Artificial Sequence: Synthetic oligonucleotide
acucucaugggcagccaug

SEQ ID NO: 202765 - RNA, 19 nt, Artificial Sequence
  Description of Artificial Sequence: Synthetic oligonucleotide
ucguuccaccagaguuagg

SEQ ID NO: 202766 - RNA, 19 nt, Artificial Sequence
  Description of Artificial Sequence: Synthetic oligonucleotide
uccuaucaugcuucuucuu

SEQ ID NO: 202767 - RNA, 19 nt, Artificial Sequence
  Description of Artificial Sequence: Synthetic oligonucleotide
ugguacgguuauacaggau

SEQ ID NO: 202768 - RNA, 19 nt, Artificial Sequence
  Description of Artificial Sequence: Synthetic oligonucleotide
ucaugcgucgucgggcauc

SEQ ID NO: 202769 - RNA, 19 nt, Artificial Sequence
  Description of Artificial Sequence: Synthetic oligonucleotide
uauucucgacuaggcugcc

SEQ ID NO: 202770 - RNA, 19 nt, Artificial Sequence
  Description of Artificial Sequence: Synthetic oligonucleotide
guacgguuauacaggaucu

SEQ ID NO: 202771 - RNA, 19 nt, Artificial Sequence
  Description of Artificial Sequence: Synthetic oligonucleotide
acuuucggcuguccccaga

SEQ ID NO: 202772 - RNA, 19 nt, Artificial Sequence
  Description of Artificial Sequence: Synthetic oligonucleotide
aguuaggaugcagccgcgu

SEQ ID NO: 202773 - RNA, 19 nt, Artificial Sequence
  Description of Artificial Sequence: Synthetic oligonucleotide
cuuucggcuguccccagaa

SEQ ID NO: 202774 - RNA, 19 nt, Artificial Sequence
  Description of Artificial Sequence: Synthetic oligonucleotide
cgcaacagaccuuuaauga

SEQ ID NO: 202775 - RNA, 19 nt, Artificial Sequence
  Description of Artificial Sequence: Synthetic oligonucleotide
uagcgcugcacacguucaa

SEQ ID NO: 202776 - RNA, 19 nt, Artificial Sequence
  Description of Artificial Sequence: Synthetic oligonucleotide
ucuuccgaacuagcauggu

SEQ ID NO: 202777 - RNA, 19 nt, Artificial Sequence
  Description of Artificial Sequence: Synthetic oligonucleotide
ccgguaaccauccuuuuga

SEQ ID NO: 202778 - RNA, 19 nt, Artificial Sequence
  Description of Artificial Sequence: Synthetic oligonucleotide
cuuuuggcgcaagguacuc

SEQ ID NO: 202779 - RNA, 19 nt, Artificial Sequence
  Description of Artificial Sequence: Synthetic oligonucleotide
gugguacgccaccacggac

SEQ ID NO: 202780 - RNA, 19 nt, Artificial Sequence
  Description of Artificial Sequence: Synthetic oligonucleotide
guagucguagagagaggca

SEQ ID NO: 202781 - RNA, 19 nt, Artificial Sequence
  Description of Artificial Sequence: Synthetic oligonucleotide
acguucaaugauggcacau

SEQ ID NO: 202782 - RNA, 19 nt, Artificial Sequence
  Description of Artificial Sequence: Synthetic oligonucleotide
ucggugcaucaccacuguc

SEQ ID NO: 202783 - RNA, 19 nt, Artificial Sequence
  Description of Artificial Sequence: Synthetic oligonucleotide
ggaugguucguauaagguu

SEQ ID NO: 202784 - RNA, 19 nt, Artificial Sequence
  Description of Artificial Sequence: Synthetic oligonucleotide
cagguacggauccggucug

SEQ ID NO: 202785 - RNA, 19 nt, Artificial Sequence
  Description of Artificial Sequence: Synthetic oligonucleotide
caguucggugcaucaccac

SEQ ID NO: 202786 - RNA, 19 nt, Artificial Sequence
  Description of Artificial Sequence: Synthetic oligonucleotide
cacgcaguggcugaucaaa

SEQ ID NO: 202787 - RNA, 19 nt, Artificial Sequence
  Description of Artificial Sequence: Synthetic oligonucleotide
acgggccugauaccagcgu

SEQ ID NO: 202788 - RNA, 19 nt, Artificial Sequence
  Description of Artificial Sequence: Synthetic oligonucleotide
auccggucuguacgguccu

SEQ ID NO: 202789 - RNA, 19 nt, Artificial Sequence
  Description of Artificial Sequence: Synthetic oligonucleotide
aggaucuguacugguggau

SEQ ID NO: 202790 - RNA, 19 nt, Artificial Sequence
  Description of Artificial Sequence: Synthetic oligonucleotide
cagcugaguccucacccuc

SEQ ID NO: 202791 - RNA, 19 nt, Artificial Sequence
  Description of Artificial Sequence: Synthetic oligonucleotide
ugccgcucgccuacccgca

SEQ ID NO: 202792 - RNA, 19 nt, Artificial Sequence
  Description of Artificial Sequence: Synthetic oligonucleotide
uccccgccuucauuguccu

SEQ ID NO: 202793 - RNA, 19 nt, Artificial Sequence
  Description of Artificial Sequence: Synthetic oligonucleotide
agcauggugcgaacuuugu

SEQ ID NO: 202794 - RNA, 19 nt, Artificial Sequence
  Description of Artificial Sequence: Synthetic oligonucleotide
gucacgggccugauaccag

SEQ ID NO: 202795 - RNA, 19 nt, Artificial Sequence
  Description of Artificial Sequence: Synthetic oligonucleotide
ccgcaguuggugauggaac

SEQ ID NO: 202796 - RNA, 19 nt, Artificial Sequence
  Description of Artificial Sequence: Synthetic oligonucleotide
auccuuugucaggccuugg

SEQ ID NO: 202797 - RNA, 19 nt, Artificial Sequence
  Description of Artificial Sequence: Synthetic oligonucleotide
agccgcguacacgcagugg

SEQ ID NO: 202798 - RNA, 19 nt, Artificial Sequence
  Description of Artificial Sequence: Synthetic oligonucleotide
ugguucguauaagguuggu

SEQ ID NO: 202799 - RNA, 19 nt, Artificial Sequence
  Description of Artificial Sequence: Synthetic oligonucleotide
acugguggauccgcaugcu

SEQ ID NO: 202800 - RNA, 19 nt, Artificial Sequence
  Description of Artificial Sequence: Synthetic oligonucleotide
agucguagagagaggcaau

SEQ ID NO: 202801 - RNA, 19 nt, Artificial Sequence
  Description of Artificial Sequence: Synthetic oligonucleotide
cuguacugguggauccgca

SEQ ID NO: 202802 - RNA, 19 nt, Artificial Sequence
  Description of Artificial Sequence: Synthetic oligonucleotide
guagguagauccagcucaa

SEQ ID NO: 202803 - RNA, 19 nt, Artificial Sequence
  Description of Artificial Sequence: Synthetic oligonucleotide
gcaauucaaucuggguggc

SEQ ID NO: 202804 - RNA, 19 nt, Artificial Sequence
  Description of Artificial Sequence: Synthetic oligonucleotide
acgguccuuggcauagaug

SEQ ID NO: 202805 - RNA, 19 nt, Artificial Sequence
  Description of Artificial Sequence: Synthetic oligonucleotide
guagcgcugcacacguuca

SEQ ID NO: 202806 - RNA, 19 nt, Artificial Sequence
  Description of Artificial Sequence: Synthetic oligonucleotide
cacguucaaugauggcaca

SEQ ID NO: 202807 - RNA, 19 nt, Artificial Sequence
  Description of Artificial Sequence: Synthetic oligonucleotide
cuacccgcaguuggugaug

SEQ ID NO: 202808 - RNA, 19 nt, Artificial Sequence
  Description of Artificial Sequence: Synthetic oligonucleotide
cacggacccuuucccacuc

SEQ ID NO: 202809 - RNA, 19 nt, Artificial Sequence
  Description of Artificial Sequence: Synthetic oligonucleotide
gguggauccgcaugcugaa

SEQ ID NO: 202810 - RNA, 19 nt, Artificial Sequence
  Description of Artificial Sequence: Synthetic oligonucleotide
gugcauccuuugucaggcc

SEQ ID NO: 202811 - RNA, 19 nt, Artificial Sequence
  Description of Artificial Sequence: Synthetic oligonucleotide
cguuccaccagaguuagga

SEQ ID NO: 202812 - RNA, 19 nt, Artificial Sequence
  Description of Artificial Sequence: Synthetic oligonucleotide
uagguagauccagcucaaa

SEQ ID NO: 202813 - RNA, 19 nt, Artificial Sequence
  Description of Artificial Sequence: Synthetic oligonucleotide
cggaaauagccaccauagg

SEQ ID NO: 202814 - RNA, 19 nt, Artificial Sequence
  Description of Artificial Sequence: Synthetic oligonucleotide
gugcaaccaagauauccau

SEQ ID NO: 202815 - RNA, 19 nt, Artificial Sequence
  Description of Artificial Sequence: Synthetic oligonucleotide
ggcucaguucggugcauca

SEQ ID NO: 202816 - RNA, 19 nt, Artificial Sequence
  Description of Artificial Sequence: Synthetic oligonucleotide
gcgccucaaguagauuugg

SEQ ID NO: 202817 - RNA, 19 nt, Artificial Sequence
  Description of Artificial Sequence: Synthetic oligonucleotide
cauuacggaugguucguau

SEQ ID NO: 202818 - RNA, 19 nt, Artificial Sequence
  Description of Artificial Sequence: Synthetic oligonucleotide
aggauggcacagguacgga

SEQ ID NO: 202819 - RNA, 19 nt, Artificial Sequence
  Description of Artificial Sequence: Synthetic oligonucleotide
gcccagaaguuccuuggca

SEQ ID NO: 202820 - RNA, 19 nt, Artificial Sequence
  Description of Artificial Sequence: Synthetic oligonucleotide
agguugaugugcagaugaa

SEQ ID NO: 202821 - RNA, 19 nt, Artificial Sequence
  Description of Artificial Sequence: Synthetic oligonucleotide
auucucgacuaggcugcca

SEQ ID NO: 202822 - RNA, 19 nt, Artificial Sequence
  Description of Artificial Sequence: Synthetic oligonucleotide
ccuuaacaagugguacgcc

SEQ ID NO: 202823 - RNA, 19 nt, Artificial Sequence
  Description of Artificial Sequence: Synthetic oligonucleotide
caugcgucgucgggcauca

SEQ ID NO: 202824 - RNA, 19 nt, Artificial Sequence
  Description of Artificial Sequence: Synthetic oligonucleotide
cugacgcugaugggccuug

SEQ ID NO: 202825 - RNA, 19 nt, Artificial Sequence
  Description of Artificial Sequence: Synthetic oligonucleotide
caggcgcuuagauuuccua

SEQ ID NO: 202826 - RNA, 19 nt, Artificial Sequence
  Description of Artificial Sequence: Synthetic oligonucleotide
ccguucauuauucucgacu

SEQ ID NO: 202827 - RNA, 19 nt, Artificial Sequence
  Description of Artificial Sequence: Synthetic oligonucleotide
ggauccgcaugcugaaugu

SEQ ID NO: 202828 - RNA, 19 nt, Artificial Sequence
  Description of Artificial Sequence: Synthetic oligonucleotide
cgaacuuugucagccucag

SEQ ID NO: 202829 - RNA, 19 nt, Artificial Sequence
  Description of Artificial Sequence: Synthetic oligonucleotide
gacgcugaugggccuugua

SEQ ID NO: 202830 - RNA, 19 nt, Artificial Sequence
  Description of Artificial Sequence: Synthetic oligonucleotide
ccagcgugaguggagagca

SEQ ID NO: 202831 - RNA, 19 nt, Artificial Sequence
  Description of Artificial Sequence: Synthetic oligonucleotide
caaugauauugaacuugau

SEQ ID NO: 202832 - RNA, 19 nt, Artificial Sequence
  Description of Artificial Sequence: Synthetic oligonucleotide
gugguaccuuucuccucca

SEQ ID NO: 202833 - RNA, 19 nt, Artificial Sequence
  Description of Artificial Sequence: Synthetic oligonucleotide
uaggcacaucugccacauc

SEQ ID NO: 202834 - RNA, 19 nt, Artificial Sequence
  Description of Artificial Sequence: Synthetic oligonucleotide
gguggcucaugagcaugag

SEQ ID NO: 202835 - RNA, 19 nt, Artificial Sequence
  Description of Artificial Sequence: Synthetic oligonucleotide
gcgucgucgggcaucacuc

SEQ ID NO: 202836 - RNA, 19 nt, Artificial Sequence
  Description of Artificial Sequence: Synthetic oligonucleotide
cgaacuagcauggugcgaa

SEQ ID NO: 202837 - RNA, 19 nt, Artificial Sequence
  Description of Artificial Sequence: Synthetic oligonucleotide
cggaucuuuuggcgcaagg

SEQ ID NO: 202838 - RNA, 19 nt, Artificial Sequence
  Description of Artificial Sequence: Synthetic oligonucleotide
guacacgcaguggcugauc

SEQ ID NO: 202839 - RNA, 19 nt, Artificial Sequence
  Description of Artificial Sequence: Synthetic oligonucleotide
gcgaacuuugucagccuca

SEQ ID NO: 202840 - RNA, 19 nt, Artificial Sequence
  Description of Artificial Sequence: Synthetic oligonucleotide
agguacggauccggucugu

SEQ ID NO: 202841 - RNA, 19 nt, Artificial Sequence
  Description of Artificial Sequence: Synthetic oligonucleotide
gucggcgucgcucuaccuu

SEQ ID NO: 202842 - RNA, 19 nt, Artificial Sequence
  Description of Artificial Sequence: Synthetic oligonucleotide
cacagcucauuaagauagu

SEQ ID NO: 202843 - RNA, 19 nt, Artificial Sequence
  Description of Artificial Sequence: Synthetic oligonucleotide
gcguacacgcaguggcuga

SEQ ID NO: 202844 - RNA, 19 nt, Artificial Sequence
  Description of Artificial Sequence: Synthetic oligonucleotide
ugacgcugaugggccuugu

SEQ ID NO: 202845 - RNA, 19 nt, Artificial Sequence
  Description of Artificial Sequence: Synthetic oligonucleotide
ccacuugacuggauaucca

SEQ ID NO: 202846 - RNA, 19 nt, Artificial Sequence
  Description of Artificial Sequence: Synthetic oligonucleotide
ccuuggcacgaccacuuga

SEQ ID NO: 202847 - RNA, 19 nt, Artificial Sequence
  Description of Artificial Sequence: Synthetic oligonucleotide
cuagcauggugcgaacuuu

SEQ ID NO: 202848 - RNA, 19 nt, Artificial Sequence
  Description of Artificial Sequence: Synthetic oligonucleotide
gccuacccgcaguugguga

SEQ ID NO: 202849 - RNA, 19 nt, Artificial Sequence
  Description of Artificial Sequence: Synthetic oligonucleotide
cugcaccaugguacgguua

SEQ ID NO: 202850 - RNA, 19 nt, Artificial Sequence
  Description of Artificial Sequence: Synthetic oligonucleotide
uggcacggucuguucccuu

SEQ ID NO: 202851 - RNA, 19 nt, Artificial Sequence
  Description of Artificial Sequence: Synthetic oligonucleotide
gugcgaacuuugucagccu

SEQ ID NO: 202852 - RNA, 19 nt, Artificial Sequence
  Description of Artificial Sequence: Synthetic oligonucleotide
ggcauuacggaugguucgu

SEQ ID NO: 202853 - RNA, 19 nt, Artificial Sequence
  Description of Artificial Sequence: Synthetic oligonucleotide
auuucgcaacagaccuuua

SEQ ID NO: 202854 - RNA, 19 nt, Artificial Sequence
  Description of Artificial Sequence: Synthetic oligonucleotide
gguagauauggcagaggau

SEQ ID NO: 202855 - RNA, 19 nt, Artificial Sequence
  Description of Artificial Sequence: Synthetic oligonucleotide
gauccgcaugcugaauguu

SEQ ID NO: 202856 - RNA, 19 nt, Artificial Sequence
  Description of Artificial Sequence: Synthetic oligonucleotide
ggucuugcucagacuuuga

SEQ ID NO: 202857 - RNA, 19 nt, Artificial Sequence
  Description of Artificial Sequence: Synthetic oligonucleotide
ccgcaugcugaauguuguc

SEQ ID NO: 202858 - RNA, 19 nt, Artificial Sequence
  Description of Artificial Sequence: Synthetic oligonucleotide
cgguuauacaggaucugua

SEQ ID NO: 202859 - RNA, 19 nt, Artificial Sequence
  Description of Artificial Sequence: Synthetic oligonucleotide
cguauaagguuggucagcu

SEQ ID NO: 202860 - RNA, 19 nt, Artificial Sequence
  Description of Artificial Sequence: Synthetic oligonucleotide
cagccauguaggggaucuc

SEQ ID NO: 202861 - RNA, 19 nt, Artificial Sequence
  Description of Artificial Sequence: Synthetic oligonucleotide
uccggucuguacgguccuu

SEQ ID NO: 202862 - RNA, 19 nt, Artificial Sequence
  Description of Artificial Sequence: Synthetic oligonucleotide
cguagagagaggcaaugau

SEQ ID NO: 202863 - RNA, 19 nt, Artificial Sequence
  Description of Artificial Sequence: Synthetic oligonucleotide
gguugcgcuccuguagacu

SEQ ID NO: 202864 - RNA, 19 nt, Artificial Sequence
  Description of Artificial Sequence: Synthetic oligonucleotide
gccuuguagucgaacuugu

SEQ ID NO: 202865 - RNA, 19 nt, Artificial Sequence
  Description of Artificial Sequence: Synthetic oligonucleotide
gaugcgccucaaguagauu

SEQ ID NO: 202866 - RNA, 19 nt, Artificial Sequence
  Description of Artificial Sequence: Synthetic oligonucleotide
cccgcaguuggugauggaa

SEQ ID NO: 202867 - RNA, 19 nt, Artificial Sequence
  Description of Artificial Sequence: Synthetic oligonucleotide
cgcguacacgcaguggcug

SEQ ID NO: 202868 - RNA, 19 nt, Artificial Sequence
  Description of Artificial Sequence: Synthetic oligonucleotide
gguacggauccggucugua

SEQ ID NO: 202869 - RNA, 19 nt, Artificial Sequence
  Description of Artificial Sequence: Synthetic oligonucleotide
augcgucgucgggcaucac

SEQ ID NO: 202870 - RNA, 19 nt, Artificial Sequence
  Description of Artificial Sequence: Synthetic oligonucleotide
augcagccgcguacacgca

SEQ ID NO: 202871 - RNA, 19 nt, Artificial Sequence
  Description of Artificial Sequence: Synthetic oligonucleotide
cguucaaugauggcacaua

SEQ ID NO: 202872 - RNA, 19 nt, Artificial Sequence
  Description of Artificial Sequence: Synthetic oligonucleotide
ggaugcgccucaaguagau

SEQ ID NO: 202873 - RNA, 19 nt, Artificial Sequence
  Description of Artificial Sequence: Synthetic oligonucleotide
ccuuuugaucucggaaaua

SEQ ID NO: 202874 - RNA, 19 nt, Artificial Sequence
  Description of Artificial Sequence: Synthetic oligonucleotide
gcucgccuacccgcaguug

SEQ ID NO: 202875 - RNA, 19 nt, Artificial Sequence
  Description of Artificial Sequence: Synthetic oligonucleotide
ccuacccgcaguuggugau

SEQ ID NO: 202876 - RNA, 19 nt, Artificial Sequence
  Description of Artificial Sequence: Synthetic oligonucleotide
ccgaacuagcauggugcga

SEQ ID NO: 202877 - RNA, 19 nt, Artificial Sequence
  Description of Artificial Sequence: Synthetic oligonucleotide
gccugauaccagcgugagu

SEQ ID NO: 202878 - RNA, 19 nt, Artificial Sequence
  Description of Artificial Sequence: Synthetic oligonucleotide
gcacagguacggauccggu

SEQ ID NO: 202879 - RNA, 19 nt, Artificial Sequence
  Description of Artificial Sequence: Synthetic oligonucleotide
cccacacuuucccauucau

SEQ ID NO: 202880 - RNA, 19 nt, Artificial Sequence
  Description of Artificial Sequence: Synthetic oligonucleotide
gcagccgcguacacgcagu

SEQ ID NO: 202881 - RNA, 19 nt, Artificial Sequence
  Description of Artificial Sequence: Synthetic oligonucleotide
gggcaccugucggcgucgc

SEQ ID NO: 202882 - RNA, 19 nt, Artificial Sequence
  Description of Artificial Sequence: Synthetic oligonucleotide
cgccuacccgcaguuggug

SEQ ID NO: 202883 - RNA, 19 nt, Artificial Sequence
  Description of Artificial Sequence: Synthetic oligonucleotide
cagcgugaguggagagcau

SEQ ID NO: 202884 - RNA, 19 nt, Artificial Sequence
  Description of Artificial Sequence: Synthetic oligonucleotide
ccgcguacacgcaguggcu

SEQ ID NO: 202885 - RNA, 19 nt, Artificial Sequence
  Description of Artificial Sequence: Synthetic oligonucleotide
gcugacgcugaugggccuu

SEQ ID NO: 202886 - RNA, 19 nt, Artificial Sequence
  Description of Artificial Sequence: Synthetic oligonucleotide
ccccgccuucauuguccuc

SEQ ID NO: 202887 - RNA, 19 nt, Artificial Sequence
  Description of Artificial Sequence: Synthetic oligonucleotide
guacgccaccacggacccu

SEQ ID NO: 202888 - RNA, 19 nt, Artificial Sequence
  Description of Artificial Sequence: Synthetic oligonucleotide
cgucgucgggcaucacucu

SEQ ID NO: 202889 - RNA, 19 nt, Artificial Sequence
  Description of Artificial Sequence: Synthetic oligonucleotide
cguacacgcaguggcugau

SEQ ID NO: 202890 - RNA, 19 nt, Artificial Sequence
  Description of Artificial Sequence: Synthetic oligonucleotide
cgcucgccuacccgcaguu

SEQ ID NO: 202891 - RNA, 19 nt, Artificial Sequence
  Description of Artificial Sequence: Synthetic oligonucleotide
aaaugaggcacucuccucc

SEQ ID NO: 202892 - RNA, 19 nt, Artificial Sequence
  Description of Artificial Sequence: Synthetic oligonucleotide
gaaucuaaguauaagaucc

SEQ ID NO: 202893 - RNA, 19 nt, Artificial Sequence
  Description of Artificial Sequence: Synthetic oligonucleotide
uauaagauccgcaugacca

SEQ ID NO: 202894 - RNA, 19 nt, Artificial Sequence
  Description of Artificial Sequence: Synthetic oligonucleotide
aauaccucuaccucgaucu

SEQ ID NO: 202895 - RNA, 19 nt, Artificial Sequence
  Description of Artificial Sequence: Synthetic oligonucleotide
aaaaccucauuccagcggg

SEQ ID NO: 202896 - RNA, 19 nt, Artificial Sequence
  Description of Artificial Sequence: Synthetic oligonucleotide
agucccuucaccccgaacc

SEQ ID NO: 202897 - RNA, 19 nt, Artificial Sequence
  Description of Artificial Sequence: Synthetic oligonucleotide
agcgauagccauucuagcc

SEQ ID NO: 202898 - RNA, 19 nt, Artificial Sequence
  Description of Artificial Sequence: Synthetic oligonucleotide
aaagcgauagccauucuag

SEQ ID NO: 202899 - RNA, 19 nt, Artificial Sequence
  Description of Artificial Sequence: Synthetic oligonucleotide
cucaaucaggccuuuaacg

SEQ ID NO: 202900 - RNA, 19 nt, Artificial Sequence
  Description of Artificial Sequence: Synthetic oligonucleotide
ugaacugacaguugcacca

SEQ ID NO: 202901 - RNA, 19 nt, Artificial Sequence
  Description of Artificial Sequence: Synthetic oligonucleotide
ugagacucacuuuauaccu

SEQ ID NO: 202902 - RNA, 19 nt, Artificial Sequence
  Description of Artificial Sequence: Synthetic oligonucleotide
aaauaccucuaccucgauc

SEQ ID NO: 202903 - RNA, 19 nt, Artificial Sequence
  Description of Artificial Sequence: Synthetic oligonucleotide
ucuaaguauaagauccgca

SEQ ID NO: 202904 - RNA, 19 nt, Artificial Sequence
  Description of Artificial Sequence: Synthetic oligonucleotide
aaucgaugugacaaucacc

SEQ ID NO: 202905 - RNA, 19 nt, Artificial Sequence
  Description of Artificial Sequence: Synthetic oligonucleotide
aagcgauagccauucuagc

SEQ ID NO: 202906 - RNA, 19 nt, Artificial Sequence
  Description of Artificial Sequence: Synthetic oligonucleotide
aacaacauggcuccggaaa

SEQ ID NO: 202907 - RNA, 19 nt, Artificial Sequence
  Description of Artificial Sequence: Synthetic oligonucleotide
ugaaucuaaguauaagauc

SEQ ID NO: 202908 - RNA, 19 nt, Artificial Sequence
  Description of Artificial Sequence: Synthetic oligonucleotide
uucaccccgaaccugaagc

SEQ ID NO: 202909 - RNA, 19 nt, Artificial Sequence
  Description of Artificial Sequence: Synthetic oligonucleotide
uuuaugggaagucucuccu

SEQ ID NO: 202910 - RNA, 19 nt, Artificial Sequence
  Description of Artificial Sequence: Synthetic oligonucleotide
uuaacguacuugucuuugg

SEQ ID NO: 202911 - RNA, 19 nt, Artificial Sequence
  Description of Artificial Sequence: Synthetic oligonucleotide
gaucacggccauuuugucg

SEQ ID NO: 202912 - RNA, 19 nt, Artificial Sequence
  Description of Artificial Sequence: Synthetic oligonucleotide
aaucuaaguauaagauccg

SEQ ID NO: 202913 - RNA, 19 nt, Artificial Sequence
  Description of Artificial Sequence: Synthetic oligonucleotide
agaaaugaggcacucuccu

SEQ ID NO: 202914 - RNA, 19 nt, Artificial Sequence
  Description of Artificial Sequence: Synthetic oligonucleotide
aucuaaguauaagauccgc

SEQ ID NO: 202915 - RNA, 19 nt, Artificial Sequence
  Description of Artificial Sequence: Synthetic oligonucleotide
uaugggaagucucuccuac

SEQ ID NO: 202916 - RNA, 19 nt, Artificial Sequence
  Description of Artificial Sequence: Synthetic oligonucleotide
ugacguaggggucugauuu

SEQ ID NO: 202917 - RNA, 19 nt, Artificial Sequence
  Description of Artificial Sequence: Synthetic oligonucleotide
gaaucgaugugacaaucac

SEQ ID NO: 202918 - RNA, 19 nt, Artificial Sequence
  Description of Artificial Sequence: Synthetic oligonucleotide
aaggccgugcaguaaaggu

SEQ ID NO: 202919 - RNA, 19 nt, Artificial Sequence
  Description of Artificial Sequence: Synthetic oligonucleotide
aagcucacgcucucgugac

SEQ ID NO: 202920 - RNA, 19 nt, Artificial Sequence
  Description of Artificial Sequence: Synthetic oligonucleotide
auaagauccgcaugaccag

SEQ ID NO: 202921 - RNA, 19 nt, Artificial Sequence
  Description of Artificial Sequence: Synthetic oligonucleotide
ugauuugcccuucaccaac

SEQ ID NO: 202922 - RNA, 19 nt, Artificial Sequence
  Description of Artificial Sequence: Synthetic oligonucleotide
ucacuuuauaccugcccag

SEQ ID NO: 202923 - RNA, 19 nt, Artificial Sequence
  Description of Artificial Sequence: Synthetic oligonucleotide
cucgauucuugucugguag

SEQ ID NO: 202924 - RNA, 19 nt, Artificial Sequence
  Description of Artificial Sequence: Synthetic oligonucleotide
ucuaguacauggauccgaa

SEQ ID NO: 202925 - RNA, 19 nt, Artificial Sequence
  Description of Artificial Sequence: Synthetic oligonucleotide
uacgcugagaguagcauau

SEQ ID NO: 202926 - RNA, 19 nt, Artificial Sequence
  Description of Artificial Sequence: Synthetic oligonucleotide
auucuagccucaaaugaac

SEQ ID NO: 202927 - RNA, 19 nt, Artificial Sequence
  Description of Artificial Sequence: Synthetic oligonucleotide
guuaggaguugugugacag

SEQ ID NO: 202928 - RNA, 19 nt, Artificial Sequence
  Description of Artificial Sequence: Synthetic oligonucleotide
agucagugccccuaauguc

SEQ ID NO: 202929 - RNA, 19 nt, Artificial Sequence
  Description of Artificial Sequence: Synthetic oligonucleotide
augaaucuaaguauaagau

SEQ ID NO: 202930 - RNA, 19 nt, Artificial Sequence
  Description of Artificial Sequence: Synthetic oligonucleotide
aguauaagauccgcaugac

SEQ ID NO: 202931 - RNA, 19 nt, Artificial Sequence
  Description of Artificial Sequence: Synthetic oligonucleotide
guauaagauccgcaugacc

SEQ ID NO: 202932 - RNA, 19 nt, Artificial Sequence
  Description of Artificial Sequence: Synthetic oligonucleotide
uccggucgugaacugaugc

SEQ ID NO: 202933 - RNA, 19 nt, Artificial Sequence
  Description of Artificial Sequence: Synthetic oligonucleotide
uugacuucacugaaacauc

SEQ ID NO: 202934 - RNA, 19 nt, Artificial Sequence
  Description of Artificial Sequence: Synthetic oligonucleotide
caguaaagguuacauauga

SEQ ID NO: 202935 - RNA, 19 nt, Artificial Sequence
  Description of Artificial Sequence: Synthetic oligonucleotide
uucuagccucaaaugaacu

SEQ ID NO: 202936 - RNA, 19 nt, Artificial Sequence
  Description of Artificial Sequence: Synthetic oligonucleotide
gccucuaguacauggaucc

SEQ ID NO: 202937 - RNA, 19 nt, Artificial Sequence
  Description of Artificial Sequence: Synthetic oligonucleotide
cauuuugucgaagggcccg

SEQ ID NO: 202938 - RNA, 19 nt, Artificial Sequence
  Description of Artificial Sequence: Synthetic oligonucleotide
ucuccuacgcugagaguag

SEQ ID NO: 202939 - RNA, 19 nt, Artificial Sequence
  Description of Artificial Sequence: Synthetic oligonucleotide
uuauaccugcccagaaagu

SEQ ID NO: 202940 - RNA, 19 nt, Artificial Sequence
  Description of Artificial Sequence: Synthetic oligonucleotide
ugagugcaaaccaucuguc

SEQ ID NO: 202941 - RNA, 19 nt, Artificial Sequence
  Description of Artificial Sequence: Synthetic oligonucleotide
aucuccgcaagauccagcu

SEQ ID NO: 202942 - RNA, 19 nt, Artificial Sequence
  Description of Artificial Sequence: Synthetic oligonucleotide
aaccguucauugaacucgg

SEQ ID NO: 202943 - RNA, 19 nt, Artificial Sequence
  Description of Artificial Sequence: Synthetic oligonucleotide
uaucaccucauaagucucu

SEQ ID NO: 202944 - RNA, 19 nt, Artificial Sequence
  Description of Artificial Sequence: Synthetic oligonucleotide
ugcuaaccagcuuuuguuc

SEQ ID NO: 202945 - RNA, 19 nt, Artificial Sequence
  Description of Artificial Sequence: Synthetic oligonucleotide
caggcguaagugcaggcgg

SEQ ID NO: 202946 - RNA, 19 nt, Artificial Sequence
  Description of Artificial Sequence: Synthetic oligonucleotide
aacggucuuuggcaaucag

SEQ ID NO: 202947 - RNA, 19 nt, Artificial Sequence
  Description of Artificial Sequence: Synthetic oligonucleotide
uaggucuaggggucagacg

SEQ ID NO: 202948 - RNA, 19 nt, Artificial Sequence
  Description of Artificial Sequence: Synthetic oligonucleotide
gaccucgugcacuaucacc

SEQ ID NO: 202949 - RNA, 19 nt, Artificial Sequence
  Description of Artificial Sequence: Synthetic oligonucleotide
ucuagccucaaaugaacuu

SEQ ID NO: 202950 - RNA, 19 nt, Artificial Sequence
  Description of Artificial Sequence: Synthetic oligonucleotide
gacacauagggaucuggga

SEQ ID NO: 202951 - RNA, 19 nt, Artificial Sequence
  Description of Artificial Sequence: Synthetic oligonucleotide
cacggacaagcgcauaggg

SEQ ID NO: 202952 - RNA, 19 nt, Artificial Sequence
  Description of Artificial Sequence: Synthetic oligonucleotide
ugucgaagggcccggcagc

SEQ ID NO: 202953 - RNA, 19 nt, Artificial Sequence
  Description of Artificial Sequence: Synthetic oligonucleotide
agaaugucugggugcccac

SEQ ID NO: 202954 - RNA, 19 nt, Artificial Sequence
  Description of Artificial Sequence: Synthetic oligonucleotide
cucaaaccguucauugaac

SEQ ID NO: 202955 - RNA, 19 nt, Artificial Sequence
  Description of Artificial Sequence: Synthetic oligonucleotide
gaaacuccguccugccacc

SEQ ID NO: 202956 - RNA, 19 nt, Artificial Sequence
  Description of Artificial Sequence: Synthetic oligonucleotide
uaucuccgcaagauccagc

SEQ ID NO: 202957 - RNA, 19 nt, Artificial Sequence
  Description of Artificial Sequence: Synthetic oligonucleotide
ugaugccccgauuccacug

SEQ ID NO: 202958 - RNA, 19 nt, Artificial Sequence
  Description of Artificial Sequence: Synthetic oligonucleotide
ugucccgggaccucgugca

SEQ ID NO: 202959 - RNA, 19 nt, Artificial Sequence
  Description of Artificial Sequence: Synthetic oligonucleotide
ucugcccguuccaaguaga

SEQ ID NO: 202960 - RNA, 19 nt, Artificial Sequence
  Description of Artificial Sequence: Synthetic oligonucleotide
aaccaucugucuaaacaga

SEQ ID NO: 202961 - RNA, 19 nt, Artificial Sequence
  Description of Artificial Sequence: Synthetic oligonucleotide
uccggaaacuccguccugc

SEQ ID NO: 202962 - RNA, 19 nt, Artificial Sequence
  Description of Artificial Sequence: Synthetic oligonucleotide
agggguuagcaccccggac

SEQ ID NO: 202963 - RNA, 19 nt, Artificial Sequence
  Description of Artificial Sequence: Synthetic oligonucleotide
cuagcugcgcucucaucag

SEQ ID NO: 202964 - RNA, 19 nt, Artificial Sequence
  Description of Artificial Sequence: Synthetic oligonucleotide
ucgauucuugucugguagu

SEQ ID NO: 202965 - RNA, 19 nt, Artificial Sequence
  Description of Artificial Sequence: Synthetic oligonucleotide
gccauuuugucgaagggcc

SEQ ID NO: 202966 - RNA, 19 nt, Artificial Sequence
  Description of Artificial Sequence: Synthetic oligonucleotide
ggucauaccacugggcugc

SEQ ID NO: 202967 - RNA, 19 nt, Artificial Sequence
  Description of Artificial Sequence: Synthetic oligonucleotide
uguuaggaguugugugaca

SEQ ID NO: 202968 - RNA, 19 nt, Artificial Sequence
  Description of Artificial Sequence: Synthetic oligonucleotide
gaguugugugacagggccg

SEQ ID NO: 202969 - RNA, 19 nt, Artificial Sequence
  Description of Artificial Sequence: Synthetic oligonucleotide
gauccgcaugaccaguuuc

SEQ ID NO: 202970 - RNA, 19 nt, Artificial Sequence
  Description of Artificial Sequence: Synthetic oligonucleotide
auuuugucgaagggcccgg

SEQ ID NO: 202971 - RNA, 19 nt, Artificial Sequence
  Description of Artificial Sequence: Synthetic oligonucleotide
acggacaagcgcauagggg

SEQ ID NO: 202972 - RNA, 19 nt, Artificial Sequence
  Description of Artificial Sequence: Synthetic oligonucleotide
aggguaccaaucauccagg

SEQ ID NO: 202973 - RNA, 19 nt, Artificial Sequence
  Description of Artificial Sequence: Synthetic oligonucleotide
uccuacgcugagaguagca

SEQ ID NO: 202974 - RNA, 19 nt, Artificial Sequence
  Description of Artificial Sequence: Synthetic oligonucleotide
ucacgcucucgugacauga

SEQ ID NO: 202975 - RNA, 19 nt, Artificial Sequence
  Description of Artificial Sequence: Synthetic oligonucleotide
uggaaucgaugugacaauc

SEQ ID NO: 202976 - RNA, 19 nt, Artificial Sequence
  Description of Artificial Sequence: Synthetic oligonucleotide
ucgaucuccugucccggga

SEQ ID NO: 202977 - RNA, 19 nt, Artificial Sequence
  Description of Artificial Sequence: Synthetic oligonucleotide
cuuuauaccugcccagaaa

SEQ ID NO: 202978 - RNA, 19 nt, Artificial Sequence
  Description of Artificial Sequence: Synthetic oligonucleotide
ucaccccgaaccugaagcu

SEQ ID NO: 202979 - RNA, 19 nt, Artificial Sequence
  Description of Artificial Sequence: Synthetic oligonucleotide
aaaccucauuccagcgggg

SEQ ID NO: 202980 - RNA, 19 nt, Artificial Sequence
  Description of Artificial Sequence: Synthetic oligonucleotide
ggaucuuugucaaauaccu

SEQ ID NO: 202981 - RNA, 19 nt, Artificial Sequence
  Description of Artificial Sequence: Synthetic oligonucleotide
uuaugggaagucucuccua

SEQ ID NO: 202982 - RNA, 19 nt, Artificial Sequence
  Description of Artificial Sequence: Synthetic oligonucleotide
cagggcccuggaaucaucc

SEQ ID NO: 202983 - RNA, 19 nt, Artificial Sequence
  Description of Artificial Sequence: Synthetic oligonucleotide
gcaaagaccccgauuuggg

SEQ ID NO: 202984 - RNA, 19 nt, Artificial Sequence
  Description of Artificial Sequence: Synthetic oligonucleotide
uccucgucgaugacacgac

SEQ ID NO: 202985 - RNA, 19 nt, Artificial Sequence
  Description of Artificial Sequence: Synthetic oligonucleotide
acacggacaagcgcauagg

SEQ ID NO: 202986 - RNA, 19 nt, Artificial Sequence
  Description of Artificial Sequence: Synthetic oligonucleotide
uuugacguaggggucugau

SEQ ID NO: 202987 - RNA, 19 nt, Artificial Sequence
  Description of Artificial Sequence: Synthetic oligonucleotide
ugggcccgauccaaguaca

SEQ ID NO: 202988 - RNA, 19 nt, Artificial Sequence
  Description of Artificial Sequence: Synthetic oligonucleotide
ugucgggcuguccccagcu

SEQ ID NO: 202989 - RNA, 19 nt, Artificial Sequence
  Description of Artificial Sequence: Synthetic oligonucleotide
cuuaggucccugccccagg

SEQ ID NO: 202990 - RNA, 19 nt, Artificial Sequence
  Description of Artificial Sequence: Synthetic oligonucleotide
agagcaaugucgggcuguc

SEQ ID NO: 202991 - RNA, 19 nt, Artificial Sequence
  Description of Artificial Sequence: Synthetic oligonucleotide
ggauauggagcccagggua

SEQ ID NO: 202992 - RNA, 19 nt, Artificial Sequence
  Description of Artificial Sequence: Synthetic oligonucleotide
agaggguaccaaucaucca

SEQ ID NO: 202993 - RNA, 19 nt, Artificial Sequence
  Description of Artificial Sequence: Synthetic oligonucleotide
cacuguaggaccugaucca

SEQ ID NO: 202994 - RNA, 19 nt, Artificial Sequence
  Description of Artificial Sequence: Synthetic oligonucleotide
cugggcccgauccaaguac

SEQ ID NO: 202995 - RNA, 19 nt, Artificial Sequence
  Description of Artificial Sequence: Synthetic oligonucleotide
augucgggcuguccccagc

SEQ ID NO: 202996 - RNA, 19 nt, Artificial Sequence
  Description of Artificial Sequence: Synthetic oligonucleotide
gucuaaacagagucgcucu

SEQ ID NO: 202997 - RNA, 19 nt, Artificial Sequence
  Description of Artificial Sequence: Synthetic oligonucleotide
gaagucucuccuacgcuga

SEQ ID NO: 202998 - RNA, 19 nt, Artificial Sequence
  Description of Artificial Sequence: Synthetic oligonucleotide
ugccccgauuccacuguag

SEQ ID NO: 202999 - RNA, 19 nt, Artificial Sequence
  Description of Artificial Sequence: Synthetic oligonucleotide
ccguucauugaacucgggg

SEQ ID NO: 203000 - RNA, 19 nt, Artificial Sequence
  Description of Artificial Sequence: Synthetic oligonucleotide
ucuccgcaagauccagcug

SEQ ID NO: 203001 - RNA, 19 nt, Artificial Sequence
  Description of Artificial Sequence: Synthetic oligonucleotide
ugaggcccugaggagucgg

SEQ ID NO: 203002 - RNA, 19 nt, Artificial Sequence
  Description of Artificial Sequence: Synthetic oligonucleotide
gggguuagcaccccggaca

SEQ ID NO: 203003 - RNA, 19 nt, Artificial Sequence
  Description of Artificial Sequence: Synthetic oligonucleotide
ccgaagaacacucuccguc

SEQ ID NO: 203004 - RNA, 19 nt, Artificial Sequence
  Description of Artificial Sequence: Synthetic oligonucleotide
cucgaucuccugucccggg

SEQ ID NO: 203005 - RNA, 19 nt, Artificial Sequence
  Description of Artificial Sequence: Synthetic oligonucleotide
gcuaaccagcuuuuguuca

SEQ ID NO: 203006 - RNA, 19 nt, Artificial Sequence
  Description of Artificial Sequence: Synthetic oligonucleotide
ggccauuuugucgaagggc

SEQ ID NO: 203007 - RNA, 19 nt, Artificial Sequence
  Description of Artificial Sequence: Synthetic oligonucleotide
agguccugagccucuagua

SEQ ID NO: 203008 - RNA, 19 nt, Artificial Sequence
  Description of Artificial Sequence: Synthetic oligonucleotide
ugucagggcccuggaauca

SEQ ID NO: 203009 - RNA, 19 nt, Artificial Sequence
  Description of Artificial Sequence: Synthetic oligonucleotide
accggguacaguggggaag

SEQ ID NO: 203010 - RNA, 19 nt, Artificial Sequence
  Description of Artificial Sequence: Synthetic oligonucleotide
ggguuagcaccccggacag

SEQ ID NO: 203011 - RNA, 19 nt, Artificial Sequence
  Description of Artificial Sequence: Synthetic oligonucleotide
ggauccgaagaacacucuc

SEQ ID NO: 203012 - RNA, 19 nt, Artificial Sequence
  Description of Artificial Sequence: Synthetic oligonucleotide
uccgucccaaagugguugu

SEQ ID NO: 203013 - RNA, 19 nt, Artificial Sequence
  Description of Artificial Sequence: Synthetic oligonucleotide
uugacguaggggucugauu

SEQ ID NO: 203014 - RNA, 19 nt, Artificial Sequence
  Description of Artificial Sequence: Synthetic oligonucleotide
ccuagcugcgcucucauca

SEQ ID NO: 203015 - RNA, 19 nt, Artificial Sequence
  Description of Artificial Sequence: Synthetic oligonucleotide
cuccgcaagauccagcugu

SEQ ID NO: 203016 - RNA, 19 nt, Artificial Sequence
  Description of Artificial Sequence: Synthetic oligonucleotide
ugcccguuccaaguagaca

SEQ ID NO: 203017 - RNA, 19 nt, Artificial Sequence
  Description of Artificial Sequence: Synthetic oligonucleotide
ggaaguagccagcuuaggu

SEQ ID NO: 203018 - RNA, 19 nt, Artificial Sequence
  Description of Artificial Sequence: Synthetic oligonucleotide
uuuugucgaagggcccggc

SEQ ID NO: 203019 - RNA, 19 nt, Artificial Sequence
  Description of Artificial Sequence: Synthetic oligonucleotide
ccgauuccacuguaggacc

SEQ ID NO: 203020 - RNA, 19 nt, Artificial Sequence
  Description of Artificial Sequence: Synthetic oligonucleotide
uuggcaugauuuggugcca

SEQ ID NO: 203021 - RNA, 19 nt, Artificial Sequence
  Description of Artificial Sequence: Synthetic oligonucleotide
aagcgcauaggggucugau

SEQ ID NO: 203022 - RNA, 19 nt, Artificial Sequence
  Description of Artificial Sequence: Synthetic oligonucleotide
cccgauuccacuguaggac

SEQ ID NO: 203023 - RNA, 19 nt, Artificial Sequence
  Description of Artificial Sequence: Synthetic oligonucleotide
cugcccguuccaaguagac

SEQ ID NO: 203024 - RNA, 19 nt, Artificial Sequence
  Description of Artificial Sequence: Synthetic oligonucleotide
agguuacauaugauccucu

SEQ ID NO: 203025 - RNA, 19 nt, Artificial Sequence
  Description of Artificial Sequence: Synthetic oligonucleotide
gcaugauuuggugccacug

SEQ ID NO: 203026 - RNA, 19 nt, Artificial Sequence
  Description of Artificial Sequence: Synthetic oligonucleotide
cuaggggucagacgcucca

SEQ ID NO: 203027 - RNA, 19 nt, Artificial Sequence
  Description of Artificial Sequence: Synthetic oligonucleotide
ccauuuugucgaagggccc

SEQ ID NO: 203028 - RNA, 19 nt, Artificial Sequence
  Description of Artificial Sequence: Synthetic oligonucleotide
ggaaucgaugugacaauca

SEQ ID NO: 203029 - RNA, 19 nt, Artificial Sequence
  Description of Artificial Sequence: Synthetic oligonucleotide
gacguuugggaaacagucu

SEQ ID NO: 203030 - RNA, 19 nt, Artificial Sequence
  Description of Artificial Sequence: Synthetic oligonucleotide
cuacgcugagaguagcaua

SEQ ID NO: 203031 - RNA, 19 nt, Artificial Sequence
  Description of Artificial Sequence: Synthetic oligonucleotide
cacuuuauaccugcccaga

SEQ ID NO: 203032 - RNA, 19 nt, Artificial Sequence
  Description of Artificial Sequence: Synthetic oligonucleotide
caaggggaaaggccgugca

SEQ ID NO: 203033 - RNA, 19 nt, Artificial Sequence
  Description of Artificial Sequence: Synthetic oligonucleotide
agauccgcaugaccaguuu

SEQ ID NO: 203034 - RNA, 19 nt, Artificial Sequence
  Description of Artificial Sequence: Synthetic oligonucleotide
cucucgugacaugaaagaa

SEQ ID NO: 203035 - RNA, 19 nt, Artificial Sequence
  Description of Artificial Sequence: Synthetic oligonucleotide
ucccuagcugcgcucucau

SEQ ID NO: 203036 - RNA, 19 nt, Artificial Sequence
  Description of Artificial Sequence: Synthetic oligonucleotide
aacuccguccugccaccuu

SEQ ID NO: 203037 - RNA, 19 nt, Artificial Sequence
  Description of Artificial Sequence: Synthetic oligonucleotide
gcgauagccauucuagccu

SEQ ID NO: 203038 - RNA, 19 nt, Artificial Sequence
  Description of Artificial Sequence: Synthetic oligonucleotide
ccagggguuagcaccccgg

SEQ ID NO: 203039 - RNA, 19 nt, Artificial Sequence
  Description of Artificial Sequence: Synthetic oligonucleotide
ccggucgugaacugaugcc

SEQ ID NO: 203040 - RNA, 19 nt, Artificial Sequence
  Description of Artificial Sequence: Synthetic oligonucleotide
gguuuuaugggaagucucu

SEQ ID NO: 203041 - RNA, 19 nt, Artificial Sequence
  Description of Artificial Sequence: Synthetic oligonucleotide
aguaggucuaggggucaga

SEQ ID NO: 203042 - RNA, 19 nt, Artificial Sequence
  Description of Artificial Sequence: Synthetic oligonucleotide
agggcccuggaaucauccu

SEQ ID NO: 203043 - RNA, 19 nt, Artificial Sequence
  Description of Artificial Sequence: Synthetic oligonucleotide
uggcuccggaaacuccguc

SEQ ID NO: 203044 - RNA, 19 nt, Artificial Sequence
  Description of Artificial Sequence: Synthetic oligonucleotide
gauccugggcccgauccaa

SEQ ID NO: 203045 - RNA, 19 nt, Artificial Sequence
  Description of Artificial Sequence: Synthetic oligonucleotide
ccaggcguaagugcaggcg

SEQ ID NO: 203046 - RNA, 19 nt, Artificial Sequence
  Description of Artificial Sequence: Synthetic oligonucleotide
cuccuacgcugagaguagc

SEQ ID NO: 203047 - RNA, 19 nt, Artificial Sequence
  Description of Artificial Sequence: Synthetic oligonucleotide
uaagugcaggcggccagau

SEQ ID NO: 203048 - RNA, 19 nt, Artificial Sequence
  Description of Artificial Sequence: Synthetic oligonucleotide
cucacgcucucgugacaug

SEQ ID NO: 203049 - RNA, 19 nt, Artificial Sequence
  Description of Artificial Sequence: Synthetic oligonucleotide
agucucuccuacgcugaga

SEQ ID NO: 203050 - RNA, 19 nt, Artificial Sequence
  Description of Artificial Sequence: Synthetic oligonucleotide
gcaaaccaucugucuaaac

SEQ ID NO: 203051 - RNA, 19 nt, Artificial Sequence
  Description of Artificial Sequence: Synthetic oligonucleotide
agagacccauccaggggca

SEQ ID NO: 203052 - RNA, 19 nt, Artificial Sequence
  Description of Artificial Sequence: Synthetic oligonucleotide
agcucacgcucucgugaca

SEQ ID NO: 203053 - RNA, 19 nt, Artificial Sequence
  Description of Artificial Sequence: Synthetic oligonucleotide
aucccuagcugcgcucuca

SEQ ID NO: 203054 - RNA, 19 nt, Artificial Sequence
  Description of Artificial Sequence: Synthetic oligonucleotide
gacaagcgcauaggggucu

SEQ ID NO: 203055 - RNA, 19 nt, Artificial Sequence
  Description of Artificial Sequence: Synthetic oligonucleotide
cguuugggaaacagucuug

SEQ ID NO: 203056 - RNA, 19 nt, Artificial Sequence
  Description of Artificial Sequence: Synthetic oligonucleotide
gccccuaaugucagggccc

SEQ ID NO: 203057 - RNA, 19 nt, Artificial Sequence
  Description of Artificial Sequence: Synthetic oligonucleotide
ggauugagguccucccgaa

SEQ ID NO: 203058 - RNA, 19 nt, Artificial Sequence
  Description of Artificial Sequence: Synthetic oligonucleotide
cagggguuagcaccccgga

SEQ ID NO: 203059 - RNA, 19 nt, Artificial Sequence
  Description of Artificial Sequence: Synthetic oligonucleotide
caccccgaaccugaagcuc

SEQ ID NO: 203060 - RNA, 19 nt, Artificial Sequence
  Description of Artificial Sequence: Synthetic oligonucleotide
acccugggagaggucuauc

SEQ ID NO: 203061 - RNA, 19 nt, Artificial Sequence
  Description of Artificial Sequence: Synthetic oligonucleotide
cggucgugaacugaugccc

SEQ ID NO: 203062 - RNA, 19 nt, Artificial Sequence
  Description of Artificial Sequence: Synthetic oligonucleotide
ccggguacaguggggaagc

SEQ ID NO: 203063 - RNA, 19 nt, Artificial Sequence
  Description of Artificial Sequence: Synthetic oligonucleotide
guaggaccugauccaauuu

SEQ ID NO: 203064 - RNA, 19 nt, Artificial Sequence
  Description of Artificial Sequence: Synthetic oligonucleotide
ucacggccauuuugucgaa

SEQ ID NO: 203065 - RNA, 19 nt, Artificial Sequence
  Description of Artificial Sequence: Synthetic oligonucleotide
ccggaaacuccguccugcc

SEQ ID NO: 203066 - RNA, 19 nt, Artificial Sequence
  Description of Artificial Sequence: Synthetic oligonucleotide
cuggaaucgaugugacaau

SEQ ID NO: 203067 - RNA, 19 nt, Artificial Sequence
  Description of Artificial Sequence: Synthetic oligonucleotide
cgauagccauucuagccuc

SEQ ID NO: 203068 - RNA, 19 nt, Artificial Sequence
  Description of Artificial Sequence: Synthetic oligonucleotide
ggcguaagugcaggcggcc

SEQ ID NO: 203069 - RNA, 19 nt, Artificial Sequence
  Description of Artificial Sequence: Synthetic oligonucleotide
gaacugacaguugcaccau

SEQ ID NO: 203070 - RNA, 19 nt, Artificial Sequence
  Description of Artificial Sequence: Synthetic oligonucleotide
cggacaagcgcauaggggu

SEQ ID NO: 203071 - RNA, 19 nt, Artificial Sequence
  Description of Artificial Sequence: Synthetic oligonucleotide
ggagagucagugccccuaa

SEQ ID NO: 203072 - RNA, 19 nt, Artificial Sequence
  Description of Artificial Sequence: Synthetic oligonucleotide
gcggggauugagguccucc

SEQ ID NO: 203073 - RNA, 19 nt, Artificial Sequence
  Description of Artificial Sequence: Synthetic oligonucleotide
ccguuccaaguagacagac

SEQ ID NO: 203074 - RNA, 19 nt, Artificial Sequence
  Description of Artificial Sequence: Synthetic oligonucleotide
cacgcucucgugacaugaa

SEQ ID NO: 203075 - RNA, 19 nt, Artificial Sequence
  Description of Artificial Sequence: Synthetic oligonucleotide
augccccgauuccacugua

SEQ ID NO: 203076 - RNA, 19 nt, Artificial Sequence
  Description of Artificial Sequence: Synthetic oligonucleotide
ggacuguggugagacucac

SEQ ID NO: 203077 - RNA, 19 nt, Artificial Sequence
  Description of Artificial Sequence: Synthetic oligonucleotide
guacaguggggaagcagau

SEQ ID NO: 203078 - RNA, 19 nt, Artificial Sequence
  Description of Artificial Sequence: Synthetic oligonucleotide
ggcccgauccaaguacaca

SEQ ID NO: 203079 - RNA, 19 nt, Artificial Sequence
  Description of Artificial Sequence: Synthetic oligonucleotide
guuugacguaggggucuga

SEQ ID NO: 203080 - RNA, 19 nt, Artificial Sequence
  Description of Artificial Sequence: Synthetic oligonucleotide
ccccgauuccacuguagga

SEQ ID NO: 203081 - RNA, 19 nt, Artificial Sequence
  Description of Artificial Sequence: Synthetic oligonucleotide
agcggggauugagguccuc

SEQ ID NO: 203082 - RNA, 19 nt, Artificial Sequence
  Description of Artificial Sequence: Synthetic oligonucleotide
gagagucagugccccuaau

SEQ ID NO: 203083 - RNA, 19 nt, Artificial Sequence
  Description of Artificial Sequence: Synthetic oligonucleotide
caccggguacaguggggaa

SEQ ID NO: 203084 - RNA, 19 nt, Artificial Sequence
  Description of Artificial Sequence: Synthetic oligonucleotide
ggcaugauuuggugccacu

SEQ ID NO: 203085 - RNA, 19 nt, Artificial Sequence
  Description of Artificial Sequence: Synthetic oligonucleotide
gaccccgauuugggcccag

SEQ ID NO: 203086 - RNA, 19 nt, Artificial Sequence
  Description of Artificial Sequence: Synthetic oligonucleotide
caaauaccucuaccucgau

SEQ ID NO: 203087 - RNA, 19 nt, Artificial Sequence
  Description of Artificial Sequence: Synthetic oligonucleotide
ggaucccuagcugcgcucu

SEQ ID NO: 203088 - RNA, 19 nt, Artificial Sequence
  Description of Artificial Sequence: Synthetic oligonucleotide
accccgauuugggcccaga

SEQ ID NO: 203089 - RNA, 19 nt, Artificial Sequence
  Description of Artificial Sequence: Synthetic oligonucleotide
cgugcaguaaagguuacau

SEQ ID NO: 203090 - RNA, 19 nt, Artificial Sequence
  Description of Artificial Sequence: Synthetic oligonucleotide
ggcguggcuggguaucccu

SEQ ID NO: 203091 - RNA, 19 nt, Artificial Sequence
  Description of Artificial Sequence: Synthetic oligonucleotide
caagcgcauaggggucuga

SEQ ID NO: 203092 - RNA, 19 nt, Artificial Sequence
  Description of Artificial Sequence: Synthetic oligonucleotide
gggcccuggaaucauccuu

SEQ ID NO: 203093 - RNA, 19 nt, Artificial Sequence
  Description of Artificial Sequence: Synthetic oligonucleotide
cugaaacaucuagcuuucu

SEQ ID NO: 203094 - RNA, 19 nt, Artificial Sequence
  Description of Artificial Sequence: Synthetic oligonucleotide
cccgaacaacauggcuccg

SEQ ID NO: 203095 - RNA, 19 nt, Artificial Sequence
  Description of Artificial Sequence: Synthetic oligonucleotide
gggucugauuugcccucaa

SEQ ID NO: 203096 - RNA, 19 nt, Artificial Sequence
  Description of Artificial Sequence: Synthetic oligonucleotide
ccucccgaacaacauggcu

SEQ ID NO: 203097 - RNA, 19 nt, Artificial Sequence
  Description of Artificial Sequence: Synthetic oligonucleotide
gcucacgcucucgugacau

SEQ ID NO: 203098 - RNA, 19 nt, Artificial Sequence
  Description of Artificial Sequence: Synthetic oligonucleotide
cccuagcugcgcucucauc

SEQ ID NO: 203099 - RNA, 19 nt, Artificial Sequence
  Description of Artificial Sequence: Synthetic oligonucleotide
cgggaccucgugcacuauc

SEQ ID NO: 203100 - RNA, 19 nt, Artificial Sequence
  Description of Artificial Sequence: Synthetic oligonucleotide
ccuacgcugagaguagcau

SEQ ID NO: 203101 - RNA, 19 nt, Artificial Sequence
  Description of Artificial Sequence: Synthetic oligonucleotide
ccgugcaguaaagguuaca

SEQ ID NO: 203102 - RNA, 19 nt, Artificial Sequence
  Description of Artificial Sequence: Synthetic oligonucleotide
gggagaucacggccauuuu

SEQ ID NO: 203103 - RNA, 19 nt, Artificial Sequence
  Description of Artificial Sequence: Synthetic oligonucleotide
ggcugacguuugggaaaca

SEQ ID NO: 203104 - RNA, 19 nt, Artificial Sequence
  Description of Artificial Sequence: Synthetic oligonucleotide
cccggcagcuguggaugau

SEQ ID NO: 203105 - RNA, 19 nt, Artificial Sequence
  Description of Artificial Sequence: Synthetic oligonucleotide
ccgucccaaagugguuguu

SEQ ID NO: 203106 - RNA, 19 nt, Artificial Sequence
  Description of Artificial Sequence: Synthetic oligonucleotide
uauucuauuacccacaccc

SEQ ID NO: 203107 - RNA, 19 nt, Artificial Sequence
  Description of Artificial Sequence: Synthetic oligonucleotide
aaaaugagacugcagaggc

SEQ ID NO: 203108 - RNA, 19 nt, Artificial Sequence
  Description of Artificial Sequence: Synthetic oligonucleotide
auauuauaugcucagaugg

SEQ ID NO: 203109 - RNA, 19 nt, Artificial Sequence
  Description of Artificial Sequence: Synthetic oligonucleotide
aaaacaaaacaaaacaaac

SEQ ID NO: 203110 - RNA, 19 nt, Artificial Sequence
  Description of Artificial Sequence: Synthetic oligonucleotide
aguacuauuagccacacug

SEQ ID NO: 203111 - RNA, 19 nt, Artificial Sequence
  Description of Artificial Sequence: Synthetic oligonucleotide
  modified_base (7)..(7): a, c, u, g, unknown or other
auauganaaguuccgaagg

SEQ ID NO: 203112 - RNA, 19 nt, Artificial Sequence
  Description of Artificial Sequence: Synthetic oligonucleotide
aaccgcuucauguacauuc

SEQ ID NO: 203113 - RNA, 19 nt, Artificial Sequence
  Description of Artificial Sequence: Synthetic oligonucleotide
  modified_base (8)..(8): a, c, u, g, unknown or other
gauauganaaguuccgaag

SEQ ID NO: 203114 - RNA, 19 nt, Artificial Sequence
  Description of Artificial Sequence: Synthetic oligonucleotide
ugaaauaagaguucauagc

SEQ ID NO: 203115 - RNA, 19 nt, Artificial Sequence
  Description of Artificial Sequence: Synthetic oligonucleotide
  modified_base (2)..(2): a, c, u, g, unknown or other
anagccagguucucagugc

SEQ ID NO: 203116 - RNA, 19 nt, Artificial Sequence
  Description of Artificial Sequence: Synthetic oligonucleotide
uuaaaaguucccuaucccc

SEQ ID NO: 203117 - RNA, 19 nt, Artificial Sequence
  Description of Artificial Sequence: Synthetic oligonucleotide
aggacuaguucuuuuaggg

SEQ ID NO: 203118 - RNA, 19 nt, Artificial Sequence
  Description of Artificial Sequence: Synthetic oligonucleotide
ugauuuguugaucaacacc

SEQ ID NO: 203119 - RNA, 19 nt, Artificial Sequence
  Description of Artificial Sequence: Synthetic oligonucleotide
ugaaauguauauucgcacc

SEQ ID NO: 203120 - RNA, 19 nt, Artificial Sequence
  Description of Artificial Sequence: Synthetic oligonucleotide
ucuaacuugcaaaaucaug

SEQ ID NO: 203121 - RNA, 19 nt, Artificial Sequence
  Description of Artificial Sequence: Synthetic oligonucleotide
uacuauuagccacacuggg

SEQ ID NO: 203122 - RNA, 19 nt, Artificial Sequence
  Description of Artificial Sequence: Synthetic oligonucleotide
  modified_base (13)..(13): a, c, u, g, unknown or other
aacuugauauganaaguuc

SEQ ID NO: 203123 - RNA, 19 nt, Artificial Sequence
  Description of Artificial Sequence: Synthetic oligonucleotide
uaugcaaauaacugaguca

SEQ ID NO: 203124 - RNA, 19 nt, Artificial Sequence
  Description of Artificial Sequence: Synthetic oligonucleotide
  modified_base (6)..(6): a, c, u, g, unknown or other
uauganaaguuccgaagga

SEQ ID NO: 203125 - RNA, 19 nt, Artificial Sequence
  Description of Artificial Sequence: Synthetic oligonucleotide
ucuagcucaaccuguaaca

SEQ ID NO: 203126 - RNA, 19 nt, Artificial Sequence
  Description of Artificial Sequence: Synthetic oligonucleotide
augcaaauaacugagucag

SEQ ID NO: 203127 - RNA, 19 nt, Artificial Sequence
  Description of Artificial Sequence: Synthetic oligonucleotide
aaauguauauucgcaccac

SEQ ID NO: 203128 - RNA, 19 nt, Artificial Sequence
  Description of Artificial Sequence: Synthetic oligonucleotide
cuacuaagggucaacagug

SEQ ID NO: 203129 - RNA, 19 nt, Artificial Sequence
  Description of Artificial Sequence: Synthetic oligonucleotide
auguaucgaccauaugucc

SEQ ID NO: 203130 - RNA, 19 nt, Artificial Sequence
  Description of Artificial Sequence: Synthetic oligonucleotide
uuauaugcucagauggagc

SEQ ID NO: 203131 - RNA, 19 nt, Artificial Sequence
  Description of Artificial Sequence: Synthetic oligonucleotide
uauuauaugcucagaugga

SEQ ID NO: 203132 - RNA, 19 nt, Artificial Sequence
  Description of Artificial Sequence: Synthetic oligonucleotide
uguaucgaccauaugucca

SEQ ID NO: 203133 - RNA, 19 nt, Artificial Sequence
  Description of Artificial Sequence: Synthetic oligonucleotide
aauguauauucgcaccacu

SEQ ID NO: 203134 - RNA, 19 nt, Artificial Sequence
  Description of Artificial Sequence: Synthetic oligonucleotide
gaacaagaguucucaaucc

SEQ ID NO: 203135 - RNA, 19 nt, Artificial Sequence
  Description of Artificial Sequence: Synthetic oligonucleotide
  modified_base (3)..(3): a, c, u, g, unknown or other
ganaaguuccgaaggaggc

SEQ ID NO: 203136 - RNA, 19 nt, Artificial Sequence
  Description of Artificial Sequence: Synthetic oligonucleotide
uuuagggaaauccacugua

SEQ ID NO: 203137 - RNA, 19 nt, Artificial Sequence
  Description of Artificial Sequence: Synthetic oligonucleotide
cucaauauauuaaggaaca

SEQ ID NO: 203138 - RNA, 19 nt, Artificial Sequence
  Description of Artificial Sequence: Synthetic oligonucleotide
  modified_base (9)..(9): a, c, u, g, unknown or other
ugauauganaaguuccgaa

SEQ ID NO: 203139 - RNA, 19 nt, Artificial Sequence
  Description of Artificial Sequence: Synthetic oligonucleotide
uauacagcgugcaauuuuc

SEQ ID NO: 203140 - RNA, 19 nt, Artificial Sequence
  Description of Artificial Sequence: Synthetic oligonucleotide
uaaacuucaguggaaggug

SEQ ID NO: 203141 - RNA, 19 nt, Artificial Sequence
  Description of Artificial Sequence: Synthetic oligonucleotide
uuucacuacucguucaugu

SEQ ID NO: 203142 - RNA, 19 nt, Artificial Sequence
  Description of Artificial Sequence: Synthetic oligonucleotide
cuuaguaguguucgguggg

SEQ ID NO: 203143 - RNA, 19 nt, Artificial Sequence
  Description of Artificial Sequence: Synthetic oligonucleotide
auuauaugcucagauggag

SEQ ID NO: 203144 - RNA, 19 nt, Artificial Sequence
  Description of Artificial Sequence: Synthetic oligonucleotide
guuagcagauuuaucacag

SEQ ID NO: 203145 - RNA, 19 nt, Artificial Sequence
  Description of Artificial Sequence: Synthetic oligonucleotide
auauauuaaggaacaggac

SEQ ID NO: 203146 - RNA, 19 nt, Artificial Sequence
  Description of Artificial Sequence: Synthetic oligonucleotide
uauauucgcaccacuucug

SEQ ID NO: 203147 - RNA, 19 nt, Artificial Sequence
  Description of Artificial Sequence: Synthetic oligonucleotide
acuccuaccuuagaagggc

SEQ ID NO: 203148 - RNA, 19 nt, Artificial Sequence
  Description of Artificial Sequence: Synthetic oligonucleotide
auauucgcaccacuucugg

SEQ ID NO: 203149 - RNA, 19 nt, Artificial Sequence
  Description of Artificial Sequence: Synthetic oligonucleotide
uguucggugggaagguagg

SEQ ID NO: 203150 - RNA, 19 nt, Artificial Sequence
  Description of Artificial Sequence: Synthetic oligonucleotide
aguuagcagauuuaucaca

SEQ ID NO: 203151 - RNA, 19 nt, Artificial Sequence
  Description of Artificial Sequence: Synthetic oligonucleotide
aucacauucccgaaguuuc

SEQ ID NO: 203152 - RNA, 19 nt, Artificial Sequence
  Description of Artificial Sequence: Synthetic oligonucleotide
gacuaguucuuuuagggaa

SEQ ID NO: 203153 - RNA, 19 nt, Artificial Sequence
  Description of Artificial Sequence: Synthetic oligonucleotide
gauguaucgaccauauguc

SEQ ID NO: 203154 - RNA, 19 nt, Artificial Sequence
  Description of Artificial Sequence: Synthetic oligonucleotide
gagcagagcggauguaucg

SEQ ID NO: 203155 - RNA, 19 nt, Artificial Sequence
  Description of Artificial Sequence: Synthetic oligonucleotide
gaagacaugccccuuagua

SEQ ID NO: 203156 - RNA, 19 nt, Artificial Sequence
  Description of Artificial Sequence: Synthetic oligonucleotide
aggaguaccucgcuuacug

SEQ ID NO: 203157 - RNA, 19 nt, Artificial Sequence
  Description of Artificial Sequence: Synthetic oligonucleotide
  modified_base (17)..(17): a, c, u, g, unknown or other
gaugaacuugauauganaa

SEQ ID NO: 203158 - RNA, 19 nt, Artificial Sequence
  Description of Artificial Sequence: Synthetic oligonucleotide
acugggaagugccucuugg

SEQ ID NO: 203159 - RNA, 19 nt, Artificial Sequence
  Description of Artificial Sequence: Synthetic oligonucleotide
agacaugccccuuaguagu

SEQ ID NO: 203160 - RNA, 19 nt, Artificial Sequence
  Description of Artificial Sequence: Synthetic oligonucleotide
  modified_base (16)..(16): a, c, u, g, unknown or other
uguuccgagcauccanagc

SEQ ID NO: 203161 - RNA, 19 nt, Artificial Sequence
  Description of Artificial Sequence: Synthetic oligonucleotide
agugaaauguauauucgca

SEQ ID NO: 203162 - RNA, 19 nt, Artificial Sequence
  Description of Artificial Sequence: Synthetic oligonucleotide
  modified_base (5)..(5): a, c, u, g, unknown or other
auganaaguuccgaaggag

SEQ ID NO: 203163 - RNA, 19 nt, Artificial Sequence
  Description of Artificial Sequence: Synthetic oligonucleotide
acauugguggguugugcac

SEQ ID NO: 203164 - RNA, 19 nt, Artificial Sequence
  Description of Artificial Sequence: Synthetic oligonucleotide
guaucgaccauauguccag

SEQ ID NO: 203165 - RNA, 19 nt, Artificial Sequence
  Description of Artificial Sequence: Synthetic oligonucleotide
  modified_base (2)..(2): a, c, u, g, unknown or other
anaaguuccgaaggaggca

SEQ ID NO: 203166 - RNA, 19 nt, Artificial Sequence
  Description of Artificial Sequence: Synthetic oligonucleotide
uacauagccucuugcaaac

SEQ ID NO: 203167 - RNA, 19 nt, Artificial Sequence
  Description of Artificial Sequence: Synthetic oligonucleotide
ggaacaagaguucucaauc

SEQ ID NO: 203168 - RNA, 19 nt, Artificial Sequence
  Description of Artificial Sequence: Synthetic oligonucleotide
auucgcaccacuucuggcu

SEQ ID NO: 203169 - RNA, 19 nt, Artificial Sequence
  Description of Artificial Sequence: Synthetic oligonucleotide
uccaguugcauugaauaga

SEQ ID NO: 203170 - RNA, 19 nt, Artificial Sequence
  Description of Artificial Sequence: Synthetic oligonucleotide
auagacaaucuuuaugcuu

SEQ ID NO: 203171 - RNA, 19 nt, Artificial Sequence
  Description of Artificial Sequence: Synthetic oligonucleotide
guacauuccuucuagaggu

SEQ ID NO: 203172 - RNA, 19 nt, Artificial Sequence
  Description of Artificial Sequence: Synthetic oligonucleotide
caaaacaguuaaagguccc

SEQ ID NO: 203173 - RNA, 19 nt, Artificial Sequence
  Description of Artificial Sequence: Synthetic oligonucleotide
  modified_base (9)..(9): a, c, u, g, unknown or other
auguccagngcccagcaca

SEQ ID NO: 203174 - RNA, 19 nt, Artificial Sequence
  Description of Artificial Sequence: Synthetic oligonucleotide
uggauaagggaagaacuca

SEQ ID NO: 203175 - RNA, 19 nt, Artificial Sequence
  Description of Artificial Sequence: Synthetic oligonucleotide
ucacuacucguucauguuc

SEQ ID NO: 203176 - RNA, 19 nt, Artificial Sequence
  Description of Artificial Sequence: Synthetic oligonucleotide
uaccuuagaagggcaaagg

SEQ ID NO: 203177 - RNA, 19 nt, Artificial Sequence
  Description of Artificial Sequence: Synthetic oligonucleotide
ccucaauauauuaaggaac

SEQ ID NO: 203178 - RNA, 19 nt, Artificial Sequence
  Description of Artificial Sequence: Synthetic oligonucleotide
auucuauuacccacacccc

SEQ ID NO: 203179 - RNA, 19 nt, Artificial Sequence
  Description of Artificial Sequence: Synthetic oligonucleotide
cucgcuuacuggaggaucc

SEQ ID NO: 203180 - RNA, 19 nt, Artificial Sequence
  Description of Artificial Sequence: Synthetic oligonucleotide
ugccccuuaguaguguucg

SEQ ID NO: 203181 - RNA, 19 nt, Artificial Sequence
  Description of Artificial Sequence: Synthetic oligonucleotide
ggauguaucgaccauaugu

SEQ ID NO: 203182 - RNA, 19 nt, Artificial Sequence
  Description of Artificial Sequence: Synthetic oligonucleotide
caggacuaguucuuuuagg

SEQ ID NO: 203183 - RNA, 19 nt, Artificial Sequence
  Description of Artificial Sequence: Synthetic oligonucleotide
uggcuauucuauuacccac

SEQ ID NO: 203184 - RNA, 19 nt, Artificial Sequence
  Description of Artificial Sequence: Synthetic oligonucleotide
aguggugcuaaaucuucug

SEQ ID NO: 203185 - RNA, 19 nt, Artificial Sequence
  Description of Artificial Sequence: Synthetic oligonucleotide
gaccacggugucuucagag

SEQ ID NO: 203186 - RNA, 19 nt, Artificial Sequence
  Description of Artificial Sequence: Synthetic oligonucleotide
ucagacuaaccgcuucaug

SEQ ID NO: 203187 - RNA, 19 nt, Artificial Sequence
  Description of Artificial Sequence: Synthetic oligonucleotide
  modified_base (2)..(2): a, c, u, g, unknown or other
gngcccagcacacaaguuc

SEQ ID NO: 203188 - RNA, 19 nt, Artificial Sequence
  Description of Artificial Sequence: Synthetic oligonucleotide
  modified_base (16)..(16): a, c, u, g, unknown or other
uuccacuccucucccnccc

SEQ ID NO: 203189 - RNA, 19 nt, Artificial Sequence
  Description of Artificial Sequence: Synthetic oligonucleotide
ugcugcauauacagcgugc

SEQ ID NO: 203190 - RNA, 19 nt, Artificial Sequence
  Description of Artificial Sequence: Synthetic oligonucleotide
agagcggauguaucgacca

SEQ ID NO: 203191 - RNA, 19 nt, Artificial Sequence
  Description of Artificial Sequence: Synthetic oligonucleotide
aauugaauguuuaguguuu

SEQ ID NO: 203192 - RNA, 19 nt, Artificial Sequence
  Description of Artificial Sequence: Synthetic oligonucleotide
ccuaagguuggccugaagc

SEQ ID NO: 203193 - RNA, 19 nt, Artificial Sequence
  Description of Artificial Sequence: Synthetic oligonucleotide
acugacucccauucaauau

SEQ ID NO: 203194 - RNA, 19 nt, Artificial Sequence
  Description of Artificial Sequence: Synthetic oligonucleotide
uuuuccccgauagacaauc

SEQ ID NO: 203195 - RNA, 19 nt, Artificial Sequence
  Description of Artificial Sequence: Synthetic oligonucleotide
  modified_base (3)..(3): a, c, u, g, unknown or other
canagccagguucucagug

SEQ ID NO: 203196 - RNA, 19 nt, Artificial Sequence
  Description of Artificial Sequence: Synthetic oligonucleotide
guuggcacaauaguccagc

SEQ ID NO: 203197 - RNA, 19 nt, Artificial Sequence
  Description of Artificial Sequence: Synthetic oligonucleotide
auaucacccagauccccag

SEQ ID NO: 203198 - RNA, 19 nt, Artificial Sequence
  Description of Artificial Sequence: Synthetic oligonucleotide
  modified_base (19)..(19): a, c, u, g, unknown or other
ucgaugaacuugauaugan

SEQ ID NO: 203199 - RNA, 19 nt, Artificial Sequence
  Description of Artificial Sequence: Synthetic oligonucleotide
agcacccuaagguuggccu

SEQ ID NO: 203200 - RNA, 19 nt, Artificial Sequence
  Description of Artificial Sequence: Synthetic oligonucleotide
gacuaaccgcuucauguac

SEQ ID NO: 203201 - RNA, 19 nt, Artificial Sequence
  Description of Artificial Sequence: Synthetic oligonucleotide
  modified_base (18)..(18): a, c, u, g, unknown or other
aucgaccauauguccagng

SEQ ID NO: 203202 - RNA, 19 nt, Artificial Sequence
  Description of Artificial Sequence: Synthetic oligonucleotide
uccccgauagacaaucuuu

SEQ ID NO: 203203 - RNA, 19 nt, Artificial Sequence
  Description of Artificial Sequence: Synthetic oligonucleotide
uucgcaccacuucuggcug

SEQ ID NO: 203204 - RNA, 19 nt, Artificial Sequence
  Description of Artificial Sequence: Synthetic oligonucleotide
  modified_base (17)..(17): a, c, u, g, unknown or other
uuguuccgagcauccanag

SEQ ID NO: 203205 - RNA, 19 nt, Artificial Sequence
  Description of Artificial Sequence: Synthetic oligonucleotide
cuauuacccacaccccacc

SEQ ID NO: 203206 - RNA, 19 nt, Artificial Sequence
  Description of Artificial Sequence: Synthetic oligonucleotide
cuauaaggguaggaggcag

SEQ ID NO: 203207 - RNA, 19 nt, Artificial Sequence
  Description of Artificial Sequence: Synthetic oligonucleotide
  modified_base (8)..(8): a, c, u, g, unknown or other
uguccagngcccagcacac

SEQ ID NO: 203208 - RNA, 19 nt, Artificial Sequence
  Description of Artificial Sequence: Synthetic oligonucleotide
uggcauguuugccaauuaa

SEQ ID NO: 203209 - RNA, 19 nt, Artificial Sequence
  Description of Artificial Sequence: Synthetic oligonucleotide
uggcugaaauaagaguuca

SEQ ID NO: 203210 - RNA, 19 nt, Artificial Sequence
  Description of Artificial Sequence: Synthetic oligonucleotide
gaucgauccaguguucuga

SEQ ID NO: 203211 - RNA, 19 nt, Artificial Sequence
  Description of Artificial Sequence: Synthetic oligonucleotide
auguacaagucuuguaguu

SEQ ID NO: 203212 - RNA, 19 nt, Artificial Sequence
  Description of Artificial Sequence: Synthetic oligonucleotide
guaccucgcuuacuggagg

SEQ ID NO: 203213 - RNA, 19 nt, Artificial Sequence
  Description of Artificial Sequence: Synthetic oligonucleotide
  modified_base (10)..(10): a, c, u, g, unknown or other
uccucucccncccucccac

SEQ ID NO: 203214 - RNA, 19 nt, Artificial Sequence
  Description of Artificial Sequence: Synthetic oligonucleotide
uggcacaauaguccagcga

SEQ ID NO: 203215 - RNA, 19 nt, Artificial Sequence
  Description of Artificial Sequence: Synthetic oligonucleotide
cagacuaaccgcuucaugu

SEQ ID NO: 203216 - RNA, 19 nt, Artificial Sequence
  Description of Artificial Sequence: Synthetic oligonucleotide
guauauucgcaccacuucu

SEQ ID NO: 203217 - RNA, 19 nt, Artificial Sequence
  Description of Artificial Sequence: Synthetic oligonucleotide
agcgaagaguuccacuccu

SEQ ID NO: 203218 - RNA, 19 nt, Artificial Sequence
  Description of Artificial Sequence: Synthetic oligonucleotide
cuauucuauuacccacacc

SEQ ID NO: 203219 - RNA, 19 nt, Artificial Sequence
  Description of Artificial Sequence: Synthetic oligonucleotide
gauagacaaucuuuaugcu

SEQ ID NO: 203220 - RNA, 19 nt, Artificial Sequence
  Description of Artificial Sequence: Synthetic oligonucleotide
ucguucauguucacugguc

SEQ ID NO: 203221 - RNA, 19 nt, Artificial Sequence
  Description of Artificial Sequence: Synthetic oligonucleotide
agcuuacauuucuaaggca

SEQ ID NO: 203222 - RNA, 19 nt, Artificial Sequence
  Description of Artificial Sequence: Synthetic oligonucleotide
agaucgauccaguguucug

SEQ ID NO: 203223 - RNA, 19 nt, Artificial Sequence
  Description of Artificial Sequence: Synthetic oligonucleotide
ccuuaguaguguucggugg

SEQ ID NO: 203224 - RNA, 19 nt, Artificial Sequence
  Description of Artificial Sequence: Synthetic oligonucleotide
accgaaaacaagagcacca

SEQ ID NO: 203225 - RNA, 19 nt, Artificial Sequence
  Description of Artificial Sequence: Synthetic oligonucleotide
ucucaauacccuggggucu

SEQ ID NO: 203226 - RNA, 19 nt, Artificial Sequence
  Description of Artificial Sequence: Synthetic oligonucleotide
uucugagcgauucccugau

SEQ ID NO: 203227 - RNA, 19 nt, Artificial Sequence
  Description of Artificial Sequence: Synthetic oligonucleotide
acuauuagccacacuggga

SEQ ID NO: 203228 - RNA, 19 nt, Artificial Sequence
  Description of Artificial Sequence: Synthetic oligonucleotide
uggauagcuccagcggagg

SEQ ID NO: 203229 - RNA, 19 nt, Artificial Sequence
  Description of Artificial Sequence: Synthetic oligonucleotide
accaaguuaggaauggcau

SEQ ID NO: 203230 - RNA, 19 nt, Artificial Sequence
  Description of Artificial Sequence: Synthetic oligonucleotide
ccacucuggggcuauaagg

SEQ ID NO: 203231 - RNA, 19 nt, Artificial Sequence
  Description of Artificial Sequence: Synthetic oligonucleotide
gugcacuuuucuccuaccc

SEQ ID NO: 203232 - RNA, 19 nt, Artificial Sequence
  Description of Artificial Sequence: Synthetic oligonucleotide
ucuugguagcguucagccu

SEQ ID NO: 203233 - RNA, 19 nt, Artificial Sequence
  Description of Artificial Sequence: Synthetic oligonucleotide
agacuaaccgcuucaugua

SEQ ID NO: 203234 - RNA, 19 nt, Artificial Sequence
  Description of Artificial Sequence: Synthetic oligonucleotide
caccgaaaacaagagcacc

SEQ ID NO: 203235 - RNA, 19 nt, Artificial Sequence
  Description of Artificial Sequence: Synthetic oligonucleotide
uucacuacucguucauguu

SEQ ID NO: 203236 - RNA, 19 nt, Artificial Sequence
  Description of Artificial Sequence: Synthetic oligonucleotide
aguaccucgcuuacuggag

SEQ ID NO: 203237 - RNA, 19 nt, Artificial Sequence
  Description of Artificial Sequence: Synthetic oligonucleotide
uagcguucagccuguggga

SEQ ID NO: 203238 - RNA, 19 nt, Artificial Sequence
  Description of Artificial Sequence: Synthetic oligonucleotide
  modified_base (7)..(7): a, c, u, g, unknown or other
ucucccncccucccacaca

SEQ ID NO: 203239 - RNA, 19 nt, Artificial Sequence
  Description of Artificial Sequence: Synthetic oligonucleotide
ggggcuauaaggguaggag

SEQ ID NO: 203240 - RNA, 19 nt, Artificial Sequence
  Description of Artificial Sequence: Synthetic oligonucleotide
ucggugggaagguaggauu

SEQ ID NO: 203241 - RNA, 19 nt, Artificial Sequence
  Description of Artificial Sequence: Synthetic oligonucleotide
agcgugcaauuuucaguuc

SEQ ID NO: 203242 - RNA, 19 nt, Artificial Sequence
  Description of Artificial Sequence: Synthetic oligonucleotide
accacggugucuucagaga

SEQ ID NO: 203243 - RNA, 19 nt, Artificial Sequence
  Description of Artificial Sequence: Synthetic oligonucleotide
aggcuucuaggauggccgg

SEQ ID NO: 203244 - RNA, 19 nt, Artificial Sequence
  Description of Artificial Sequence: Synthetic oligonucleotide
uaccucgcuuacuggagga

SEQ ID NO: 203245 - RNA, 19 nt, Artificial Sequence
  Description of Artificial Sequence: Synthetic oligonucleotide
ugccagucucagacuaacc

SEQ ID NO: 203246 - RNA, 19 nt, Artificial Sequence
  Description of Artificial Sequence: Synthetic oligonucleotide
auaugcucagauggagcag

SEQ ID NO: 203247 - RNA, 19 nt, Artificial Sequence
  Description of Artificial Sequence: Synthetic oligonucleotide
  modified_base (6)..(6): a, c, u, g, unknown or other
cucccncccucccacacag

SEQ ID NO: 203248 - RNA, 19 nt, Artificial Sequence
  Description of Artificial Sequence: Synthetic oligonucleotide
gcaggacuaguucuuuuag

SEQ ID NO: 203249 - RNA, 19 nt, Artificial Sequence
  Description of Artificial Sequence: Synthetic oligonucleotide
uccuaccuuagaagggcaa

SEQ ID NO: 203250 - RNA, 19 nt, Artificial Sequence
  Description of Artificial Sequence: Synthetic oligonucleotide
gagcuaaucugcagcaguc

SEQ ID NO: 203251 - RNA, 19 nt, Artificial Sequence
  Description of Artificial Sequence: Synthetic oligonucleotide
auagccucgagcaggacua

SEQ ID NO: 203252 - RNA, 19 nt, Artificial Sequence
  Description of Artificial Sequence: Synthetic oligonucleotide
cagcgaagaguuccacucc

SEQ ID NO: 203253 - RNA, 19 nt, Artificial Sequence
  Description of Artificial Sequence: Synthetic oligonucleotide
uuccccgauagacaaucuu

SEQ ID NO: 203254 - RNA, 19 nt, Artificial Sequence
  Description of Artificial Sequence: Synthetic oligonucleotide
uuuccccgauagacaaucu

SEQ ID NO: 203255 - RNA, 19 nt, Artificial Sequence
  Description of Artificial Sequence: Synthetic oligonucleotide
gcuauucuauuacccacac

SEQ ID NO: 203256 - RNA, 19 nt, Artificial Sequence
  Description of Artificial Sequence: Synthetic oligonucleotide
ccaaguuaggaauggcaug

SEQ ID NO: 203257 - RNA, 19 nt, Artificial Sequence
  Description of Artificial Sequence: Synthetic oligonucleotide
guguucggugggaagguag

SEQ ID NO: 203258 - RNA, 19 nt, Artificial Sequence
  Description of Artificial Sequence: Synthetic oligonucleotide
aguccagcgaagaaaggaa

SEQ ID NO: 203259 - RNA, 19 nt, Artificial Sequence
  Description of Artificial Sequence: Synthetic oligonucleotide
agaagacaugccccuuagu

SEQ ID NO: 203260 - RNA, 19 nt, Artificial Sequence
  Description of Artificial Sequence: Synthetic oligonucleotide
auguauauucgcaccacuu

SEQ ID NO: 203261 - RNA, 19 nt, Artificial Sequence
  Description of Artificial Sequence: Synthetic oligonucleotide
gucuugauuaaaagucauc

SEQ ID NO: 203262 - RNA, 19 nt, Artificial Sequence
  Description of Artificial Sequence: Synthetic oligonucleotide
acuaaccgcuucauguaca

SEQ ID NO: 203263 - RNA, 19 nt, Artificial Sequence
  Description of Artificial Sequence: Synthetic oligonucleotide
aagggucaacagugguuaa

SEQ ID NO: 203264 - RNA, 19 nt, Artificial Sequence
  Description of Artificial Sequence: Synthetic oligonucleotide
agcuaaucugcagcagucu

SEQ ID NO: 203265 - RNA, 19 nt, Artificial Sequence
  Description of Artificial Sequence: Synthetic oligonucleotide
agcagagcggauguaucga

SEQ ID NO: 203266 - RNA, 19 nt, Artificial Sequence
  Description of Artificial Sequence: Synthetic oligonucleotide
cacacaaguucuggauagc

SEQ ID NO: 203267 - RNA, 19 nt, Artificial Sequence
  Description of Artificial Sequence: Synthetic oligonucleotide
  modified_base (19)..(19): a, c, u, g, unknown or other
uaucgaccauauguccagn

SEQ ID NO: 203268 - RNA, 19 nt, Artificial Sequence
  Description of Artificial Sequence: Synthetic oligonucleotide
ucgauccaguguucugacu

SEQ ID NO: 203269 - RNA, 19 nt, Artificial Sequence
  Description of Artificial Sequence: Synthetic oligonucleotide
uggggcuauaaggguagga

SEQ ID NO: 203270 - RNA, 19 nt, Artificial Sequence
  Description of Artificial Sequence: Synthetic oligonucleotide
aaggcacguggaagagagg

SEQ ID NO: 203271 - RNA, 19 nt, Artificial Sequence
  Description of Artificial Sequence: Synthetic oligonucleotide
cccuuaguaguguucggug

SEQ ID NO: 203272 - RNA, 19 nt, Artificial Sequence
  Description of Artificial Sequence: Synthetic oligonucleotide
cucaauacccuggggucuc

SEQ ID NO: 203273 - RNA, 19 nt, Artificial Sequence
  Description of Artificial Sequence: Synthetic oligonucleotide
acgcagagcagagcggaug

SEQ ID NO: 203274 - RNA, 19 nt, Artificial Sequence
  Description of Artificial Sequence: Synthetic oligonucleotide
caaaaccagccacuggaua

SEQ ID NO: 203275 - RNA, 19 nt, Artificial Sequence
  Description of Artificial Sequence: Synthetic oligonucleotide
  modified_base (4)..(4): a, c, u, g, unknown or other
cccncccucccacacaggc

SEQ ID NO: 203276 - RNA, 19 nt, Artificial Sequence
  Description of Artificial Sequence: Synthetic oligonucleotide
cccuguguaguguacucug

SEQ ID NO: 203277 - RNA, 19 nt, Artificial Sequence
  Description of Artificial Sequence: Synthetic oligonucleotide
cuggcagauucuuuaccaa

SEQ ID NO: 203278 - RNA, 19 nt, Artificial Sequence
  Description of Artificial Sequence: Synthetic oligonucleotide
uuccggcgagcuucacucc

SEQ ID NO: 203279 - RNA, 19 nt, Artificial Sequence
  Description of Artificial Sequence: Synthetic oligonucleotide
ucgcuuacuggaggauccc

SEQ ID NO: 203280 - RNA, 19 nt, Artificial Sequence
  Description of Artificial Sequence: Synthetic oligonucleotide
gggucaacagugguuaaga

SEQ ID NO: 203281 - RNA, 19 nt, Artificial Sequence
  Description of Artificial Sequence: Synthetic oligonucleotide
cagcgugcaauuuucaguu

SEQ ID NO: 203282 - RNA, 19 nt, Artificial Sequence
  Description of Artificial Sequence: Synthetic oligonucleotide
  modified_base (8)..(8): a, c, u, g, unknown or other
cucucccncccucccacac

SEQ ID NO: 203283 - RNA, 19 nt, Artificial Sequence
  Description of Artificial Sequence: Synthetic oligonucleotide
agaccacggugucuucaga

SEQ ID NO: 203284 - RNA, 19 nt, Artificial Sequence
  Description of Artificial Sequence: Synthetic oligonucleotide
ggcuauucuauuacccaca

SEQ ID NO: 203285 - RNA, 19 nt, Artificial Sequence
  Description of Artificial Sequence: Synthetic oligonucleotide
agcggauguaucgaccaua

SEQ ID NO: 203286 - RNA, 19 nt, Artificial Sequence
  Description of Artificial Sequence: Synthetic oligonucleotide
gauggccggcgucuugcuc

SEQ ID NO: 203287 - RNA, 19 nt, Artificial Sequence
  Description of Artificial Sequence: Synthetic oligonucleotide
gagcgauucccugauuugu

SEQ ID NO: 203288 - RNA, 19 nt, Artificial Sequence
  Description of Artificial Sequence: Synthetic oligonucleotide
  modified_base (12)..(12): a, c, u, g, unknown or other
ccgagcauccanagccagg

SEQ ID NO: 203289 - RNA, 19 nt, Artificial Sequence
  Description of Artificial Sequence: Synthetic oligonucleotide
gcuuacuggaggaucccug

SEQ ID NO: 203290 - RNA, 19 nt, Artificial Sequence
  Description of Artificial Sequence: Synthetic oligonucleotide
gcagagcggauguaucgac

SEQ ID NO: 203291 - RNA, 19 nt, Artificial Sequence
  Description of Artificial Sequence: Synthetic oligonucleotide
cuccuaccuuagaagggca

SEQ ID NO: 203292 - RNA, 19 nt, Artificial Sequence
  Description of Artificial Sequence: Synthetic oligonucleotide
ucugagcgauucccugauu

SEQ ID NO: 203293 - RNA, 19 nt, Artificial Sequence
  Description of Artificial Sequence: Synthetic oligonucleotide
agcguucagccugugggau

SEQ ID NO: 203294 - RNA, 19 nt, Artificial Sequence
  Description of Artificial Sequence: Synthetic oligonucleotide
cagcuacuaagggucaaca

SEQ ID NO: 203295 - RNA, 19 nt, Artificial Sequence
  Description of Artificial Sequence: Synthetic oligonucleotide
cugagcgauucccugauuu

SEQ ID NO: 203296 - RNA, 19 nt, Artificial Sequence
  Description of Artificial Sequence: Synthetic oligonucleotide
cacggugucuucagagaaa

SEQ ID NO: 203297 - RNA, 19 nt, Artificial Sequence
  Description of Artificial Sequence: Synthetic oligonucleotide
  modified_base (4)..(4): a, c, u, g, unknown or other
cagngcccagcacacaagu

SEQ ID NO: 203298 - RNA, 19 nt, Artificial Sequence
  Description of Artificial Sequence: Synthetic oligonucleotide
cuaaccgcuucauguacau

SEQ ID NO: 203299 - RNA, 19 nt, Artificial Sequence
  Description of Artificial Sequence: Synthetic oligonucleotide
uagccucgagcaggacuag

SEQ ID NO: 203300 - RNA, 19 nt, Artificial Sequence
  Description of Artificial Sequence: Synthetic oligonucleotide
cauugguggguugugcacu

SEQ ID NO: 203301 - RNA, 19 nt, Artificial Sequence
  Description of Artificial Sequence: Synthetic oligonucleotide
ccccaccgaaaacaagagc

SEQ ID NO: 203302 - RNA, 19 nt, Artificial Sequence
  Description of Artificial Sequence: Synthetic oligonucleotide
  modified_base (3)..(3): a, c, u, g, unknown or other
ccncccucccacacaggcc

SEQ ID NO: 203303 - RNA, 19 nt, Artificial Sequence
  Description of Artificial Sequence: Synthetic oligonucleotide
cacccuaagguuggccuga

SEQ ID NO: 203304 - RNA, 19 nt, Artificial Sequence
  Description of Artificial Sequence: Synthetic oligonucleotide
ggucaaguuagcagauuua

SEQ ID NO: 203305 - RNA, 19 nt, Artificial Sequence
  Description of Artificial Sequence: Synthetic oligonucleotide
  modified_base (3)..(3): a, c, u, g, unknown or other
agngcccagcacacaaguu

SEQ ID NO: 203306 - RNA, 19 nt, Artificial Sequence
  Description of Artificial Sequence: Synthetic oligonucleotide
gcugauucucuagcucaac

SEQ ID NO: 203307 - RNA, 19 nt, Artificial Sequence
  Description of Artificial Sequence: Synthetic oligonucleotide
cagaucgauccaguguucu

SEQ ID NO: 203308 - RNA, 19 nt, Artificial Sequence
  Description of Artificial Sequence: Synthetic oligonucleotide
gcccauggcuauucuauua

SEQ ID NO: 203309 - RNA, 19 nt, Artificial Sequence
  Description of Artificial Sequence: Synthetic oligonucleotide
ccagaucgauccaguguuc

SEQ ID NO: 203310 - RNA, 19 nt, Artificial Sequence
  Description of Artificial Sequence: Synthetic oligonucleotide
caauacccuggggucucuc

SEQ ID NO: 203311 - RNA, 19 nt, Artificial Sequence
  Description of Artificial Sequence: Synthetic oligonucleotide
ggcuucuaggauggccggc

SEQ ID NO: 203312 - RNA, 19 nt, Artificial Sequence
  Description of Artificial Sequence: Synthetic oligonucleotide
agccucgagcaggacuagu

SEQ ID NO: 203313 - RNA, 19 nt, Artificial Sequence
  Description of Artificial Sequence: Synthetic oligonucleotide
ccccgauagacaaucuuua

SEQ ID NO: 203314 - RNA, 19 nt, Artificial Sequence
  Description of Artificial Sequence: Synthetic oligonucleotide
ccacggugucuucagagaa

SEQ ID NO: 203315 - RNA, 19 nt, Artificial Sequence
  Description of Artificial Sequence: Synthetic oligonucleotide
ccucgcuuacuggaggauc

SEQ ID NO: 203316 - RNA, 19 nt, Artificial Sequence
  Description of Artificial Sequence: Synthetic oligonucleotide
cccagaucgauccaguguu

SEQ ID NO: 203317 - RNA, 19 nt, Artificial Sequence
  Description of Artificial Sequence: Synthetic oligonucleotide
gagcggauguaucgaccau

SEQ ID NO: 203318 - RNA, 19 nt, Artificial Sequence
  Description of Artificial Sequence: Synthetic oligonucleotide
  modified_base (7)..(7): a, c, u, g, unknown or other
guccagngcccagcacaca

SEQ ID NO: 203319 - RNA, 19 nt, Artificial Sequence
  Description of Artificial Sequence: Synthetic oligonucleotide
ccuaccuuagaagggcaaa

SEQ ID NO: 203320 - RNA, 19 nt, Artificial Sequence
  Description of Artificial Sequence: Synthetic oligonucleotide
uugguggguugugcacuuu

SEQ ID NO: 203321 - RNA, 19 nt, Artificial Sequence
  Description of Artificial Sequence: Synthetic oligonucleotide
cucagacuaaccgcuucau

SEQ ID NO: 203322 - RNA, 19 nt, Artificial Sequence
  Description of Artificial Sequence: Synthetic oligonucleotide
cccgaaguuuccggcgagc

SEQ ID NO: 203323 - RNA, 19 nt, Artificial Sequence
  Description of Artificial Sequence: Synthetic oligonucleotide
gcgaagaguuccacuccuc

SEQ ID NO: 203324 - RNA, 19 nt, Artificial Sequence
  Description of Artificial Sequence: Synthetic oligonucleotide
cccuaagguuggccugaag

SEQ ID NO: 203325 - RNA, 19 nt, Artificial Sequence
  Description of Artificial Sequence: Synthetic oligonucleotide
guacucugagggucacauu

SEQ ID NO: 203326 - RNA, 19 nt, Artificial Sequence
  Description of Artificial Sequence: Synthetic oligonucleotide
gcggauguaucgaccauau

SEQ ID NO: 203327 - RNA, 19 nt, Artificial Sequence
  Description of Artificial Sequence: Synthetic oligonucleotide
ccggcgagcuucacuccuc

SEQ ID NO: 203328 - RNA, 19 nt, Artificial Sequence
  Description of Artificial Sequence: Synthetic oligonucleotide
ccccagaucgauccagugu

SEQ ID NO: 203329 - RNA, 19 nt, Artificial Sequence
  Description of Artificial Sequence: Synthetic oligonucleotide
  modified_base (4)..(4): a, c, u, g, unknown or other
ccanagccagguucucagu

SEQ ID NO: 203330 - RNA, 19 nt, Artificial Sequence
  Description of Artificial Sequence: Synthetic oligonucleotide
ggauggccggcgucuugcu

SEQ ID NO: 203331 - RNA, 19 nt, Artificial Sequence
  Description of Artificial Sequence: Synthetic oligonucleotide
ccccuuaguaguguucggu

SEQ ID NO: 203332 - RNA, 19 nt, Artificial Sequence
  Description of Artificial Sequence: Synthetic oligonucleotide
ccgaaguuuccggcgagcu

SEQ ID NO: 203333 - RNA, 19 nt, Artificial Sequence
  Description of Artificial Sequence: Synthetic oligonucleotide
  modified_base (9)..(9): a, c, u, g, unknown or other
ccucucccncccucccaca

SEQ ID NO: 203334 - RNA, 19 nt, Artificial Sequence
  Description of Artificial Sequence: Synthetic oligonucleotide
cccagauccccagaucgau

SEQ ID NO: 203335 - RNA, 19 nt, Artificial Sequence
  Description of Artificial Sequence: Synthetic oligonucleotide
agaaucguggcacugaccc

SEQ ID NO: 203336 - RNA, 19 nt, Artificial Sequence
  Description of Artificial Sequence: Synthetic oligonucleotide
ugcuaaaacgagcagcccg

SEQ ID NO: 203337 - RNA, 19 nt, Artificial Sequence
  Description of Artificial Sequence: Synthetic oligonucleotide
auuuccucgccuuggauac

SEQ ID NO: 203338 - RNA, 19 nt, Artificial Sequence
  Description of Artificial Sequence: Synthetic oligonucleotide
uccauggacugcuaaaacg

SEQ ID NO: 203339 - RNA, 19 nt, Artificial Sequence
  Description of Artificial Sequence: Synthetic oligonucleotide
ucaccgucuacuuggaugg

SEQ ID NO: 203340 - RNA, 19 nt, Artificial Sequence
  Description of Artificial Sequence: Synthetic oligonucleotide
uugucaugaaaguaggccc

SEQ ID NO: 203341 - RNA, 19 nt, Artificial Sequence
  Description of Artificial Sequence: Synthetic oligonucleotide
cugacccuaacucauagcg

SEQ ID NO: 203342 - RNA, 19 nt, Artificial Sequence
  Description of Artificial Sequence: Synthetic oligonucleotide
ucuacuacgccauacccug

SEQ ID NO: 203343 - RNA, 19 nt, Artificial Sequence
  Description of Artificial Sequence: Synthetic oligonucleotide
auagcggaauuccaggugg

SEQ ID NO: 203344 - RNA, 19 nt, Artificial Sequence
  Description of Artificial Sequence: Synthetic oligonucleotide
gaaaaguuggucucccuug

SEQ ID NO: 203345 - RNA, 19 nt, Artificial Sequence
  Description of Artificial Sequence: Synthetic oligonucleotide
agcaauaucccaucgggug

SEQ ID NO: 203346 - RNA, 19 nt, Artificial Sequence
  Description of Artificial Sequence: Synthetic oligonucleotide
auagucaggauagccaccc

SEQ ID NO: 203347 - RNA, 19 nt, Artificial Sequence
  Description of Artificial Sequence: Synthetic oligonucleotide
ugucaugaaaguaggcccc

SEQ ID NO: 203348 - RNA, 19 nt, Artificial Sequence
  Description of Artificial Sequence: Synthetic oligonucleotide
auacccugcgccuuguugg

SEQ ID NO: 203349 - RNA, 19 nt, Artificial Sequence
  Description of Artificial Sequence: Synthetic oligonucleotide
gaaaguaggccccguauug

SEQ ID NO: 203350 - RNA, 19 nt, Artificial Sequence
  Description of Artificial Sequence: Synthetic oligonucleotide
uguugagacgcucugcaga

SEQ ID NO: 203351 - RNA, 19 nt, Artificial Sequence
  Description of Artificial Sequence: Synthetic oligonucleotide
ugaaugcucacaacggcug

SEQ ID NO: 203352 - RNA, 19 nt, Artificial Sequence
  Description of Artificial Sequence: Synthetic oligonucleotide
guacacagccuacaaagcc

SEQ ID NO: 203353 - RNA, 19 nt, Artificial Sequence
  Description of Artificial Sequence: Synthetic oligonucleotide
uuggauacgcagcucacgu

SEQ ID NO: 203354 - RNA, 19 nt, Artificial Sequence
  Description of Artificial Sequence: Synthetic oligonucleotide
ugugugguggugguggugg

SEQ ID NO: 203355 - RNA, 19 nt, Artificial Sequence
  Description of Artificial Sequence: Synthetic oligonucleotide
uacuacgccauacccugcg

SEQ ID NO: 203356 - RNA, 19 nt, Artificial Sequence
  Description of Artificial Sequence: Synthetic oligonucleotide
ucauauugguggcugggga

SEQ ID NO: 203357 - RNA, 19 nt, Artificial Sequence
  Description of Artificial Sequence: Synthetic oligonucleotide
uucuacuacgccauacccu

SEQ ID NO: 203358 - RNA, 19 nt, Artificial Sequence
  Description of Artificial Sequence: Synthetic oligonucleotide
ugcaauaccauacccucau

SEQ ID NO: 203359 - RNA, 19 nt, Artificial Sequence
  Description of Artificial Sequence: Synthetic oligonucleotide
uggaacucauauucacccg

SEQ ID NO: 203360 - RNA, 19 nt, Artificial Sequence
  Description of Artificial Sequence: Synthetic oligonucleotide
gacugcuaaaacgagcagc

SEQ ID NO: 203361 - RNA, 19 nt, Artificial Sequence
  Description of Artificial Sequence: Synthetic oligonucleotide
agcacaguagcucaggcua

SEQ ID NO: 203362 - RNA, 19 nt, Artificial Sequence
  Description of Artificial Sequence: Synthetic oligonucleotide
cuguaggugagguccaacc

SEQ ID NO: 203363 - RNA, 19 nt, Artificial Sequence
  Description of Artificial Sequence: Synthetic oligonucleotide
agauucuacuacgccauac

SEQ ID NO: 203364 - RNA, 19 nt, Artificial Sequence
  Description of Artificial Sequence: Synthetic oligonucleotide
uguugacggccacauuagg

SEQ ID NO: 203365 - RNA, 19 nt, Artificial Sequence
  Description of Artificial Sequence: Synthetic oligonucleotide
ugguccgaaccucaaauuc

SEQ ID NO: 203366 - RNA, 19 nt, Artificial Sequence
  Description of Artificial Sequence: Synthetic oligonucleotide
caucgcuagggacacaaag

SEQ ID NO: 203367 - RNA, 19 nt, Artificial Sequence
  Description of Artificial Sequence: Synthetic oligonucleotide
aguuugacagugagguacc

SEQ ID NO: 203368 - RNA, 19 nt, Artificial Sequence
  Description of Artificial Sequence: Synthetic oligonucleotide
caggucuaagccuuggaac

SEQ ID NO: 203369 - RNA, 19 nt, Artificial Sequence
  Description of Artificial Sequence: Synthetic oligonucleotide
gaacuaucguagcacugcc

SEQ ID NO: 203370 - RNA, 19 nt, Artificial Sequence
  Description of Artificial Sequence: Synthetic oligonucleotide
uguacggagggcuccacac

SEQ ID NO: 203371 - RNA, 19 nt, Artificial Sequence
  Description of Artificial Sequence: Synthetic oligonucleotide
uaccauacccucauucagu

SEQ ID NO: 203372 - RNA, 19 nt, Artificial Sequence
  Description of Artificial Sequence: Synthetic oligonucleotide
uuucgcagugcugucaccc

SEQ ID NO: 203373 - RNA, 19 nt, Artificial Sequence
  Description of Artificial Sequence: Synthetic oligonucleotide
auacgcagcucacguacac

SEQ ID NO: 203374 - RNA, 19 nt, Artificial Sequence
  Description of Artificial Sequence: Synthetic oligonucleotide
auggacugcuaaaacgagc

SEQ ID NO: 203375 - RNA, 19 nt, Artificial Sequence
  Description of Artificial Sequence: Synthetic oligonucleotide
ggcagaauugcccacaauc

SEQ ID NO: 203376 - RNA, 19 nt, Artificial Sequence
  Description of Artificial Sequence: Synthetic oligonucleotide
acgcagcucacguacacag

SEQ ID NO: 203377 - RNA, 19 nt, Artificial Sequence
  Description of Artificial Sequence: Synthetic oligonucleotide
aagacgggccucuccacug

SEQ ID NO: 203378 - RNA, 19 nt, Artificial Sequence
  Description of Artificial Sequence: Synthetic oligonucleotide
ucauagcggaauuccaggu

SEQ ID NO: 203379 - RNA, 19 nt, Artificial Sequence
  Description of Artificial Sequence: Synthetic oligonucleotide
uacggagggcuccacacca

SEQ ID NO: 203380 - RNA, 19 nt, Artificial Sequence
  Description of Artificial Sequence: Synthetic oligonucleotide
uugacaggggcagaauugc

SEQ ID NO: 203381 - RNA, 19 nt, Artificial Sequence
  Description of Artificial Sequence: Synthetic oligonucleotide
ugagguaccaggcgguaaa

SEQ ID NO: 203382 - RNA, 19 nt, Artificial Sequence
  Description of Artificial Sequence: Synthetic oligonucleotide
ugaaaguaggccccguauu

SEQ ID NO: 203383 - RNA, 19 nt, Artificial Sequence
  Description of Artificial Sequence: Synthetic oligonucleotide
aagcuguacggagggcucc

SEQ ID NO: 203384 - RNA, 19 nt, Artificial Sequence
  Description of Artificial Sequence: Synthetic oligonucleotide
ucgguccuggcaaguaggg

SEQ ID NO: 203385 - RNA, 19 nt, Artificial Sequence
  Description of Artificial Sequence: Synthetic oligonucleotide
cauggacugcuaaaacgag

SEQ ID NO: 203386 - RNA, 19 nt, Artificial Sequence
  Description of Artificial Sequence: Synthetic oligonucleotide
gauuuccucgccuuggaua

SEQ ID NO: 203387 - RNA, 19 nt, Artificial Sequence
  Description of Artificial Sequence: Synthetic oligonucleotide
ucacccgcaggcaugcaug

SEQ ID NO: 203388 - RNA, 19 nt, Artificial Sequence
  Description of Artificial Sequence: Synthetic oligonucleotide
cacccaccaaccuuggggc

SEQ ID NO: 203389 - RNA, 19 nt, Artificial Sequence
  Description of Artificial Sequence: Synthetic oligonucleotide
acauuaggaccuggggacc

SEQ ID NO: 203390 - RNA, 19 nt, Artificial Sequence
  Description of Artificial Sequence: Synthetic oligonucleotide
gaaugcucacaacggcugc

SEQ ID NO: 203391 - RNA, 19 nt, Artificial Sequence
  Description of Artificial Sequence: Synthetic oligonucleotide
augaaaguaggccccguau

SEQ ID NO: 203392 - RNA, 19 nt, Artificial Sequence
  Description of Artificial Sequence: Synthetic oligonucleotide
acuacgccauacccugcgc

SEQ ID NO: 203393 - RNA, 19 nt, Artificial Sequence
  Description of Artificial Sequence: Synthetic oligonucleotide
aggcgguaaacugagguug

SEQ ID NO: 203394 - RNA, 19 nt, Artificial Sequence
  Description of Artificial Sequence: Synthetic oligonucleotide
cauagcggaauuccaggug

SEQ ID NO: 203395 - RNA, 19 nt, Artificial Sequence
  Description of Artificial Sequence: Synthetic oligonucleotide
gacaggggcagaauugccc

SEQ ID NO: 203396 - RNA, 19 nt, Artificial Sequence
  Description of Artificial Sequence: Synthetic oligonucleotide
uucgcagugcugucacccg

SEQ ID NO: 203397 - RNA, 19 nt, Artificial Sequence
  Description of Artificial Sequence: Synthetic oligonucleotide
ucgccuuggauacgcagcu

SEQ ID NO: 203398 - RNA, 19 nt, Artificial Sequence
  Description of Artificial Sequence: Synthetic oligonucleotide
ugucacccgaugccacucg

SEQ ID NO: 203399 - RNA, 19 nt, Artificial Sequence
  Description of Artificial Sequence: Synthetic oligonucleotide
gaggcuucggagcaagguc

SEQ ID NO: 203400 - RNA, 19 nt, Artificial Sequence
  Description of Artificial Sequence: Synthetic oligonucleotide
cuuggauacgcagcucacg

SEQ ID NO: 203401 - RNA, 19 nt, Artificial Sequence
  Description of Artificial Sequence: Synthetic oligonucleotide
cucauauugguggcugggg

SEQ ID NO: 203402 - RNA, 19 nt, Artificial Sequence
  Description of Artificial Sequence: Synthetic oligonucleotide
aggggcguguguuggcccc

SEQ ID NO: 203403 - RNA, 19 nt, Artificial Sequence
  Description of Artificial Sequence: Synthetic oligonucleotide
uaucguagcacugccccac

SEQ ID NO: 203404 - RNA, 19 nt, Artificial Sequence
  Description of Artificial Sequence: Synthetic oligonucleotide
aguaggccccguauugccc

SEQ ID NO: 203405 - RNA, 19 nt, Artificial Sequence
  Description of Artificial Sequence: Synthetic oligonucleotide
ggcuauugcaauaccauac

SEQ ID NO: 203406 - RNA, 19 nt, Artificial Sequence
  Description of Artificial Sequence: Synthetic oligonucleotide
caauaucccaucgggugcc

SEQ ID NO: 203407 - RNA, 19 nt, Artificial Sequence
  Description of Artificial Sequence: Synthetic oligonucleotide
aaacgagcagcccggcuuu

SEQ ID NO: 203408 - RNA, 19 nt, Artificial Sequence
  Description of Artificial Sequence: Synthetic oligonucleotide
guuccguugacaggggcag

SEQ ID NO: 203409 - RNA, 19 nt, Artificial Sequence
  Description of Artificial Sequence: Synthetic oligonucleotide
cagccuacaaagccacugc

SEQ ID NO: 203410 - RNA, 19 nt, Artificial Sequence
  Description of Artificial Sequence: Synthetic oligonucleotide
gcaauaucccaucgggugc

SEQ ID NO: 203411 - RNA, 19 nt, Artificial Sequence
  Description of Artificial Sequence: Synthetic oligonucleotide
agcggaauuccagguggcc

SEQ ID NO: 203412 - RNA, 19 nt, Artificial Sequence
  Description of Artificial Sequence: Synthetic oligonucleotide
cuacgccauacccugcgcc

SEQ ID NO: 203413 - RNA, 19 nt, Artificial Sequence
  Description of Artificial Sequence: Synthetic oligonucleotide
acacggggaacuaucguag

SEQ ID NO: 203414 - RNA, 19 nt, Artificial Sequence
  Description of Artificial Sequence: Synthetic oligonucleotide
cauacccugcgccuuguug

SEQ ID NO: 203415 - RNA, 19 nt, Artificial Sequence
  Description of Artificial Sequence: Synthetic oligonucleotide
guggugguggugguggugg

SEQ ID NO: 203416 - RNA, 19 nt, Artificial Sequence
  Description of Artificial Sequence: Synthetic oligonucleotide
ucacacggggaacuaucgu

SEQ ID NO: 203417 - RNA, 19 nt, Artificial Sequence
  Description of Artificial Sequence: Synthetic oligonucleotide
uuuaagucccaguggccuu

SEQ ID NO: 203418 - RNA, 19 nt, Artificial Sequence
  Description of Artificial Sequence: Synthetic oligonucleotide
ccuaugaggggcaggggcg

SEQ ID NO: 203419 - RNA, 19 nt, Artificial Sequence
  Description of Artificial Sequence: Synthetic oligonucleotide
uagcggaauuccagguggc

SEQ ID NO: 203420 - RNA, 19 nt, Artificial Sequence
  Description of Artificial Sequence: Synthetic oligonucleotide
gccaucauuaauggggucc

SEQ ID NO: 203421 - RNA, 19 nt, Artificial Sequence
  Description of Artificial Sequence: Synthetic oligonucleotide
acggggaacuaucguagca

SEQ ID NO: 203422 - RNA, 19 nt, Artificial Sequence
  Description of Artificial Sequence: Synthetic oligonucleotide
ucacccgaugccacucgcc

SEQ ID NO: 203423 - RNA, 19 nt, Artificial Sequence
  Description of Artificial Sequence: Synthetic oligonucleotide
gaugggguggucacuguca

SEQ ID NO: 203424 - RNA, 19 nt, Artificial Sequence
  Description of Artificial Sequence: Synthetic oligonucleotide
guugacggccacauuagga

SEQ ID NO: 203425 - RNA, 19 nt, Artificial Sequence
  Description of Artificial Sequence: Synthetic oligonucleotide
guguugacggccacauuag

SEQ ID NO: 203426 - RNA, 19 nt, Artificial Sequence
  Description of Artificial Sequence: Synthetic oligonucleotide
ugauuuccucgccuuggau

SEQ ID NO: 203427 - RNA, 19 nt, Artificial Sequence
  Description of Artificial Sequence: Synthetic oligonucleotide
cagaccugacccuaacuca

SEQ ID NO: 203428 - RNA, 19 nt, Artificial Sequence
  Description of Artificial Sequence: Synthetic oligonucleotide
agcuggcgcacccacccuc

SEQ ID NO: 203429 - RNA, 19 nt, Artificial Sequence
  Description of Artificial Sequence: Synthetic oligonucleotide
ucucagaaucguggcacug

SEQ ID NO: 203430 - RNA, 19 nt, Artificial Sequence
  Description of Artificial Sequence: Synthetic oligonucleotide
gaugguugagcugucuucu

SEQ ID NO: 203431 - RNA, 19 nt, Artificial Sequence
  Description of Artificial Sequence: Synthetic oligonucleotide
caccauuccggcagggcug

SEQ ID NO: 203432 - RNA, 19 nt, Artificial Sequence
  Description of Artificial Sequence: Synthetic oligonucleotide
cagaaucguggcacugacc

SEQ ID NO: 203433 - RNA, 19 nt, Artificial Sequence
  Description of Artificial Sequence: Synthetic oligonucleotide
ccccguauugcccaggagc

SEQ ID NO: 203434 - RNA, 19 nt, Artificial Sequence
  Description of Artificial Sequence: Synthetic oligonucleotide
gagcccuaccagucacugg

SEQ ID NO: 203435 - RNA, 19 nt, Artificial Sequence
  Description of Artificial Sequence: Synthetic oligonucleotide
guccauggacugcuaaaac

SEQ ID NO: 203436 - RNA, 19 nt, Artificial Sequence
  Description of Artificial Sequence: Synthetic oligonucleotide
uuaagucccaguggccuuc

SEQ ID NO: 203437 - RNA, 19 nt, Artificial Sequence
  Description of Artificial Sequence: Synthetic oligonucleotide
uccccgaacggcccaggug

SEQ ID NO: 203438 - RNA, 19 nt, Artificial Sequence
  Description of Artificial Sequence: Synthetic oligonucleotide
ccauggacugcuaaaacga

SEQ ID NO: 203439 - RNA, 19 nt, Artificial Sequence
  Description of Artificial Sequence: Synthetic oligonucleotide
ccccgaacggcccaggugg

SEQ ID NO: 203440 - RNA, 19 nt, Artificial Sequence
  Description of Artificial Sequence: Synthetic oligonucleotide
cauugccuccgucucuuac

SEQ ID NO: 203441 - RNA, 19 nt, Artificial Sequence
  Description of Artificial Sequence: Synthetic oligonucleotide
gcaagcguggcauugccuc

SEQ ID NO: 203442 - RNA, 19 nt, Artificial Sequence
  Description of Artificial Sequence: Synthetic oligonucleotide
ucgcagugcugucacccga

SEQ ID NO: 203443 - RNA, 19 nt, Artificial Sequence
  Description of Artificial Sequence: Synthetic oligonucleotide
guacggagggcuccacacc

SEQ ID NO: 203444 - RNA, 19 nt, Artificial Sequence
  Description of Artificial Sequence: Synthetic oligonucleotide
accgucuacuuggauggag

SEQ ID NO: 203445 - RNA, 19 nt, Artificial Sequence
  Description of Artificial Sequence: Synthetic oligonucleotide
ccaaccaucgcuagggaca

SEQ ID NO: 203446 - RNA, 19 nt, Artificial Sequence
  Description of Artificial Sequence: Synthetic oligonucleotide
guaggccccguauugccca

SEQ ID NO: 203447 - RNA, 19 nt, Artificial Sequence
  Description of Artificial Sequence: Synthetic oligonucleotide
cacacggggaacuaucgua

SEQ ID NO: 203448 - RNA, 19 nt, Artificial Sequence
  Description of Artificial Sequence: Synthetic oligonucleotide
gacaccucgcccacacagc

SEQ ID NO: 203449 - RNA, 19 nt, Artificial Sequence
  Description of Artificial Sequence: Synthetic oligonucleotide
cuacuacgccauacccugc

SEQ ID NO: 203450 - RNA, 19 nt, Artificial Sequence
  Description of Artificial Sequence: Synthetic oligonucleotide
ugguggugguggugguggg

SEQ ID NO: 203451 - RNA, 19 nt, Artificial Sequence
  Description of Artificial Sequence: Synthetic oligonucleotide
cuuucgcagugcugucacc

SEQ ID NO: 203452 - RNA, 19 nt, Artificial Sequence
  Description of Artificial Sequence: Synthetic oligonucleotide
agacauagauggggugguc

SEQ ID NO: 203453 - RNA, 19 nt, Artificial Sequence
  Description of Artificial Sequence: Synthetic oligonucleotide
caaccaucgcuagggacac

SEQ ID NO: 203454 - RNA, 19 nt, Artificial Sequence
  Description of Artificial Sequence: Synthetic oligonucleotide
gcaguucugagcccuacca

SEQ ID NO: 203455 - RNA, 19 nt, Artificial Sequence
  Description of Artificial Sequence: Synthetic oligonucleotide
agccucggaagugagcacu

SEQ ID NO: 203456 - RNA, 19 nt, Artificial Sequence
  Description of Artificial Sequence: Synthetic oligonucleotide
agcucaggcuauugcaaua

SEQ ID NO: 203457 - RNA, 19 nt, Artificial Sequence
  Description of Artificial Sequence: Synthetic oligonucleotide
uuuccucgccuuggauacg

SEQ ID NO: 203458 - RNA, 19 nt, Artificial Sequence
  Description of Artificial Sequence: Synthetic oligonucleotide
uacgcagcucacguacaca

SEQ ID NO: 203459 - RNA, 19 nt, Artificial Sequence
  Description of Artificial Sequence: Synthetic oligonucleotide
ccggcuuuacuuuguagug

SEQ ID NO: 203460 - RNA, 19 nt, Artificial Sequence
  Description of Artificial Sequence: Synthetic oligonucleotide
agaccugacccuaacucau

SEQ ID NO: 203461 - RNA, 19 nt, Artificial Sequence
  Description of Artificial Sequence: Synthetic oligonucleotide
ccgucuacuuggauggagc

SEQ ID NO: 203462 - RNA, 19 nt, Artificial Sequence
  Description of Artificial Sequence: Synthetic oligonucleotide
uguggugguggugguggug

SEQ ID NO: 203463 - RNA, 19 nt, Artificial Sequence
  Description of Artificial Sequence: Synthetic oligonucleotide
cacugggccugacuuuaag

SEQ ID NO: 203464 - RNA, 19 nt, Artificial Sequence
  Description of Artificial Sequence: Synthetic oligonucleotide
gauacgcagcucacguaca

SEQ ID NO: 203465 - RNA, 19 nt, Artificial Sequence
  Description of Artificial Sequence: Synthetic oligonucleotide
ucaugaaaguaggccccgu

SEQ ID NO: 203466 - RNA, 19 nt, Artificial Sequence
  Description of Artificial Sequence: Synthetic oligonucleotide
ggucgguccuggcaaguag

SEQ ID NO: 203467 - RNA, 19 nt, Artificial Sequence
  Description of Artificial Sequence: Synthetic oligonucleotide
uggcgcacccacccuccag

SEQ ID NO: 203468 - RNA, 19 nt, Artificial Sequence
  Description of Artificial Sequence: Synthetic oligonucleotide
ggcgguaaacugagguugg

SEQ ID NO: 203469 - RNA, 19 nt, Artificial Sequence
  Description of Artificial Sequence: Synthetic oligonucleotide
agcagcccggcuuuacuuu

SEQ ID NO: 203470 - RNA, 19 nt, Artificial Sequence
  Description of Artificial Sequence: Synthetic oligonucleotide
agucacugggccugacuuu

SEQ ID NO: 203471 - RNA, 19 nt, Artificial Sequence
  Description of Artificial Sequence: Synthetic oligonucleotide
caggcuauugcaauaccau

SEQ ID NO: 203472 - RNA, 19 nt, Artificial Sequence
  Description of Artificial Sequence: Synthetic oligonucleotide
gucacccgaugccacucgc

SEQ ID NO: 203473 - RNA, 19 nt, Artificial Sequence
  Description of Artificial Sequence: Synthetic oligonucleotide
gugaaugcucacaacggcu

SEQ ID NO: 203474 - RNA, 19 nt, Artificial Sequence
  Description of Artificial Sequence: Synthetic oligonucleotide
cacaacggcugccagugaa

SEQ ID NO: 203475 - RNA, 19 nt, Artificial Sequence
  Description of Artificial Sequence: Synthetic oligonucleotide
guccaaggcugaugaaguc

SEQ ID NO: 203476 - RNA, 19 nt, Artificial Sequence
  Description of Artificial Sequence: Synthetic oligonucleotide
ucauccccgaacggcccag

SEQ ID NO: 203477 - RNA, 19 nt, Artificial Sequence
  Description of Artificial Sequence: Synthetic oligonucleotide
cugugaucccagaggagaa

SEQ ID NO: 203478 - RNA, 19 nt, Artificial Sequence
  Description of Artificial Sequence: Synthetic oligonucleotide
ccgaugaccagcuccucac

SEQ ID NO: 203479 - RNA, 19 nt, Artificial Sequence
  Description of Artificial Sequence: Synthetic oligonucleotide
acgagcagcccggcuuuac

SEQ ID NO: 203480 - RNA, 19 nt, Artificial Sequence
  Description of Artificial Sequence: Synthetic oligonucleotide
ggccuaggaagccauuguc

SEQ ID NO: 203481 - RNA, 19 nt, Artificial Sequence
  Description of Artificial Sequence: Synthetic oligonucleotide
cacccgaugccacucgcca

SEQ ID NO: 203482 - RNA, 19 nt, Artificial Sequence
  Description of Artificial Sequence: Synthetic oligonucleotide
caugaaaguaggccccgua

SEQ ID NO: 203483 - RNA, 19 nt, Artificial Sequence
  Description of Artificial Sequence: Synthetic oligonucleotide
uaggccccguauugcccag

SEQ ID NO: 203484 - RNA, 19 nt, Artificial Sequence
  Description of Artificial Sequence: Synthetic oligonucleotide
cacucggugccagcggccc

SEQ ID NO: 203485 - RNA, 19 nt, Artificial Sequence
  Description of Artificial Sequence: Synthetic oligonucleotide
gcucaggcuauugcaauac

SEQ ID NO: 203486 - RNA, 19 nt, Artificial Sequence
  Description of Artificial Sequence: Synthetic oligonucleotide
auaucccaucgggugccag

SEQ ID NO: 203487 - RNA, 19 nt, Artificial Sequence
  Description of Artificial Sequence: Synthetic oligonucleotide
cuggggaccggccgaugac

SEQ ID NO: 203488 - RNA, 19 nt, Artificial Sequence
  Description of Artificial Sequence: Synthetic oligonucleotide
guauuggugagagccggua

SEQ ID NO: 203489 - RNA, 19 nt, Artificial Sequence
  Description of Artificial Sequence: Synthetic oligonucleotide
cccguauugcccaggagca

SEQ ID NO: 203490 - RNA, 19 nt, Artificial Sequence
  Description of Artificial Sequence: Synthetic oligonucleotide
cucggugccagcggcccag

SEQ ID NO: 203491 - RNA, 19 nt, Artificial Sequence
  Description of Artificial Sequence: Synthetic oligonucleotide
cacgugugugggagcuggc

SEQ ID NO: 203492 - RNA, 19 nt, Artificial Sequence
  Description of Artificial Sequence: Synthetic oligonucleotide
gguuccguugacaggggca

SEQ ID NO: 203493 - RNA, 19 nt, Artificial Sequence
  Description of Artificial Sequence: Synthetic oligonucleotide
gcagcccggcuuuacuuug

SEQ ID NO: 203494 - RNA, 19 nt, Artificial Sequence
  Description of Artificial Sequence: Synthetic oligonucleotide
auccccgaacggcccaggu

SEQ ID NO: 203495 - RNA, 19 nt, Artificial Sequence
  Description of Artificial Sequence: Synthetic oligonucleotide
cugucacccgaugccacuc

SEQ ID NO: 203496 - RNA, 19 nt, Artificial Sequence
  Description of Artificial Sequence: Synthetic oligonucleotide
ugguggugguggugguggu

SEQ ID NO: 203497 - RNA, 19 nt, Artificial Sequence
  Description of Artificial Sequence: Synthetic oligonucleotide
agcaagcguggcauugccu

SEQ ID NO: 203498 - RNA, 19 nt, Artificial Sequence
  Description of Artificial Sequence: Synthetic oligonucleotide
ggugguggugguggugggg

SEQ ID NO: 203499 - RNA, 19 nt, Artificial Sequence
  Description of Artificial Sequence: Synthetic oligonucleotide
guaguccaaggcugaugaa

SEQ ID NO: 203500 - RNA, 19 nt, Artificial Sequence
  Description of Artificial Sequence: Synthetic oligonucleotide
cagcaauaucccaucgggu

SEQ ID NO: 203501 - RNA, 19 nt, Artificial Sequence
  Description of Artificial Sequence: Synthetic oligonucleotide
ggaccggccgaugaccagc

SEQ ID NO: 203502 - RNA, 19 nt, Artificial Sequence
  Description of Artificial Sequence: Synthetic oligonucleotide
gcugguccgaaccucaaau

SEQ ID NO: 203503 - RNA, 19 nt, Artificial Sequence
  Description of Artificial Sequence: Synthetic oligonucleotide
cagccucggaagugagcac

SEQ ID NO: 203504 - RNA, 19 nt, Artificial Sequence
  Description of Artificial Sequence: Synthetic oligonucleotide
cuguacggagggcuccaca

SEQ ID NO: 203505 - RNA, 19 nt, Artificial Sequence
  Description of Artificial Sequence: Synthetic oligonucleotide
uuccguugacaggggcaga

SEQ ID NO: 203506 - RNA, 19 nt, Artificial Sequence
  Description of Artificial Sequence: Synthetic oligonucleotide
ggggaacuaucguagcacu

SEQ ID NO: 203507 - RNA, 19 nt, Artificial Sequence
  Description of Artificial Sequence: Synthetic oligonucleotide
ugguguugacggccacauu

SEQ ID NO: 203508 - RNA, 19 nt, Artificial Sequence
  Description of Artificial Sequence: Synthetic oligonucleotide
gcguguguuggccccugcc

SEQ ID NO: 203509 - RNA, 19 nt, Artificial Sequence
  Description of Artificial Sequence: Synthetic oligonucleotide
gcucacacggggaacuauc

SEQ ID NO: 203510 - RNA, 19 nt, Artificial Sequence
  Description of Artificial Sequence: Synthetic oligonucleotide
agcguggcauugccuccgu

SEQ ID NO: 203511 - RNA, 19 nt, Artificial Sequence
  Description of Artificial Sequence: Synthetic oligonucleotide
agagggacgugggcugggu

SEQ ID NO: 203512 - RNA, 19 nt, Artificial Sequence
  Description of Artificial Sequence: Synthetic oligonucleotide
gcccggcuuuacuuuguag

SEQ ID NO: 203513 - RNA, 19 nt, Artificial Sequence
  Description of Artificial Sequence: Synthetic oligonucleotide
cccggcuuuacuuuguagu

SEQ ID NO: 203514 - RNA, 19 nt, Artificial Sequence
  Description of Artificial Sequence: Synthetic oligonucleotide
gugugugguggugguggug

SEQ ID NO: 203515 - RNA, 19 nt, Artificial Sequence
  Description of Artificial Sequence: Synthetic oligonucleotide
acucggugccagcggccca

SEQ ID NO: 203516 - RNA, 19 nt, Artificial Sequence
  Description of Artificial Sequence: Synthetic oligonucleotide
acggccacauuaggaccug

SEQ ID NO: 203517 - RNA, 19 nt, Artificial Sequence
  Description of Artificial Sequence: Synthetic oligonucleotide
gguguguugggacuucauu

SEQ ID NO: 203518 - RNA, 19 nt, Artificial Sequence
  Description of Artificial Sequence: Synthetic oligonucleotide
cauccccgaacggcccagg

SEQ ID NO: 203519 - RNA, 19 nt, Artificial Sequence
  Description of Artificial Sequence: Synthetic oligonucleotide
ugccuccgucucuuacaaa

SEQ ID NO: 203520 - RNA, 19 nt, Artificial Sequence
  Description of Artificial Sequence: Synthetic oligonucleotide
agcccggcuuuacuuugua

SEQ ID NO: 203521 - RNA, 19 nt, Artificial Sequence
  Description of Artificial Sequence: Synthetic oligonucleotide
cugucacaccuuccucaca

SEQ ID NO: 203522 - RNA, 19 nt, Artificial Sequence
  Description of Artificial Sequence: Synthetic oligonucleotide
caggcgguaaacugagguu

SEQ ID NO: 203523 - RNA, 19 nt, Artificial Sequence
  Description of Artificial Sequence: Synthetic oligonucleotide
gguggugguggugguggug

SEQ ID NO: 203524 - RNA, 19 nt, Artificial Sequence
  Description of Artificial Sequence: Synthetic oligonucleotide
gaccugacccuaacucaua

SEQ ID NO: 203525 - RNA, 19 nt, Artificial Sequence
  Description of Artificial Sequence: Synthetic oligonucleotide
gcguagcucauggugagua

SEQ ID NO: 203526 - RNA, 19 nt, Artificial Sequence
  Description of Artificial Sequence: Synthetic oligonucleotide
aggccccguauugcccagg

SEQ ID NO: 203527 - RNA, 19 nt, Artificial Sequence
  Description of Artificial Sequence: Synthetic oligonucleotide
cccacacgugugugggagc

SEQ ID NO: 203528 - RNA, 19 nt, Artificial Sequence
  Description of Artificial Sequence: Synthetic oligonucleotide
gcuggcgcacccacccucc

SEQ ID NO: 203529 - RNA, 19 nt, Artificial Sequence
  Description of Artificial Sequence: Synthetic oligonucleotide
gguccaaccgcuugccauu

SEQ ID NO: 203530 - RNA, 19 nt, Artificial Sequence
  Description of Artificial Sequence: Synthetic oligonucleotide
ccugcgccuuguuggcagc

SEQ ID NO: 203531 - RNA, 19 nt, Artificial Sequence
  Description of Artificial Sequence: Synthetic oligonucleotide
ccaccaauguagaccauau

SEQ ID NO: 203532 - RNA, 19 nt, Artificial Sequence
  Description of Artificial Sequence: Synthetic oligonucleotide
ggccccguauugcccagga

SEQ ID NO: 203533 - RNA, 19 nt, Artificial Sequence
  Description of Artificial Sequence: Synthetic oligonucleotide
gccccguauugcccaggag

SEQ ID NO: 203534 - RNA, 19 nt, Artificial Sequence
  Description of Artificial Sequence: Synthetic oligonucleotide
cagacaccucgcccacaca

SEQ ID NO: 203535 - RNA, 19 nt, Artificial Sequence
  Description of Artificial Sequence: Synthetic oligonucleotide
ggcguguguuggccccugc

SEQ ID NO: 203536 - RNA, 19 nt, Artificial Sequence
  Description of Artificial Sequence: Synthetic oligonucleotide
ggccugguguguugggacu

SEQ ID NO: 203537 - RNA, 19 nt, Artificial Sequence
  Description of Artificial Sequence: Synthetic oligonucleotide
gccagaccugacccuaacu

SEQ ID NO: 203538 - RNA, 19 nt, Artificial Sequence
  Description of Artificial Sequence: Synthetic oligonucleotide
ccuaacucauagcggaauu

SEQ ID NO: 203539 - RNA, 19 nt, Artificial Sequence
  Description of Artificial Sequence: Synthetic oligonucleotide
guguggugguggugguggu

SEQ ID NO: 203540 - RNA, 19 nt, Artificial Sequence
  Description of Artificial Sequence: Synthetic oligonucleotide
cuggcgcacccacccucca

SEQ ID NO: 203541 - RNA, 19 nt, Artificial Sequence
  Description of Artificial Sequence: Synthetic oligonucleotide
cagguguagccucggccau

SEQ ID NO: 203542 - RNA, 19 nt, Artificial Sequence
  Description of Artificial Sequence: Synthetic oligonucleotide
caucgggugccaguggcuu

SEQ ID NO: 203543 - RNA, 19 nt, Artificial Sequence
  Description of Artificial Sequence: Synthetic oligonucleotide
gaacuugcccugggagguu

SEQ ID NO: 203544 - RNA, 19 nt, Artificial Sequence
  Description of Artificial Sequence: Synthetic oligonucleotide
ccgguagugccagguagga

SEQ ID NO: 203545 - RNA, 19 nt, Artificial Sequence
  Description of Artificial Sequence: Synthetic oligonucleotide
caccgucuacuuggaugga

SEQ ID NO: 203546 - RNA, 19 nt, Artificial Sequence
  Description of Artificial Sequence: Synthetic oligonucleotide
gcguggcauugccuccguc

SEQ ID NO: 203547 - RNA, 19 nt, Artificial Sequence
  Description of Artificial Sequence: Synthetic oligonucleotide
ccaucgcuagggacacaaa

SEQ ID NO: 203548 - RNA, 19 nt, Artificial Sequence
  Description of Artificial Sequence: Synthetic oligonucleotide
caccaaccuuggggcucug

SEQ ID NO: 203549 - RNA, 19 nt, Artificial Sequence
  Description of Artificial Sequence: Synthetic oligonucleotide
ggcguagcucauggugagu

SEQ ID NO: 203550 - RNA, 19 nt, Artificial Sequence
  Description of Artificial Sequence: Synthetic oligonucleotide
cgagcagcccggcuuuacu

SEQ ID NO: 203551 - RNA, 19 nt, Artificial Sequence
  Description of Artificial Sequence: Synthetic oligonucleotide
gcggcaggagggugccuau

SEQ ID NO: 203552 - RNA, 19 nt, Artificial Sequence
  Description of Artificial Sequence: Synthetic oligonucleotide
ggucucccuugcagcuccu

SEQ ID NO: 203553 - RNA, 19 nt, Artificial Sequence
  Description of Artificial Sequence: Synthetic oligonucleotide
ccguugacaggggcagaau

SEQ ID NO: 203554 - RNA, 19 nt, Artificial Sequence
  Description of Artificial Sequence: Synthetic oligonucleotide
cgcucacacggggaacuau

SEQ ID NO: 203555 - RNA, 19 nt, Artificial Sequence
  Description of Artificial Sequence: Synthetic oligonucleotide
uuagcagagagucugacgg

SEQ ID NO: 203556 - RNA, 19 nt, Artificial Sequence
  Description of Artificial Sequence: Synthetic oligonucleotide
ugauuuaugcuccaaaucc

SEQ ID NO: 203557 - RNA, 19 nt, Artificial Sequence
  Description of Artificial Sequence: Synthetic oligonucleotide
ucuggaaugaaacucaaag

SEQ ID NO: 203558 - RNA, 19 nt, Artificial Sequence
  Description of Artificial Sequence: Synthetic oligonucleotide
aguugaaugaaguuggugg

SEQ ID NO: 203559 - RNA, 19 nt, Artificial Sequence
  Description of Artificial Sequence: Synthetic oligonucleotide
aauaguaaaggaccaacug

SEQ ID NO: 203560 - RNA, 19 nt, Artificial Sequence
  Description of Artificial Sequence: Synthetic oligonucleotide
aguaguuguaacuugugac

SEQ ID NO: 203561 - RNA, 19 nt, Artificial Sequence
  Description of Artificial Sequence: Synthetic oligonucleotide
uacacuaugacugaaacca

SEQ ID NO: 203562 - RNA, 19 nt, Artificial Sequence
  Description of Artificial Sequence: Synthetic oligonucleotide
ugaacaaagaugaaucuga

SEQ ID NO: 203563 - RNA, 19 nt, Artificial Sequence
  Description of Artificial Sequence: Synthetic oligonucleotide
ggagaaaauaauuagacug

SEQ ID NO: 203564 - RNA, 19 nt, Artificial Sequence
  Description of Artificial Sequence: Synthetic oligonucleotide
uguaacucggcuuuucugg

SEQ ID NO: 203565 - RNA, 19 nt, Artificial Sequence
  Description of Artificial Sequence: Synthetic oligonucleotide
aauauggggcuuauaaggc

SEQ ID NO: 203566 - RNA, 19 nt, Artificial Sequence
  Description of Artificial Sequence: Synthetic oligonucleotide
cagaugauaucuauuaggg

SEQ ID NO: 203567 - RNA, 19 nt, Artificial Sequence
  Description of Artificial Sequence: Synthetic oligonucleotide
aauaauuagacugugccaa

SEQ ID NO: 203568 - RNA, 19 nt, Artificial Sequence
  Description of Artificial Sequence: Synthetic oligonucleotide
aauuaaaccacagcacagg

SEQ ID NO: 203569 - RNA, 19 nt, Artificial Sequence
  Description of Artificial Sequence: Synthetic oligonucleotide
uauaaggcaccccauaaug

SEQ ID NO: 203570 - RNA, 19 nt, Artificial Sequence
  Description of Artificial Sequence: Synthetic oligonucleotide
uccuacuggaaucuggugg

SEQ ID NO: 203571 - RNA, 19 nt, Artificial Sequence
  Description of Artificial Sequence: Synthetic oligonucleotide
aaagucaacuguuuuggug

SEQ ID NO: 203572 - RNA, 19 nt, Artificial Sequence
  Description of Artificial Sequence: Synthetic oligonucleotide
aacggugcauccuuuaguc

SEQ ID NO: 203573 - RNA, 19 nt, Artificial Sequence
  Description of Artificial Sequence: Synthetic oligonucleotide
gauugaaagguuuaacaac

SEQ ID NO: 203574 - RNA, 19 nt, Artificial Sequence
  Description of Artificial Sequence: Synthetic oligonucleotide
uuuacacuaugacugaaac

SEQ ID NO: 203575 - RNA, 19 nt, Artificial Sequence
  Description of Artificial Sequence: Synthetic oligonucleotide
ucuuaguagggcaaggucu

SEQ ID NO: 203576 - RNA, 19 nt, Artificial Sequence
  Description of Artificial Sequence: Synthetic oligonucleotide
uauaaaaggggaguagggg

SEQ ID NO: 203577 - RNA, 19 nt, Artificial Sequence
  Description of Artificial Sequence: Synthetic oligonucleotide
gauaacuacaagaagucug

SEQ ID NO: 203578 - RNA, 19 nt, Artificial Sequence
  Description of Artificial Sequence: Synthetic oligonucleotide
aguaaguguugucaacugc

SEQ ID NO: 203579 - RNA, 19 nt, Artificial Sequence
  Description of Artificial Sequence: Synthetic oligonucleotide
ucuauuagggguucguuug

SEQ ID NO: 203580 - RNA, 19 nt, Artificial Sequence
  Description of Artificial Sequence: Synthetic oligonucleotide
gaaggagauaacuacaaga

SEQ ID NO: 203581 - RNA, 19 nt, Artificial Sequence
  Description of Artificial Sequence: Synthetic oligonucleotide
cuucuuuucaggaacgccc

SEQ ID NO: 203582 - RNA, 19 nt, Artificial Sequence
  Description of Artificial Sequence: Synthetic oligonucleotide
aaauucuagccauagcuaa

SEQ ID NO: 203583 - RNA, 19 nt, Artificial Sequence
  Description of Artificial Sequence: Synthetic oligonucleotide
agugccuugaacuugggca

SEQ ID NO: 203584 - RNA, 19 nt, Artificial Sequence
  Description of Artificial Sequence: Synthetic oligonucleotide
auacuugcggauuggauuc

SEQ ID NO: 203585 - RNA, 19 nt, Artificial Sequence
  Description of Artificial Sequence: Synthetic oligonucleotide
guaaaggaccaacugaugc

SEQ ID NO: 203586 - RNA, 19 nt, Artificial Sequence
  Description of Artificial Sequence: Synthetic oligonucleotide
gaacuuaggagacacgggc

SEQ ID NO: 203587 - RNA, 19 nt, Artificial Sequence
  Description of Artificial Sequence: Synthetic oligonucleotide
uuaaccacaaacucaucug

SEQ ID NO: 203588 - RNA, 19 nt, Artificial Sequence
  Description of Artificial Sequence: Synthetic oligonucleotide
gagaacuuaggagacacgg

SEQ ID NO: 203589 - RNA, 19 nt, Artificial Sequence
  Description of Artificial Sequence: Synthetic oligonucleotide
ugauggaacagaauguuuc

SEQ ID NO: 203590 - RNA, 19 nt, Artificial Sequence
  Description of Artificial Sequence: Synthetic oligonucleotide
uguagaagcuguuucguca

SEQ ID NO: 203591 - RNA, 19 nt, Artificial Sequence
  Description of Artificial Sequence: Synthetic oligonucleotide
ccugaugugacguaaagcg

SEQ ID NO: 203592 - RNA, 19 nt, Artificial Sequence
  Description of Artificial Sequence: Synthetic oligonucleotide
gaaauucacuuccuuauac

SEQ ID NO: 203593 - RNA, 19 nt, Artificial Sequence
  Description of Artificial Sequence: Synthetic oligonucleotide
uuuggacgagccuugaagc

SEQ ID NO: 203594 - RNA, 19 nt, Artificial Sequence
  Description of Artificial Sequence: Synthetic oligonucleotide
uggaguuuggcuuuucuca

SEQ ID NO: 203595 - RNA, 19 nt, Artificial Sequence
  Description of Artificial Sequence: Synthetic oligonucleotide
ugaugugacguaaagcgcu

SEQ ID NO: 203596 - RNA, 19 nt, Artificial Sequence
  Description of Artificial Sequence: Synthetic oligonucleotide
auagcuaaaaucaauagua

SEQ ID NO: 203597 - RNA, 19 nt, Artificial Sequence
  Description of Artificial Sequence: Synthetic oligonucleotide
aguauguuugccuuugacu

SEQ ID NO: 203598 - RNA, 19 nt, Artificial Sequence
  Description of Artificial Sequence: Synthetic oligonucleotide
agugaucuucaagaaaacc

SEQ ID NO: 203599 - RNA, 19 nt, Artificial Sequence
  Description of Artificial Sequence: Synthetic oligonucleotide
ucuugccucuggaauaugg

SEQ ID NO: 203600 - RNA, 19 nt, Artificial Sequence
  Description of Artificial Sequence: Synthetic oligonucleotide
uggaauuaccuucuuuuca

SEQ ID NO: 203601 - RNA, 19 nt, Artificial Sequence
  Description of Artificial Sequence: Synthetic oligonucleotide
agaugauaucuauuagggg

SEQ ID NO: 203602 - RNA, 19 nt, Artificial Sequence
  Description of Artificial Sequence: Synthetic oligonucleotide
uugaaagguuuaacaacgg

SEQ ID NO: 203603 - RNA, 19 nt, Artificial Sequence
  Description of Artificial Sequence: Synthetic oligonucleotide
uuggauucgccuuauguac

SEQ ID NO: 203604 - RNA, 19 nt, Artificial Sequence
  Description of Artificial Sequence: Synthetic oligonucleotide
ugaacuagagaaccagaca

SEQ ID NO: 203605 - RNA, 19 nt, Artificial Sequence
  Description of Artificial Sequence: Synthetic oligonucleotide
gacggaucgucucugagcc

SEQ ID NO: 203606 - RNA, 19 nt, Artificial Sequence
  Description of Artificial Sequence: Synthetic oligonucleotide
ucugguggagaacuuagga

SEQ ID NO: 203607 - RNA, 19 nt, Artificial Sequence
  Description of Artificial Sequence: Synthetic oligonucleotide
ucuggcaaguuaauggugu

SEQ ID NO: 203608 - RNA, 19 nt, Artificial Sequence
  Description of Artificial Sequence: Synthetic oligonucleotide
aggguaacaaguucucuuc

SEQ ID NO: 203609 - RNA, 19 nt, Artificial Sequence
  Description of Artificial Sequence: Synthetic oligonucleotide
ucgaacacugucuucuucc

SEQ ID NO: 203610 - RNA, 19 nt, Artificial Sequence
  Description of Artificial Sequence: Synthetic oligonucleotide
aaggagauaacuacaagaa

SEQ ID NO: 203611 - RNA, 19 nt, Artificial Sequence
  Description of Artificial Sequence: Synthetic oligonucleotide
aucuuaguagggcaagguc

SEQ ID NO: 203612 - RNA, 19 nt, Artificial Sequence
  Description of Artificial Sequence: Synthetic oligonucleotide
ucaaagguguaacucggcu

SEQ ID NO: 203613 - RNA, 19 nt, Artificial Sequence
  Description of Artificial Sequence: Synthetic oligonucleotide
ugacucucgaucuugaauu

SEQ ID NO: 203614 - RNA, 19 nt, Artificial Sequence
  Description of Artificial Sequence: Synthetic oligonucleotide
uuacacuaugacugaaacc

SEQ ID NO: 203615 - RNA, 19 nt, Artificial Sequence
  Description of Artificial Sequence: Synthetic oligonucleotide
ucaauaguaaaggaccaac

SEQ ID NO: 203616 - RNA, 19 nt, Artificial Sequence
  Description of Artificial Sequence: Synthetic oligonucleotide
ugaaagguuuaacaacggu

SEQ ID NO: 203617 - RNA, 19 nt, Artificial Sequence
  Description of Artificial Sequence: Synthetic oligonucleotide
ucuagccauagcuaaaauc

SEQ ID NO: 203618 - RNA, 19 nt, Artificial Sequence
  Description of Artificial Sequence: Synthetic oligonucleotide
guuguaacuugugacauug

SEQ ID NO: 203619 - RNA, 19 nt, Artificial Sequence
  Description of Artificial Sequence: Synthetic oligonucleotide
acacuugaaauucuagcca

SEQ ID NO: 203620 - RNA, 19 nt, Artificial Sequence
  Description of Artificial Sequence: Synthetic oligonucleotide
uauaguaaguguugucaac

SEQ ID NO: 203621 - RNA, 19 nt, Artificial Sequence
  Description of Artificial Sequence: Synthetic oligonucleotide
uuuagcaggaggucucuug

SEQ ID NO: 203622 - RNA, 19 nt, Artificial Sequence
  Description of Artificial Sequence: Synthetic oligonucleotide
aggagauaacuacaagaag

SEQ ID NO: 203623 - RNA, 19 nt, Artificial Sequence
  Description of Artificial Sequence: Synthetic oligonucleotide
uuaacaacggugcauccuu

SEQ ID NO: 203624 - RNA, 19 nt, Artificial Sequence
  Description of Artificial Sequence: Synthetic oligonucleotide
aauuuguauugcuggaguu

SEQ ID NO: 203625 - RNA, 19 nt, Artificial Sequence
  Description of Artificial Sequence: Synthetic oligonucleotide
uaaagccuaaaugaguuuc

SEQ ID NO: 203626 - RNA, 19 nt, Artificial Sequence
  Description of Artificial Sequence: Synthetic oligonucleotide
ugggagguuuagcaggagg

SEQ ID NO: 203627 - RNA, 19 nt, Artificial Sequence
  Description of Artificial Sequence: Synthetic oligonucleotide
guaguuguaacuugugaca

SEQ ID NO: 203628 - RNA, 19 nt, Artificial Sequence
  Description of Artificial Sequence: Synthetic oligonucleotide
ucuugggcaagaugggucc

SEQ ID NO: 203629 - RNA, 19 nt, Artificial Sequence
  Description of Artificial Sequence: Synthetic oligonucleotide
cuuagcagagagucugacg

SEQ ID NO: 203630 - RNA, 19 nt, Artificial Sequence
  Description of Artificial Sequence: Synthetic oligonucleotide
ucgguggccaguugaaagg

SEQ ID NO: 203631 - RNA, 19 nt, Artificial Sequence
  Description of Artificial Sequence: Synthetic oligonucleotide
cuuaguagggcaaggucug

SEQ ID NO: 203632 - RNA, 19 nt, Artificial Sequence
  Description of Artificial Sequence: Synthetic oligonucleotide
aagcgcuccuacuggaauc

SEQ ID NO: 203633 - RNA, 19 nt, Artificial Sequence
  Description of Artificial Sequence: Synthetic oligonucleotide
uuucgaaguucagacauga

SEQ ID NO: 203634 - RNA, 19 nt, Artificial Sequence
  Description of Artificial Sequence: Synthetic oligonucleotide
agcuaaaaucaauaguaaa

SEQ ID NO: 203635 - RNA, 19 nt, Artificial Sequence
  Description of Artificial Sequence: Synthetic oligonucleotide
cuucuuagcagagagucug

SEQ ID NO: 203636 - RNA, 19 nt, Artificial Sequence
  Description of Artificial Sequence: Synthetic oligonucleotide
uguuguuugauucgcucau

SEQ ID NO: 203637 - RNA, 19 nt, Artificial Sequence
  Description of Artificial Sequence: Synthetic oligonucleotide
cagagagucugacggaucg

SEQ ID NO: 203638 - RNA, 19 nt, Artificial Sequence
  Description of Artificial Sequence: Synthetic oligonucleotide
aaaucaaaaccaacaggcu

SEQ ID NO: 203639 - RNA, 19 nt, Artificial Sequence
  Description of Artificial Sequence: Synthetic oligonucleotide
gagauaacuacaagaaguc

SEQ ID NO: 203640 - RNA, 19 nt, Artificial Sequence
  Description of Artificial Sequence: Synthetic oligonucleotide
gagccuugaagcaagcugc

SEQ ID NO: 203641 - RNA, 19 nt, Artificial Sequence
  Description of Artificial Sequence: Synthetic oligonucleotide
guaacuugugacauugccc

SEQ ID NO: 203642 - RNA, 19 nt, Artificial Sequence
  Description of Artificial Sequence: Synthetic oligonucleotide
aagaucuuaguagggcaag

SEQ ID NO: 203643 - RNA, 19 nt, Artificial Sequence
  Description of Artificial Sequence: Synthetic oligonucleotide
uguugucugacuuccucca

SEQ ID NO: 203644 - RNA, 19 nt, Artificial Sequence
  Description of Artificial Sequence: Synthetic oligonucleotide
auuugguuugcaguauggg

SEQ ID NO: 203645 - RNA, 19 nt, Artificial Sequence
  Description of Artificial Sequence: Synthetic oligonucleotide
acaagaagucugaauaaag

SEQ ID NO: 203646 - RNA, 19 nt, Artificial Sequence
  Description of Artificial Sequence: Synthetic oligonucleotide
agccuaaaugaguuucuuc

SEQ ID NO: 203647 - RNA, 19 nt, Artificial Sequence
  Description of Artificial Sequence: Synthetic oligonucleotide
ugagcucguaucacaacug

SEQ ID NO: 203648 - RNA, 19 nt, Artificial Sequence
  Description of Artificial Sequence: Synthetic oligonucleotide
uuauaaggcaccccauaau

SEQ ID NO: 203649 - RNA, 19 nt, Artificial Sequence
  Description of Artificial Sequence: Synthetic oligonucleotide
aagugaucuucaagaaaac

SEQ ID NO: 203650 - RNA, 19 nt, Artificial Sequence
  Description of Artificial Sequence: Synthetic oligonucleotide
aaguugaaugaaguuggug

SEQ ID NO: 203651 - RNA, 19 nt, Artificial Sequence
  Description of Artificial Sequence: Synthetic oligonucleotide
acguaaagcgcuccuacug

SEQ ID NO: 203652 - RNA, 19 nt, Artificial Sequence
  Description of Artificial Sequence: Synthetic oligonucleotide
auuaccuucuuuucaggaa

SEQ ID NO: 203653 - RNA, 19 nt, Artificial Sequence
  Description of Artificial Sequence: Synthetic oligonucleotide
uaaguguugucaacugccu

SEQ ID NO: 203654 - RNA, 19 nt, Artificial Sequence
  Description of Artificial Sequence: Synthetic oligonucleotide
uuagggguucguuugugga

SEQ ID NO: 203655 - RNA, 19 nt, Artificial Sequence
  Description of Artificial Sequence: Synthetic oligonucleotide
aucaaaagauaaguaguug

SEQ ID NO: 203656 - RNA, 19 nt, Artificial Sequence
  Description of Artificial Sequence: Synthetic oligonucleotide
uggaaucugguggagaacu

SEQ ID NO: 203657 - RNA, 19 nt, Artificial Sequence
  Description of Artificial Sequence: Synthetic oligonucleotide
ugaaacucaaaguguucgu

SEQ ID NO: 203658 - RNA, 19 nt, Artificial Sequence
  Description of Artificial Sequence: Synthetic oligonucleotide
acgguauuugguuugcagu

SEQ ID NO: 203659 - RNA, 19 nt, Artificial Sequence
  Description of Artificial Sequence: Synthetic oligonucleotide
ugucccggguaucaaagga

SEQ ID NO: 203660 - RNA, 19 nt, Artificial Sequence
  Description of Artificial Sequence: Synthetic oligonucleotide
acagcccacgauuuaacug

SEQ ID NO: 203661 - RNA, 19 nt, Artificial Sequence
  Description of Artificial Sequence: Synthetic oligonucleotide
uggauucgccuuauguacc

SEQ ID NO: 203662 - RNA, 19 nt, Artificial Sequence
  Description of Artificial Sequence: Synthetic oligonucleotide
ucagcuugagucacacucu

SEQ ID NO: 203663 - RNA, 19 nt, Artificial Sequence
  Description of Artificial Sequence: Synthetic oligonucleotide
aguucucgggcuuugaauu

SEQ ID NO: 203664 - RNA, 19 nt, Artificial Sequence
  Description of Artificial Sequence: Synthetic oligonucleotide
cugaugugacguaaagcgc

SEQ ID NO: 203665 - RNA, 19 nt, Artificial Sequence
  Description of Artificial Sequence: Synthetic oligonucleotide
aacucggcuuuucuggagu

SEQ ID NO: 203666 - RNA, 19 nt, Artificial Sequence
  Description of Artificial Sequence: Synthetic oligonucleotide
auguuguuugauucgcuca

SEQ ID NO: 203667 - RNA, 19 nt, Artificial Sequence
  Description of Artificial Sequence: Synthetic oligonucleotide
ugacggaucgucucugagc

SEQ ID NO: 203668 - RNA, 19 nt, Artificial Sequence
  Description of Artificial Sequence: Synthetic oligonucleotide
uauguagaagcuguuucgu

SEQ ID NO: 203669 - RNA, 19 nt, Artificial Sequence
  Description of Artificial Sequence: Synthetic oligonucleotide
ugaaauucacuuccuuaua

SEQ ID NO: 203670 - RNA, 19 nt, Artificial Sequence
  Description of Artificial Sequence: Synthetic oligonucleotide
gaauuguguaaagugaucu

SEQ ID NO: 203671 - RNA, 19 nt, Artificial Sequence
  Description of Artificial Sequence: Synthetic oligonucleotide
gauaucuauuagggguucg

SEQ ID NO: 203672 - RNA, 19 nt, Artificial Sequence
  Description of Artificial Sequence: Synthetic oligonucleotide
agauaaguaguuguaacuu

SEQ ID NO: 203673 - RNA, 19 nt, Artificial Sequence
  Description of Artificial Sequence: Synthetic oligonucleotide
aaagcgcuccuacuggaau

SEQ ID NO: 203674 - RNA, 19 nt, Artificial Sequence
  Description of Artificial Sequence: Synthetic oligonucleotide
uugguucacagauuucuuc

SEQ ID NO: 203675 - RNA, 19 nt, Artificial Sequence
  Description of Artificial Sequence: Synthetic oligonucleotide
gauuggauucgccuuaugu

SEQ ID NO: 203676 - RNA, 19 nt, Artificial Sequence
  Description of Artificial Sequence: Synthetic oligonucleotide
uacaagaagucugaauaaa

SEQ ID NO: 203677 - RNA, 19 nt, Artificial Sequence
  Description of Artificial Sequence: Synthetic oligonucleotide
aguugaaagggcuccuccu

SEQ ID NO: 203678 - RNA, 19 nt, Artificial Sequence
  Description of Artificial Sequence: Synthetic oligonucleotide
aguaugggagucuucggau

SEQ ID NO: 203679 - RNA, 19 nt, Artificial Sequence
  Description of Artificial Sequence: Synthetic oligonucleotide
cucgguggccaguugaaag

SEQ ID NO: 203680 - RNA, 19 nt, Artificial Sequence
  Description of Artificial Sequence: Synthetic oligonucleotide
ucgcucaucugugaggaag

SEQ ID NO: 203681 - RNA, 19 nt, Artificial Sequence
  Description of Artificial Sequence: Synthetic oligonucleotide
agaauguuucugaagauuu

SEQ ID NO: 203682 - RNA, 19 nt, Artificial Sequence
  Description of Artificial Sequence: Synthetic oligonucleotide
ucacucgggcaggagaugg

SEQ ID NO: 203683 - RNA, 19 nt, Artificial Sequence
  Description of Artificial Sequence: Synthetic oligonucleotide
uuucuccgcaucucuacca

SEQ ID NO: 203684 - RNA, 19 nt, Artificial Sequence
  Description of Artificial Sequence: Synthetic oligonucleotide
cacgguauuugguuugcag

SEQ ID NO: 203685 - RNA, 19 nt, Artificial Sequence
  Description of Artificial Sequence: Synthetic oligonucleotide
aaagccuaaaugaguuucu

SEQ ID NO: 203686 - RNA, 19 nt, Artificial Sequence
  Description of Artificial Sequence: Synthetic oligonucleotide
agaacuuaggagacacggg

SEQ ID NO: 203687 - RNA, 19 nt, Artificial Sequence
  Description of Artificial Sequence: Synthetic oligonucleotide
aaugaaguugguggggcau

SEQ ID NO: 203688 - RNA, 19 nt, Artificial Sequence
  Description of Artificial Sequence: Synthetic oligonucleotide
aucuauuagggguucguuu

SEQ ID NO: 203689 - RNA, 19 nt, Artificial Sequence
  Description of Artificial Sequence: Synthetic oligonucleotide
augagucuacauuuucagu

SEQ ID NO: 203690 - RNA, 19 nt, Artificial Sequence
  Description of Artificial Sequence: Synthetic oligonucleotide
uaauguggcacagguugag

SEQ ID NO: 203691 - RNA, 19 nt, Artificial Sequence
  Description of Artificial Sequence: Synthetic oligonucleotide
uuggacgagccuugaagca

SEQ ID NO: 203692 - RNA, 19 nt, Artificial Sequence
  Description of Artificial Sequence: Synthetic oligonucleotide
caacuggcgcucuuugucc

SEQ ID NO: 203693 - RNA, 19 nt, Artificial Sequence
  Description of Artificial Sequence: Synthetic oligonucleotide
cuuauaaggcaccccauaa

SEQ ID NO: 203694 - RNA, 19 nt, Artificial Sequence
  Description of Artificial Sequence: Synthetic oligonucleotide
agaucuuaguagggcaagg

SEQ ID NO: 203695 - RNA, 19 nt, Artificial Sequence
  Description of Artificial Sequence: Synthetic oligonucleotide
uaguuguaacuugugacau

SEQ ID NO: 203696 - RNA, 19 nt, Artificial Sequence
  Description of Artificial Sequence: Synthetic oligonucleotide
guuuguggaaggcuucaac

SEQ ID NO: 203697 - RNA, 19 nt, Artificial Sequence
  Description of Artificial Sequence: Synthetic oligonucleotide
uguuucgucaaauguucuu

SEQ ID NO: 203698 - RNA, 19 nt, Artificial Sequence
  Description of Artificial Sequence: Synthetic oligonucleotide
agauaacuacaagaagucu

SEQ ID NO: 203699 - RNA, 19 nt, Artificial Sequence
  Description of Artificial Sequence: Synthetic oligonucleotide
agauuaggagaaaauaauu

SEQ ID NO: 203700 - RNA, 19 nt, Artificial Sequence
  Description of Artificial Sequence: Synthetic oligonucleotide
gaaauucuagccauagcua

SEQ ID NO: 203701 - RNA, 19 nt, Artificial Sequence
  Description of Artificial Sequence: Synthetic oligonucleotide
aguguucguccucugauuu

SEQ ID NO: 203702 - RNA, 19 nt, Artificial Sequence
  Description of Artificial Sequence: Synthetic oligonucleotide
aacuuaggagacacgggca

SEQ ID NO: 203703 - RNA, 19 nt, Artificial Sequence
  Description of Artificial Sequence: Synthetic oligonucleotide
uugcggauuggauucgccu

SEQ ID NO: 203704 - RNA, 19 nt, Artificial Sequence
  Description of Artificial Sequence: Synthetic oligonucleotide
gauggaacagaauguuucu

SEQ ID NO: 203705 - RNA, 19 nt, Artificial Sequence
  Description of Artificial Sequence: Synthetic oligonucleotide
uaacucggcuuuucuggag

SEQ ID NO: 203706 - RNA, 19 nt, Artificial Sequence
  Description of Artificial Sequence: Synthetic oligonucleotide
ucggcuuuucuggaguuug

SEQ ID NO: 203707 - RNA, 19 nt, Artificial Sequence
  Description of Artificial Sequence: Synthetic oligonucleotide
ucgggcuuugaauuuguau

SEQ ID NO: 203708 - RNA, 19 nt, Artificial Sequence
  Description of Artificial Sequence: Synthetic oligonucleotide
aggaacgcccacaacaucu

SEQ ID NO: 203709 - RNA, 19 nt, Artificial Sequence
  Description of Artificial Sequence: Synthetic oligonucleotide
auucguuucucaauuucca

SEQ ID NO: 203710 - RNA, 19 nt, Artificial Sequence
  Description of Artificial Sequence: Synthetic oligonucleotide
uaauuagacugugccaaaa

SEQ ID NO: 203711 - RNA, 19 nt, Artificial Sequence
  Description of Artificial Sequence: Synthetic oligonucleotide
aaguguucguccucugauu

SEQ ID NO: 203712 - RNA, 19 nt, Artificial Sequence
  Description of Artificial Sequence: Synthetic oligonucleotide
agcauucacagaacaauca

SEQ ID NO: 203713 - RNA, 19 nt, Artificial Sequence
  Description of Artificial Sequence: Synthetic oligonucleotide
auaauuagacugugccaaa

SEQ ID NO: 203714 - RNA, 19 nt, Artificial Sequence
  Description of Artificial Sequence: Synthetic oligonucleotide
guguaacucggcuuuucug

SEQ ID NO: 203715 - RNA, 19 nt, Artificial Sequence
  Description of Artificial Sequence: Synthetic oligonucleotide
uucgccuuauguaccaguu

SEQ ID NO: 203716 - RNA, 19 nt, Artificial Sequence
  Description of Artificial Sequence: Synthetic oligonucleotide
uguauugcuggaguuucuc

SEQ ID NO: 203717 - RNA, 19 nt, Artificial Sequence
  Description of Artificial Sequence: Synthetic oligonucleotide
aauucuagccauagcuaaa

SEQ ID NO: 203718 - RNA, 19 nt, Artificial Sequence
  Description of Artificial Sequence: Synthetic oligonucleotide
acagaacaaucaucugaug

SEQ ID NO: 203719 - RNA, 19 nt, Artificial Sequence
  Description of Artificial Sequence: Synthetic oligonucleotide
aaguguugucaacugccuu

SEQ ID NO: 203720 - RNA, 19 nt, Artificial Sequence
  Description of Artificial Sequence: Synthetic oligonucleotide
uugauucgcucaucuguga

SEQ ID NO: 203721 - RNA, 19 nt, Artificial Sequence
  Description of Artificial Sequence: Synthetic oligonucleotide
ggagauuaggagaaaauaa

SEQ ID NO: 203722 - RNA, 19 nt, Artificial Sequence
  Description of Artificial Sequence: Synthetic oligonucleotide
aaaguugaaugaaguuggu

SEQ ID NO: 203723 - RNA, 19 nt, Artificial Sequence
  Description of Artificial Sequence: Synthetic oligonucleotide
gagauuaggagaaaauaau

SEQ ID NO: 203724 - RNA, 19 nt, Artificial Sequence
  Description of Artificial Sequence: Synthetic oligonucleotide
ccuuuagucacucgggcag

SEQ ID NO: 203725 - RNA, 19 nt, Artificial Sequence
  Description of Artificial Sequence: Synthetic oligonucleotide
aagccuggcacgguauuug

SEQ ID NO: 203726 - RNA, 19 nt, Artificial Sequence
  Description of Artificial Sequence: Synthetic oligonucleotide
ucguaucacaacugguuua

SEQ ID NO: 203727 - RNA, 19 nt, Artificial Sequence
  Description of Artificial Sequence: Synthetic oligonucleotide
uuccucagaugauaucuau

SEQ ID NO: 203728 - RNA, 19 nt, Artificial Sequence
  Description of Artificial Sequence: Synthetic oligonucleotide
caguauguuugccuuugac

SEQ ID NO: 203729 - RNA, 19 nt, Artificial Sequence
  Description of Artificial Sequence: Synthetic oligonucleotide
aacaacggugcauccuuua

SEQ ID NO: 203730 - RNA, 19 nt, Artificial Sequence
  Description of Artificial Sequence: Synthetic oligonucleotide
uccucaaaccaugagucua

SEQ ID NO: 203731 - RNA, 19 nt, Artificial Sequence
  Description of Artificial Sequence: Synthetic oligonucleotide
agggguucguuuguggaag

SEQ ID NO: 203732 - RNA, 19 nt, Artificial Sequence
  Description of Artificial Sequence: Synthetic oligonucleotide
auaaggcaccccauaaugu

SEQ ID NO: 203733 - RNA, 19 nt, Artificial Sequence
  Description of Artificial Sequence: Synthetic oligonucleotide
auaucuauuagggguucgu

SEQ ID NO: 203734 - RNA, 19 nt, Artificial Sequence
  Description of Artificial Sequence: Synthetic oligonucleotide
auaaagccuaaaugaguuu

SEQ ID NO: 203735 - RNA, 19 nt, Artificial Sequence
  Description of Artificial Sequence: Synthetic oligonucleotide
gacaguggcuggaauuacc

SEQ ID NO: 203736 - RNA, 19 nt, Artificial Sequence
  Description of Artificial Sequence: Synthetic oligonucleotide
cuugcggauuggauucgcc

SEQ ID NO: 203737 - RNA, 19 nt, Artificial Sequence
  Description of Artificial Sequence: Synthetic oligonucleotide
auucuagccauagcuaaaa

SEQ ID NO: 203738 - RNA, 19 nt, Artificial Sequence
  Description of Artificial Sequence: Synthetic oligonucleotide
agucugacggaucgucucu

SEQ ID NO: 203739 - RNA, 19 nt, Artificial Sequence
  Description of Artificial Sequence: Synthetic oligonucleotide
gauuuaugcuccaaauccu

SEQ ID NO: 203740 - RNA, 19 nt, Artificial Sequence
  Description of Artificial Sequence: Synthetic oligonucleotide
uuguauugcuggaguuucu

SEQ ID NO: 203741 - RNA, 19 nt, Artificial Sequence
  Description of Artificial Sequence: Synthetic oligonucleotide
uggcacgguauuugguuug

SEQ ID NO: 203742 - RNA, 19 nt, Artificial Sequence
  Description of Artificial Sequence: Synthetic oligonucleotide
uuucuugccucuggaauau

SEQ ID NO: 203743 - RNA, 19 nt, Artificial Sequence
  Description of Artificial Sequence: Synthetic oligonucleotide
cacuaugacugaaaccaca

SEQ ID NO: 203744 - RNA, 19 nt, Artificial Sequence
  Description of Artificial Sequence: Synthetic oligonucleotide
cuuuagucacucgggcagg

SEQ ID NO: 203745 - RNA, 19 nt, Artificial Sequence
  Description of Artificial Sequence: Synthetic oligonucleotide
augugacguaaagcgcucc

SEQ ID NO: 203746 - RNA, 19 nt, Artificial Sequence
  Description of Artificial Sequence: Synthetic oligonucleotide
agccuggcacgguauuugg

SEQ ID NO: 203747 - RNA, 19 nt, Artificial Sequence
  Description of Artificial Sequence: Synthetic oligonucleotide
aguaaaggaccaacugaug

SEQ ID NO: 203748 - RNA, 19 nt, Artificial Sequence
  Description of Artificial Sequence: Synthetic oligonucleotide
acacuaugacugaaaccac

SEQ ID NO: 203749 - RNA, 19 nt, Artificial Sequence
  Description of Artificial Sequence: Synthetic oligonucleotide
gccuaaaugaguuucuucu

SEQ ID NO: 203750 - RNA, 19 nt, Artificial Sequence
  Description of Artificial Sequence: Synthetic oligonucleotide
acuugcggauuggauucgc

SEQ ID NO: 203751 - RNA, 19 nt, Artificial Sequence
  Description of Artificial Sequence: Synthetic oligonucleotide
ugcggauuggauucgccuu

SEQ ID NO: 203752 - RNA, 19 nt, Artificial Sequence
  Description of Artificial Sequence: Synthetic oligonucleotide
gggugagucugagaaaggg

SEQ ID NO: 203753 - RNA, 19 nt, Artificial Sequence
  Description of Artificial Sequence: Synthetic oligonucleotide
ugauaucuauuagggguuc

SEQ ID NO: 203754 - RNA, 19 nt, Artificial Sequence
  Description of Artificial Sequence: Synthetic oligonucleotide
guugucugacuuccuccag

SEQ ID NO: 203755 - RNA, 19 nt, Artificial Sequence
  Description of Artificial Sequence: Synthetic oligonucleotide
caagaucuuaguagggcaa

SEQ ID NO: 203756 - RNA, 19 nt, Artificial Sequence
  Description of Artificial Sequence: Synthetic oligonucleotide
ugccuucaaagguguaacu

SEQ ID NO: 203757 - RNA, 19 nt, Artificial Sequence
  Description of Artificial Sequence: Synthetic oligonucleotide
guaugggagucuucggauc

SEQ ID NO: 203758 - RNA, 19 nt, Artificial Sequence
  Description of Artificial Sequence: Synthetic oligonucleotide
cuggaagcaccucgaacac

SEQ ID NO: 203759 - RNA, 19 nt, Artificial Sequence
  Description of Artificial Sequence: Synthetic oligonucleotide
cacgggcacagucaauggc

SEQ ID NO: 203760 - RNA, 19 nt, Artificial Sequence
  Description of Artificial Sequence: Synthetic oligonucleotide
guaacucggcuuuucugga

SEQ ID NO: 203761 - RNA, 19 nt, Artificial Sequence
  Description of Artificial Sequence: Synthetic oligonucleotide
augauaucuauuagggguu

SEQ ID NO: 203762 - RNA, 19 nt, Artificial Sequence
  Description of Artificial Sequence: Synthetic oligonucleotide
ggugacuugguucacagau

SEQ ID NO: 203763 - RNA, 19 nt, Artificial Sequence
  Description of Artificial Sequence: Synthetic oligonucleotide
uguuuggacgagccuugaa

SEQ ID NO: 203764 - RNA, 19 nt, Artificial Sequence
  Description of Artificial Sequence: Synthetic oligonucleotide
cuguacuuuugcaggucac

SEQ ID NO: 203765 - RNA, 19 nt, Artificial Sequence
  Description of Artificial Sequence: Synthetic oligonucleotide
cucaaggaaguuuugcccu

SEQ ID NO: 203766 - RNA, 19 nt, Artificial Sequence
  Description of Artificial Sequence: Synthetic oligonucleotide
cauacuugcggauuggauu

SEQ ID NO: 203767 - RNA, 19 nt, Artificial Sequence
  Description of Artificial Sequence: Synthetic oligonucleotide
auggggcuuauaaggcacc

SEQ ID NO: 203768 - RNA, 19 nt, Artificial Sequence
  Description of Artificial Sequence: Synthetic oligonucleotide
ucugacggaucgucucuga

SEQ ID NO: 203769 - RNA, 19 nt, Artificial Sequence
  Description of Artificial Sequence: Synthetic oligonucleotide
acauauguagaagcuguuu

SEQ ID NO: 203770 - RNA, 19 nt, Artificial Sequence
  Description of Artificial Sequence: Synthetic oligonucleotide
auggauuagcugcuucuuu

SEQ ID NO: 203771 - RNA, 19 nt, Artificial Sequence
  Description of Artificial Sequence: Synthetic oligonucleotide
uacuugcggauuggauucg

SEQ ID NO: 203772 - RNA, 19 nt, Artificial Sequence
  Description of Artificial Sequence: Synthetic oligonucleotide
auuuaugcuccaaauccuu

SEQ ID NO: 203773 - RNA, 19 nt, Artificial Sequence
  Description of Artificial Sequence: Synthetic oligonucleotide
ucgccuuauguaccaguuc

SEQ ID NO: 203774 - RNA, 19 nt, Artificial Sequence
  Description of Artificial Sequence: Synthetic oligonucleotide
acuguuuuggugacuuggu

SEQ ID NO: 203775 - RNA, 19 nt, Artificial Sequence
  Description of Artificial Sequence: Synthetic oligonucleotide
acugccuucaaagguguaa

SEQ ID NO: 203776 - RNA, 19 nt, Artificial Sequence
  Description of Artificial Sequence: Synthetic oligonucleotide
uggacgagccuugaagcaa

SEQ ID NO: 203777 - RNA, 19 nt, Artificial Sequence
  Description of Artificial Sequence: Synthetic oligonucleotide
aguuguaacuugugacauu

SEQ ID NO: 203778 - RNA, 19 nt, Artificial Sequence
  Description of Artificial Sequence: Synthetic oligonucleotide
ggguaacaaguucucuucc

SEQ ID NO: 203779 - RNA, 19 nt, Artificial Sequence
  Description of Artificial Sequence: Synthetic oligonucleotide
uuagaaccuucugccuugc

SEQ ID NO: 203780 - RNA, 19 nt, Artificial Sequence
  Description of Artificial Sequence: Synthetic oligonucleotide
uaucuauuagggguucguu

SEQ ID NO: 203781 - RNA, 19 nt, Artificial Sequence
  Description of Artificial Sequence: Synthetic oligonucleotide
gaggguaacaaguucucuu

SEQ ID NO: 203782 - RNA, 19 nt, Artificial Sequence
  Description of Artificial Sequence: Synthetic oligonucleotide
cugacggaucgucucugag

SEQ ID NO: 203783 - RNA, 19 nt, Artificial Sequence
  Description of Artificial Sequence: Synthetic oligonucleotide
uuguuccucagaugauauc

SEQ ID NO: 203784 - RNA, 19 nt, Artificial Sequence
  Description of Artificial Sequence: Synthetic oligonucleotide
cacuuccacguuucuugcc

SEQ ID NO: 203785 - RNA, 19 nt, Artificial Sequence
  Description of Artificial Sequence: Synthetic oligonucleotide
gaugugacguaaagcgcuc

SEQ ID NO: 203786 - RNA, 19 nt, Artificial Sequence
  Description of Artificial Sequence: Synthetic oligonucleotide
gggcuuauaaggcacccca

SEQ ID NO: 203787 - RNA, 19 nt, Artificial Sequence
  Description of Artificial Sequence: Synthetic oligonucleotide
uggggcuuauaaggcaccc

SEQ ID NO: 203788 - RNA, 19 nt, Artificial Sequence
  Description of Artificial Sequence: Synthetic oligonucleotide
acgauuuaacugccuuuau

SEQ ID NO: 203789 - RNA, 19 nt, Artificial Sequence
  Description of Artificial Sequence: Synthetic oligonucleotide
cuccgugccugaugugacg

SEQ ID NO: 203790 - RNA, 19 nt, Artificial Sequence
  Description of Artificial Sequence: Synthetic oligonucleotide
gcaacuggcgcucuuuguc

SEQ ID NO: 203791 - RNA, 19 nt, Artificial Sequence
  Description of Artificial Sequence: Synthetic oligonucleotide
agguggaacaccaggcgca

SEQ ID NO: 203792 - RNA, 19 nt, Artificial Sequence
  Description of Artificial Sequence: Synthetic oligonucleotide
caccccauaauguggcaca

SEQ ID NO: 203793 - RNA, 19 nt, Artificial Sequence
  Description of Artificial Sequence: Synthetic oligonucleotide
ggaaugaaacucaaagugu

SEQ ID NO: 203794 - RNA, 19 nt, Artificial Sequence
  Description of Artificial Sequence: Synthetic oligonucleotide
gagguuuagcaggaggucu

SEQ ID NO: 203795 - RNA, 19 nt, Artificial Sequence
  Description of Artificial Sequence: Synthetic oligonucleotide
acggugcauccuuuaguca

SEQ ID NO: 203796 - RNA, 19 nt, Artificial Sequence
  Description of Artificial Sequence: Synthetic oligonucleotide
gguacaucucuuugcuuuc

SEQ ID NO: 203797 - RNA, 19 nt, Artificial Sequence
  Description of Artificial Sequence: Synthetic oligonucleotide
auggcagcucacuggacuu

SEQ ID NO: 203798 - RNA, 19 nt, Artificial Sequence
  Description of Artificial Sequence: Synthetic oligonucleotide
uaacaacggugcauccuuu

SEQ ID NO: 203799 - RNA, 19 nt, Artificial Sequence
  Description of Artificial Sequence: Synthetic oligonucleotide
guucuggaggguaacaagu

SEQ ID NO: 203800 - RNA, 19 nt, Artificial Sequence
  Description of Artificial Sequence: Synthetic oligonucleotide
ccucaaaccaugagucuac

SEQ ID NO: 203801 - RNA, 19 nt, Artificial Sequence
  Description of Artificial Sequence: Synthetic oligonucleotide
ugggcaagauggguccacc

SEQ ID NO: 203802 - RNA, 19 nt, Artificial Sequence
  Description of Artificial Sequence: Synthetic oligonucleotide
cacgauuuaacugccuuua

SEQ ID NO: 203803 - RNA, 19 nt, Artificial Sequence
  Description of Artificial Sequence: Synthetic oligonucleotide
gcaagcugccuccuucugc

SEQ ID NO: 203804 - RNA, 19 nt, Artificial Sequence
  Description of Artificial Sequence: Synthetic oligonucleotide
gggagauuaggagaaaaua

SEQ ID NO: 203805 - RNA, 19 nt, Artificial Sequence
  Description of Artificial Sequence: Synthetic oligonucleotide
ccuacuggaaucuggugga

SEQ ID NO: 203806 - RNA, 19 nt, Artificial Sequence
  Description of Artificial Sequence: Synthetic oligonucleotide
gcuguacuuuugcagguca

SEQ ID NO: 203807 - RNA, 19 nt, Artificial Sequence
  Description of Artificial Sequence: Synthetic oligonucleotide
uuuuggugacuugguucac

SEQ ID NO: 203808 - RNA, 19 nt, Artificial Sequence
  Description of Artificial Sequence: Synthetic oligonucleotide
ggauucgccuuauguacca

SEQ ID NO: 203809 - RNA, 19 nt, Artificial Sequence
  Description of Artificial Sequence: Synthetic oligonucleotide
cagguugagcucguaucac

SEQ ID NO: 203810 - RNA, 19 nt, Artificial Sequence
  Description of Artificial Sequence: Synthetic oligonucleotide
agcucguaucacaacuggu

SEQ ID NO: 203811 - RNA, 19 nt, Artificial Sequence
  Description of Artificial Sequence: Synthetic oligonucleotide
cucuccgugccugauguga

SEQ ID NO: 203812 - RNA, 19 nt, Artificial Sequence
  Description of Artificial Sequence: Synthetic oligonucleotide
ggggcaucaaaagauaagu

SEQ ID NO: 203813 - RNA, 19 nt, Artificial Sequence
  Description of Artificial Sequence: Synthetic oligonucleotide
cggugcauccuuuagucac

SEQ ID NO: 203814 - RNA, 19 nt, Artificial Sequence
  Description of Artificial Sequence: Synthetic oligonucleotide
cuacuggaaucugguggag

SEQ ID NO: 203815 - RNA, 19 nt, Artificial Sequence
  Description of Artificial Sequence: Synthetic oligonucleotide
ggacgagccuugaagcaag

SEQ ID NO: 203816 - RNA, 19 nt, Artificial Sequence
  Description of Artificial Sequence: Synthetic oligonucleotide
cuggaaucugguggagaac

SEQ ID NO: 203817 - RNA, 19 nt, Artificial Sequence
  Description of Artificial Sequence: Synthetic oligonucleotide
gccugaugugacguaaagc

SEQ ID NO: 203818 - RNA, 19 nt, Artificial Sequence
  Description of Artificial Sequence: Synthetic oligonucleotide
gggguucguuuguggaagg

SEQ ID NO: 203819 - RNA, 19 nt, Artificial Sequence
  Description of Artificial Sequence: Synthetic oligonucleotide
gcuuauaaggcaccccaua

SEQ ID NO: 203820 - RNA, 19 nt, Artificial Sequence
  Description of Artificial Sequence: Synthetic oligonucleotide
ucucuccgugccugaugug

SEQ ID NO: 203821 - RNA, 19 nt, Artificial Sequence
  Description of Artificial Sequence: Synthetic oligonucleotide
caggaggucucuugggcaa

SEQ ID NO: 203822 - RNA, 19 nt, Artificial Sequence
  Description of Artificial Sequence: Synthetic oligonucleotide
acucggcuuuucuggaguu

SEQ ID NO: 203823 - RNA, 19 nt, Artificial Sequence
  Description of Artificial Sequence: Synthetic oligonucleotide
caggaacgcccacaacauc

SEQ ID NO: 203824 - RNA, 19 nt, Artificial Sequence
  Description of Artificial Sequence: Synthetic oligonucleotide
agagagucugacggaucgu

SEQ ID NO: 203825 - RNA, 19 nt, Artificial Sequence
  Description of Artificial Sequence: Synthetic oligonucleotide
gcaggaggucucuugggca

SEQ ID NO: 203826 - RNA, 19 nt, Artificial Sequence
  Description of Artificial Sequence: Synthetic oligonucleotide
gacgagccuugaagcaagc

SEQ ID NO: 203827 - RNA, 19 nt, Artificial Sequence
  Description of Artificial Sequence: Synthetic oligonucleotide
gucugacggaucgucucug

SEQ ID NO: 203828 - RNA, 19 nt, Artificial Sequence
  Description of Artificial Sequence: Synthetic oligonucleotide
agcugcauacuugcggauu

SEQ ID NO: 203829 - RNA, 19 nt, Artificial Sequence
  Description of Artificial Sequence: Synthetic oligonucleotide
cucguaucacaacugguuu

SEQ ID NO: 203830 - RNA, 19 nt, Artificial Sequence
  Description of Artificial Sequence: Synthetic oligonucleotide
uucuugccucuggaauaug

SEQ ID NO: 203831 - RNA, 19 nt, Artificial Sequence
  Description of Artificial Sequence: Synthetic oligonucleotide
ccacguuucuugccucugg

SEQ ID NO: 203832 - RNA, 19 nt, Artificial Sequence
  Description of Artificial Sequence: Synthetic oligonucleotide
gguugagcucguaucacaa

SEQ ID NO: 203833 - RNA, 19 nt, Artificial Sequence
  Description of Artificial Sequence: Synthetic oligonucleotide
acgagccuugaagcaagcu

SEQ ID NO: 203834 - RNA, 19 nt, Artificial Sequence
  Description of Artificial Sequence: Synthetic oligonucleotide
cuauuagggguucguuugu

SEQ ID NO: 203835 - RNA, 19 nt, Artificial Sequence
  Description of Artificial Sequence: Synthetic oligonucleotide
ugccguuccuuggcucucc

SEQ ID NO: 203836 - RNA, 19 nt, Artificial Sequence
  Description of Artificial Sequence: Synthetic oligonucleotide
uucgcucaucugugaggaa

SEQ ID NO: 203837 - RNA, 19 nt, Artificial Sequence
  Description of Artificial Sequence: Synthetic oligonucleotide
cugaaaccacagcccacga

SEQ ID NO: 203838 - RNA, 19 nt, Artificial Sequence
  Description of Artificial Sequence: Synthetic oligonucleotide
caacggugcauccuuuagu

SEQ ID NO: 203839 - RNA, 19 nt, Artificial Sequence
  Description of Artificial Sequence: Synthetic oligonucleotide
ccaagcaacuuguucccca

SEQ ID NO: 203840 - RNA, 19 nt, Artificial Sequence
  Description of Artificial Sequence: Synthetic oligonucleotide
guucguuuguggaaggcuu

SEQ ID NO: 203841 - RNA, 19 nt, Artificial Sequence
  Description of Artificial Sequence: Synthetic oligonucleotide
cucggauccuguucuucaa

SEQ ID NO: 203842 - RNA, 19 nt, Artificial Sequence
  Description of Artificial Sequence: Synthetic oligonucleotide
caucugugaggaagugaaa

SEQ ID NO: 203843 - RNA, 19 nt, Artificial Sequence
  Description of Artificial Sequence: Synthetic oligonucleotide
caacugccuucaaaggugu

SEQ ID NO: 203844 - RNA, 19 nt, Artificial Sequence
  Description of Artificial Sequence: Synthetic oligonucleotide
caaggaaguuuugcccuga

SEQ ID NO: 203845 - RNA, 19 nt, Artificial Sequence
  Description of Artificial Sequence: Synthetic oligonucleotide
gucucaguucuggagggua

SEQ ID NO: 203846 - RNA, 19 nt, Artificial Sequence
  Description of Artificial Sequence: Synthetic oligonucleotide
acggaucgucucugagccu

SEQ ID NO: 203847 - RNA, 19 nt, Artificial Sequence
  Description of Artificial Sequence: Synthetic oligonucleotide
ggauuggauucgccuuaug

SEQ ID NO: 203848 - RNA, 19 nt, Artificial Sequence
  Description of Artificial Sequence: Synthetic oligonucleotide
ggcacgguauuugguuugc

SEQ ID NO: 203849 - RNA, 19 nt, Artificial Sequence
  Description of Artificial Sequence: Synthetic oligonucleotide
guuugcaguaugggagucu

SEQ ID NO: 203850 - RNA, 19 nt, Artificial Sequence
  Description of Artificial Sequence: Synthetic oligonucleotide
uggcuggaauuaccuucuu

SEQ ID NO: 203851 - RNA, 19 nt, Artificial Sequence
  Description of Artificial Sequence: Synthetic oligonucleotide
ggguucguuuguggaaggc

SEQ ID NO: 203852 - RNA, 19 nt, Artificial Sequence
  Description of Artificial Sequence: Synthetic oligonucleotide
gguucguuuguggaaggcu

SEQ ID NO: 203853 - RNA, 19 nt, Artificial Sequence
  Description of Artificial Sequence: Synthetic oligonucleotide
gguuugcaguaugggaguc

SEQ ID NO: 203854 - RNA, 19 nt, Artificial Sequence
  Description of Artificial Sequence: Synthetic oligonucleotide
gaaguugguggggcaucaa

SEQ ID NO: 203855 - RNA, 19 nt, Artificial Sequence
  Description of Artificial Sequence: Synthetic oligonucleotide
guucucgggcuuugaauuu

SEQ ID NO: 203856 - RNA, 19 nt, Artificial Sequence
  Description of Artificial Sequence: Synthetic oligonucleotide
gcaccccauaauguggcac

SEQ ID NO: 203857 - RNA, 19 nt, Artificial Sequence
  Description of Artificial Sequence: Synthetic oligonucleotide
cagucaauggcagcucacu

SEQ ID NO: 203858 - RNA, 19 nt, Artificial Sequence
  Description of Artificial Sequence: Synthetic oligonucleotide
cacauauguagaagcuguu

SEQ ID NO: 203859 - RNA, 19 nt, Artificial Sequence
  Description of Artificial Sequence: Synthetic oligonucleotide
ggacaguggcuggaauuac

SEQ ID NO: 203860 - RNA, 19 nt, Artificial Sequence
  Description of Artificial Sequence: Synthetic oligonucleotide
cuugggcaagaugggucca

SEQ ID NO: 203861 - RNA, 19 nt, Artificial Sequence
  Description of Artificial Sequence: Synthetic oligonucleotide
cgcaguauguuugccuuug

SEQ ID NO: 203862 - RNA, 19 nt, Artificial Sequence
  Description of Artificial Sequence: Synthetic oligonucleotide
gcggauuggauucgccuua

SEQ ID NO: 203863 - RNA, 19 nt, Artificial Sequence
  Description of Artificial Sequence: Synthetic oligonucleotide
ggcgcaguauguuugccuu

SEQ ID NO: 203864 - RNA, 19 nt, Artificial Sequence
  Description of Artificial Sequence: Synthetic oligonucleotide
guguuuggacgagccuuga

SEQ ID NO: 203865 - RNA, 19 nt, Artificial Sequence
  Description of Artificial Sequence: Synthetic oligonucleotide
gcucguaucacaacugguu

SEQ ID NO: 203866 - RNA, 19 nt, Artificial Sequence
  Description of Artificial Sequence: Synthetic oligonucleotide
ccucucgguggccaguuga

SEQ ID NO: 203867 - RNA, 19 nt, Artificial Sequence
  Description of Artificial Sequence: Synthetic oligonucleotide
gggcacacuuccacguuuc

SEQ ID NO: 203868 - RNA, 19 nt, Artificial Sequence
  Description of Artificial Sequence: Synthetic oligonucleotide
gggcacauauguagaagcu

SEQ ID NO: 203869 - RNA, 19 nt, Artificial Sequence
  Description of Artificial Sequence: Synthetic oligonucleotide
gcuccuacuggaaucuggu

SEQ ID NO: 203870 - RNA, 19 nt, Artificial Sequence
  Description of Artificial Sequence: Synthetic oligonucleotide
ggugggcacucggauccug

SEQ ID NO: 203871 - RNA, 19 nt, Artificial Sequence
  Description of Artificial Sequence: Synthetic oligonucleotide
ccuggcacgguauuugguu

SEQ ID NO: 203872 - RNA, 19 nt, Artificial Sequence
  Description of Artificial Sequence: Synthetic oligonucleotide
gggcaagauggguccaccu

SEQ ID NO: 203873 - RNA, 19 nt, Artificial Sequence
  Description of Artificial Sequence: Synthetic oligonucleotide
ccagagcaagcuucuugaa

SEQ ID NO: 203874 - RNA, 19 nt, Artificial Sequence
  Description of Artificial Sequence: Synthetic oligonucleotide
cuggaauauggggcuuaua

SEQ ID NO: 203875 - RNA, 19 nt, Artificial Sequence
  Description of Artificial Sequence: Synthetic oligonucleotide
gucacaagccuggcacggu

SEQ ID NO: 203876 - RNA, 19 nt, Artificial Sequence
  Description of Artificial Sequence: Synthetic oligonucleotide
gcauacuugcggauuggau

SEQ ID NO: 203877 - RNA, 19 nt, Artificial Sequence
  Description of Artificial Sequence: Synthetic oligonucleotide
cccggguaucaaaggagaa

SEQ ID NO: 203878 - RNA, 19 nt, Artificial Sequence
  Description of Artificial Sequence: Synthetic oligonucleotide
gcgcucuuugucccgggua

SEQ ID NO: 203879 - RNA, 19 nt, Artificial Sequence
  Description of Artificial Sequence: Synthetic oligonucleotide
ggcacacuuccacguuucu

SEQ ID NO: 203880 - RNA, 19 nt, Artificial Sequence
  Description of Artificial Sequence: Synthetic oligonucleotide
cccacgauuuaacugccuu

SEQ ID NO: 203881 - RNA, 19 nt, Artificial Sequence
  Description of Artificial Sequence: Synthetic oligonucleotide
caagccuggcacgguauuu

SEQ ID NO: 203882 - RNA, 19 nt, Artificial Sequence
  Description of Artificial Sequence: Synthetic oligonucleotide
ggcuuauaaggcaccccau

SEQ ID NO: 203883 - RNA, 19 nt, Artificial Sequence
  Description of Artificial Sequence: Synthetic oligonucleotide
gcacgguauuugguuugca

SEQ ID NO: 203884 - RNA, 19 nt, Artificial Sequence
  Description of Artificial Sequence: Synthetic oligonucleotide
ccauaauguggcacagguu

SEQ ID NO: 203885 - RNA, 19 nt, Artificial Sequence
  Description of Artificial Sequence: Synthetic oligonucleotide
cgugccugaugugacguaa

SEQ ID NO: 203886 - RNA, 19 nt, Artificial Sequence
  Description of Artificial Sequence: Synthetic oligonucleotide
ggaacgcccacaacaucuu

SEQ ID NO: 203887 - RNA, 19 nt, Artificial Sequence
  Description of Artificial Sequence: Synthetic oligonucleotide
gggcuccuccugaacuaga

SEQ ID NO: 203888 - RNA, 19 nt, Artificial Sequence
  Description of Artificial Sequence: Synthetic oligonucleotide
gcgcuccuacuggaaucug

SEQ ID NO: 203889 - RNA, 19 nt, Artificial Sequence
  Description of Artificial Sequence: Synthetic oligonucleotide
cucggcuuuucuggaguuu

SEQ ID NO: 203890 - RNA, 19 nt, Artificial Sequence
  Description of Artificial Sequence: Synthetic oligonucleotide
gcgcaguauguuugccuuu

SEQ ID NO: 203891 - RNA, 19 nt, Artificial Sequence
  Description of Artificial Sequence: Synthetic oligonucleotide
ggcacagguugagcucgua

SEQ ID NO: 203892 - RNA, 19 nt, Artificial Sequence
  Description of Artificial Sequence: Synthetic oligonucleotide
cggauuggauucgccuuau

SEQ ID NO: 203893 - RNA, 19 nt, Artificial Sequence
  Description of Artificial Sequence: Synthetic oligonucleotide
aaagguucgauuucaaagc

SEQ ID NO: 203894 - RNA, 19 nt, Artificial Sequence
  Description of Artificial Sequence: Synthetic oligonucleotide
auuguauggacucugauag

SEQ ID NO: 203895 - RNA, 19 nt, Artificial Sequence
  Description of Artificial Sequence: Synthetic oligonucleotide
uguuaaaggaaucauggug

SEQ ID NO: 203896 - RNA, 19 nt, Artificial Sequence
  Description of Artificial Sequence: Synthetic oligonucleotide
gaguuuuagaaucugggcg

SEQ ID NO: 203897 - RNA, 19 nt, Artificial Sequence
  Description of Artificial Sequence: Synthetic oligonucleotide
auaauggugaacaaaacac

SEQ ID NO: 203898 - RNA, 19 nt, Artificial Sequence
  Description of Artificial Sequence: Synthetic oligonucleotide
acauggaucaccuaugcuc

SEQ ID NO: 203899 - RNA, 19 nt, Artificial Sequence
  Description of Artificial Sequence: Synthetic oligonucleotide
auaaauagagcucaagaca

SEQ ID NO: 203900 - RNA, 19 nt, Artificial Sequence
  Description of Artificial Sequence: Synthetic oligonucleotide
aaggcuaacacuuucaaua

SEQ ID NO: 203901 - RNA, 19 nt, Artificial Sequence
  Description of Artificial Sequence: Synthetic oligonucleotide
uggaagaaucaucauaucc

SEQ ID NO: 203902 - RNA, 19 nt, Artificial Sequence
  Description of Artificial Sequence: Synthetic oligonucleotide
gcaauuaggacuuuggagg

SEQ ID NO: 203903 - RNA, 19 nt, Artificial Sequence
  Description of Artificial Sequence: Synthetic oligonucleotide
caaagguucgauuucaaag

SEQ ID NO: 203904 - RNA, 19 nt, Artificial Sequence
  Description of Artificial Sequence: Synthetic oligonucleotide
uguacuuacgccauacccc

SEQ ID NO: 203905 - RNA, 19 nt, Artificial Sequence
  Description of Artificial Sequence: Synthetic oligonucleotide
ugcguuucaugcaagauug

SEQ ID NO: 203906 - RNA, 19 nt, Artificial Sequence
  Description of Artificial Sequence: Synthetic oligonucleotide
aagcccaacuuacaguccc

SEQ ID NO: 203907 - RNA, 19 nt, Artificial Sequence
  Description of Artificial Sequence: Synthetic oligonucleotide
aauuuaggaagaagggccc

SEQ ID NO: 203908 - RNA, 19 nt, Artificial Sequence
  Description of Artificial Sequence: Synthetic oligonucleotide
acauacguaauaaaccucc

SEQ ID NO: 203909 - RNA, 19 nt, Artificial Sequence
  Description of Artificial Sequence: Synthetic oligonucleotide
ucauugauuagagugacug

SEQ ID NO: 203910 - RNA, 19 nt, Artificial Sequence
  Description of Artificial Sequence: Synthetic oligonucleotide
uauuuugcaggcacaacag

SEQ ID NO: 203911 - RNA, 19 nt, Artificial Sequence
  Description of Artificial Sequence: Synthetic oligonucleotide
ucgacaauggaugagagac

SEQ ID NO: 203912 - RNA, 19 nt, Artificial Sequence
  Description of Artificial Sequence: Synthetic oligonucleotide
uaagcauguaaacaagcug

SEQ ID NO: 203913 - RNA, 19 nt, Artificial Sequence
  Description of Artificial Sequence: Synthetic oligonucleotide
uggagaucgacaauggaug

SEQ ID NO: 203914 - RNA, 19 nt, Artificial Sequence
  Description of Artificial Sequence: Synthetic oligonucleotide
agacauacguaauaaaccu

SEQ ID NO: 203915 - RNA, 19 nt, Artificial Sequence
  Description of Artificial Sequence: Synthetic oligonucleotide
ugauagggcacaaagguuc

SEQ ID NO: 203916 - RNA, 19 nt, Artificial Sequence
  Description of Artificial Sequence: Synthetic oligonucleotide
ucuaauagcucucucucac

SEQ ID NO: 203917 - RNA, 19 nt, Artificial Sequence
  Description of Artificial Sequence: Synthetic oligonucleotide
uuggaauugagaaccagac

SEQ ID NO: 203918 - RNA, 19 nt, Artificial Sequence
  Description of Artificial Sequence: Synthetic oligonucleotide
aaaaccuuauuacguacgu

SEQ ID NO: 203919 - RNA, 19 nt, Artificial Sequence
  Description of Artificial Sequence: Synthetic oligonucleotide
uggaaaauggagaucgaca

SEQ ID NO: 203920 - RNA, 19 nt, Artificial Sequence
  Description of Artificial Sequence: Synthetic oligonucleotide
auugcggcguaguucagcc

SEQ ID NO: 203921 - RNA, 19 nt, Artificial Sequence
  Description of Artificial Sequence: Synthetic oligonucleotide
cuacaaguacuuuacgugc

SEQ ID NO: 203922 - RNA, 19 nt, Artificial Sequence
  Description of Artificial Sequence: Synthetic oligonucleotide
uacguaauaaaccuccaaa

SEQ ID NO: 203923 - RNA, 19 nt, Artificial Sequence
  Description of Artificial Sequence: Synthetic oligonucleotide
uugugggccaacacaaugg

SEQ ID NO: 203924 - RNA, 19 nt, Artificial Sequence
  Description of Artificial Sequence: Synthetic oligonucleotide
uaggcaguuacauggauca

SEQ ID NO: 203925 - RNA, 19 nt, Artificial Sequence
  Description of Artificial Sequence: Synthetic oligonucleotide
uccggugggaaaauaauug

SEQ ID NO: 203926 - RNA, 19 nt, Artificial Sequence
  Description of Artificial Sequence: Synthetic oligonucleotide
aaagugugcaaccuacaga

SEQ ID NO: 203927 - RNA, 19 nt, Artificial Sequence
  Description of Artificial Sequence: Synthetic oligonucleotide
auauaacaauuguauggac

SEQ ID NO: 203928 - RNA, 19 nt, Artificial Sequence
  Description of Artificial Sequence: Synthetic oligonucleotide
gacuccaauagcauaagag

SEQ ID NO: 203929 - RNA, 19 nt, Artificial Sequence
  Description of Artificial Sequence: Synthetic oligonucleotide
uaagagguggcaauuaaua

SEQ ID NO: 203930 - RNA, 19 nt, Artificial Sequence
  Description of Artificial Sequence: Synthetic oligonucleotide
ucauguugcaccgauauaa

SEQ ID NO: 203931 - RNA, 19 nt, Artificial Sequence
  Description of Artificial Sequence: Synthetic oligonucleotide
uuacguacguccuccaaag

SEQ ID NO: 203932 - RNA, 19 nt, Artificial Sequence
  Description of Artificial Sequence: Synthetic oligonucleotide
agauugauuggauagggaa

SEQ ID NO: 203933 - RNA, 19 nt, Artificial Sequence
  Description of Artificial Sequence: Synthetic oligonucleotide
uacgccaucaagucugggg

SEQ ID NO: 203934 - RNA, 19 nt, Artificial Sequence
  Description of Artificial Sequence: Synthetic oligonucleotide
aaugcuggaaacauguuaa

SEQ ID NO: 203935 - RNA, 19 nt, Artificial Sequence
  Description of Artificial Sequence: Synthetic oligonucleotide
uacgccauaccccagaaua

SEQ ID NO: 203936 - RNA, 19 nt, Artificial Sequence
  Description of Artificial Sequence: Synthetic oligonucleotide
agcauaagcagcugagcgg

SEQ ID NO: 203937 - RNA, 19 nt, Artificial Sequence
  Description of Artificial Sequence: Synthetic oligonucleotide
ucauggaauaagcauguaa

SEQ ID NO: 203938 - RNA, 19 nt, Artificial Sequence
  Description of Artificial Sequence: Synthetic oligonucleotide
ugcaccgauauaacaauug

SEQ ID NO: 203939 - RNA, 19 nt, Artificial Sequence
  Description of Artificial Sequence: Synthetic oligonucleotide
uuacauggaucaccuaugc

SEQ ID NO: 203940 - RNA, 19 nt, Artificial Sequence
  Description of Artificial Sequence: Synthetic oligonucleotide
guuaccugguaccaaagug

SEQ ID NO: 203941 - RNA, 19 nt, Artificial Sequence
  Description of Artificial Sequence: Synthetic oligonucleotide
cgauauaacaauuguaugg

SEQ ID NO: 203942 - RNA, 19 nt, Artificial Sequence
  Description of Artificial Sequence: Synthetic oligonucleotide
cuucauuccgaucaagaug

SEQ ID NO: 203943 - RNA, 19 nt, Artificial Sequence
  Description of Artificial Sequence: Synthetic oligonucleotide
guaaccaaggcaaugugcc

SEQ ID NO: 203944 - RNA, 19 nt, Artificial Sequence
  Description of Artificial Sequence: Synthetic oligonucleotide
aaaccaugcauaggguugg

SEQ ID NO: 203945 - RNA, 19 nt, Artificial Sequence
  Description of Artificial Sequence: Synthetic oligonucleotide
aagguucgauuucaaagca

SEQ ID NO: 203946 - RNA, 19 nt, Artificial Sequence
  Description of Artificial Sequence: Synthetic oligonucleotide
cuguacuuacgccauaccc

SEQ ID NO: 203947 - RNA, 19 nt, Artificial Sequence
  Description of Artificial Sequence: Synthetic oligonucleotide
aacaauuguauggacucug

SEQ ID NO: 203948 - RNA, 19 nt, Artificial Sequence
  Description of Artificial Sequence: Synthetic oligonucleotide
cauggaauaagcauguaaa

SEQ ID NO: 203949 - RNA, 19 nt, Artificial Sequence
  Description of Artificial Sequence: Synthetic oligonucleotide
agaacccuccugcacagac

SEQ ID NO: 203950 - RNA, 19 nt, Artificial Sequence
  Description of Artificial Sequence: Synthetic oligonucleotide
acgacugaguuacagggag

SEQ ID NO: 203951 - RNA, 19 nt, Artificial Sequence
  Description of Artificial Sequence: Synthetic oligonucleotide
aaccuacagacccucaggu

SEQ ID NO: 203952 - RNA, 19 nt, Artificial Sequence
  Description of Artificial Sequence: Synthetic oligonucleotide
gaagccguugagcuguccg

SEQ ID NO: 203953 - RNA, 19 nt, Artificial Sequence
  Description of Artificial Sequence: Synthetic oligonucleotide
aaacuugcguuucaugcaa

SEQ ID NO: 203954 - RNA, 19 nt, Artificial Sequence
  Description of Artificial Sequence: Synthetic oligonucleotide
gaagcugucccuaccaaag

SEQ ID NO: 203955 - RNA, 19 nt, Artificial Sequence
  Description of Artificial Sequence: Synthetic oligonucleotide
ugcggcguaguucagccag

SEQ ID NO: 203956 - RNA, 19 nt, Artificial Sequence
  Description of Artificial Sequence: Synthetic oligonucleotide
aauggagaucgacaaugga

SEQ ID NO: 203957 - RNA, 19 nt, Artificial Sequence
  Description of Artificial Sequence: Synthetic oligonucleotide
uaagagaccugaacaagaa

SEQ ID NO: 203958 - RNA, 19 nt, Artificial Sequence
  Description of Artificial Sequence: Synthetic oligonucleotide
cauuacaagucuuguaguc

SEQ ID NO: 203959 - RNA, 19 nt, Artificial Sequence
  Description of Artificial Sequence: Synthetic oligonucleotide
uccuuuccugaaaaggccc

SEQ ID NO: 203960 - RNA, 19 nt, Artificial Sequence
  Description of Artificial Sequence: Synthetic oligonucleotide
acguaauaaaccuccaaaa

SEQ ID NO: 203961 - RNA, 19 nt, Artificial Sequence
  Description of Artificial Sequence: Synthetic oligonucleotide
ugauuagagugacugcaac

SEQ ID NO: 203962 - RNA, 19 nt, Artificial Sequence
  Description of Artificial Sequence: Synthetic oligonucleotide
auaagcagcugagcggucc

SEQ ID NO: 203963 - RNA, 19 nt, Artificial Sequence
  Description of Artificial Sequence: Synthetic oligonucleotide
accgauauaacaauuguau

SEQ ID NO: 203964 - RNA, 19 nt, Artificial Sequence
  Description of Artificial Sequence: Synthetic oligonucleotide
auaggguugguuuacuaaa

SEQ ID NO: 203965 - RNA, 19 nt, Artificial Sequence
  Description of Artificial Sequence: Synthetic oligonucleotide
acgugcacauuacaaggac

SEQ ID NO: 203966 - RNA, 19 nt, Artificial Sequence
  Description of Artificial Sequence: Synthetic oligonucleotide
agauccagaucccugacaa

SEQ ID NO: 203967 - RNA, 19 nt, Artificial Sequence
  Description of Artificial Sequence: Synthetic oligonucleotide
gauugauuggauagggaac

SEQ ID NO: 203968 - RNA, 19 nt, Artificial Sequence
  Description of Artificial Sequence: Synthetic oligonucleotide
gagaugguuuaauuguaac

SEQ ID NO: 203969 - RNA, 19 nt, Artificial Sequence
  Description of Artificial Sequence: Synthetic oligonucleotide
ucuucauuccgaucaagau

SEQ ID NO: 203970 - RNA, 19 nt, Artificial Sequence
  Description of Artificial Sequence: Synthetic oligonucleotide
cacaagggugccaagugcc

SEQ ID NO: 203971 - RNA, 19 nt, Artificial Sequence
  Description of Artificial Sequence: Synthetic oligonucleotide
uccaacugaaacuugcguu

SEQ ID NO: 203972 - RNA, 19 nt, Artificial Sequence
  Description of Artificial Sequence: Synthetic oligonucleotide
gaacgugcccuccucaaug

SEQ ID NO: 203973 - RNA, 19 nt, Artificial Sequence
  Description of Artificial Sequence: Synthetic oligonucleotide
guaggugguaaauuguauc

SEQ ID NO: 203974 - RNA, 19 nt, Artificial Sequence
  Description of Artificial Sequence: Synthetic oligonucleotide
gaaggugagcauccaaaac

SEQ ID NO: 203975 - RNA, 19 nt, Artificial Sequence
  Description of Artificial Sequence: Synthetic oligonucleotide
auuacguacguccuccaaa

SEQ ID NO: 203976 - RNA, 19 nt, Artificial Sequence
  Description of Artificial Sequence: Synthetic oligonucleotide
gacaauggaugagagacuc

SEQ ID NO: 203977 - RNA, 19 nt, Artificial Sequence
  Description of Artificial Sequence: Synthetic oligonucleotide
uagggacagaauagcaagc

SEQ ID NO: 203978 - RNA, 19 nt, Artificial Sequence
  Description of Artificial Sequence: Synthetic oligonucleotide
ggagcuauugugcagugug

SEQ ID NO: 203979 - RNA, 19 nt, Artificial Sequence
  Description of Artificial Sequence: Synthetic oligonucleotide
uacuuuacgugcacauuac

SEQ ID NO: 203980 - RNA, 19 nt, Artificial Sequence
  Description of Artificial Sequence: Synthetic oligonucleotide
uacgugcacauuacaagga

SEQ ID NO: 203981 - RNA, 19 nt, Artificial Sequence
  Description of Artificial Sequence: Synthetic oligonucleotide
ucguggaagccguugagcu

SEQ ID NO: 203982 - RNA, 19 nt, Artificial Sequence
  Description of Artificial Sequence: Synthetic oligonucleotide
agcucauuggaccugguuu

SEQ ID NO: 203983 - RNA, 19 nt, Artificial Sequence
  Description of Artificial Sequence: Synthetic oligonucleotide
uugauuagagugacugcaa

SEQ ID NO: 203984 - RNA, 19 nt, Artificial Sequence
  Description of Artificial Sequence: Synthetic oligonucleotide
ggaauugagaaccagacau

SEQ ID NO: 203985 - RNA, 19 nt, Artificial Sequence
  Description of Artificial Sequence: Synthetic oligonucleotide
accucgaucuugcauauau

SEQ ID NO: 203986 - RNA, 19 nt, Artificial Sequence
  Description of Artificial Sequence: Synthetic oligonucleotide
uuggaggauuaggugauag

SEQ ID NO: 203987 - RNA, 19 nt, Artificial Sequence
  Description of Artificial Sequence: Synthetic oligonucleotide
acaagggauuuugcuaccc

SEQ ID NO: 203988 - RNA, 19 nt, Artificial Sequence
  Description of Artificial Sequence: Synthetic oligonucleotide
auaagagaccugaacaaga

SEQ ID NO: 203989 - RNA, 19 nt, Artificial Sequence
  Description of Artificial Sequence: Synthetic oligonucleotide
ggaaaauggagaucgacaa

SEQ ID NO: 203990 - RNA, 19 nt, Artificial Sequence
  Description of Artificial Sequence: Synthetic oligonucleotide
aaccagacauacguaauaa

SEQ ID NO: 203991 - RNA, 19 nt, Artificial Sequence
  Description of Artificial Sequence: Synthetic oligonucleotide
ggcaaugugccauugcggc

SEQ ID NO: 203992 - RNA, 19 nt, Artificial Sequence
  Description of Artificial Sequence: Synthetic oligonucleotide
cuuuacgugcacauuacaa

SEQ ID NO: 203993 - RNA, 19 nt, Artificial Sequence
  Description of Artificial Sequence: Synthetic oligonucleotide
guuacauggaucaccuaug

SEQ ID NO: 203994 - RNA, 19 nt, Artificial Sequence
  Description of Artificial Sequence: Synthetic oligonucleotide
uuacaaauucaugcugaca

SEQ ID NO: 203995 - RNA, 19 nt, Artificial Sequence
  Description of Artificial Sequence: Synthetic oligonucleotide
acgccaucaagucugggga

SEQ ID NO: 203996 - RNA, 19 nt, Artificial Sequence
  Description of Artificial Sequence: Synthetic oligonucleotide
agaucgacaauggaugaga

SEQ ID NO: 203997 - RNA, 19 nt, Artificial Sequence
  Description of Artificial Sequence: Synthetic oligonucleotide
guacuuacgccauacccca

SEQ ID NO: 203998 - RNA, 19 nt, Artificial Sequence
  Description of Artificial Sequence: Synthetic oligonucleotide
cauaauggaaaauggagau

SEQ ID NO: 203999 - RNA, 19 nt, Artificial Sequence
  Description of Artificial Sequence: Synthetic oligonucleotide
guacuuuacgugcacauua

SEQ ID NO: 204000 - RNA, 19 nt, Artificial Sequence
  Description of Artificial Sequence: Synthetic oligonucleotide
uaaaacccugggaggagcu

SEQ ID NO: 204001 - RNA, 19 nt, Artificial Sequence
  Description of Artificial Sequence: Synthetic oligonucleotide
uccccaaccgccguaagug

SEQ ID NO: 204002 - RNA, 19 nt, Artificial Sequence
  Description of Artificial Sequence: Synthetic oligonucleotide
uguagcuacaccagcuguu

SEQ ID NO: 204003 - RNA, 19 nt, Artificial Sequence
  Description of Artificial Sequence: Synthetic oligonucleotide
uggaugagagacuccaaua

SEQ ID NO: 204004 - RNA, 19 nt, Artificial Sequence
  Description of Artificial Sequence: Synthetic oligonucleotide
agcugaaaaguggagagau

SEQ ID NO: 204005 - RNA, 19 nt, Artificial Sequence
  Description of Artificial Sequence: Synthetic oligonucleotide
aguuaccugguaccaaagu

SEQ ID NO: 204006 - RNA, 19 nt, Artificial Sequence
  Description of Artificial Sequence: Synthetic oligonucleotide
uacauggaucaccuaugcu

SEQ ID NO: 204007 - RNA, 19 nt, Artificial Sequence
  Description of Artificial Sequence: Synthetic oligonucleotide
aacgugcccuccucaauga

SEQ ID NO: 204008 - RNA, 19 nt, Artificial Sequence
  Description of Artificial Sequence: Synthetic oligonucleotide
gaucgacaauggaugagag

SEQ ID NO: 204009 - RNA, 19 nt, Artificial Sequence
  Description of Artificial Sequence: Synthetic oligonucleotide
aacccuuuggaagaaucau

SEQ ID NO: 204010 - RNA, 19 nt, Artificial Sequence
  Description of Artificial Sequence: Synthetic oligonucleotide
agcaagcccaacuuacagu

SEQ ID NO: 204011 - RNA, 19 nt, Artificial Sequence
  Description of Artificial Sequence: Synthetic oligonucleotide
cugaucaggagcugaaaga

SEQ ID NO: 204012 - RNA, 19 nt, Artificial Sequence
  Description of Artificial Sequence: Synthetic oligonucleotide
cugucccuaccaaaguggc

SEQ ID NO: 204013 - RNA, 19 nt, Artificial Sequence
  Description of Artificial Sequence: Synthetic oligonucleotide
auggagaucgacaauggau

SEQ ID NO: 204014 - RNA, 19 nt, Artificial Sequence
  Description of Artificial Sequence: Synthetic oligonucleotide
aagccguugagcuguccgu

SEQ ID NO: 204015 - RNA, 19 nt, Artificial Sequence
  Description of Artificial Sequence: Synthetic oligonucleotide
uauuacguacguccuccaa

SEQ ID NO: 204016 - RNA, 19 nt, Artificial Sequence
  Description of Artificial Sequence: Synthetic oligonucleotide
agucauggaauaagcaugu

SEQ ID NO: 204017 - RNA, 19 nt, Artificial Sequence
  Description of Artificial Sequence: Synthetic oligonucleotide
ugagaaccagacauacgua

SEQ ID NO: 204018 - RNA, 19 nt, Artificial Sequence
  Description of Artificial Sequence: Synthetic oligonucleotide
caauuaggacuuuggagga

SEQ ID NO: 204019 - RNA, 19 nt, Artificial Sequence
  Description of Artificial Sequence: Synthetic oligonucleotide
uagccuacgccaucaaguc

SEQ ID NO: 204020 - RNA, 19 nt, Artificial Sequence
  Description of Artificial Sequence: Synthetic oligonucleotide
aagcugucccuaccaaagu

SEQ ID NO: 204021 - RNA, 19 nt, Artificial Sequence
  Description of Artificial Sequence: Synthetic oligonucleotide
aucaccuaugcucacuaua

SEQ ID NO: 204022 - RNA, 19 nt, Artificial Sequence
  Description of Artificial Sequence: Synthetic oligonucleotide
ugagcgguccacuuuggua

SEQ ID NO: 204023 - RNA, 19 nt, Artificial Sequence
  Description of Artificial Sequence: Synthetic oligonucleotide
acuuuacgugcacauuaca

SEQ ID NO: 204024 - RNA, 19 nt, Artificial Sequence
  Description of Artificial Sequence: Synthetic oligonucleotide
gagaucgacaauggaugag

SEQ ID NO: 204025 - RNA, 19 nt, Artificial Sequence
  Description of Artificial Sequence: Synthetic oligonucleotide
acuugcguuucaugcaaga

SEQ ID NO: 204026 - RNA, 19 nt, Artificial Sequence
  Description of Artificial Sequence: Synthetic oligonucleotide
acuuacgccauaccccaga

SEQ ID NO: 204027 - RNA, 19 nt, Artificial Sequence
  Description of Artificial Sequence: Synthetic oligonucleotide
ugucccuaccaaaguggcc

SEQ ID NO: 204028 - RNA, 19 nt, Artificial Sequence
  Description of Artificial Sequence: Synthetic oligonucleotide
acaauggaugagagacucc

SEQ ID NO: 204029 - RNA, 19 nt, Artificial Sequence
  Description of Artificial Sequence: Synthetic oligonucleotide
uucaaguaugaagggauuu

SEQ ID NO: 204030 - RNA, 19 nt, Artificial Sequence
  Description of Artificial Sequence: Synthetic oligonucleotide
uuauuacguacguccucca

SEQ ID NO: 204031 - RNA, 19 nt, Artificial Sequence
  Description of Artificial Sequence: Synthetic oligonucleotide
gacauacguaauaaaccuc

SEQ ID NO: 204032 - RNA, 19 nt, Artificial Sequence
  Description of Artificial Sequence: Synthetic oligonucleotide
cuacaguguuuguuucuag

SEQ ID NO: 204033 - RNA, 19 nt, Artificial Sequence
  Description of Artificial Sequence: Synthetic oligonucleotide
cauaggguugguuuacuaa

SEQ ID NO: 204034 - RNA, 19 nt, Artificial Sequence
  Description of Artificial Sequence: Synthetic oligonucleotide
augcauaggguugguuuac

SEQ ID NO: 204035 - RNA, 19 nt, Artificial Sequence
  Description of Artificial Sequence: Synthetic oligonucleotide
aucgacaauggaugagaga

SEQ ID NO: 204036 - RNA, 19 nt, Artificial Sequence
  Description of Artificial Sequence: Synthetic oligonucleotide
gccguaaguguccacaaug

SEQ ID NO: 204037 - RNA, 19 nt, Artificial Sequence
  Description of Artificial Sequence: Synthetic oligonucleotide
gucccuaccaaaguggcca

SEQ ID NO: 204038 - RNA, 19 nt, Artificial Sequence
  Description of Artificial Sequence: Synthetic oligonucleotide
aagguauuuugcaggcaca

SEQ ID NO: 204039 - RNA, 19 nt, Artificial Sequence
  Description of Artificial Sequence: Synthetic oligonucleotide
gguauaauccuuuccugaa

SEQ ID NO: 204040 - RNA, 19 nt, Artificial Sequence
  Description of Artificial Sequence: Synthetic oligonucleotide
agucaaacuacaaguacuu

SEQ ID NO: 204041 - RNA, 19 nt, Artificial Sequence
  Description of Artificial Sequence: Synthetic oligonucleotide
ugggcacuucccaugggaa

SEQ ID NO: 204042 - RNA, 19 nt, Artificial Sequence
  Description of Artificial Sequence: Synthetic oligonucleotide
ggugaacaaaacaccuagg

SEQ ID NO: 204043 - RNA, 19 nt, Artificial Sequence
  Description of Artificial Sequence: Synthetic oligonucleotide
cauacguaauaaaccucca

SEQ ID NO: 204044 - RNA, 19 nt, Artificial Sequence
  Description of Artificial Sequence: Synthetic oligonucleotide
ccgauauaacaauuguaug

SEQ ID NO: 204045 - RNA, 19 nt, Artificial Sequence
  Description of Artificial Sequence: Synthetic oligonucleotide
ggauguaauuuccccagca

SEQ ID NO: 204046 - RNA, 19 nt, Artificial Sequence
  Description of Artificial Sequence: Synthetic oligonucleotide
caccuagggacagaauagc

SEQ ID NO: 204047 - RNA, 19 nt, Artificial Sequence
  Description of Artificial Sequence: Synthetic oligonucleotide
acgccauaccccagaauac

SEQ ID NO: 204048 - RNA, 19 nt, Artificial Sequence
  Description of Artificial Sequence: Synthetic oligonucleotide
gaacgccucguggaagccg

SEQ ID NO: 204049 - RNA, 19 nt, Artificial Sequence
  Description of Artificial Sequence: Synthetic oligonucleotide
uacguacguccuccaaaga

SEQ ID NO: 204050 - RNA, 19 nt, Artificial Sequence
  Description of Artificial Sequence: Synthetic oligonucleotide
gcaaugugccauugcggcg

SEQ ID NO: 204051 - RNA, 19 nt, Artificial Sequence
  Description of Artificial Sequence: Synthetic oligonucleotide
caugcauaggguugguuua

SEQ ID NO: 204052 - RNA, 19 nt, Artificial Sequence
  Description of Artificial Sequence: Synthetic oligonucleotide
uacuuacgccauaccccag

SEQ ID NO: 204053 - RNA, 19 nt, Artificial Sequence
  Description of Artificial Sequence: Synthetic oligonucleotide
cauuccgaucaagaugaac

SEQ ID NO: 204054 - RNA, 19 nt, Artificial Sequence
  Description of Artificial Sequence: Synthetic oligonucleotide
ccggugggaaaauaauugc

SEQ ID NO: 204055 - RNA, 19 nt, Artificial Sequence
  Description of Artificial Sequence: Synthetic oligonucleotide
aacgccucguggaagccgu

SEQ ID NO: 204056 - RNA, 19 nt, Artificial Sequence
  Description of Artificial Sequence: Synthetic oligonucleotide
ucauuggaccugguuuuga

SEQ ID NO: 204057 - RNA, 19 nt, Artificial Sequence
  Description of Artificial Sequence: Synthetic oligonucleotide
auagcaagcccaacuuaca

SEQ ID NO: 204058 - RNA, 19 nt, Artificial Sequence
  Description of Artificial Sequence: Synthetic oligonucleotide
ggauuuugcuacccaacga

SEQ ID NO: 204059 - RNA, 19 nt, Artificial Sequence
  Description of Artificial Sequence: Synthetic oligonucleotide
agauuuugauucggugcug

SEQ ID NO: 204060 - RNA, 19 nt, Artificial Sequence
  Description of Artificial Sequence: Synthetic oligonucleotide
guaggucuaacccaagguu

SEQ ID NO: 204061 - RNA, 19 nt, Artificial Sequence
  Description of Artificial Sequence: Synthetic oligonucleotide
cagaucuuaucugggugac

SEQ ID NO: 204062 - RNA, 19 nt, Artificial Sequence
  Description of Artificial Sequence: Synthetic oligonucleotide
caucauguugcaccgauau

SEQ ID NO: 204063 - RNA, 19 nt, Artificial Sequence
  Description of Artificial Sequence: Synthetic oligonucleotide
cauugcggcguaguucagc

SEQ ID NO: 204064 - RNA, 19 nt, Artificial Sequence
  Description of Artificial Sequence: Synthetic oligonucleotide
ugccauugcggcguaguuc

SEQ ID NO: 204065 - RNA, 19 nt, Artificial Sequence
  Description of Artificial Sequence: Synthetic oligonucleotide
aaccgccguaaguguccac

SEQ ID NO: 204066 - RNA, 19 nt, Artificial Sequence
  Description of Artificial Sequence: Synthetic oligonucleotide
auuuugauucggugcuguu

SEQ ID NO: 204067 - RNA, 19 nt, Artificial Sequence
  Description of Artificial Sequence: Synthetic oligonucleotide
caccgauauaacaauugua

SEQ ID NO: 204068 - RNA, 19 nt, Artificial Sequence
  Description of Artificial Sequence: Synthetic oligonucleotide
accgccguaaguguccaca

SEQ ID NO: 204069 - RNA, 19 nt, Artificial Sequence
  Description of Artificial Sequence: Synthetic oligonucleotide
uuacgccauaccccagaau

SEQ ID NO: 204070 - RNA, 19 nt, Artificial Sequence
  Description of Artificial Sequence: Synthetic oligonucleotide
uagaaacgacugaguuaca

SEQ ID NO: 204071 - RNA, 19 nt, Artificial Sequence
  Description of Artificial Sequence: Synthetic oligonucleotide
caagggauuuugcuaccca

SEQ ID NO: 204072 - RNA, 19 nt, Artificial Sequence
  Description of Artificial Sequence: Synthetic oligonucleotide
cuacccaacgagcagcaua

SEQ ID NO: 204073 - RNA, 19 nt, Artificial Sequence
  Description of Artificial Sequence: Synthetic oligonucleotide
ugcauaggguugguuuacu

SEQ ID NO: 204074 - RNA, 19 nt, Artificial Sequence
  Description of Artificial Sequence: Synthetic oligonucleotide
ugggcguaaccaaggcaau

SEQ ID NO: 204075 - RNA, 19 nt, Artificial Sequence
  Description of Artificial Sequence: Synthetic oligonucleotide
ccaaccgccguaagugucc

SEQ ID NO: 204076 - RNA, 19 nt, Artificial Sequence
  Description of Artificial Sequence: Synthetic oligonucleotide
ugaacgccucguggaagcc

SEQ ID NO: 204077 - RNA, 19 nt, Artificial Sequence
  Description of Artificial Sequence: Synthetic oligonucleotide
aggcaguuacauggaucac

SEQ ID NO: 204078 - RNA, 19 nt, Artificial Sequence
  Description of Artificial Sequence: Synthetic oligonucleotide
aaugugccauugcggcgua

SEQ ID NO: 204079 - RNA, 19 nt, Artificial Sequence
  Description of Artificial Sequence: Synthetic oligonucleotide
gucaggcuagagcuccaac

SEQ ID NO: 204080 - RNA, 19 nt, Artificial Sequence
  Description of Artificial Sequence: Synthetic oligonucleotide
auaggggagcacagcaccu

SEQ ID NO: 204081 - RNA, 19 nt, Artificial Sequence
  Description of Artificial Sequence: Synthetic oligonucleotide
agcuguccguucauggcug

SEQ ID NO: 204082 - RNA, 19 nt, Artificial Sequence
  Description of Artificial Sequence: Synthetic oligonucleotide
caaugaacgccucguggaa

SEQ ID NO: 204083 - RNA, 19 nt, Artificial Sequence
  Description of Artificial Sequence: Synthetic oligonucleotide
gacucugauaggggagcac

SEQ ID NO: 204084 - RNA, 19 nt, Artificial Sequence
  Description of Artificial Sequence: Synthetic oligonucleotide
aggucuaacccaagguuuu

SEQ ID NO: 204085 - RNA, 19 nt, Artificial Sequence
  Description of Artificial Sequence: Synthetic oligonucleotide
cuuacgccauaccccagaa

SEQ ID NO: 204086 - RNA, 19 nt, Artificial Sequence
  Description of Artificial Sequence: Synthetic oligonucleotide
gcguaaccaaggcaaugug

SEQ ID NO: 204087 - RNA, 19 nt, Artificial Sequence
  Description of Artificial Sequence: Synthetic oligonucleotide
ggauuaggugauagggcac

SEQ ID NO: 204088 - RNA, 19 nt, Artificial Sequence
  Description of Artificial Sequence: Synthetic oligonucleotide
uuuggaggauuaggugaua

SEQ ID NO: 204089 - RNA, 19 nt, Artificial Sequence
  Description of Artificial Sequence: Synthetic oligonucleotide
agguucgauuucaaagcau

SEQ ID NO: 204090 - RNA, 19 nt, Artificial Sequence
  Description of Artificial Sequence: Synthetic oligonucleotide
gggcaauaucuggugacug

SEQ ID NO: 204091 - RNA, 19 nt, Artificial Sequence
  Description of Artificial Sequence: Synthetic oligonucleotide
guaccaaagugugcaaccu

SEQ ID NO: 204092 - RNA, 19 nt, Artificial Sequence
  Description of Artificial Sequence: Synthetic oligonucleotide
caaugugccauugcggcgu

SEQ ID NO: 204093 - RNA, 19 nt, Artificial Sequence
  Description of Artificial Sequence: Synthetic oligonucleotide
ucccuaccaaaguggccau

SEQ ID NO: 204094 - RNA, 19 nt, Artificial Sequence
  Description of Artificial Sequence: Synthetic oligonucleotide
ggaucaccuaugcucacua

SEQ ID NO: 204095 - RNA, 19 nt, Artificial Sequence
  Description of Artificial Sequence: Synthetic oligonucleotide
gccagucaaaccagcauca

SEQ ID NO: 204096 - RNA, 19 nt, Artificial Sequence
  Description of Artificial Sequence: Synthetic oligonucleotide
cuacagacccucagguacu

SEQ ID NO: 204097 - RNA, 19 nt, Artificial Sequence
  Description of Artificial Sequence: Synthetic oligonucleotide
ggcaauaucuggugacugu

SEQ ID NO: 204098 - RNA, 19 nt, Artificial Sequence
  Description of Artificial Sequence: Synthetic oligonucleotide
gcauaagcagcugagcggu

SEQ ID NO: 204099 - RNA, 19 nt, Artificial Sequence
  Description of Artificial Sequence: Synthetic oligonucleotide
cuacgccaucaagucuggg

SEQ ID NO: 204100 - RNA, 19 nt, Artificial Sequence
  Description of Artificial Sequence: Synthetic oligonucleotide
ggagcacagcaccucgauc

SEQ ID NO: 204101 - RNA, 19 nt, Artificial Sequence
  Description of Artificial Sequence: Synthetic oligonucleotide
ccucaaugaacgccucgug

SEQ ID NO: 204102 - RNA, 19 nt, Artificial Sequence
  Description of Artificial Sequence: Synthetic oligonucleotide
gguucgauuucaaagcauu

SEQ ID NO: 204103 - RNA, 19 nt, Artificial Sequence
  Description of Artificial Sequence: Synthetic oligonucleotide
gaucaccuaugcucacuau

SEQ ID NO: 204104 - RNA, 19 nt, Artificial Sequence
  Description of Artificial Sequence: Synthetic oligonucleotide
gauccagaucccugacaau

SEQ ID NO: 204105 - RNA, 19 nt, Artificial Sequence
  Description of Artificial Sequence: Synthetic oligonucleotide
uaauugcaauuaggacuuu

SEQ ID NO: 204106 - RNA, 19 nt, Artificial Sequence
  Description of Artificial Sequence: Synthetic oligonucleotide
gggcguaaccaaggcaaug

SEQ ID NO: 204107 - RNA, 19 nt, Artificial Sequence
  Description of Artificial Sequence: Synthetic oligonucleotide
cuugcguuucaugcaagau

SEQ ID NO: 204108 - RNA, 19 nt, Artificial Sequence
  Description of Artificial Sequence: Synthetic oligonucleotide
gcauaggguugguuuacua

SEQ ID NO: 204109 - RNA, 19 nt, Artificial Sequence
  Description of Artificial Sequence: Synthetic oligonucleotide
guucaaguaugaagggauu

SEQ ID NO: 204110 - RNA, 19 nt, Artificial Sequence
  Description of Artificial Sequence: Synthetic oligonucleotide
guggaguacugucuuucuu

SEQ ID NO: 204111 - RNA, 19 nt, Artificial Sequence
  Description of Artificial Sequence: Synthetic oligonucleotide
cccaaccgccguaaguguc

SEQ ID NO: 204112 - RNA, 19 nt, Artificial Sequence
  Description of Artificial Sequence: Synthetic oligonucleotide
ccaugcauaggguugguuu

SEQ ID NO: 204113 - RNA, 19 nt, Artificial Sequence
  Description of Artificial Sequence: Synthetic oligonucleotide
ccuaccugggaaugcugga

SEQ ID NO: 204114 - RNA, 19 nt, Artificial Sequence
  Description of Artificial Sequence: Synthetic oligonucleotide
gccguugagcuguccguuc

SEQ ID NO: 204115 - RNA, 19 nt, Artificial Sequence
  Description of Artificial Sequence: Synthetic oligonucleotide
gggcgaagaucaaaauucu

SEQ ID NO: 204116 - RNA, 19 nt, Artificial Sequence
  Description of Artificial Sequence: Synthetic oligonucleotide
caaccgccguaagugucca

SEQ ID NO: 204117 - RNA, 19 nt, Artificial Sequence
  Description of Artificial Sequence: Synthetic oligonucleotide
cuccccaaccgccguaagu

SEQ ID NO: 204118 - RNA, 19 nt, Artificial Sequence
  Description of Artificial Sequence: Synthetic oligonucleotide
gcauguaaacaagcuggcu

SEQ ID NO: 204119 - RNA, 19 nt, Artificial Sequence
  Description of Artificial Sequence: Synthetic oligonucleotide
guacugcccugugacuucu

SEQ ID NO: 204120 - RNA, 19 nt, Artificial Sequence
  Description of Artificial Sequence: Synthetic oligonucleotide
ccguugagcuguccguuca

SEQ ID NO: 204121 - RNA, 19 nt, Artificial Sequence
  Description of Artificial Sequence: Synthetic oligonucleotide
ggcauacacucuucaguuu

SEQ ID NO: 204122 - RNA, 19 nt, Artificial Sequence
  Description of Artificial Sequence: Synthetic oligonucleotide
cccugacaaugaccccagg

SEQ ID NO: 204123 - RNA, 19 nt, Artificial Sequence
  Description of Artificial Sequence: Synthetic oligonucleotide
gcguuucaugcaagauuga

SEQ ID NO: 204124 - RNA, 19 nt, Artificial Sequence
  Description of Artificial Sequence: Synthetic oligonucleotide
cgccauaccccagaauaca

SEQ ID NO: 204125 - RNA, 19 nt, Artificial Sequence
  Description of Artificial Sequence: Synthetic oligonucleotide
ccgccguaaguguccacaa

SEQ ID NO: 204126 - RNA, 19 nt, Artificial Sequence
  Description of Artificial Sequence: Synthetic oligonucleotide
ggguagaaccuagcauuuu

SEQ ID NO: 204127 - RNA, 19 nt, Artificial Sequence
  Description of Artificial Sequence: Synthetic oligonucleotide
ccucgaucuugcauauauu

SEQ ID NO: 204128 - RNA, 19 nt, Artificial Sequence
  Description of Artificial Sequence: Synthetic oligonucleotide
ccccaaccgccguaagugu

SEQ ID NO: 204129 - RNA, 19 nt, Artificial Sequence
  Description of Artificial Sequence: Synthetic oligonucleotide
gcggcguaguucagccagu

SEQ ID NO: 204130 - RNA, 19 nt, Artificial Sequence
  Description of Artificial Sequence: Synthetic oligonucleotide
cgccguaaguguccacaau

SEQ ID NO: 204131 - RNA, 19 nt, Artificial Sequence
  Description of Artificial Sequence: Synthetic oligonucleotide
aauagccugaucuaaagac

SEQ ID NO: 204132 - RNA, 19 nt, Artificial Sequence
  Description of Artificial Sequence: Synthetic oligonucleotide
aguaauacaauccauagug

SEQ ID NO: 204133 - RNA, 19 nt, Artificial Sequence
  Description of Artificial Sequence: Synthetic oligonucleotide
aaguuuucgaaacaacugc

SEQ ID NO: 204134 - RNA, 19 nt, Artificial Sequence
  Description of Artificial Sequence: Synthetic oligonucleotide
aaugugauaaaauaaccug

SEQ ID NO: 204135 - RNA, 19 nt, Artificial Sequence
  Description of Artificial Sequence: Synthetic oligonucleotide
uuagauaccuguuugaaag

SEQ ID NO: 204136 - RNA, 19 nt, Artificial Sequence
  Description of Artificial Sequence: Synthetic oligonucleotide
gauuucaucguucagugcg

SEQ ID NO: 204137 - RNA, 19 nt, Artificial Sequence
  Description of Artificial Sequence: Synthetic oligonucleotide
ucucaguucauuaaguucc

SEQ ID NO: 204138 - RNA, 19 nt, Artificial Sequence
  Description of Artificial Sequence: Synthetic oligonucleotide
uccauuaaaaucuuugugc

SEQ ID NO: 204139 - RNA, 19 nt, Artificial Sequence
  Description of Artificial Sequence: Synthetic oligonucleotide
aauaugacuaaccuuauuu

SEQ ID NO: 204140 - RNA, 19 nt, Artificial Sequence
  Description of Artificial Sequence: Synthetic oligonucleotide
auaugcuaucucuugaugc

SEQ ID NO: 204141 - RNA, 19 nt, Artificial Sequence
  Description of Artificial Sequence: Synthetic oligonucleotide
uacucuuuuauuuauagcu

SEQ ID NO: 204142 - RNA, 19 nt, Artificial Sequence
  Description of Artificial Sequence: Synthetic oligonucleotide
ugauaaaauaaccuguuac

SEQ ID NO: 204143 - RNA, 19 nt, Artificial Sequence
  Description of Artificial Sequence: Synthetic oligonucleotide
auaccuucuaguuuaauuc

SEQ ID NO: 204144 - RNA, 19 nt, Artificial Sequence
  Description of Artificial Sequence: Synthetic oligonucleotide
ugaacuggucaacugaugg

SEQ ID NO: 204145 - RNA, 19 nt, Artificial Sequence
  Description of Artificial Sequence: Synthetic oligonucleotide
aguauagaaagcuggcagc

SEQ ID NO: 204146 - RNA, 19 nt, Artificial Sequence
  Description of Artificial Sequence: Synthetic oligonucleotide
auaggaauagcaucguugg

SEQ ID NO: 204147 - RNA, 19 nt, Artificial Sequence
  Description of Artificial Sequence: Synthetic oligonucleotide
ugugguaucaucuucuaca

SEQ ID NO: 204148 - RNA, 19 nt, Artificial Sequence
  Description of Artificial Sequence: Synthetic oligonucleotide
aauaggagaacacuuuaca

SEQ ID NO: 204149 - RNA, 19 nt, Artificial Sequence
  Description of Artificial Sequence: Synthetic oligonucleotide
aagacaaguauaaaagcac

SEQ ID NO: 204150 - RNA, 19 nt, Artificial Sequence
  Description of Artificial Sequence: Synthetic oligonucleotide
uuaagaggcagaaaaguca

SEQ ID NO: 204151 - RNA, 19 nt, Artificial Sequence
  Description of Artificial Sequence: Synthetic oligonucleotide
auuauauugcuccagauuu

SEQ ID NO: 204152 - RNA, 19 nt, Artificial Sequence
  Description of Artificial Sequence: Synthetic oligonucleotide
ugaguagaaacuuccaugc

SEQ ID NO: 204153 - RNA, 19 nt, Artificial Sequence
  Description of Artificial Sequence: Synthetic oligonucleotide
gaucauaggaauagcaucg

SEQ ID NO: 204154 - RNA, 19 nt, Artificial Sequence
  Description of Artificial Sequence: Synthetic oligonucleotide
aauuccaugauugauuugu

SEQ ID NO: 204155 - RNA, 19 nt, Artificial Sequence
  Description of Artificial Sequence: Synthetic oligonucleotide
aguaguucaggccuaaaag

SEQ ID NO: 204156 - RNA, 19 nt, Artificial Sequence
  Description of Artificial Sequence: Synthetic oligonucleotide
aguagaaacuuccaugcuc

SEQ ID NO: 204157 - RNA, 19 nt, Artificial Sequence
  Description of Artificial Sequence: Synthetic oligonucleotide
ugugaucacgucaauauga

SEQ ID NO: 204158 - RNA, 19 nt, Artificial Sequence
  Description of Artificial Sequence: Synthetic oligonucleotide
cacaaguauagaaagcugg

SEQ ID NO: 204159 - RNA, 19 nt, Artificial Sequence
  Description of Artificial Sequence: Synthetic oligonucleotide
uauacguagaaauguaaca

SEQ ID NO: 204160 - RNA, 19 nt, Artificial Sequence
  Description of Artificial Sequence: Synthetic oligonucleotide
agauucauuuuauugaacu

SEQ ID NO: 204161 - RNA, 19 nt, Artificial Sequence
  Description of Artificial Sequence: Synthetic oligonucleotide
uaaccaauuauuuaguuuu

SEQ ID NO: 204162 - RNA, 19 nt, Artificial Sequence
  Description of Artificial Sequence: Synthetic oligonucleotide
aaauaaaauuccucgacua

SEQ ID NO: 204163 - RNA, 19 nt, Artificial Sequence
  Description of Artificial Sequence: Synthetic oligonucleotide
uuauacacaucuucaaggc

SEQ ID NO: 204164 - RNA, 19 nt, Artificial Sequence
  Description of Artificial Sequence: Synthetic oligonucleotide
aguaauuccuuucacuuug

SEQ ID NO: 204165 - RNA, 19 nt, Artificial Sequence
  Description of Artificial Sequence: Synthetic oligonucleotide
augauugauuuguagcccc

SEQ ID NO: 204166 - RNA, 19 nt, Artificial Sequence
  Description of Artificial Sequence: Synthetic oligonucleotide
uccaugauugauuuguagc

SEQ ID NO: 204167 - RNA, 19 nt, Artificial Sequence
  Description of Artificial Sequence: Synthetic oligonucleotide
acaaugugauaaaauaacc

SEQ ID NO: 204168 - RNA, 19 nt, Artificial Sequence
  Description of Artificial Sequence: Synthetic oligonucleotide
guaguaguaauaaacuggg

SEQ ID NO: 204169 - RNA, 19 nt, Artificial Sequence
  Description of Artificial Sequence: Synthetic oligonucleotide
uuugucauuaauagccuga

SEQ ID NO: 204170 - RNA, 19 nt, Artificial Sequence
  Description of Artificial Sequence: Synthetic oligonucleotide
aguucuaucuuucuuauuu

SEQ ID NO: 204171 - RNA, 19 nt, Artificial Sequence
  Description of Artificial Sequence: Synthetic oligonucleotide
aaggucaguucuuuccugg

SEQ ID NO: 204172 - RNA, 19 nt, Artificial Sequence
  Description of Artificial Sequence: Synthetic oligonucleotide
ucaaguucugauguugugg

SEQ ID NO: 204173 - RNA, 19 nt, Artificial Sequence
  Description of Artificial Sequence: Synthetic oligonucleotide
aacgugacuguacuucuuc

SEQ ID NO: 204174 - RNA, 19 nt, Artificial Sequence
  Description of Artificial Sequence: Synthetic oligonucleotide
ucuaacgucuuucuguaac

SEQ ID NO: 204175 - RNA, 19 nt, Artificial Sequence
  Description of Artificial Sequence: Synthetic oligonucleotide
ucuacucgaguaauaauac

SEQ ID NO: 204176 - RNA, 19 nt, Artificial Sequence
  Description of Artificial Sequence: Synthetic oligonucleotide
cauaggaauagcaucguug

SEQ ID NO: 204177 - RNA, 19 nt, Artificial Sequence
  Description of Artificial Sequence: Synthetic oligonucleotide
cucaguuuacugaucauag

SEQ ID NO: 204178 - RNA, 19 nt, Artificial Sequence
  Description of Artificial Sequence: Synthetic oligonucleotide
uuuguuaacgugacuguac

SEQ ID NO: 204179 - RNA, 19 nt, Artificial Sequence
  Description of Artificial Sequence: Synthetic oligonucleotide
ucgacuauacguagaaaug

SEQ ID NO: 204180 - RNA, 19 nt, Artificial Sequence
  Description of Artificial Sequence: Synthetic oligonucleotide
ucuuucauuuagcaguugu

SEQ ID NO: 204181 - RNA, 19 nt, Artificial Sequence
  Description of Artificial Sequence: Synthetic oligonucleotide
uucaacucgagcuuugacu

SEQ ID NO: 204182 - RNA, 19 nt, Artificial Sequence
  Description of Artificial Sequence: Synthetic oligonucleotide
uuucucgugucauaguagc

SEQ ID NO: 204183 - RNA, 19 nt, Artificial Sequence
  Description of Artificial Sequence: Synthetic oligonucleotide
uccaugaucauaucugaca

SEQ ID NO: 204184 - RNA, 19 nt, Artificial Sequence
  Description of Artificial Sequence: Synthetic oligonucleotide
uuguuaagaggcagaaaag

SEQ ID NO: 204185 - RNA, 19 nt, Artificial Sequence
  Description of Artificial Sequence: Synthetic oligonucleotide
uauuuucgaaguucaagca

SEQ ID NO: 204186 - RNA, 19 nt, Artificial Sequence
  Description of Artificial Sequence: Synthetic oligonucleotide
cuauacguagaaauguaac

SEQ ID NO: 204187 - RNA, 19 nt, Artificial Sequence
  Description of Artificial Sequence: Synthetic oligonucleotide
uuuucgaaacaacugcuuc

SEQ ID NO: 204188 - RNA, 19 nt, Artificial Sequence
  Description of Artificial Sequence: Synthetic oligonucleotide
auagaaagcuggcagcgag

SEQ ID NO: 204189 - RNA, 19 nt, Artificial Sequence
  Description of Artificial Sequence: Synthetic oligonucleotide
acaaguauagaaagcuggc

SEQ ID NO: 204190 - RNA, 19 nt, Artificial Sequence
  Description of Artificial Sequence: Synthetic oligonucleotide
uuucgaaacaacugcuuca

SEQ ID NO: 204191 - RNA, 19 nt, Artificial Sequence
  Description of Artificial Sequence: Synthetic oligonucleotide
ugugcugagcauccaaugc

SEQ ID NO: 204192 - RNA, 19 nt, Artificial Sequence
  Description of Artificial Sequence: Synthetic oligonucleotide
caaguucugauguuguggc

SEQ ID NO: 204193 - RNA, 19 nt, Artificial Sequence
  Description of Artificial Sequence: Synthetic oligonucleotide
uucagcgauucucugguag

SEQ ID NO: 204194 - RNA, 19 nt, Artificial Sequence
  Description of Artificial Sequence: Synthetic oligonucleotide
ucgaguaauaauaccuucu

SEQ ID NO: 204195 - RNA, 19 nt, Artificial Sequence
  Description of Artificial Sequence: Synthetic oligonucleotide
acguucauuaauuccauga

SEQ ID NO: 204196 - RNA, 19 nt, Artificial Sequence
  Description of Artificial Sequence: Synthetic oligonucleotide
ucaauuaaccauguguggu

SEQ ID NO: 204197 - RNA, 19 nt, Artificial Sequence
  Description of Artificial Sequence: Synthetic oligonucleotide
ugucggcugacucaaguag

SEQ ID NO: 204198 - RNA, 19 nt, Artificial Sequence
  Description of Artificial Sequence: Synthetic oligonucleotide
accacauuauuauacacau

SEQ ID NO: 204199 - RNA, 19 nt, Artificial Sequence
  Description of Artificial Sequence: Synthetic oligonucleotide
ugucaauggaauuauccaa

SEQ ID NO: 204200 - RNA, 19 nt, Artificial Sequence
  Description of Artificial Sequence: Synthetic oligonucleotide
uucuacuugguccaagcgu

SEQ ID NO: 204201 - RNA, 19 nt, Artificial Sequence
  Description of Artificial Sequence: Synthetic oligonucleotide
auaauaugcuaucucuuga

SEQ ID NO: 204202 - RNA, 19 nt, Artificial Sequence
  Description of Artificial Sequence: Synthetic oligonucleotide
uaagcuacguugcuuuggc

SEQ ID NO: 204203 - RNA, 19 nt, Artificial Sequence
  Description of Artificial Sequence: Synthetic oligonucleotide
uguugcauuucucucauuu

SEQ ID NO: 204204 - RNA, 19 nt, Artificial Sequence
  Description of Artificial Sequence: Synthetic oligonucleotide
aaucuagcaauuccucgcu

SEQ ID NO: 204205 - RNA, 19 nt, Artificial Sequence
  Description of Artificial Sequence: Synthetic oligonucleotide
caauccauagugaaagcac

SEQ ID NO: 204206 - RNA, 19 nt, Artificial Sequence
  Description of Artificial Sequence: Synthetic oligonucleotide
uguaacauuacaggggagu

SEQ ID NO: 204207 - RNA, 19 nt, Artificial Sequence
  Description of Artificial Sequence: Synthetic oligonucleotide
ccuaguucugcuuucagcg

SEQ ID NO: 204208 - RNA, 19 nt, Artificial Sequence
  Description of Artificial Sequence: Synthetic oligonucleotide
ugacucaaguaguucaggc

SEQ ID NO: 204209 - RNA, 19 nt, Artificial Sequence
  Description of Artificial Sequence: Synthetic oligonucleotide
gauguaaacuggcuucccc

SEQ ID NO: 204210 - RNA, 19 nt, Artificial Sequence
  Description of Artificial Sequence: Synthetic oligonucleotide
uuaaccaugugugguauca

SEQ ID NO: 204211 - RNA, 19 nt, Artificial Sequence
  Description of Artificial Sequence: Synthetic oligonucleotide
aacucaauaauaaccaauu

SEQ ID NO: 204212 - RNA, 19 nt, Artificial Sequence
  Description of Artificial Sequence: Synthetic oligonucleotide
guuaccagcagugaccucc

SEQ ID NO: 204213 - RNA, 19 nt, Artificial Sequence
  Description of Artificial Sequence: Synthetic oligonucleotide
auagcaugcagacuugccu

SEQ ID NO: 204214 - RNA, 19 nt, Artificial Sequence
  Description of Artificial Sequence: Synthetic oligonucleotide
gacucaaguaguucaggcc

SEQ ID NO: 204215 - RNA, 19 nt, Artificial Sequence
  Description of Artificial Sequence: Synthetic oligonucleotide
uuguuaacgugacuguacu

SEQ ID NO: 204216 - RNA, 19 nt, Artificial Sequence
  Description of Artificial Sequence: Synthetic oligonucleotide
ucugcgcagguuuucauug

SEQ ID NO: 204217 - RNA, 19 nt, Artificial Sequence
  Description of Artificial Sequence: Synthetic oligonucleotide
ugacuaaccuuauuucuga

SEQ ID NO: 204218 - RNA, 19 nt, Artificial Sequence
  Description of Artificial Sequence: Synthetic oligonucleotide
aaguaguucaggccuaaaa

SEQ ID NO: 204219 - RNA, 19 nt, Artificial Sequence
  Description of Artificial Sequence: Synthetic oligonucleotide
gucaauaugacuaaccuua

SEQ ID NO: 204220 - RNA, 19 nt, Artificial Sequence
  Description of Artificial Sequence: Synthetic oligonucleotide
ucaagcacguucauuaauu

SEQ ID NO: 204221 - RNA, 19 nt, Artificial Sequence
  Description of Artificial Sequence: Synthetic oligonucleotide
aggaaauaaaauuccucga

SEQ ID NO: 204222 - RNA, 19 nt, Artificial Sequence
  Description of Artificial Sequence: Synthetic oligonucleotide
uguucuacuugguccaagc

SEQ ID NO: 204223 - RNA, 19 nt, Artificial Sequence
  Description of Artificial Sequence: Synthetic oligonucleotide
acgucaauaugacuaaccu

SEQ ID NO: 204224 - RNA, 19 nt, Artificial Sequence
  Description of Artificial Sequence: Synthetic oligonucleotide
aggggaguuuauaaaauac

SEQ ID NO: 204225 - RNA, 19 nt, Artificial Sequence
  Description of Artificial Sequence: Synthetic oligonucleotide
uacaggggaguuuauaaaa

SEQ ID NO: 204226 - RNA, 19 nt, Artificial Sequence
  Description of Artificial Sequence: Synthetic oligonucleotide
ucaacucgagcuuugacuu

SEQ ID NO: 204227 - RNA, 19 nt, Artificial Sequence
  Description of Artificial Sequence: Synthetic oligonucleotide
ucacaucuaacuuguuaag

SEQ ID NO: 204228 - RNA, 19 nt, Artificial Sequence
  Description of Artificial Sequence: Synthetic oligonucleotide
ggaaauaaaauuccucgac

SEQ ID NO: 204229 - RNA, 19 nt, Artificial Sequence
  Description of Artificial Sequence: Synthetic oligonucleotide
aacuuccaugcuccgacag

SEQ ID NO: 204230 - RNA, 19 nt, Artificial Sequence
  Description of Artificial Sequence: Synthetic oligonucleotide
uucgaaacaacugcuucag

SEQ ID NO: 204231 - RNA, 19 nt, Artificial Sequence
  Description of Artificial Sequence: Synthetic oligonucleotide
agcaucguugguuucagga

SEQ ID NO: 204232 - RNA, 19 nt, Artificial Sequence
  Description of Artificial Sequence: Synthetic oligonucleotide
aaaaucagagcaagggcca

SEQ ID NO: 204233 - RNA, 19 nt, Artificial Sequence
  Description of Artificial Sequence: Synthetic oligonucleotide
uaaguuccuguucuacuug

SEQ ID NO: 204234 - RNA, 19 nt, Artificial Sequence
  Description of Artificial Sequence: Synthetic oligonucleotide
gaucacgucaauaugacua

SEQ ID NO: 204235 - RNA, 19 nt, Artificial Sequence
  Description of Artificial Sequence: Synthetic oligonucleotide
cuccauuaaaaucuuugug

SEQ ID NO: 204236 - RNA, 19 nt, Artificial Sequence
  Description of Artificial Sequence: Synthetic oligonucleotide
uuaacgugacuguacuucu

SEQ ID NO: 204237 - RNA, 19 nt, Artificial Sequence
  Description of Artificial Sequence: Synthetic oligonucleotide
gaaguugacggauuucauc

SEQ ID NO: 204238 - RNA, 19 nt, Artificial Sequence
  Description of Artificial Sequence: Synthetic oligonucleotide
ugguagacuccauagcaug

SEQ ID NO: 204239 - RNA, 19 nt, Artificial Sequence
  Description of Artificial Sequence: Synthetic oligonucleotide
uccuguaaaugacacccug

SEQ ID NO: 204240 - RNA, 19 nt, Artificial Sequence
  Description of Artificial Sequence: Synthetic oligonucleotide
ucuagcaauuccucgcucu

SEQ ID NO: 204241 - RNA, 19 nt, Artificial Sequence
  Description of Artificial Sequence: Synthetic oligonucleotide
cacgucaauaugacuaacc

SEQ ID NO: 204242 - RNA, 19 nt, Artificial Sequence
  Description of Artificial Sequence: Synthetic oligonucleotide
ugauaauaugcuaucucuu

SEQ ID NO: 204243 - RNA, 19 nt, Artificial Sequence
  Description of Artificial Sequence: Synthetic oligonucleotide
uaguucaggccuaaaagua

SEQ ID NO: 204244 - RNA, 19 nt, Artificial Sequence
  Description of Artificial Sequence: Synthetic oligonucleotide
gagccaaucuagcaauucc

SEQ ID NO: 204245 - RNA, 19 nt, Artificial Sequence
  Description of Artificial Sequence: Synthetic oligonucleotide
uucuguaacucaagucgag

SEQ ID NO: 204246 - RNA, 19 nt, Artificial Sequence
  Description of Artificial Sequence: Synthetic oligonucleotide
ucgauggcugacuugguca

SEQ ID NO: 204247 - RNA, 19 nt, Artificial Sequence
  Description of Artificial Sequence: Synthetic oligonucleotide
uuaaguuccuguucuacuu

SEQ ID NO: 204248 - RNA, 19 nt, Artificial Sequence
  Description of Artificial Sequence: Synthetic oligonucleotide
uccucuugucgcuuuauca

SEQ ID NO: 204249 - RNA, 19 nt, Artificial Sequence
  Description of Artificial Sequence: Synthetic oligonucleotide
ucucacaucuaacuuguua

SEQ ID NO: 204250 - RNA, 19 nt, Artificial Sequence
  Description of Artificial Sequence: Synthetic oligonucleotide
uaauaugcuaucucuugau

SEQ ID NO: 204251 - RNA, 19 nt, Artificial Sequence
  Description of Artificial Sequence: Synthetic oligonucleotide
ucuugucgcuuuaucaacu

SEQ ID NO: 204252 - RNA, 19 nt, Artificial Sequence
  Description of Artificial Sequence: Synthetic oligonucleotide
aauuccucgcucuucuuuu

SEQ ID NO: 204253 - RNA, 19 nt, Artificial Sequence
  Description of Artificial Sequence: Synthetic oligonucleotide
uuugucggcugacucaagu

SEQ ID NO: 204254 - RNA, 19 nt, Artificial Sequence
  Description of Artificial Sequence: Synthetic oligonucleotide
uuuagcaguugucuguuuu

SEQ ID NO: 204255 - RNA, 19 nt, Artificial Sequence
  Description of Artificial Sequence: Synthetic oligonucleotide
guuaacgugacuguacuuc

SEQ ID NO: 204256 - RNA, 19 nt, Artificial Sequence
  Description of Artificial Sequence: Synthetic oligonucleotide
auacguagaaauguaacau

SEQ ID NO: 204257 - RNA, 19 nt, Artificial Sequence
  Description of Artificial Sequence: Synthetic oligonucleotide
ucucacuuucgccacuccc

SEQ ID NO: 204258 - RNA, 19 nt, Artificial Sequence
  Description of Artificial Sequence: Synthetic oligonucleotide
uccuaguucugcuuucagc

SEQ ID NO: 204259 - RNA, 19 nt, Artificial Sequence
  Description of Artificial Sequence: Synthetic oligonucleotide
uuuuacucuuuuauuuaua

SEQ ID NO: 204260 - RNA, 19 nt, Artificial Sequence
  Description of Artificial Sequence: Synthetic oligonucleotide
cuacucgaguaauaauacc

SEQ ID NO: 204261 - RNA, 19 nt, Artificial Sequence
  Description of Artificial Sequence: Synthetic oligonucleotide
aauuccucgacuauacgua

SEQ ID NO: 204262 - RNA, 19 nt, Artificial Sequence
  Description of Artificial Sequence: Synthetic oligonucleotide
cuuucucgugucauaguag

SEQ ID NO: 204263 - RNA, 19 nt, Artificial Sequence
  Description of Artificial Sequence: Synthetic oligonucleotide
aguucuuagauaccuguuu

SEQ ID NO: 204264 - RNA, 19 nt, Artificial Sequence
  Description of Artificial Sequence: Synthetic oligonucleotide
agcacguucauuaauucca

SEQ ID NO: 204265 - RNA, 19 nt, Artificial Sequence
  Description of Artificial Sequence: Synthetic oligonucleotide
caugauugauuuguagccc

SEQ ID NO: 204266 - RNA, 19 nt, Artificial Sequence
  Description of Artificial Sequence: Synthetic oligonucleotide
aauuugucggcugacucaa

SEQ ID NO: 204267 - RNA, 19 nt, Artificial Sequence
  Description of Artificial Sequence: Synthetic oligonucleotide
uugauguaaacuggcuucc

SEQ ID NO: 204268 - RNA, 19 nt, Artificial Sequence
  Description of Artificial Sequence: Synthetic oligonucleotide
aucucuugaugcuuuaaau

SEQ ID NO: 204269 - RNA, 19 nt, Artificial Sequence
  Description of Artificial Sequence: Synthetic oligonucleotide
cauguuugaaagcuuuguc

SEQ ID NO: 204270 - RNA, 19 nt, Artificial Sequence
  Description of Artificial Sequence: Synthetic oligonucleotide
auuccucgacuauacguag

SEQ ID NO: 204271 - RNA, 19 nt, Artificial Sequence
  Description of Artificial Sequence: Synthetic oligonucleotide
ucucugauaauaugcuauc

SEQ ID NO: 204272 - RNA, 19 nt, Artificial Sequence
  Description of Artificial Sequence: Synthetic oligonucleotide
ugaguugagaaagcaaauc

SEQ ID NO: 204273 - RNA, 19 nt, Artificial Sequence
  Description of Artificial Sequence: Synthetic oligonucleotide
cauagugaaagcacgagcu

SEQ ID NO: 204274 - RNA, 19 nt, Artificial Sequence
  Description of Artificial Sequence: Synthetic oligonucleotide
agcacuguguauucuaaau

SEQ ID NO: 204275 - RNA, 19 nt, Artificial Sequence
  Description of Artificial Sequence: Synthetic oligonucleotide
aaguaagucucuacucgag

SEQ ID NO: 204276 - RNA, 19 nt, Artificial Sequence
  Description of Artificial Sequence: Synthetic oligonucleotide
aauuaaccaugugugguau

SEQ ID NO: 204277 - RNA, 19 nt, Artificial Sequence
  Description of Artificial Sequence: Synthetic oligonucleotide
ucuuagauaccuguuugaa

SEQ ID NO: 204278 - RNA, 19 nt, Artificial Sequence
  Description of Artificial Sequence: Synthetic oligonucleotide
aguaagucucuacucgagu

SEQ ID NO: 204279 - RNA, 19 nt, Artificial Sequence
  Description of Artificial Sequence: Synthetic oligonucleotide
ugcgucuacucuuuucuga

SEQ ID NO: 204280 - RNA, 19 nt, Artificial Sequence
  Description of Artificial Sequence: Synthetic oligonucleotide
aguuccuaguucugcuuuc

SEQ ID NO: 204281 - RNA, 19 nt, Artificial Sequence
  Description of Artificial Sequence: Synthetic oligonucleotide
cauagcaugcagacuugcc

SEQ ID NO: 204282 - RNA, 19 nt, Artificial Sequence
  Description of Artificial Sequence: Synthetic oligonucleotide
uuacaggggaguuuauaaa

SEQ ID NO: 204283 - RNA, 19 nt, Artificial Sequence
  Description of Artificial Sequence: Synthetic oligonucleotide
ugcuuuccuguaaaugaca

SEQ ID NO: 204284 - RNA, 19 nt, Artificial Sequence
  Description of Artificial Sequence: Synthetic oligonucleotide
acuuucucgugucauagua

SEQ ID NO: 204285 - RNA, 19 nt, Artificial Sequence
  Description of Artificial Sequence: Synthetic oligonucleotide
gauuuauggcauccaugug

SEQ ID NO: 204286 - RNA, 19 nt, Artificial Sequence
  Description of Artificial Sequence: Synthetic oligonucleotide
auuguaccucaguuuacug

SEQ ID NO: 204287 - RNA, 19 nt, Artificial Sequence
  Description of Artificial Sequence: Synthetic oligonucleotide
cucuacucgaguaauaaua

SEQ ID NO: 204288 - RNA, 19 nt, Artificial Sequence
  Description of Artificial Sequence: Synthetic oligonucleotide
aagucgagacuuucucgug

SEQ ID NO: 204289 - RNA, 19 nt, Artificial Sequence
  Description of Artificial Sequence: Synthetic oligonucleotide
uacguagaaauguaacauu

SEQ ID NO: 204290 - RNA, 19 nt, Artificial Sequence
  Description of Artificial Sequence: Synthetic oligonucleotide
uuucuguccgccugagagc

SEQ ID NO: 204291 - RNA, 19 nt, Artificial Sequence
  Description of Artificial Sequence: Synthetic oligonucleotide
ucgaaacaacugcuucagg

SEQ ID NO: 204292 - RNA, 19 nt, Artificial Sequence
  Description of Artificial Sequence: Synthetic oligonucleotide
agcaaaucaguuccuaguu

SEQ ID NO: 204293 - RNA, 19 nt, Artificial Sequence
  Description of Artificial Sequence: Synthetic oligonucleotide
auuaaccaugugugguauc

SEQ ID NO: 204294 - RNA, 19 nt, Artificial Sequence
  Description of Artificial Sequence: Synthetic oligonucleotide
cucgaguaauaauaccuuc

SEQ ID NO: 204295 - RNA, 19 nt, Artificial Sequence
  Description of Artificial Sequence: Synthetic oligonucleotide
agcuacguugcuuuggcau

SEQ ID NO: 204296 - RNA, 19 nt, Artificial Sequence
  Description of Artificial Sequence: Synthetic oligonucleotide
caaugugauaaaauaaccu

SEQ ID NO: 204297 - RNA, 19 nt, Artificial Sequence
  Description of Artificial Sequence: Synthetic oligonucleotide
uccucgacuauacguagaa

SEQ ID NO: 204298 - RNA, 19 nt, Artificial Sequence
  Description of Artificial Sequence: Synthetic oligonucleotide
guguauucuaaauccaaaa

SEQ ID NO: 204299 - RNA, 19 nt, Artificial Sequence
  Description of Artificial Sequence: Synthetic oligonucleotide
ucaauaugacuaaccuuau

SEQ ID NO: 204300 - RNA, 19 nt, Artificial Sequence
  Description of Artificial Sequence: Synthetic oligonucleotide
guagccccuauccaauucc

SEQ ID NO: 204301 - RNA, 19 nt, Artificial Sequence
  Description of Artificial Sequence: Synthetic oligonucleotide
ucagcgauucucugguaga

SEQ ID NO: 204302 - RNA, 19 nt, Artificial Sequence
  Description of Artificial Sequence: Synthetic oligonucleotide
agacaaguauaaaagcacu

SEQ ID NO: 204303 - RNA, 19 nt, Artificial Sequence
  Description of Artificial Sequence: Synthetic oligonucleotide
guaagcuacguugcuuugg

SEQ ID NO: 204304 - RNA, 19 nt, Artificial Sequence
  Description of Artificial Sequence: Synthetic oligonucleotide
uuauauugcuccagauuuu

SEQ ID NO: 204305 - RNA, 19 nt, Artificial Sequence
  Description of Artificial Sequence: Synthetic oligonucleotide
caccagagauuucuguccg

SEQ ID NO: 204306 - RNA, 19 nt, Artificial Sequence
  Description of Artificial Sequence: Synthetic oligonucleotide
ucuguaacucaagucgaga

SEQ ID NO: 204307 - RNA, 19 nt, Artificial Sequence
  Description of Artificial Sequence: Synthetic oligonucleotide
ugauugauuuguagccccu

SEQ ID NO: 204308 - RNA, 19 nt, Artificial Sequence
  Description of Artificial Sequence: Synthetic oligonucleotide
agugucuucccaaacacau

SEQ ID NO: 204309 - RNA, 19 nt, Artificial Sequence
  Description of Artificial Sequence: Synthetic oligonucleotide
uguaaaugacacccugauu

SEQ ID NO: 204310 - RNA, 19 nt, Artificial Sequence
  Description of Artificial Sequence: Synthetic oligonucleotide
acggauuucaucguucagu

SEQ ID NO: 204311 - RNA, 19 nt, Artificial Sequence
  Description of Artificial Sequence: Synthetic oligonucleotide
acauguuugaaagcuuugu

SEQ ID NO: 204312 - RNA, 19 nt, Artificial Sequence
  Description of Artificial Sequence: Synthetic oligonucleotide
guaguucaggccuaaaagu

SEQ ID NO: 204313 - RNA, 19 nt, Artificial Sequence
  Description of Artificial Sequence: Synthetic oligonucleotide
guaaaagggagcaggguca

SEQ ID NO: 204314 - RNA, 19 nt, Artificial Sequence
  Description of Artificial Sequence: Synthetic oligonucleotide
guaucucucacaucuaacu

SEQ ID NO: 204315 - RNA, 19 nt, Artificial Sequence
  Description of Artificial Sequence: Synthetic oligonucleotide
auugauuuguagccccuau

SEQ ID NO: 204316 - RNA, 19 nt, Artificial Sequence
  Description of Artificial Sequence: Synthetic oligonucleotide
guugcuuuggcaugaaggu

SEQ ID NO: 204317 - RNA, 19 nt, Artificial Sequence
  Description of Artificial Sequence: Synthetic oligonucleotide
aguuuucgaaacaacugcu

SEQ ID NO: 204318 - RNA, 19 nt, Artificial Sequence
  Description of Artificial Sequence: Synthetic oligonucleotide
uuuuguuaacgugacugua

SEQ ID NO: 204319 - RNA, 19 nt, Artificial Sequence
  Description of Artificial Sequence: Synthetic oligonucleotide
agucgagacuuucucgugu

SEQ ID NO: 204320 - RNA, 19 nt, Artificial Sequence
  Description of Artificial Sequence: Synthetic oligonucleotide
acucaauaauaaccaauua

SEQ ID NO: 204321 - RNA, 19 nt, Artificial Sequence
  Description of Artificial Sequence: Synthetic oligonucleotide
ugccuccaagcuuuguaag

SEQ ID NO: 204322 - RNA, 19 nt, Artificial Sequence
  Description of Artificial Sequence: Synthetic oligonucleotide
aucacgucaauaugacuaa

SEQ ID NO: 204323 - RNA, 19 nt, Artificial Sequence
  Description of Artificial Sequence: Synthetic oligonucleotide
gguacuaacuucuggaaua

SEQ ID NO: 204324 - RNA, 19 nt, Artificial Sequence
  Description of Artificial Sequence: Synthetic oligonucleotide
ccaaucuagcaauuccucg

SEQ ID NO: 204325 - RNA, 19 nt, Artificial Sequence
  Description of Artificial Sequence: Synthetic oligonucleotide
caugugugguaucaucuuc

SEQ ID NO: 204326 - RNA, 19 nt, Artificial Sequence
  Description of Artificial Sequence: Synthetic oligonucleotide
ucgcuuuaucaacuuuucu

SEQ ID NO: 204327 - RNA, 19 nt, Artificial Sequence
  Description of Artificial Sequence: Synthetic oligonucleotide
cauagaauuugucggcuga

SEQ ID NO: 204328 - RNA, 19 nt, Artificial Sequence
  Description of Artificial Sequence: Synthetic oligonucleotide
agcguuuccucagauucuc

SEQ ID NO: 204329 - RNA, 19 nt, Artificial Sequence
  Description of Artificial Sequence: Synthetic oligonucleotide
uucuguccgccugagagcu

SEQ ID NO: 204330 - RNA, 19 nt, Artificial Sequence
  Description of Artificial Sequence: Synthetic oligonucleotide
ugaucacgucaauaugacu

SEQ ID NO: 204331 - RNA, 19 nt, Artificial Sequence
  Description of Artificial Sequence: Synthetic oligonucleotide
uugccuccaagcuuuguaa

SEQ ID NO: 204332 - RNA, 19 nt, Artificial Sequence
  Description of Artificial Sequence: Synthetic oligonucleotide
aguuuacugaucauaggaa

SEQ ID NO: 204333 - RNA, 19 nt, Artificial Sequence
  Description of Artificial Sequence: Synthetic oligonucleotide
uguagccccuauccaauuc

SEQ ID NO: 204334 - RNA, 19 nt, Artificial Sequence
  Description of Artificial Sequence: Synthetic oligonucleotide
ugaguaugaagaccacauu

SEQ ID NO: 204335 - RNA, 19 nt, Artificial Sequence
  Description of Artificial Sequence: Synthetic oligonucleotide
auagccugaucuaaagacu

SEQ ID NO: 204336 - RNA, 19 nt, Artificial Sequence
  Description of Artificial Sequence: Synthetic oligonucleotide
guaagucucuacucgagua

SEQ ID NO: 204337 - RNA, 19 nt, Artificial Sequence
  Description of Artificial Sequence: Synthetic oligonucleotide
gaagggaccccaacucccg

SEQ ID NO: 204338 - RNA, 19 nt, Artificial Sequence
  Description of Artificial Sequence: Synthetic oligonucleotide
ugcuucaagcucacccagc

SEQ ID NO: 204339 - RNA, 19 nt, Artificial Sequence
  Description of Artificial Sequence: Synthetic oligonucleotide
uaaccuuauuucugaacuu

SEQ ID NO: 204340 - RNA, 19 nt, Artificial Sequence
  Description of Artificial Sequence: Synthetic oligonucleotide
ucucuacucgaguaauaau

SEQ ID NO: 204341 - RNA, 19 nt, Artificial Sequence
  Description of Artificial Sequence: Synthetic oligonucleotide
cucgacuauacguagaaau

SEQ ID NO: 204342 - RNA, 19 nt, Artificial Sequence
  Description of Artificial Sequence: Synthetic oligonucleotide
cugugaucacgucaauaug

SEQ ID NO: 204343 - RNA, 19 nt, Artificial Sequence
  Description of Artificial Sequence: Synthetic oligonucleotide
gacggauuucaucguucag

SEQ ID NO: 204344 - RNA, 19 nt, Artificial Sequence
  Description of Artificial Sequence: Synthetic oligonucleotide
accaugugugguaucaucu

SEQ ID NO: 204345 - RNA, 19 nt, Artificial Sequence
  Description of Artificial Sequence: Synthetic oligonucleotide
guuuacugaucauaggaau

SEQ ID NO: 204346 - RNA, 19 nt, Artificial Sequence
  Description of Artificial Sequence: Synthetic oligonucleotide
aagucucuacucgaguaau

SEQ ID NO: 204347 - RNA, 19 nt, Artificial Sequence
  Description of Artificial Sequence: Synthetic oligonucleotide
acguagaaauguaacauua

SEQ ID NO: 204348 - RNA, 19 nt, Artificial Sequence
  Description of Artificial Sequence: Synthetic oligonucleotide
ugcuccgacagaugagugu

SEQ ID NO: 204349 - RNA, 19 nt, Artificial Sequence
  Description of Artificial Sequence: Synthetic oligonucleotide
acacaaguauagaaagcug

SEQ ID NO: 204350 - RNA, 19 nt, Artificial Sequence
  Description of Artificial Sequence: Synthetic oligonucleotide
auagugaaagcacgagcua

SEQ ID NO: 204351 - RNA, 19 nt, Artificial Sequence
  Description of Artificial Sequence: Synthetic oligonucleotide
cucuugaugcuuuaaauuu

SEQ ID NO: 204352 - RNA, 19 nt, Artificial Sequence
  Description of Artificial Sequence: Synthetic oligonucleotide
auaggcgguaucucucaca

SEQ ID NO: 204353 - RNA, 19 nt, Artificial Sequence
  Description of Artificial Sequence: Synthetic oligonucleotide
auagcaucguugguuucag

SEQ ID NO: 204354 - RNA, 19 nt, Artificial Sequence
  Description of Artificial Sequence: Synthetic oligonucleotide
ucaucguucagugcgucua

SEQ ID NO: 204355 - RNA, 19 nt, Artificial Sequence
  Description of Artificial Sequence: Synthetic oligonucleotide
uuccucgacuauacguaga

SEQ ID NO: 204356 - RNA, 19 nt, Artificial Sequence
  Description of Artificial Sequence: Synthetic oligonucleotide
ggcgguaucucucacaucu

SEQ ID NO: 204357 - RNA, 19 nt, Artificial Sequence
  Description of Artificial Sequence: Synthetic oligonucleotide
cuucaacucgagcuuugac

SEQ ID NO: 204358 - RNA, 19 nt, Artificial Sequence
  Description of Artificial Sequence: Synthetic oligonucleotide
gaccuccacacaaguauag

SEQ ID NO: 204359 - RNA, 19 nt, Artificial Sequence
  Description of Artificial Sequence: Synthetic oligonucleotide
aguugacggauuucaucgu

SEQ ID NO: 204360 - RNA, 19 nt, Artificial Sequence
  Description of Artificial Sequence: Synthetic oligonucleotide
agaugagugucuucccaaa

SEQ ID NO: 204361 - RNA, 19 nt, Artificial Sequence
  Description of Artificial Sequence: Synthetic oligonucleotide
augcagacuugccuccaag

SEQ ID NO: 204362 - RNA, 19 nt, Artificial Sequence
  Description of Artificial Sequence: Synthetic oligonucleotide
uucagugcgucuacucuuu

SEQ ID NO: 204363 - RNA, 19 nt, Artificial Sequence
  Description of Artificial Sequence: Synthetic oligonucleotide
uucaccuugcuuuccugua

SEQ ID NO: 204364 - RNA, 19 nt, Artificial Sequence
  Description of Artificial Sequence: Synthetic oligonucleotide
uaaaagggagcagggucac

SEQ ID NO: 204365 - RNA, 19 nt, Artificial Sequence
  Description of Artificial Sequence: Synthetic oligonucleotide
gcauuucucucauuucacc

SEQ ID NO: 204366 - RNA, 19 nt, Artificial Sequence
  Description of Artificial Sequence: Synthetic oligonucleotide
gugaucacgucaauaugac

SEQ ID NO: 204367 - RNA, 19 nt, Artificial Sequence
  Description of Artificial Sequence: Synthetic oligonucleotide
acuuccaugcuccgacaga

SEQ ID NO: 204368 - RNA, 19 nt, Artificial Sequence
  Description of Artificial Sequence: Synthetic oligonucleotide
ugacacccugauuccaacu

SEQ ID NO: 204369 - RNA, 19 nt, Artificial Sequence
  Description of Artificial Sequence: Synthetic oligonucleotide
agcgagugccuguugcucu

SEQ ID NO: 204370 - RNA, 19 nt, Artificial Sequence
  Description of Artificial Sequence: Synthetic oligonucleotide
caauuaaccauguguggua

SEQ ID NO: 204371 - RNA, 19 nt, Artificial Sequence
  Description of Artificial Sequence: Synthetic oligonucleotide
cugucgguuggucaucuuc

SEQ ID NO: 204372 - RNA, 19 nt, Artificial Sequence
  Description of Artificial Sequence: Synthetic oligonucleotide
ugugugguaucaucuucua

SEQ ID NO: 204373 - RNA, 19 nt, Artificial Sequence
  Description of Artificial Sequence: Synthetic oligonucleotide
uucaggccuaaaaguagua

SEQ ID NO: 204374 - RNA, 19 nt, Artificial Sequence
  Description of Artificial Sequence: Synthetic oligonucleotide
agcaguugucuguuuuccu

SEQ ID NO: 204375 - RNA, 19 nt, Artificial Sequence
  Description of Artificial Sequence: Synthetic oligonucleotide
agccaaucuagcaauuccu

SEQ ID NO: 204376 - RNA, 19 nt, Artificial Sequence
  Description of Artificial Sequence: Synthetic oligonucleotide
gauuguaccucaguuuacu

SEQ ID NO: 204377 - RNA, 19 nt, Artificial Sequence
  Description of Artificial Sequence: Synthetic oligonucleotide
gauaggcgguaucucucac

SEQ ID NO: 204378 - RNA, 19 nt, Artificial Sequence
  Description of Artificial Sequence: Synthetic oligonucleotide
gguagcuugagccaaucua

SEQ ID NO: 204379 - RNA, 19 nt, Artificial Sequence
  Description of Artificial Sequence: Synthetic oligonucleotide
aagcuacguugcuuuggca

SEQ ID NO: 204380 - RNA, 19 nt, Artificial Sequence
  Description of Artificial Sequence: Synthetic oligonucleotide
caaguauagaaagcuggca

SEQ ID NO: 204381 - RNA, 19 nt, Artificial Sequence
  Description of Artificial Sequence: Synthetic oligonucleotide
gacuauacguagaaaugua

SEQ ID NO: 204382 - RNA, 19 nt, Artificial Sequence
  Description of Artificial Sequence: Synthetic oligonucleotide
gugauaaaauaaccuguua

SEQ ID NO: 204383 - RNA, 19 nt, Artificial Sequence
  Description of Artificial Sequence: Synthetic oligonucleotide
gggauuguaccucaguuua

SEQ ID NO: 204384 - RNA, 19 nt, Artificial Sequence
  Description of Artificial Sequence: Synthetic oligonucleotide
caugaucauaucugacaca

SEQ ID NO: 204385 - RNA, 19 nt, Artificial Sequence
  Description of Artificial Sequence: Synthetic oligonucleotide
ucguucagugcgucuacuc

SEQ ID NO: 204386 - RNA, 19 nt, Artificial Sequence
  Description of Artificial Sequence: Synthetic oligonucleotide
aacacauguuugaaagcuu

SEQ ID NO: 204387 - RNA, 19 nt, Artificial Sequence
  Description of Artificial Sequence: Synthetic oligonucleotide
uguuaacgugacuguacuu

SEQ ID NO: 204388 - RNA, 19 nt, Artificial Sequence
  Description of Artificial Sequence: Synthetic oligonucleotide
agcagcaugcccugucggu

SEQ ID NO: 204389 - RNA, 19 nt, Artificial Sequence
  Description of Artificial Sequence: Synthetic oligonucleotide
gguccaagcguuuccucag

SEQ ID NO: 204390 - RNA, 19 nt, Artificial Sequence
  Description of Artificial Sequence: Synthetic oligonucleotide
uagccccuauccaauuccu

SEQ ID NO: 204391 - RNA, 19 nt, Artificial Sequence
  Description of Artificial Sequence: Synthetic oligonucleotide
ucggcugacucaaguaguu

SEQ ID NO: 204392 - RNA, 19 nt, Artificial Sequence
  Description of Artificial Sequence: Synthetic oligonucleotide
gcuuuguaagcuacguugc

SEQ ID NO: 204393 - RNA, 19 nt, Artificial Sequence
  Description of Artificial Sequence: Synthetic oligonucleotide
uccaagcguuuccucagau

SEQ ID NO: 204394 - RNA, 19 nt, Artificial Sequence
  Description of Artificial Sequence: Synthetic oligonucleotide
caagucgagacuuucucgu

SEQ ID NO: 204395 - RNA, 19 nt, Artificial Sequence
  Description of Artificial Sequence: Synthetic oligonucleotide
uacuucacugaaguucuua

SEQ ID NO: 204396 - RNA, 19 nt, Artificial Sequence
  Description of Artificial Sequence: Synthetic oligonucleotide
aaguucaagcacguucauu

SEQ ID NO: 204397 - RNA, 19 nt, Artificial Sequence
  Description of Artificial Sequence: Synthetic oligonucleotide
acacauguuugaaagcuuu

SEQ ID NO: 204398 - RNA, 19 nt, Artificial Sequence
  Description of Artificial Sequence: Synthetic oligonucleotide
aaccuguuaccagcaguga

SEQ ID NO: 204399 - RNA, 19 nt, Artificial Sequence
  Description of Artificial Sequence: Synthetic oligonucleotide
ugucaaaccugggauugua

SEQ ID NO: 204400 - RNA, 19 nt, Artificial Sequence
  Description of Artificial Sequence: Synthetic oligonucleotide
ucaggauaggcgguaucuc

SEQ ID NO: 204401 - RNA, 19 nt, Artificial Sequence
  Description of Artificial Sequence: Synthetic oligonucleotide
cugaucauaggaauagcau

SEQ ID NO: 204402 - RNA, 19 nt, Artificial Sequence
  Description of Artificial Sequence: Synthetic oligonucleotide
cuugagccaaucuagcaau

SEQ ID NO: 204403 - RNA, 19 nt, Artificial Sequence
  Description of Artificial Sequence: Synthetic oligonucleotide
gguagacuccauagcaugc

SEQ ID NO: 204404 - RNA, 19 nt, Artificial Sequence
  Description of Artificial Sequence: Synthetic oligonucleotide
cuccauagcaugcagacuu

SEQ ID NO: 204405 - RNA, 19 nt, Artificial Sequence
  Description of Artificial Sequence: Synthetic oligonucleotide
gugugguaucaucuucuac

SEQ ID NO: 204406 - RNA, 19 nt, Artificial Sequence
  Description of Artificial Sequence: Synthetic oligonucleotide
caacucccggauuuucuuc

SEQ ID NO: 204407 - RNA, 19 nt, Artificial Sequence
  Description of Artificial Sequence: Synthetic oligonucleotide
gucgagacuuucucguguc

SEQ ID NO: 204408 - RNA, 19 nt, Artificial Sequence
  Description of Artificial Sequence: Synthetic oligonucleotide
augcuuggucaaucucauc

SEQ ID NO: 204409 - RNA, 19 nt, Artificial Sequence
  Description of Artificial Sequence: Synthetic oligonucleotide
guaguucuaucuuucuuau

SEQ ID NO: 204410 - RNA, 19 nt, Artificial Sequence
  Description of Artificial Sequence: Synthetic oligonucleotide
caaaguugcuuugccacca

SEQ ID NO: 204411 - RNA, 19 nt, Artificial Sequence
  Description of Artificial Sequence: Synthetic oligonucleotide
gcgauucucugguagacuc

SEQ ID NO: 204412 - RNA, 19 nt, Artificial Sequence
  Description of Artificial Sequence: Synthetic oligonucleotide
ucaaguaguucaggccuaa

SEQ ID NO: 204413 - RNA, 19 nt, Artificial Sequence
  Description of Artificial Sequence: Synthetic oligonucleotide
gacuaaccuuauuucugaa

SEQ ID NO: 204414 - RNA, 19 nt, Artificial Sequence
  Description of Artificial Sequence: Synthetic oligonucleotide
acucgaguaauaauaccuu

SEQ ID NO: 204415 - RNA, 19 nt, Artificial Sequence
  Description of Artificial Sequence: Synthetic oligonucleotide
guugcuuugccaccaggua

SEQ ID NO: 204416 - RNA, 19 nt, Artificial Sequence
  Description of Artificial Sequence: Synthetic oligonucleotide
caaaccugggauuguaccu

SEQ ID NO: 204417 - RNA, 19 nt, Artificial Sequence
  Description of Artificial Sequence: Synthetic oligonucleotide
caucguugguuucaggaua

SEQ ID NO: 204418 - RNA, 19 nt, Artificial Sequence
  Description of Artificial Sequence: Synthetic oligonucleotide
gucgcuuuaucaacuuuuc

SEQ ID NO: 204419 - RNA, 19 nt, Artificial Sequence
  Description of Artificial Sequence: Synthetic oligonucleotide
gagacuuucucgugucaua

SEQ ID NO: 204420 - RNA, 19 nt, Artificial Sequence
  Description of Artificial Sequence: Synthetic oligonucleotide
agauuucuguccgccugag

SEQ ID NO: 204421 - RNA, 19 nt, Artificial Sequence
  Description of Artificial Sequence: Synthetic oligonucleotide
uaacgugacuguacuucuu

SEQ ID NO: 204422 - RNA, 19 nt, Artificial Sequence
  Description of Artificial Sequence: Synthetic oligonucleotide
uuucugcgcagguuuucau

SEQ ID NO: 204423 - RNA, 19 nt, Artificial Sequence
  Description of Artificial Sequence: Synthetic oligonucleotide
uaacucaagucgagacuuu

SEQ ID NO: 204424 - RNA, 19 nt, Artificial Sequence
  Description of Artificial Sequence: Synthetic oligonucleotide
ucacgucaauaugacuaac

SEQ ID NO: 204425 - RNA, 19 nt, Artificial Sequence
  Description of Artificial Sequence: Synthetic oligonucleotide
uucuaacgucuuucuguaa

SEQ ID NO: 204426 - RNA, 19 nt, Artificial Sequence
  Description of Artificial Sequence: Synthetic oligonucleotide
acguugcuuuggcaugaag

SEQ ID NO: 204427 - RNA, 19 nt, Artificial Sequence
  Description of Artificial Sequence: Synthetic oligonucleotide
caucguucagugcgucuac

SEQ ID NO: 204428 - RNA, 19 nt, Artificial Sequence
  Description of Artificial Sequence: Synthetic oligonucleotide
gcugugaucacgucaauau

SEQ ID NO: 204429 - RNA, 19 nt, Artificial Sequence
  Description of Artificial Sequence: Synthetic oligonucleotide
cuaacgucuuucuguaacu

SEQ ID NO: 204430 - RNA, 19 nt, Artificial Sequence
  Description of Artificial Sequence: Synthetic oligonucleotide
cguagaaauguaacauuac

SEQ ID NO: 204431 - RNA, 19 nt, Artificial Sequence
  Description of Artificial Sequence: Synthetic oligonucleotide
cucacuuucgccacucccu

SEQ ID NO: 204432 - RNA, 19 nt, Artificial Sequence
  Description of Artificial Sequence: Synthetic oligonucleotide
ggauuucaucguucagugc

SEQ ID NO: 204433 - RNA, 19 nt, Artificial Sequence
  Description of Artificial Sequence: Synthetic oligonucleotide
ucguugguuucaggauagg

SEQ ID NO: 204434 - RNA, 19 nt, Artificial Sequence
  Description of Artificial Sequence: Synthetic oligonucleotide
cggauuucaucguucagug

SEQ ID NO: 204435 - RNA, 19 nt, Artificial Sequence
  Description of Artificial Sequence: Synthetic oligonucleotide
gugaacuggucaacugaug

SEQ ID NO: 204436 - RNA, 19 nt, Artificial Sequence
  Description of Artificial Sequence: Synthetic oligonucleotide
cuggccauaguaucuuuua

SEQ ID NO: 204437 - RNA, 19 nt, Artificial Sequence
  Description of Artificial Sequence: Synthetic oligonucleotide
cuguaaaugacacccugau

SEQ ID NO: 204438 - RNA, 19 nt, Artificial Sequence
  Description of Artificial Sequence: Synthetic oligonucleotide
guuucugcgcagguuuuca

SEQ ID NO: 204439 - RNA, 19 nt, Artificial Sequence
  Description of Artificial Sequence: Synthetic oligonucleotide
uugucaaaccugggauugu

SEQ ID NO: 204440 - RNA, 19 nt, Artificial Sequence
  Description of Artificial Sequence: Synthetic oligonucleotide
uaguucuaucuuucuuauu

SEQ ID NO: 204441 - RNA, 19 nt, Artificial Sequence
  Description of Artificial Sequence: Synthetic oligonucleotide
ccauaguaauuccuuucac

SEQ ID NO: 204442 - RNA, 19 nt, Artificial Sequence
  Description of Artificial Sequence: Synthetic oligonucleotide
cgaaguucaagcacguuca

SEQ ID NO: 204443 - RNA, 19 nt, Artificial Sequence
  Description of Artificial Sequence: Synthetic oligonucleotide
ccugugaacuggucaacug

SEQ ID NO: 204444 - RNA, 19 nt, Artificial Sequence
  Description of Artificial Sequence: Synthetic oligonucleotide
cagcgauucucugguagac

SEQ ID NO: 204445 - RNA, 19 nt, Artificial Sequence
  Description of Artificial Sequence: Synthetic oligonucleotide
uagcaauuccucgcucuuc

SEQ ID NO: 204446 - RNA, 19 nt, Artificial Sequence
  Description of Artificial Sequence: Synthetic oligonucleotide
agcgauucucugguagacu

SEQ ID NO: 204447 - RNA, 19 nt, Artificial Sequence
  Description of Artificial Sequence: Synthetic oligonucleotide
ggauaggcgguaucucuca

SEQ ID NO: 204448 - RNA, 19 nt, Artificial Sequence
  Description of Artificial Sequence: Synthetic oligonucleotide
gauugauuuguagccccua

SEQ ID NO: 204449 - RNA, 19 nt, Artificial Sequence
  Description of Artificial Sequence: Synthetic oligonucleotide
aggcgguaucucucacauc

SEQ ID NO: 204450 - RNA, 19 nt, Artificial Sequence
  Description of Artificial Sequence: Synthetic oligonucleotide
agggaccccaacucccgga

SEQ ID NO: 204451 - RNA, 19 nt, Artificial Sequence
  Description of Artificial Sequence: Synthetic oligonucleotide
uccgacagaugagugucuu

SEQ ID NO: 204452 - RNA, 19 nt, Artificial Sequence
  Description of Artificial Sequence: Synthetic oligonucleotide
cacgagcuagcugaguaga

SEQ ID NO: 204453 - RNA, 19 nt, Artificial Sequence
  Description of Artificial Sequence: Synthetic oligonucleotide
caggauaggcgguaucucu

SEQ ID NO: 204454 - RNA, 19 nt, Artificial Sequence
  Description of Artificial Sequence: Synthetic oligonucleotide
uuucagcgauucucuggua

SEQ ID NO: 204455 - RNA, 19 nt, Artificial Sequence
  Description of Artificial Sequence: Synthetic oligonucleotide
cugaguugagaaagcaaau

SEQ ID NO: 204456 - RNA, 19 nt, Artificial Sequence
  Description of Artificial Sequence: Synthetic oligonucleotide
guucaggccuaaaaguagu

SEQ ID NO: 204457 - RNA, 19 nt, Artificial Sequence
  Description of Artificial Sequence: Synthetic oligonucleotide
ccuguaaaugacacccuga

SEQ ID NO: 204458 - RNA, 19 nt, Artificial Sequence
  Description of Artificial Sequence: Synthetic oligonucleotide
agccccuauccaauuccuc

SEQ ID NO: 204459 - RNA, 19 nt, Artificial Sequence
  Description of Artificial Sequence: Synthetic oligonucleotide
gcuccgacagaugaguguc

SEQ ID NO: 204460 - RNA, 19 nt, Artificial Sequence
  Description of Artificial Sequence: Synthetic oligonucleotide
ucagugcgucuacucuuuu

SEQ ID NO: 204461 - RNA, 19 nt, Artificial Sequence
  Description of Artificial Sequence: Synthetic oligonucleotide
caugcuccgacagaugagu

SEQ ID NO: 204462 - RNA, 19 nt, Artificial Sequence
  Description of Artificial Sequence: Synthetic oligonucleotide
aucguucagugcgucuacu

SEQ ID NO: 204463 - RNA, 19 nt, Artificial Sequence
  Description of Artificial Sequence: Synthetic oligonucleotide
uggguagcuugagccaauc

SEQ ID NO: 204464 - RNA, 19 nt, Artificial Sequence
  Description of Artificial Sequence: Synthetic oligonucleotide
guugacggauuucaucguu

SEQ ID NO: 204465 - RNA, 19 nt, Artificial Sequence
  Description of Artificial Sequence: Synthetic oligonucleotide
uguuaccagcagugaccuc

SEQ ID NO: 204466 - RNA, 19 nt, Artificial Sequence
  Description of Artificial Sequence: Synthetic oligonucleotide
cucugauaauaugcuaucu

SEQ ID NO: 204467 - RNA, 19 nt, Artificial Sequence
  Description of Artificial Sequence: Synthetic oligonucleotide
cacuuucgccacucccuuc

SEQ ID NO: 204468 - RNA, 19 nt, Artificial Sequence
  Description of Artificial Sequence: Synthetic oligonucleotide
gaaguucaagcacguucau

SEQ ID NO: 204469 - RNA, 19 nt, Artificial Sequence
  Description of Artificial Sequence: Synthetic oligonucleotide
gcugaguagaaacuuccau

SEQ ID NO: 204470 - RNA, 19 nt, Artificial Sequence
  Description of Artificial Sequence: Synthetic oligonucleotide
cuuccaugcuccgacagau

SEQ ID NO: 204471 - RNA, 19 nt, Artificial Sequence
  Description of Artificial Sequence: Synthetic oligonucleotide
auuugucggcugacucaag

SEQ ID NO: 204472 - RNA, 19 nt, Artificial Sequence
  Description of Artificial Sequence: Synthetic oligonucleotide
uggcagcgagugccuguug

SEQ ID NO: 204473 - RNA, 19 nt, Artificial Sequence
  Description of Artificial Sequence: Synthetic oligonucleotide
guccaagcguuuccucaga

SEQ ID NO: 204474 - RNA, 19 nt, Artificial Sequence
  Description of Artificial Sequence: Synthetic oligonucleotide
cugcgcagguuuucauuga

SEQ ID NO: 204475 - RNA, 19 nt, Artificial Sequence
  Description of Artificial Sequence: Synthetic oligonucleotide
guaccucaguuuacugauc

SEQ ID NO: 204476 - RNA, 19 nt, Artificial Sequence
  Description of Artificial Sequence: Synthetic oligonucleotide
gccccuauccaauuccucu

SEQ ID NO: 204477 - RNA, 19 nt, Artificial Sequence
  Description of Artificial Sequence: Synthetic oligonucleotide
cacccugauuccaacuccu

SEQ ID NO: 204478 - RNA, 19 nt, Artificial Sequence
  Description of Artificial Sequence: Synthetic oligonucleotide
uacguugcuuuggcaugaa

SEQ ID NO: 204479 - RNA, 19 nt, Artificial Sequence
  Description of Artificial Sequence: Synthetic oligonucleotide
guaauuccuuucacuuugu

SEQ ID NO: 204480 - RNA, 19 nt, Artificial Sequence
  Description of Artificial Sequence: Synthetic oligonucleotide
gucggcugacucaaguagu

SEQ ID NO: 204481 - RNA, 19 nt, Artificial Sequence
  Description of Artificial Sequence: Synthetic oligonucleotide
cgaguaauaauaccuucua

SEQ ID NO: 204482 - RNA, 19 nt, Artificial Sequence
  Description of Artificial Sequence: Synthetic oligonucleotide
caauaugacuaaccuuauu

SEQ ID NO: 204483 - RNA, 19 nt, Artificial Sequence
  Description of Artificial Sequence: Synthetic oligonucleotide
acgagcuagcugaguagaa

SEQ ID NO: 204484 - RNA, 19 nt, Artificial Sequence
  Description of Artificial Sequence: Synthetic oligonucleotide
ccaccagguacuaacuucu

SEQ ID NO: 204485 - RNA, 19 nt, Artificial Sequence
  Description of Artificial Sequence: Synthetic oligonucleotide
ccuacccugcuuugcauaa

SEQ ID NO: 204486 - RNA, 19 nt, Artificial Sequence
  Description of Artificial Sequence: Synthetic oligonucleotide
gguuucaggauaggcggua

SEQ ID NO: 204487 - RNA, 19 nt, Artificial Sequence
  Description of Artificial Sequence: Synthetic oligonucleotide
caguuccuaguucugcuuu

SEQ ID NO: 204488 - RNA, 19 nt, Artificial Sequence
  Description of Artificial Sequence: Synthetic oligonucleotide
gcgucuacucuuuucugau

SEQ ID NO: 204489 - RNA, 19 nt, Artificial Sequence
  Description of Artificial Sequence: Synthetic oligonucleotide
guuucaggauaggcgguau

SEQ ID NO: 204490 - RNA, 19 nt, Artificial Sequence
  Description of Artificial Sequence: Synthetic oligonucleotide
caaguaguucaggccuaaa

SEQ ID NO: 204491 - RNA, 19 nt, Artificial Sequence
  Description of Artificial Sequence: Synthetic oligonucleotide
ccccucucacuuucgccac

SEQ ID NO: 204492 - RNA, 19 nt, Artificial Sequence
  Description of Artificial Sequence: Synthetic oligonucleotide
cgacuauacguagaaaugu

SEQ ID NO: 204493 - RNA, 19 nt, Artificial Sequence
  Description of Artificial Sequence: Synthetic oligonucleotide
cgucuacucuuuucugauc

SEQ ID NO: 204494 - RNA, 19 nt, Artificial Sequence
  Description of Artificial Sequence: Synthetic oligonucleotide
gagucucuaucugcugcau

SEQ ID NO: 204495 - RNA, 19 nt, Artificial Sequence
  Description of Artificial Sequence: Synthetic oligonucleotide
auacuucacugaaguucuu

SEQ ID NO: 204496 - RNA, 19 nt, Artificial Sequence
  Description of Artificial Sequence: Synthetic oligonucleotide
uguccgccugagagcuguu

SEQ ID NO: 204497 - RNA, 19 nt, Artificial Sequence
  Description of Artificial Sequence: Synthetic oligonucleotide
cuuugccaccagguacuaa

SEQ ID NO: 204498 - RNA, 19 nt, Artificial Sequence
  Description of Artificial Sequence: Synthetic oligonucleotide
cuccgacagaugagugucu

SEQ ID NO: 204499 - RNA, 19 nt, Artificial Sequence
  Description of Artificial Sequence: Synthetic oligonucleotide
cuacccugcuuugcauaaa

SEQ ID NO: 204500 - RNA, 19 nt, Artificial Sequence
  Description of Artificial Sequence: Synthetic oligonucleotide
cgguaucucucacaucuaa

SEQ ID NO: 204501 - RNA, 19 nt, Artificial Sequence
  Description of Artificial Sequence: Synthetic oligonucleotide
cguucagugcgucuacucu

SEQ ID NO: 204502 - RNA, 19 nt, Artificial Sequence
  Description of Artificial Sequence: Synthetic oligonucleotide
cccuacccugcuuugcaua

SEQ ID NO: 204503 - RNA, 19 nt, Artificial Sequence
  Description of Artificial Sequence: Synthetic oligonucleotide
cgagcuagcugaguagaaa

SEQ ID NO: 204504 - RNA, 19 nt, Artificial Sequence
  Description of Artificial Sequence: Synthetic oligonucleotide
ccaugugugguaucaucuu

SEQ ID NO: 204505 - RNA, 19 nt, Artificial Sequence
  Description of Artificial Sequence: Synthetic oligonucleotide
cucucacaucuaacuuguu

SEQ ID NO: 204506 - RNA, 19 nt, Artificial Sequence
  Description of Artificial Sequence: Synthetic oligonucleotide
ccucgacuauacguagaaa

SEQ ID NO: 204507 - RNA, 19 nt, Artificial Sequence
  Description of Artificial Sequence: Synthetic oligonucleotide
ccaagcguuuccucagauu

SEQ ID NO: 204508 - RNA, 19 nt, Artificial Sequence
  Description of Artificial Sequence: Synthetic oligonucleotide
cggcugacucaaguaguuc

SEQ ID NO: 204509 - RNA, 19 nt, Artificial Sequence
  Description of Artificial Sequence: Synthetic oligonucleotide
gcgguaucucucacaucua

SEQ ID NO: 204510 - RNA, 19 nt, Artificial Sequence
  Description of Artificial Sequence: Synthetic oligonucleotide
gcccugucgguuggucauc

SEQ ID NO: 204511 - RNA, 19 nt, Artificial Sequence
  Description of Artificial Sequence: Synthetic oligonucleotide
cccugucgguuggucaucu

SEQ ID NO: 204512 - RNA, 19 nt, Artificial Sequence
  Description of Artificial Sequence: Synthetic oligonucleotide
cccucucacuuucgccacu

SEQ ID NO: 204513 - RNA, 19 nt, Artificial Sequence
  Description of Artificial Sequence: Synthetic oligonucleotide
ccugucgguuggucaucuu

SEQ ID NO: 204514 - RNA, 19 nt, Artificial Sequence
  Description of Artificial Sequence: Synthetic oligonucleotide
agcaagauacucuaguugc

SEQ ID NO: 204515 - RNA, 19 nt, Artificial Sequence
  Description of Artificial Sequence: Synthetic oligonucleotide
aaccaaacuaaacaaagug

SEQ ID NO: 204516 - RNA, 19 nt, Artificial Sequence
  Description of Artificial Sequence: Synthetic oligonucleotide
aaacuaaacaaagugaugu

SEQ ID NO: 204517 - RNA, 19 nt, Artificial Sequence
  Description of Artificial Sequence: Synthetic oligonucleotide
uguuauuugggcaaguaca

SEQ ID NO: 204518 - RNA, 19 nt, Artificial Sequence
  Description of Artificial Sequence: Synthetic oligonucleotide
aacaauacgcaagucaugg

SEQ ID NO: 204519 - RNA, 19 nt, Artificial Sequence
  Description of Artificial Sequence: Synthetic oligonucleotide
uuugaaguuauauucacuc

SEQ ID NO: 204520 - RNA, 19 nt, Artificial Sequence
  Description of Artificial Sequence: Synthetic oligonucleotide
aagaacaauacgcaaguca

SEQ ID NO: 204521 - RNA, 19 nt, Artificial Sequence
  Description of Artificial Sequence: Synthetic oligonucleotide
ugugaagaaauucggaucu

SEQ ID NO: 204522 - RNA, 19 nt, Artificial Sequence
  Description of Artificial Sequence: Synthetic oligonucleotide
aauaacuuaacaguuugcu

SEQ ID NO: 204523 - RNA, 19 nt, Artificial Sequence
  Description of Artificial Sequence: Synthetic oligonucleotide
aguacagugguuuuaaaga

SEQ ID NO: 204524 - RNA, 19 nt, Artificial Sequence
  Description of Artificial Sequence: Synthetic oligonucleotide
ucucaauauccucugagag

SEQ ID NO: 204525 - RNA, 19 nt, Artificial Sequence
  Description of Artificial Sequence: Synthetic oligonucleotide
aagucuuagaggcccgucc

SEQ ID NO: 204526 - RNA, 19 nt, Artificial Sequence
  Description of Artificial Sequence: Synthetic oligonucleotide
aggauucucagucugagag

SEQ ID NO: 204527 - RNA, 19 nt, Artificial Sequence
  Description of Artificial Sequence: Synthetic oligonucleotide
aauacgcaagucauggacc

SEQ ID NO: 204528 - RNA, 19 nt, Artificial Sequence
  Description of Artificial Sequence: Synthetic oligonucleotide
acuaaacaaagugaugugc

SEQ ID NO: 204529 - RNA, 19 nt, Artificial Sequence
  Description of Artificial Sequence: Synthetic oligonucleotide
ucuagaacugaguugauaa

SEQ ID NO: 204530 - RNA, 19 nt, Artificial Sequence
  Description of Artificial Sequence: Synthetic oligonucleotide
uuugguagcagucuagaac

SEQ ID NO: 204531 - RNA, 19 nt, Artificial Sequence
  Description of Artificial Sequence: Synthetic oligonucleotide
aguugauaagccuugguug

SEQ ID NO: 204532 - RNA, 19 nt, Artificial Sequence
  Description of Artificial Sequence: Synthetic oligonucleotide
uuguacgucuucuagaucu

SEQ ID NO: 204533 - RNA, 19 nt, Artificial Sequence
  Description of Artificial Sequence: Synthetic oligonucleotide
uuugcaugcagaauauuca

SEQ ID NO: 204534 - RNA, 19 nt, Artificial Sequence
  Description of Artificial Sequence: Synthetic oligonucleotide
aaaguuccccaguucaggg

SEQ ID NO: 204535 - RNA, 19 nt, Artificial Sequence
  Description of Artificial Sequence: Synthetic oligonucleotide
aacaguuugcuguguuugc

SEQ ID NO: 204536 - RNA, 19 nt, Artificial Sequence
  Description of Artificial Sequence: Synthetic oligonucleotide
uauuugggcaaguacagug

SEQ ID NO: 204537 - RNA, 19 nt, Artificial Sequence
  Description of Artificial Sequence: Synthetic oligonucleotide
ucaauauccucugagagga

SEQ ID NO: 204538 - RNA, 19 nt, Artificial Sequence
  Description of Artificial Sequence: Synthetic oligonucleotide
uuaaagaaccaaacuaaac

SEQ ID NO: 204539 - RNA, 19 nt, Artificial Sequence
  Description of Artificial Sequence: Synthetic oligonucleotide
augaagggcaguuuguacg

SEQ ID NO: 204540 - RNA, 19 nt, Artificial Sequence
  Description of Artificial Sequence: Synthetic oligonucleotide
uugguagcagucuagaacu

SEQ ID NO: 204541 - RNA, 19 nt, Artificial Sequence
  Description of Artificial Sequence: Synthetic oligonucleotide
auaacuacggucuuuuagu

SEQ ID NO: 204542 - RNA, 19 nt, Artificial Sequence
  Description of Artificial Sequence: Synthetic oligonucleotide
gagauuagugacaaguucc

SEQ ID NO: 204543 - RNA, 19 nt, Artificial Sequence
  Description of Artificial Sequence: Synthetic oligonucleotide
uuuaugcaccucuucaucc

SEQ ID NO: 204544 - RNA, 19 nt, Artificial Sequence
  Description of Artificial Sequence: Synthetic oligonucleotide
uuugugaagaaauucggau

SEQ ID NO: 204545 - RNA, 19 nt, Artificial Sequence
  Description of Artificial Sequence: Synthetic oligonucleotide
aaagugaugugcagggagc

SEQ ID NO: 204546 - RNA, 19 nt, Artificial Sequence
  Description of Artificial Sequence: Synthetic oligonucleotide
aagagcgcucaguuguucc

SEQ ID NO: 204547 - RNA, 19 nt, Artificial Sequence
  Description of Artificial Sequence: Synthetic oligonucleotide
uagaauucuguguaugcag

SEQ ID NO: 204548 - RNA, 19 nt, Artificial Sequence
  Description of Artificial Sequence: Synthetic oligonucleotide
uuaucuuaaguguuucagc

SEQ ID NO: 204549 - RNA, 19 nt, Artificial Sequence
  Description of Artificial Sequence: Synthetic oligonucleotide
aacuaaacaaagugaugug

SEQ ID NO: 204550 - RNA, 19 nt, Artificial Sequence
  Description of Artificial Sequence: Synthetic oligonucleotide
agaacugaguugauaagcc

SEQ ID NO: 204551 - RNA, 19 nt, Artificial Sequence
  Description of Artificial Sequence: Synthetic oligonucleotide
ucaacuuccucguucauuc

SEQ ID NO: 204552 - RNA, 19 nt, Artificial Sequence
  Description of Artificial Sequence: Synthetic oligonucleotide
cucaauauccucugagagg

SEQ ID NO: 204553 - RNA, 19 nt, Artificial Sequence
  Description of Artificial Sequence: Synthetic oligonucleotide
uggucaauuucaaauuuca

SEQ ID NO: 204554 - RNA, 19 nt, Artificial Sequence
  Description of Artificial Sequence: Synthetic oligonucleotide
uacuaugaagggcaguuug

SEQ ID NO: 204555 - RNA, 19 nt, Artificial Sequence
  Description of Artificial Sequence: Synthetic oligonucleotide
cugccauuuaaccucaucc

SEQ ID NO: 204556 - RNA, 19 nt, Artificial Sequence
  Description of Artificial Sequence: Synthetic oligonucleotide
auaacuuaacaguuugcug

SEQ ID NO: 204557 - RNA, 19 nt, Artificial Sequence
  Description of Artificial Sequence: Synthetic oligonucleotide
ugaaguuauauucacucuu

SEQ ID NO: 204558 - RNA, 19 nt, Artificial Sequence
  Description of Artificial Sequence: Synthetic oligonucleotide
ucuccuuuucuugaaaugc

SEQ ID NO: 204559 - RNA, 19 nt, Artificial Sequence
  Description of Artificial Sequence: Synthetic oligonucleotide
uccaauuuugaccgaagcu

SEQ ID NO: 204560 - RNA, 19 nt, Artificial Sequence
  Description of Artificial Sequence: Synthetic oligonucleotide
guaggaauccuguaugcag

SEQ ID NO: 204561 - RNA, 19 nt, Artificial Sequence
  Description of Artificial Sequence: Synthetic oligonucleotide
uuuaacucguguugaagcu

SEQ ID NO: 204562 - RNA, 19 nt, Artificial Sequence
  Description of Artificial Sequence: Synthetic oligonucleotide
auauucacucuuccucugc

SEQ ID NO: 204563 - RNA, 19 nt, Artificial Sequence
  Description of Artificial Sequence: Synthetic oligonucleotide
caaguuaucguaggaaucc

SEQ ID NO: 204564 - RNA, 19 nt, Artificial Sequence
  Description of Artificial Sequence: Synthetic oligonucleotide
uuugaauuauucagcucug

SEQ ID NO: 204565 - RNA, 19 nt, Artificial Sequence
  Description of Artificial Sequence: Synthetic oligonucleotide
uggauuugguucaugagau

SEQ ID NO: 204566 - RNA, 19 nt, Artificial Sequence
  Description of Artificial Sequence: Synthetic oligonucleotide
uguguaugcaggaagccaa

SEQ ID NO: 204567 - RNA, 19 nt, Artificial Sequence
  Description of Artificial Sequence: Synthetic oligonucleotide
uuugaugaccuacuaacuu

SEQ ID NO: 204568 - RNA, 19 nt, Artificial Sequence
  Description of Artificial Sequence: Synthetic oligonucleotide
ucgcacuacauauugaauc

SEQ ID NO: 204569 - RNA, 19 nt, Artificial Sequence
  Description of Artificial Sequence: Synthetic oligonucleotide
cuaguuucuguacuuuugc

SEQ ID NO: 204570 - RNA, 19 nt, Artificial Sequence
  Description of Artificial Sequence: Synthetic oligonucleotide
ucauggaccucacauuuca

SEQ ID NO: 204571 - RNA, 19 nt, Artificial Sequence
  Description of Artificial Sequence: Synthetic oligonucleotide
guucgcucaucucaggugg

SEQ ID NO: 204572 - RNA, 19 nt, Artificial Sequence
  Description of Artificial Sequence: Synthetic oligonucleotide
uaacucguguugaagcucc

SEQ ID NO: 204573 - RNA, 19 nt, Artificial Sequence
  Description of Artificial Sequence: Synthetic oligonucleotide
uuucgucagagacagcucu

SEQ ID NO: 204574 - RNA, 19 nt, Artificial Sequence
  Description of Artificial Sequence: Synthetic oligonucleotide
aggaguugugauuuuaacu

SEQ ID NO: 204575 - RNA, 19 nt, Artificial Sequence
  Description of Artificial Sequence: Synthetic oligonucleotide
ugaauuauucagcucuguc

SEQ ID NO: 204576 - RNA, 19 nt, Artificial Sequence
  Description of Artificial Sequence: Synthetic oligonucleotide
acugaucacauuuucagua

SEQ ID NO: 204577 - RNA, 19 nt, Artificial Sequence
  Description of Artificial Sequence: Synthetic oligonucleotide
uuacugcgcaacaugauuc

SEQ ID NO: 204578 - RNA, 19 nt, Artificial Sequence
  Description of Artificial Sequence: Synthetic oligonucleotide
aagacuguucgcucaucuc

SEQ ID NO: 204579 - RNA, 19 nt, Artificial Sequence
  Description of Artificial Sequence: Synthetic oligonucleotide
uuuucaagauugagguuug

SEQ ID NO: 204580 - RNA, 19 nt, Artificial Sequence
  Description of Artificial Sequence: Synthetic oligonucleotide
uuccaauuuugaccgaagc

SEQ ID NO: 204581 - RNA, 19 nt, Artificial Sequence
  Description of Artificial Sequence: Synthetic oligonucleotide
uucagcauuucuucaauaa

SEQ ID NO: 204582 - RNA, 19 nt, Artificial Sequence
  Description of Artificial Sequence: Synthetic oligonucleotide
cuauacuccaguuucguca

SEQ ID NO: 204583 - RNA, 19 nt, Artificial Sequence
  Description of Artificial Sequence: Synthetic oligonucleotide
uuuugaccgaagcuucucc

SEQ ID NO: 204584 - RNA, 19 nt, Artificial Sequence
  Description of Artificial Sequence: Synthetic oligonucleotide
caauacgcaagucauggac

SEQ ID NO: 204585 - RNA, 19 nt, Artificial Sequence
  Description of Artificial Sequence: Synthetic oligonucleotide
uugugaagaaauucggauc

SEQ ID NO: 204586 - RNA, 19 nt, Artificial Sequence
  Description of Artificial Sequence: Synthetic oligonucleotide
aguuucgucagagacagcu

SEQ ID NO: 204587 - RNA, 19 nt, Artificial Sequence
  Description of Artificial Sequence: Synthetic oligonucleotide
uugucagaaucucuggacu

SEQ ID NO: 204588 - RNA, 19 nt, Artificial Sequence
  Description of Artificial Sequence: Synthetic oligonucleotide
ugaauuugcaggaguugug

SEQ ID NO: 204589 - RNA, 19 nt, Artificial Sequence
  Description of Artificial Sequence: Synthetic oligonucleotide
aucguaggaauccuguaug

SEQ ID NO: 204590 - RNA, 19 nt, Artificial Sequence
  Description of Artificial Sequence: Synthetic oligonucleotide
ugcgcaacaugauucauaa

SEQ ID NO: 204591 - RNA, 19 nt, Artificial Sequence
  Description of Artificial Sequence: Synthetic oligonucleotide
guuauuugggcaaguacag

SEQ ID NO: 204592 - RNA, 19 nt, Artificial Sequence
  Description of Artificial Sequence: Synthetic oligonucleotide
ugcuguucacauuuggcca

SEQ ID NO: 204593 - RNA, 19 nt, Artificial Sequence
  Description of Artificial Sequence: Synthetic oligonucleotide
ugucaaaauucuguugaag

SEQ ID NO: 204594 - RNA, 19 nt, Artificial Sequence
  Description of Artificial Sequence: Synthetic oligonucleotide
ugcaaguuaucguaggaau

SEQ ID NO: 204595 - RNA, 19 nt, Artificial Sequence
  Description of Artificial Sequence: Synthetic oligonucleotide
uucuuuugguuuaacucgu

SEQ ID NO: 204596 - RNA, 19 nt, Artificial Sequence
  Description of Artificial Sequence: Synthetic oligonucleotide
uacuaacuuuccauuuucc

SEQ ID NO: 204597 - RNA, 19 nt, Artificial Sequence
  Description of Artificial Sequence: Synthetic oligonucleotide
ucucauuuugaaguuauau

SEQ ID NO: 204598 - RNA, 19 nt, Artificial Sequence
  Description of Artificial Sequence: Synthetic oligonucleotide
ugaucucuuaauugcugag

SEQ ID NO: 204599 - RNA, 19 nt, Artificial Sequence
  Description of Artificial Sequence: Synthetic oligonucleotide
uaacaguuugcuguguuug

SEQ ID NO: 204600 - RNA, 19 nt, Artificial Sequence
  Description of Artificial Sequence: Synthetic oligonucleotide
ugccauuuaaccucaucca

SEQ ID NO: 204601 - RNA, 19 nt, Artificial Sequence
  Description of Artificial Sequence: Synthetic oligonucleotide
agacuguucgcucaucuca

SEQ ID NO: 204602 - RNA, 19 nt, Artificial Sequence
  Description of Artificial Sequence: Synthetic oligonucleotide
cuuugugacaaggugcugc

SEQ ID NO: 204603 - RNA, 19 nt, Artificial Sequence
  Description of Artificial Sequence: Synthetic oligonucleotide
uuugcagcucugaagcugu

SEQ ID NO: 204604 - RNA, 19 nt, Artificial Sequence
  Description of Artificial Sequence: Synthetic oligonucleotide
uuaagaagcuuuuccuggu

SEQ ID NO: 204605 - RNA, 19 nt, Artificial Sequence
  Description of Artificial Sequence: Synthetic oligonucleotide
ugaccuacuaacuuuccau

SEQ ID NO: 204606 - RNA, 19 nt, Artificial Sequence
  Description of Artificial Sequence: Synthetic oligonucleotide
uacagugguuuuaaagaac

SEQ ID NO: 204607 - RNA, 19 nt, Artificial Sequence
  Description of Artificial Sequence: Synthetic oligonucleotide
ugaugaccuacuaacuuuc

SEQ ID NO: 204608 - RNA, 19 nt, Artificial Sequence
  Description of Artificial Sequence: Synthetic oligonucleotide
aggauuacugcgcaacaug

SEQ ID NO: 204609 - RNA, 19 nt, Artificial Sequence
  Description of Artificial Sequence: Synthetic oligonucleotide
uucaggguaucuaugguuu

SEQ ID NO: 204610 - RNA, 19 nt, Artificial Sequence
  Description of Artificial Sequence: Synthetic oligonucleotide
auacugaggauuacugcgc

SEQ ID NO: 204611 - RNA, 19 nt, Artificial Sequence
  Description of Artificial Sequence: Synthetic oligonucleotide
cucguguugaagcuccugg

SEQ ID NO: 204612 - RNA, 19 nt, Artificial Sequence
  Description of Artificial Sequence: Synthetic oligonucleotide
uucuucaaauuguaaugac

SEQ ID NO: 204613 - RNA, 19 nt, Artificial Sequence
  Description of Artificial Sequence: Synthetic oligonucleotide
ugcucuagacuccaaaguu

SEQ ID NO: 204614 - RNA, 19 nt, Artificial Sequence
  Description of Artificial Sequence: Synthetic oligonucleotide
uuaaccucauccagcuggc

SEQ ID NO: 204615 - RNA, 19 nt, Artificial Sequence
  Description of Artificial Sequence: Synthetic oligonucleotide
auaagccuugguuggagug

SEQ ID NO: 204616 - RNA, 19 nt, Artificial Sequence
  Description of Artificial Sequence: Synthetic oligonucleotide
gaccucacauuucaaaaca

SEQ ID NO: 204617 - RNA, 19 nt, Artificial Sequence
  Description of Artificial Sequence: Synthetic oligonucleotide
ucuccuuacuaugaagggc

SEQ ID NO: 204618 - RNA, 19 nt, Artificial Sequence
  Description of Artificial Sequence: Synthetic oligonucleotide
aguucugauucgcucaacu

SEQ ID NO: 204619 - RNA, 19 nt, Artificial Sequence
  Description of Artificial Sequence: Synthetic oligonucleotide
uccaaagacuguucgcuca

SEQ ID NO: 204620 - RNA, 19 nt, Artificial Sequence
  Description of Artificial Sequence: Synthetic oligonucleotide
agaacaauacgcaagucau

SEQ ID NO: 204621 - RNA, 19 nt, Artificial Sequence
  Description of Artificial Sequence: Synthetic oligonucleotide
agggcuugacuuugguagc

SEQ ID NO: 204622 - RNA, 19 nt, Artificial Sequence
  Description of Artificial Sequence: Synthetic oligonucleotide
uggagugguaauuaucuua

SEQ ID NO: 204623 - RNA, 19 nt, Artificial Sequence
  Description of Artificial Sequence: Synthetic oligonucleotide
uggaccucacauuucaaaa

SEQ ID NO: 204624 - RNA, 19 nt, Artificial Sequence
  Description of Artificial Sequence: Synthetic oligonucleotide
uugaugaccuacuaacuuu

SEQ ID NO: 204625 - RNA, 19 nt, Artificial Sequence
  Description of Artificial Sequence: Synthetic oligonucleotide
uuuauucagcugagaaacu

SEQ ID NO: 204626 - RNA, 19 nt, Artificial Sequence
  Description of Artificial Sequence: Synthetic oligonucleotide
accaaacuaaacaaaguga

SEQ ID NO: 204627 - RNA, 19 nt, Artificial Sequence
  Description of Artificial Sequence: Synthetic oligonucleotide
uccgaguuagcucuuugaa

SEQ ID NO: 204628 - RNA, 19 nt, Artificial Sequence
  Description of Artificial Sequence: Synthetic oligonucleotide
ucagcacgcaacuuuucug

SEQ ID NO: 204629 - RNA, 19 nt, Artificial Sequence
  Description of Artificial Sequence: Synthetic oligonucleotide
uuuucagcacgcaacuuuu

SEQ ID NO: 204630 - RNA, 19 nt, Artificial Sequence
  Description of Artificial Sequence: Synthetic oligonucleotide
ugaagggcaguuuguacgu

SEQ ID NO: 204631 - RNA, 19 nt, Artificial Sequence
  Description of Artificial Sequence: Synthetic oligonucleotide
auuacugcgcaacaugauu

SEQ ID NO: 204632 - RNA, 19 nt, Artificial Sequence
  Description of Artificial Sequence: Synthetic oligonucleotide
uguucgcucaucucaggug

SEQ ID NO: 204633 - RNA, 19 nt, Artificial Sequence
  Description of Artificial Sequence: Synthetic oligonucleotide
ucuugagucgcacuacaua

SEQ ID NO: 204634 - RNA, 19 nt, Artificial Sequence
  Description of Artificial Sequence: Synthetic oligonucleotide
agucgcacuacauauugaa

SEQ ID NO: 204635 - RNA, 19 nt, Artificial Sequence
  Description of Artificial Sequence: Synthetic oligonucleotide
ugaggauuacugcgcaaca

SEQ ID NO: 204636 - RNA, 19 nt, Artificial Sequence
  Description of Artificial Sequence: Synthetic oligonucleotide
cuccuuacuaugaagggca

SEQ ID NO: 204637 - RNA, 19 nt, Artificial Sequence
  Description of Artificial Sequence: Synthetic oligonucleotide
auuugggcaaguacagugg

SEQ ID NO: 204638 - RNA, 19 nt, Artificial Sequence
  Description of Artificial Sequence: Synthetic oligonucleotide
uugacuugaagagcgcuca

SEQ ID NO: 204639 - RNA, 19 nt, Artificial Sequence
  Description of Artificial Sequence: Synthetic oligonucleotide
uugguuuaacucguguuga

SEQ ID NO: 204640 - RNA, 19 nt, Artificial Sequence
  Description of Artificial Sequence: Synthetic oligonucleotide
cuguuauuugggcaaguac

SEQ ID NO: 204641 - RNA, 19 nt, Artificial Sequence
  Description of Artificial Sequence: Synthetic oligonucleotide
ucguaggaauccuguaugc

SEQ ID NO: 204642 - RNA, 19 nt, Artificial Sequence
  Description of Artificial Sequence: Synthetic oligonucleotide
uccuuuauucugaggauuu

SEQ ID NO: 204643 - RNA, 19 nt, Artificial Sequence
  Description of Artificial Sequence: Synthetic oligonucleotide
uucuagaucuguuuucauu

SEQ ID NO: 204644 - RNA, 19 nt, Artificial Sequence
  Description of Artificial Sequence: Synthetic oligonucleotide
cuacuaacuuuccauuuuc

SEQ ID NO: 204645 - RNA, 19 nt, Artificial Sequence
  Description of Artificial Sequence: Synthetic oligonucleotide
aguccgaagcucuucagaa

SEQ ID NO: 204646 - RNA, 19 nt, Artificial Sequence
  Description of Artificial Sequence: Synthetic oligonucleotide
uucaaauuguaaugacaau

SEQ ID NO: 204647 - RNA, 19 nt, Artificial Sequence
  Description of Artificial Sequence: Synthetic oligonucleotide
cagcaagauacucuaguug

SEQ ID NO: 204648 - RNA, 19 nt, Artificial Sequence
  Description of Artificial Sequence: Synthetic oligonucleotide
ucugauugccaccauccuu

SEQ ID NO: 204649 - RNA, 19 nt, Artificial Sequence
  Description of Artificial Sequence: Synthetic oligonucleotide
uguacgucuucuagaucug

SEQ ID NO: 204650 - RNA, 19 nt, Artificial Sequence
  Description of Artificial Sequence: Synthetic oligonucleotide
auauccucugagaggauuc

SEQ ID NO: 204651 - RNA, 19 nt, Artificial Sequence
  Description of Artificial Sequence: Synthetic oligonucleotide
uacugaggauuacugcgca

SEQ ID NO: 204652 - RNA, 19 nt, Artificial Sequence
  Description of Artificial Sequence: Synthetic oligonucleotide
auccagcuugacuugaaga

SEQ ID NO: 204653 - RNA, 19 nt, Artificial Sequence
  Description of Artificial Sequence: Synthetic oligonucleotide
augcucuagacuccaaagu

SEQ ID NO: 204654 - RNA, 19 nt, Artificial Sequence
  Description of Artificial Sequence: Synthetic oligonucleotide
agcucuguuauuugggcaa

SEQ ID NO: 204655 - RNA, 19 nt, Artificial Sequence
  Description of Artificial Sequence: Synthetic oligonucleotide
ugcuagaauucuguguaug

SEQ ID NO: 204656 - RNA, 19 nt, Artificial Sequence
  Description of Artificial Sequence: Synthetic oligonucleotide
aauauccucugagaggauu

SEQ ID NO: 204657 - RNA, 19 nt, Artificial Sequence
  Description of Artificial Sequence: Synthetic oligonucleotide
gaauuugcaggaguuguga

SEQ ID NO: 204658 - RNA, 19 nt, Artificial Sequence
  Description of Artificial Sequence: Synthetic oligonucleotide
ugacgcacagccucaagaa

SEQ ID NO: 204659 - RNA, 19 nt, Artificial Sequence
  Description of Artificial Sequence: Synthetic oligonucleotide
cuggucaauuucaaauuuc

SEQ ID NO: 204660 - RNA, 19 nt, Artificial Sequence
  Description of Artificial Sequence: Synthetic oligonucleotide
ucuuuugguuuaacucgug

SEQ ID NO: 204661 - RNA, 19 nt, Artificial Sequence
  Description of Artificial Sequence: Synthetic oligonucleotide
uuuccgaguuagcucuuug

SEQ ID NO: 204662 - RNA, 19 nt, Artificial Sequence
  Description of Artificial Sequence: Synthetic oligonucleotide
uuauucagcugagaaacuu

SEQ ID NO: 204663 - RNA, 19 nt, Artificial Sequence
  Description of Artificial Sequence: Synthetic oligonucleotide
guagcagucuagaacugag

SEQ ID NO: 204664 - RNA, 19 nt, Artificial Sequence
  Description of Artificial Sequence: Synthetic oligonucleotide
aacugaguugauaagccuu

SEQ ID NO: 204665 - RNA, 19 nt, Artificial Sequence
  Description of Artificial Sequence: Synthetic oligonucleotide
gccucaagaaccuuuaaga

SEQ ID NO: 204666 - RNA, 19 nt, Artificial Sequence
  Description of Artificial Sequence: Synthetic oligonucleotide
uuaacaguuugcuguguuu

SEQ ID NO: 204667 - RNA, 19 nt, Artificial Sequence
  Description of Artificial Sequence: Synthetic oligonucleotide
augaccuacuaacuuucca

SEQ ID NO: 204668 - RNA, 19 nt, Artificial Sequence
  Description of Artificial Sequence: Synthetic oligonucleotide
agucuuagaggcccgucca

SEQ ID NO: 204669 - RNA, 19 nt, Artificial Sequence
  Description of Artificial Sequence: Synthetic oligonucleotide
auucgcucaacuuccucgu

SEQ ID NO: 204670 - RNA, 19 nt, Artificial Sequence
  Description of Artificial Sequence: Synthetic oligonucleotide
aacuacggucuuuuaguuu

SEQ ID NO: 204671 - RNA, 19 nt, Artificial Sequence
  Description of Artificial Sequence: Synthetic oligonucleotide
gacaaguuccuugucagaa

SEQ ID NO: 204672 - RNA, 19 nt, Artificial Sequence
  Description of Artificial Sequence: Synthetic oligonucleotide
uuccgaguuagcucuuuga

SEQ ID NO: 204673 - RNA, 19 nt, Artificial Sequence
  Description of Artificial Sequence: Synthetic oligonucleotide
auuugcaauuuauguccug

SEQ ID NO: 204674 - RNA, 19 nt, Artificial Sequence
  Description of Artificial Sequence: Synthetic oligonucleotide
uacugcgcaacaugauuca

SEQ ID NO: 204675 - RNA, 19 nt, Artificial Sequence
  Description of Artificial Sequence: Synthetic oligonucleotide
gaaagacugaagcucagau

SEQ ID NO: 204676 - RNA, 19 nt, Artificial Sequence
  Description of Artificial Sequence: Synthetic oligonucleotide
uccuuacuaugaagggcag

SEQ ID NO: 204677 - RNA, 19 nt, Artificial Sequence
  Description of Artificial Sequence: Synthetic oligonucleotide
ucguguugaagcuccugga

SEQ ID NO: 204678 - RNA, 19 nt, Artificial Sequence
  Description of Artificial Sequence: Synthetic oligonucleotide
aaguuaucguaggaauccu

SEQ ID NO: 204679 - RNA, 19 nt, Artificial Sequence
  Description of Artificial Sequence: Synthetic oligonucleotide
ugggcagauugcaguagcc

SEQ ID NO: 204680 - RNA, 19 nt, Artificial Sequence
  Description of Artificial Sequence: Synthetic oligonucleotide
uacucgguagcagaaucca

SEQ ID NO: 204681 - RNA, 19 nt, Artificial Sequence
  Description of Artificial Sequence: Synthetic oligonucleotide
uugcaaguuaucguaggaa

SEQ ID NO: 204682 - RNA, 19 nt, Artificial Sequence
  Description of Artificial Sequence: Synthetic oligonucleotide
agcacgcaacuuuucuguc

SEQ ID NO: 204683 - RNA, 19 nt, Artificial Sequence
  Description of Artificial Sequence: Synthetic oligonucleotide
cugaggauuacugcgcaac

SEQ ID NO: 204684 - RNA, 19 nt, Artificial Sequence
  Description of Artificial Sequence: Synthetic oligonucleotide
uuaacucguguugaagcuc

SEQ ID NO: 204685 - RNA, 19 nt, Artificial Sequence
  Description of Artificial Sequence: Synthetic oligonucleotide
cucaucucagguggcaccg

SEQ ID NO: 204686 - RNA, 19 nt, Artificial Sequence
  Description of Artificial Sequence: Synthetic oligonucleotide
uucugauguagguuuugau

SEQ ID NO: 204687 - RNA, 19 nt, Artificial Sequence
  Description of Artificial Sequence: Synthetic oligonucleotide
uuuguacgucuucuagauc

SEQ ID NO: 204688 - RNA, 19 nt, Artificial Sequence
  Description of Artificial Sequence: Synthetic oligonucleotide
agauuagugacaaguuccu

SEQ ID NO: 204689 - RNA, 19 nt, Artificial Sequence
  Description of Artificial Sequence: Synthetic oligonucleotide
ucaacucucugcucucuuc

SEQ ID NO: 204690 - RNA, 19 nt, Artificial Sequence
  Description of Artificial Sequence: Synthetic oligonucleotide
agccauagcaacauuguau

SEQ ID NO: 204691 - RNA, 19 nt, Artificial Sequence
  Description of Artificial Sequence: Synthetic oligonucleotide
uuaguuuagcucuguuauu

SEQ ID NO: 204692 - RNA, 19 nt, Artificial Sequence
  Description of Artificial Sequence: Synthetic oligonucleotide
ggaguugugauuuuaacuu

SEQ ID NO: 204693 - RNA, 19 nt, Artificial Sequence
  Description of Artificial Sequence: Synthetic oligonucleotide
uaacuacggucuuuuaguu

SEQ ID NO: 204694 - RNA, 19 nt, Artificial Sequence
  Description of Artificial Sequence: Synthetic oligonucleotide
gacuuugguagcagucuag

SEQ ID NO: 204695 - RNA, 19 nt, Artificial Sequence
  Description of Artificial Sequence: Synthetic oligonucleotide
uugaauuauucagcucugu

SEQ ID NO: 204696 - RNA, 19 nt, Artificial Sequence
  Description of Artificial Sequence: Synthetic oligonucleotide
cucuagcugucucauuuug

SEQ ID NO: 204697 - RNA, 19 nt, Artificial Sequence
  Description of Artificial Sequence: Synthetic oligonucleotide
ucaucagaauacugaggau

SEQ ID NO: 204698 - RNA, 19 nt, Artificial Sequence
  Description of Artificial Sequence: Synthetic oligonucleotide
uuuugggacucuguggaua

SEQ ID NO: 204699 - RNA, 19 nt, Artificial Sequence
  Description of Artificial Sequence: Synthetic oligonucleotide
gaugaccuacuaacuuucc

SEQ ID NO: 204700 - RNA, 19 nt, Artificial Sequence
  Description of Artificial Sequence: Synthetic oligonucleotide
acaauacgcaagucaugga

SEQ ID NO: 204701 - RNA, 19 nt, Artificial Sequence
  Description of Artificial Sequence: Synthetic oligonucleotide
auuuaaccucauccagcug

SEQ ID NO: 204702 - RNA, 19 nt, Artificial Sequence
  Description of Artificial Sequence: Synthetic oligonucleotide
gaaggugcuauacuccagu

SEQ ID NO: 204703 - RNA, 19 nt, Artificial Sequence
  Description of Artificial Sequence: Synthetic oligonucleotide
accuacuaacuuuccauuu

SEQ ID NO: 204704 - RNA, 19 nt, Artificial Sequence
  Description of Artificial Sequence: Synthetic oligonucleotide
acgcaacuuuucugucucc

SEQ ID NO: 204705 - RNA, 19 nt, Artificial Sequence
  Description of Artificial Sequence: Synthetic oligonucleotide
acuuugguagcagucuaga

SEQ ID NO: 204706 - RNA, 19 nt, Artificial Sequence
  Description of Artificial Sequence: Synthetic oligonucleotide
ugguguuuugggacucugu

SEQ ID NO: 204707 - RNA, 19 nt, Artificial Sequence
  Description of Artificial Sequence: Synthetic oligonucleotide
aucagaauacugaggauua

SEQ ID NO: 204708 - RNA, 19 nt, Artificial Sequence
  Description of Artificial Sequence: Synthetic oligonucleotide
cagcauaucccucucaaua

SEQ ID NO: 204709 - RNA, 19 nt, Artificial Sequence
  Description of Artificial Sequence: Synthetic oligonucleotide
gguuuaacucguguugaag

SEQ ID NO: 204710 - RNA, 19 nt, Artificial Sequence
  Description of Artificial Sequence: Synthetic oligonucleotide
ugguuuaacucguguugaa

SEQ ID NO: 204711 - RNA, 19 nt, Artificial Sequence
  Description of Artificial Sequence: Synthetic oligonucleotide
agacuccaggcgcagauuu

SEQ ID NO: 204712 - RNA, 19 nt, Artificial Sequence
  Description of Artificial Sequence: Synthetic oligonucleotide
uuucagcacgcaacuuuuc

SEQ ID NO: 204713 - RNA, 19 nt, Artificial Sequence
  Description of Artificial Sequence: Synthetic oligonucleotide
uacgucuucuagaucuguu

SEQ ID NO: 204714 - RNA, 19 nt, Artificial Sequence
  Description of Artificial Sequence: Synthetic oligonucleotide
guacauuuucagcacgcaa

SEQ ID NO: 204715 - RNA, 19 nt, Artificial Sequence
  Description of Artificial Sequence: Synthetic oligonucleotide
ggacucuguggauacucgg

SEQ ID NO: 204716 - RNA, 19 nt, Artificial Sequence
  Description of Artificial Sequence: Synthetic oligonucleotide
agaaccuuuaagauuucuu

SEQ ID NO: 204717 - RNA, 19 nt, Artificial Sequence
  Description of Artificial Sequence: Synthetic oligonucleotide
agagcgcucaguuguuccu

SEQ ID NO: 204718 - RNA, 19 nt, Artificial Sequence
  Description of Artificial Sequence: Synthetic oligonucleotide
agauugcaguagcccagag

SEQ ID NO: 204719 - RNA, 19 nt, Artificial Sequence
  Description of Artificial Sequence: Synthetic oligonucleotide
aguuaucguaggaauccug

SEQ ID NO: 204720 - RNA, 19 nt, Artificial Sequence
  Description of Artificial Sequence: Synthetic oligonucleotide
ucaggguaucuaugguuuc

SEQ ID NO: 204721 - RNA, 19 nt, Artificial Sequence
  Description of Artificial Sequence: Synthetic oligonucleotide
cugaucaacucucugcucu

SEQ ID NO: 204722 - RNA, 19 nt, Artificial Sequence
  Description of Artificial Sequence: Synthetic oligonucleotide
cugaguugauaagccuugg

SEQ ID NO: 204723 - RNA, 19 nt, Artificial Sequence
  Description of Artificial Sequence: Synthetic oligonucleotide
cucuagacuccaaaguucu

SEQ ID NO: 204724 - RNA, 19 nt, Artificial Sequence
  Description of Artificial Sequence: Synthetic oligonucleotide
gaacugaguugauaagccu

SEQ ID NO: 204725 - RNA, 19 nt, Artificial Sequence
  Description of Artificial Sequence: Synthetic oligonucleotide
cuuguuucaggguaucuau

SEQ ID NO: 204726 - RNA, 19 nt, Artificial Sequence
  Description of Artificial Sequence: Synthetic oligonucleotide
cugacgcacagccucaaga

SEQ ID NO: 204727 - RNA, 19 nt, Artificial Sequence
  Description of Artificial Sequence: Synthetic oligonucleotide
ccaaaguucugauucgcuc

SEQ ID NO: 204728 - RNA, 19 nt, Artificial Sequence
  Description of Artificial Sequence: Synthetic oligonucleotide
aguagcaagcaagcuuucu

SEQ ID NO: 204729 - RNA, 19 nt, Artificial Sequence
  Description of Artificial Sequence: Synthetic oligonucleotide
ucuuagaggcccguccauc

SEQ ID NO: 204730 - RNA, 19 nt, Artificial Sequence
  Description of Artificial Sequence: Synthetic oligonucleotide
accggcucauuuaauauau

SEQ ID NO: 204731 - RNA, 19 nt, Artificial Sequence
  Description of Artificial Sequence: Synthetic oligonucleotide
ggcagauugcaguagccca

SEQ ID NO: 204732 - RNA, 19 nt, Artificial Sequence
  Description of Artificial Sequence: Synthetic oligonucleotide
gcaauuuauguccuggagu

SEQ ID NO: 204733 - RNA, 19 nt, Artificial Sequence
  Description of Artificial Sequence: Synthetic oligonucleotide
guuaucguaggaauccugu

SEQ ID NO: 204734 - RNA, 19 nt, Artificial Sequence
  Description of Artificial Sequence: Synthetic oligonucleotide
uuggagugguaauuaucuu

SEQ ID NO: 204735 - RNA, 19 nt, Artificial Sequence
  Description of Artificial Sequence: Synthetic oligonucleotide
gauugcaguagcccagagu

SEQ ID NO: 204736 - RNA, 19 nt, Artificial Sequence
  Description of Artificial Sequence: Synthetic oligonucleotide
ugauugccaccauccuucu

SEQ ID NO: 204737 - RNA, 19 nt, Artificial Sequence
  Description of Artificial Sequence: Synthetic oligonucleotide
gauccuuuauucugaggau

SEQ ID NO: 204738 - RNA, 19 nt, Artificial Sequence
  Description of Artificial Sequence: Synthetic oligonucleotide
caugauucauaacuacggu

SEQ ID NO: 204739 - RNA, 19 nt, Artificial Sequence
  Description of Artificial Sequence: Synthetic oligonucleotide
aggugcuauacuccaguuu

SEQ ID NO: 204740 - RNA, 19 nt, Artificial Sequence
  Description of Artificial Sequence: Synthetic oligonucleotide
ggauuacugcgcaacauga

SEQ ID NO: 204741 - RNA, 19 nt, Artificial Sequence
  Description of Artificial Sequence: Synthetic oligonucleotide
gauacucuaguugcuuucu

SEQ ID NO: 204742 - RNA, 19 nt, Artificial Sequence
  Description of Artificial Sequence: Synthetic oligonucleotide
uacggucuuuuaguuuagc

SEQ ID NO: 204743 - RNA, 19 nt, Artificial Sequence
  Description of Artificial Sequence: Synthetic oligonucleotide
cuuugacaaucuccucuuc

SEQ ID NO: 204744 - RNA, 19 nt, Artificial Sequence
  Description of Artificial Sequence: Synthetic oligonucleotide
gaaccugaaccugcacaug

SEQ ID NO: 204745 - RNA, 19 nt, Artificial Sequence
  Description of Artificial Sequence: Synthetic oligonucleotide
uucgucagagacagcucuu

SEQ ID NO: 204746 - RNA, 19 nt, Artificial Sequence
  Description of Artificial Sequence: Synthetic oligonucleotide
auaucccucucaauauccu

SEQ ID NO: 204747 - RNA, 19 nt, Artificial Sequence
  Description of Artificial Sequence: Synthetic oligonucleotide
cuuugguagcagucuagaa

SEQ ID NO: 204748 - RNA, 19 nt, Artificial Sequence
  Description of Artificial Sequence: Synthetic oligonucleotide
ggguaucuaugguuucugc

SEQ ID NO: 204749 - RNA, 19 nt, Artificial Sequence
  Description of Artificial Sequence: Synthetic oligonucleotide
ccgaguuagcucuuugaac

SEQ ID NO: 204750 - RNA, 19 nt, Artificial Sequence
  Description of Artificial Sequence: Synthetic oligonucleotide
uuagaggcccguccaucuu

SEQ ID NO: 204751 - RNA, 19 nt, Artificial Sequence
  Description of Artificial Sequence: Synthetic oligonucleotide
ggcuuaguuccuucucuug

SEQ ID NO: 204752 - RNA, 19 nt, Artificial Sequence
  Description of Artificial Sequence: Synthetic oligonucleotide
cuuuugguuuaacucgugu

SEQ ID NO: 204753 - RNA, 19 nt, Artificial Sequence
  Description of Artificial Sequence: Synthetic oligonucleotide
acugaggauuacugcgcaa

SEQ ID NO: 204754 - RNA, 19 nt, Artificial Sequence
  Description of Artificial Sequence: Synthetic oligonucleotide
ucacaugcucuagcugucu

SEQ ID NO: 204755 - RNA, 19 nt, Artificial Sequence
  Description of Artificial Sequence: Synthetic oligonucleotide
cacaguccgaagcucuuca

SEQ ID NO: 204756 - RNA, 19 nt, Artificial Sequence
  Description of Artificial Sequence: Synthetic oligonucleotide
guuucaggguaucuauggu

SEQ ID NO: 204757 - RNA, 19 nt, Artificial Sequence
  Description of Artificial Sequence: Synthetic oligonucleotide
cacaugcucuagcugucuc

SEQ ID NO: 204758 - RNA, 19 nt, Artificial Sequence
  Description of Artificial Sequence: Synthetic oligonucleotide
ugcacaguccgaagcucuu

SEQ ID NO: 204759 - RNA, 19 nt, Artificial Sequence
  Description of Artificial Sequence: Synthetic oligonucleotide
cuuagaggcccguccaucu

SEQ ID NO: 204760 - RNA, 19 nt, Artificial Sequence
  Description of Artificial Sequence: Synthetic oligonucleotide
gcaaguuaucguaggaauc

SEQ ID NO: 204761 - RNA, 19 nt, Artificial Sequence
  Description of Artificial Sequence: Synthetic oligonucleotide
gaagagcgcucaguuguuc

SEQ ID NO: 204762 - RNA, 19 nt, Artificial Sequence
  Description of Artificial Sequence: Synthetic oligonucleotide
gagcgcucaguuguuccug

SEQ ID NO: 204763 - RNA, 19 nt, Artificial Sequence
  Description of Artificial Sequence: Synthetic oligonucleotide
gauucauaacuacggucuu

SEQ ID NO: 204764 - RNA, 19 nt, Artificial Sequence
  Description of Artificial Sequence: Synthetic oligonucleotide
gggacucuguggauacucg

SEQ ID NO: 204765 - RNA, 19 nt, Artificial Sequence
  Description of Artificial Sequence: Synthetic oligonucleotide
aggcccguccaucuucuau

SEQ ID NO: 204766 - RNA, 19 nt, Artificial Sequence
  Description of Artificial Sequence: Synthetic oligonucleotide
cagucugagaguuucuuuu

SEQ ID NO: 204767 - RNA, 19 nt, Artificial Sequence
  Description of Artificial Sequence: Synthetic oligonucleotide
cuaguugcuuucucaacau

SEQ ID NO: 204768 - RNA, 19 nt, Artificial Sequence
  Description of Artificial Sequence: Synthetic oligonucleotide
cuaugaagggcaguuugua

SEQ ID NO: 204769 - RNA, 19 nt, Artificial Sequence
  Description of Artificial Sequence: Synthetic oligonucleotide
cagcacgcaacuuuucugu

SEQ ID NO: 204770 - RNA, 19 nt, Artificial Sequence
  Description of Artificial Sequence: Synthetic oligonucleotide
guuucgucagagacagcuc

SEQ ID NO: 204771 - RNA, 19 nt, Artificial Sequence
  Description of Artificial Sequence: Synthetic oligonucleotide
ucgcucaucucagguggca

SEQ ID NO: 204772 - RNA, 19 nt, Artificial Sequence
  Description of Artificial Sequence: Synthetic oligonucleotide
gcuauacuccaguuucguc

SEQ ID NO: 204773 - RNA, 19 nt, Artificial Sequence
  Description of Artificial Sequence: Synthetic oligonucleotide
gcucuagacuccaaaguuc

SEQ ID NO: 204774 - RNA, 19 nt, Artificial Sequence
  Description of Artificial Sequence: Synthetic oligonucleotide
gcaacaugauucauaacua

SEQ ID NO: 204775 - RNA, 19 nt, Artificial Sequence
  Description of Artificial Sequence: Synthetic oligonucleotide
acucguguugaagcuccug

SEQ ID NO: 204776 - RNA, 19 nt, Artificial Sequence
  Description of Artificial Sequence: Synthetic oligonucleotide
uuuuccgaguuagcucuuu

SEQ ID NO: 204777 - RNA, 19 nt, Artificial Sequence
  Description of Artificial Sequence: Synthetic oligonucleotide
acagccucaagaaccuuua

SEQ ID NO: 204778 - RNA, 19 nt, Artificial Sequence
  Description of Artificial Sequence: Synthetic oligonucleotide
ggcccguccaucuucuauc

SEQ ID NO: 204779 - RNA, 19 nt, Artificial Sequence
  Description of Artificial Sequence: Synthetic oligonucleotide
gcgcagauuuuccauuuca

SEQ ID NO: 204780 - RNA, 19 nt, Artificial Sequence
  Description of Artificial Sequence: Synthetic oligonucleotide
gagucgcacuacauauuga

SEQ ID NO: 204781 - RNA, 19 nt, Artificial Sequence
  Description of Artificial Sequence: Synthetic oligonucleotide
cugcgcaacaugauucaua

SEQ ID NO: 204782 - RNA, 19 nt, Artificial Sequence
  Description of Artificial Sequence: Synthetic oligonucleotide
gcaaguacagugguuuuaa

SEQ ID NO: 204783 - RNA, 19 nt, Artificial Sequence
  Description of Artificial Sequence: Synthetic oligonucleotide
gguagcagucuagaacuga

SEQ ID NO: 204784 - RNA, 19 nt, Artificial Sequence
  Description of Artificial Sequence: Synthetic oligonucleotide
guucugauucgcucaacuu

SEQ ID NO: 204785 - RNA, 19 nt, Artificial Sequence
  Description of Artificial Sequence: Synthetic oligonucleotide
gauuacugcgcaacaugau

SEQ ID NO: 204786 - RNA, 19 nt, Artificial Sequence
  Description of Artificial Sequence: Synthetic oligonucleotide
gacuugaagagcgcucagu

SEQ ID NO: 204787 - RNA, 19 nt, Artificial Sequence
  Description of Artificial Sequence: Synthetic oligonucleotide
caccggcucauuuaauaua

SEQ ID NO: 204788 - RNA, 19 nt, Artificial Sequence
  Description of Artificial Sequence: Synthetic oligonucleotide
ggcaccggcucauuuaaua

SEQ ID NO: 204789 - RNA, 19 nt, Artificial Sequence
  Description of Artificial Sequence: Synthetic oligonucleotide
auacuccaguuucgucaga

SEQ ID NO: 204790 - RNA, 19 nt, Artificial Sequence
  Description of Artificial Sequence: Synthetic oligonucleotide
aacucguguugaagcuccu

SEQ ID NO: 204791 - RNA, 19 nt, Artificial Sequence
  Description of Artificial Sequence: Synthetic oligonucleotide
cagaauggugucucuaguu

SEQ ID NO: 204792 - RNA, 19 nt, Artificial Sequence
  Description of Artificial Sequence: Synthetic oligonucleotide
ucaguggcaugggccagau

SEQ ID NO: 204793 - RNA, 19 nt, Artificial Sequence
  Description of Artificial Sequence: Synthetic oligonucleotide
gaggauuacugcgcaacau

SEQ ID NO: 204794 - RNA, 19 nt, Artificial Sequence
  Description of Artificial Sequence: Synthetic oligonucleotide
acugcgcaacaugauucau

SEQ ID NO: 204795 - RNA, 19 nt, Artificial Sequence
  Description of Artificial Sequence: Synthetic oligonucleotide
cauggaccucacauuucaa

SEQ ID NO: 204796 - RNA, 19 nt, Artificial Sequence
  Description of Artificial Sequence: Synthetic oligonucleotide
gcucuguuauuugggcaag

SEQ ID NO: 204797 - RNA, 19 nt, Artificial Sequence
  Description of Artificial Sequence: Synthetic oligonucleotide
ccaauuuugaccgaagcuu

SEQ ID NO: 204798 - RNA, 19 nt, Artificial Sequence
  Description of Artificial Sequence: Synthetic oligonucleotide
cuccugacgcacagccuca

SEQ ID NO: 204799 - RNA, 19 nt, Artificial Sequence
  Description of Artificial Sequence: Synthetic oligonucleotide
caguuucgucagagacagc

SEQ ID NO: 204800 - RNA, 19 nt, Artificial Sequence
  Description of Artificial Sequence: Synthetic oligonucleotide
ggcgcuugcaggcuuuugu

SEQ ID NO: 204801 - RNA, 19 nt, Artificial Sequence
  Description of Artificial Sequence: Synthetic oligonucleotide
ggcgcagauuuuccauuuc

SEQ ID NO: 204802 - RNA, 19 nt, Artificial Sequence
  Description of Artificial Sequence: Synthetic oligonucleotide
uggcgcuugcaggcuuuug

SEQ ID NO: 204803 - RNA, 19 nt, Artificial Sequence
  Description of Artificial Sequence: Synthetic oligonucleotide
cuucuagaucuguuuucau

SEQ ID NO: 204804 - RNA, 19 nt, Artificial Sequence
  Description of Artificial Sequence: Synthetic oligonucleotide
ccguccaucuucuaucucu

SEQ ID NO: 204805 - RNA, 19 nt, Artificial Sequence
  Description of Artificial Sequence: Synthetic oligonucleotide
cgcacuacauauugaaucu

SEQ ID NO: 204806 - RNA, 19 nt, Artificial Sequence
  Description of Artificial Sequence: Synthetic oligonucleotide
gcuguucacauuuggccau

SEQ ID NO: 204807 - RNA, 19 nt, Artificial Sequence
  Description of Artificial Sequence: Synthetic oligonucleotide
ggcaaguacagugguuuua

SEQ ID NO: 204808 - RNA, 19 nt, Artificial Sequence
  Description of Artificial Sequence: Synthetic oligonucleotide
gucgcacuacauauugaau

SEQ ID NO: 204809 - RNA, 19 nt, Artificial Sequence
  Description of Artificial Sequence: Synthetic oligonucleotide
guacgucuucuagaucugu

SEQ ID NO: 204810 - RNA, 19 nt, Artificial Sequence
  Description of Artificial Sequence: Synthetic oligonucleotide
cugauucgcucaacuuccu

SEQ ID NO: 204811 - RNA, 19 nt, Artificial Sequence
  Description of Artificial Sequence: Synthetic oligonucleotide
gcaccggcucauuuaauau

SEQ ID NO: 204812 - RNA, 19 nt, Artificial Sequence
  Description of Artificial Sequence: Synthetic oligonucleotide
gucuuagaggcccguccau

SEQ ID NO: 204813 - RNA, 19 nt, Artificial Sequence
  Description of Artificial Sequence: Synthetic oligonucleotide
ggcugaaaaugggguggug

SEQ ID NO: 204814 - RNA, 19 nt, Artificial Sequence
  Description of Artificial Sequence: Synthetic oligonucleotide
ccugacgcacagccucaag

SEQ ID NO: 204815 - RNA, 19 nt, Artificial Sequence
  Description of Artificial Sequence: Synthetic oligonucleotide
cagccucaagaaccuuuaa

SEQ ID NO: 204816 - RNA, 19 nt, Artificial Sequence
  Description of Artificial Sequence: Synthetic oligonucleotide
gcgcaacaugauucauaac

SEQ ID NO: 204817 - RNA, 19 nt, Artificial Sequence
  Description of Artificial Sequence: Synthetic oligonucleotide
ccggcucauuuaauauauc

SEQ ID NO: 204818 - RNA, 19 nt, Artificial Sequence
  Description of Artificial Sequence: Synthetic oligonucleotide
uuggcgcuugcaggcuuuu

SEQ ID NO: 204819 - RNA, 19 nt, Artificial Sequence
  Description of Artificial Sequence: Synthetic oligonucleotide
cagcagaaugaagaacaau

SEQ ID NO: 204820 - RNA, 19 nt, Artificial Sequence
  Description of Artificial Sequence: Synthetic oligonucleotide
ggauauccacuuccuguuu

SEQ ID NO: 204821 - RNA, 19 nt, Artificial Sequence
  Description of Artificial Sequence: Synthetic oligonucleotide
caauauccucugagaggau

SEQ ID NO: 204822 - RNA, 19 nt, Artificial Sequence
  Description of Artificial Sequence: Synthetic oligonucleotide
ggaauccuguaugcaggcu

SEQ ID NO: 204823 - RNA, 19 nt, Artificial Sequence
  Description of Artificial Sequence: Synthetic oligonucleotide
ggauacucgguagcagaau

SEQ ID NO: 204824 - RNA, 19 nt, Artificial Sequence
  Description of Artificial Sequence: Synthetic oligonucleotide
gcccguccaucuucuaucu

SEQ ID NO: 204825 - RNA, 19 nt, Artificial Sequence
  Description of Artificial Sequence: Synthetic oligonucleotide
gcgcucaguuguuccugca

SEQ ID NO: 204826 - RNA, 19 nt, Artificial Sequence
  Description of Artificial Sequence: Synthetic oligonucleotide
cgcucaucucagguggcac

SEQ ID NO: 204827 - RNA, 19 nt, Artificial Sequence
  Description of Artificial Sequence: Synthetic oligonucleotide
gcgcuugcaggcuuuuguu

SEQ ID NO: 204828 - RNA, 19 nt, Artificial Sequence
  Description of Artificial Sequence: Synthetic oligonucleotide
cccguccaucuucuaucuc

SEQ ID NO: 204829 - RNA, 19 nt, Artificial Sequence
  Description of Artificial Sequence: Synthetic oligonucleotide
gggcaaguacagugguuuu

SEQ ID NO: 204830 - RNA, 19 nt, Artificial Sequence
  Description of Artificial Sequence: Synthetic oligonucleotide
guaugcaggcuuggcucuu

SEQ ID NO: 204831 - RNA, 19 nt, Artificial Sequence
  Description of Artificial Sequence: Synthetic oligonucleotide
gcaguagcccagagugcuu

SEQ ID NO: 204832 - RNA, 19 nt, Artificial Sequence
  Description of Artificial Sequence: Synthetic oligonucleotide
ccucagcaagccugacauu

SEQ ID NO: 204833 - RNA, 19 nt, Artificial Sequence
  Description of Artificial Sequence: Synthetic oligonucleotide
ugaguugcaaauaaauugg

SEQ ID NO: 204834 - RNA, 19 nt, Artificial Sequence
  Description of Artificial Sequence: Synthetic oligonucleotide
aaaagcaucccauagugug

SEQ ID NO: 204835 - RNA, 19 nt, Artificial Sequence
  Description of Artificial Sequence: Synthetic oligonucleotide
ucagccuucaaacagcugg

SEQ ID NO: 204836 - RNA, 19 nt, Artificial Sequence
  Description of Artificial Sequence: Synthetic oligonucleotide
acuauuuuggaacugcugg

SEQ ID NO: 204837 - RNA, 19 nt, Artificial Sequence
  Description of Artificial Sequence: Synthetic oligonucleotide
uuuaauaucgcuuggccgc

SEQ ID NO: 204838 - RNA, 19 nt, Artificial Sequence
  Description of Artificial Sequence: Synthetic oligonucleotide
ucuaaaagcacacuauuga

SEQ ID NO: 204839 - RNA, 19 nt, Artificial Sequence
  Description of Artificial Sequence: Synthetic oligonucleotide
uuuuaauaucgcuuggccg

SEQ ID NO: 204840 - RNA, 19 nt, Artificial Sequence
  Description of Artificial Sequence: Synthetic oligonucleotide
aauccuacuucuucaggcc

SEQ ID NO: 204841 - RNA, 19 nt, Artificial Sequence
  Description of Artificial Sequence: Synthetic oligonucleotide
uuuugaaccacguugguga

SEQ ID NO: 204842 - RNA, 19 nt, Artificial Sequence
  Description of Artificial Sequence: Synthetic oligonucleotide
ucuaucacagaaauaaaga

SEQ ID NO: 204843 - RNA, 19 nt, Artificial Sequence
  Description of Artificial Sequence: Synthetic oligonucleotide
acaaguauaaguuuaaguu

SEQ ID NO: 204844 - RNA, 19 nt, Artificial Sequence
  Description of Artificial Sequence: Synthetic oligonucleotide
cuuaagacacuuuugcccg

SEQ ID NO: 204845 - RNA, 19 nt, Artificial Sequence
  Description of Artificial Sequence: Synthetic oligonucleotide
gauucuaucacagaaauaa

SEQ ID NO: 204846 - RNA, 19 nt, Artificial Sequence
  Description of Artificial Sequence: Synthetic oligonucleotide
cugaguugcaaauaaauug

SEQ ID NO: 204847 - RNA, 19 nt, Artificial Sequence
  Description of Artificial Sequence: Synthetic oligonucleotide
ucuagauauagcauauuug

SEQ ID NO: 204848 - RNA, 19 nt, Artificial Sequence
  Description of Artificial Sequence: Synthetic oligonucleotide
ugugugauugguuuaguag

SEQ ID NO: 204849 - RNA, 19 nt, Artificial Sequence
  Description of Artificial Sequence: Synthetic oligonucleotide
uuggacagaauuuccaggg

SEQ ID NO: 204850 - RNA, 19 nt, Artificial Sequence
  Description of Artificial Sequence: Synthetic oligonucleotide
uuaagagaaauguuaacuc

SEQ ID NO: 204851 - RNA, 19 nt, Artificial Sequence
  Description of Artificial Sequence: Synthetic oligonucleotide
aguugcucgauacagcgcg

SEQ ID NO: 204852 - RNA, 19 nt, Artificial Sequence
  Description of Artificial Sequence: Synthetic oligonucleotide
ugauaccaggcuuugaucc

SEQ ID NO: 204853 - RNA, 19 nt, Artificial Sequence
  Description of Artificial Sequence: Synthetic oligonucleotide
uauugcagcccucuaaaag

SEQ ID NO: 204854 - RNA, 19 nt, Artificial Sequence
  Description of Artificial Sequence: Synthetic oligonucleotide
ucaauauaccacuuggcca

SEQ ID NO: 204855 - RNA, 19 nt, Artificial Sequence
  Description of Artificial Sequence: Synthetic oligonucleotide
uauagcauauuugaccagg

SEQ ID NO: 204856 - RNA, 19 nt, Artificial Sequence
  Description of Artificial Sequence: Synthetic oligonucleotide
cuagauauagcauauuuga

SEQ ID NO: 204857 - RNA, 19 nt, Artificial Sequence
  Description of Artificial Sequence: Synthetic oligonucleotide
uuggcuaugaugucacugg

SEQ ID NO: 204858 - RNA, 19 nt, Artificial Sequence
  Description of Artificial Sequence: Synthetic oligonucleotide
aagaauuaacucugcaacu

SEQ ID NO: 204859 - RNA, 19 nt, Artificial Sequence
  Description of Artificial Sequence: Synthetic oligonucleotide
uauggauuucuagauauag

SEQ ID NO: 204860 - RNA, 19 nt, Artificial Sequence
  Description of Artificial Sequence: Synthetic oligonucleotide
aaagaugucuuugauagaa

SEQ ID NO: 204861 - RNA, 19 nt, Artificial Sequence
  Description of Artificial Sequence: Synthetic oligonucleotide
uauugaguuugucaggugu

SEQ ID NO: 204862 - RNA, 19 nt, Artificial Sequence
  Description of Artificial Sequence: Synthetic oligonucleotide
uguaagaacugacuuaaau

SEQ ID NO: 204863 - RNA, 19 nt, Artificial Sequence
  Description of Artificial Sequence: Synthetic oligonucleotide
uugaucaugggguuaagga

SEQ ID NO: 204864 - RNA, 19 nt, Artificial Sequence
  Description of Artificial Sequence: Synthetic oligonucleotide
aucuacuuagccuguaggg

SEQ ID NO: 204865 - RNA, 19 nt, Artificial Sequence
  Description of Artificial Sequence: Synthetic oligonucleotide
uaggauauagccacugggc

SEQ ID NO: 204866 - RNA, 19 nt, Artificial Sequence
  Description of Artificial Sequence: Synthetic oligonucleotide
ugaaucaauauaccacuug

SEQ ID NO: 204867 - RNA, 19 nt, Artificial Sequence
  Description of Artificial Sequence: Synthetic oligonucleotide
uucuacaugcuaaaacccc

SEQ ID NO: 204868 - RNA, 19 nt, Artificial Sequence
  Description of Artificial Sequence: Synthetic oligonucleotide
ugucaauauaacaaguaua

SEQ ID NO: 204869 - RNA, 19 nt, Artificial Sequence
  Description of Artificial Sequence: Synthetic oligonucleotide
auggauaacauguacacuu

SEQ ID NO: 204870 - RNA, 19 nt, Artificial Sequence
  Description of Artificial Sequence: Synthetic oligonucleotide
aggcauagugacuuucucc

SEQ ID NO: 204871 - RNA, 19 nt, Artificial Sequence
  Description of Artificial Sequence: Synthetic oligonucleotide
ugaaguucaguguaagaac

SEQ ID NO: 204872 - RNA, 19 nt, Artificial Sequence
  Description of Artificial Sequence: Synthetic oligonucleotide
uuacccuugcaccacagug

SEQ ID NO: 204873 - RNA, 19 nt, Artificial Sequence
  Description of Artificial Sequence: Synthetic oligonucleotide
uguaggaucucccuaugga

SEQ ID NO: 204874 - RNA, 19 nt, Artificial Sequence
  Description of Artificial Sequence: Synthetic oligonucleotide
cuaggauauagccacuggg

SEQ ID NO: 204875 - RNA, 19 nt, Artificial Sequence
  Description of Artificial Sequence: Synthetic oligonucleotide
aaagcaucccauagugugc

SEQ ID NO: 204876 - RNA, 19 nt, Artificial Sequence
  Description of Artificial Sequence: Synthetic oligonucleotide
caauauaacaaguauaagu

SEQ ID NO: 204877 - RNA, 19 nt, Artificial Sequence
  Description of Artificial Sequence: Synthetic oligonucleotide
uauuugaccagggaaacac

SEQ ID NO: 204878 - RNA, 19 nt, Artificial Sequence
  Description of Artificial Sequence: Synthetic oligonucleotide
uuaacucucuguauuugca

SEQ ID NO: 204879 - RNA, 19 nt, Artificial Sequence
  Description of Artificial Sequence: Synthetic oligonucleotide
aacugacuuaaauccaugu

SEQ ID NO: 204880 - RNA, 19 nt, Artificial Sequence
  Description of Artificial Sequence: Synthetic oligonucleotide
uccgcuuaaacccuggguc

SEQ ID NO: 204881 - RNA, 19 nt, Artificial Sequence
  Description of Artificial Sequence: Synthetic oligonucleotide
uucuagauauagcauauuu

SEQ ID NO: 204882 - RNA, 19 nt, Artificial Sequence
  Description of Artificial Sequence: Synthetic oligonucleotide
ugcucuagaagcccuguag

SEQ ID NO: 204883 - RNA, 19 nt, Artificial Sequence
  Description of Artificial Sequence: Synthetic oligonucleotide
ucuagaagcccuguagggg

SEQ ID NO: 204884 - RNA, 19 nt, Artificial Sequence
  Description of Artificial Sequence: Synthetic oligonucleotide
uuugcccguguuuugaacc

SEQ ID NO: 204885 - RNA, 19 nt, Artificial Sequence
  Description of Artificial Sequence: Synthetic oligonucleotide
agaccuguaacaccgggag

SEQ ID NO: 204886 - RNA, 19 nt, Artificial Sequence
  Description of Artificial Sequence: Synthetic oligonucleotide
gaugugagagaccuguaac

SEQ ID NO: 204887 - RNA, 19 nt, Artificial Sequence
  Description of Artificial Sequence: Synthetic oligonucleotide
uucggcaucaguugguacc

SEQ ID NO: 204888 - RNA, 19 nt, Artificial Sequence
  Description of Artificial Sequence: Synthetic oligonucleotide
auguacguggugcuauugc

SEQ ID NO: 204889 - RNA, 19 nt, Artificial Sequence
  Description of Artificial Sequence: Synthetic oligonucleotide
aaaauguaggaucucccua

SEQ ID NO: 204890 - RNA, 19 nt, Artificial Sequence
  Description of Artificial Sequence: Synthetic oligonucleotide
aaggcauagugacuuucuc

SEQ ID NO: 204891 - RNA, 19 nt, Artificial Sequence
  Description of Artificial Sequence: Synthetic oligonucleotide
cuagaagcccuguaggggc

SEQ ID NO: 204892 - RNA, 19 nt, Artificial Sequence
  Description of Artificial Sequence: Synthetic oligonucleotide
aagacuguccccuguaaau

SEQ ID NO: 204893 - RNA, 19 nt, Artificial Sequence
  Description of Artificial Sequence: Synthetic oligonucleotide
ucaauauaacaaguauaag

SEQ ID NO: 204894 - RNA, 19 nt, Artificial Sequence
  Description of Artificial Sequence: Synthetic oligonucleotide
cucuaaaagcacacuauug

SEQ ID NO: 204895 - RNA, 19 nt, Artificial Sequence
  Description of Artificial Sequence: Synthetic oligonucleotide
aguucgguaagcaugcuag

SEQ ID NO: 204896 - RNA, 19 nt, Artificial Sequence
  Description of Artificial Sequence: Synthetic oligonucleotide
aaaugguguguagugaaca

SEQ ID NO: 204897 - RNA, 19 nt, Artificial Sequence
  Description of Artificial Sequence: Synthetic oligonucleotide
ugcuaaaaccccuuuaauu

SEQ ID NO: 204898 - RNA, 19 nt, Artificial Sequence
  Description of Artificial Sequence: Synthetic oligonucleotide
aucagacauuuuaauaucg

SEQ ID NO: 204899 - RNA, 19 nt, Artificial Sequence
  Description of Artificial Sequence: Synthetic oligonucleotide
auggauuucuagauauagc

SEQ ID NO: 204900 - RNA, 19 nt, Artificial Sequence
  Description of Artificial Sequence: Synthetic oligonucleotide
gacagcaugccccucgacc

SEQ ID NO: 204901 - RNA, 19 nt, Artificial Sequence
  Description of Artificial Sequence: Synthetic oligonucleotide
aguugguaccccuucagga

SEQ ID NO: 204902 - RNA, 19 nt, Artificial Sequence
  Description of Artificial Sequence: Synthetic oligonucleotide
aauguaggaucucccuaug

SEQ ID NO: 204903 - RNA, 19 nt, Artificial Sequence
  Description of Artificial Sequence: Synthetic oligonucleotide
cucuagaagcccuguaggg

SEQ ID NO: 204904 - RNA, 19 nt, Artificial Sequence
  Description of Artificial Sequence: Synthetic oligonucleotide
uguacguggugcuauugca

SEQ ID NO: 204905 - RNA, 19 nt, Artificial Sequence
  Description of Artificial Sequence: Synthetic oligonucleotide
gauauagccacugggcaug

SEQ ID NO: 204906 - RNA, 19 nt, Artificial Sequence
  Description of Artificial Sequence: Synthetic oligonucleotide
ucuacuuagccuguaggga

SEQ ID NO: 204907 - RNA, 19 nt, Artificial Sequence
  Description of Artificial Sequence: Synthetic oligonucleotide
aguguaagaacugacuuaa

SEQ ID NO: 204908 - RNA, 19 nt, Artificial Sequence
  Description of Artificial Sequence: Synthetic oligonucleotide
guugguaccccuucaggag

SEQ ID NO: 204909 - RNA, 19 nt, Artificial Sequence
  Description of Artificial Sequence: Synthetic oligonucleotide
auaucuacuuagccuguag

SEQ ID NO: 204910 - RNA, 19 nt, Artificial Sequence
  Description of Artificial Sequence: Synthetic oligonucleotide
aggaguucgguaagcaugc

SEQ ID NO: 204911 - RNA, 19 nt, Artificial Sequence
  Description of Artificial Sequence: Synthetic oligonucleotide
agagacaguugauucuauc

SEQ ID NO: 204912 - RNA, 19 nt, Artificial Sequence
  Description of Artificial Sequence: Synthetic oligonucleotide
cuguagggaacagagacag

SEQ ID NO: 204913 - RNA, 19 nt, Artificial Sequence
  Description of Artificial Sequence: Synthetic oligonucleotide
cauuuuaauaucgcuuggc

SEQ ID NO: 204914 - RNA, 19 nt, Artificial Sequence
  Description of Artificial Sequence: Synthetic oligonucleotide
ugggucucagccuucaaac

SEQ ID NO: 204915 - RNA, 19 nt, Artificial Sequence
  Description of Artificial Sequence: Synthetic oligonucleotide
gaaacgguucucuccauca

SEQ ID NO: 204916 - RNA, 19 nt, Artificial Sequence
  Description of Artificial Sequence: Synthetic oligonucleotide
ucacuauggggcaucucag

SEQ ID NO: 204917 - RNA, 19 nt, Artificial Sequence
  Description of Artificial Sequence: Synthetic oligonucleotide
ugauugguuuaguagguau

SEQ ID NO: 204918 - RNA, 19 nt, Artificial Sequence
  Description of Artificial Sequence: Synthetic oligonucleotide
ucucccuauggauuucuag

SEQ ID NO: 204919 - RNA, 19 nt, Artificial Sequence
  Description of Artificial Sequence: Synthetic oligonucleotide
acaaggaaacgguucucuc

SEQ ID NO: 204920 - RNA, 19 nt, Artificial Sequence
  Description of Artificial Sequence: Synthetic oligonucleotide
gacguguaauucaaacagg

SEQ ID NO: 204921 - RNA, 19 nt, Artificial Sequence
  Description of Artificial Sequence: Synthetic oligonucleotide
uugcacauugcugugguca

SEQ ID NO: 204922 - RNA, 19 nt, Artificial Sequence
  Description of Artificial Sequence: Synthetic oligonucleotide
ucuuugacuuuauuggcua

SEQ ID NO: 204923 - RNA, 19 nt, Artificial Sequence
  Description of Artificial Sequence: Synthetic oligonucleotide
caauauaccacuuggccaa

SEQ ID NO: 204924 - RNA, 19 nt, Artificial Sequence
  Description of Artificial Sequence: Synthetic oligonucleotide
uccgcuuaagacacuuuug

SEQ ID NO: 204925 - RNA, 19 nt, Artificial Sequence
  Description of Artificial Sequence: Synthetic oligonucleotide
ugugagagaccuguaacac

SEQ ID NO: 204926 - RNA, 19 nt, Artificial Sequence
  Description of Artificial Sequence: Synthetic oligonucleotide
ugaccagggaaacacguau

SEQ ID NO: 204927 - RNA, 19 nt, Artificial Sequence
  Description of Artificial Sequence: Synthetic oligonucleotide
acuauggggcaucucagca

SEQ ID NO: 204928 - RNA, 19 nt, Artificial Sequence
  Description of Artificial Sequence: Synthetic oligonucleotide
gugacaaaccuugauauuc

SEQ ID NO: 204929 - RNA, 19 nt, Artificial Sequence
  Description of Artificial Sequence: Synthetic oligonucleotide
uauaccacuuggccaacac

SEQ ID NO: 204930 - RNA, 19 nt, Artificial Sequence
  Description of Artificial Sequence: Synthetic oligonucleotide
caaaaugaaguucagugua

SEQ ID NO: 204931 - RNA, 19 nt, Artificial Sequence
  Description of Artificial Sequence: Synthetic oligonucleotide
cacguauuugugaaugaac

SEQ ID NO: 204932 - RNA, 19 nt, Artificial Sequence
  Description of Artificial Sequence: Synthetic oligonucleotide
uugauccucuuccacccag

SEQ ID NO: 204933 - RNA, 19 nt, Artificial Sequence
  Description of Artificial Sequence: Synthetic oligonucleotide
ugggguuaaggacuucagc

SEQ ID NO: 204934 - RNA, 19 nt, Artificial Sequence
  Description of Artificial Sequence: Synthetic oligonucleotide
acugcuagcugcaaggucu

SEQ ID NO: 204935 - RNA, 19 nt, Artificial Sequence
  Description of Artificial Sequence: Synthetic oligonucleotide
auugaucaugggguuaagg

SEQ ID NO: 204936 - RNA, 19 nt, Artificial Sequence
  Description of Artificial Sequence: Synthetic oligonucleotide
ugucuuuguccgcuuaaac

SEQ ID NO: 204937 - RNA, 19 nt, Artificial Sequence
  Description of Artificial Sequence: Synthetic oligonucleotide
augaagaauuaacucugca

SEQ ID NO: 204938 - RNA, 19 nt, Artificial Sequence
  Description of Artificial Sequence: Synthetic oligonucleotide
ucuagcuuuucuccaucca

SEQ ID NO: 204939 - RNA, 19 nt, Artificial Sequence
  Description of Artificial Sequence: Synthetic oligonucleotide
uguaacaccgggagcagua

SEQ ID NO: 204940 - RNA, 19 nt, Artificial Sequence
  Description of Artificial Sequence: Synthetic oligonucleotide
uguacacuuccucuacagu

SEQ ID NO: 204941 - RNA, 19 nt, Artificial Sequence
  Description of Artificial Sequence: Synthetic oligonucleotide
uuugaaccacguuggugag

SEQ ID NO: 204942 - RNA, 19 nt, Artificial Sequence
  Description of Artificial Sequence: Synthetic oligonucleotide
agaccuccgcuuaagacac

SEQ ID NO: 204943 - RNA, 19 nt, Artificial Sequence
  Description of Artificial Sequence: Synthetic oligonucleotide
uucgcccuuuucuugcagg

SEQ ID NO: 204944 - RNA, 19 nt, Artificial Sequence
  Description of Artificial Sequence: Synthetic oligonucleotide
uuuuacccuugcaccacag

SEQ ID NO: 204945 - RNA, 19 nt, Artificial Sequence
  Description of Artificial Sequence: Synthetic oligonucleotide
ugcgaggacauucaugguu

SEQ ID NO: 204946 - RNA, 19 nt, Artificial Sequence
  Description of Artificial Sequence: Synthetic oligonucleotide
ucgguaagcaugcuagcaa

SEQ ID NO: 204947 - RNA, 19 nt, Artificial Sequence
  Description of Artificial Sequence: Synthetic oligonucleotide
aaguugcucgauacagcgc

SEQ ID NO: 204948 - RNA, 19 nt, Artificial Sequence
  Description of Artificial Sequence: Synthetic oligonucleotide
acagucuuaguuccuuucu

SEQ ID NO: 204949 - RNA, 19 nt, Artificial Sequence
  Description of Artificial Sequence: Synthetic oligonucleotide
cucucgauggauaacaugu

SEQ ID NO: 204950 - RNA, 19 nt, Artificial Sequence
  Description of Artificial Sequence: Synthetic oligonucleotide
aauauaccacuuggccaac

SEQ ID NO: 204951 - RNA, 19 nt, Artificial Sequence
  Description of Artificial Sequence: Synthetic oligonucleotide
uggauaacauguacacuuc

SEQ ID NO: 204952 - RNA, 19 nt, Artificial Sequence
  Description of Artificial Sequence: Synthetic oligonucleotide
cauauuugaccagggaaac

SEQ ID NO: 204953 - RNA, 19 nt, Artificial Sequence
  Description of Artificial Sequence: Synthetic oligonucleotide
aagcaugccacagacccca

SEQ ID NO: 204954 - RNA, 19 nt, Artificial Sequence
  Description of Artificial Sequence: Synthetic oligonucleotide
uuucggauucuuuggcuac

SEQ ID NO: 204955 - RNA, 19 nt, Artificial Sequence
  Description of Artificial Sequence: Synthetic oligonucleotide
uucugcgaggacauucaug

SEQ ID NO: 204956 - RNA, 19 nt, Artificial Sequence
  Description of Artificial Sequence: Synthetic oligonucleotide
aggagguuacuucauugca

SEQ ID NO: 204957 - RNA, 19 nt, Artificial Sequence
  Description of Artificial Sequence: Synthetic oligonucleotide
acuacacacaucaauugcu

SEQ ID NO: 204958 - RNA, 19 nt, Artificial Sequence
  Description of Artificial Sequence: Synthetic oligonucleotide
cucgauggauaacauguac

SEQ ID NO: 204959 - RNA, 19 nt, Artificial Sequence
  Description of Artificial Sequence: Synthetic oligonucleotide
ucccauagugugcaguccu

SEQ ID NO: 204960 - RNA, 19 nt, Artificial Sequence
  Description of Artificial Sequence: Synthetic oligonucleotide
aaccaaauaaguaguguua

SEQ ID NO: 204961 - RNA, 19 nt, Artificial Sequence
  Description of Artificial Sequence: Synthetic oligonucleotide
cacuuaaagauaaacauuu

SEQ ID NO: 204962 - RNA, 19 nt, Artificial Sequence
  Description of Artificial Sequence: Synthetic oligonucleotide
agcacacuauugaucaugg

SEQ ID NO: 204963 - RNA, 19 nt, Artificial Sequence
  Description of Artificial Sequence: Synthetic oligonucleotide
aguuaaagcaccggccuug

SEQ ID NO: 204964 - RNA, 19 nt, Artificial Sequence
  Description of Artificial Sequence: Synthetic oligonucleotide
auagcauauuugaccaggg

SEQ ID NO: 204965 - RNA, 19 nt, Artificial Sequence
  Description of Artificial Sequence: Synthetic oligonucleotide
ugcuauugcagcccucuaa

SEQ ID NO: 204966 - RNA, 19 nt, Artificial Sequence
  Description of Artificial Sequence: Synthetic oligonucleotide
uagcauauuugaccaggga

SEQ ID NO: 204967 - RNA, 19 nt, Artificial Sequence
  Description of Artificial Sequence: Synthetic oligonucleotide
uuauugaguuugucaggug

SEQ ID NO: 204968 - RNA, 19 nt, Artificial Sequence
  Description of Artificial Sequence: Synthetic oligonucleotide
ggucucagccuucaaacag

SEQ ID NO: 204969 - RNA, 19 nt, Artificial Sequence
  Description of Artificial Sequence: Synthetic oligonucleotide
uucgguaagcaugcuagca

SEQ ID NO: 204970 - RNA, 19 nt, Artificial Sequence
  Description of Artificial Sequence: Synthetic oligonucleotide
acuuucggauucuuuggcu

SEQ ID NO: 204971 - RNA, 19 nt, Artificial Sequence
  Description of Artificial Sequence: Synthetic oligonucleotide
gucuagcugggucucagcc

SEQ ID NO: 204972 - RNA, 19 nt, Artificial Sequence
  Description of Artificial Sequence: Synthetic oligonucleotide
auuucuagauauagcauau

SEQ ID NO: 204973 - RNA, 19 nt, Artificial Sequence
  Description of Artificial Sequence: Synthetic oligonucleotide
cguguuuugaaccacguug

SEQ ID NO: 204974 - RNA, 19 nt, Artificial Sequence
  Description of Artificial Sequence: Synthetic oligonucleotide
uguccgcuuaaacccuggg

SEQ ID NO: 204975 - RNA, 19 nt, Artificial Sequence
  Description of Artificial Sequence: Synthetic oligonucleotide
uuaauaucgcuuggccgcc

SEQ ID NO: 204976 - RNA, 19 nt, Artificial Sequence
  Description of Artificial Sequence: Synthetic oligonucleotide
uugauaccaggcuuugauc

SEQ ID NO: 204977 - RNA, 19 nt, Artificial Sequence
  Description of Artificial Sequence: Synthetic oligonucleotide
uggcuaugaugucacuggc

SEQ ID NO: 204978 - RNA, 19 nt, Artificial Sequence
  Description of Artificial Sequence: Synthetic oligonucleotide
acguguaauucaaacagga

SEQ ID NO: 204979 - RNA, 19 nt, Artificial Sequence
  Description of Artificial Sequence: Synthetic oligonucleotide
cucccuauggauuucuaga

SEQ ID NO: 204980 - RNA, 19 nt, Artificial Sequence
  Description of Artificial Sequence: Synthetic oligonucleotide
gaucuggagucacauuuuc

SEQ ID NO: 204981 - RNA, 19 nt, Artificial Sequence
  Description of Artificial Sequence: Synthetic oligonucleotide
agucuagcugggucucagc

SEQ ID NO: 204982 - RNA, 19 nt, Artificial Sequence
  Description of Artificial Sequence: Synthetic oligonucleotide
uacuuagccuguagggaac

SEQ ID NO: 204983 - RNA, 19 nt, Artificial Sequence
  Description of Artificial Sequence: Synthetic oligonucleotide
uuugucagguguggcggcg

SEQ ID NO: 204984 - RNA, 19 nt, Artificial Sequence
  Description of Artificial Sequence: Synthetic oligonucleotide
acucucgauggauaacaug

SEQ ID NO: 204985 - RNA, 19 nt, Artificial Sequence
  Description of Artificial Sequence: Synthetic oligonucleotide
aagcaucccauagugugca

SEQ ID NO: 204986 - RNA, 19 nt, Artificial Sequence
  Description of Artificial Sequence: Synthetic oligonucleotide
acagcgcgcaguuacuuca

SEQ ID NO: 204987 - RNA, 19 nt, Artificial Sequence
  Description of Artificial Sequence: Synthetic oligonucleotide
gcucuagaagcccuguagg

SEQ ID NO: 204988 - RNA, 19 nt, Artificial Sequence
  Description of Artificial Sequence: Synthetic oligonucleotide
cacuuucggauucuuuggc

SEQ ID NO: 204989 - RNA, 19 nt, Artificial Sequence
  Description of Artificial Sequence: Synthetic oligonucleotide
cacauugcacuucugcauc

SEQ ID NO: 204990 - RNA, 19 nt, Artificial Sequence
  Description of Artificial Sequence: Synthetic oligonucleotide
aauaucgcuuggccgccga

SEQ ID NO: 204991 - RNA, 19 nt, Artificial Sequence
  Description of Artificial Sequence: Synthetic oligonucleotide
gugagagaccuguaacacc

SEQ ID NO: 204992 - RNA, 19 nt, Artificial Sequence
  Description of Artificial Sequence: Synthetic oligonucleotide
aguucuagcuuuucuccau

SEQ ID NO: 204993 - RNA, 19 nt, Artificial Sequence
  Description of Artificial Sequence: Synthetic oligonucleotide
ggaaacacguauuugugaa

SEQ ID NO: 204994 - RNA, 19 nt, Artificial Sequence
  Description of Artificial Sequence: Synthetic oligonucleotide
ugggucacuuucugcgagg

SEQ ID NO: 204995 - RNA, 19 nt, Artificial Sequence
  Description of Artificial Sequence: Synthetic oligonucleotide
aacaccgggagcaguagcu

SEQ ID NO: 204996 - RNA, 19 nt, Artificial Sequence
  Description of Artificial Sequence: Synthetic oligonucleotide
uuuacccuugcaccacagu

SEQ ID NO: 204997 - RNA, 19 nt, Artificial Sequence
  Description of Artificial Sequence: Synthetic oligonucleotide
aucauauauccuaaauuaa

SEQ ID NO: 204998 - RNA, 19 nt, Artificial Sequence
  Description of Artificial Sequence: Synthetic oligonucleotide
ggcacuuaaagauaaacau

SEQ ID NO: 204999 - RNA, 19 nt, Artificial Sequence
  Description of Artificial Sequence: Synthetic oligonucleotide
cccugaaucaauauaccac

SEQ ID NO: 205000 - RNA, 19 nt, Artificial Sequence
  Description of Artificial Sequence: Synthetic oligonucleotide
ucucccuuugaagacuaca

SEQ ID NO: 205001 - RNA, 19 nt, Artificial Sequence
  Description of Artificial Sequence: Synthetic oligonucleotide
ccagucaugagcuuucuuc

SEQ ID NO: 205002 - RNA, 19 nt, Artificial Sequence
  Description of Artificial Sequence: Synthetic oligonucleotide
caguugguaccccuucagg

SEQ ID NO: 205003 - RNA, 19 nt, Artificial Sequence
  Description of Artificial Sequence: Synthetic oligonucleotide
uuuugcccguguuuugaac

SEQ ID NO: 205004 - RNA, 19 nt, Artificial Sequence
  Description of Artificial Sequence: Synthetic oligonucleotide
auguuaacucucuguauuu

SEQ ID NO: 205005 - RNA, 19 nt, Artificial Sequence
  Description of Artificial Sequence: Synthetic oligonucleotide
gauucgcaggguugccccg

SEQ ID NO: 205006 - RNA, 19 nt, Artificial Sequence
  Description of Artificial Sequence: Synthetic oligonucleotide
ggauaacauguacacuucc

SEQ ID NO: 205007 - RNA, 19 nt, Artificial Sequence
  Description of Artificial Sequence: Synthetic oligonucleotide
aaauuggccuuaugcuuuu

SEQ ID NO: 205008 - RNA, 19 nt, Artificial Sequence
  Description of Artificial Sequence: Synthetic oligonucleotide
cuacuuagccuguagggaa

SEQ ID NO: 205009 - RNA, 19 nt, Artificial Sequence
  Description of Artificial Sequence: Synthetic oligonucleotide
aaagcacacuauugaucau

SEQ ID NO: 205010 - RNA, 19 nt, Artificial Sequence
  Description of Artificial Sequence: Synthetic oligonucleotide
uuugauccucuuccaccca

SEQ ID NO: 205011 - RNA, 19 nt, Artificial Sequence
  Description of Artificial Sequence: Synthetic oligonucleotide
cacuauggggcaucucagc

SEQ ID NO: 205012 - RNA, 19 nt, Artificial Sequence
  Description of Artificial Sequence: Synthetic oligonucleotide
ugugacaaaccuugauauu

SEQ ID NO: 205013 - RNA, 19 nt, Artificial Sequence
  Description of Artificial Sequence: Synthetic oligonucleotide
aucgcuuggccgccgagug

SEQ ID NO: 205014 - RNA, 19 nt, Artificial Sequence
  Description of Artificial Sequence: Synthetic oligonucleotide
accuugauauucaucaaaa

SEQ ID NO: 205015 - RNA, 19 nt, Artificial Sequence
  Description of Artificial Sequence: Synthetic oligonucleotide
guuaaagcaccggccuugg

SEQ ID NO: 205016 - RNA, 19 nt, Artificial Sequence
  Description of Artificial Sequence: Synthetic oligonucleotide
ucggcaucaguugguaccc

SEQ ID NO: 205017 - RNA, 19 nt, Artificial Sequence
  Description of Artificial Sequence: Synthetic oligonucleotide
cuuucugcgaggacauuca

SEQ ID NO: 205018 - RNA, 19 nt, Artificial Sequence
  Description of Artificial Sequence: Synthetic oligonucleotide
agacuguccccuguaaaug

SEQ ID NO: 205019 - RNA, 19 nt, Artificial Sequence
  Description of Artificial Sequence: Synthetic oligonucleotide
uugcccguguuuugaacca

SEQ ID NO: 205020 - RNA, 19 nt, Artificial Sequence
  Description of Artificial Sequence: Synthetic oligonucleotide
ggcacuggcucauuugaag

SEQ ID NO: 205021 - RNA, 19 nt, Artificial Sequence
  Description of Artificial Sequence: Synthetic oligonucleotide
gugugacaaaccuugauau

SEQ ID NO: 205022 - RNA, 19 nt, Artificial Sequence
  Description of Artificial Sequence: Synthetic oligonucleotide
ugcucgauacagcgcgcag

SEQ ID NO: 205023 - RNA, 19 nt, Artificial Sequence
  Description of Artificial Sequence: Synthetic oligonucleotide
ucucgauggauaacaugua

SEQ ID NO: 205024 - RNA, 19 nt, Artificial Sequence
  Description of Artificial Sequence: Synthetic oligonucleotide
uuaagacacuuuugcccgu

SEQ ID NO: 205025 - RNA, 19 nt, Artificial Sequence
  Description of Artificial Sequence: Synthetic oligonucleotide
auagggcacuuaaagauaa

SEQ ID NO: 205026 - RNA, 19 nt, Artificial Sequence
  Description of Artificial Sequence: Synthetic oligonucleotide
cugacuuaaauccauguuu

SEQ ID NO: 205027 - RNA, 19 nt, Artificial Sequence
  Description of Artificial Sequence: Synthetic oligonucleotide
uacaugcuaaaaccccuuu

SEQ ID NO: 205028 - RNA, 19 nt, Artificial Sequence
  Description of Artificial Sequence: Synthetic oligonucleotide
acaugcuaaaaccccuuua

SEQ ID NO: 205029 - RNA, 19 nt, Artificial Sequence
  Description of Artificial Sequence: Synthetic oligonucleotide
agcgcgcaguuacuucagc

SEQ ID NO: 205030 - RNA, 19 nt, Artificial Sequence
  Description of Artificial Sequence: Synthetic oligonucleotide
aauaucuacuuagccugua

SEQ ID NO: 205031 - RNA, 19 nt, Artificial Sequence
  Description of Artificial Sequence: Synthetic oligonucleotide
ggcgacguguaauucaaac

SEQ ID NO: 205032 - RNA, 19 nt, Artificial Sequence
  Description of Artificial Sequence: Synthetic oligonucleotide
ccgcuuaagacacuuuugc

SEQ ID NO: 205033 - RNA, 19 nt, Artificial Sequence
  Description of Artificial Sequence: Synthetic oligonucleotide
gauguacguggugcuauug

SEQ ID NO: 205034 - RNA, 19 nt, Artificial Sequence
  Description of Artificial Sequence: Synthetic oligonucleotide
uugaccagggaaacacgua

SEQ ID NO: 205035 - RNA, 19 nt, Artificial Sequence
  Description of Artificial Sequence: Synthetic oligonucleotide
cauagugugcaguccucuc

SEQ ID NO: 205036 - RNA, 19 nt, Artificial Sequence
  Description of Artificial Sequence: Synthetic oligonucleotide
cuguggauucgcaggguug

SEQ ID NO: 205037 - RNA, 19 nt, Artificial Sequence
  Description of Artificial Sequence: Synthetic oligonucleotide
cgauggauaacauguacac

SEQ ID NO: 205038 - RNA, 19 nt, Artificial Sequence
  Description of Artificial Sequence: Synthetic oligonucleotide
agugucuuuguccgcuuaa

SEQ ID NO: 205039 - RNA, 19 nt, Artificial Sequence
  Description of Artificial Sequence: Synthetic oligonucleotide
acuuuugcccguguuuuga

SEQ ID NO: 205040 - RNA, 19 nt, Artificial Sequence
  Description of Artificial Sequence: Synthetic oligonucleotide
gaacuagcuggagucuagc

SEQ ID NO: 205041 - RNA, 19 nt, Artificial Sequence
  Description of Artificial Sequence: Synthetic oligonucleotide
cuauugauaccaggcuuug

SEQ ID NO: 205042 - RNA, 19 nt, Artificial Sequence
  Description of Artificial Sequence: Synthetic oligonucleotide
ggugugacaaaccuugaua

SEQ ID NO: 205043 - RNA, 19 nt, Artificial Sequence
  Description of Artificial Sequence: Synthetic oligonucleotide
uagugacuuucucccuuug

SEQ ID NO: 205044 - RNA, 19 nt, Artificial Sequence
  Description of Artificial Sequence: Synthetic oligonucleotide
aaaccccuuuaauuuucua

SEQ ID NO: 205045 - RNA, 19 nt, Artificial Sequence
  Description of Artificial Sequence: Synthetic oligonucleotide
uccccuguaaauggugugu

SEQ ID NO: 205046 - RNA, 19 nt, Artificial Sequence
  Description of Artificial Sequence: Synthetic oligonucleotide
acgguucucuccaucagug

SEQ ID NO: 205047 - RNA, 19 nt, Artificial Sequence
  Description of Artificial Sequence: Synthetic oligonucleotide
uguugauaaggagguuacu

SEQ ID NO: 205048 - RNA, 19 nt, Artificial Sequence
  Description of Artificial Sequence: Synthetic oligonucleotide
uuucggcaucaguugguac

SEQ ID NO: 205049 - RNA, 19 nt, Artificial Sequence
  Description of Artificial Sequence: Synthetic oligonucleotide
uugcaccacagugugugug

SEQ ID NO: 205050 - RNA, 19 nt, Artificial Sequence
  Description of Artificial Sequence: Synthetic oligonucleotide
gaccuguaacaccgggagc

SEQ ID NO: 205051 - RNA, 19 nt, Artificial Sequence
  Description of Artificial Sequence: Synthetic oligonucleotide
gaacuuuugcuugguccug

SEQ ID NO: 205052 - RNA, 19 nt, Artificial Sequence
  Description of Artificial Sequence: Synthetic oligonucleotide
agucaugagcuuucuucau

SEQ ID NO: 205053 - RNA, 19 nt, Artificial Sequence
  Description of Artificial Sequence: Synthetic oligonucleotide
cuuggccucucucaacauc

SEQ ID NO: 205054 - RNA, 19 nt, Artificial Sequence
  Description of Artificial Sequence: Synthetic oligonucleotide
uggauucgcaggguugccc

SEQ ID NO: 205055 - RNA, 19 nt, Artificial Sequence
  Description of Artificial Sequence: Synthetic oligonucleotide
gaggcgucucccugaauca

SEQ ID NO: 205056 - RNA, 19 nt, Artificial Sequence
  Description of Artificial Sequence: Synthetic oligonucleotide
aggugugacaaaccuugau

SEQ ID NO: 205057 - RNA, 19 nt, Artificial Sequence
  Description of Artificial Sequence: Synthetic oligonucleotide
cuaugaugucacuggcauc

SEQ ID NO: 205058 - RNA, 19 nt, Artificial Sequence
  Description of Artificial Sequence: Synthetic oligonucleotide
ggauucgcaggguugcccc

SEQ ID NO: 205059 - RNA, 19 nt, Artificial Sequence
  Description of Artificial Sequence: Synthetic oligonucleotide
uauugaucaugggguuaag

SEQ ID NO: 205060 - RNA, 19 nt, Artificial Sequence
  Description of Artificial Sequence: Synthetic oligonucleotide
gaagcaugccacagacccc

SEQ ID NO: 205061 - RNA, 19 nt, Artificial Sequence
  Description of Artificial Sequence: Synthetic oligonucleotide
uaauaucgcuuggccgccg

SEQ ID NO: 205062 - RNA, 19 nt, Artificial Sequence
  Description of Artificial Sequence: Synthetic oligonucleotide
uuuucggcaucaguuggua

SEQ ID NO: 205063 - RNA, 19 nt, Artificial Sequence
  Description of Artificial Sequence: Synthetic oligonucleotide
acacguauuugugaaugaa

SEQ ID NO: 205064 - RNA, 19 nt, Artificial Sequence
  Description of Artificial Sequence: Synthetic oligonucleotide
guaccccuucaggagaucc

SEQ ID NO: 205065 - RNA, 19 nt, Artificial Sequence
  Description of Artificial Sequence: Synthetic oligonucleotide
cuuaguuccuuucuccccu

SEQ ID NO: 205066 - RNA, 19 nt, Artificial Sequence
  Description of Artificial Sequence: Synthetic oligonucleotide
ugacugaaccuugcucuca

SEQ ID NO: 205067 - RNA, 19 nt, Artificial Sequence
  Description of Artificial Sequence: Synthetic oligonucleotide
ucuucgcccuuuucuugca

SEQ ID NO: 205068 - RNA, 19 nt, Artificial Sequence
  Description of Artificial Sequence: Synthetic oligonucleotide
augguguguagugaacaga

SEQ ID NO: 205069 - RNA, 19 nt, Artificial Sequence
  Description of Artificial Sequence: Synthetic oligonucleotide
uacagcgcgcaguuacuuc

SEQ ID NO: 205070 - RNA, 19 nt, Artificial Sequence
  Description of Artificial Sequence: Synthetic oligonucleotide
uuucugcgaggacauucau

SEQ ID NO: 205071 - RNA, 19 nt, Artificial Sequence
  Description of Artificial Sequence: Synthetic oligonucleotide
gggaaacacguauuuguga

SEQ ID NO: 205072 - RNA, 19 nt, Artificial Sequence
  Description of Artificial Sequence: Synthetic oligonucleotide
guugauaaggagguuacuu

SEQ ID NO: 205073 - RNA, 19 nt, Artificial Sequence
  Description of Artificial Sequence: Synthetic oligonucleotide
caucuauugauaccaggcu

SEQ ID NO: 205074 - RNA, 19 nt, Artificial Sequence
  Description of Artificial Sequence: Synthetic oligonucleotide
cagcugguguggaugugag

SEQ ID NO: 205075 - RNA, 19 nt, Artificial Sequence
  Description of Artificial Sequence: Synthetic oligonucleotide
ggagguuacuucauugcac

SEQ ID NO: 205076 - RNA, 19 nt, Artificial Sequence
  Description of Artificial Sequence: Synthetic oligonucleotide
guaacaccgggagcaguag

SEQ ID NO: 205077 - RNA, 19 nt, Artificial Sequence
  Description of Artificial Sequence: Synthetic oligonucleotide
auaucgcuuggccgccgag

SEQ ID NO: 205078 - RNA, 19 nt, Artificial Sequence
  Description of Artificial Sequence: Synthetic oligonucleotide
uccuuggaugggugguccc

SEQ ID NO: 205079 - RNA, 19 nt, Artificial Sequence
  Description of Artificial Sequence: Synthetic oligonucleotide
gagaccuguaacaccggga

SEQ ID NO: 205080 - RNA, 19 nt, Artificial Sequence
  Description of Artificial Sequence: Synthetic oligonucleotide
acuauugaucaugggguua

SEQ ID NO: 205081 - RNA, 19 nt, Artificial Sequence
  Description of Artificial Sequence: Synthetic oligonucleotide
gcgcaguuacuucagccag

SEQ ID NO: 205082 - RNA, 19 nt, Artificial Sequence
  Description of Artificial Sequence: Synthetic oligonucleotide
auucgcaggguugccccgg

SEQ ID NO: 205083 - RNA, 19 nt, Artificial Sequence
  Description of Artificial Sequence: Synthetic oligonucleotide
uuucuagauauagcauauu

SEQ ID NO: 205084 - RNA, 19 nt, Artificial Sequence
  Description of Artificial Sequence: Synthetic oligonucleotide
ugugugugauugguuuagu

SEQ ID NO: 205085 - RNA, 19 nt, Artificial Sequence
  Description of Artificial Sequence: Synthetic oligonucleotide
gcuauugcagcccucuaaa

SEQ ID NO: 205086 - RNA, 19 nt, Artificial Sequence
  Description of Artificial Sequence: Synthetic oligonucleotide
uaucgcuuggccgccgagu

SEQ ID NO: 205087 - RNA, 19 nt, Artificial Sequence
  Description of Artificial Sequence: Synthetic oligonucleotide
agggcguccuggauguacg

SEQ ID NO: 205088 - RNA, 19 nt, Artificial Sequence
  Description of Artificial Sequence: Synthetic oligonucleotide
uucgaggcgucucccugaa

SEQ ID NO: 205089 - RNA, 19 nt, Artificial Sequence
  Description of Artificial Sequence: Synthetic oligonucleotide
guguggaugugagagaccu

SEQ ID NO: 205090 - RNA, 19 nt, Artificial Sequence
  Description of Artificial Sequence: Synthetic oligonucleotide
ccuugcaccacagugugug

SEQ ID NO: 205091 - RNA, 19 nt, Artificial Sequence
  Description of Artificial Sequence: Synthetic oligonucleotide
gcgacguguaauucaaaca

SEQ ID NO: 205092 - RNA, 19 nt, Artificial Sequence
  Description of Artificial Sequence: Synthetic oligonucleotide
gucucccugaaucaauaua

SEQ ID NO: 205093 - RNA, 19 nt, Artificial Sequence
  Description of Artificial Sequence: Synthetic oligonucleotide
agaaaggcauagugacuuu

SEQ ID NO: 205094 - RNA, 19 nt, Artificial Sequence
  Description of Artificial Sequence: Synthetic oligonucleotide
ccugaaucaauauaccacu

SEQ ID NO: 205095 - RNA, 19 nt, Artificial Sequence
  Description of Artificial Sequence: Synthetic oligonucleotide
gacacuuuugcccguguuu

SEQ ID NO: 205096 - RNA, 19 nt, Artificial Sequence
  Description of Artificial Sequence: Synthetic oligonucleotide
gaaacacguauuugugaau

SEQ ID NO: 205097 - RNA, 19 nt, Artificial Sequence
  Description of Artificial Sequence: Synthetic oligonucleotide
gaguucgguaagcaugcua

SEQ ID NO: 205098 - RNA, 19 nt, Artificial Sequence
  Description of Artificial Sequence: Synthetic oligonucleotide
caggcaugguugugcacac

SEQ ID NO: 205099 - RNA, 19 nt, Artificial Sequence
  Description of Artificial Sequence: Synthetic oligonucleotide
gcuaugaugucacuggcau

SEQ ID NO: 205100 - RNA, 19 nt, Artificial Sequence
  Description of Artificial Sequence: Synthetic oligonucleotide
acuuagccuguagggaaca

SEQ ID NO: 205101 - RNA, 19 nt, Artificial Sequence
  Description of Artificial Sequence: Synthetic oligonucleotide
cgauacagcgcgcaguuac

SEQ ID NO: 205102 - RNA, 19 nt, Artificial Sequence
  Description of Artificial Sequence: Synthetic oligonucleotide
accggccuuggacugcucu

SEQ ID NO: 205103 - RNA, 19 nt, Artificial Sequence
  Description of Artificial Sequence: Synthetic oligonucleotide
ccagaccuccgcuuaagac

SEQ ID NO: 205104 - RNA, 19 nt, Artificial Sequence
  Description of Artificial Sequence: Synthetic oligonucleotide
gugugugauugguuuagua

SEQ ID NO: 205105 - RNA, 19 nt, Artificial Sequence
  Description of Artificial Sequence: Synthetic oligonucleotide
gaacagacuuggccagcca

SEQ ID NO: 205106 - RNA, 19 nt, Artificial Sequence
  Description of Artificial Sequence: Synthetic oligonucleotide
cacugcuagcugcaagguc

SEQ ID NO: 205107 - RNA, 19 nt, Artificial Sequence
  Description of Artificial Sequence: Synthetic oligonucleotide
uuaaacccugggucacuuu

SEQ ID NO: 205108 - RNA, 19 nt, Artificial Sequence
  Description of Artificial Sequence: Synthetic oligonucleotide
uucgcaggguugccccggc

SEQ ID NO: 205109 - RNA, 19 nt, Artificial Sequence
  Description of Artificial Sequence: Synthetic oligonucleotide
ccaaccugccaagagcagg

SEQ ID NO: 205110 - RNA, 19 nt, Artificial Sequence
  Description of Artificial Sequence: Synthetic oligonucleotide
uggucucaugcugcucucc

SEQ ID NO: 205111 - RNA, 19 nt, Artificial Sequence
  Description of Artificial Sequence: Synthetic oligonucleotide
ucgcuuggccgccgagugc

SEQ ID NO: 205112 - RNA, 19 nt, Artificial Sequence
  Description of Artificial Sequence: Synthetic oligonucleotide
cuauugcagcccucuaaaa

SEQ ID NO: 205113 - RNA, 19 nt, Artificial Sequence
  Description of Artificial Sequence: Synthetic oligonucleotide
gauugguuuaguagguauu

SEQ ID NO: 205114 - RNA, 19 nt, Artificial Sequence
  Description of Artificial Sequence: Synthetic oligonucleotide
ggagcaguagcuggagggc

SEQ ID NO: 205115 - RNA, 19 nt, Artificial Sequence
  Description of Artificial Sequence: Synthetic oligonucleotide
ggcuuugauccucuuccac

SEQ ID NO: 205116 - RNA, 19 nt, Artificial Sequence
  Description of Artificial Sequence: Synthetic oligonucleotide
uggagucuagcugggucuc

SEQ ID NO: 205117 - RNA, 19 nt, Artificial Sequence
  Description of Artificial Sequence: Synthetic oligonucleotide
gcaguuacuucagccagac

SEQ ID NO: 205118 - RNA, 19 nt, Artificial Sequence
  Description of Artificial Sequence: Synthetic oligonucleotide
auauaccacuuggccaaca

SEQ ID NO: 205119 - RNA, 19 nt, Artificial Sequence
  Description of Artificial Sequence: Synthetic oligonucleotide
gguugccccggccuuuucc

SEQ ID NO: 205120 - RNA, 19 nt, Artificial Sequence
  Description of Artificial Sequence: Synthetic oligonucleotide
guagcuggagggcguccug

SEQ ID NO: 205121 - RNA, 19 nt, Artificial Sequence
  Description of Artificial Sequence: Synthetic oligonucleotide
ggguuaaggacuucagccu

SEQ ID NO: 205122 - RNA, 19 nt, Artificial Sequence
  Description of Artificial Sequence: Synthetic oligonucleotide
cuucgaggcgucucccuga

SEQ ID NO: 205123 - RNA, 19 nt, Artificial Sequence
  Description of Artificial Sequence: Synthetic oligonucleotide
cuuuguccgcuuaaacccu

SEQ ID NO: 205124 - RNA, 19 nt, Artificial Sequence
  Description of Artificial Sequence: Synthetic oligonucleotide
gcgcgcaguuacuucagcc

SEQ ID NO: 205125 - RNA, 19 nt, Artificial Sequence
  Description of Artificial Sequence: Synthetic oligonucleotide
cagcgcgcaguuacuucag

SEQ ID NO: 205126 - RNA, 19 nt, Artificial Sequence
  Description of Artificial Sequence: Synthetic oligonucleotide
aggggcagucucugcacau

SEQ ID NO: 205127 - RNA, 19 nt, Artificial Sequence
  Description of Artificial Sequence: Synthetic oligonucleotide
guugcucgauacagcgcgc

SEQ ID NO: 205128 - RNA, 19 nt, Artificial Sequence
  Description of Artificial Sequence: Synthetic oligonucleotide
cccuguaaaugguguguag

SEQ ID NO: 205129 - RNA, 19 nt, Artificial Sequence
  Description of Artificial Sequence: Synthetic oligonucleotide
aggaaacgguucucuccau

SEQ ID NO: 205130 - RNA, 19 nt, Artificial Sequence
  Description of Artificial Sequence: Synthetic oligonucleotide
ggcggcgacguguaauuca

SEQ ID NO: 205131 - RNA, 19 nt, Artificial Sequence
  Description of Artificial Sequence: Synthetic oligonucleotide
gauacagcgcgcaguuacu

SEQ ID NO: 205132 - RNA, 19 nt, Artificial Sequence
  Description of Artificial Sequence: Synthetic oligonucleotide
cauagugacuuucucccuu

SEQ ID NO: 205133 - RNA, 19 nt, Artificial Sequence
  Description of Artificial Sequence: Synthetic oligonucleotide
gagugcgcgcgggagcccc

SEQ ID NO: 205134 - RNA, 19 nt, Artificial Sequence
  Description of Artificial Sequence: Synthetic oligonucleotide
auacagcgcgcaguuacuu

SEQ ID NO: 205135 - RNA, 19 nt, Artificial Sequence
  Description of Artificial Sequence: Synthetic oligonucleotide
ggugcggcucagaaagagc

SEQ ID NO: 205136 - RNA, 19 nt, Artificial Sequence
  Description of Artificial Sequence: Synthetic oligonucleotide
acguuggugagggcugaca

SEQ ID NO: 205137 - RNA, 19 nt, Artificial Sequence
  Description of Artificial Sequence: Synthetic oligonucleotide
guccgcuuaaacccugggu

SEQ ID NO: 205138 - RNA, 19 nt, Artificial Sequence
  Description of Artificial Sequence: Synthetic oligonucleotide
ggucccgccugugauguug

SEQ ID NO: 205139 - RNA, 19 nt, Artificial Sequence
  Description of Artificial Sequence: Synthetic oligonucleotide
uggugcuauugcagcccuc

SEQ ID NO: 205140 - RNA, 19 nt, Artificial Sequence
  Description of Artificial Sequence: Synthetic oligonucleotide
ucgcaggguugccccggcc

SEQ ID NO: 205141 - RNA, 19 nt, Artificial Sequence
  Description of Artificial Sequence: Synthetic oligonucleotide
auggccuuauugaguuugu

SEQ ID NO: 205142 - RNA, 19 nt, Artificial Sequence
  Description of Artificial Sequence: Synthetic oligonucleotide
cugaaucaauauaccacuu

SEQ ID NO: 205143 - RNA, 19 nt, Artificial Sequence
  Description of Artificial Sequence: Synthetic oligonucleotide
ugcucccaacagugguuaa

SEQ ID NO: 205144 - RNA, 19 nt, Artificial Sequence
  Description of Artificial Sequence: Synthetic oligonucleotide
guggauucgcaggguugcc

SEQ ID NO: 205145 - RNA, 19 nt, Artificial Sequence
  Description of Artificial Sequence: Synthetic oligonucleotide
agcaugccccucgacccug

SEQ ID NO: 205146 - RNA, 19 nt, Artificial Sequence
  Description of Artificial Sequence: Synthetic oligonucleotide
ggggcaucucagcagcauc

SEQ ID NO: 205147 - RNA, 19 nt, Artificial Sequence
  Description of Artificial Sequence: Synthetic oligonucleotide
gugucuuuguccgcuuaaa

SEQ ID NO: 205148 - RNA, 19 nt, Artificial Sequence
  Description of Artificial Sequence: Synthetic oligonucleotide
uauagccacugggcaugac

SEQ ID NO: 205149 - RNA, 19 nt, Artificial Sequence
  Description of Artificial Sequence: Synthetic oligonucleotide
cuuugacuuuauuggcuau

SEQ ID NO: 205150 - RNA, 19 nt, Artificial Sequence
  Description of Artificial Sequence: Synthetic oligonucleotide
gcccguguuuugaaccacg

SEQ ID NO: 205151 - RNA, 19 nt, Artificial Sequence
  Description of Artificial Sequence: Synthetic oligonucleotide
gcuuguaguguccuuggau

SEQ ID NO: 205152 - RNA, 19 nt, Artificial Sequence
  Description of Artificial Sequence: Synthetic oligonucleotide
ugcgcgcgggagccccggg

SEQ ID NO: 205153 - RNA, 19 nt, Artificial Sequence
  Description of Artificial Sequence: Synthetic oligonucleotide
gcagcccucuaaaagcaca

SEQ ID NO: 205154 - RNA, 19 nt, Artificial Sequence
  Description of Artificial Sequence: Synthetic oligonucleotide
cacuauugaucaugggguu

SEQ ID NO: 205155 - RNA, 19 nt, Artificial Sequence
  Description of Artificial Sequence: Synthetic oligonucleotide
ccgcuuaaacccuggguca

SEQ ID NO: 205156 - RNA, 19 nt, Artificial Sequence
  Description of Artificial Sequence: Synthetic oligonucleotide
cccucgacccugcugcccc

SEQ ID NO: 205157 - RNA, 19 nt, Artificial Sequence
  Description of Artificial Sequence: Synthetic oligonucleotide
gccaacacacaccaguauu

SEQ ID NO: 205158 - RNA, 19 nt, Artificial Sequence
  Description of Artificial Sequence: Synthetic oligonucleotide
guggugcuauugcagcccu

SEQ ID NO: 205159 - RNA, 19 nt, Artificial Sequence
  Description of Artificial Sequence: Synthetic oligonucleotide
guguaagaacugacuuaaa

SEQ ID NO: 205160 - RNA, 19 nt, Artificial Sequence
  Description of Artificial Sequence: Synthetic oligonucleotide
cccauagugugcaguccuc

SEQ ID NO: 205161 - RNA, 19 nt, Artificial Sequence
  Description of Artificial Sequence: Synthetic oligonucleotide
ggcguccuggauguacgug

SEQ ID NO: 205162 - RNA, 19 nt, Artificial Sequence
  Description of Artificial Sequence: Synthetic oligonucleotide
gacucucgauggauaacau

SEQ ID NO: 205163 - RNA, 19 nt, Artificial Sequence
  Description of Artificial Sequence: Synthetic oligonucleotide
uggcggcgacguguaauuc

SEQ ID NO: 205164 - RNA, 19 nt, Artificial Sequence
  Description of Artificial Sequence: Synthetic oligonucleotide
gguuacuucauugcacauu

SEQ ID NO: 205165 - RNA, 19 nt, Artificial Sequence
  Description of Artificial Sequence: Synthetic oligonucleotide
gccgagugcgcgcgggagc

SEQ ID NO: 205166 - RNA, 19 nt, Artificial Sequence
  Description of Artificial Sequence: Synthetic oligonucleotide
ucgaggcgucucccugaau

SEQ ID NO: 205167 - RNA, 19 nt, Artificial Sequence
  Description of Artificial Sequence: Synthetic oligonucleotide
guggcggcgacguguaauu

SEQ ID NO: 205168 - RNA, 19 nt, Artificial Sequence
  Description of Artificial Sequence: Synthetic oligonucleotide
ccgagugcgcgcgggagcc

SEQ ID NO: 205169 - RNA, 19 nt, Artificial Sequence
  Description of Artificial Sequence: Synthetic oligonucleotide
cuuaaacccugggucacuu

SEQ ID NO: 205170 - RNA, 19 nt, Artificial Sequence
  Description of Artificial Sequence: Synthetic oligonucleotide
gagucacuauggggcaucu

SEQ ID NO: 205171 - RNA, 19 nt, Artificial Sequence
  Description of Artificial Sequence: Synthetic oligonucleotide
cccgccugugauguugaag

SEQ ID NO: 205172 - RNA, 19 nt, Artificial Sequence
  Description of Artificial Sequence: Synthetic oligonucleotide
cugcucuagaagcccugua

SEQ ID NO: 205173 - RNA, 19 nt, Artificial Sequence
  Description of Artificial Sequence: Synthetic oligonucleotide
agugcgcgcgggagccccg

SEQ ID NO: 205174 - RNA, 19 nt, Artificial Sequence
  Description of Artificial Sequence: Synthetic oligonucleotide
cgguaagcaugcuagcaaa

SEQ ID NO: 205175 - RNA, 19 nt, Artificial Sequence
  Description of Artificial Sequence: Synthetic oligonucleotide
gcauagugacuuucucccu

SEQ ID NO: 205176 - RNA, 19 nt, Artificial Sequence
  Description of Artificial Sequence: Synthetic oligonucleotide
gucauagcuggaccacauu

SEQ ID NO: 205177 - RNA, 19 nt, Artificial Sequence
  Description of Artificial Sequence: Synthetic oligonucleotide
gcaaauaaauuggccuuau

SEQ ID NO: 205178 - RNA, 19 nt, Artificial Sequence
  Description of Artificial Sequence: Synthetic oligonucleotide
aucucccuauggauuucua

SEQ ID NO: 205179 - RNA, 19 nt, Artificial Sequence
  Description of Artificial Sequence: Synthetic oligonucleotide
caguuaaagcaccggccuu

SEQ ID NO: 205180 - RNA, 19 nt, Artificial Sequence
  Description of Artificial Sequence: Synthetic oligonucleotide
gguaagcaugcuagcaaau

SEQ ID NO: 205181 - RNA, 19 nt, Artificial Sequence
  Description of Artificial Sequence: Synthetic oligonucleotide
gucccgccugugauguuga

SEQ ID NO: 205182 - RNA, 19 nt, Artificial Sequence
  Description of Artificial Sequence: Synthetic oligonucleotide
gguguguagugaacagacu

SEQ ID NO: 205183 - RNA, 19 nt, Artificial Sequence
  Description of Artificial Sequence: Synthetic oligonucleotide
gcggcgacguguaauucaa

SEQ ID NO: 205184 - RNA, 19 nt, Artificial Sequence
  Description of Artificial Sequence: Synthetic oligonucleotide
cccuauggauuucuagaua

SEQ ID NO: 205185 - RNA, 19 nt, Artificial Sequence
  Description of Artificial Sequence: Synthetic oligonucleotide
gcgaggacauucaugguuu

SEQ ID NO: 205186 - RNA, 19 nt, Artificial Sequence
  Description of Artificial Sequence: Synthetic oligonucleotide
cgcuuaaacccugggucac

SEQ ID NO: 205187 - RNA, 19 nt, Artificial Sequence
  Description of Artificial Sequence: Synthetic oligonucleotide
gcucgauacagcgcgcagu

SEQ ID NO: 205188 - RNA, 19 nt, Artificial Sequence
  Description of Artificial Sequence: Synthetic oligonucleotide
cugcgaggacauucauggu

SEQ ID NO: 205189 - RNA, 19 nt, Artificial Sequence
  Description of Artificial Sequence: Synthetic oligonucleotide
gguguggcggcgacgugua

SEQ ID NO: 205190 - RNA, 19 nt, Artificial Sequence
  Description of Artificial Sequence: Synthetic oligonucleotide
ggauguacguggugcuauu

SEQ ID NO: 205191 - RNA, 19 nt, Artificial Sequence
  Description of Artificial Sequence: Synthetic oligonucleotide
ccggcaggguccugaucug

SEQ ID NO: 205192 - RNA, 19 nt, Artificial Sequence
  Description of Artificial Sequence: Synthetic oligonucleotide
gcgucucccugaaucaaua

SEQ ID NO: 205193 - RNA, 19 nt, Artificial Sequence
  Description of Artificial Sequence: Synthetic oligonucleotide
cccuggcggaggagaagug

SEQ ID NO: 205194 - RNA, 19 nt, Artificial Sequence
  Description of Artificial Sequence: Synthetic oligonucleotide
uggucccgccugugauguu

SEQ ID NO: 205195 - RNA, 19 nt, Artificial Sequence
  Description of Artificial Sequence: Synthetic oligonucleotide
gcuuaaacccugggucacu

SEQ ID NO: 205196 - RNA, 19 nt, Artificial Sequence
  Description of Artificial Sequence: Synthetic oligonucleotide
cccguguuuugaaccacgu

SEQ ID NO: 205197 - RNA, 19 nt, Artificial Sequence
  Description of Artificial Sequence: Synthetic oligonucleotide
gcaugccccucgacccugc

SEQ ID NO: 205198 - RNA, 19 nt, Artificial Sequence
  Description of Artificial Sequence: Synthetic oligonucleotide
guguggcggcgacguguaa

SEQ ID NO: 205199 - RNA, 19 nt, Artificial Sequence
  Description of Artificial Sequence: Synthetic oligonucleotide
caccggccuuggacugcuc

SEQ ID NO: 205200 - RNA, 19 nt, Artificial Sequence
  Description of Artificial Sequence: Synthetic oligonucleotide
ccccuguaaauggugugua

SEQ ID NO: 205201 - RNA, 19 nt, Artificial Sequence
  Description of Artificial Sequence: Synthetic oligonucleotide
gcaucaguugguaccccuu

SEQ ID NO: 205202 - RNA, 19 nt, Artificial Sequence
  Description of Artificial Sequence: Synthetic oligonucleotide
gcucuaggauauagccacu

SEQ ID NO: 205203 - RNA, 19 nt, Artificial Sequence
  Description of Artificial Sequence: Synthetic oligonucleotide
caugccccucgacccugcu

SEQ ID NO: 205204 - RNA, 19 nt, Artificial Sequence
  Description of Artificial Sequence: Synthetic oligonucleotide
ggaguucgguaagcaugcu

SEQ ID NO: 205205 - RNA, 19 nt, Artificial Sequence
  Description of Artificial Sequence: Synthetic oligonucleotide
gaccuccgcuuaagacacu

SEQ ID NO: 205206 - RNA, 19 nt, Artificial Sequence
  Description of Artificial Sequence: Synthetic oligonucleotide
ccccuggcggaggagaagu

SEQ ID NO: 205207 - RNA, 19 nt, Artificial Sequence
  Description of Artificial Sequence: Synthetic oligonucleotide
gcaugguugugcacaccuu

SEQ ID NO: 205208 - RNA, 19 nt, Artificial Sequence
  Description of Artificial Sequence: Synthetic oligonucleotide
ccguguuuugaaccacguu

SEQ ID NO: 205209 - RNA, 19 nt, Artificial Sequence
  Description of Artificial Sequence: Synthetic oligonucleotide
cgucucccugaaucaauau

SEQ ID NO: 205210 - RNA, 19 nt, Artificial Sequence
  Description of Artificial Sequence: Synthetic oligonucleotide
ccccggcaggguccugauc

SEQ ID NO: 205211 - RNA, 19 nt, Artificial Sequence
  Description of Artificial Sequence: Synthetic oligonucleotide
cgagugcgcgcgggagccc

SEQ ID NO: 205212 - RNA, 19 nt, Artificial Sequence
  Description of Artificial Sequence: Synthetic oligonucleotide
cggcgacguguaauucaaa

SEQ ID NO: 205213 - RNA, 19 nt, Artificial Sequence
  Description of Artificial Sequence: Synthetic oligonucleotide
uuagaguacaaacaugugg

SEQ ID NO: 205214 - RNA, 19 nt, Artificial Sequence
  Description of Artificial Sequence: Synthetic oligonucleotide
acuaugaucuaaaagaugc

SEQ ID NO: 205215 - RNA, 19 nt, Artificial Sequence
  Description of Artificial Sequence: Synthetic oligonucleotide
aaauauagcgcauauuuga

SEQ ID NO: 205216 - RNA, 19 nt, Artificial Sequence
  Description of Artificial Sequence: Synthetic oligonucleotide
cauguuuaagcauaaaggc

SEQ ID NO: 205217 - RNA, 19 nt, Artificial Sequence
  Description of Artificial Sequence: Synthetic oligonucleotide
uguuuaagcauaaaggccu

SEQ ID NO: 205218 - RNA, 19 nt, Artificial Sequence
  Description of Artificial Sequence: Synthetic oligonucleotide
uacaauaugcccauagaag

SEQ ID NO: 205219 - RNA, 19 nt, Artificial Sequence
  Description of Artificial Sequence: Synthetic oligonucleotide
aguaugaucguguaacaac

SEQ ID NO: 205220 - RNA, 19 nt, Artificial Sequence
  Description of Artificial Sequence: Synthetic oligonucleotide
ucuguguuaguguagauca

SEQ ID NO: 205221 - RNA, 19 nt, Artificial Sequence
  Description of Artificial Sequence: Synthetic oligonucleotide
agaacaugcuugcugaacc

SEQ ID NO: 205222 - RNA, 19 nt, Artificial Sequence
  Description of Artificial Sequence: Synthetic oligonucleotide
acugacauagcucuggauc

SEQ ID NO: 205223 - RNA, 19 nt, Artificial Sequence
  Description of Artificial Sequence: Synthetic oligonucleotide
uggauaaugaaguuaggag

SEQ ID NO: 205224 - RNA, 19 nt, Artificial Sequence
  Description of Artificial Sequence: Synthetic oligonucleotide
ugaaauaucccaucuagcu

SEQ ID NO: 205225 - RNA, 19 nt, Artificial Sequence
  Description of Artificial Sequence: Synthetic oligonucleotide
ugaauagacuugcugaugc

SEQ ID NO: 205226 - RNA, 19 nt, Artificial Sequence
  Description of Artificial Sequence: Synthetic oligonucleotide
aauagacuugcugaugccc

SEQ ID NO: 205227 - RNA, 19 nt, Artificial Sequence
  Description of Artificial Sequence: Synthetic oligonucleotide
gauaaugaaguuaggagag

SEQ ID NO: 205228 - RNA, 19 nt, Artificial Sequence
  Description of Artificial Sequence: Synthetic oligonucleotide
aaucugacuuucccuaagc

SEQ ID NO: 205229 - RNA, 19 nt, Artificial Sequence
  Description of Artificial Sequence: Synthetic oligonucleotide
uuaaggacugcuuugacuc

SEQ ID NO: 205230 - RNA, 19 nt, Artificial Sequence
  Description of Artificial Sequence: Synthetic oligonucleotide
guaacuacgccauuucugg

SEQ ID NO: 205231 - RNA, 19 nt, Artificial Sequence
  Description of Artificial Sequence: Synthetic oligonucleotide
ucgaaguuguucuaaauca

SEQ ID NO: 205232 - RNA, 19 nt, Artificial Sequence
  Description of Artificial Sequence: Synthetic oligonucleotide
cauugguugaggaugaagc

SEQ ID NO: 205233 - RNA, 19 nt, Artificial Sequence
  Description of Artificial Sequence: Synthetic oligonucleotide
uugacucuuacuuggagag

SEQ ID NO: 205234 - RNA, 19 nt, Artificial Sequence
  Description of Artificial Sequence: Synthetic oligonucleotide
aaugaaguuaggagagugc

SEQ ID NO: 205235 - RNA, 19 nt, Artificial Sequence
  Description of Artificial Sequence: Synthetic oligonucleotide
aacccguguaaauccaagc

SEQ ID NO: 205236 - RNA, 19 nt, Artificial Sequence
  Description of Artificial Sequence: Synthetic oligonucleotide
auguuuaagcauaaaggcc

SEQ ID NO: 205237 - RNA, 19 nt, Artificial Sequence
  Description of Artificial Sequence: Synthetic oligonucleotide
cacaacaagguuuagccag

SEQ ID NO: 205238 - RNA, 19 nt, Artificial Sequence
  Description of Artificial Sequence: Synthetic oligonucleotide
uauggaucggccuaggagu

SEQ ID NO: 205239 - RNA, 19 nt, Artificial Sequence
  Description of Artificial Sequence: Synthetic oligonucleotide
acgacuuuccaugacauac

SEQ ID NO: 205240 - RNA, 19 nt, Artificial Sequence
  Description of Artificial Sequence: Synthetic oligonucleotide
uauuuagaguacaaacaug

SEQ ID NO: 205241 - RNA, 19 nt, Artificial Sequence
  Description of Artificial Sequence: Synthetic oligonucleotide
auauaucuaggauuauguc

SEQ ID NO: 205242 - RNA, 19 nt, Artificial Sequence
  Description of Artificial Sequence: Synthetic oligonucleotide
uauagcgcauauuugaaaa

SEQ ID NO: 205243 - RNA, 19 nt, Artificial Sequence
  Description of Artificial Sequence: Synthetic oligonucleotide
auaucuauaggaucuccag

SEQ ID NO: 205244 - RNA, 19 nt, Artificial Sequence
  Description of Artificial Sequence: Synthetic oligonucleotide
acccguguaaauccaagcc

SEQ ID NO: 205245 - RNA, 19 nt, Artificial Sequence
  Description of Artificial Sequence: Synthetic oligonucleotide
uuuugauccauacuccccu

SEQ ID NO: 205246 - RNA, 19 nt, Artificial Sequence
  Description of Artificial Sequence: Synthetic oligonucleotide
guagaguacaaccugacuc

SEQ ID NO: 205247 - RNA, 19 nt, Artificial Sequence
  Description of Artificial Sequence: Synthetic oligonucleotide
cauagaagggauuccauug

SEQ ID NO: 205248 - RNA, 19 nt, Artificial Sequence
  Description of Artificial Sequence: Synthetic oligonucleotide
cacgguucaauacagacug

SEQ ID NO: 205249 - RNA, 19 nt, Artificial Sequence
  Description of Artificial Sequence: Synthetic oligonucleotide
aggaguuuuaguccugugg

SEQ ID NO: 205250 - RNA, 19 nt, Artificial Sequence
  Description of Artificial Sequence: Synthetic oligonucleotide
cugacauagcucuggaucg

SEQ ID NO: 205251 - RNA, 19 nt, Artificial Sequence
  Description of Artificial Sequence: Synthetic oligonucleotide
ucagugguaaccuaaguua

SEQ ID NO: 205252 - RNA, 19 nt, Artificial Sequence
  Description of Artificial Sequence: Synthetic oligonucleotide
ugaguguauagcuucugag

SEQ ID NO: 205253 - RNA, 19 nt, Artificial Sequence
  Description of Artificial Sequence: Synthetic oligonucleotide
augaucguguaacaacucg

SEQ ID NO: 205254 - RNA, 19 nt, Artificial Sequence
  Description of Artificial Sequence: Synthetic oligonucleotide
aucguguaacaacucgucc

SEQ ID NO: 205255 - RNA, 19 nt, Artificial Sequence
  Description of Artificial Sequence: Synthetic oligonucleotide
aaaucugacuuucccuaag

SEQ ID NO: 205256 - RNA, 19 nt, Artificial Sequence
  Description of Artificial Sequence: Synthetic oligonucleotide
auaccaacaccacuaauca

SEQ ID NO: 205257 - RNA, 19 nt, Artificial Sequence
  Description of Artificial Sequence: Synthetic oligonucleotide
agccauacgggugagaagg

SEQ ID NO: 205258 - RNA, 19 nt, Artificial Sequence
  Description of Artificial Sequence: Synthetic oligonucleotide
aagugucagauaaugagug

SEQ ID NO: 205259 - RNA, 19 nt, Artificial Sequence
  Description of Artificial Sequence: Synthetic oligonucleotide
aguaagccguuguacuugc

SEQ ID NO: 205260 - RNA, 19 nt, Artificial Sequence
  Description of Artificial Sequence: Synthetic oligonucleotide
acuuauuuuaccauguuaa

SEQ ID NO: 205261 - RNA, 19 nt, Artificial Sequence
  Description of Artificial Sequence: Synthetic oligonucleotide
uucacgguucaauacagac

SEQ ID NO: 205262 - RNA, 19 nt, Artificial Sequence
  Description of Artificial Sequence: Synthetic oligonucleotide
acaaccugacucuauuuag

SEQ ID NO: 205263 - RNA, 19 nt, Artificial Sequence
  Description of Artificial Sequence: Synthetic oligonucleotide
caugguaccaagagagucc

SEQ ID NO: 205264 - RNA, 19 nt, Artificial Sequence
  Description of Artificial Sequence: Synthetic oligonucleotide
ucauauaucuaggauuaug

SEQ ID NO: 205265 - RNA, 19 nt, Artificial Sequence
  Description of Artificial Sequence: Synthetic oligonucleotide
ugaggggucgcucuccagg

SEQ ID NO: 205266 - RNA, 19 nt, Artificial Sequence
  Description of Artificial Sequence: Synthetic oligonucleotide
ucguguaacaacucgucca

SEQ ID NO: 205267 - RNA, 19 nt, Artificial Sequence
  Description of Artificial Sequence: Synthetic oligonucleotide
gacucaguaucaucguggg

SEQ ID NO: 205268 - RNA, 19 nt, Artificial Sequence
  Description of Artificial Sequence: Synthetic oligonucleotide
ugacuauugggaaccaugu

SEQ ID NO: 205269 - RNA, 19 nt, Artificial Sequence
  Description of Artificial Sequence: Synthetic oligonucleotide
guaaggcccaugcaggugg

SEQ ID NO: 205270 - RNA, 19 nt, Artificial Sequence
  Description of Artificial Sequence: Synthetic oligonucleotide
gcaagugucagauaaugag

SEQ ID NO: 205271 - RNA, 19 nt, Artificial Sequence
  Description of Artificial Sequence: Synthetic oligonucleotide
agcaguuuaagccauuaau

SEQ ID NO: 205272 - RNA, 19 nt, Artificial Sequence
  Description of Artificial Sequence: Synthetic oligonucleotide
gaaauauagcgcauauuug

SEQ ID NO: 205273 - RNA, 19 nt, Artificial Sequence
  Description of Artificial Sequence: Synthetic oligonucleotide
accacaccuaguaaggugc

SEQ ID NO: 205274 - RNA, 19 nt, Artificial Sequence
  Description of Artificial Sequence: Synthetic oligonucleotide
auuuugauccauacucccc

SEQ ID NO: 205275 - RNA, 19 nt, Artificial Sequence
  Description of Artificial Sequence: Synthetic oligonucleotide
auggauugcccuuacugag

SEQ ID NO: 205276 - RNA, 19 nt, Artificial Sequence
  Description of Artificial Sequence: Synthetic oligonucleotide
ugaucuaagcagccaaugu

SEQ ID NO: 205277 - RNA, 19 nt, Artificial Sequence
  Description of Artificial Sequence: Synthetic oligonucleotide
guauggaucggccuaggag

SEQ ID NO: 205278 - RNA, 19 nt, Artificial Sequence
  Description of Artificial Sequence: Synthetic oligonucleotide
ggauaaugaaguuaggaga

SEQ ID NO: 205279 - RNA, 19 nt, Artificial Sequence
  Description of Artificial Sequence: Synthetic oligonucleotide
uuacuccuaggacagcugc

SEQ ID NO: 205280 - RNA, 19 nt, Artificial Sequence
  Description of Artificial Sequence: Synthetic oligonucleotide
gcuauuauuacuccuagga

SEQ ID NO: 205281 - RNA, 19 nt, Artificial Sequence
  Description of Artificial Sequence: Synthetic oligonucleotide
ugaucguguaacaacucgu

SEQ ID NO: 205282 - RNA, 19 nt, Artificial Sequence
  Description of Artificial Sequence: Synthetic oligonucleotide
uguggauaaugaaguuagg

SEQ ID NO: 205283 - RNA, 19 nt, Artificial Sequence
  Description of Artificial Sequence: Synthetic oligonucleotide
aaaaucaacuucugccuua

SEQ ID NO: 205284 - RNA, 19 nt, Artificial Sequence
  Description of Artificial Sequence: Synthetic oligonucleotide
agcgcauauuugaaaagcc

SEQ ID NO: 205285 - RNA, 19 nt, Artificial Sequence
  Description of Artificial Sequence: Synthetic oligonucleotide
ugauuagaagaaaggaguu

SEQ ID NO: 205286 - RNA, 19 nt, Artificial Sequence
  Description of Artificial Sequence: Synthetic oligonucleotide
ugcuauuauuacuccuagg

SEQ ID NO: 205287 - RNA, 19 nt, Artificial Sequence
  Description of Artificial Sequence: Synthetic oligonucleotide
caucaugaaaauaccaaca

SEQ ID NO: 205288 - RNA, 19 nt, Artificial Sequence
  Description of Artificial Sequence: Synthetic oligonucleotide
aacaugcuugcugaacccg

SEQ ID NO: 205289 - RNA, 19 nt, Artificial Sequence
  Description of Artificial Sequence: Synthetic oligonucleotide
aaagccauacgggugagaa

SEQ ID NO: 205290 - RNA, 19 nt, Artificial Sequence
  Description of Artificial Sequence: Synthetic oligonucleotide
caugugggugacuauuggg

SEQ ID NO: 205291 - RNA, 19 nt, Artificial Sequence
  Description of Artificial Sequence: Synthetic oligonucleotide
caucguggggacuucgucg

SEQ ID NO: 205292 - RNA, 19 nt, Artificial Sequence
  Description of Artificial Sequence: Synthetic oligonucleotide
aacuacgccauuucuggaa

SEQ ID NO: 205293 - RNA, 19 nt, Artificial Sequence
  Description of Artificial Sequence: Synthetic oligonucleotide
ucuuacuccagugaugaaa

SEQ ID NO: 205294 - RNA, 19 nt, Artificial Sequence
  Description of Artificial Sequence: Synthetic oligonucleotide
uaucccaucuagcuugaga

SEQ ID NO: 205295 - RNA, 19 nt, Artificial Sequence
  Description of Artificial Sequence: Synthetic oligonucleotide
ugugaagcuuccaaauguc

SEQ ID NO: 205296 - RNA, 19 nt, Artificial Sequence
  Description of Artificial Sequence: Synthetic oligonucleotide
cuccauucaguaacuacgc

SEQ ID NO: 205297 - RNA, 19 nt, Artificial Sequence
  Description of Artificial Sequence: Synthetic oligonucleotide
uguagaguacaaccugacu

SEQ ID NO: 205298 - RNA, 19 nt, Artificial Sequence
  Description of Artificial Sequence: Synthetic oligonucleotide
uauuacuccuaggacagcu

SEQ ID NO: 205299 - RNA, 19 nt, Artificial Sequence
  Description of Artificial Sequence: Synthetic oligonucleotide
ucacgguucaauacagacu

SEQ ID NO: 205300 - RNA, 19 nt, Artificial Sequence
  Description of Artificial Sequence: Synthetic oligonucleotide
uagcgcauauuugaaaagc

SEQ ID NO: 205301 - RNA, 19 nt, Artificial Sequence
  Description of Artificial Sequence: Synthetic oligonucleotide
aauauagcgcauauuugaa

SEQ ID NO: 205302 - RNA, 19 nt, Artificial Sequence
  Description of Artificial Sequence: Synthetic oligonucleotide
gaucuuguuuaaguggggc

SEQ ID NO: 205303 - RNA, 19 nt, Artificial Sequence
  Description of Artificial Sequence: Synthetic oligonucleotide
uugcaagugucagauaaug

SEQ ID NO: 205304 - RNA, 19 nt, Artificial Sequence
  Description of Artificial Sequence: Synthetic oligonucleotide
ucuaugucccaagugacuc

SEQ ID NO: 205305 - RNA, 19 nt, Artificial Sequence
  Description of Artificial Sequence: Synthetic oligonucleotide
cauauaucuaggauuaugu

SEQ ID NO: 205306 - RNA, 19 nt, Artificial Sequence
  Description of Artificial Sequence: Synthetic oligonucleotide
aguaacuacgccauuucug

SEQ ID NO: 205307 - RNA, 19 nt, Artificial Sequence
  Description of Artificial Sequence: Synthetic oligonucleotide
ugcgccuauauuuucugcu

SEQ ID NO: 205308 - RNA, 19 nt, Artificial Sequence
  Description of Artificial Sequence: Synthetic oligonucleotide
gaacaugcuugcugaaccc

SEQ ID NO: 205309 - RNA, 19 nt, Artificial Sequence
  Description of Artificial Sequence: Synthetic oligonucleotide
gaauagacuugcugaugcc

SEQ ID NO: 205310 - RNA, 19 nt, Artificial Sequence
  Description of Artificial Sequence: Synthetic oligonucleotide
caucauaucuauaggaucu

SEQ ID NO: 205311 - RNA, 19 nt, Artificial Sequence
  Description of Artificial Sequence: Synthetic oligonucleotide
uaagccguuguacuugcuc

SEQ ID NO: 205312 - RNA, 19 nt, Artificial Sequence
  Description of Artificial Sequence: Synthetic oligonucleotide
aaacccugguugcaagugu

SEQ ID NO: 205313 - RNA, 19 nt, Artificial Sequence
  Description of Artificial Sequence: Synthetic oligonucleotide
cauagaccggaccccagcg

SEQ ID NO: 205314 - RNA, 19 nt, Artificial Sequence
  Description of Artificial Sequence: Synthetic oligonucleotide
ucauaucuauaggaucucc

SEQ ID NO: 205315 - RNA, 19 nt, Artificial Sequence
  Description of Artificial Sequence: Synthetic oligonucleotide
agucauauaucuaggauua

SEQ ID NO: 205316 - RNA, 19 nt, Artificial Sequence
  Description of Artificial Sequence: Synthetic oligonucleotide
auuuguacugggaucacga

SEQ ID NO: 205317 - RNA, 19 nt, Artificial Sequence
  Description of Artificial Sequence: Synthetic oligonucleotide
uugaguucugcgccuauau

SEQ ID NO: 205318 - RNA, 19 nt, Artificial Sequence
  Description of Artificial Sequence: Synthetic oligonucleotide
uaacaucauggauugcccu

SEQ ID NO: 205319 - RNA, 19 nt, Artificial Sequence
  Description of Artificial Sequence: Synthetic oligonucleotide
ucuauaggaucuccagauc

SEQ ID NO: 205320 - RNA, 19 nt, Artificial Sequence
  Description of Artificial Sequence: Synthetic oligonucleotide
gggaucacgacuuuccaug

SEQ ID NO: 205321 - RNA, 19 nt, Artificial Sequence
  Description of Artificial Sequence: Synthetic oligonucleotide
gacucuuacuuggagagga

SEQ ID NO: 205322 - RNA, 19 nt, Artificial Sequence
  Description of Artificial Sequence: Synthetic oligonucleotide
aaccuaaguuacaagucca

SEQ ID NO: 205323 - RNA, 19 nt, Artificial Sequence
  Description of Artificial Sequence: Synthetic oligonucleotide
aaguucauuuauggcaaca

SEQ ID NO: 205324 - RNA, 19 nt, Artificial Sequence
  Description of Artificial Sequence: Synthetic oligonucleotide
gacacgacugugugcgccg

SEQ ID NO: 205325 - RNA, 19 nt, Artificial Sequence
  Description of Artificial Sequence: Synthetic oligonucleotide
uaugaucguguaacaacuc

SEQ ID NO: 205326 - RNA, 19 nt, Artificial Sequence
  Description of Artificial Sequence: Synthetic oligonucleotide
augauuucacgguucaaua

SEQ ID NO: 205327 - RNA, 19 nt, Artificial Sequence
  Description of Artificial Sequence: Synthetic oligonucleotide
uugaauagacuugcugaug

SEQ ID NO: 205328 - RNA, 19 nt, Artificial Sequence
  Description of Artificial Sequence: Synthetic oligonucleotide
ugguaaccuaaguuacaag

SEQ ID NO: 205329 - RNA, 19 nt, Artificial Sequence
  Description of Artificial Sequence: Synthetic oligonucleotide
auauagcgcauauuugaaa

SEQ ID NO: 205330 - RNA, 19 nt, Artificial Sequence
  Description of Artificial Sequence: Synthetic oligonucleotide
aguacaaccugacucuauu

SEQ ID NO: 205331 - RNA, 19 nt, Artificial Sequence
  Description of Artificial Sequence: Synthetic oligonucleotide
auugcccuuacugaggggu

SEQ ID NO: 205332 - RNA, 19 nt, Artificial Sequence
  Description of Artificial Sequence: Synthetic oligonucleotide
uucgauggacuaaagucuu

SEQ ID NO: 205333 - RNA, 19 nt, Artificial Sequence
  Description of Artificial Sequence: Synthetic oligonucleotide
cauaucuauaggaucucca

SEQ ID NO: 205334 - RNA, 19 nt, Artificial Sequence
  Description of Artificial Sequence: Synthetic oligonucleotide
cauacgggugagaaggguc

SEQ ID NO: 205335 - RNA, 19 nt, Artificial Sequence
  Description of Artificial Sequence: Synthetic oligonucleotide
aagccauacgggugagaag

SEQ ID NO: 205336 - RNA, 19 nt, Artificial Sequence
  Description of Artificial Sequence: Synthetic oligonucleotide
gugacuauugggaaccaug

SEQ ID NO: 205337 - RNA, 19 nt, Artificial Sequence
  Description of Artificial Sequence: Synthetic oligonucleotide
ccaaguaugaucguguaac

SEQ ID NO: 205338 - RNA, 19 nt, Artificial Sequence
  Description of Artificial Sequence: Synthetic oligonucleotide
aaguaugaucguguaacaa

SEQ ID NO: 205339 - RNA, 19 nt, Artificial Sequence
  Description of Artificial Sequence: Synthetic oligonucleotide
uugcucuuacuccagugau

SEQ ID NO: 205340 - RNA, 19 nt, Artificial Sequence
  Description of Artificial Sequence: Synthetic oligonucleotide
acuccauagaccggacccc

SEQ ID NO: 205341 - RNA, 19 nt, Artificial Sequence
  Description of Artificial Sequence: Synthetic oligonucleotide
auagaccggaccccagcgg

SEQ ID NO: 205342 - RNA, 19 nt, Artificial Sequence
  Description of Artificial Sequence: Synthetic oligonucleotide
gguaaccuaaguuacaagu

SEQ ID NO: 205343 - RNA, 19 nt, Artificial Sequence
  Description of Artificial Sequence: Synthetic oligonucleotide
cuaagcccauaucuguggc

SEQ ID NO: 205344 - RNA, 19 nt, Artificial Sequence
  Description of Artificial Sequence: Synthetic oligonucleotide
auagcaaccaucaccacuu

SEQ ID NO: 205345 - RNA, 19 nt, Artificial Sequence
  Description of Artificial Sequence: Synthetic oligonucleotide
guggauaaugaaguuagga

SEQ ID NO: 205346 - RNA, 19 nt, Artificial Sequence
  Description of Artificial Sequence: Synthetic oligonucleotide
uguauggaucggccuagga

SEQ ID NO: 205347 - RNA, 19 nt, Artificial Sequence
  Description of Artificial Sequence: Synthetic oligonucleotide
ccuuaaaucugacuuuccc

SEQ ID NO: 205348 - RNA, 19 nt, Artificial Sequence
  Description of Artificial Sequence: Synthetic oligonucleotide
uuucacgguucaauacaga

SEQ ID NO: 205349 - RNA, 19 nt, Artificial Sequence
  Description of Artificial Sequence: Synthetic oligonucleotide
agcggacacgacugugugc

SEQ ID NO: 205350 - RNA, 19 nt, Artificial Sequence
  Description of Artificial Sequence: Synthetic oligonucleotide
uccaaguaugaucguguaa

SEQ ID NO: 205351 - RNA, 19 nt, Artificial Sequence
  Description of Artificial Sequence: Synthetic oligonucleotide
aucauaucuauaggaucuc

SEQ ID NO: 205352 - RNA, 19 nt, Artificial Sequence
  Description of Artificial Sequence: Synthetic oligonucleotide
cuucgauggacuaaagucu

SEQ ID NO: 205353 - RNA, 19 nt, Artificial Sequence
  Description of Artificial Sequence: Synthetic oligonucleotide
uucaguaacuacgccauuu

SEQ ID NO: 205354 - RNA, 19 nt, Artificial Sequence
  Description of Artificial Sequence: Synthetic oligonucleotide
ggacucaguaucaucgugg

SEQ ID NO: 205355 - RNA, 19 nt, Artificial Sequence
  Description of Artificial Sequence: Synthetic oligonucleotide
aaauccaagccaggaauuu

SEQ ID NO: 205356 - RNA, 19 nt, Artificial Sequence
  Description of Artificial Sequence: Synthetic oligonucleotide
cuaguaaggugcccacacc

SEQ ID NO: 205357 - RNA, 19 nt, Artificial Sequence
  Description of Artificial Sequence: Synthetic oligonucleotide
cccggaaacauccuggcgg

SEQ ID NO: 205358 - RNA, 19 nt, Artificial Sequence
  Description of Artificial Sequence: Synthetic oligonucleotide
ucccaucuagcuugagaag

SEQ ID NO: 205359 - RNA, 19 nt, Artificial Sequence
  Description of Artificial Sequence: Synthetic oligonucleotide
agaacucaaaacacaguga

SEQ ID NO: 205360 - RNA, 19 nt, Artificial Sequence
  Description of Artificial Sequence: Synthetic oligonucleotide
gaucguguaacaacucguc

SEQ ID NO: 205361 - RNA, 19 nt, Artificial Sequence
  Description of Artificial Sequence: Synthetic oligonucleotide
uacgccauuucuggaauga

SEQ ID NO: 205362 - RNA, 19 nt, Artificial Sequence
  Description of Artificial Sequence: Synthetic oligonucleotide
cauccgaccucaagaacac

SEQ ID NO: 205363 - RNA, 19 nt, Artificial Sequence
  Description of Artificial Sequence: Synthetic oligonucleotide
ugauccauacuccccuuuu

SEQ ID NO: 205364 - RNA, 19 nt, Artificial Sequence
  Description of Artificial Sequence: Synthetic oligonucleotide
gaacccguguaaauccaag

SEQ ID NO: 205365 - RNA, 19 nt, Artificial Sequence
  Description of Artificial Sequence: Synthetic oligonucleotide
guuguauggaucggccuag

SEQ ID NO: 205366 - RNA, 19 nt, Artificial Sequence
  Description of Artificial Sequence: Synthetic oligonucleotide
cugacucuauuuagaguac

SEQ ID NO: 205367 - RNA, 19 nt, Artificial Sequence
  Description of Artificial Sequence: Synthetic oligonucleotide
ugcugaugcccagugcuag

SEQ ID NO: 205368 - RNA, 19 nt, Artificial Sequence
  Description of Artificial Sequence: Synthetic oligonucleotide
guucaguaagccguuguac

SEQ ID NO: 205369 - RNA, 19 nt, Artificial Sequence
  Description of Artificial Sequence: Synthetic oligonucleotide
aucguggggacuucgucgu

SEQ ID NO: 205370 - RNA, 19 nt, Artificial Sequence
  Description of Artificial Sequence: Synthetic oligonucleotide
aacaagguuuagccagaau

SEQ ID NO: 205371 - RNA, 19 nt, Artificial Sequence
  Description of Artificial Sequence: Synthetic oligonucleotide
ugcugaacccguguaaauc

SEQ ID NO: 205372 - RNA, 19 nt, Artificial Sequence
  Description of Artificial Sequence: Synthetic oligonucleotide
agaucuacgugccgaacuu

SEQ ID NO: 205373 - RNA, 19 nt, Artificial Sequence
  Description of Artificial Sequence: Synthetic oligonucleotide
cauaaaggccucuaauugu

SEQ ID NO: 205374 - RNA, 19 nt, Artificial Sequence
  Description of Artificial Sequence: Synthetic oligonucleotide
acuacgccauuucuggaau

SEQ ID NO: 205375 - RNA, 19 nt, Artificial Sequence
  Description of Artificial Sequence: Synthetic oligonucleotide
ccguguaaauccaagccag

SEQ ID NO: 205376 - RNA, 19 nt, Artificial Sequence
  Description of Artificial Sequence: Synthetic oligonucleotide
ggaaacaugauuucacggu

SEQ ID NO: 205377 - RNA, 19 nt, Artificial Sequence
  Description of Artificial Sequence: Synthetic oligonucleotide
uaacuacgccauuucugga

SEQ ID NO: 205378 - RNA, 19 nt, Artificial Sequence
  Description of Artificial Sequence: Synthetic oligonucleotide
aagcccauaucuguggcuu

SEQ ID NO: 205379 - RNA, 19 nt, Artificial Sequence
  Description of Artificial Sequence: Synthetic oligonucleotide
gccauuaaugcagauagca

SEQ ID NO: 205380 - RNA, 19 nt, Artificial Sequence
  Description of Artificial Sequence: Synthetic oligonucleotide
gcggacacgacugugugcg

SEQ ID NO: 205381 - RNA, 19 nt, Artificial Sequence
  Description of Artificial Sequence: Synthetic oligonucleotide
uccgguuguauggaucggc

SEQ ID NO: 205382 - RNA, 19 nt, Artificial Sequence
  Description of Artificial Sequence: Synthetic oligonucleotide
ugcccuuacugaggggucg

SEQ ID NO: 205383 - RNA, 19 nt, Artificial Sequence
  Description of Artificial Sequence: Synthetic oligonucleotide
uacuugcuccgguuguaug

SEQ ID NO: 205384 - RNA, 19 nt, Artificial Sequence
  Description of Artificial Sequence: Synthetic oligonucleotide
caagugucagauaaugagu

SEQ ID NO: 205385 - RNA, 19 nt, Artificial Sequence
  Description of Artificial Sequence: Synthetic oligonucleotide
gaaguuguucuaaaucacu

SEQ ID NO: 205386 - RNA, 19 nt, Artificial Sequence
  Description of Artificial Sequence: Synthetic oligonucleotide
gaucacgacuuuccaugac

SEQ ID NO: 205387 - RNA, 19 nt, Artificial Sequence
  Description of Artificial Sequence: Synthetic oligonucleotide
uccauagaccggaccccag

SEQ ID NO: 205388 - RNA, 19 nt, Artificial Sequence
  Description of Artificial Sequence: Synthetic oligonucleotide
ugcuauccugacuguaaaa

SEQ ID NO: 205389 - RNA, 19 nt, Artificial Sequence
  Description of Artificial Sequence: Synthetic oligonucleotide
acaccuaguaaggugccca

SEQ ID NO: 205390 - RNA, 19 nt, Artificial Sequence
  Description of Artificial Sequence: Synthetic oligonucleotide
caaguaugaucguguaaca

SEQ ID NO: 205391 - RNA, 19 nt, Artificial Sequence
  Description of Artificial Sequence: Synthetic oligonucleotide
cuuaaggacugcuuugacu

SEQ ID NO: 205392 - RNA, 19 nt, Artificial Sequence
  Description of Artificial Sequence: Synthetic oligonucleotide
uuauggcaacaagaagugu

SEQ ID NO: 205393 - RNA, 19 nt, Artificial Sequence
  Description of Artificial Sequence: Synthetic oligonucleotide
agaagacuucgauggacua

SEQ ID NO: 205394 - RNA, 19 nt, Artificial Sequence
  Description of Artificial Sequence: Synthetic oligonucleotide
caauggauugccugucaca

SEQ ID NO: 205395 - RNA, 19 nt, Artificial Sequence
  Description of Artificial Sequence: Synthetic oligonucleotide
caaacccugguugcaagug

SEQ ID NO: 205396 - RNA, 19 nt, Artificial Sequence
  Description of Artificial Sequence: Synthetic oligonucleotide
gaggccccuacucggacac

SEQ ID NO: 205397 - RNA, 19 nt, Artificial Sequence
  Description of Artificial Sequence: Synthetic oligonucleotide
gaaaagccauacgggugag

SEQ ID NO: 205398 - RNA, 19 nt, Artificial Sequence
  Description of Artificial Sequence: Synthetic oligonucleotide
ugcuccgguuguauggauc

SEQ ID NO: 205399 - RNA, 19 nt, Artificial Sequence
  Description of Artificial Sequence: Synthetic oligonucleotide
guuaggagagugccucuca

SEQ ID NO: 205400 - RNA, 19 nt, Artificial Sequence
  Description of Artificial Sequence: Synthetic oligonucleotide
uaugcccauagaagggauu

SEQ ID NO: 205401 - RNA, 19 nt, Artificial Sequence
  Description of Artificial Sequence: Synthetic oligonucleotide
cccaucuagcuugagaagc

SEQ ID NO: 205402 - RNA, 19 nt, Artificial Sequence
  Description of Artificial Sequence: Synthetic oligonucleotide
gcgcccaucaugaaaauac

SEQ ID NO: 205403 - RNA, 19 nt, Artificial Sequence
  Description of Artificial Sequence: Synthetic oligonucleotide
uuguauggaucggccuagg

SEQ ID NO: 205404 - RNA, 19 nt, Artificial Sequence
  Description of Artificial Sequence: Synthetic oligonucleotide
caucuguagaguacaaccu

SEQ ID NO: 205405 - RNA, 19 nt, Artificial Sequence
  Description of Artificial Sequence: Synthetic oligonucleotide
gaagacuucgauggacuaa

SEQ ID NO: 205406 - RNA, 19 nt, Artificial Sequence
  Description of Artificial Sequence: Synthetic oligonucleotide
uuucggcucuuggagcuug

SEQ ID NO: 205407 - RNA, 19 nt, Artificial Sequence
  Description of Artificial Sequence: Synthetic oligonucleotide
uuauuacuccuaggacagc

SEQ ID NO: 205408 - RNA, 19 nt, Artificial Sequence
  Description of Artificial Sequence: Synthetic oligonucleotide
ucuaauuguucaggaguuu

SEQ ID NO: 205409 - RNA, 19 nt, Artificial Sequence
  Description of Artificial Sequence: Synthetic oligonucleotide
uaaggcccaugcagguggc

SEQ ID NO: 205410 - RNA, 19 nt, Artificial Sequence
  Description of Artificial Sequence: Synthetic oligonucleotide
auuacuccuaggacagcug

SEQ ID NO: 205411 - RNA, 19 nt, Artificial Sequence
  Description of Artificial Sequence: Synthetic oligonucleotide
agugguaaccuaaguuaca

SEQ ID NO: 205412 - RNA, 19 nt, Artificial Sequence
  Description of Artificial Sequence: Synthetic oligonucleotide
gugguaaccuaaguuacaa

SEQ ID NO: 205413 - RNA, 19 nt, Artificial Sequence
  Description of Artificial Sequence: Synthetic oligonucleotide
caugauuccaugguaccaa

SEQ ID NO: 205414 - RNA, 19 nt, Artificial Sequence
  Description of Artificial Sequence: Synthetic oligonucleotide
gcgccaacugacuccauag

SEQ ID NO: 205415 - RNA, 19 nt, Artificial Sequence
  Description of Artificial Sequence: Synthetic oligonucleotide
cacauccgaccucaagaac

SEQ ID NO: 205416 - RNA, 19 nt, Artificial Sequence
  Description of Artificial Sequence: Synthetic oligonucleotide
aagagaguccugcgcccau

SEQ ID NO: 205417 - RNA, 19 nt, Artificial Sequence
  Description of Artificial Sequence: Synthetic oligonucleotide
uuugaguucugcgccuaua

SEQ ID NO: 205418 - RNA, 19 nt, Artificial Sequence
  Description of Artificial Sequence: Synthetic oligonucleotide
gauuagaagaaaggaguuu

SEQ ID NO: 205419 - RNA, 19 nt, Artificial Sequence
  Description of Artificial Sequence: Synthetic oligonucleotide
gacuauugggaaccaugua

SEQ ID NO: 205420 - RNA, 19 nt, Artificial Sequence
  Description of Artificial Sequence: Synthetic oligonucleotide
gacugugugcgccgccggc

SEQ ID NO: 205421 - RNA, 19 nt, Artificial Sequence
  Description of Artificial Sequence: Synthetic oligonucleotide
cuacgccauuucuggaaug

SEQ ID NO: 205422 - RNA, 19 nt, Artificial Sequence
  Description of Artificial Sequence: Synthetic oligonucleotide
acugaggggucgcucucca

SEQ ID NO: 205423 - RNA, 19 nt, Artificial Sequence
  Description of Artificial Sequence: Synthetic oligonucleotide
cuaugucccaagugacuca

SEQ ID NO: 205424 - RNA, 19 nt, Artificial Sequence
  Description of Artificial Sequence: Synthetic oligonucleotide
cccaugauuccaugguacc

SEQ ID NO: 205425 - RNA, 19 nt, Artificial Sequence
  Description of Artificial Sequence: Synthetic oligonucleotide
cuaugaucuaaaagaugcu

SEQ ID NO: 205426 - RNA, 19 nt, Artificial Sequence
  Description of Artificial Sequence: Synthetic oligonucleotide
ccggaaacauccuggcggg

SEQ ID NO: 205427 - RNA, 19 nt, Artificial Sequence
  Description of Artificial Sequence: Synthetic oligonucleotide
gguuguauggaucggccua

SEQ ID NO: 205428 - RNA, 19 nt, Artificial Sequence
  Description of Artificial Sequence: Synthetic oligonucleotide
uugcccuuacugagggguc

SEQ ID NO: 205429 - RNA, 19 nt, Artificial Sequence
  Description of Artificial Sequence: Synthetic oligonucleotide
agaggccccuacucggaca

SEQ ID NO: 205430 - RNA, 19 nt, Artificial Sequence
  Description of Artificial Sequence: Synthetic oligonucleotide
cugugugcgccgccggcgg

SEQ ID NO: 205431 - RNA, 19 nt, Artificial Sequence
  Description of Artificial Sequence: Synthetic oligonucleotide
ucggccuaggagugcuucu

SEQ ID NO: 205432 - RNA, 19 nt, Artificial Sequence
  Description of Artificial Sequence: Synthetic oligonucleotide
gaucuacgugccgaacuuc

SEQ ID NO: 205433 - RNA, 19 nt, Artificial Sequence
  Description of Artificial Sequence: Synthetic oligonucleotide
gcgccuauauuuucugcug

SEQ ID NO: 205434 - RNA, 19 nt, Artificial Sequence
  Description of Artificial Sequence: Synthetic oligonucleotide
acacgacugugugcgccgc

SEQ ID NO: 205435 - RNA, 19 nt, Artificial Sequence
  Description of Artificial Sequence: Synthetic oligonucleotide
auggaucggccuaggagug

SEQ ID NO: 205436 - RNA, 19 nt, Artificial Sequence
  Description of Artificial Sequence: Synthetic oligonucleotide
cagcggacacgacugugug

SEQ ID NO: 205437 - RNA, 19 nt, Artificial Sequence
  Description of Artificial Sequence: Synthetic oligonucleotide
ccacuaaucaaugaagaaa

SEQ ID NO: 205438 - RNA, 19 nt, Artificial Sequence
  Description of Artificial Sequence: Synthetic oligonucleotide
caggucgaaaccacaauau

SEQ ID NO: 205439 - RNA, 19 nt, Artificial Sequence
  Description of Artificial Sequence: Synthetic oligonucleotide
ccgguuguauggaucggcc

SEQ ID NO: 205440 - RNA, 19 nt, Artificial Sequence
  Description of Artificial Sequence: Synthetic oligonucleotide
ggucgaaaccacaauauau

SEQ ID NO: 205441 - RNA, 19 nt, Artificial Sequence
  Description of Artificial Sequence: Synthetic oligonucleotide
cagaucuacgugccgaacu

SEQ ID NO: 205442 - RNA, 19 nt, Artificial Sequence
  Description of Artificial Sequence: Synthetic oligonucleotide
acgguucaauacagacugg

SEQ ID NO: 205443 - RNA, 19 nt, Artificial Sequence
  Description of Artificial Sequence: Synthetic oligonucleotide
gggugaucuaagcagccaa

SEQ ID NO: 205444 - RNA, 19 nt, Artificial Sequence
  Description of Artificial Sequence: Synthetic oligonucleotide
cguguaaauccaagccagg

SEQ ID NO: 205445 - RNA, 19 nt, Artificial Sequence
  Description of Artificial Sequence: Synthetic oligonucleotide
uggaucggccuaggagugc

SEQ ID NO: 205446 - RNA, 19 nt, Artificial Sequence
  Description of Artificial Sequence: Synthetic oligonucleotide
gcugcuauuauuacuccua

SEQ ID NO: 205447 - RNA, 19 nt, Artificial Sequence
  Description of Artificial Sequence: Synthetic oligonucleotide
cuaauuguucaggaguuuu

SEQ ID NO: 205448 - RNA, 19 nt, Artificial Sequence
  Description of Artificial Sequence: Synthetic oligonucleotide
cccguguaaauccaagcca

SEQ ID NO: 205449 - RNA, 19 nt, Artificial Sequence
  Description of Artificial Sequence: Synthetic oligonucleotide
agaguacaaccugacucua

SEQ ID NO: 205450 - RNA, 19 nt, Artificial Sequence
  Description of Artificial Sequence: Synthetic oligonucleotide
ccauagaccggaccccagc

SEQ ID NO: 205451 - RNA, 19 nt, Artificial Sequence
  Description of Artificial Sequence: Synthetic oligonucleotide
ggacacgacugugugcgcc

SEQ ID NO: 205452 - RNA, 19 nt, Artificial Sequence
  Description of Artificial Sequence: Synthetic oligonucleotide
ggcaacuacuaugaucuaa

SEQ ID NO: 205453 - RNA, 19 nt, Artificial Sequence
  Description of Artificial Sequence: Synthetic oligonucleotide
gguggcugcuauuauuacu

SEQ ID NO: 205454 - RNA, 19 nt, Artificial Sequence
  Description of Artificial Sequence: Synthetic oligonucleotide
gcgcauauuugaaaagcca

SEQ ID NO: 205455 - RNA, 19 nt, Artificial Sequence
  Description of Artificial Sequence: Synthetic oligonucleotide
acgugccgaacuucaggau

SEQ ID NO: 205456 - RNA, 19 nt, Artificial Sequence
  Description of Artificial Sequence: Synthetic oligonucleotide
ccauugguugaggaugaag

SEQ ID NO: 205457 - RNA, 19 nt, Artificial Sequence
  Description of Artificial Sequence: Synthetic oligonucleotide
gcugaugcccagugcuagc

SEQ ID NO: 205458 - RNA, 19 nt, Artificial Sequence
  Description of Artificial Sequence: Synthetic oligonucleotide
cugaggggucgcucuccag

SEQ ID NO: 205459 - RNA, 19 nt, Artificial Sequence
  Description of Artificial Sequence: Synthetic oligonucleotide
gacuucgucgucugauuuu

SEQ ID NO: 205460 - RNA, 19 nt, Artificial Sequence
  Description of Artificial Sequence: Synthetic oligonucleotide
ggcuaaaaugagaaacugu

SEQ ID NO: 205461 - RNA, 19 nt, Artificial Sequence
  Description of Artificial Sequence: Synthetic oligonucleotide
uugcuccgguuguauggau

SEQ ID NO: 205462 - RNA, 19 nt, Artificial Sequence
  Description of Artificial Sequence: Synthetic oligonucleotide
cccaagugacucauucauc

SEQ ID NO: 205463 - RNA, 19 nt, Artificial Sequence
  Description of Artificial Sequence: Synthetic oligonucleotide
guacaaccugacucuauuu

SEQ ID NO: 205464 - RNA, 19 nt, Artificial Sequence
  Description of Artificial Sequence: Synthetic oligonucleotide
cuccauagaccggacccca

SEQ ID NO: 205465 - RNA, 19 nt, Artificial Sequence
  Description of Artificial Sequence: Synthetic oligonucleotide
cugcccggccgccaccgag

SEQ ID NO: 205466 - RNA, 19 nt, Artificial Sequence
  Description of Artificial Sequence: Synthetic oligonucleotide
gcccaucaugaaaauacca

SEQ ID NO: 205467 - RNA, 19 nt, Artificial Sequence
  Description of Artificial Sequence: Synthetic oligonucleotide
uggcaacuacuaugaucua

SEQ ID NO: 205468 - RNA, 19 nt, Artificial Sequence
  Description of Artificial Sequence: Synthetic oligonucleotide
uuuucggcucuuggagcuu

SEQ ID NO: 205469 - RNA, 19 nt, Artificial Sequence
  Description of Artificial Sequence: Synthetic oligonucleotide
ugccgaacuucaggauuuc

SEQ ID NO: 205470 - RNA, 19 nt, Artificial Sequence
  Description of Artificial Sequence: Synthetic oligonucleotide
ccacauccgaccucaagaa

SEQ ID NO: 205471 - RNA, 19 nt, Artificial Sequence
  Description of Artificial Sequence: Synthetic oligonucleotide
gccauacgggugagaaggg

SEQ ID NO: 205472 - RNA, 19 nt, Artificial Sequence
  Description of Artificial Sequence: Synthetic oligonucleotide
ucguggggacuucgucguc

SEQ ID NO: 205473 - RNA, 19 nt, Artificial Sequence
  Description of Artificial Sequence: Synthetic oligonucleotide
acagcgucgcccagcugca

SEQ ID NO: 205474 - RNA, 19 nt, Artificial Sequence
  Description of Artificial Sequence: Synthetic oligonucleotide
acgccauuucuggaaugaa

SEQ ID NO: 205475 - RNA, 19 nt, Artificial Sequence
  Description of Artificial Sequence: Synthetic oligonucleotide
gggaaucauacaauggauu

SEQ ID NO: 205476 - RNA, 19 nt, Artificial Sequence
  Description of Artificial Sequence: Synthetic oligonucleotide
ccgagccugcacagcgucg

SEQ ID NO: 205477 - RNA, 19 nt, Artificial Sequence
  Description of Artificial Sequence: Synthetic oligonucleotide
cuuagguggugagacuuuu

SEQ ID NO: 205478 - RNA, 19 nt, Artificial Sequence
  Description of Artificial Sequence: Synthetic oligonucleotide
gcaaacccugguugcaagu

SEQ ID NO: 205479 - RNA, 19 nt, Artificial Sequence
  Description of Artificial Sequence: Synthetic oligonucleotide
ccuuacugaggggucgcuc

SEQ ID NO: 205480 - RNA, 19 nt, Artificial Sequence
  Description of Artificial Sequence: Synthetic oligonucleotide
gucauauaucuaggauuau

SEQ ID NO: 205481 - RNA, 19 nt, Artificial Sequence
  Description of Artificial Sequence: Synthetic oligonucleotide
guacuugcuccgguuguau

SEQ ID NO: 205482 - RNA, 19 nt, Artificial Sequence
  Description of Artificial Sequence: Synthetic oligonucleotide
ggaucggccuaggagugcu

SEQ ID NO: 205483 - RNA, 19 nt, Artificial Sequence
  Description of Artificial Sequence: Synthetic oligonucleotide
gccgcgccaacugacucca

SEQ ID NO: 205484 - RNA, 19 nt, Artificial Sequence
  Description of Artificial Sequence: Synthetic oligonucleotide
ggccuaggagugcuucugu

SEQ ID NO: 205485 - RNA, 19 nt, Artificial Sequence
  Description of Artificial Sequence: Synthetic oligonucleotide
ccgaccucaagaacacagu

SEQ ID NO: 205486 - RNA, 19 nt, Artificial Sequence
  Description of Artificial Sequence: Synthetic oligonucleotide
caccgagccugcacagcgu

SEQ ID NO: 205487 - RNA, 19 nt, Artificial Sequence
  Description of Artificial Sequence: Synthetic oligonucleotide
caguaucaucguggggacu

SEQ ID NO: 205488 - RNA, 19 nt, Artificial Sequence
  Description of Artificial Sequence: Synthetic oligonucleotide
cagcgucgcccagcugcac

SEQ ID NO: 205489 - RNA, 19 nt, Artificial Sequence
  Description of Artificial Sequence: Synthetic oligonucleotide
cugcagccgcgggccacug

SEQ ID NO: 205490 - RNA, 19 nt, Artificial Sequence
  Description of Artificial Sequence: Synthetic oligonucleotide
cgugccgaacuucaggauu

SEQ ID NO: 205491 - RNA, 19 nt, Artificial Sequence
  Description of Artificial Sequence: Synthetic oligonucleotide
cggacacgacugugugcgc

SEQ ID NO: 205492 - RNA, 19 nt, Artificial Sequence
  Description of Artificial Sequence: Synthetic oligonucleotide
ccauacgggugagaagggu

SEQ ID NO: 205493 - RNA, 19 nt, Artificial Sequence
  Description of Artificial Sequence: Synthetic oligonucleotide
ggacggcacugacuccccu

SEQ ID NO: 205494 - RNA, 19 nt, Artificial Sequence
  Description of Artificial Sequence: Synthetic oligonucleotide
cgguuguauggaucggccu

SEQ ID NO: 205495 - RNA, 19 nt, Artificial Sequence
  Description of Artificial Sequence: Synthetic oligonucleotide
gaucggccuaggagugcuu

SEQ ID NO: 205496 - RNA, 19 nt, Artificial Sequence
  Description of Artificial Sequence: Synthetic oligonucleotide
cccuuacugaggggucgcu

SEQ ID NO: 205497 - RNA, 19 nt, Artificial Sequence
  Description of Artificial Sequence: Synthetic oligonucleotide
ccccagcggacacgacugu

SEQ ID NO: 205498 - RNA, 19 nt, Artificial Sequence
  Description of Artificial Sequence: Synthetic oligonucleotide
aagauauauauauauaaac

SEQ ID NO: 205499 - RNA, 19 nt, Artificial Sequence
  Description of Artificial Sequence: Synthetic oligonucleotide
gauauauauauauaaaccc

SEQ ID NO: 205500 - RNA, 19 nt, Artificial Sequence
  Description of Artificial Sequence: Synthetic oligonucleotide
aaauucguaagcuccagcc

SEQ ID NO: 205501 - RNA, 19 nt, Artificial Sequence
  Description of Artificial Sequence: Synthetic oligonucleotide
aauaucuaaagugauuagc

SEQ ID NO: 205502 - RNA, 19 nt, Artificial Sequence
  Description of Artificial Sequence: Synthetic oligonucleotide
uucacuagcaacaauaucu

SEQ ID NO: 205503 - RNA, 19 nt, Artificial Sequence
  Description of Artificial Sequence: Synthetic oligonucleotide
agauauauauauauaaacc

SEQ ID NO: 205504 - RNA, 19 nt, Artificial Sequence
  Description of Artificial Sequence: Synthetic oligonucleotide
auauaugauaagaugaugc

SEQ ID NO: 205505 - RNA, 19 nt, Artificial Sequence
  Description of Artificial Sequence: Synthetic oligonucleotide
auauauauauauaaacccc

SEQ ID NO: 205506 - RNA, 19 nt, Artificial Sequence
  Description of Artificial Sequence: Synthetic oligonucleotide
uauaugauaagaugaugcg

SEQ ID NO: 205507 - RNA, 19 nt, Artificial Sequence
  Description of Artificial Sequence: Synthetic oligonucleotide
ugauuagcaaucaauacca

SEQ ID NO: 205508 - RNA, 19 nt, Artificial Sequence
  Description of Artificial Sequence: Synthetic oligonucleotide
uauauauauauaaacccca

SEQ ID NO: 205509 - RNA, 19 nt, Artificial Sequence
  Description of Artificial Sequence: Synthetic oligonucleotide
ugaagauauauauauauaa

SEQ ID NO: 205510 - RNA, 19 nt, Artificial Sequence
  Description of Artificial Sequence: Synthetic oligonucleotide
uauauauaaaccccaaauc

SEQ ID NO: 205511 - RNA, 19 nt, Artificial Sequence
  Description of Artificial Sequence: Synthetic oligonucleotide
guuaacacggcucaauacg

SEQ ID NO: 205512 - RNA, 19 nt, Artificial Sequence
  Description of Artificial Sequence: Synthetic oligonucleotide
uauacaaugacuggcauca

SEQ ID NO: 205513 - RNA, 19 nt, Artificial Sequence
  Description of Artificial Sequence: Synthetic oligonucleotide
uuacuagcuagugagagcg

SEQ ID NO: 205514 - RNA, 19 nt, Artificial Sequence
  Description of Artificial Sequence: Synthetic oligonucleotide
uaugguaauacuucaacac

SEQ ID NO: 205515 - RNA, 19 nt, Artificial Sequence
  Description of Artificial Sequence: Synthetic oligonucleotide
aauucuacuacuauuugug

SEQ ID NO: 205516 - RNA, 19 nt, Artificial Sequence
  Description of Artificial Sequence: Synthetic oligonucleotide
uguauaggaaggaauauau

SEQ ID NO: 205517 - RNA, 19 nt, Artificial Sequence
  Description of Artificial Sequence: Synthetic oligonucleotide
ugugacucaagagagaagc

SEQ ID NO: 205518 - RNA, 19 nt, Artificial Sequence
  Description of Artificial Sequence: Synthetic oligonucleotide
acugaagauauauauauau

SEQ ID NO: 205519 - RNA, 19 nt, Artificial Sequence
  Description of Artificial Sequence: Synthetic oligonucleotide
auagagauuccaugcaugg

SEQ ID NO: 205520 - RNA, 19 nt, Artificial Sequence
  Description of Artificial Sequence: Synthetic oligonucleotide
gaaaucacaaauuuauuaa

SEQ ID NO: 205521 - RNA, 19 nt, Artificial Sequence
  Description of Artificial Sequence: Synthetic oligonucleotide
gugauuagcaaucaauacc

SEQ ID NO: 205522 - RNA, 19 nt, Artificial Sequence
  Description of Artificial Sequence: Synthetic oligonucleotide
aagauuaaugucagcauuc

SEQ ID NO: 205523 - RNA, 19 nt, Artificial Sequence
  Description of Artificial Sequence: Synthetic oligonucleotide
aaucuuggcguuaacagag

SEQ ID NO: 205524 - RNA, 19 nt, Artificial Sequence
  Description of Artificial Sequence: Synthetic oligonucleotide
auggaaauucguaagcucc

SEQ ID NO: 205525 - RNA, 19 nt, Artificial Sequence
  Description of Artificial Sequence: Synthetic oligonucleotide
ucuaucauacauucacuag

SEQ ID NO: 205526 - RNA, 19 nt, Artificial Sequence
  Description of Artificial Sequence: Synthetic oligonucleotide
ucuaugguaauacuucaac

SEQ ID NO: 205527 - RNA, 19 nt, Artificial Sequence
  Description of Artificial Sequence: Synthetic oligonucleotide
gaagaugacacugugacuc

SEQ ID NO: 205528 - RNA, 19 nt, Artificial Sequence
  Description of Artificial Sequence: Synthetic oligonucleotide
agacaaacuggaucuaugg

SEQ ID NO: 205529 - RNA, 19 nt, Artificial Sequence
  Description of Artificial Sequence: Synthetic oligonucleotide
uuuuacuagcuagugagag

SEQ ID NO: 205530 - RNA, 19 nt, Artificial Sequence
  Description of Artificial Sequence: Synthetic oligonucleotide
aauauaugauaagaugaug

SEQ ID NO: 205531 - RNA, 19 nt, Artificial Sequence
  Description of Artificial Sequence: Synthetic oligonucleotide
auacaggguggcuugaugg

SEQ ID NO: 205532 - RNA, 19 nt, Artificial Sequence
  Description of Artificial Sequence: Synthetic oligonucleotide
ucgccuugaacuucuaugg

SEQ ID NO: 205533 - RNA, 19 nt, Artificial Sequence
  Description of Artificial Sequence: Synthetic oligonucleotide
ugucauuuagagaacaaua

SEQ ID NO: 205534 - RNA, 19 nt, Artificial Sequence
  Description of Artificial Sequence: Synthetic oligonucleotide
aagacccaaaugugaaugg

SEQ ID NO: 205535 - RNA, 19 nt, Artificial Sequence
  Description of Artificial Sequence: Synthetic oligonucleotide
auacauguaugccacguag

SEQ ID NO: 205536 - RNA, 19 nt, Artificial Sequence
  Description of Artificial Sequence: Synthetic oligonucleotide
ugguuuauugcuuuuggac

SEQ ID NO: 205537 - RNA, 19 nt, Artificial Sequence
  Description of Artificial Sequence: Synthetic oligonucleotide
uguaugcuaugcaagcugc

SEQ ID NO: 205538 - RNA, 19 nt, Artificial Sequence
  Description of Artificial Sequence: Synthetic oligonucleotide
agagauuccaugcauggca

SEQ ID NO: 205539 - RNA, 19 nt, Artificial Sequence
  Description of Artificial Sequence: Synthetic oligonucleotide
ugugaacuaugccauuuag

SEQ ID NO: 205540 - RNA, 19 nt, Artificial Sequence
  Description of Artificial Sequence: Synthetic oligonucleotide
aaauagguuucugaggacu

SEQ ID NO: 205541 - RNA, 19 nt, Artificial Sequence
  Description of Artificial Sequence: Synthetic oligonucleotide
gauggauuaguugaacuug

SEQ ID NO: 205542 - RNA, 19 nt, Artificial Sequence
  Description of Artificial Sequence: Synthetic oligonucleotide
auuuaggugacaaugauuu

SEQ ID NO: 205543 - RNA, 19 nt, Artificial Sequence
  Description of Artificial Sequence: Synthetic oligonucleotide
uguugaaaauuagaagacc

SEQ ID NO: 205544 - RNA, 19 nt, Artificial Sequence
  Description of Artificial Sequence: Synthetic oligonucleotide
aauucguaagcuccagccu

SEQ ID NO: 205545 - RNA, 19 nt, Artificial Sequence
  Description of Artificial Sequence: Synthetic oligonucleotide
uugccaacagcaauuuaag

SEQ ID NO: 205546 - RNA, 19 nt, Artificial Sequence
  Description of Artificial Sequence: Synthetic oligonucleotide
auuaaugucagcauucuaa

SEQ ID NO: 205547 - RNA, 19 nt, Artificial Sequence
  Description of Artificial Sequence: Synthetic oligonucleotide
aaauacauguaugccacgu

SEQ ID NO: 205548 - RNA, 19 nt, Artificial Sequence
  Description of Artificial Sequence: Synthetic oligonucleotide
aggaucuuuacgcaggacu

SEQ ID NO: 205549 - RNA, 19 nt, Artificial Sequence
  Description of Artificial Sequence: Synthetic oligonucleotide
gaaaagugaggccauuaac

SEQ ID NO: 205550 - RNA, 19 nt, Artificial Sequence
  Description of Artificial Sequence: Synthetic oligonucleotide
auacguuuacuguauauau

SEQ ID NO: 205551 - RNA, 19 nt, Artificial Sequence
  Description of Artificial Sequence: Synthetic oligonucleotide
uuaacacggcucaauacgu

SEQ ID NO: 205552 - RNA, 19 nt, Artificial Sequence
  Description of Artificial Sequence: Synthetic oligonucleotide
auuuggaauacaggguggc

SEQ ID NO: 205553 - RNA, 19 nt, Artificial Sequence
  Description of Artificial Sequence: Synthetic oligonucleotide
uuuccgucuagcauuaaau

SEQ ID NO: 205554 - RNA, 19 nt, Artificial Sequence
  Description of Artificial Sequence: Synthetic oligonucleotide
aauacguuuacuguauaua

SEQ ID NO: 205555 - RNA, 19 nt, Artificial Sequence
  Description of Artificial Sequence: Synthetic oligonucleotide
cugucggugaccccgaacg

SEQ ID NO: 205556 - RNA, 19 nt, Artificial Sequence
  Description of Artificial Sequence: Synthetic oligonucleotide
gcuagaacuacauagucac

SEQ ID NO: 205557 - RNA, 19 nt, Artificial Sequence
  Description of Artificial Sequence: Synthetic oligonucleotide
agagauagccaggugugcc

SEQ ID NO: 205558 - RNA, 19 nt, Artificial Sequence
  Description of Artificial Sequence: Synthetic oligonucleotide
auaaggaucuuuacgcagg

SEQ ID NO: 205559 - RNA, 19 nt, Artificial Sequence
  Description of Artificial Sequence: Synthetic oligonucleotide
ugaacuucuauggcuaagc

SEQ ID NO: 205560 - RNA, 19 nt, Artificial Sequence
  Description of Artificial Sequence: Synthetic oligonucleotide
cauuacauguagaaccuuc

SEQ ID NO: 205561 - RNA, 19 nt, Artificial Sequence
  Description of Artificial Sequence: Synthetic oligonucleotide
auagucacaaagaucaagu

SEQ ID NO: 205562 - RNA, 19 nt, Artificial Sequence
  Description of Artificial Sequence: Synthetic oligonucleotide
gaagauauauauauauaaa

SEQ ID NO: 205563 - RNA, 19 nt, Artificial Sequence
  Description of Artificial Sequence: Synthetic oligonucleotide
cuuuacgcaggacuucugg

SEQ ID NO: 205564 - RNA, 19 nt, Artificial Sequence
  Description of Artificial Sequence: Synthetic oligonucleotide
gaacuaugccauuuaggug

SEQ ID NO: 205565 - RNA, 19 nt, Artificial Sequence
  Description of Artificial Sequence: Synthetic oligonucleotide
gauggaaauucguaagcuc

SEQ ID NO: 205566 - RNA, 19 nt, Artificial Sequence
  Description of Artificial Sequence: Synthetic oligonucleotide
ugaccccgaacgaugaaag

SEQ ID NO: 205567 - RNA, 19 nt, Artificial Sequence
  Description of Artificial Sequence: Synthetic oligonucleotide
gagauagccaggugugccg

SEQ ID NO: 205568 - RNA, 19 nt, Artificial Sequence
  Description of Artificial Sequence: Synthetic oligonucleotide
caaguucaaacacuaugag

SEQ ID NO: 205569 - RNA, 19 nt, Artificial Sequence
  Description of Artificial Sequence: Synthetic oligonucleotide
uuccgauauacugucauga

SEQ ID NO: 205570 - RNA, 19 nt, Artificial Sequence
  Description of Artificial Sequence: Synthetic oligonucleotide
auuagaagacccaaaugug

SEQ ID NO: 205571 - RNA, 19 nt, Artificial Sequence
  Description of Artificial Sequence: Synthetic oligonucleotide
ucgucuuuggcauuccacu

SEQ ID NO: 205572 - RNA, 19 nt, Artificial Sequence
  Description of Artificial Sequence: Synthetic oligonucleotide
ugcgucacaugauaagaug

SEQ ID NO: 205573 - RNA, 19 nt, Artificial Sequence
  Description of Artificial Sequence: Synthetic oligonucleotide
gaucuaugguaauacuuca

SEQ ID NO: 205574 - RNA, 19 nt, Artificial Sequence
  Description of Artificial Sequence: Synthetic oligonucleotide
agcgaggcaguaaaggccc

SEQ ID NO: 205575 - RNA, 19 nt, Artificial Sequence
  Description of Artificial Sequence: Synthetic oligonucleotide
augcuaugcaagcugcauc

SEQ ID NO: 205576 - RNA, 19 nt, Artificial Sequence
  Description of Artificial Sequence: Synthetic oligonucleotide
uauggcuaagccgaagucu

SEQ ID NO: 205577 - RNA, 19 nt, Artificial Sequence
  Description of Artificial Sequence: Synthetic oligonucleotide
gucgccuugaacuucuaug

SEQ ID NO: 205578 - RNA, 19 nt, Artificial Sequence
  Description of Artificial Sequence: Synthetic oligonucleotide
agccgaauguaugcuaugc

SEQ ID NO: 205579 - RNA, 19 nt, Artificial Sequence
  Description of Artificial Sequence: Synthetic oligonucleotide
auaugauaagaugaugcgu

SEQ ID NO: 205580 - RNA, 19 nt, Artificial Sequence
  Description of Artificial Sequence: Synthetic oligonucleotide
uuuacgcaggacuucugga

SEQ ID NO: 205581 - RNA, 19 nt, Artificial Sequence
  Description of Artificial Sequence: Synthetic oligonucleotide
aagaaaacuggggcauuuc

SEQ ID NO: 205582 - RNA, 19 nt, Artificial Sequence
  Description of Artificial Sequence: Synthetic oligonucleotide
uguauacaaugacuggcau

SEQ ID NO: 205583 - RNA, 19 nt, Artificial Sequence
  Description of Artificial Sequence: Synthetic oligonucleotide
ugccugugcaucauggaac

SEQ ID NO: 205584 - RNA, 19 nt, Artificial Sequence
  Description of Artificial Sequence: Synthetic oligonucleotide
ucuuccgacugcaucgucu

SEQ ID NO: 205585 - RNA, 19 nt, Artificial Sequence
  Description of Artificial Sequence: Synthetic oligonucleotide
uccgucuagcauuaaauuu

SEQ ID NO: 205586 - RNA, 19 nt, Artificial Sequence
  Description of Artificial Sequence: Synthetic oligonucleotide
caggacuuacccuuccggg

SEQ ID NO: 205587 - RNA, 19 nt, Artificial Sequence
  Description of Artificial Sequence: Synthetic oligonucleotide
aagacaaacuggaucuaug

SEQ ID NO: 205588 - RNA, 19 nt, Artificial Sequence
  Description of Artificial Sequence: Synthetic oligonucleotide
guagagcguugacagaucc

SEQ ID NO: 205589 - RNA, 19 nt, Artificial Sequence
  Description of Artificial Sequence: Synthetic oligonucleotide
aauauucucuugccacuau

SEQ ID NO: 205590 - RNA, 19 nt, Artificial Sequence
  Description of Artificial Sequence: Synthetic oligonucleotide
uaguuugccaacagcaauu

SEQ ID NO: 205591 - RNA, 19 nt, Artificial Sequence
  Description of Artificial Sequence: Synthetic oligonucleotide
auucuacuacuauuugugu

SEQ ID NO: 205592 - RNA, 19 nt, Artificial Sequence
  Description of Artificial Sequence: Synthetic oligonucleotide
ugauaguguggauugguuu

SEQ ID NO: 205593 - RNA, 19 nt, Artificial Sequence
  Description of Artificial Sequence: Synthetic oligonucleotide
aacacggcucaauacguuu

SEQ ID NO: 205594 - RNA, 19 nt, Artificial Sequence
  Description of Artificial Sequence: Synthetic oligonucleotide
uuauugcuuuuggacaaag

SEQ ID NO: 205595 - RNA, 19 nt, Artificial Sequence
  Description of Artificial Sequence: Synthetic oligonucleotide
cuagcuagugagagcgagg

SEQ ID NO: 205596 - RNA, 19 nt, Artificial Sequence
  Description of Artificial Sequence: Synthetic oligonucleotide
ugccacguagauuugcuuc

SEQ ID NO: 205597 - RNA, 19 nt, Artificial Sequence
  Description of Artificial Sequence: Synthetic oligonucleotide
gguacugucggugaccccg

SEQ ID NO: 205598 - RNA, 19 nt, Artificial Sequence
  Description of Artificial Sequence: Synthetic oligonucleotide
ugagccgaauguaugcuau

SEQ ID NO: 205599 - RNA, 19 nt, Artificial Sequence
  Description of Artificial Sequence: Synthetic oligonucleotide
cauuuagagaacaauaauu

SEQ ID NO: 205600 - RNA, 19 nt, Artificial Sequence
  Description of Artificial Sequence: Synthetic oligonucleotide
auucguaagcuccagccuu

SEQ ID NO: 205601 - RNA, 19 nt, Artificial Sequence
  Description of Artificial Sequence: Synthetic oligonucleotide
cucauuuuacuagcuagug

SEQ ID NO: 205602 - RNA, 19 nt, Artificial Sequence
  Description of Artificial Sequence: Synthetic oligonucleotide
agagagauagccaggugug

SEQ ID NO: 205603 - RNA, 19 nt, Artificial Sequence
  Description of Artificial Sequence: Synthetic oligonucleotide
ucggugaccccgaacgaug

SEQ ID NO: 205604 - RNA, 19 nt, Artificial Sequence
  Description of Artificial Sequence: Synthetic oligonucleotide
ucaaucagucguuuaccau

SEQ ID NO: 205605 - RNA, 19 nt, Artificial Sequence
  Description of Artificial Sequence: Synthetic oligonucleotide
auaagcuucgaagucccca

SEQ ID NO: 205606 - RNA, 19 nt, Artificial Sequence
  Description of Artificial Sequence: Synthetic oligonucleotide
aaagaaaacuggggcauuu

SEQ ID NO: 205607 - RNA, 19 nt, Artificial Sequence
  Description of Artificial Sequence: Synthetic oligonucleotide
ucccucuauaguuugccaa

SEQ ID NO: 205608 - RNA, 19 nt, Artificial Sequence
  Description of Artificial Sequence: Synthetic oligonucleotide
ugacuccuuuacuccaucc

SEQ ID NO: 205609 - RNA, 19 nt, Artificial Sequence
  Description of Artificial Sequence: Synthetic oligonucleotide
uuaguugaacuuggaauau

SEQ ID NO: 205610 - RNA, 19 nt, Artificial Sequence
  Description of Artificial Sequence: Synthetic oligonucleotide
aucgucuuuggcauuccac

SEQ ID NO: 205611 - RNA, 19 nt, Artificial Sequence
  Description of Artificial Sequence: Synthetic oligonucleotide
aggacuuacccuuccgggu

SEQ ID NO: 205612 - RNA, 19 nt, Artificial Sequence
  Description of Artificial Sequence: Synthetic oligonucleotide
auuuccgucuagcauuaaa

SEQ ID NO: 205613 - RNA, 19 nt, Artificial Sequence
  Description of Artificial Sequence: Synthetic oligonucleotide
uauaagcuucgaagucccc

SEQ ID NO: 205614 - RNA, 19 nt, Artificial Sequence
  Description of Artificial Sequence: Synthetic oligonucleotide
aacuuggaauauuguggaa

SEQ ID NO: 205615 - RNA, 19 nt, Artificial Sequence
  Description of Artificial Sequence: Synthetic oligonucleotide
accccgaacgaugaaagug

SEQ ID NO: 205616 - RNA, 19 nt, Artificial Sequence
  Description of Artificial Sequence: Synthetic oligonucleotide
augugugauuccacugugc

SEQ ID NO: 205617 - RNA, 19 nt, Artificial Sequence
  Description of Artificial Sequence: Synthetic oligonucleotide
uccgauauacugucaugaa

SEQ ID NO: 205618 - RNA, 19 nt, Artificial Sequence
  Description of Artificial Sequence: Synthetic oligonucleotide
auaagaugaugcgucacau

SEQ ID NO: 205619 - RNA, 19 nt, Artificial Sequence
  Description of Artificial Sequence: Synthetic oligonucleotide
cugaagauauauauauaua

SEQ ID NO: 205620 - RNA, 19 nt, Artificial Sequence
  Description of Artificial Sequence: Synthetic oligonucleotide
cuuccgauauacugucaug

SEQ ID NO: 205621 - RNA, 19 nt, Artificial Sequence
  Description of Artificial Sequence: Synthetic oligonucleotide
agcuagaacuacauaguca

SEQ ID NO: 205622 - RNA, 19 nt, Artificial Sequence
  Description of Artificial Sequence: Synthetic oligonucleotide
acugucggugaccccgaac

SEQ ID NO: 205623 - RNA, 19 nt, Artificial Sequence
  Description of Artificial Sequence: Synthetic oligonucleotide
uagagauuccaugcauggc

SEQ ID NO: 205624 - RNA, 19 nt, Artificial Sequence
  Description of Artificial Sequence: Synthetic oligonucleotide
uggcguuaacagagaaacc

SEQ ID NO: 205625 - RNA, 19 nt, Artificial Sequence
  Description of Artificial Sequence: Synthetic oligonucleotide
uaauauucucuugccacua

SEQ ID NO: 205626 - RNA, 19 nt, Artificial Sequence
  Description of Artificial Sequence: Synthetic oligonucleotide
aaguaauggaagcccucuu

SEQ ID NO: 205627 - RNA, 19 nt, Artificial Sequence
  Description of Artificial Sequence: Synthetic oligonucleotide
ugucugaccucccucuaua

SEQ ID NO: 205628 - RNA, 19 nt, Artificial Sequence
  Description of Artificial Sequence: Synthetic oligonucleotide
ccgucuagcauuaaauuuc

SEQ ID NO: 205629 - RNA, 19 nt, Artificial Sequence
  Description of Artificial Sequence: Synthetic oligonucleotide
uagagcguugacagaucca

SEQ ID NO: 205630 - RNA, 19 nt, Artificial Sequence
  Description of Artificial Sequence: Synthetic oligonucleotide
gauggguacugucggugac

SEQ ID NO: 205631 - RNA, 19 nt, Artificial Sequence
  Description of Artificial Sequence: Synthetic oligonucleotide
uggcagguuaacacggcuc

SEQ ID NO: 205632 - RNA, 19 nt, Artificial Sequence
  Description of Artificial Sequence: Synthetic oligonucleotide
uggguacugucggugaccc

SEQ ID NO: 205633 - RNA, 19 nt, Artificial Sequence
  Description of Artificial Sequence: Synthetic oligonucleotide
uuuaggugacaaugauuua

SEQ ID NO: 205634 - RNA, 19 nt, Artificial Sequence
  Description of Artificial Sequence: Synthetic oligonucleotide
aaacuggaucuaugguaau

SEQ ID NO: 205635 - RNA, 19 nt, Artificial Sequence
  Description of Artificial Sequence: Synthetic oligonucleotide
uguggaaguccaucccuuc

SEQ ID NO: 205636 - RNA, 19 nt, Artificial Sequence
  Description of Artificial Sequence: Synthetic oligonucleotide
cuauggcuaagccgaaguc

SEQ ID NO: 205637 - RNA, 19 nt, Artificial Sequence
  Description of Artificial Sequence: Synthetic oligonucleotide
aacuggaucuaugguaaua

SEQ ID NO: 205638 - RNA, 19 nt, Artificial Sequence
  Description of Artificial Sequence: Synthetic oligonucleotide
caauucuacuacuauuugu

SEQ ID NO: 205639 - RNA, 19 nt, Artificial Sequence
  Description of Artificial Sequence: Synthetic oligonucleotide
gacuuacccuuccgggugc

SEQ ID NO: 205640 - RNA, 19 nt, Artificial Sequence
  Description of Artificial Sequence: Synthetic oligonucleotide
cauaugcauuacauguaga

SEQ ID NO: 205641 - RNA, 19 nt, Artificial Sequence
  Description of Artificial Sequence: Synthetic oligonucleotide
auuuuacuagcuagugaga

SEQ ID NO: 205642 - RNA, 19 nt, Artificial Sequence
  Description of Artificial Sequence: Synthetic oligonucleotide
ugaccucccucuauaguuu

SEQ ID NO: 205643 - RNA, 19 nt, Artificial Sequence
  Description of Artificial Sequence: Synthetic oligonucleotide
caucuuagugcagaagaca

SEQ ID NO: 205644 - RNA, 19 nt, Artificial Sequence
  Description of Artificial Sequence: Synthetic oligonucleotide
ggaacaucccucauuuuac

SEQ ID NO: 205645 - RNA, 19 nt, Artificial Sequence
  Description of Artificial Sequence: Synthetic oligonucleotide
ggacuuacccuuccgggug

SEQ ID NO: 205646 - RNA, 19 nt, Artificial Sequence
  Description of Artificial Sequence: Synthetic oligonucleotide
acacacgagucucuuccga

SEQ ID NO: 205647 - RNA, 19 nt, Artificial Sequence
  Description of Artificial Sequence: Synthetic oligonucleotide
ugucggugaccccgaacga

SEQ ID NO: 205648 - RNA, 19 nt, Artificial Sequence
  Description of Artificial Sequence: Synthetic oligonucleotide
uugucugaccucccucuau

SEQ ID NO: 205649 - RNA, 19 nt, Artificial Sequence
  Description of Artificial Sequence: Synthetic oligonucleotide
aguagagcguugacagauc

SEQ ID NO: 205650 - RNA, 19 nt, Artificial Sequence
  Description of Artificial Sequence: Synthetic oligonucleotide
agaucucauuggcagguua

SEQ ID NO: 205651 - RNA, 19 nt, Artificial Sequence
  Description of Artificial Sequence: Synthetic oligonucleotide
uggcuaagccgaagucugc

SEQ ID NO: 205652 - RNA, 19 nt, Artificial Sequence
  Description of Artificial Sequence: Synthetic oligonucleotide
uaacacggcucaauacguu

SEQ ID NO: 205653 - RNA, 19 nt, Artificial Sequence
  Description of Artificial Sequence: Synthetic oligonucleotide
aggggagaggguguuuuag

SEQ ID NO: 205654 - RNA, 19 nt, Artificial Sequence
  Description of Artificial Sequence: Synthetic oligonucleotide
guaugccacguagauuugc

SEQ ID NO: 205655 - RNA, 19 nt, Artificial Sequence
  Description of Artificial Sequence: Synthetic oligonucleotide
gagccgaauguaugcuaug

SEQ ID NO: 205656 - RNA, 19 nt, Artificial Sequence
  Description of Artificial Sequence: Synthetic oligonucleotide
gguaauacuucaacaccac

SEQ ID NO: 205657 - RNA, 19 nt, Artificial Sequence
  Description of Artificial Sequence: Synthetic oligonucleotide
uacuagcuagugagagcga

SEQ ID NO: 205658 - RNA, 19 nt, Artificial Sequence
  Description of Artificial Sequence: Synthetic oligonucleotide
ggcguuaacagagaaaccu

SEQ ID NO: 205659 - RNA, 19 nt, Artificial Sequence
  Description of Artificial Sequence: Synthetic oligonucleotide
cacggcucaauacguuuac

SEQ ID NO: 205660 - RNA, 19 nt, Artificial Sequence
  Description of Artificial Sequence: Synthetic oligonucleotide
ggcagguuaacacggcuca

SEQ ID NO: 205661 - RNA, 19 nt, Artificial Sequence
  Description of Artificial Sequence: Synthetic oligonucleotide
cagccuaugcugaucuuca

SEQ ID NO: 205662 - RNA, 19 nt, Artificial Sequence
  Description of Artificial Sequence: Synthetic oligonucleotide
caaucagucguuuaccauu

SEQ ID NO: 205663 - RNA, 19 nt, Artificial Sequence
  Description of Artificial Sequence: Synthetic oligonucleotide
ggaaauucguaagcuccag

SEQ ID NO: 205664 - RNA, 19 nt, Artificial Sequence
  Description of Artificial Sequence: Synthetic oligonucleotide
uggguguuucagagccuca

SEQ ID NO: 205665 - RNA, 19 nt, Artificial Sequence
  Description of Artificial Sequence: Synthetic oligonucleotide
cauucacuagcaacaauau

SEQ ID NO: 205666 - RNA, 19 nt, Artificial Sequence
  Description of Artificial Sequence: Synthetic oligonucleotide
ccaggacuuacccuuccgg

SEQ ID NO: 205667 - RNA, 19 nt, Artificial Sequence
  Description of Artificial Sequence: Synthetic oligonucleotide
gauuagcaaucaauaccaa

SEQ ID NO: 205668 - RNA, 19 nt, Artificial Sequence
  Description of Artificial Sequence: Synthetic oligonucleotide
agcagucuacagucuccug

SEQ ID NO: 205669 - RNA, 19 nt, Artificial Sequence
  Description of Artificial Sequence: Synthetic oligonucleotide
caauuuccgucuagcauua

SEQ ID NO: 205670 - RNA, 19 nt, Artificial Sequence
  Description of Artificial Sequence: Synthetic oligonucleotide
ugcuggucgccuugaacuu

SEQ ID NO: 205671 - RNA, 19 nt, Artificial Sequence
  Description of Artificial Sequence: Synthetic oligonucleotide
cuccuagcaggaagaugac

SEQ ID NO: 205672 - RNA, 19 nt, Artificial Sequence
  Description of Artificial Sequence: Synthetic oligonucleotide
caauacguuuacuguauau

SEQ ID NO: 205673 - RNA, 19 nt, Artificial Sequence
  Description of Artificial Sequence: Synthetic oligonucleotide
cauuuaggugacaaugauu

SEQ ID NO: 205674 - RNA, 19 nt, Artificial Sequence
  Description of Artificial Sequence: Synthetic oligonucleotide
augcgucacaugauaagau

SEQ ID NO: 205675 - RNA, 19 nt, Artificial Sequence
  Description of Artificial Sequence: Synthetic oligonucleotide
ggguguuucagagccucag

SEQ ID NO: 205676 - RNA, 19 nt, Artificial Sequence
  Description of Artificial Sequence: Synthetic oligonucleotide
gcaguaaaggcccucucua

SEQ ID NO: 205677 - RNA, 19 nt, Artificial Sequence
  Description of Artificial Sequence: Synthetic oligonucleotide
ccgaauguaugcuaugcaa

SEQ ID NO: 205678 - RNA, 19 nt, Artificial Sequence
  Description of Artificial Sequence: Synthetic oligonucleotide
caaguaauggaagcccucu

SEQ ID NO: 205679 - RNA, 19 nt, Artificial Sequence
  Description of Artificial Sequence: Synthetic oligonucleotide
cucccucuauaguuugcca

SEQ ID NO: 205680 - RNA, 19 nt, Artificial Sequence
  Description of Artificial Sequence: Synthetic oligonucleotide
augccacguagauuugcuu

SEQ ID NO: 205681 - RNA, 19 nt, Artificial Sequence
  Description of Artificial Sequence: Synthetic oligonucleotide
guaugcuaugcaagcugca

SEQ ID NO: 205682 - RNA, 19 nt, Artificial Sequence
  Description of Artificial Sequence: Synthetic oligonucleotide
gugagccgaauguaugcua

SEQ ID NO: 205683 - RNA, 19 nt, Artificial Sequence
  Description of Artificial Sequence: Synthetic oligonucleotide
agcuaugguuggaguaaug

SEQ ID NO: 205684 - RNA, 19 nt, Artificial Sequence
  Description of Artificial Sequence: Synthetic oligonucleotide
gccgaauguaugcuaugca

SEQ ID NO: 205685 - RNA, 19 nt, Artificial Sequence
  Description of Artificial Sequence: Synthetic oligonucleotide
caguagagcguugacagau

SEQ ID NO: 205686 - RNA, 19 nt, Artificial Sequence
  Description of Artificial Sequence: Synthetic oligonucleotide
agccuaugcugaucuucau

SEQ ID NO: 205687 - RNA, 19 nt, Artificial Sequence
  Description of Artificial Sequence: Synthetic oligonucleotide
ccucccucuauaguuugcc

SEQ ID NO: 205688 - RNA, 19 nt, Artificial Sequence
  Description of Artificial Sequence: Synthetic oligonucleotide
cuugauggguacugucggu

SEQ ID NO: 205689 - RNA, 19 nt, Artificial Sequence
  Description of Artificial Sequence: Synthetic oligonucleotide
acacggcucaauacguuua

SEQ ID NO: 205690 - RNA, 19 nt, Artificial Sequence
  Description of Artificial Sequence: Synthetic oligonucleotide
caccacaugcuaaguuaaa

SEQ ID NO: 205691 - RNA, 19 nt, Artificial Sequence
  Description of Artificial Sequence: Synthetic oligonucleotide
uacugucggugaccccgaa

SEQ ID NO: 205692 - RNA, 19 nt, Artificial Sequence
  Description of Artificial Sequence: Synthetic oligonucleotide
gaccccgaacgaugaaagu

SEQ ID NO: 205693 - RNA, 19 nt, Artificial Sequence
  Description of Artificial Sequence: Synthetic oligonucleotide
ccgaacgaugaaagugaac

SEQ ID NO: 205694 - RNA, 19 nt, Artificial Sequence
  Description of Artificial Sequence: Synthetic oligonucleotide
gcgucacauaugcauuaca

SEQ ID NO: 205695 - RNA, 19 nt, Artificial Sequence
  Description of Artificial Sequence: Synthetic oligonucleotide
cuugucugaccucccucua

SEQ ID NO: 205696 - RNA, 19 nt, Artificial Sequence
  Description of Artificial Sequence: Synthetic oligonucleotide
gaggacguccccaggacuu

SEQ ID NO: 205697 - RNA, 19 nt, Artificial Sequence
  Description of Artificial Sequence: Synthetic oligonucleotide
cguuuaccauuauggcaag

SEQ ID NO: 205698 - RNA, 19 nt, Artificial Sequence
  Description of Artificial Sequence: Synthetic oligonucleotide
ggaucuuuacgcaggacuu

SEQ ID NO: 205699 - RNA, 19 nt, Artificial Sequence
  Description of Artificial Sequence: Synthetic oligonucleotide
ggguucaggaugauagugu

SEQ ID NO: 205700 - RNA, 19 nt, Artificial Sequence
  Description of Artificial Sequence: Synthetic oligonucleotide
gaauacaggguggcuugau

SEQ ID NO: 205701 - RNA, 19 nt, Artificial Sequence
  Description of Artificial Sequence: Synthetic oligonucleotide
cuuccgacugcaucgucuu

SEQ ID NO: 205702 - RNA, 19 nt, Artificial Sequence
  Description of Artificial Sequence: Synthetic oligonucleotide
guacugucggugaccccga

SEQ ID NO: 205703 - RNA, 19 nt, Artificial Sequence
  Description of Artificial Sequence: Synthetic oligonucleotide
ggggagaggguguuuuagu

SEQ ID NO: 205704 - RNA, 19 nt, Artificial Sequence
  Description of Artificial Sequence: Synthetic oligonucleotide
agcccucuuccgauauacu

SEQ ID NO: 205705 - RNA, 19 nt, Artificial Sequence
  Description of Artificial Sequence: Synthetic oligonucleotide
ccucuauaguuugccaaca

SEQ ID NO: 205706 - RNA, 19 nt, Artificial Sequence
  Description of Artificial Sequence: Synthetic oligonucleotide
ggugugccggcaaaaccaa

SEQ ID NO: 205707 - RNA, 19 nt, Artificial Sequence
  Description of Artificial Sequence: Synthetic oligonucleotide
aggacguccccaggacuua

SEQ ID NO: 205708 - RNA, 19 nt, Artificial Sequence
  Description of Artificial Sequence: Synthetic oligonucleotide
ggaagcccucuuccgauau

SEQ ID NO: 205709 - RNA, 19 nt, Artificial Sequence
  Description of Artificial Sequence: Synthetic oligonucleotide
gcuggucgccuugaacuuc

SEQ ID NO: 205710 - RNA, 19 nt, Artificial Sequence
  Description of Artificial Sequence: Synthetic oligonucleotide
gucggugaccccgaacgau

SEQ ID NO: 205711 - RNA, 19 nt, Artificial Sequence
  Description of Artificial Sequence: Synthetic oligonucleotide
ggguacugucggugacccc

SEQ ID NO: 205712 - RNA, 19 nt, Artificial Sequence
  Description of Artificial Sequence: Synthetic oligonucleotide
ccacguagauuugcuucac

SEQ ID NO: 205713 - RNA, 19 nt, Artificial Sequence
  Description of Artificial Sequence: Synthetic oligonucleotide
ggacguccccaggacuuac

SEQ ID NO: 205714 - RNA, 19 nt, Artificial Sequence
  Description of Artificial Sequence: Synthetic oligonucleotide
cuaugccauuuaggugaca

SEQ ID NO: 205715 - RNA, 19 nt, Artificial Sequence
  Description of Artificial Sequence: Synthetic oligonucleotide
cccgaacgaugaaagugaa

SEQ ID NO: 205716 - RNA, 19 nt, Artificial Sequence
  Description of Artificial Sequence: Synthetic oligonucleotide
ccugugaacuaugccauuu

SEQ ID NO: 205717 - RNA, 19 nt, Artificial Sequence
  Description of Artificial Sequence: Synthetic oligonucleotide
ggggaacaucccucauuuu

SEQ ID NO: 205718 - RNA, 19 nt, Artificial Sequence
  Description of Artificial Sequence: Synthetic oligonucleotide
aaguuauuaaucuugcggg

SEQ ID NO: 205719 - RNA, 19 nt, Artificial Sequence
  Description of Artificial Sequence: Synthetic oligonucleotide
uuuuacucaacccagaaga

SEQ ID NO: 205720 - RNA, 19 nt, Artificial Sequence
  Description of Artificial Sequence: Synthetic oligonucleotide
aaacucguaagucagaagu

SEQ ID NO: 205721 - RNA, 19 nt, Artificial Sequence
  Description of Artificial Sequence: Synthetic oligonucleotide
aguagugguauucuggacc

SEQ ID NO: 205722 - RNA, 19 nt, Artificial Sequence
  Description of Artificial Sequence: Synthetic oligonucleotide
ucugauauuuuacucaacc

SEQ ID NO: 205723 - RNA, 19 nt, Artificial Sequence
  Description of Artificial Sequence: Synthetic oligonucleotide
ugauauuuuacucaaccca

SEQ ID NO: 205724 - RNA, 19 nt, Artificial Sequence
  Description of Artificial Sequence: Synthetic oligonucleotide
acuauugcaaaugaugagc

SEQ ID NO: 205725 - RNA, 19 nt, Artificial Sequence
  Description of Artificial Sequence: Synthetic oligonucleotide
uuuguguagucuuuaagca

SEQ ID NO: 205726 - RNA, 19 nt, Artificial Sequence
  Description of Artificial Sequence: Synthetic oligonucleotide
ucagauuaggugagggucg

SEQ ID NO: 205727 - RNA, 19 nt, Artificial Sequence
  Description of Artificial Sequence: Synthetic oligonucleotide
uuauuaaucuugcgggucc

SEQ ID NO: 205728 - RNA, 19 nt, Artificial Sequence
  Description of Artificial Sequence: Synthetic oligonucleotide
aacuauugcaaaugaugag

SEQ ID NO: 205729 - RNA, 19 nt, Artificial Sequence
  Description of Artificial Sequence: Synthetic oligonucleotide
uacauuagccauuuuggcc

SEQ ID NO: 205730 - RNA, 19 nt, Artificial Sequence
  Description of Artificial Sequence: Synthetic oligonucleotide
aaagcaggcgcguucaaug

SEQ ID NO: 205731 - RNA, 19 nt, Artificial Sequence
  Description of Artificial Sequence: Synthetic oligonucleotide
aagucagaaguuuucucag

SEQ ID NO: 205732 - RNA, 19 nt, Artificial Sequence
  Description of Artificial Sequence: Synthetic oligonucleotide
acauuagccauuuuggccu

SEQ ID NO: 205733 - RNA, 19 nt, Artificial Sequence
  Description of Artificial Sequence: Synthetic oligonucleotide
aucauuuggacccuuugag

SEQ ID NO: 205734 - RNA, 19 nt, Artificial Sequence
  Description of Artificial Sequence: Synthetic oligonucleotide
cauuccaagccuuaguagc

SEQ ID NO: 205735 - RNA, 19 nt, Artificial Sequence
  Description of Artificial Sequence: Synthetic oligonucleotide
aagcaucagguacuugacc

SEQ ID NO: 205736 - RNA, 19 nt, Artificial Sequence
  Description of Artificial Sequence: Synthetic oligonucleotide
cuugcuagucucaugguag

SEQ ID NO: 205737 - RNA, 19 nt, Artificial Sequence
  Description of Artificial Sequence: Synthetic oligonucleotide
uguugaaaccccaguauca

SEQ ID NO: 205738 - RNA, 19 nt, Artificial Sequence
  Description of Artificial Sequence: Synthetic oligonucleotide
uuaguagugguauucugga

SEQ ID NO: 205739 - RNA, 19 nt, Artificial Sequence
  Description of Artificial Sequence: Synthetic oligonucleotide
uaacauucugcccacuggc

SEQ ID NO: 205740 - RNA, 19 nt, Artificial Sequence
  Description of Artificial Sequence: Synthetic oligonucleotide
ucuccgauucccaugcggg

SEQ ID NO: 205741 - RNA, 19 nt, Artificial Sequence
  Description of Artificial Sequence: Synthetic oligonucleotide
uuuggacccuuugagaagg

SEQ ID NO: 205742 - RNA, 19 nt, Artificial Sequence
  Description of Artificial Sequence: Synthetic oligonucleotide
gaugucggaccccaggacg

SEQ ID NO: 205743 - RNA, 19 nt, Artificial Sequence
  Description of Artificial Sequence: Synthetic oligonucleotide
agaggugccauuaugugac

SEQ ID NO: 205744 - RNA, 19 nt, Artificial Sequence
  Description of Artificial Sequence: Synthetic oligonucleotide
ugagagaaaucauuuggac

SEQ ID NO: 205745 - RNA, 19 nt, Artificial Sequence
  Description of Artificial Sequence: Synthetic oligonucleotide
aguccgagacuccacauuc

SEQ ID NO: 205746 - RNA, 19 nt, Artificial Sequence
  Description of Artificial Sequence: Synthetic oligonucleotide
gaauuauaguccgagacuc

SEQ ID NO: 205747 - RNA, 19 nt, Artificial Sequence
  Description of Artificial Sequence: Synthetic oligonucleotide
auuuuacucaacccagaag

SEQ ID NO: 205748 - RNA, 19 nt, Artificial Sequence
  Description of Artificial Sequence: Synthetic oligonucleotide
ucuugcaugccacucucag

SEQ ID NO: 205749 - RNA, 19 nt, Artificial Sequence
  Description of Artificial Sequence: Synthetic oligonucleotide
uuauaggccgccuuagacu

SEQ ID NO: 205750 - RNA, 19 nt, Artificial Sequence
  Description of Artificial Sequence: Synthetic oligonucleotide
ccuacauuagccauuuugg

SEQ ID NO: 205751 - RNA, 19 nt, Artificial Sequence
  Description of Artificial Sequence: Synthetic oligonucleotide
uuagaggugccauuaugug

SEQ ID NO: 205752 - RNA, 19 nt, Artificial Sequence
  Description of Artificial Sequence: Synthetic oligonucleotide
gaccuuaaaggcuauuuca

SEQ ID NO: 205753 - RNA, 19 nt, Artificial Sequence
  Description of Artificial Sequence: Synthetic oligonucleotide
cuugccccgaauuauaguc

SEQ ID NO: 205754 - RNA, 19 nt, Artificial Sequence
  Description of Artificial Sequence: Synthetic oligonucleotide
cuaacauucugcccacugg

SEQ ID NO: 205755 - RNA, 19 nt, Artificial Sequence
  Description of Artificial Sequence: Synthetic oligonucleotide
ucaguguauucucggauga

SEQ ID NO: 205756 - RNA, 19 nt, Artificial Sequence
  Description of Artificial Sequence: Synthetic oligonucleotide
uauucucggaugauauccc

SEQ ID NO: 205757 - RNA, 19 nt, Artificial Sequence
  Description of Artificial Sequence: Synthetic oligonucleotide
aaacuugacaacacacaag

SEQ ID NO: 205758 - RNA, 19 nt, Artificial Sequence
  Description of Artificial Sequence: Synthetic oligonucleotide
caguaugccagccagggac

SEQ ID NO: 205759 - RNA, 19 nt, Artificial Sequence
  Description of Artificial Sequence: Synthetic oligonucleotide
aucaguguauucucggaug

SEQ ID NO: 205760 - RNA, 19 nt, Artificial Sequence
  Description of Artificial Sequence: Synthetic oligonucleotide
aaacaucaguguauucucg

SEQ ID NO: 205761 - RNA, 19 nt, Artificial Sequence
  Description of Artificial Sequence: Synthetic oligonucleotide
cuuauaggccgccuuagac

SEQ ID NO: 205762 - RNA, 19 nt, Artificial Sequence
  Description of Artificial Sequence: Synthetic oligonucleotide
uacugaugagaauguacag

SEQ ID NO: 205763 - RNA, 19 nt, Artificial Sequence
  Description of Artificial Sequence: Synthetic oligonucleotide
cacaauuggaccaggccag

SEQ ID NO: 205764 - RNA, 19 nt, Artificial Sequence
  Description of Artificial Sequence: Synthetic oligonucleotide
aguuauuaaucuugcgggu

SEQ ID NO: 205765 - RNA, 19 nt, Artificial Sequence
  Description of Artificial Sequence: Synthetic oligonucleotide
ugaggcccgccuuugaucc

SEQ ID NO: 205766 - RNA, 19 nt, Artificial Sequence
  Description of Artificial Sequence: Synthetic oligonucleotide
gacaaugggguuuggccag

SEQ ID NO: 205767 - RNA, 19 nt, Artificial Sequence
  Description of Artificial Sequence: Synthetic oligonucleotide
auuggguuuggccacacaa

SEQ ID NO: 205768 - RNA, 19 nt, Artificial Sequence
  Description of Artificial Sequence: Synthetic oligonucleotide
auucugacgugcugguugg

SEQ ID NO: 205769 - RNA, 19 nt, Artificial Sequence
  Description of Artificial Sequence: Synthetic oligonucleotide
uaguagcugucuuaggcug

SEQ ID NO: 205770 - RNA, 19 nt, Artificial Sequence
  Description of Artificial Sequence: Synthetic oligonucleotide
agggguacugaugagaaug

SEQ ID NO: 205771 - RNA, 19 nt, Artificial Sequence
  Description of Artificial Sequence: Synthetic oligonucleotide
ugaacucuggggacuaaca

SEQ ID NO: 205772 - RNA, 19 nt, Artificial Sequence
  Description of Artificial Sequence: Synthetic oligonucleotide
acuaacauucugcccacug

SEQ ID NO: 205773 - RNA, 19 nt, Artificial Sequence
  Description of Artificial Sequence: Synthetic oligonucleotide
gaucugauauuuuacucaa

SEQ ID NO: 205774 - RNA, 19 nt, Artificial Sequence
  Description of Artificial Sequence: Synthetic oligonucleotide
cuggggacuaacauucugc

SEQ ID NO: 205775 - RNA, 19 nt, Artificial Sequence
  Description of Artificial Sequence: Synthetic oligonucleotide
caugcaacuggguucugcc

SEQ ID NO: 205776 - RNA, 19 nt, Artificial Sequence
  Description of Artificial Sequence: Synthetic oligonucleotide
gacguagucccaucuugcg

SEQ ID NO: 205777 - RNA, 19 nt, Artificial Sequence
  Description of Artificial Sequence: Synthetic oligonucleotide
uagaggugccauuauguga

SEQ ID NO: 205778 - RNA, 19 nt, Artificial Sequence
  Description of Artificial Sequence: Synthetic oligonucleotide
ugucuuaggccuagcagcu

SEQ ID NO: 205779 - RNA, 19 nt, Artificial Sequence
  Description of Artificial Sequence: Synthetic oligonucleotide
uugaccaacuuauuugcuc

SEQ ID NO: 205780 - RNA, 19 nt, Artificial Sequence
  Description of Artificial Sequence: Synthetic oligonucleotide
cuuagacugguucuuggac

SEQ ID NO: 205781 - RNA, 19 nt, Artificial Sequence
  Description of Artificial Sequence: Synthetic oligonucleotide
ggggcaaugaccaaucagg

SEQ ID NO: 205782 - RNA, 19 nt, Artificial Sequence
  Description of Artificial Sequence: Synthetic oligonucleotide
aaguuggcaguagcgguac

SEQ ID NO: 205783 - RNA, 19 nt, Artificial Sequence
  Description of Artificial Sequence: Synthetic oligonucleotide
ggagcgggcauucuggugg

SEQ ID NO: 205784 - RNA, 19 nt, Artificial Sequence
  Description of Artificial Sequence: Synthetic oligonucleotide
ucgggagcgggcauucugg

SEQ ID NO: 205785 - RNA, 19 nt, Artificial Sequence
  Description of Artificial Sequence: Synthetic oligonucleotide
ugaggaaaucgggagcggg

SEQ ID NO: 205786 - RNA, 19 nt, Artificial Sequence
  Description of Artificial Sequence: Synthetic oligonucleotide
auuaggugagggucguaag

SEQ ID NO: 205787 - RNA, 19 nt, Artificial Sequence
  Description of Artificial Sequence: Synthetic oligonucleotide
cuuuagaggugccauuaug

SEQ ID NO: 205788 - RNA, 19 nt, Artificial Sequence
  Description of Artificial Sequence: Synthetic oligonucleotide
aucuccgauucccaugcgg

SEQ ID NO: 205789 - RNA, 19 nt, Artificial Sequence
  Description of Artificial Sequence: Synthetic oligonucleotide
cucagauuaggugaggguc

SEQ ID NO: 205790 - RNA, 19 nt, Artificial Sequence
  Description of Artificial Sequence: Synthetic oligonucleotide
ugcuguugggcacucgucu

SEQ ID NO: 205791 - RNA, 19 nt, Artificial Sequence
  Description of Artificial Sequence: Synthetic oligonucleotide
guagcgguaccacuggggc

SEQ ID NO: 205792 - RNA, 19 nt, Artificial Sequence
  Description of Artificial Sequence: Synthetic oligonucleotide
ugaguggucaccggaacug

SEQ ID NO: 205793 - RNA, 19 nt, Artificial Sequence
  Description of Artificial Sequence: Synthetic oligonucleotide
ugcaacuggguucugccaa

SEQ ID NO: 205794 - RNA, 19 nt, Artificial Sequence
  Description of Artificial Sequence: Synthetic oligonucleotide
cagaucacuggguuaggcc

SEQ ID NO: 205795 - RNA, 19 nt, Artificial Sequence
  Description of Artificial Sequence: Synthetic oligonucleotide
accuuaaaggcuauuucag

SEQ ID NO: 205796 - RNA, 19 nt, Artificial Sequence
  Description of Artificial Sequence: Synthetic oligonucleotide
uuguguagucuuuaagcau

SEQ ID NO: 205797 - RNA, 19 nt, Artificial Sequence
  Description of Artificial Sequence: Synthetic oligonucleotide
ucguaagucagaaguuuuc

SEQ ID NO: 205798 - RNA, 19 nt, Artificial Sequence
  Description of Artificial Sequence: Synthetic oligonucleotide
aggacguagucccaucuug

SEQ ID NO: 205799 - RNA, 19 nt, Artificial Sequence
  Description of Artificial Sequence: Synthetic oligonucleotide
ucuagauagcuguguuuug

SEQ ID NO: 205800 - RNA, 19 nt, Artificial Sequence
  Description of Artificial Sequence: Synthetic oligonucleotide
ggaucugauauuuuacuca

SEQ ID NO: 205801 - RNA, 19 nt, Artificial Sequence
  Description of Artificial Sequence: Synthetic oligonucleotide
aaaucgggagcgggcauuc

SEQ ID NO: 205802 - RNA, 19 nt, Artificial Sequence
  Description of Artificial Sequence: Synthetic oligonucleotide
ggcauuacgugcgugagag

SEQ ID NO: 205803 - RNA, 19 nt, Artificial Sequence
  Description of Artificial Sequence: Synthetic oligonucleotide
ucucagauuaggugagggu

SEQ ID NO: 205804 - RNA, 19 nt, Artificial Sequence
  Description of Artificial Sequence: Synthetic oligonucleotide
agcaggaucugauauuuua

SEQ ID NO: 205805 - RNA, 19 nt, Artificial Sequence
  Description of Artificial Sequence: Synthetic oligonucleotide
aucuugcggguccucuugc

SEQ ID NO: 205806 - RNA, 19 nt, Artificial Sequence
  Description of Artificial Sequence: Synthetic oligonucleotide
aacuagguggggucugcca

SEQ ID NO: 205807 - RNA, 19 nt, Artificial Sequence
  Description of Artificial Sequence: Synthetic oligonucleotide
ugacuuauaggccgccuua

SEQ ID NO: 205808 - RNA, 19 nt, Artificial Sequence
  Description of Artificial Sequence: Synthetic oligonucleotide
guuauuaaucuugcggguc

SEQ ID NO: 205809 - RNA, 19 nt, Artificial Sequence
  Description of Artificial Sequence: Synthetic oligonucleotide
uguauucucggaugauauc

SEQ ID NO: 205810 - RNA, 19 nt, Artificial Sequence
  Description of Artificial Sequence: Synthetic oligonucleotide
acgugcgugagagaaauca

SEQ ID NO: 205811 - RNA, 19 nt, Artificial Sequence
  Description of Artificial Sequence: Synthetic oligonucleotide
cugauuugccugugguugc

SEQ ID NO: 205812 - RNA, 19 nt, Artificial Sequence
  Description of Artificial Sequence: Synthetic oligonucleotide
uuacgugcgugagagaaau

SEQ ID NO: 205813 - RNA, 19 nt, Artificial Sequence
  Description of Artificial Sequence: Synthetic oligonucleotide
guggaaucggccaaucggc

SEQ ID NO: 205814 - RNA, 19 nt, Artificial Sequence
  Description of Artificial Sequence: Synthetic oligonucleotide
agggucguaaguucugcca

SEQ ID NO: 205815 - RNA, 19 nt, Artificial Sequence
  Description of Artificial Sequence: Synthetic oligonucleotide
aaaccccaguaucagccau

SEQ ID NO: 205816 - RNA, 19 nt, Artificial Sequence
  Description of Artificial Sequence: Synthetic oligonucleotide
ccgaauuauaguccgagac

SEQ ID NO: 205817 - RNA, 19 nt, Artificial Sequence
  Description of Artificial Sequence: Synthetic oligonucleotide
ugucuuaggcugguuguug

SEQ ID NO: 205818 - RNA, 19 nt, Artificial Sequence
  Description of Artificial Sequence: Synthetic oligonucleotide
cuuggcauuacgugcguga

SEQ ID NO: 205819 - RNA, 19 nt, Artificial Sequence
  Description of Artificial Sequence: Synthetic oligonucleotide
gauuaggugagggucguaa

SEQ ID NO: 205820 - RNA, 19 nt, Artificial Sequence
  Description of Artificial Sequence: Synthetic oligonucleotide
uugcggguccucuugcccc

SEQ ID NO: 205821 - RNA, 19 nt, Artificial Sequence
  Description of Artificial Sequence: Synthetic oligonucleotide
gguaaaggggauucuggac

SEQ ID NO: 205822 - RNA, 19 nt, Artificial Sequence
  Description of Artificial Sequence: Synthetic oligonucleotide
gaggaaaucgggagcgggc

SEQ ID NO: 205823 - RNA, 19 nt, Artificial Sequence
  Description of Artificial Sequence: Synthetic oligonucleotide
uaguagugguauucuggac

SEQ ID NO: 205824 - RNA, 19 nt, Artificial Sequence
  Description of Artificial Sequence: Synthetic oligonucleotide
cauuacgugcgugagagaa

SEQ ID NO: 205825 - RNA, 19 nt, Artificial Sequence
  Description of Artificial Sequence: Synthetic oligonucleotide
ucuugccccgaauuauagu

SEQ ID NO: 205826 - RNA, 19 nt, Artificial Sequence
  Description of Artificial Sequence: Synthetic oligonucleotide
cugaagcuagugaggcccg

SEQ ID NO: 205827 - RNA, 19 nt, Artificial Sequence
  Description of Artificial Sequence: Synthetic oligonucleotide
uggaccuuaaaggcuauuu

SEQ ID NO: 205828 - RNA, 19 nt, Artificial Sequence
  Description of Artificial Sequence: Synthetic oligonucleotide
cuugcggguccucuugccc

SEQ ID NO: 205829 - RNA, 19 nt, Artificial Sequence
  Description of Artificial Sequence: Synthetic oligonucleotide
uauuaaucuugcggguccu

SEQ ID NO: 205830 - RNA, 19 nt, Artificial Sequence
  Description of Artificial Sequence: Synthetic oligonucleotide
cccuacauuagccauuuug

SEQ ID NO: 205831 - RNA, 19 nt, Artificial Sequence
  Description of Artificial Sequence: Synthetic oligonucleotide
auauuuuacucaacccaga

SEQ ID NO: 205832 - RNA, 19 nt, Artificial Sequence
  Description of Artificial Sequence: Synthetic oligonucleotide
ucucagucaacaggaugug

SEQ ID NO: 205833 - RNA, 19 nt, Artificial Sequence
  Description of Artificial Sequence: Synthetic oligonucleotide
ugccuuaguagugguauuc

SEQ ID NO: 205834 - RNA, 19 nt, Artificial Sequence
  Description of Artificial Sequence: Synthetic oligonucleotide
ggggauucugacgugcugg

SEQ ID NO: 205835 - RNA, 19 nt, Artificial Sequence
  Description of Artificial Sequence: Synthetic oligonucleotide
auuaaucuugcggguccuc

SEQ ID NO: 205836 - RNA, 19 nt, Artificial Sequence
  Description of Artificial Sequence: Synthetic oligonucleotide
guuaggccagaucacugga

SEQ ID NO: 205837 - RNA, 19 nt, Artificial Sequence
  Description of Artificial Sequence: Synthetic oligonucleotide
ugacgugcugguugggccu

SEQ ID NO: 205838 - RNA, 19 nt, Artificial Sequence
  Description of Artificial Sequence: Synthetic oligonucleotide
gggucguaaguucugccag

SEQ ID NO: 205839 - RNA, 19 nt, Artificial Sequence
  Description of Artificial Sequence: Synthetic oligonucleotide
ucuugcggguccucuugcc

SEQ ID NO: 205840 - RNA, 19 nt, Artificial Sequence
  Description of Artificial Sequence: Synthetic oligonucleotide
gaguggucaccggaacugg

SEQ ID NO: 205841 - RNA, 19 nt, Artificial Sequence
  Description of Artificial Sequence: Synthetic oligonucleotide
cuucacgacucagaggauc

SEQ ID NO: 205842 - RNA, 19 nt, Artificial Sequence
  Description of Artificial Sequence: Synthetic oligonucleotide
aguguauucucggaugaua

SEQ ID NO: 205843 - RNA, 19 nt, Artificial Sequence
  Description of Artificial Sequence: Synthetic oligonucleotide
augugacuuauaggccgcc

SEQ ID NO: 205844 - RNA, 19 nt, Artificial Sequence
  Description of Artificial Sequence: Synthetic oligonucleotide
uggcauuacgugcgugaga

SEQ ID NO: 205845 - RNA, 19 nt, Artificial Sequence
  Description of Artificial Sequence: Synthetic oligonucleotide
ucggccaaucggcagggau

SEQ ID NO: 205846 - RNA, 19 nt, Artificial Sequence
  Description of Artificial Sequence: Synthetic oligonucleotide
gaagcuagugaggcccgcc

SEQ ID NO: 205847 - RNA, 19 nt, Artificial Sequence
  Description of Artificial Sequence: Synthetic oligonucleotide
auaguccgagacuccacau

SEQ ID NO: 205848 - RNA, 19 nt, Artificial Sequence
  Description of Artificial Sequence: Synthetic oligonucleotide
ugcaccgccguccgguuuc

SEQ ID NO: 205849 - RNA, 19 nt, Artificial Sequence
  Description of Artificial Sequence: Synthetic oligonucleotide
uagcgguaccacuggggcc

SEQ ID NO: 205850 - RNA, 19 nt, Artificial Sequence
  Description of Artificial Sequence: Synthetic oligonucleotide
accgaaguuggcggcaaag

SEQ ID NO: 205851 - RNA, 19 nt, Artificial Sequence
  Description of Artificial Sequence: Synthetic oligonucleotide
ggguggaucucagauuagg

SEQ ID NO: 205852 - RNA, 19 nt, Artificial Sequence
  Description of Artificial Sequence: Synthetic oligonucleotide
uaguccgagacuccacauu

SEQ ID NO: 205853 - RNA, 19 nt, Artificial Sequence
  Description of Artificial Sequence: Synthetic oligonucleotide
ccuuuguguagucuuuaag

SEQ ID NO: 205854 - RNA, 19 nt, Artificial Sequence
  Description of Artificial Sequence: Synthetic oligonucleotide
uugcuguugggcacucguc

SEQ ID NO: 205855 - RNA, 19 nt, Artificial Sequence
  Description of Artificial Sequence: Synthetic oligonucleotide
augcaacuggguucugcca

SEQ ID NO: 205856 - RNA, 19 nt, Artificial Sequence
  Description of Artificial Sequence: Synthetic oligonucleotide
ugauuugccugugguugcu

SEQ ID NO: 205857 - RNA, 19 nt, Artificial Sequence
  Description of Artificial Sequence: Synthetic oligonucleotide
ugcuagucucaugguagga

SEQ ID NO: 205858 - RNA, 19 nt, Artificial Sequence
  Description of Artificial Sequence: Synthetic oligonucleotide
uuagccauuuuggccuggu

SEQ ID NO: 205859 - RNA, 19 nt, Artificial Sequence
  Description of Artificial Sequence: Synthetic oligonucleotide
uuaggccuagcagcugcug

SEQ ID NO: 205860 - RNA, 19 nt, Artificial Sequence
  Description of Artificial Sequence: Synthetic oligonucleotide
agccuuaguagcugucuua

SEQ ID NO: 205861 - RNA, 19 nt, Artificial Sequence
  Description of Artificial Sequence: Synthetic oligonucleotide
guuggcaguagcgguacca

SEQ ID NO: 205862 - RNA, 19 nt, Artificial Sequence
  Description of Artificial Sequence: Synthetic oligonucleotide
aguaugccagccagggacu

SEQ ID NO: 205863 - RNA, 19 nt, Artificial Sequence
  Description of Artificial Sequence: Synthetic oligonucleotide
aggcacgggcguuuggggu

SEQ ID NO: 205864 - RNA, 19 nt, Artificial Sequence
  Description of Artificial Sequence: Synthetic oligonucleotide
gcaggaucugauauuuuac

SEQ ID NO: 205865 - RNA, 19 nt, Artificial Sequence
  Description of Artificial Sequence: Synthetic oligonucleotide
uccuuggcauuacgugcgu

SEQ ID NO: 205866 - RNA, 19 nt, Artificial Sequence
  Description of Artificial Sequence: Synthetic oligonucleotide
uagugaggcccgccuuuga

SEQ ID NO: 205867 - RNA, 19 nt, Artificial Sequence
  Description of Artificial Sequence: Synthetic oligonucleotide
ucuucacgacucagaggau

SEQ ID NO: 205868 - RNA, 19 nt, Artificial Sequence
  Description of Artificial Sequence: Synthetic oligonucleotide
aggcgcguucaaugauuuc

SEQ ID NO: 205869 - RNA, 19 nt, Artificial Sequence
  Description of Artificial Sequence: Synthetic oligonucleotide
gucguaaguucugccaguc

SEQ ID NO: 205870 - RNA, 19 nt, Artificial Sequence
  Description of Artificial Sequence: Synthetic oligonucleotide
accccaguaucagccaucu

SEQ ID NO: 205871 - RNA, 19 nt, Artificial Sequence
  Description of Artificial Sequence: Synthetic oligonucleotide
ggacguagucccaucuugc

SEQ ID NO: 205872 - RNA, 19 nt, Artificial Sequence
  Description of Artificial Sequence: Synthetic oligonucleotide
cuagugaggcccgccuuug

SEQ ID NO: 205873 - RNA, 19 nt, Artificial Sequence
  Description of Artificial Sequence: Synthetic oligonucleotide
gucccaucuugcguagugc

SEQ ID NO: 205874 - RNA, 19 nt, Artificial Sequence
  Description of Artificial Sequence: Synthetic oligonucleotide
guagugccucccaaaggac

SEQ ID NO: 205875 - RNA, 19 nt, Artificial Sequence
  Description of Artificial Sequence: Synthetic oligonucleotide
gcggguucgugcuucagca

SEQ ID NO: 205876 - RNA, 19 nt, Artificial Sequence
  Description of Artificial Sequence: Synthetic oligonucleotide
caacuggguucugccaagc

SEQ ID NO: 205877 - RNA, 19 nt, Artificial Sequence
  Description of Artificial Sequence: Synthetic oligonucleotide
ggcacgggcguuuggggug

SEQ ID NO: 205878 - RNA, 19 nt, Artificial Sequence
  Description of Artificial Sequence: Synthetic oligonucleotide
auuacgugcgugagagaaa

SEQ ID NO: 205879 - RNA, 19 nt, Artificial Sequence
  Description of Artificial Sequence: Synthetic oligonucleotide
caucuccgauucccaugcg

SEQ ID NO: 205880 - RNA, 19 nt, Artificial Sequence
  Description of Artificial Sequence: Synthetic oligonucleotide
acaauuggaccaggccaga

SEQ ID NO: 205881 - RNA, 19 nt, Artificial Sequence
  Description of Artificial Sequence: Synthetic oligonucleotide
guaccacuggggccaauaa

SEQ ID NO: 205882 - RNA, 19 nt, Artificial Sequence
  Description of Artificial Sequence: Synthetic oligonucleotide
uacgugcgugagagaaauc

SEQ ID NO: 205883 - RNA, 19 nt, Artificial Sequence
  Description of Artificial Sequence: Synthetic oligonucleotide
ggaugucggaccccaggac

SEQ ID NO: 205884 - RNA, 19 nt, Artificial Sequence
  Description of Artificial Sequence: Synthetic oligonucleotide
ugcgccagguggguucuga

SEQ ID NO: 205885 - RNA, 19 nt, Artificial Sequence
  Description of Artificial Sequence: Synthetic oligonucleotide
ggcgcguucaaugauuucu

SEQ ID NO: 205886 - RNA, 19 nt, Artificial Sequence
  Description of Artificial Sequence: Synthetic oligonucleotide
cagucaacaggauguggcu

SEQ ID NO: 205887 - RNA, 19 nt, Artificial Sequence
  Description of Artificial Sequence: Synthetic oligonucleotide
aaucgggagcgggcauucu

SEQ ID NO: 205888 - RNA, 19 nt, Artificial Sequence
  Description of Artificial Sequence: Synthetic oligonucleotide
auaggccgccuuagacugg

SEQ ID NO: 205889 - RNA, 19 nt, Artificial Sequence
  Description of Artificial Sequence: Synthetic oligonucleotide
gcugucuuaggcugguugu

SEQ ID NO: 205890 - RNA, 19 nt, Artificial Sequence
  Description of Artificial Sequence: Synthetic oligonucleotide
ugugaacucuggggacuaa

SEQ ID NO: 205891 - RNA, 19 nt, Artificial Sequence
  Description of Artificial Sequence: Synthetic oligonucleotide
ccaaucggcagggauccag

SEQ ID NO: 205892 - RNA, 19 nt, Artificial Sequence
  Description of Artificial Sequence: Synthetic oligonucleotide
gaggcccgccuuugauccc

SEQ ID NO: 205893 - RNA, 19 nt, Artificial Sequence
  Description of Artificial Sequence: Synthetic oligonucleotide
gacccuuugagaagguauu

SEQ ID NO: 205894 - RNA, 19 nt, Artificial Sequence
  Description of Artificial Sequence: Synthetic oligonucleotide
gcuagucucaugguaggaa

SEQ ID NO: 205895 - RNA, 19 nt, Artificial Sequence
  Description of Artificial Sequence: Synthetic oligonucleotide
ugccaaucuugagggcccu

SEQ ID NO: 205896 - RNA, 19 nt, Artificial Sequence
  Description of Artificial Sequence: Synthetic oligonucleotide
caagccuuaguagcugucu

SEQ ID NO: 205897 - RNA, 19 nt, Artificial Sequence
  Description of Artificial Sequence: Synthetic oligonucleotide
cugaguggucaccggaacu

SEQ ID NO: 205898 - RNA, 19 nt, Artificial Sequence
  Description of Artificial Sequence: Synthetic oligonucleotide
ggccgccuuagacugguuc

SEQ ID NO: 205899 - RNA, 19 nt, Artificial Sequence
  Description of Artificial Sequence: Synthetic oligonucleotide
gggagcgggcauucuggug

SEQ ID NO: 205900 - RNA, 19 nt, Artificial Sequence
  Description of Artificial Sequence: Synthetic oligonucleotide
ccaucaaggucugcacaag

SEQ ID NO: 205901 - RNA, 19 nt, Artificial Sequence
  Description of Artificial Sequence: Synthetic oligonucleotide
gaaaucgggagcgggcauu

SEQ ID NO: 205902 - RNA, 19 nt, Artificial Sequence
  Description of Artificial Sequence: Synthetic oligonucleotide
caugcggguucgugcuuca

SEQ ID NO: 205903 - RNA, 19 nt, Artificial Sequence
  Description of Artificial Sequence: Synthetic oligonucleotide
gccugucuuaggccuagca

SEQ ID NO: 205904 - RNA, 19 nt, Artificial Sequence
  Description of Artificial Sequence: Synthetic oligonucleotide
ccgauucccaugcggguuc

SEQ ID NO: 205905 - RNA, 19 nt, Artificial Sequence
  Description of Artificial Sequence: Synthetic oligonucleotide
ccaacuagguggggucugc

SEQ ID NO: 205906 - RNA, 19 nt, Artificial Sequence
  Description of Artificial Sequence: Synthetic oligonucleotide
ucacuggguuaggccagau

SEQ ID NO: 205907 - RNA, 19 nt, Artificial Sequence
  Description of Artificial Sequence: Synthetic oligonucleotide
ggucguaaguucugccagu

SEQ ID NO: 205908 - RNA, 19 nt, Artificial Sequence
  Description of Artificial Sequence: Synthetic oligonucleotide
augcggguucgugcuucag

SEQ ID NO: 205909 - RNA, 19 nt, Artificial Sequence
  Description of Artificial Sequence: Synthetic oligonucleotide
cagggaccuuagugguauc

SEQ ID NO: 205910 - RNA, 19 nt, Artificial Sequence
  Description of Artificial Sequence: Synthetic oligonucleotide
gccaacuagguggggucug

SEQ ID NO: 205911 - RNA, 19 nt, Artificial Sequence
  Description of Artificial Sequence: Synthetic oligonucleotide
cggccaaucggcagggauc

SEQ ID NO: 205912 - RNA, 19 nt, Artificial Sequence
  Description of Artificial Sequence: Synthetic oligonucleotide
agauuaggugagggucgua

SEQ ID NO: 205913 - RNA, 19 nt, Artificial Sequence
  Description of Artificial Sequence: Synthetic oligonucleotide
ggaccuuagugguaucauu

SEQ ID NO: 205914 - RNA, 19 nt, Artificial Sequence
  Description of Artificial Sequence: Synthetic oligonucleotide
ggguucugccaagcuguug

SEQ ID NO: 205915 - RNA, 19 nt, Artificial Sequence
  Description of Artificial Sequence: Synthetic oligonucleotide
gguaucgggcccagaaggu

SEQ ID NO: 205916 - RNA, 19 nt, Artificial Sequence
  Description of Artificial Sequence: Synthetic oligonucleotide
caggcgcguucaaugauuu

SEQ ID NO: 205917 - RNA, 19 nt, Artificial Sequence
  Description of Artificial Sequence: Synthetic oligonucleotide
ggaggggaugucggacccc

SEQ ID NO: 205918 - RNA, 19 nt, Artificial Sequence
  Description of Artificial Sequence: Synthetic oligonucleotide
caaagcaggcgcguucaau

SEQ ID NO: 205919 - RNA, 19 nt, Artificial Sequence
  Description of Artificial Sequence: Synthetic oligonucleotide
gcauuacgugcgugagaga

SEQ ID NO: 205920 - RNA, 19 nt, Artificial Sequence
  Description of Artificial Sequence: Synthetic oligonucleotide
ccaugcggguucgugcuuc

SEQ ID NO: 205921 - RNA, 19 nt, Artificial Sequence
  Description of Artificial Sequence: Synthetic oligonucleotide
cccaggacguagucccauc

SEQ ID NO: 205922 - RNA, 19 nt, Artificial Sequence
  Description of Artificial Sequence: Synthetic oligonucleotide
gcuagugaggcccgccuuu

SEQ ID NO: 205923 - RNA, 19 nt, Artificial Sequence
  Description of Artificial Sequence: Synthetic oligonucleotide
ccuuggcauuacgugcgug

SEQ ID NO: 205924 - RNA, 19 nt, Artificial Sequence
  Description of Artificial Sequence: Synthetic oligonucleotide
ggaaaucgggagcgggcau

SEQ ID NO: 205925 - RNA, 19 nt, Artificial Sequence
  Description of Artificial Sequence: Synthetic oligonucleotide
ggcguuugggguggaucuc

SEQ ID NO: 205926 - RNA, 19 nt, Artificial Sequence
  Description of Artificial Sequence: Synthetic oligonucleotide
aucggccaaucggcaggga

SEQ ID NO: 205927 - RNA, 19 nt, Artificial Sequence
  Description of Artificial Sequence: Synthetic oligonucleotide
caggacguagucccaucuu

SEQ ID NO: 205928 - RNA, 19 nt, Artificial Sequence
  Description of Artificial Sequence: Synthetic oligonucleotide
gguagccgcggaggccugc

SEQ ID NO: 205929 - RNA, 19 nt, Artificial Sequence
  Description of Artificial Sequence: Synthetic oligonucleotide
caguguauucucggaugau

SEQ ID NO: 205930 - RNA, 19 nt, Artificial Sequence
  Description of Artificial Sequence: Synthetic oligonucleotide
cgauucccaugcggguucg

SEQ ID NO: 205931 - RNA, 19 nt, Artificial Sequence
  Description of Artificial Sequence: Synthetic oligonucleotide
cgggcguuugggguggauc

SEQ ID NO: 205932 - RNA, 19 nt, Artificial Sequence
  Description of Artificial Sequence: Synthetic oligonucleotide
acgggcguuugggguggau

SEQ ID NO: 205933 - RNA, 19 nt, Artificial Sequence
  Description of Artificial Sequence: Synthetic oligonucleotide
cagagauaccugggcuggu

SEQ ID NO: 205934 - RNA, 19 nt, Artificial Sequence
  Description of Artificial Sequence: Synthetic oligonucleotide
gccccgaauuauaguccga

SEQ ID NO: 205935 - RNA, 19 nt, Artificial Sequence
  Description of Artificial Sequence: Synthetic oligonucleotide
gugcgccagguggguucug

SEQ ID NO: 205936 - RNA, 19 nt, Artificial Sequence
  Description of Artificial Sequence: Synthetic oligonucleotide
caccgccguccgguuucug

SEQ ID NO: 205937 - RNA, 19 nt, Artificial Sequence
  Description of Artificial Sequence: Synthetic oligonucleotide
ggauucugacgugcugguu

SEQ ID NO: 205938 - RNA, 19 nt, Artificial Sequence
  Description of Artificial Sequence: Synthetic oligonucleotide
gccaaucggcagggaucca

SEQ ID NO: 205939 - RNA, 19 nt, Artificial Sequence
  Description of Artificial Sequence: Synthetic oligonucleotide
cugcaccgccguccgguuu

SEQ ID NO: 205940 - RNA, 19 nt, Artificial Sequence
  Description of Artificial Sequence: Synthetic oligonucleotide
cguccgguuucugagccau

SEQ ID NO: 205941 - RNA, 19 nt, Artificial Sequence
  Description of Artificial Sequence: Synthetic oligonucleotide
cacgggcguuuggggugga

SEQ ID NO: 205942 - RNA, 19 nt, Artificial Sequence
  Description of Artificial Sequence: Synthetic oligonucleotide
gggcgugucuuuggucguu

SEQ ID NO: 205943 - RNA, 19 nt, Artificial Sequence
  Description of Artificial Sequence: Synthetic oligonucleotide
gcggguccucuugccccga

SEQ ID NO: 205944 - RNA, 19 nt, Artificial Sequence
  Description of Artificial Sequence: Synthetic oligonucleotide
gcaccgccguccgguuucu

SEQ ID NO: 205945 - RNA, 19 nt, Artificial Sequence
  Description of Artificial Sequence: Synthetic oligonucleotide
cccaugcggguucgugcuu

SEQ ID NO: 205946 - RNA, 19 nt, Artificial Sequence
  Description of Artificial Sequence: Synthetic oligonucleotide
auaaauaucagcaagcagc

SEQ ID NO: 205947 - RNA, 19 nt, Artificial Sequence
  Description of Artificial Sequence: Synthetic oligonucleotide
acauaugucaauugcaucc

SEQ ID NO: 205948 - RNA, 19 nt, Artificial Sequence
  Description of Artificial Sequence: Synthetic oligonucleotide
ucucacauuaaaauuauag

SEQ ID NO: 205949 - RNA, 19 nt, Artificial Sequence
  Description of Artificial Sequence: Synthetic oligonucleotide
ugggauaugauccuucucg

SEQ ID NO: 205950 - RNA, 19 nt, Artificial Sequence
  Description of Artificial Sequence: Synthetic oligonucleotide
ucuaauacucuuuagaaaa

SEQ ID NO: 205951 - RNA, 19 nt, Artificial Sequence
  Description of Artificial Sequence: Synthetic oligonucleotide
aagauuauaucauaaagua

SEQ ID NO: 205952 - RNA, 19 nt, Artificial Sequence
  Description of Artificial Sequence: Synthetic oligonucleotide
uucaagaucauauaagcug

SEQ ID NO: 205953 - RNA, 19 nt, Artificial Sequence
  Description of Artificial Sequence: Synthetic oligonucleotide
ugauuuugggguaagcugg

SEQ ID NO: 205954 - RNA, 19 nt, Artificial Sequence
  Description of Artificial Sequence: Synthetic oligonucleotide
aauaggaucguggaaaauc

SEQ ID NO: 205955 - RNA, 19 nt, Artificial Sequence
  Description of Artificial Sequence: Synthetic oligonucleotide
uuaguaagagcucagccag

SEQ ID NO: 205956 - RNA, 19 nt, Artificial Sequence
  Description of Artificial Sequence: Synthetic oligonucleotide
aagcuuugcaacaagaacg

SEQ ID NO: 205957 - RNA, 19 nt, Artificial Sequence
  Description of Artificial Sequence: Synthetic oligonucleotide
uuucuaucauauuauaaag

SEQ ID NO: 205958 - RNA, 19 nt, Artificial Sequence
  Description of Artificial Sequence: Synthetic oligonucleotide
agaucauauaagcuguugc

SEQ ID NO: 205959 - RNA, 19 nt, Artificial Sequence
  Description of Artificial Sequence: Synthetic oligonucleotide
aaaauuaucugguuugcgu

SEQ ID NO: 205960 - RNA, 19 nt, Artificial Sequence
  Description of Artificial Sequence: Synthetic oligonucleotide
agacaaauacaccugugcc

SEQ ID NO: 205961 - RNA, 19 nt, Artificial Sequence
  Description of Artificial Sequence: Synthetic oligonucleotide
uguuucacaaugaaccagg

SEQ ID NO: 205962 - RNA, 19 nt, Artificial Sequence
  Description of Artificial Sequence: Synthetic oligonucleotide
uauaaagugcauuuugacc

SEQ ID NO: 205963 - RNA, 19 nt, Artificial Sequence
  Description of Artificial Sequence: Synthetic oligonucleotide
aaagauugauaaacgaugg

SEQ ID NO: 205964 - RNA, 19 nt, Artificial Sequence
  Description of Artificial Sequence: Synthetic oligonucleotide
aaugagcuagucuuuauca

SEQ ID NO: 205965 - RNA, 19 nt, Artificial Sequence
  Description of Artificial Sequence: Synthetic oligonucleotide
uucagucuuaguaagagcu

SEQ ID NO: 205966 - RNA, 19 nt, Artificial Sequence
  Description of Artificial Sequence: Synthetic oligonucleotide
aagauugauaaacgauggc

SEQ ID NO: 205967 - RNA, 19 nt, Artificial Sequence
  Description of Artificial Sequence: Synthetic oligonucleotide
uaaaugauauaauggguag

SEQ ID NO: 205968 - RNA, 19 nt, Artificial Sequence
  Description of Artificial Sequence: Synthetic oligonucleotide
uucaauaggauuccaagac

SEQ ID NO: 205969 - RNA, 19 nt, Artificial Sequence
  Description of Artificial Sequence: Synthetic oligonucleotide
aguuacacaagauuauauc

SEQ ID NO: 205970 - RNA, 19 nt, Artificial Sequence
  Description of Artificial Sequence: Synthetic oligonucleotide
uauagcucaaacaaaguuc

SEQ ID NO: 205971 - RNA, 19 nt, Artificial Sequence
  Description of Artificial Sequence: Synthetic oligonucleotide
gaaagauugauaaacgaug

SEQ ID NO: 205972 - RNA, 19 nt, Artificial Sequence
  Description of Artificial Sequence: Synthetic oligonucleotide
agguauaucaccuugacuu

SEQ ID NO: 205973 - RNA, 19 nt, Artificial Sequence
  Description of Artificial Sequence: Synthetic oligonucleotide
acgguuauggcacaggcac

SEQ ID NO: 205974 - RNA, 19 nt, Artificial Sequence
  Description of Artificial Sequence: Synthetic oligonucleotide
aauuaucugguuugcguuc

SEQ ID NO: 205975 - RNA, 19 nt, Artificial Sequence
  Description of Artificial Sequence: Synthetic oligonucleotide
gauaugauccuucucggag

SEQ ID NO: 205976 - RNA, 19 nt, Artificial Sequence
  Description of Artificial Sequence: Synthetic oligonucleotide
ucaaguauauccuuucuga

SEQ ID NO: 205977 - RNA, 19 nt, Artificial Sequence
  Description of Artificial Sequence: Synthetic oligonucleotide
auagcucaaacaaaguucc

SEQ ID NO: 205978 - RNA, 19 nt, Artificial Sequence
  Description of Artificial Sequence: Synthetic oligonucleotide
ugucauauuuugcugacug

SEQ ID NO: 205979 - RNA, 19 nt, Artificial Sequence
  Description of Artificial Sequence: Synthetic oligonucleotide
aagaaagauugauaaacga

SEQ ID NO: 205980 - RNA, 19 nt, Artificial Sequence
  Description of Artificial Sequence: Synthetic oligonucleotide
aguggaacuacccaggucu

SEQ ID NO: 205981 - RNA, 19 nt, Artificial Sequence
  Description of Artificial Sequence: Synthetic oligonucleotide
ugaacuuccaccaacucaa

SEQ ID NO: 205982 - RNA, 19 nt, Artificial Sequence
  Description of Artificial Sequence: Synthetic oligonucleotide
ucaagaucauauaagcugu

SEQ ID NO: 205983 - RNA, 19 nt, Artificial Sequence
  Description of Artificial Sequence: Synthetic oligonucleotide
gauuauaucauaaaguaua

SEQ ID NO: 205984 - RNA, 19 nt, Artificial Sequence
  Description of Artificial Sequence: Synthetic oligonucleotide
auguguagaguuuuaauug

SEQ ID NO: 205985 - RNA, 19 nt, Artificial Sequence
  Description of Artificial Sequence: Synthetic oligonucleotide
ucuuaguaagagcucagcc

SEQ ID NO: 205986 - RNA, 19 nt, Artificial Sequence
  Description of Artificial Sequence: Synthetic oligonucleotide
ugcuuaguggccauuaagc

SEQ ID NO: 205987 - RNA, 19 nt, Artificial Sequence
  Description of Artificial Sequence: Synthetic oligonucleotide
ucucauacaacuucagucu

SEQ ID NO: 205988 - RNA, 19 nt, Artificial Sequence
  Description of Artificial Sequence: Synthetic oligonucleotide
uucauaauaggugauugcc

SEQ ID NO: 205989 - RNA, 19 nt, Artificial Sequence
  Description of Artificial Sequence: Synthetic oligonucleotide
ucucuauaaaccguaauug

SEQ ID NO: 205990 - RNA, 19 nt, Artificial Sequence
  Description of Artificial Sequence: Synthetic oligonucleotide
aucaccuugacuuuaacaa

SEQ ID NO: 205991 - RNA, 19 nt, Artificial Sequence
  Description of Artificial Sequence: Synthetic oligonucleotide
uaguuaugaguuuugauaa

SEQ ID NO: 205992 - RNA, 19 nt, Artificial Sequence
  Description of Artificial Sequence: Synthetic oligonucleotide
acucaagaaagauugauaa

SEQ ID NO: 205993 - RNA, 19 nt, Artificial Sequence
  Description of Artificial Sequence: Synthetic oligonucleotide
uguguagaguuuuaauugc

SEQ ID NO: 205994 - RNA, 19 nt, Artificial Sequence
  Description of Artificial Sequence: Synthetic oligonucleotide
aguauaauugugccaguuc

SEQ ID NO: 205995 - RNA, 19 nt, Artificial Sequence
  Description of Artificial Sequence: Synthetic oligonucleotide
aauuguguuucucagccau

SEQ ID NO: 205996 - RNA, 19 nt, Artificial Sequence
  Description of Artificial Sequence: Synthetic oligonucleotide
aguauauccuuucugauuu

SEQ ID NO: 205997 - RNA, 19 nt, Artificial Sequence
  Description of Artificial Sequence: Synthetic oligonucleotide
uucauugccauguguagag

SEQ ID NO: 205998 - RNA, 19 nt, Artificial Sequence
  Description of Artificial Sequence: Synthetic oligonucleotide
uuugggguaagcuggaugu

SEQ ID NO: 205999 - RNA, 19 nt, Artificial Sequence
  Description of Artificial Sequence: Synthetic oligonucleotide
ucaaucaaacgagacaaag

SEQ ID NO: 206000 - RNA, 19 nt, Artificial Sequence
  Description of Artificial Sequence: Synthetic oligonucleotide
ucugguuuaaugcuuguuc

SEQ ID NO: 206001 - RNA, 19 nt, Artificial Sequence
  Description of Artificial Sequence: Synthetic oligonucleotide
ugaauguucauguaugcau

SEQ ID NO: 206002 - RNA, 19 nt, Artificial Sequence
  Description of Artificial Sequence: Synthetic oligonucleotide
uccauaauguaucccaugu

SEQ ID NO: 206003 - RNA, 19 nt, Artificial Sequence
  Description of Artificial Sequence: Synthetic oligonucleotide
cauuaagcagcaauucucc

SEQ ID NO: 206004 - RNA, 19 nt, Artificial Sequence
  Description of Artificial Sequence: Synthetic oligonucleotide
uaagcggugaacuuccacc

SEQ ID NO: 206005 - RNA, 19 nt, Artificial Sequence
  Description of Artificial Sequence: Synthetic oligonucleotide
uuauagcucaaacaaaguu

SEQ ID NO: 206006 - RNA, 19 nt, Artificial Sequence
  Description of Artificial Sequence: Synthetic oligonucleotide
aggucuuaaagaugcacgg

SEQ ID NO: 206007 - RNA, 19 nt, Artificial Sequence
  Description of Artificial Sequence: Synthetic oligonucleotide
aaauuaucugguuugcguu

SEQ ID NO: 206008 - RNA, 19 nt, Artificial Sequence
  Description of Artificial Sequence: Synthetic oligonucleotide
gagacaaauacaccugugc

SEQ ID NO: 206009 - RNA, 19 nt, Artificial Sequence
  Description of Artificial Sequence: Synthetic oligonucleotide
auuuaagcggugaacuucc

SEQ ID NO: 206010 - RNA, 19 nt, Artificial Sequence
  Description of Artificial Sequence: Synthetic oligonucleotide
ucuuaaagaugcacgggcc

SEQ ID NO: 206011 - RNA, 19 nt, Artificial Sequence
  Description of Artificial Sequence: Synthetic oligonucleotide
cucuauaaaccguaauugc

SEQ ID NO: 206012 - RNA, 19 nt, Artificial Sequence
  Description of Artificial Sequence: Synthetic oligonucleotide
ugauauaauggguagucuc

SEQ ID NO: 206013 - RNA, 19 nt, Artificial Sequence
  Description of Artificial Sequence: Synthetic oligonucleotide
uuaguaauucuucugccau

SEQ ID NO: 206014 - RNA, 19 nt, Artificial Sequence
  Description of Artificial Sequence: Synthetic oligonucleotide
uucggcuucaauaggauuc

SEQ ID NO: 206015 - RNA, 19 nt, Artificial Sequence
  Description of Artificial Sequence: Synthetic oligonucleotide
ugguuugcguucuaaaagc

SEQ ID NO: 206016 - RNA, 19 nt, Artificial Sequence
  Description of Artificial Sequence: Synthetic oligonucleotide
auaugauccuucucggagg

SEQ ID NO: 206017 - RNA, 19 nt, Artificial Sequence
  Description of Artificial Sequence: Synthetic oligonucleotide
uguauugcaaaggcugucg

SEQ ID NO: 206018 - RNA, 19 nt, Artificial Sequence
  Description of Artificial Sequence: Synthetic oligonucleotide
ucaauaggauuccaagaca

SEQ ID NO: 206019 - RNA, 19 nt, Artificial Sequence
  Description of Artificial Sequence: Synthetic oligonucleotide
uuacacaagauuauaucau

SEQ ID NO: 206020 - RNA, 19 nt, Artificial Sequence
  Description of Artificial Sequence: Synthetic oligonucleotide
ucuuuaucacagaacugcc

SEQ ID NO: 206021 - RNA, 19 nt, Artificial Sequence
  Description of Artificial Sequence: Synthetic oligonucleotide
ugcgaaguguuucugugag

SEQ ID NO: 206022 - RNA, 19 nt, Artificial Sequence
  Description of Artificial Sequence: Synthetic oligonucleotide
ugaacgcgcuucaauaucc

SEQ ID NO: 206023 - RNA, 19 nt, Artificial Sequence
  Description of Artificial Sequence: Synthetic oligonucleotide
cuuaguggccauuaagcag

SEQ ID NO: 206024 - RNA, 19 nt, Artificial Sequence
  Description of Artificial Sequence: Synthetic oligonucleotide
uaaaauuaucugguuugcg

SEQ ID NO: 206025 - RNA, 19 nt, Artificial Sequence
  Description of Artificial Sequence: Synthetic oligonucleotide
agauugauaaacgauggcu

SEQ ID NO: 206026 - RNA, 19 nt, Artificial Sequence
  Description of Artificial Sequence: Synthetic oligonucleotide
uuugacgaaaacaaucauu

SEQ ID NO: 206027 - RNA, 19 nt, Artificial Sequence
  Description of Artificial Sequence: Synthetic oligonucleotide
uucaagcagauuucuauca

SEQ ID NO: 206028 - RNA, 19 nt, Artificial Sequence
  Description of Artificial Sequence: Synthetic oligonucleotide
guaguuaugaguuuugaua

SEQ ID NO: 206029 - RNA, 19 nt, Artificial Sequence
  Description of Artificial Sequence: Synthetic oligonucleotide
gucuuaaagaugcacgggc

SEQ ID NO: 206030 - RNA, 19 nt, Artificial Sequence
  Description of Artificial Sequence: Synthetic oligonucleotide
cucuguagaaaugagcuag

SEQ ID NO: 206031 - RNA, 19 nt, Artificial Sequence
  Description of Artificial Sequence: Synthetic oligonucleotide
uguaauccuuuacaguacu

SEQ ID NO: 206032 - RNA, 19 nt, Artificial Sequence
  Description of Artificial Sequence: Synthetic oligonucleotide
augagcuagucuuuaucac

SEQ ID NO: 206033 - RNA, 19 nt, Artificial Sequence
  Description of Artificial Sequence: Synthetic oligonucleotide
ugagcuagucuuuaucaca

SEQ ID NO: 206034 - RNA, 19 nt, Artificial Sequence
  Description of Artificial Sequence: Synthetic oligonucleotide
aucaaguauauccuuucug

SEQ ID NO: 206035 - RNA, 19 nt, Artificial Sequence
  Description of Artificial Sequence: Synthetic oligonucleotide
ucauguaugcauccccgag

SEQ ID NO: 206036 - RNA, 19 nt, Artificial Sequence
  Description of Artificial Sequence: Synthetic oligonucleotide
ucccauguauucauaagcu

SEQ ID NO: 206037 - RNA, 19 nt, Artificial Sequence
  Description of Artificial Sequence: Synthetic oligonucleotide
auaaacgauggcucgcauc

SEQ ID NO: 206038 - RNA, 19 nt, Artificial Sequence
  Description of Artificial Sequence: Synthetic oligonucleotide
agaugcacgggccuuauca

SEQ ID NO: 206039 - RNA, 19 nt, Artificial Sequence
  Description of Artificial Sequence: Synthetic oligonucleotide
cugauuuugggguaagcug

SEQ ID NO: 206040 - RNA, 19 nt, Artificial Sequence
  Description of Artificial Sequence: Synthetic oligonucleotide
aaaaugucgaagggcauca

SEQ ID NO: 206041 - RNA, 19 nt, Artificial Sequence
  Description of Artificial Sequence: Synthetic oligonucleotide
cucuauaauucuucacacg

SEQ ID NO: 206042 - RNA, 19 nt, Artificial Sequence
  Description of Artificial Sequence: Synthetic oligonucleotide
gauugauaaacgauggcuc

SEQ ID NO: 206043 - RNA, 19 nt, Artificial Sequence
  Description of Artificial Sequence: Synthetic oligonucleotide
cuaauacucuuuagaaaag

SEQ ID NO: 206044 - RNA, 19 nt, Artificial Sequence
  Description of Artificial Sequence: Synthetic oligonucleotide
gacaaauacaccugugcca

SEQ ID NO: 206045 - RNA, 19 nt, Artificial Sequence
  Description of Artificial Sequence: Synthetic oligonucleotide
ucaauauccgagccugcag

SEQ ID NO: 206046 - RNA, 19 nt, Artificial Sequence
  Description of Artificial Sequence: Synthetic oligonucleotide
agaaccuggugacauaugu

SEQ ID NO: 206047 - RNA, 19 nt, Artificial Sequence
  Description of Artificial Sequence: Synthetic oligonucleotide
ucauuugcgccuaauggaa

SEQ ID NO: 206048 - RNA, 19 nt, Artificial Sequence
  Description of Artificial Sequence: Synthetic oligonucleotide
uuguucauaguccuguuuu

SEQ ID NO: 206049 - RNA, 19 nt, Artificial Sequence
  Description of Artificial Sequence: Synthetic oligonucleotide
cuuuaaauaggaucgugga

SEQ ID NO: 206050 - RNA, 19 nt, Artificial Sequence
  Description of Artificial Sequence: Synthetic oligonucleotide
auuuacagguucaugagcu

SEQ ID NO: 206051 - RNA, 19 nt, Artificial Sequence
  Description of Artificial Sequence: Synthetic oligonucleotide
aaauacaccugugccauca

SEQ ID NO: 206052 - RNA, 19 nt, Artificial Sequence
  Description of Artificial Sequence: Synthetic oligonucleotide
cuuaguaagagcucagcca

SEQ ID NO: 206053 - RNA, 19 nt, Artificial Sequence
  Description of Artificial Sequence: Synthetic oligonucleotide
ugaaaacucauggauggca

SEQ ID NO: 206054 - RNA, 19 nt, Artificial Sequence
  Description of Artificial Sequence: Synthetic oligonucleotide
uguguaguuaugaguuuug

SEQ ID NO: 206055 - RNA, 19 nt, Artificial Sequence
  Description of Artificial Sequence: Synthetic oligonucleotide
uaauccuuuacaguacuga

SEQ ID NO: 206056 - RNA, 19 nt, Artificial Sequence
  Description of Artificial Sequence: Synthetic oligonucleotide
uaacgaggcaaucgcauca

SEQ ID NO: 206057 - RNA, 19 nt, Artificial Sequence
  Description of Artificial Sequence: Synthetic oligonucleotide
gcaacaagaacgguuaugg

SEQ ID NO: 206058 - RNA, 19 nt, Artificial Sequence
  Description of Artificial Sequence: Synthetic oligonucleotide
ucugauuuugggguaagcu

SEQ ID NO: 206059 - RNA, 19 nt, Artificial Sequence
  Description of Artificial Sequence: Synthetic oligonucleotide
uguguguauugcaaaggcu

SEQ ID NO: 206060 - RNA, 19 nt, Artificial Sequence
  Description of Artificial Sequence: Synthetic oligonucleotide
caauugcauccacauaucg

SEQ ID NO: 206061 - RNA, 19 nt, Artificial Sequence
  Description of Artificial Sequence: Synthetic oligonucleotide
cuucauuccugguagguuc

SEQ ID NO: 206062 - RNA, 19 nt, Artificial Sequence
  Description of Artificial Sequence: Synthetic oligonucleotide
cauuuacagguucaugagc

SEQ ID NO: 206063 - RNA, 19 nt, Artificial Sequence
  Description of Artificial Sequence: Synthetic oligonucleotide
ugcuguaacgaggcaaucg

SEQ ID NO: 206064 - RNA, 19 nt, Artificial Sequence
  Description of Artificial Sequence: Synthetic oligonucleotide
aaaugauauaauggguagu

SEQ ID NO: 206065 - RNA, 19 nt, Artificial Sequence
  Description of Artificial Sequence: Synthetic oligonucleotide
aacuuuggucuagaaggac

SEQ ID NO: 206066 - RNA, 19 nt, Artificial Sequence
  Description of Artificial Sequence: Synthetic oligonucleotide
aguuaugaguuuugauaag

SEQ ID NO: 206067 - RNA, 19 nt, Artificial Sequence
  Description of Artificial Sequence: Synthetic oligonucleotide
auuucagugaaggugcuca

SEQ ID NO: 206068 - RNA, 19 nt, Artificial Sequence
  Description of Artificial Sequence: Synthetic oligonucleotide
ugaguuuugauaagugcuu

SEQ ID NO: 206069 - RNA, 19 nt, Artificial Sequence
  Description of Artificial Sequence: Synthetic oligonucleotide
uuaacagguaacuguugac

SEQ ID NO: 206070 - RNA, 19 nt, Artificial Sequence
  Description of Artificial Sequence: Synthetic oligonucleotide
aagaucauauaagcuguug

SEQ ID NO: 206071 - RNA, 19 nt, Artificial Sequence
  Description of Artificial Sequence: Synthetic oligonucleotide
uuugcugacugaauauaaa

SEQ ID NO: 206072 - RNA, 19 nt, Artificial Sequence
  Description of Artificial Sequence: Synthetic oligonucleotide
gcuguucuccauuuaagcg

SEQ ID NO: 206073 - RNA, 19 nt, Artificial Sequence
  Description of Artificial Sequence: Synthetic oligonucleotide
cugcucaacaguuugacga

SEQ ID NO: 206074 - RNA, 19 nt, Artificial Sequence
  Description of Artificial Sequence: Synthetic oligonucleotide
accuccaauaguuucauua

SEQ ID NO: 206075 - RNA, 19 nt, Artificial Sequence
  Description of Artificial Sequence: Synthetic oligonucleotide
uguaguuaugaguuuugau

SEQ ID NO: 206076 - RNA, 19 nt, Artificial Sequence
  Description of Artificial Sequence: Synthetic oligonucleotide
cauaguugaaggcugcauc

SEQ ID NO: 206077 - RNA, 19 nt, Artificial Sequence
  Description of Artificial Sequence: Synthetic oligonucleotide
ggugauauacaacauuuuc

SEQ ID NO: 206078 - RNA, 19 nt, Artificial Sequence
  Description of Artificial Sequence: Synthetic oligonucleotide
uaauaggugauugccuuug

SEQ ID NO: 206079 - RNA, 19 nt, Artificial Sequence
  Description of Artificial Sequence: Synthetic oligonucleotide
uauaauggguagucucuca

SEQ ID NO: 206080 - RNA, 19 nt, Artificial Sequence
  Description of Artificial Sequence: Synthetic oligonucleotide
auaugucaauugcauccac

SEQ ID NO: 206081 - RNA, 19 nt, Artificial Sequence
  Description of Artificial Sequence: Synthetic oligonucleotide
aacgagacaaagucauaaa

SEQ ID NO: 206082 - RNA, 19 nt, Artificial Sequence
  Description of Artificial Sequence: Synthetic oligonucleotide
ugggcauucuuucagcaau

SEQ ID NO: 206083 - RNA, 19 nt, Artificial Sequence
  Description of Artificial Sequence: Synthetic oligonucleotide
uguauaugcuugcucuuuc

SEQ ID NO: 206084 - RNA, 19 nt, Artificial Sequence
  Description of Artificial Sequence: Synthetic oligonucleotide
caaucacuaucuuuucgag

SEQ ID NO: 206085 - RNA, 19 nt, Artificial Sequence
  Description of Artificial Sequence: Synthetic oligonucleotide
uauaaaccguaauugcuuu

SEQ ID NO: 206086 - RNA, 19 nt, Artificial Sequence
  Description of Artificial Sequence: Synthetic oligonucleotide
agaaagauugauaaacgau

SEQ ID NO: 206087 - RNA, 19 nt, Artificial Sequence
  Description of Artificial Sequence: Synthetic oligonucleotide
uugggguucugguuuaaug

SEQ ID NO: 206088 - RNA, 19 nt, Artificial Sequence
  Description of Artificial Sequence: Synthetic oligonucleotide
aaaucucggaacauccuca

SEQ ID NO: 206089 - RNA, 19 nt, Artificial Sequence
  Description of Artificial Sequence: Synthetic oligonucleotide
aacuacccaggucuccauc

SEQ ID NO: 206090 - RNA, 19 nt, Artificial Sequence
  Description of Artificial Sequence: Synthetic oligonucleotide
ucgaagggcaucauuuggu

SEQ ID NO: 206091 - RNA, 19 nt, Artificial Sequence
  Description of Artificial Sequence: Synthetic oligonucleotide
ucuucucaggagaucaauc

SEQ ID NO: 206092 - RNA, 19 nt, Artificial Sequence
  Description of Artificial Sequence: Synthetic oligonucleotide
aaauuucagcugcgaagug

SEQ ID NO: 206093 - RNA, 19 nt, Artificial Sequence
  Description of Artificial Sequence: Synthetic oligonucleotide
guacugauauccuggcucc

SEQ ID NO: 206094 - RNA, 19 nt, Artificial Sequence
  Description of Artificial Sequence: Synthetic oligonucleotide
auauaauggguagucucuc

SEQ ID NO: 206095 - RNA, 19 nt, Artificial Sequence
  Description of Artificial Sequence: Synthetic oligonucleotide
aaagcugcugcaaaugaaa

SEQ ID NO: 206096 - RNA, 19 nt, Artificial Sequence
  Description of Artificial Sequence: Synthetic oligonucleotide
gauucaagcagauuucuau

SEQ ID NO: 206097 - RNA, 19 nt, Artificial Sequence
  Description of Artificial Sequence: Synthetic oligonucleotide
uauaucaccuugacuuuaa

SEQ ID NO: 206098 - RNA, 19 nt, Artificial Sequence
  Description of Artificial Sequence: Synthetic oligonucleotide
guauugcaaaggcugucgg

SEQ ID NO: 206099 - RNA, 19 nt, Artificial Sequence
  Description of Artificial Sequence: Synthetic oligonucleotide
uacucggaguugcaagcgg

SEQ ID NO: 206100 - RNA, 19 nt, Artificial Sequence
  Description of Artificial Sequence: Synthetic oligonucleotide
auccccgaggagcagaaag

SEQ ID NO: 206101 - RNA, 19 nt, Artificial Sequence
  Description of Artificial Sequence: Synthetic oligonucleotide
uuggccucuauaauucuuc

SEQ ID NO: 206102 - RNA, 19 nt, Artificial Sequence
  Description of Artificial Sequence: Synthetic oligonucleotide
cuucaauaggauuccaaga

SEQ ID NO: 206103 - RNA, 19 nt, Artificial Sequence
  Description of Artificial Sequence: Synthetic oligonucleotide
ugaggcaucaaggucuucu

SEQ ID NO: 206104 - RNA, 19 nt, Artificial Sequence
  Description of Artificial Sequence: Synthetic oligonucleotide
ugaguuaaacuuuggucua

SEQ ID NO: 206105 - RNA, 19 nt, Artificial Sequence
  Description of Artificial Sequence: Synthetic oligonucleotide
aacgaggcaaucgcaucac

SEQ ID NO: 206106 - RNA, 19 nt, Artificial Sequence
  Description of Artificial Sequence: Synthetic oligonucleotide
cucauuugcgccuaaugga

SEQ ID NO: 206107 - RNA, 19 nt, Artificial Sequence
  Description of Artificial Sequence: Synthetic oligonucleotide
uaaaaugucgaagggcauc

SEQ ID NO: 206108 - RNA, 19 nt, Artificial Sequence
  Description of Artificial Sequence: Synthetic oligonucleotide
uucucaggagaucaaucaa

SEQ ID NO: 206109 - RNA, 19 nt, Artificial Sequence
  Description of Artificial Sequence: Synthetic oligonucleotide
uuucgagcuuuauuaaaau

SEQ ID NO: 206110 - RNA, 19 nt, Artificial Sequence
  Description of Artificial Sequence: Synthetic oligonucleotide
cuucucaggagaucaauca

SEQ ID NO: 206111 - RNA, 19 nt, Artificial Sequence
  Description of Artificial Sequence: Synthetic oligonucleotide
aacaugaggucagccauca

SEQ ID NO: 206112 - RNA, 19 nt, Artificial Sequence
  Description of Artificial Sequence: Synthetic oligonucleotide
acaaauacaccugugccau

SEQ ID NO: 206113 - RNA, 19 nt, Artificial Sequence
  Description of Artificial Sequence: Synthetic oligonucleotide
gagaucaaucaaacgagac

SEQ ID NO: 206114 - RNA, 19 nt, Artificial Sequence
  Description of Artificial Sequence: Synthetic oligonucleotide
auuugcgccuaauggaaga

SEQ ID NO: 206115 - RNA, 19 nt, Artificial Sequence
  Description of Artificial Sequence: Synthetic oligonucleotide
agguuuucaaacacuucac

SEQ ID NO: 206116 - RNA, 19 nt, Artificial Sequence
  Description of Artificial Sequence: Synthetic oligonucleotide
ucuuacuaucuguuucaca

SEQ ID NO: 206117 - RNA, 19 nt, Artificial Sequence
  Description of Artificial Sequence: Synthetic oligonucleotide
uuugugacugugcuuugau

SEQ ID NO: 206118 - RNA, 19 nt, Artificial Sequence
  Description of Artificial Sequence: Synthetic oligonucleotide
agagcugacaauucauuua

SEQ ID NO: 206119 - RNA, 19 nt, Artificial Sequence
  Description of Artificial Sequence: Synthetic oligonucleotide
cuaaaagcugcugcaaaug

SEQ ID NO: 206120 - RNA, 19 nt, Artificial Sequence
  Description of Artificial Sequence: Synthetic oligonucleotide
ugcuaucucucccauuuuc

SEQ ID NO: 206121 - RNA, 19 nt, Artificial Sequence
  Description of Artificial Sequence: Synthetic oligonucleotide
auaucaccuugacuuuaac

SEQ ID NO: 206122 - RNA, 19 nt, Artificial Sequence
  Description of Artificial Sequence: Synthetic oligonucleotide
cucgcaucaaccucaguuc

SEQ ID NO: 206123 - RNA, 19 nt, Artificial Sequence
  Description of Artificial Sequence: Synthetic oligonucleotide
uaguaagagcucagccagg

SEQ ID NO: 206124 - RNA, 19 nt, Artificial Sequence
  Description of Artificial Sequence: Synthetic oligonucleotide
aaugucgaagggcaucauu

SEQ ID NO: 206125 - RNA, 19 nt, Artificial Sequence
  Description of Artificial Sequence: Synthetic oligonucleotide
uuaagcggugaacuuccac

SEQ ID NO: 206126 - RNA, 19 nt, Artificial Sequence
  Description of Artificial Sequence: Synthetic oligonucleotide
aauauccgagccugcaguu

SEQ ID NO: 206127 - RNA, 19 nt, Artificial Sequence
  Description of Artificial Sequence: Synthetic oligonucleotide
uugcaauccgcuucagcug

SEQ ID NO: 206128 - RNA, 19 nt, Artificial Sequence
  Description of Artificial Sequence: Synthetic oligonucleotide
uugauaaacgauggcucgc

SEQ ID NO: 206129 - RNA, 19 nt, Artificial Sequence
  Description of Artificial Sequence: Synthetic oligonucleotide
aaacuuuggucuagaagga

SEQ ID NO: 206130 - RNA, 19 nt, Artificial Sequence
  Description of Artificial Sequence: Synthetic oligonucleotide
auaggaucguggaaaaucu

SEQ ID NO: 206131 - RNA, 19 nt, Artificial Sequence
  Description of Artificial Sequence: Synthetic oligonucleotide
ccucauuugcgccuaaugg

SEQ ID NO: 206132 - RNA, 19 nt, Artificial Sequence
  Description of Artificial Sequence: Synthetic oligonucleotide
ugauaaacgauggcucgca

SEQ ID NO: 206133 - RNA, 19 nt, Artificial Sequence
  Description of Artificial Sequence: Synthetic oligonucleotide
cugguuuaaugcuuguuca

SEQ ID NO: 206134 - RNA, 19 nt, Artificial Sequence
  Description of Artificial Sequence: Synthetic oligonucleotide
ucugaacgcgcuucaauau

SEQ ID NO: 206135 - RNA, 19 nt, Artificial Sequence
  Description of Artificial Sequence: Synthetic oligonucleotide
auugcaaaggcugucggau

SEQ ID NO: 206136 - RNA, 19 nt, Artificial Sequence
  Description of Artificial Sequence: Synthetic oligonucleotide
aaucucggaacauccucaa

SEQ ID NO: 206137 - RNA, 19 nt, Artificial Sequence
  Description of Artificial Sequence: Synthetic oligonucleotide
acuacccaggucuccauca

SEQ ID NO: 206138 - RNA, 19 nt, Artificial Sequence
  Description of Artificial Sequence: Synthetic oligonucleotide
aacucaagaaagauugaua

SEQ ID NO: 206139 - RNA, 19 nt, Artificial Sequence
  Description of Artificial Sequence: Synthetic oligonucleotide
uguaaaccuuugcugcuuc

SEQ ID NO: 206140 - RNA, 19 nt, Artificial Sequence
  Description of Artificial Sequence: Synthetic oligonucleotide
ucacacguuccugaaaacu

SEQ ID NO: 206141 - RNA, 19 nt, Artificial Sequence
  Description of Artificial Sequence: Synthetic oligonucleotide
uuccaugccaucucauagu

SEQ ID NO: 206142 - RNA, 19 nt, Artificial Sequence
  Description of Artificial Sequence: Synthetic oligonucleotide
gauauaauggguagucucu

SEQ ID NO: 206143 - RNA, 19 nt, Artificial Sequence
  Description of Artificial Sequence: Synthetic oligonucleotide
ucaugagcuagagaaugcu

SEQ ID NO: 206144 - RNA, 19 nt, Artificial Sequence
  Description of Artificial Sequence: Synthetic oligonucleotide
aucugaacgcgcuucaaua

SEQ ID NO: 206145 - RNA, 19 nt, Artificial Sequence
  Description of Artificial Sequence: Synthetic oligonucleotide
ucgcaucaaccucaguucu

SEQ ID NO: 206146 - RNA, 19 nt, Artificial Sequence
  Description of Artificial Sequence: Synthetic oligonucleotide
auaagugcuuucccaauuu

SEQ ID NO: 206147 - RNA, 19 nt, Artificial Sequence
  Description of Artificial Sequence: Synthetic oligonucleotide
acgauggcucgcaucaacc

SEQ ID NO: 206148 - RNA, 19 nt, Artificial Sequence
  Description of Artificial Sequence: Synthetic oligonucleotide
aggcaauucuguuguccac

SEQ ID NO: 206149 - RNA, 19 nt, Artificial Sequence
  Description of Artificial Sequence: Synthetic oligonucleotide
uucauguaugcauccccga

SEQ ID NO: 206150 - RNA, 19 nt, Artificial Sequence
  Description of Artificial Sequence: Synthetic oligonucleotide
ugcaagcggcccuggaccg

SEQ ID NO: 206151 - RNA, 19 nt, Artificial Sequence
  Description of Artificial Sequence: Synthetic oligonucleotide
ucaguggaacuacccaggu

SEQ ID NO: 206152 - RNA, 19 nt, Artificial Sequence
  Description of Artificial Sequence: Synthetic oligonucleotide
gcuguaacgaggcaaucgc

SEQ ID NO: 206153 - RNA, 19 nt, Artificial Sequence
  Description of Artificial Sequence: Synthetic oligonucleotide
agauuauaucauaaaguau

SEQ ID NO: 206154 - RNA, 19 nt, Artificial Sequence
  Description of Artificial Sequence: Synthetic oligonucleotide
gggauaugauccuucucgg

SEQ ID NO: 206155 - RNA, 19 nt, Artificial Sequence
  Description of Artificial Sequence: Synthetic oligonucleotide
cauaauguaucccauguau

SEQ ID NO: 206156 - RNA, 19 nt, Artificial Sequence
  Description of Artificial Sequence: Synthetic oligonucleotide
gguuauggcacaggcaccg

SEQ ID NO: 206157 - RNA, 19 nt, Artificial Sequence
  Description of Artificial Sequence: Synthetic oligonucleotide
uuugcgccuaauggaagag

SEQ ID NO: 206158 - RNA, 19 nt, Artificial Sequence
  Description of Artificial Sequence: Synthetic oligonucleotide
cugcuuaguggccauuaag

SEQ ID NO: 206159 - RNA, 19 nt, Artificial Sequence
  Description of Artificial Sequence: Synthetic oligonucleotide
aaguauaauugugccaguu

SEQ ID NO: 206160 - RNA, 19 nt, Artificial Sequence
  Description of Artificial Sequence: Synthetic oligonucleotide
uggauucaagcagauuucu

SEQ ID NO: 206161 - RNA, 19 nt, Artificial Sequence
  Description of Artificial Sequence: Synthetic oligonucleotide
acucggaguugcaagcggc

SEQ ID NO: 206162 - RNA, 19 nt, Artificial Sequence
  Description of Artificial Sequence: Synthetic oligonucleotide
cuguuucacaaugaaccag

SEQ ID NO: 206163 - RNA, 19 nt, Artificial Sequence
  Description of Artificial Sequence: Synthetic oligonucleotide
uggccauuaagcagcaauu

SEQ ID NO: 206164 - RNA, 19 nt, Artificial Sequence
  Description of Artificial Sequence: Synthetic oligonucleotide
gaguuaaacuuuggucuag

SEQ ID NO: 206165 - RNA, 19 nt, Artificial Sequence
  Description of Artificial Sequence: Synthetic oligonucleotide
cauuugcgccuaauggaag

SEQ ID NO: 206166 - RNA, 19 nt, Artificial Sequence
  Description of Artificial Sequence: Synthetic oligonucleotide
gauggcucgcaucaaccuc

SEQ ID NO: 206167 - RNA, 19 nt, Artificial Sequence
  Description of Artificial Sequence: Synthetic oligonucleotide
aggugauugccuuugugua

SEQ ID NO: 206168 - RNA, 19 nt, Artificial Sequence
  Description of Artificial Sequence: Synthetic oligonucleotide
cuccauuacucggaguugc

SEQ ID NO: 206169 - RNA, 19 nt, Artificial Sequence
  Description of Artificial Sequence: Synthetic oligonucleotide
ggugauugccuuuguguag

SEQ ID NO: 206170 - RNA, 19 nt, Artificial Sequence
  Description of Artificial Sequence: Synthetic oligonucleotide
aacgcgcuucaauauccga

SEQ ID NO: 206171 - RNA, 19 nt, Artificial Sequence
  Description of Artificial Sequence: Synthetic oligonucleotide
ugggguaagcuggaugugc

SEQ ID NO: 206172 - RNA, 19 nt, Artificial Sequence
  Description of Artificial Sequence: Synthetic oligonucleotide
aguaagagcucagccaggu

SEQ ID NO: 206173 - RNA, 19 nt, Artificial Sequence
  Description of Artificial Sequence: Synthetic oligonucleotide
auuuugaccccaaucacua

SEQ ID NO: 206174 - RNA, 19 nt, Artificial Sequence
  Description of Artificial Sequence: Synthetic oligonucleotide
aagaacgguuauggcacag

SEQ ID NO: 206175 - RNA, 19 nt, Artificial Sequence
  Description of Artificial Sequence: Synthetic oligonucleotide
ugcucaacaguuugacgaa

SEQ ID NO: 206176 - RNA, 19 nt, Artificial Sequence
  Description of Artificial Sequence: Synthetic oligonucleotide
ucuucggcuucaauaggau

SEQ ID NO: 206177 - RNA, 19 nt, Artificial Sequence
  Description of Artificial Sequence: Synthetic oligonucleotide
gaacugccucauuugcgcc

SEQ ID NO: 206178 - RNA, 19 nt, Artificial Sequence
  Description of Artificial Sequence: Synthetic oligonucleotide
guguagaguuuuaauugcc

SEQ ID NO: 206179 - RNA, 19 nt, Artificial Sequence
  Description of Artificial Sequence: Synthetic oligonucleotide
uuuguguaguuaugaguuu

SEQ ID NO: 206180 - RNA, 19 nt, Artificial Sequence
  Description of Artificial Sequence: Synthetic oligonucleotide
uuuugugacugugcuuuga

SEQ ID NO: 206181 - RNA, 19 nt, Artificial Sequence
  Description of Artificial Sequence: Synthetic oligonucleotide
aagaugcacgggccuuauc

SEQ ID NO: 206182 - RNA, 19 nt, Artificial Sequence
  Description of Artificial Sequence: Synthetic oligonucleotide
cauguguagaguuuuaauu

SEQ ID NO: 206183 - RNA, 19 nt, Artificial Sequence
  Description of Artificial Sequence: Synthetic oligonucleotide
aaggacuugggaacgccca

SEQ ID NO: 206184 - RNA, 19 nt, Artificial Sequence
  Description of Artificial Sequence: Synthetic oligonucleotide
aaccagggccucucuauaa

SEQ ID NO: 206185 - RNA, 19 nt, Artificial Sequence
  Description of Artificial Sequence: Synthetic oligonucleotide
ugccaauuuguaucccacu

SEQ ID NO: 206186 - RNA, 19 nt, Artificial Sequence
  Description of Artificial Sequence: Synthetic oligonucleotide
auacucuuuagaaaaggua

SEQ ID NO: 206187 - RNA, 19 nt, Artificial Sequence
  Description of Artificial Sequence: Synthetic oligonucleotide
uccauuacucggaguugca

SEQ ID NO: 206188 - RNA, 19 nt, Artificial Sequence
  Description of Artificial Sequence: Synthetic oligonucleotide
augauauaauggguagucu

SEQ ID NO: 206189 - RNA, 19 nt, Artificial Sequence
  Description of Artificial Sequence: Synthetic oligonucleotide
ucugcuuaguggccauuaa

SEQ ID NO: 206190 - RNA, 19 nt, Artificial Sequence
  Description of Artificial Sequence: Synthetic oligonucleotide
ucuguauaugcuugcucuu

SEQ ID NO: 206191 - RNA, 19 nt, Artificial Sequence
  Description of Artificial Sequence: Synthetic oligonucleotide
gagccugcuguaacgaggc

SEQ ID NO: 206192 - RNA, 19 nt, Artificial Sequence
  Description of Artificial Sequence: Synthetic oligonucleotide
agguaaauaucugccauuu

SEQ ID NO: 206193 - RNA, 19 nt, Artificial Sequence
  Description of Artificial Sequence: Synthetic oligonucleotide
uuuaagcggugaacuucca

SEQ ID NO: 206194 - RNA, 19 nt, Artificial Sequence
  Description of Artificial Sequence: Synthetic oligonucleotide
gagcuagagaaugcuggag

SEQ ID NO: 206195 - RNA, 19 nt, Artificial Sequence
  Description of Artificial Sequence: Synthetic oligonucleotide
guuaugaguuuugauaagu

SEQ ID NO: 206196 - RNA, 19 nt, Artificial Sequence
  Description of Artificial Sequence: Synthetic oligonucleotide
gaacgcgcuucaauauccg

SEQ ID NO: 206197 - RNA, 19 nt, Artificial Sequence
  Description of Artificial Sequence: Synthetic oligonucleotide
uuaaagaugcacgggccuu

SEQ ID NO: 206198 - RNA, 19 nt, Artificial Sequence
  Description of Artificial Sequence: Synthetic oligonucleotide
gaauuguguuucucagcca

SEQ ID NO: 206199 - RNA, 19 nt, Artificial Sequence
  Description of Artificial Sequence: Synthetic oligonucleotide
acacaagauuauaucauaa

SEQ ID NO: 206200 - RNA, 19 nt, Artificial Sequence
  Description of Artificial Sequence: Synthetic oligonucleotide
cucggaguugcaagcggcc

SEQ ID NO: 206201 - RNA, 19 nt, Artificial Sequence
  Description of Artificial Sequence: Synthetic oligonucleotide
uuuggucuagaaggacuug

SEQ ID NO: 206202 - RNA, 19 nt, Artificial Sequence
  Description of Artificial Sequence: Synthetic oligonucleotide
cuuccaugagagcugacaa

SEQ ID NO: 206203 - RNA, 19 nt, Artificial Sequence
  Description of Artificial Sequence: Synthetic oligonucleotide
accgucugaggcuuuaguu

SEQ ID NO: 206204 - RNA, 19 nt, Artificial Sequence
  Description of Artificial Sequence: Synthetic oligonucleotide
ccaauuuguaucccacugc

SEQ ID NO: 206205 - RNA, 19 nt, Artificial Sequence
  Description of Artificial Sequence: Synthetic oligonucleotide
cugaacgcgcuucaauauc

SEQ ID NO: 206206 - RNA, 19 nt, Artificial Sequence
  Description of Artificial Sequence: Synthetic oligonucleotide
ugcauccacauaucguuuu

SEQ ID NO: 206207 - RNA, 19 nt, Artificial Sequence
  Description of Artificial Sequence: Synthetic oligonucleotide
aaauaggaucguggaaaau

SEQ ID NO: 206208 - RNA, 19 nt, Artificial Sequence
  Description of Artificial Sequence: Synthetic oligonucleotide
gcuguugccauucccaaga

SEQ ID NO: 206209 - RNA, 19 nt, Artificial Sequence
  Description of Artificial Sequence: Synthetic oligonucleotide
ugcguucuaaaagcugcug

SEQ ID NO: 206210 - RNA, 19 nt, Artificial Sequence
  Description of Artificial Sequence: Synthetic oligonucleotide
ucgagccugcuguaacgag

SEQ ID NO: 206211 - RNA, 19 nt, Artificial Sequence
  Description of Artificial Sequence: Synthetic oligonucleotide
augucgaagggcaucauuu

SEQ ID NO: 206212 - RNA, 19 nt, Artificial Sequence
  Description of Artificial Sequence: Synthetic oligonucleotide
caauuuguaucccacugcu

SEQ ID NO: 206213 - RNA, 19 nt, Artificial Sequence
  Description of Artificial Sequence: Synthetic oligonucleotide
ggaacgcccaucuuccaug

SEQ ID NO: 206214 - RNA, 19 nt, Artificial Sequence
  Description of Artificial Sequence: Synthetic oligonucleotide
acgcgcuucaauauccgag

SEQ ID NO: 206215 - RNA, 19 nt, Artificial Sequence
  Description of Artificial Sequence: Synthetic oligonucleotide
auaaaccguaauugcuuuu

SEQ ID NO: 206216 - RNA, 19 nt, Artificial Sequence
  Description of Artificial Sequence: Synthetic oligonucleotide
gcuuaguggccauuaagca

SEQ ID NO: 206217 - RNA, 19 nt, Artificial Sequence
  Description of Artificial Sequence: Synthetic oligonucleotide
aggaucguggaaaaucuaa

SEQ ID NO: 206218 - RNA, 19 nt, Artificial Sequence
  Description of Artificial Sequence: Synthetic oligonucleotide
cauaauaggugauugccuu

SEQ ID NO: 206219 - RNA, 19 nt, Artificial Sequence
  Description of Artificial Sequence: Synthetic oligonucleotide
uuauggcacaggcaccguu

SEQ ID NO: 206220 - RNA, 19 nt, Artificial Sequence
  Description of Artificial Sequence: Synthetic oligonucleotide
agucuuaguaagagcucag

SEQ ID NO: 206221 - RNA, 19 nt, Artificial Sequence
  Description of Artificial Sequence: Synthetic oligonucleotide
gaugcacgggccuuaucaa

SEQ ID NO: 206222 - RNA, 19 nt, Artificial Sequence
  Description of Artificial Sequence: Synthetic oligonucleotide
guaauccuuuacaguacug

SEQ ID NO: 206223 - RNA, 19 nt, Artificial Sequence
  Description of Artificial Sequence: Synthetic oligonucleotide
guagguucauugccaugug

SEQ ID NO: 206224 - RNA, 19 nt, Artificial Sequence
  Description of Artificial Sequence: Synthetic oligonucleotide
guucauugccauguguaga

SEQ ID NO: 206225 - RNA, 19 nt, Artificial Sequence
  Description of Artificial Sequence: Synthetic oligonucleotide
cuuugcaacaagaacgguu

SEQ ID NO: 206226 - RNA, 19 nt, Artificial Sequence
  Description of Artificial Sequence: Synthetic oligonucleotide
caggugauauacaacauuu

SEQ ID NO: 206227 - RNA, 19 nt, Artificial Sequence
  Description of Artificial Sequence: Synthetic oligonucleotide
ucggaacauccucaaguuu

SEQ ID NO: 206228 - RNA, 19 nt, Artificial Sequence
  Description of Artificial Sequence: Synthetic oligonucleotide
auaaucucgcugagcagca

SEQ ID NO: 206229 - RNA, 19 nt, Artificial Sequence
  Description of Artificial Sequence: Synthetic oligonucleotide
uugcauccacauaucguuu

SEQ ID NO: 206230 - RNA, 19 nt, Artificial Sequence
  Description of Artificial Sequence: Synthetic oligonucleotide
cucucuauaaaccguaauu

SEQ ID NO: 206231 - RNA, 19 nt, Artificial Sequence
  Description of Artificial Sequence: Synthetic oligonucleotide
uaggaucguggaaaaucua

SEQ ID NO: 206232 - RNA, 19 nt, Artificial Sequence
  Description of Artificial Sequence: Synthetic oligonucleotide
uaaagaugcacgggccuua

SEQ ID NO: 206233 - RNA, 19 nt, Artificial Sequence
  Description of Artificial Sequence: Synthetic oligonucleotide
uuuugaccccaaucacuau

SEQ ID NO: 206234 - RNA, 19 nt, Artificial Sequence
  Description of Artificial Sequence: Synthetic oligonucleotide
uccgagccugcaguucucg

SEQ ID NO: 206235 - RNA, 19 nt, Artificial Sequence
  Description of Artificial Sequence: Synthetic oligonucleotide
ggucuucggcuucaauagg

SEQ ID NO: 206236 - RNA, 19 nt, Artificial Sequence
  Description of Artificial Sequence: Synthetic oligonucleotide
cauucccaagagagcuggg

SEQ ID NO: 206237 - RNA, 19 nt, Artificial Sequence
  Description of Artificial Sequence: Synthetic oligonucleotide
uucgugcuguucuccauuu

SEQ ID NO: 206238 - RNA, 19 nt, Artificial Sequence
  Description of Artificial Sequence: Synthetic oligonucleotide
acaguuugacgaaaacaau

SEQ ID NO: 206239 - RNA, 19 nt, Artificial Sequence
  Description of Artificial Sequence: Synthetic oligonucleotide
cuuaaagaugcacgggccu

SEQ ID NO: 206240 - RNA, 19 nt, Artificial Sequence
  Description of Artificial Sequence: Synthetic oligonucleotide
gagagcugacaauucauuu

SEQ ID NO: 206241 - RNA, 19 nt, Artificial Sequence
  Description of Artificial Sequence: Synthetic oligonucleotide
ucuaugcuucagguaaaua

SEQ ID NO: 206242 - RNA, 19 nt, Artificial Sequence
  Description of Artificial Sequence: Synthetic oligonucleotide
aaagaugcacgggccuuau

SEQ ID NO: 206243 - RNA, 19 nt, Artificial Sequence
  Description of Artificial Sequence: Synthetic oligonucleotide
ggcuccaauuuuguucugg

SEQ ID NO: 206244 - RNA, 19 nt, Artificial Sequence
  Description of Artificial Sequence: Synthetic oligonucleotide
uugccauguguagaguuuu

SEQ ID NO: 206245 - RNA, 19 nt, Artificial Sequence
  Description of Artificial Sequence: Synthetic oligonucleotide
cuguaacgaggcaaucgca

SEQ ID NO: 206246 - RNA, 19 nt, Artificial Sequence
  Description of Artificial Sequence: Synthetic oligonucleotide
uggcucgcaucaaccucag

SEQ ID NO: 206247 - RNA, 19 nt, Artificial Sequence
  Description of Artificial Sequence: Synthetic oligonucleotide
ucacuaucuuuucgagcuu

SEQ ID NO: 206248 - RNA, 19 nt, Artificial Sequence
  Description of Artificial Sequence: Synthetic oligonucleotide
guguaguuaugaguuuuga

SEQ ID NO: 206249 - RNA, 19 nt, Artificial Sequence
  Description of Artificial Sequence: Synthetic oligonucleotide
uugcgccuaauggaagaga

SEQ ID NO: 206250 - RNA, 19 nt, Artificial Sequence
  Description of Artificial Sequence: Synthetic oligonucleotide
gccaaguauaauugugcca

SEQ ID NO: 206251 - RNA, 19 nt, Artificial Sequence
  Description of Artificial Sequence: Synthetic oligonucleotide
ccgucugaggcuuuaguuc

SEQ ID NO: 206252 - RNA, 19 nt, Artificial Sequence
  Description of Artificial Sequence: Synthetic oligonucleotide
aggcugcuauuucagugaa

SEQ ID NO: 206253 - RNA, 19 nt, Artificial Sequence
  Description of Artificial Sequence: Synthetic oligonucleotide
ggauaugauccuucucgga

SEQ ID NO: 206254 - RNA, 19 nt, Artificial Sequence
  Description of Artificial Sequence: Synthetic oligonucleotide
aguugcaagcggcccugga

SEQ ID NO: 206255 - RNA, 19 nt, Artificial Sequence
  Description of Artificial Sequence: Synthetic oligonucleotide
caaguauauccuuucugau

SEQ ID NO: 206256 - RNA, 19 nt, Artificial Sequence
  Description of Artificial Sequence: Synthetic oligonucleotide
gcuuugauuaaaugauaua

SEQ ID NO: 206257 - RNA, 19 nt, Artificial Sequence
  Description of Artificial Sequence: Synthetic oligonucleotide
ggagaucaaucaaacgaga

SEQ ID NO: 206258 - RNA, 19 nt, Artificial Sequence
  Description of Artificial Sequence: Synthetic oligonucleotide
caguggaacuacccagguc

SEQ ID NO: 206259 - RNA, 19 nt, Artificial Sequence
  Description of Artificial Sequence: Synthetic oligonucleotide
gcauuaucuuacuaucugu

SEQ ID NO: 206260 - RNA, 19 nt, Artificial Sequence
  Description of Artificial Sequence: Synthetic oligonucleotide
aaaugucgaagggcaucau

SEQ ID NO: 206261 - RNA, 19 nt, Artificial Sequence
  Description of Artificial Sequence: Synthetic oligonucleotide
cuuuggucuagaaggacuu

SEQ ID NO: 206262 - RNA, 19 nt, Artificial Sequence
  Description of Artificial Sequence: Synthetic oligonucleotide
cgagccugcuguaacgagg

SEQ ID NO: 206263 - RNA, 19 nt, Artificial Sequence
  Description of Artificial Sequence: Synthetic oligonucleotide
guaagagcucagccagguc

SEQ ID NO: 206264 - RNA, 19 nt, Artificial Sequence
  Description of Artificial Sequence: Synthetic oligonucleotide
uacugauauccuggcucca

SEQ ID NO: 206265 - RNA, 19 nt, Artificial Sequence
  Description of Artificial Sequence: Synthetic oligonucleotide
cgcgcuucaauauccgagc

SEQ ID NO: 206266 - RNA, 19 nt, Artificial Sequence
  Description of Artificial Sequence: Synthetic oligonucleotide
acgaggcaaucgcaucacu

SEQ ID NO: 206267 - RNA, 19 nt, Artificial Sequence
  Description of Artificial Sequence: Synthetic oligonucleotide
ggcaccguuuuaguaauuc

SEQ ID NO: 206268 - RNA, 19 nt, Artificial Sequence
  Description of Artificial Sequence: Synthetic oligonucleotide
aggugauauacaacauuuu

SEQ ID NO: 206269 - RNA, 19 nt, Artificial Sequence
  Description of Artificial Sequence: Synthetic oligonucleotide
ugggaacgcccaucuucca

SEQ ID NO: 206270 - RNA, 19 nt, Artificial Sequence
  Description of Artificial Sequence: Synthetic oligonucleotide
gugauugccuuuguguagu

SEQ ID NO: 206271 - RNA, 19 nt, Artificial Sequence
  Description of Artificial Sequence: Synthetic oligonucleotide
ggccucuauaauucuucac

SEQ ID NO: 206272 - RNA, 19 nt, Artificial Sequence
  Description of Artificial Sequence: Synthetic oligonucleotide
gcggugaacuuccaccaac

SEQ ID NO: 206273 - RNA, 19 nt, Artificial Sequence
  Description of Artificial Sequence: Synthetic oligonucleotide
caagaacgguuauggcaca

SEQ ID NO: 206274 - RNA, 19 nt, Artificial Sequence
  Description of Artificial Sequence: Synthetic oligonucleotide
caguucugugcuuuugacu

SEQ ID NO: 206275 - RNA, 19 nt, Artificial Sequence
  Description of Artificial Sequence: Synthetic oligonucleotide
cauaucguuuugccuuuaa

SEQ ID NO: 206276 - RNA, 19 nt, Artificial Sequence
  Description of Artificial Sequence: Synthetic oligonucleotide
ggccauuaagcagcaauuc

SEQ ID NO: 206277 - RNA, 19 nt, Artificial Sequence
  Description of Artificial Sequence: Synthetic oligonucleotide
gauaaacgauggcucgcau

SEQ ID NO: 206278 - RNA, 19 nt, Artificial Sequence
  Description of Artificial Sequence: Synthetic oligonucleotide
gcucgcaucaaccucaguu

SEQ ID NO: 206279 - RNA, 19 nt, Artificial Sequence
  Description of Artificial Sequence: Synthetic oligonucleotide
gaccccaaucacuaucuuu

SEQ ID NO: 206280 - RNA, 19 nt, Artificial Sequence
  Description of Artificial Sequence: Synthetic oligonucleotide
gaguugcaagcggcccugg

SEQ ID NO: 206281 - RNA, 19 nt, Artificial Sequence
  Description of Artificial Sequence: Synthetic oligonucleotide
ugauugccuuuguguaguu

SEQ ID NO: 206282 - RNA, 19 nt, Artificial Sequence
  Description of Artificial Sequence: Synthetic oligonucleotide
ucgugcuguucuccauuua

SEQ ID NO: 206283 - RNA, 19 nt, Artificial Sequence
  Description of Artificial Sequence: Synthetic oligonucleotide
gauugccuuuguguaguua

SEQ ID NO: 206284 - RNA, 19 nt, Artificial Sequence
  Description of Artificial Sequence: Synthetic oligonucleotide
cuucaagaaccuggugaca

SEQ ID NO: 206285 - RNA, 19 nt, Artificial Sequence
  Description of Artificial Sequence: Synthetic oligonucleotide
cucggaacauccucaaguu

SEQ ID NO: 206286 - RNA, 19 nt, Artificial Sequence
  Description of Artificial Sequence: Synthetic oligonucleotide
gggacugggcauucuuuca

SEQ ID NO: 206287 - RNA, 19 nt, Artificial Sequence
  Description of Artificial Sequence: Synthetic oligonucleotide
cuuuuggcgucuguuucaa

SEQ ID NO: 206288 - RNA, 19 nt, Artificial Sequence
  Description of Artificial Sequence: Synthetic oligonucleotide
cauauaagcuguugccauu

SEQ ID NO: 206289 - RNA, 19 nt, Artificial Sequence
  Description of Artificial Sequence: Synthetic oligonucleotide
acgggccuuaucaaguaua

SEQ ID NO: 206290 - RNA, 19 nt, Artificial Sequence
  Description of Artificial Sequence: Synthetic oligonucleotide
cucucacauuaaaauuaua

SEQ ID NO: 206291 - RNA, 19 nt, Artificial Sequence
  Description of Artificial Sequence: Synthetic oligonucleotide
ccucaaguuucccacaucu

SEQ ID NO: 206292 - RNA, 19 nt, Artificial Sequence
  Description of Artificial Sequence: Synthetic oligonucleotide
acuugggaacgcccaucuu

SEQ ID NO: 206293 - RNA, 19 nt, Artificial Sequence
  Description of Artificial Sequence: Synthetic oligonucleotide
cucauacaacuucagucuu

SEQ ID NO: 206294 - RNA, 19 nt, Artificial Sequence
  Description of Artificial Sequence: Synthetic oligonucleotide
cagguaaauaucugccauu

SEQ ID NO: 206295 - RNA, 19 nt, Artificial Sequence
  Description of Artificial Sequence: Synthetic oligonucleotide
aucuggauucaagcagauu

SEQ ID NO: 206296 - RNA, 19 nt, Artificial Sequence
  Description of Artificial Sequence: Synthetic oligonucleotide
auaggccacuauggcuucu

SEQ ID NO: 206297 - RNA, 19 nt, Artificial Sequence
  Description of Artificial Sequence: Synthetic oligonucleotide
cugcuauuucagugaaggu

SEQ ID NO: 206298 - RNA, 19 nt, Artificial Sequence
  Description of Artificial Sequence: Synthetic oligonucleotide
caagcggcccuggaccguc

SEQ ID NO: 206299 - RNA, 19 nt, Artificial Sequence
  Description of Artificial Sequence: Synthetic oligonucleotide
uggaccgucugaggcuuua

SEQ ID NO: 206300 - RNA, 19 nt, Artificial Sequence
  Description of Artificial Sequence: Synthetic oligonucleotide
cgccuaauggaagagagaa

SEQ ID NO: 206301 - RNA, 19 nt, Artificial Sequence
  Description of Artificial Sequence: Synthetic oligonucleotide
gaacuacccaggucuccau

SEQ ID NO: 206302 - RNA, 19 nt, Artificial Sequence
  Description of Artificial Sequence: Synthetic oligonucleotide
cacauaucguuuugccuuu

SEQ ID NO: 206303 - RNA, 19 nt, Artificial Sequence
  Description of Artificial Sequence: Synthetic oligonucleotide
gcacaaauuucagcugcga

SEQ ID NO: 206304 - RNA, 19 nt, Artificial Sequence
  Description of Artificial Sequence: Synthetic oligonucleotide
gguuugcguucuaaaagcu

SEQ ID NO: 206305 - RNA, 19 nt, Artificial Sequence
  Description of Artificial Sequence: Synthetic oligonucleotide
agcggcccuggaccgucug

SEQ ID NO: 206306 - RNA, 19 nt, Artificial Sequence
  Description of Artificial Sequence: Synthetic oligonucleotide
gcaccguuuuaguaauucu

SEQ ID NO: 206307 - RNA, 19 nt, Artificial Sequence
  Description of Artificial Sequence: Synthetic oligonucleotide
caagaucauauaagcuguu

SEQ ID NO: 206308 - RNA, 19 nt, Artificial Sequence
  Description of Artificial Sequence: Synthetic oligonucleotide
cuucggcuucaauaggauu

SEQ ID NO: 206309 - RNA, 19 nt, Artificial Sequence
  Description of Artificial Sequence: Synthetic oligonucleotide
caaucgcaucacugggucu

SEQ ID NO: 206310 - RNA, 19 nt, Artificial Sequence
  Description of Artificial Sequence: Synthetic oligonucleotide
caaaugccacagucagugu

SEQ ID NO: 206311 - RNA, 19 nt, Artificial Sequence
  Description of Artificial Sequence: Synthetic oligonucleotide
acauaucguuuugccuuua

SEQ ID NO: 206312 - RNA, 19 nt, Artificial Sequence
  Description of Artificial Sequence: Synthetic oligonucleotide
gccauguguagaguuuuaa

SEQ ID NO: 206313 - RNA, 19 nt, Artificial Sequence
  Description of Artificial Sequence: Synthetic oligonucleotide
ccauaauguaucccaugua

SEQ ID NO: 206314 - RNA, 19 nt, Artificial Sequence
  Description of Artificial Sequence: Synthetic oligonucleotide
ccaugcugucuccugcuca

SEQ ID NO: 206315 - RNA, 19 nt, Artificial Sequence
  Description of Artificial Sequence: Synthetic oligonucleotide
ggaccgucugaggcuuuag

SEQ ID NO: 206316 - RNA, 19 nt, Artificial Sequence
  Description of Artificial Sequence: Synthetic oligonucleotide
ggccucucuauaaaccgua

SEQ ID NO: 206317 - RNA, 19 nt, Artificial Sequence
  Description of Artificial Sequence: Synthetic oligonucleotide
cacuaucuuuucgagcuuu

SEQ ID NO: 206318 - RNA, 19 nt, Artificial Sequence
  Description of Artificial Sequence: Synthetic oligonucleotide
gggccuuaucaaguauauc

SEQ ID NO: 206319 - RNA, 19 nt, Artificial Sequence
  Description of Artificial Sequence: Synthetic oligonucleotide
gcacgggccuuaucaagua

SEQ ID NO: 206320 - RNA, 19 nt, Artificial Sequence
  Description of Artificial Sequence: Synthetic oligonucleotide
gggaacgcccaucuuccau

SEQ ID NO: 206321 - RNA, 19 nt, Artificial Sequence
  Description of Artificial Sequence: Synthetic oligonucleotide
aagcggcccuggaccgucu

SEQ ID NO: 206322 - RNA, 19 nt, Artificial Sequence
  Description of Artificial Sequence: Synthetic oligonucleotide
guuauggcacaggcaccgu

SEQ ID NO: 206323 - RNA, 19 nt, Artificial Sequence
  Description of Artificial Sequence: Synthetic oligonucleotide
gcgccuaauggaagagaga

SEQ ID NO: 206324 - RNA, 19 nt, Artificial Sequence
  Description of Artificial Sequence: Synthetic oligonucleotide
gaacugcaucuggcugcuc

SEQ ID NO: 206325 - RNA, 19 nt, Artificial Sequence
  Description of Artificial Sequence: Synthetic oligonucleotide
ccauuuaagcggugaacuu

SEQ ID NO: 206326 - RNA, 19 nt, Artificial Sequence
  Description of Artificial Sequence: Synthetic oligonucleotide
gccucucuauaaaccguaa

SEQ ID NO: 206327 - RNA, 19 nt, Artificial Sequence
  Description of Artificial Sequence: Synthetic oligonucleotide
cacgggccuuaucaaguau

SEQ ID NO: 206328 - RNA, 19 nt, Artificial Sequence
  Description of Artificial Sequence: Synthetic oligonucleotide
gggccucucuauaaaccgu

SEQ ID NO: 206329 - RNA, 19 nt, Artificial Sequence
  Description of Artificial Sequence: Synthetic oligonucleotide
ccucucuauaaaccguaau

SEQ ID NO: 206330 - RNA, 19 nt, Artificial Sequence
  Description of Artificial Sequence: Synthetic oligonucleotide
gugaggcaucaaggucuuc

SEQ ID NO: 206331 - RNA, 19 nt, Artificial Sequence
  Description of Artificial Sequence: Synthetic oligonucleotide
aggcaccguuuuaguaauu

SEQ ID NO: 206332 - RNA, 19 nt, Artificial Sequence
  Description of Artificial Sequence: Synthetic oligonucleotide
cggugaacuuccaccaacu

SEQ ID NO: 206333 - RNA, 19 nt, Artificial Sequence
  Description of Artificial Sequence: Synthetic oligonucleotide
cgauggcucgcaucaaccu

SEQ ID NO: 206334 - RNA, 19 nt, Artificial Sequence
  Description of Artificial Sequence: Synthetic oligonucleotide
ccgagccugcaguucucga

SEQ ID NO: 206335 - RNA, 19 nt, Artificial Sequence
  Description of Artificial Sequence: Synthetic oligonucleotide
cgcuucaauauccgagccu

SEQ ID NO: 206336 - RNA, 19 nt, Artificial Sequence
  Description of Artificial Sequence: Synthetic oligonucleotide
gcgucuguuucaagaucau

SEQ ID NO: 206337 - RNA, 19 nt, Artificial Sequence
  Description of Artificial Sequence: Synthetic oligonucleotide
gcaauccgcuucagcuggu

SEQ ID NO: 206338 - RNA, 19 nt, Artificial Sequence
  Description of Artificial Sequence: Synthetic oligonucleotide
ggcucgcaucaaccucagu

SEQ ID NO: 206339 - RNA, 19 nt, Artificial Sequence
  Description of Artificial Sequence: Synthetic oligonucleotide
cuggaccgucugaggcuuu

SEQ ID NO: 206340 - RNA, 19 nt, Artificial Sequence
  Description of Artificial Sequence: Synthetic oligonucleotide
gcaagcggcccuggaccgu

SEQ ID NO: 206341 - RNA, 19 nt, Artificial Sequence
  Description of Artificial Sequence: Synthetic oligonucleotide
gcccggggacugggcauuc

SEQ ID NO: 206342 - RNA, 19 nt, Artificial Sequence
  Description of Artificial Sequence: Synthetic oligonucleotide
cccggggacugggcauucu

SEQ ID NO: 206343 - RNA, 19 nt, Artificial Sequence
  Description of Artificial Sequence: Synthetic oligonucleotide
auuauagaaccacagaggc

SEQ ID NO: 206344 - RNA, 19 nt, Artificial Sequence
  Description of Artificial Sequence: Synthetic oligonucleotide
aguuauaagaauuuuacug

SEQ ID NO: 206345 - RNA, 19 nt, Artificial Sequence
  Description of Artificial Sequence: Synthetic oligonucleotide
ucuauuagaaaucuagucc

SEQ ID NO: 206346 - RNA, 19 nt, Artificial Sequence
  Description of Artificial Sequence: Synthetic oligonucleotide
aaaaguauaucccaguacu

SEQ ID NO: 206347 - RNA, 19 nt, Artificial Sequence
  Description of Artificial Sequence: Synthetic oligonucleotide
acauuuuaaaccuaauugg

SEQ ID NO: 206348 - RNA, 19 nt, Artificial Sequence
  Description of Artificial Sequence: Synthetic oligonucleotide
cugaauaugagguaguugg

SEQ ID NO: 206349 - RNA, 19 nt, Artificial Sequence
  Description of Artificial Sequence: Synthetic oligonucleotide
ucaaagauaggcaauaaga

SEQ ID NO: 206350 - RNA, 19 nt, Artificial Sequence
  Description of Artificial Sequence: Synthetic oligonucleotide
uuaauaugagcuuucuugg

SEQ ID NO: 206351 - RNA, 19 nt, Artificial Sequence
  Description of Artificial Sequence: Synthetic oligonucleotide
uaagguuugaaucauaaaa

SEQ ID NO: 206352 - RNA, 19 nt, Artificial Sequence
  Description of Artificial Sequence: Synthetic oligonucleotide
auugccauuaaacauggcg

SEQ ID NO: 206353 - RNA, 19 nt, Artificial Sequence
  Description of Artificial Sequence: Synthetic oligonucleotide
uuuucgaugacauuggaga

SEQ ID NO: 206354 - RNA, 19 nt, Artificial Sequence
  Description of Artificial Sequence: Synthetic oligonucleotide
auaaaugaagcgcagaaug

SEQ ID NO: 206355 - RNA, 19 nt, Artificial Sequence
  Description of Artificial Sequence: Synthetic oligonucleotide
guauuauagaaccacagag

SEQ ID NO: 206356 - RNA, 19 nt, Artificial Sequence
  Description of Artificial Sequence: Synthetic oligonucleotide
agcgacguauuauagaacc

SEQ ID NO: 206357 - RNA, 19 nt, Artificial Sequence
  Description of Artificial Sequence: Synthetic oligonucleotide
aaccuaauuggcuauauca

SEQ ID NO: 206358 - RNA, 19 nt, Artificial Sequence
  Description of Artificial Sequence: Synthetic oligonucleotide
uucacgaugacucgcaggg

SEQ ID NO: 206359 - RNA, 19 nt, Artificial Sequence
  Description of Artificial Sequence: Synthetic oligonucleotide
aauaagaagcuguauggug

SEQ ID NO: 206360 - RNA, 19 nt, Artificial Sequence
  Description of Artificial Sequence: Synthetic oligonucleotide
uugccauuaaacauggcgg

SEQ ID NO: 206361 - RNA, 19 nt, Artificial Sequence
  Description of Artificial Sequence: Synthetic oligonucleotide
aauacauacauacccuuug

SEQ ID NO: 206362 - RNA, 19 nt, Artificial Sequence
  Description of Artificial Sequence: Synthetic oligonucleotide
uauuucgaagacaacauca

SEQ ID NO: 206363 - RNA, 19 nt, Artificial Sequence
  Description of Artificial Sequence: Synthetic oligonucleotide
aagaaugcacaauaggaug

SEQ ID NO: 206364 - RNA, 19 nt, Artificial Sequence
  Description of Artificial Sequence: Synthetic oligonucleotide
aacgccauaaacugggauc

SEQ ID NO: 206365 - RNA, 19 nt, Artificial Sequence
  Description of Artificial Sequence: Synthetic oligonucleotide
uuuggacugaauaugaggu

SEQ ID NO: 206366 - RNA, 19 nt, Artificial Sequence
  Description of Artificial Sequence: Synthetic oligonucleotide
gcuauauuaaaauacauac

SEQ ID NO: 206367 - RNA, 19 nt, Artificial Sequence
  Description of Artificial Sequence: Synthetic oligonucleotide
uuagaaaaguauaucccag

SEQ ID NO: 206368 - RNA, 19 nt, Artificial Sequence
  Description of Artificial Sequence: Synthetic oligonucleotide
uucgaagacaacaucagca

SEQ ID NO: 206369 - RNA, 19 nt, Artificial Sequence
  Description of Artificial Sequence: Synthetic oligonucleotide
uggaguuccagauauguag

SEQ ID NO: 206370 - RNA, 19 nt, Artificial Sequence
  Description of Artificial Sequence: Synthetic oligonucleotide
cugugauuagcacagaggg

SEQ ID NO: 206371 - RNA, 19 nt, Artificial Sequence
  Description of Artificial Sequence: Synthetic oligonucleotide
aucacuggaaauuagaaaa

SEQ ID NO: 206372 - RNA, 19 nt, Artificial Sequence
  Description of Artificial Sequence: Synthetic oligonucleotide
aaugcuaagccaccaaaug

SEQ ID NO: 206373 - RNA, 19 nt, Artificial Sequence
  Description of Artificial Sequence: Synthetic oligonucleotide
auauacuuccuauacuccg

SEQ ID NO: 206374 - RNA, 19 nt, Artificial Sequence
  Description of Artificial Sequence: Synthetic oligonucleotide
gacaauugaucuuuccugg

SEQ ID NO: 206375 - RNA, 19 nt, Artificial Sequence
  Description of Artificial Sequence: Synthetic oligonucleotide
aaaguguauguauacaaaa

SEQ ID NO: 206376 - RNA, 19 nt, Artificial Sequence
  Description of Artificial Sequence: Synthetic oligonucleotide
uaauugccauuaaacaugg

SEQ ID NO: 206377 - RNA, 19 nt, Artificial Sequence
  Description of Artificial Sequence: Synthetic oligonucleotide
auauaaauucaggucaggc

SEQ ID NO: 206378 - RNA, 19 nt, Artificial Sequence
  Description of Artificial Sequence: Synthetic oligonucleotide
aaagcaccugaauaaauga

SEQ ID NO: 206379 - RNA, 19 nt, Artificial Sequence
  Description of Artificial Sequence: Synthetic oligonucleotide
gaugcuucagcuuucaaga

SEQ ID NO: 206380 - RNA, 19 nt, Artificial Sequence
  Description of Artificial Sequence: Synthetic oligonucleotide
uuggaaacgccauaaacug

SEQ ID NO: 206381 - RNA, 19 nt, Artificial Sequence
  Description of Artificial Sequence: Synthetic oligonucleotide
guaacuguguauuauaguc

SEQ ID NO: 206382 - RNA, 19 nt, Artificial Sequence
  Description of Artificial Sequence: Synthetic oligonucleotide
agcacaauuaauaugagcu

SEQ ID NO: 206383 - RNA, 19 nt, Artificial Sequence
  Description of Artificial Sequence: Synthetic oligonucleotide
uuuuacuggaacccagagg

SEQ ID NO: 206384 - RNA, 19 nt, Artificial Sequence
  Description of Artificial Sequence: Synthetic oligonucleotide
ucagaauggugaaacuugg

SEQ ID NO: 206385 - RNA, 19 nt, Artificial Sequence
  Description of Artificial Sequence: Synthetic oligonucleotide
uacucagucacuccuauca

SEQ ID NO: 206386 - RNA, 19 nt, Artificial Sequence
  Description of Artificial Sequence: Synthetic oligonucleotide
aauugaucuuuccuggugu

SEQ ID NO: 206387 - RNA, 19 nt, Artificial Sequence
  Description of Artificial Sequence: Synthetic oligonucleotide
acauguaacaagguaauuc

SEQ ID NO: 206388 - RNA, 19 nt, Artificial Sequence
  Description of Artificial Sequence: Synthetic oligonucleotide
uugcaaaggaacuucuagg

SEQ ID NO: 206389 - RNA, 19 nt, Artificial Sequence
  Description of Artificial Sequence: Synthetic oligonucleotide
aggaugaauguuaaaauac

SEQ ID NO: 206390 - RNA, 19 nt, Artificial Sequence
  Description of Artificial Sequence: Synthetic oligonucleotide
uaccgauuuaguuauaaga

SEQ ID NO: 206391 - RNA, 19 nt, Artificial Sequence
  Description of Artificial Sequence: Synthetic oligonucleotide
uucaguaugaagcccaagu

SEQ ID NO: 206392 - RNA, 19 nt, Artificial Sequence
  Description of Artificial Sequence: Synthetic oligonucleotide
uuauaagaauuuuacugga

SEQ ID NO: 206393 - RNA, 19 nt, Artificial Sequence
  Description of Artificial Sequence: Synthetic oligonucleotide
cagaauguaggacaaacag

SEQ ID NO: 206394 - RNA, 19 nt, Artificial Sequence
  Description of Artificial Sequence: Synthetic oligonucleotide
aaugaagcagccaaguuga

SEQ ID NO: 206395 - RNA, 19 nt, Artificial Sequence
  Description of Artificial Sequence: Synthetic oligonucleotide
uuuuaaaccuaauuggcua

SEQ ID NO: 206396 - RNA, 19 nt, Artificial Sequence
  Description of Artificial Sequence: Synthetic oligonucleotide
ugggugguaaaacaccacg

SEQ ID NO: 206397 - RNA, 19 nt, Artificial Sequence
  Description of Artificial Sequence: Synthetic oligonucleotide
cuaaacagcggcauuuccg

SEQ ID NO: 206398 - RNA, 19 nt, Artificial Sequence
  Description of Artificial Sequence: Synthetic oligonucleotide
auaaauucaggucaggcua

SEQ ID NO: 206399 - RNA, 19 nt, Artificial Sequence
  Description of Artificial Sequence: Synthetic oligonucleotide
ugaauguuaaaauacuauu

SEQ ID NO: 206400 - RNA, 19 nt, Artificial Sequence
  Description of Artificial Sequence: Synthetic oligonucleotide
ccaguauucaguaugaagc

SEQ ID NO: 206401 - RNA, 19 nt, Artificial Sequence
  Description of Artificial Sequence: Synthetic oligonucleotide
agucaggcuacucagucac

SEQ ID NO: 206402 - RNA, 19 nt, Artificial Sequence
  Description of Artificial Sequence: Synthetic oligonucleotide
aguugaggcggucuaauuc

SEQ ID NO: 206403 - RNA, 19 nt, Artificial Sequence
  Description of Artificial Sequence: Synthetic oligonucleotide
uaaaaucacuggaaauuag

SEQ ID NO: 206404 - RNA, 19 nt, Artificial Sequence
  Description of Artificial Sequence: Synthetic oligonucleotide
ucagguuacauguuugaug

SEQ ID NO: 206405 - RNA, 19 nt, Artificial Sequence
  Description of Artificial Sequence: Synthetic oligonucleotide
uguauuucgaagacaacau

SEQ ID NO: 206406 - RNA, 19 nt, Artificial Sequence
  Description of Artificial Sequence: Synthetic oligonucleotide
agucuuacauucuagggga

SEQ ID NO: 206407 - RNA, 19 nt, Artificial Sequence
  Description of Artificial Sequence: Synthetic oligonucleotide
ugguaaaacaccacgucca

SEQ ID NO: 206408 - RNA, 19 nt, Artificial Sequence
  Description of Artificial Sequence: Synthetic oligonucleotide
caucgugccaccaggaugg

SEQ ID NO: 206409 - RNA, 19 nt, Artificial Sequence
  Description of Artificial Sequence: Synthetic oligonucleotide
uccaguauucaguaugaag

SEQ ID NO: 206410 - RNA, 19 nt, Artificial Sequence
  Description of Artificial Sequence: Synthetic oligonucleotide
uucacaucgugccaccagg

SEQ ID NO: 206411 - RNA, 19 nt, Artificial Sequence
  Description of Artificial Sequence: Synthetic oligonucleotide
guaucaaaaggcuaccaug

SEQ ID NO: 206412 - RNA, 19 nt, Artificial Sequence
  Description of Artificial Sequence: Synthetic oligonucleotide
aaucacuggaaauuagaaa

SEQ ID NO: 206413 - RNA, 19 nt, Artificial Sequence
  Description of Artificial Sequence: Synthetic oligonucleotide
uaccaugugaucuaaaauu

SEQ ID NO: 206414 - RNA, 19 nt, Artificial Sequence
  Description of Artificial Sequence: Synthetic oligonucleotide
auagucaggcuacucaguc

SEQ ID NO: 206415 - RNA, 19 nt, Artificial Sequence
  Description of Artificial Sequence: Synthetic oligonucleotide
gaaaaugccagcugggaca

SEQ ID NO: 206416 - RNA, 19 nt, Artificial Sequence
  Description of Artificial Sequence: Synthetic oligonucleotide
aaaccuaauuggcuauauc

SEQ ID NO: 206417 - RNA, 19 nt, Artificial Sequence
  Description of Artificial Sequence: Synthetic oligonucleotide
uauacuuccuauacuccgc

SEQ ID NO: 206418 - RNA, 19 nt, Artificial Sequence
  Description of Artificial Sequence: Synthetic oligonucleotide
ugagcgacguauuauagaa

SEQ ID NO: 206419 - RNA, 19 nt, Artificial Sequence
  Description of Artificial Sequence: Synthetic oligonucleotide
ucuagguauugcuauauuc

SEQ ID NO: 206420 - RNA, 19 nt, Artificial Sequence
  Description of Artificial Sequence: Synthetic oligonucleotide
caagcaucgguuuauuaag

SEQ ID NO: 206421 - RNA, 19 nt, Artificial Sequence
  Description of Artificial Sequence: Synthetic oligonucleotide
ugaauuaaacagaugcuuu

SEQ ID NO: 206422 - RNA, 19 nt, Artificial Sequence
  Description of Artificial Sequence: Synthetic oligonucleotide
cuguguauuauagucaggc

SEQ ID NO: 206423 - RNA, 19 nt, Artificial Sequence
  Description of Artificial Sequence: Synthetic oligonucleotide
uaugcauauuaaaaucacu

SEQ ID NO: 206424 - RNA, 19 nt, Artificial Sequence
  Description of Artificial Sequence: Synthetic oligonucleotide
cucuauuagaaaucuaguc

SEQ ID NO: 206425 - RNA, 19 nt, Artificial Sequence
  Description of Artificial Sequence: Synthetic oligonucleotide
acuaaacagcggcauuucc

SEQ ID NO: 206426 - RNA, 19 nt, Artificial Sequence
  Description of Artificial Sequence: Synthetic oligonucleotide
aguauucaguaugaagccc

SEQ ID NO: 206427 - RNA, 19 nt, Artificial Sequence
  Description of Artificial Sequence: Synthetic oligonucleotide
ugagcuagugucccaaggc

SEQ ID NO: 206428 - RNA, 19 nt, Artificial Sequence
  Description of Artificial Sequence: Synthetic oligonucleotide
auacuuccuauacuccgcc

SEQ ID NO: 206429 - RNA, 19 nt, Artificial Sequence
  Description of Artificial Sequence: Synthetic oligonucleotide
ugugccaauaguugaauaa

SEQ ID NO: 206430 - RNA, 19 nt, Artificial Sequence
  Description of Artificial Sequence: Synthetic oligonucleotide
uaaacagcggcauuuccga

SEQ ID NO: 206431 - RNA, 19 nt, Artificial Sequence
  Description of Artificial Sequence: Synthetic oligonucleotide
aguugaaaaguuuggcucu

SEQ ID NO: 206432 - RNA, 19 nt, Artificial Sequence
  Description of Artificial Sequence: Synthetic oligonucleotide
ucuaguccccuguaguagg

SEQ ID NO: 206433 - RNA, 19 nt, Artificial Sequence
  Description of Artificial Sequence: Synthetic oligonucleotide
aacauggcggcaucacuuc

SEQ ID NO: 206434 - RNA, 19 nt, Artificial Sequence
  Description of Artificial Sequence: Synthetic oligonucleotide
aguuggagaaaauaugcau

SEQ ID NO: 206435 - RNA, 19 nt, Artificial Sequence
  Description of Artificial Sequence: Synthetic oligonucleotide
agcacagaucaaaagacac

SEQ ID NO: 206436 - RNA, 19 nt, Artificial Sequence
  Description of Artificial Sequence: Synthetic oligonucleotide
uucaggucaggcuauauua

SEQ ID NO: 206437 - RNA, 19 nt, Artificial Sequence
  Description of Artificial Sequence: Synthetic oligonucleotide
uauaagaauuuuacuggaa

SEQ ID NO: 206438 - RNA, 19 nt, Artificial Sequence
  Description of Artificial Sequence: Synthetic oligonucleotide
uagguauugcuauauucug

SEQ ID NO: 206439 - RNA, 19 nt, Artificial Sequence
  Description of Artificial Sequence: Synthetic oligonucleotide
uguguauaaguauucuaaa

SEQ ID NO: 206440 - RNA, 19 nt, Artificial Sequence
  Description of Artificial Sequence: Synthetic oligonucleotide
guugaggcggucuaauucc

SEQ ID NO: 206441 - RNA, 19 nt, Artificial Sequence
  Description of Artificial Sequence: Synthetic oligonucleotide
cuugcaauuccucagacaa

SEQ ID NO: 206442 - RNA, 19 nt, Artificial Sequence
  Description of Artificial Sequence: Synthetic oligonucleotide
gugguacuaacacagcucc

SEQ ID NO: 206443 - RNA, 19 nt, Artificial Sequence
  Description of Artificial Sequence: Synthetic oligonucleotide
caguauucaguaugaagcc

SEQ ID NO: 206444 - RNA, 19 nt, Artificial Sequence
  Description of Artificial Sequence: Synthetic oligonucleotide
uuagaaaucuaguccccug

SEQ ID NO: 206445 - RNA, 19 nt, Artificial Sequence
  Description of Artificial Sequence: Synthetic oligonucleotide
agcauauugcuucugagua

SEQ ID NO: 206446 - RNA, 19 nt, Artificial Sequence
  Description of Artificial Sequence: Synthetic oligonucleotide
aauaccauaccgauuuagu

SEQ ID NO: 206447 - RNA, 19 nt, Artificial Sequence
  Description of Artificial Sequence: Synthetic oligonucleotide
gugguaaaacaccacgucc

SEQ ID NO: 206448 - RNA, 19 nt, Artificial Sequence
  Description of Artificial Sequence: Synthetic oligonucleotide
uugaauuaaacagaugcuu

SEQ ID NO: 206449 - RNA, 19 nt, Artificial Sequence
  Description of Artificial Sequence: Synthetic oligonucleotide
ucacaugacuaaacagcgg

SEQ ID NO: 206450 - RNA, 19 nt, Artificial Sequence
  Description of Artificial Sequence: Synthetic oligonucleotide
uuauuuugacaguacuggu

SEQ ID NO: 206451 - RNA, 19 nt, Artificial Sequence
  Description of Artificial Sequence: Synthetic oligonucleotide
ugugguacuaacacagcuc

SEQ ID NO: 206452 - RNA, 19 nt, Artificial Sequence
  Description of Artificial Sequence: Synthetic oligonucleotide
cagcauacaaagaaugcac

SEQ ID NO: 206453 - RNA, 19 nt, Artificial Sequence
  Description of Artificial Sequence: Synthetic oligonucleotide
aguaugaagcccaaguaug

SEQ ID NO: 206454 - RNA, 19 nt, Artificial Sequence
  Description of Artificial Sequence: Synthetic oligonucleotide
ucuagcuaaaagaauucuu

SEQ ID NO: 206455 - RNA, 19 nt, Artificial Sequence
  Description of Artificial Sequence: Synthetic oligonucleotide
ucaguguaguguuauuugu

SEQ ID NO: 206456 - RNA, 19 nt, Artificial Sequence
  Description of Artificial Sequence: Synthetic oligonucleotide
acuuccuauacuccgccag

SEQ ID NO: 206457 - RNA, 19 nt, Artificial Sequence
  Description of Artificial Sequence: Synthetic oligonucleotide
uagaaaucuaguccccugu

SEQ ID NO: 206458 - RNA, 19 nt, Artificial Sequence
  Description of Artificial Sequence: Synthetic oligonucleotide
cugugauugucuuuguaac

SEQ ID NO: 206459 - RNA, 19 nt, Artificial Sequence
  Description of Artificial Sequence: Synthetic oligonucleotide
cagagugguagugugaugc

SEQ ID NO: 206460 - RNA, 19 nt, Artificial Sequence
  Description of Artificial Sequence: Synthetic oligonucleotide
acgaugcuaacacuaaaca

SEQ ID NO: 206461 - RNA, 19 nt, Artificial Sequence
  Description of Artificial Sequence: Synthetic oligonucleotide
agauauguagcuccaaguu

SEQ ID NO: 206462 - RNA, 19 nt, Artificial Sequence
  Description of Artificial Sequence: Synthetic oligonucleotide
cauguaauccuaacacuac

SEQ ID NO: 206463 - RNA, 19 nt, Artificial Sequence
  Description of Artificial Sequence: Synthetic oligonucleotide
auaagaagcuguaugguga

SEQ ID NO: 206464 - RNA, 19 nt, Artificial Sequence
  Description of Artificial Sequence: Synthetic oligonucleotide
ugugauugucuuuguaacu

SEQ ID NO: 206465 - RNA, 19 nt, Artificial Sequence
  Description of Artificial Sequence: Synthetic oligonucleotide
accauaccgauuuaguuau

SEQ ID NO: 206466 - RNA, 19 nt, Artificial Sequence
  Description of Artificial Sequence: Synthetic oligonucleotide
ucaguaugaagcccaagua

SEQ ID NO: 206467 - RNA, 19 nt, Artificial Sequence
  Description of Artificial Sequence: Synthetic oligonucleotide
aauuuccuaaaaguuugga

SEQ ID NO: 206468 - RNA, 19 nt, Artificial Sequence
  Description of Artificial Sequence: Synthetic oligonucleotide
aguaucaaaaggcuaccau

SEQ ID NO: 206469 - RNA, 19 nt, Artificial Sequence
  Description of Artificial Sequence: Synthetic oligonucleotide
agagguuacccauucuuca

SEQ ID NO: 206470 - RNA, 19 nt, Artificial Sequence
  Description of Artificial Sequence: Synthetic oligonucleotide
aaccuagaggagaagccac

SEQ ID NO: 206471 - RNA, 19 nt, Artificial Sequence
  Description of Artificial Sequence: Synthetic oligonucleotide
agaacucuuaagcuuuugu

SEQ ID NO: 206472 - RNA, 19 nt, Artificial Sequence
  Description of Artificial Sequence: Synthetic oligonucleotide
caugugaucuaaaauugca

SEQ ID NO: 206473 - RNA, 19 nt, Artificial Sequence
  Description of Artificial Sequence: Synthetic oligonucleotide
cacgaugcuaacacuaaac

SEQ ID NO: 206474 - RNA, 19 nt, Artificial Sequence
  Description of Artificial Sequence: Synthetic oligonucleotide
uguggaguuccagauaugu

SEQ ID NO: 206475 - RNA, 19 nt, Artificial Sequence
  Description of Artificial Sequence: Synthetic oligonucleotide
auucuagcuaaaagaauuc

SEQ ID NO: 206476 - RNA, 19 nt, Artificial Sequence
  Description of Artificial Sequence: Synthetic oligonucleotide
uuuugcauguaauccuaac

SEQ ID NO: 206477 - RNA, 19 nt, Artificial Sequence
  Description of Artificial Sequence: Synthetic oligonucleotide
ucuuggaagucaaauucau

SEQ ID NO: 206478 - RNA, 19 nt, Artificial Sequence
  Description of Artificial Sequence: Synthetic oligonucleotide
aacagcggcauuuccgaga

SEQ ID NO: 206479 - RNA, 19 nt, Artificial Sequence
  Description of Artificial Sequence: Synthetic oligonucleotide
ugaauaugagguaguuggu

SEQ ID NO: 206480 - RNA, 19 nt, Artificial Sequence
  Description of Artificial Sequence: Synthetic oligonucleotide
auaccgauuuaguuauaag

SEQ ID NO: 206481 - RNA, 19 nt, Artificial Sequence
  Description of Artificial Sequence: Synthetic oligonucleotide
uguguauuauagucaggcu

SEQ ID NO: 206482 - RNA, 19 nt, Artificial Sequence
  Description of Artificial Sequence: Synthetic oligonucleotide
cuaaaagaauucuuuccca

SEQ ID NO: 206483 - RNA, 19 nt, Artificial Sequence
  Description of Artificial Sequence: Synthetic oligonucleotide
auaggcaauaagaagcugu

SEQ ID NO: 206484 - RNA, 19 nt, Artificial Sequence
  Description of Artificial Sequence: Synthetic oligonucleotide
cuugagcgacguauuauag

SEQ ID NO: 206485 - RNA, 19 nt, Artificial Sequence
  Description of Artificial Sequence: Synthetic oligonucleotide
uauaucaguguaguguuau

SEQ ID NO: 206486 - RNA, 19 nt, Artificial Sequence
  Description of Artificial Sequence: Synthetic oligonucleotide
aggaacuucuagguauugc

SEQ ID NO: 206487 - RNA, 19 nt, Artificial Sequence
  Description of Artificial Sequence: Synthetic oligonucleotide
ugugauuagcacagagggu

SEQ ID NO: 206488 - RNA, 19 nt, Artificial Sequence
  Description of Artificial Sequence: Synthetic oligonucleotide
auuucgaagacaacaucag

SEQ ID NO: 206489 - RNA, 19 nt, Artificial Sequence
  Description of Artificial Sequence: Synthetic oligonucleotide
gucagaauggugaaacuug

SEQ ID NO: 206490 - RNA, 19 nt, Artificial Sequence
  Description of Artificial Sequence: Synthetic oligonucleotide
uaagcuuuuguagccaagu

SEQ ID NO: 206491 - RNA, 19 nt, Artificial Sequence
  Description of Artificial Sequence: Synthetic oligonucleotide
ggucacaugacuaaacagc

SEQ ID NO: 206492 - RNA, 19 nt, Artificial Sequence
  Description of Artificial Sequence: Synthetic oligonucleotide
ucuguguauaaguauucua

SEQ ID NO: 206493 - RNA, 19 nt, Artificial Sequence
  Description of Artificial Sequence: Synthetic oligonucleotide
aagcaucgguuuauuaagg

SEQ ID NO: 206494 - RNA, 19 nt, Artificial Sequence
  Description of Artificial Sequence: Synthetic oligonucleotide
gcauauuaaaaucacugga

SEQ ID NO: 206495 - RNA, 19 nt, Artificial Sequence
  Description of Artificial Sequence: Synthetic oligonucleotide
cauacauacccuuugcaaa

SEQ ID NO: 206496 - RNA, 19 nt, Artificial Sequence
  Description of Artificial Sequence: Synthetic oligonucleotide
cacaauaggaugaauguua

SEQ ID NO: 206497 - RNA, 19 nt, Artificial Sequence
  Description of Artificial Sequence: Synthetic oligonucleotide
accgauuuaguuauaagaa

SEQ ID NO: 206498 - RNA, 19 nt, Artificial Sequence
  Description of Artificial Sequence: Synthetic oligonucleotide
acagcggcauuuccgagag

SEQ ID NO: 206499 - RNA, 19 nt, Artificial Sequence
  Description of Artificial Sequence: Synthetic oligonucleotide
uugagcgacguauuauaga

SEQ ID NO: 206500 - RNA, 19 nt, Artificial Sequence
  Description of Artificial Sequence: Synthetic oligonucleotide
accuaauuggcuauaucag

SEQ ID NO: 206501 - RNA, 19 nt, Artificial Sequence
  Description of Artificial Sequence: Synthetic oligonucleotide
augaauguuaaaauacuau

SEQ ID NO: 206502 - RNA, 19 nt, Artificial Sequence
  Description of Artificial Sequence: Synthetic oligonucleotide
ucuuacauucuaggggaag

SEQ ID NO: 206503 - RNA, 19 nt, Artificial Sequence
  Description of Artificial Sequence: Synthetic oligonucleotide
guguauuauagucaggcua

SEQ ID NO: 206504 - RNA, 19 nt, Artificial Sequence
  Description of Artificial Sequence: Synthetic oligonucleotide
ggagacguccccuagaauc

SEQ ID NO: 206505 - RNA, 19 nt, Artificial Sequence
  Description of Artificial Sequence: Synthetic oligonucleotide
guacugguuacacacaaaa

SEQ ID NO: 206506 - RNA, 19 nt, Artificial Sequence
  Description of Artificial Sequence: Synthetic oligonucleotide
gaacucuuaagcuuuugua

SEQ ID NO: 206507 - RNA, 19 nt, Artificial Sequence
  Description of Artificial Sequence: Synthetic oligonucleotide
ucgaugacauuggagacgu

SEQ ID NO: 206508 - RNA, 19 nt, Artificial Sequence
  Description of Artificial Sequence: Synthetic oligonucleotide
auaugagcuuucuugggau

SEQ ID NO: 206509 - RNA, 19 nt, Artificial Sequence
  Description of Artificial Sequence: Synthetic oligonucleotide
augaagcccaaguauggcu

SEQ ID NO: 206510 - RNA, 19 nt, Artificial Sequence
  Description of Artificial Sequence: Synthetic oligonucleotide
aggggugggcuucagucac

SEQ ID NO: 206511 - RNA, 19 nt, Artificial Sequence
  Description of Artificial Sequence: Synthetic oligonucleotide
uucuagcuaaaagaauucu

SEQ ID NO: 206512 - RNA, 19 nt, Artificial Sequence
  Description of Artificial Sequence: Synthetic oligonucleotide
ugaguaucaaaaggcuacc

SEQ ID NO: 206513 - RNA, 19 nt, Artificial Sequence
  Description of Artificial Sequence: Synthetic oligonucleotide
auuucagcaauggggcaac

SEQ ID NO: 206514 - RNA, 19 nt, Artificial Sequence
  Description of Artificial Sequence: Synthetic oligonucleotide
aauguaggacaaacaggag

SEQ ID NO: 206515 - RNA, 19 nt, Artificial Sequence
  Description of Artificial Sequence: Synthetic oligonucleotide
caauugaucuuuccuggug

SEQ ID NO: 206516 - RNA, 19 nt, Artificial Sequence
  Description of Artificial Sequence: Synthetic oligonucleotide
ugcaauuccucagacaauu

SEQ ID NO: 206517 - RNA, 19 nt, Artificial Sequence
  Description of Artificial Sequence: Synthetic oligonucleotide
auaccauaccgauuuaguu

SEQ ID NO: 206518 - RNA, 19 nt, Artificial Sequence
  Description of Artificial Sequence: Synthetic oligonucleotide
acguauuauagaaccacag

SEQ ID NO: 206519 - RNA, 19 nt, Artificial Sequence
  Description of Artificial Sequence: Synthetic oligonucleotide
cuucacgaugacucgcagg

SEQ ID NO: 206520 - RNA, 19 nt, Artificial Sequence
  Description of Artificial Sequence: Synthetic oligonucleotide
agaaugcacaauaggauga

SEQ ID NO: 206521 - RNA, 19 nt, Artificial Sequence
  Description of Artificial Sequence: Synthetic oligonucleotide
cuagguauugcuauauucu

SEQ ID NO: 206522 - RNA, 19 nt, Artificial Sequence
  Description of Artificial Sequence: Synthetic oligonucleotide
ugauuagcacagaggguga

SEQ ID NO: 206523 - RNA, 19 nt, Artificial Sequence
  Description of Artificial Sequence: Synthetic oligonucleotide
gcggcaucacuucacaucg

SEQ ID NO: 206524 - RNA, 19 nt, Artificial Sequence
  Description of Artificial Sequence: Synthetic oligonucleotide
acaaugcuaagccaccaaa

SEQ ID NO: 206525 - RNA, 19 nt, Artificial Sequence
  Description of Artificial Sequence: Synthetic oligonucleotide
uguccaacagucuuacauu

SEQ ID NO: 206526 - RNA, 19 nt, Artificial Sequence
  Description of Artificial Sequence: Synthetic oligonucleotide
gagacuugguacaucucag

SEQ ID NO: 206527 - RNA, 19 nt, Artificial Sequence
  Description of Artificial Sequence: Synthetic oligonucleotide
guugguggcgaugaaauga

SEQ ID NO: 206528 - RNA, 19 nt, Artificial Sequence
  Description of Artificial Sequence: Synthetic oligonucleotide
uaacacagcucccucgguc

SEQ ID NO: 206529 - RNA, 19 nt, Artificial Sequence
  Description of Artificial Sequence: Synthetic oligonucleotide
uuggagacguccccuagaa

SEQ ID NO: 206530 - RNA, 19 nt, Artificial Sequence
  Description of Artificial Sequence: Synthetic oligonucleotide
aagcgcaggucacaugacu

SEQ ID NO: 206531 - RNA, 19 nt, Artificial Sequence
  Description of Artificial Sequence: Synthetic oligonucleotide
uccaacacuccuccaaaau

SEQ ID NO: 206532 - RNA, 19 nt, Artificial Sequence
  Description of Artificial Sequence: Synthetic oligonucleotide
aaacuugagcgacguauua

SEQ ID NO: 206533 - RNA, 19 nt, Artificial Sequence
  Description of Artificial Sequence: Synthetic oligonucleotide
uuacauucuaggggaagca

SEQ ID NO: 206534 - RNA, 19 nt, Artificial Sequence
  Description of Artificial Sequence: Synthetic oligonucleotide
uugguggcgaugaaaugaa

SEQ ID NO: 206535 - RNA, 19 nt, Artificial Sequence
  Description of Artificial Sequence: Synthetic oligonucleotide
agcaucgguuuauuaagga

SEQ ID NO: 206536 - RNA, 19 nt, Artificial Sequence
  Description of Artificial Sequence: Synthetic oligonucleotide
uaucaguguaguguuauuu

SEQ ID NO: 206537 - RNA, 19 nt, Artificial Sequence
  Description of Artificial Sequence: Synthetic oligonucleotide
acaguuguuccuuguauuu

SEQ ID NO: 206538 - RNA, 19 nt, Artificial Sequence
  Description of Artificial Sequence: Synthetic oligonucleotide
ugccaauaguugaauaauu

SEQ ID NO: 206539 - RNA, 19 nt, Artificial Sequence
  Description of Artificial Sequence: Synthetic oligonucleotide
auuggcuauaucaguguag

SEQ ID NO: 206540 - RNA, 19 nt, Artificial Sequence
  Description of Artificial Sequence: Synthetic oligonucleotide
ugggacaacaagagucugu

SEQ ID NO: 206541 - RNA, 19 nt, Artificial Sequence
  Description of Artificial Sequence: Synthetic oligonucleotide
uucacauauugaucaaguu

SEQ ID NO: 206542 - RNA, 19 nt, Artificial Sequence
  Description of Artificial Sequence: Synthetic oligonucleotide
guauucaguaugaagccca

SEQ ID NO: 206543 - RNA, 19 nt, Artificial Sequence
  Description of Artificial Sequence: Synthetic oligonucleotide
acacaggggacauguaaca

SEQ ID NO: 206544 - RNA, 19 nt, Artificial Sequence
  Description of Artificial Sequence: Synthetic oligonucleotide
guauuucgaagacaacauc

SEQ ID NO: 206545 - RNA, 19 nt, Artificial Sequence
  Description of Artificial Sequence: Synthetic oligonucleotide
guuguucaagucagagugg

SEQ ID NO: 206546 - RNA, 19 nt, Artificial Sequence
  Description of Artificial Sequence: Synthetic oligonucleotide
agauaggcaauaagaagcu

SEQ ID NO: 206547 - RNA, 19 nt, Artificial Sequence
  Description of Artificial Sequence: Synthetic oligonucleotide
ucuuuggaaacgccauaaa

SEQ ID NO: 206548 - RNA, 19 nt, Artificial Sequence
  Description of Artificial Sequence: Synthetic oligonucleotide
agcucccucggucugaggu

SEQ ID NO: 206549 - RNA, 19 nt, Artificial Sequence
  Description of Artificial Sequence: Synthetic oligonucleotide
uauucaguaugaagcccaa

SEQ ID NO: 206550 - RNA, 19 nt, Artificial Sequence
  Description of Artificial Sequence: Synthetic oligonucleotide
acagugauauuaaaugaaa

SEQ ID NO: 206551 - RNA, 19 nt, Artificial Sequence
  Description of Artificial Sequence: Synthetic oligonucleotide
aaaacuugagcgacguauu

SEQ ID NO: 206552 - RNA, 19 nt, Artificial Sequence
  Description of Artificial Sequence: Synthetic oligonucleotide
ugacuaaacagcggcauuu

SEQ ID NO: 206553 - RNA, 19 nt, Artificial Sequence
  Description of Artificial Sequence: Synthetic oligonucleotide
caaguauggcuuguacagg

SEQ ID NO: 206554 - RNA, 19 nt, Artificial Sequence
  Description of Artificial Sequence: Synthetic oligonucleotide
uuacaaugcuaagccacca

SEQ ID NO: 206555 - RNA, 19 nt, Artificial Sequence
  Description of Artificial Sequence: Synthetic oligonucleotide
aaaauaccauaccgauuua

SEQ ID NO: 206556 - RNA, 19 nt, Artificial Sequence
  Description of Artificial Sequence: Synthetic oligonucleotide
aaagcgcaggucacaugac

SEQ ID NO: 206557 - RNA, 19 nt, Artificial Sequence
  Description of Artificial Sequence: Synthetic oligonucleotide
uuugcaacugugugaugau

SEQ ID NO: 206558 - RNA, 19 nt, Artificial Sequence
  Description of Artificial Sequence: Synthetic oligonucleotide
cuagcuaaaagaauucuuu

SEQ ID NO: 206559 - RNA, 19 nt, Artificial Sequence
  Description of Artificial Sequence: Synthetic oligonucleotide
ccugaauaaaugaagcgca

SEQ ID NO: 206560 - RNA, 19 nt, Artificial Sequence
  Description of Artificial Sequence: Synthetic oligonucleotide
uauuauagucaggcuacuc

SEQ ID NO: 206561 - RNA, 19 nt, Artificial Sequence
  Description of Artificial Sequence: Synthetic oligonucleotide
gacguauuauagaaccaca

SEQ ID NO: 206562 - RNA, 19 nt, Artificial Sequence
  Description of Artificial Sequence: Synthetic oligonucleotide
ggcgaugaaaugaagcagc

SEQ ID NO: 206563 - RNA, 19 nt, Artificial Sequence
  Description of Artificial Sequence: Synthetic oligonucleotide
gauaggcaauaagaagcug

SEQ ID NO: 206564 - RNA, 19 nt, Artificial Sequence
  Description of Artificial Sequence: Synthetic oligonucleotide
auuggagacguccccuaga

SEQ ID NO: 206565 - RNA, 19 nt, Artificial Sequence
  Description of Artificial Sequence: Synthetic oligonucleotide
acuggaacccagagguuac

SEQ ID NO: 206566 - RNA, 19 nt, Artificial Sequence
  Description of Artificial Sequence: Synthetic oligonucleotide
aguugguggcgaugaaaug

SEQ ID NO: 206567 - RNA, 19 nt, Artificial Sequence
  Description of Artificial Sequence: Synthetic oligonucleotide
uacauucuaggggaagcac

SEQ ID NO: 206568 - RNA, 19 nt, Artificial Sequence
  Description of Artificial Sequence: Synthetic oligonucleotide
ggaaaaugccagcugggac

SEQ ID NO: 206569 - RNA, 19 nt, Artificial Sequence
  Description of Artificial Sequence: Synthetic oligonucleotide
ugcuaacacuaaacaguga

SEQ ID NO: 206570 - RNA, 19 nt, Artificial Sequence
  Description of Artificial Sequence: Synthetic oligonucleotide
gaagcgcagaauguaggac

SEQ ID NO: 206571 - RNA, 19 nt, Artificial Sequence
  Description of Artificial Sequence: Synthetic oligonucleotide
ugguacuaacacagcuccc

SEQ ID NO: 206572 - RNA, 19 nt, Artificial Sequence
  Description of Artificial Sequence: Synthetic oligonucleotide
agucagaauggugaaacuu

SEQ ID NO: 206573 - RNA, 19 nt, Artificial Sequence
  Description of Artificial Sequence: Synthetic oligonucleotide
ccaauaguugaauaauuca

SEQ ID NO: 206574 - RNA, 19 nt, Artificial Sequence
  Description of Artificial Sequence: Synthetic oligonucleotide
cgagaguggauauacuucc

SEQ ID NO: 206575 - RNA, 19 nt, Artificial Sequence
  Description of Artificial Sequence: Synthetic oligonucleotide
uuggacugaauaugaggua

SEQ ID NO: 206576 - RNA, 19 nt, Artificial Sequence
  Description of Artificial Sequence: Synthetic oligonucleotide
ggugguaaaacaccacguc

SEQ ID NO: 206577 - RNA, 19 nt, Artificial Sequence
  Description of Artificial Sequence: Synthetic oligonucleotide
ucaggcuacucagucacuc

SEQ ID NO: 206578 - RNA, 19 nt, Artificial Sequence
  Description of Artificial Sequence: Synthetic oligonucleotide
uggggcaaccuagaggaga

SEQ ID NO: 206579 - RNA, 19 nt, Artificial Sequence
  Description of Artificial Sequence: Synthetic oligonucleotide
agugagcuagugucccaag

SEQ ID NO: 206580 - RNA, 19 nt, Artificial Sequence
  Description of Artificial Sequence: Synthetic oligonucleotide
aaaggaacuucuagguauu

SEQ ID NO: 206581 - RNA, 19 nt, Artificial Sequence
  Description of Artificial Sequence: Synthetic oligonucleotide
agaagcuguauggugacuu

SEQ ID NO: 206582 - RNA, 19 nt, Artificial Sequence
  Description of Artificial Sequence: Synthetic oligonucleotide
cauuaaacauggcggcauc

SEQ ID NO: 206583 - RNA, 19 nt, Artificial Sequence
  Description of Artificial Sequence: Synthetic oligonucleotide
gcaagcaucgguuuauuaa

SEQ ID NO: 206584 - RNA, 19 nt, Artificial Sequence
  Description of Artificial Sequence: Synthetic oligonucleotide
guugaauuaaacagaugcu

SEQ ID NO: 206585 - RNA, 19 nt, Artificial Sequence
  Description of Artificial Sequence: Synthetic oligonucleotide
guagccaagucucuacaaa

SEQ ID NO: 206586 - RNA, 19 nt, Artificial Sequence
  Description of Artificial Sequence: Synthetic oligonucleotide
gucaggcuauauuaaaaua

SEQ ID NO: 206587 - RNA, 19 nt, Artificial Sequence
  Description of Artificial Sequence: Synthetic oligonucleotide
ggauagagccagaagugag

SEQ ID NO: 206588 - RNA, 19 nt, Artificial Sequence
  Description of Artificial Sequence: Synthetic oligonucleotide
ucagagugguagugugaug

SEQ ID NO: 206589 - RNA, 19 nt, Artificial Sequence
  Description of Artificial Sequence: Synthetic oligonucleotide
guagugugaugcuucagcu

SEQ ID NO: 206590 - RNA, 19 nt, Artificial Sequence
  Description of Artificial Sequence: Synthetic oligonucleotide
uggguugcuggaagauccc

SEQ ID NO: 206591 - RNA, 19 nt, Artificial Sequence
  Description of Artificial Sequence: Synthetic oligonucleotide
agguauugcuauauucugu

SEQ ID NO: 206592 - RNA, 19 nt, Artificial Sequence
  Description of Artificial Sequence: Synthetic oligonucleotide
cauggcggcaucacuucac

SEQ ID NO: 206593 - RNA, 19 nt, Artificial Sequence
  Description of Artificial Sequence: Synthetic oligonucleotide
uuaaaccuaauuggcuaua

SEQ ID NO: 206594 - RNA, 19 nt, Artificial Sequence
  Description of Artificial Sequence: Synthetic oligonucleotide
gaugacucgcagggguggg

SEQ ID NO: 206595 - RNA, 19 nt, Artificial Sequence
  Description of Artificial Sequence: Synthetic oligonucleotide
uucuagguauugcuauauu

SEQ ID NO: 206596 - RNA, 19 nt, Artificial Sequence
  Description of Artificial Sequence: Synthetic oligonucleotide
acuucuagguauugcuaua

SEQ ID NO: 206597 - RNA, 19 nt, Artificial Sequence
  Description of Artificial Sequence: Synthetic oligonucleotide
uccuaucaacuuccuggcu

SEQ ID NO: 206598 - RNA, 19 nt, Artificial Sequence
  Description of Artificial Sequence: Synthetic oligonucleotide
uggcuauaucaguguagug

SEQ ID NO: 206599 - RNA, 19 nt, Artificial Sequence
  Description of Artificial Sequence: Synthetic oligonucleotide
aauucaggucaggcuauau

SEQ ID NO: 206600 - RNA, 19 nt, Artificial Sequence
  Description of Artificial Sequence: Synthetic oligonucleotide
augugaucuaaaauugcaa

SEQ ID NO: 206601 - RNA, 19 nt, Artificial Sequence
  Description of Artificial Sequence: Synthetic oligonucleotide
cgaugcuaacacuaaacag

SEQ ID NO: 206602 - RNA, 19 nt, Artificial Sequence
  Description of Artificial Sequence: Synthetic oligonucleotide
cauuggagacguccccuag

SEQ ID NO: 206603 - RNA, 19 nt, Artificial Sequence
  Description of Artificial Sequence: Synthetic oligonucleotide
gguaaaacaccacguccac

SEQ ID NO: 206604 - RNA, 19 nt, Artificial Sequence
  Description of Artificial Sequence: Synthetic oligonucleotide
uaugagcuuucuugggauu

SEQ ID NO: 206605 - RNA, 19 nt, Artificial Sequence
  Description of Artificial Sequence: Synthetic oligonucleotide
ugagguacacaggggacau

SEQ ID NO: 206606 - RNA, 19 nt, Artificial Sequence
  Description of Artificial Sequence: Synthetic oligonucleotide
uacuuccuauacuccgcca

SEQ ID NO: 206607 - RNA, 19 nt, Artificial Sequence
  Description of Artificial Sequence: Synthetic oligonucleotide
uugcaauuccucagacaau

SEQ ID NO: 206608 - RNA, 19 nt, Artificial Sequence
  Description of Artificial Sequence: Synthetic oligonucleotide
augacuaaacagcggcauu

SEQ ID NO: 206609 - RNA, 19 nt, Artificial Sequence
  Description of Artificial Sequence: Synthetic oligonucleotide
gucuaauuccauggaagga

SEQ ID NO: 206610 - RNA, 19 nt, Artificial Sequence
  Description of Artificial Sequence: Synthetic oligonucleotide
cacuucacaucgugccacc

SEQ ID NO: 206611 - RNA, 19 nt, Artificial Sequence
  Description of Artificial Sequence: Synthetic oligonucleotide
guacuaacacagcucccuc

SEQ ID NO: 206612 - RNA, 19 nt, Artificial Sequence
  Description of Artificial Sequence: Synthetic oligonucleotide
gccaauaguugaauaauuc

SEQ ID NO: 206613 - RNA, 19 nt, Artificial Sequence
  Description of Artificial Sequence: Synthetic oligonucleotide
cugggugguaaaacaccac

SEQ ID NO: 206614 - RNA, 19 nt, Artificial Sequence
  Description of Artificial Sequence: Synthetic oligonucleotide
uugaaaaguuuggcucucu

SEQ ID NO: 206615 - RNA, 19 nt, Artificial Sequence
  Description of Artificial Sequence: Synthetic oligonucleotide
ggcuauaucaguguagugu

SEQ ID NO: 206616 - RNA, 19 nt, Artificial Sequence
  Description of Artificial Sequence: Synthetic oligonucleotide
auucaguaugaagcccaag

SEQ ID NO: 206617 - RNA, 19 nt, Artificial Sequence
  Description of Artificial Sequence: Synthetic oligonucleotide
agguuacccauucuucaua

SEQ ID NO: 206618 - RNA, 19 nt, Artificial Sequence
  Description of Artificial Sequence: Synthetic oligonucleotide
cauaccgauuuaguuauaa

SEQ ID NO: 206619 - RNA, 19 nt, Artificial Sequence
  Description of Artificial Sequence: Synthetic oligonucleotide
cuccaaaauacuuuccaau

SEQ ID NO: 206620 - RNA, 19 nt, Artificial Sequence
  Description of Artificial Sequence: Synthetic oligonucleotide
cagauauguagcuccaagu

SEQ ID NO: 206621 - RNA, 19 nt, Artificial Sequence
  Description of Artificial Sequence: Synthetic oligonucleotide
cucagacaauugaucuuuc

SEQ ID NO: 206622 - RNA, 19 nt, Artificial Sequence
  Description of Artificial Sequence: Synthetic oligonucleotide
ggcuauauuaaaauacaua

SEQ ID NO: 206623 - RNA, 19 nt, Artificial Sequence
  Description of Artificial Sequence: Synthetic oligonucleotide
gaaugcacaauaggaugaa

SEQ ID NO: 206624 - RNA, 19 nt, Artificial Sequence
  Description of Artificial Sequence: Synthetic oligonucleotide
cacauggccugggaaaaug

SEQ ID NO: 206625 - RNA, 19 nt, Artificial Sequence
  Description of Artificial Sequence: Synthetic oligonucleotide
uauguagcuccaaguucuu

SEQ ID NO: 206626 - RNA, 19 nt, Artificial Sequence
  Description of Artificial Sequence: Synthetic oligonucleotide
auaucaguguaguguuauu

SEQ ID NO: 206627 - RNA, 19 nt, Artificial Sequence
  Description of Artificial Sequence: Synthetic oligonucleotide
aagaagcuguauggugacu

SEQ ID NO: 206628 - RNA, 19 nt, Artificial Sequence
  Description of Artificial Sequence: Synthetic oligonucleotide
caaccuagaggagaagcca

SEQ ID NO: 206629 - RNA, 19 nt, Artificial Sequence
  Description of Artificial Sequence: Synthetic oligonucleotide
gacuguugaaucaaacuuu

SEQ ID NO: 206630 - RNA, 19 nt, Artificial Sequence
  Description of Artificial Sequence: Synthetic oligonucleotide
cggucuaauuccauggaag

SEQ ID NO: 206631 - RNA, 19 nt, Artificial Sequence
  Description of Artificial Sequence: Synthetic oligonucleotide
gaacuucuagguauugcua

SEQ ID NO: 206632 - RNA, 19 nt, Artificial Sequence
  Description of Artificial Sequence: Synthetic oligonucleotide
aagcuguauggugacuuuu

SEQ ID NO: 206633 - RNA, 19 nt, Artificial Sequence
  Description of Artificial Sequence: Synthetic oligonucleotide
gguuacccauucuucauaa

SEQ ID NO: 206634 - RNA, 19 nt, Artificial Sequence
  Description of Artificial Sequence: Synthetic oligonucleotide
caguuguuccuuguauuuc

SEQ ID NO: 206635 - RNA, 19 nt, Artificial Sequence
  Description of Artificial Sequence: Synthetic oligonucleotide
uggaucccuucugugguac

SEQ ID NO: 206636 - RNA, 19 nt, Artificial Sequence
  Description of Artificial Sequence: Synthetic oligonucleotide
aggucaggcuauauuaaaa

SEQ ID NO: 206637 - RNA, 19 nt, Artificial Sequence
  Description of Artificial Sequence: Synthetic oligonucleotide
uuguacaggggugggcuuc

SEQ ID NO: 206638 - RNA, 19 nt, Artificial Sequence
  Description of Artificial Sequence: Synthetic oligonucleotide
uacauacccuuugcaaaau

SEQ ID NO: 206639 - RNA, 19 nt, Artificial Sequence
  Description of Artificial Sequence: Synthetic oligonucleotide
agcaagcaucgguuuauua

SEQ ID NO: 206640 - RNA, 19 nt, Artificial Sequence
  Description of Artificial Sequence: Synthetic oligonucleotide
uggcuuguacagggguggg

SEQ ID NO: 206641 - RNA, 19 nt, Artificial Sequence
  Description of Artificial Sequence: Synthetic oligonucleotide
ccgagaguggauauacuuc

SEQ ID NO: 206642 - RNA, 19 nt, Artificial Sequence
  Description of Artificial Sequence: Synthetic oligonucleotide
caguguaguguuauuugua

SEQ ID NO: 206643 - RNA, 19 nt, Artificial Sequence
  Description of Artificial Sequence: Synthetic oligonucleotide
gguauugcuauauucuguu

SEQ ID NO: 206644 - RNA, 19 nt, Artificial Sequence
  Description of Artificial Sequence: Synthetic oligonucleotide
aaauucaggucaggcuaua

SEQ ID NO: 206645 - RNA, 19 nt, Artificial Sequence
  Description of Artificial Sequence: Synthetic oligonucleotide
gcauguaauccuaacacua

SEQ ID NO: 206646 - RNA, 19 nt, Artificial Sequence
  Description of Artificial Sequence: Synthetic oligonucleotide
guauggcuuguacaggggu

SEQ ID NO: 206647 - RNA, 19 nt, Artificial Sequence
  Description of Artificial Sequence: Synthetic oligonucleotide
agaucccuggcuagcaccu

SEQ ID NO: 206648 - RNA, 19 nt, Artificial Sequence
  Description of Artificial Sequence: Synthetic oligonucleotide
cuacucagucacuccuauc

SEQ ID NO: 206649 - RNA, 19 nt, Artificial Sequence
  Description of Artificial Sequence: Synthetic oligonucleotide
ggaucaggacacucuuggc

SEQ ID NO: 206650 - RNA, 19 nt, Artificial Sequence
  Description of Artificial Sequence: Synthetic oligonucleotide
gagcgacguauuauagaac

SEQ ID NO: 206651 - RNA, 19 nt, Artificial Sequence
  Description of Artificial Sequence: Synthetic oligonucleotide
aagcccaaguauggcuugu

SEQ ID NO: 206652 - RNA, 19 nt, Artificial Sequence
  Description of Artificial Sequence: Synthetic oligonucleotide
guaguugguggcgaugaaa

SEQ ID NO: 206653 - RNA, 19 nt, Artificial Sequence
  Description of Artificial Sequence: Synthetic oligonucleotide
cugugguacuaacacagcu

SEQ ID NO: 206654 - RNA, 19 nt, Artificial Sequence
  Description of Artificial Sequence: Synthetic oligonucleotide
guauaucccaguacuaaau

SEQ ID NO: 206655 - RNA, 19 nt, Artificial Sequence
  Description of Artificial Sequence: Synthetic oligonucleotide
gcaucgguuuauuaaggaa

SEQ ID NO: 206656 - RNA, 19 nt, Artificial Sequence
  Description of Artificial Sequence: Synthetic oligonucleotide
caggucaggcuauauuaaa

SEQ ID NO: 206657 - RNA, 19 nt, Artificial Sequence
  Description of Artificial Sequence: Synthetic oligonucleotide
gagguuacccauucuucau

SEQ ID NO: 206658 - RNA, 19 nt, Artificial Sequence
  Description of Artificial Sequence: Synthetic oligonucleotide
acguccccuagaaucuuuc

SEQ ID NO: 206659 - RNA, 19 nt, Artificial Sequence
  Description of Artificial Sequence: Synthetic oligonucleotide
cuaccaugugaucuaaaau

SEQ ID NO: 206660 - RNA, 19 nt, Artificial Sequence
  Description of Artificial Sequence: Synthetic oligonucleotide
agacaacaucagcaagcau

SEQ ID NO: 206661 - RNA, 19 nt, Artificial Sequence
  Description of Artificial Sequence: Synthetic oligonucleotide
caauaagaagcuguauggu

SEQ ID NO: 206662 - RNA, 19 nt, Artificial Sequence
  Description of Artificial Sequence: Synthetic oligonucleotide
ggucaggcuauauuaaaau

SEQ ID NO: 206663 - RNA, 19 nt, Artificial Sequence
  Description of Artificial Sequence: Synthetic oligonucleotide
gaaacgccauaaacuggga

SEQ ID NO: 206664 - RNA, 19 nt, Artificial Sequence
  Description of Artificial Sequence: Synthetic oligonucleotide
gcgaugaaaugaagcagcc

SEQ ID NO: 206665 - RNA, 19 nt, Artificial Sequence
  Description of Artificial Sequence: Synthetic oligonucleotide
gguacuaacacagcucccu

SEQ ID NO: 206666 - RNA, 19 nt, Artificial Sequence
  Description of Artificial Sequence: Synthetic oligonucleotide
uggagacguccccuagaau

SEQ ID NO: 206667 - RNA, 19 nt, Artificial Sequence
  Description of Artificial Sequence: Synthetic oligonucleotide
auauugcuucugaguauca

SEQ ID NO: 206668 - RNA, 19 nt, Artificial Sequence
  Description of Artificial Sequence: Synthetic oligonucleotide
gacauuggagacguccccu

SEQ ID NO: 206669 - RNA, 19 nt, Artificial Sequence
  Description of Artificial Sequence: Synthetic oligonucleotide
cguauuauagaaccacaga

SEQ ID NO: 206670 - RNA, 19 nt, Artificial Sequence
  Description of Artificial Sequence: Synthetic oligonucleotide
cucccucggucugagguac

SEQ ID NO: 206671 - RNA, 19 nt, Artificial Sequence
  Description of Artificial Sequence: Synthetic oligonucleotide
cugggacaacaagagucug

SEQ ID NO: 206672 - RNA, 19 nt, Artificial Sequence
  Description of Artificial Sequence: Synthetic oligonucleotide
cacgaugacucgcaggggu

SEQ ID NO: 206673 - RNA, 19 nt, Artificial Sequence
  Description of Artificial Sequence: Synthetic oligonucleotide
ccuaacacuacaggaaaga

SEQ ID NO: 206674 - RNA, 19 nt, Artificial Sequence
  Description of Artificial Sequence: Synthetic oligonucleotide
cacgaugccugucacuucu

SEQ ID NO: 206675 - RNA, 19 nt, Artificial Sequence
  Description of Artificial Sequence: Synthetic oligonucleotide
cuagugucccaaggccaag

SEQ ID NO: 206676 - RNA, 19 nt, Artificial Sequence
  Description of Artificial Sequence: Synthetic oligonucleotide
cgacguauuauagaaccac

SEQ ID NO: 206677 - RNA, 19 nt, Artificial Sequence
  Description of Artificial Sequence: Synthetic oligonucleotide
guugaaaggcagucagaau

SEQ ID NO: 206678 - RNA, 19 nt, Artificial Sequence
  Description of Artificial Sequence: Synthetic oligonucleotide
agcgcaggucacaugacua

SEQ ID NO: 206679 - RNA, 19 nt, Artificial Sequence
  Description of Artificial Sequence: Synthetic oligonucleotide
gaucccuucugugguacua

SEQ ID NO: 206680 - RNA, 19 nt, Artificial Sequence
  Description of Artificial Sequence: Synthetic oligonucleotide
gugccaauaguugaauaau

SEQ ID NO: 206681 - RNA, 19 nt, Artificial Sequence
  Description of Artificial Sequence: Synthetic oligonucleotide
ccuaauuggcuauaucagu

SEQ ID NO: 206682 - RNA, 19 nt, Artificial Sequence
  Description of Artificial Sequence: Synthetic oligonucleotide
gaagcuguauggugacuuu

SEQ ID NO: 206683 - RNA, 19 nt, Artificial Sequence
  Description of Artificial Sequence: Synthetic oligonucleotide
gucagagugguagugugau

SEQ ID NO: 206684 - RNA, 19 nt, Artificial Sequence
  Description of Artificial Sequence: Synthetic oligonucleotide
cuaagccaccaaaugggau

SEQ ID NO: 206685 - RNA, 19 nt, Artificial Sequence
  Description of Artificial Sequence: Synthetic oligonucleotide
ugacucgcagggguggguu

SEQ ID NO: 206686 - RNA, 19 nt, Artificial Sequence
  Description of Artificial Sequence: Synthetic oligonucleotide
cauggaaggaguugucauu

SEQ ID NO: 206687 - RNA, 19 nt, Artificial Sequence
  Description of Artificial Sequence: Synthetic oligonucleotide
aucgugccaccaggauggc

SEQ ID NO: 206688 - RNA, 19 nt, Artificial Sequence
  Description of Artificial Sequence: Synthetic oligonucleotide
cuaguuccucccacugaaa

SEQ ID NO: 206689 - RNA, 19 nt, Artificial Sequence
  Description of Artificial Sequence: Synthetic oligonucleotide
ggcggucuaauuccaugga

SEQ ID NO: 206690 - RNA, 19 nt, Artificial Sequence
  Description of Artificial Sequence: Synthetic oligonucleotide
gacugaauaugagguaguu

SEQ ID NO: 206691 - RNA, 19 nt, Artificial Sequence
  Description of Artificial Sequence: Synthetic oligonucleotide
ccaacacuccuccaaaaua

SEQ ID NO: 206692 - RNA, 19 nt, Artificial Sequence
  Description of Artificial Sequence: Synthetic oligonucleotide
cuucuagguauugcuauau

SEQ ID NO: 206693 - RNA, 19 nt, Artificial Sequence
  Description of Artificial Sequence: Synthetic oligonucleotide
cuuucuuggcuugguaggu

SEQ ID NO: 206694 - RNA, 19 nt, Artificial Sequence
  Description of Artificial Sequence: Synthetic oligonucleotide
gagaguggauauacuuccu

SEQ ID NO: 206695 - RNA, 19 nt, Artificial Sequence
  Description of Artificial Sequence: Synthetic oligonucleotide
gcuugguaggucuugcaau

SEQ ID NO: 206696 - RNA, 19 nt, Artificial Sequence
  Description of Artificial Sequence: Synthetic oligonucleotide
ggcaugcuuugcaacugug

SEQ ID NO: 206697 - RNA, 19 nt, Artificial Sequence
  Description of Artificial Sequence: Synthetic oligonucleotide
gcggucuaauuccauggaa

SEQ ID NO: 206698 - RNA, 19 nt, Artificial Sequence
  Description of Artificial Sequence: Synthetic oligonucleotide
ucccucggucugagguaca

SEQ ID NO: 206699 - RNA, 19 nt, Artificial Sequence
  Description of Artificial Sequence: Synthetic oligonucleotide
guggaguuccagauaugua

SEQ ID NO: 206700 - RNA, 19 nt, Artificial Sequence
  Description of Artificial Sequence: Synthetic oligonucleotide
gccauuaaacauggcggca

SEQ ID NO: 206701 - RNA, 19 nt, Artificial Sequence
  Description of Artificial Sequence: Synthetic oligonucleotide
cauuuccgagaguggauau

SEQ ID NO: 206702 - RNA, 19 nt, Artificial Sequence
  Description of Artificial Sequence: Synthetic oligonucleotide
caaaugggaugugccaaua

SEQ ID NO: 206703 - RNA, 19 nt, Artificial Sequence
  Description of Artificial Sequence: Synthetic oligonucleotide
augacucgcaggggugggu

SEQ ID NO: 206704 - RNA, 19 nt, Artificial Sequence
  Description of Artificial Sequence: Synthetic oligonucleotide
gcggcauuuccgagagugg

SEQ ID NO: 206705 - RNA, 19 nt, Artificial Sequence
  Description of Artificial Sequence: Synthetic oligonucleotide
ggcacaguuguuccuugua

SEQ ID NO: 206706 - RNA, 19 nt, Artificial Sequence
  Description of Artificial Sequence: Synthetic oligonucleotide
gcuuguacaggggugggcu

SEQ ID NO: 206707 - RNA, 19 nt, Artificial Sequence
  Description of Artificial Sequence: Synthetic oligonucleotide
ccgauuuaguuauaagaau

SEQ ID NO: 206708 - RNA, 19 nt, Artificial Sequence
  Description of Artificial Sequence: Synthetic oligonucleotide
ggauucuagcuaaaagaau

SEQ ID NO: 206709 - RNA, 19 nt, Artificial Sequence
  Description of Artificial Sequence: Synthetic oligonucleotide
gcauuuccgagaguggaua

SEQ ID NO: 206710 - RNA, 19 nt, Artificial Sequence
  Description of Artificial Sequence: Synthetic oligonucleotide
guaggacugggaggaagua

SEQ ID NO: 206711 - RNA, 19 nt, Artificial Sequence
  Description of Artificial Sequence: Synthetic oligonucleotide
ggcuuguacaggggugggc

SEQ ID NO: 206712 - RNA, 19 nt, Artificial Sequence
  Description of Artificial Sequence: Synthetic oligonucleotide
gcauauugcuucugaguau

SEQ ID NO: 206713 - RNA, 19 nt, Artificial Sequence
  Description of Artificial Sequence: Synthetic oligonucleotide
gucuuacauucuaggggaa

SEQ ID NO: 206714 - RNA, 19 nt, Artificial Sequence
  Description of Artificial Sequence: Synthetic oligonucleotide
gcgacguauuauagaacca

SEQ ID NO: 206715 - RNA, 19 nt, Artificial Sequence
  Description of Artificial Sequence: Synthetic oligonucleotide
gggugguaaaacaccacgu

SEQ ID NO: 206716 - RNA, 19 nt, Artificial Sequence
  Description of Artificial Sequence: Synthetic oligonucleotide
acgaugccugucacuucug

SEQ ID NO: 206717 - RNA, 19 nt, Artificial Sequence
  Description of Artificial Sequence: Synthetic oligonucleotide
ucgcagggguggguugcug

SEQ ID NO: 206718 - RNA, 19 nt, Artificial Sequence
  Description of Artificial Sequence: Synthetic oligonucleotide
caucagcaagcaucgguuu

SEQ ID NO: 206719 - RNA, 19 nt, Artificial Sequence
  Description of Artificial Sequence: Synthetic oligonucleotide
cgaugacucgcaggggugg

SEQ ID NO: 206720 - RNA, 19 nt, Artificial Sequence
  Description of Artificial Sequence: Synthetic oligonucleotide
cugggaucaggacacucuu

SEQ ID NO: 206721 - RNA, 19 nt, Artificial Sequence
  Description of Artificial Sequence: Synthetic oligonucleotide
gcgcaggucacaugacuaa

SEQ ID NO: 206722 - RNA, 19 nt, Artificial Sequence
  Description of Artificial Sequence: Synthetic oligonucleotide
caaguugaggcggucuaau

SEQ ID NO: 206723 - RNA, 19 nt, Artificial Sequence
  Description of Artificial Sequence: Synthetic oligonucleotide
gcuacucagucacuccuau

SEQ ID NO: 206724 - RNA, 19 nt, Artificial Sequence
  Description of Artificial Sequence: Synthetic oligonucleotide
gcaaguuguucaagucaga

SEQ ID NO: 206725 - RNA, 19 nt, Artificial Sequence
  Description of Artificial Sequence: Synthetic oligonucleotide
guacaggggugggcuucag

SEQ ID NO: 206726 - RNA, 19 nt, Artificial Sequence
  Description of Artificial Sequence: Synthetic oligonucleotide
agcccaaguauggcuugua

SEQ ID NO: 206727 - RNA, 19 nt, Artificial Sequence
  Description of Artificial Sequence: Synthetic oligonucleotide
ggacaacaagagucugugu

SEQ ID NO: 206728 - RNA, 19 nt, Artificial Sequence
  Description of Artificial Sequence: Synthetic oligonucleotide
cuucagucacugugccagu

SEQ ID NO: 206729 - RNA, 19 nt, Artificial Sequence
  Description of Artificial Sequence: Synthetic oligonucleotide
cuuguacaggggugggcuu

SEQ ID NO: 206730 - RNA, 19 nt, Artificial Sequence
  Description of Artificial Sequence: Synthetic oligonucleotide
ccacgaugcuaacacuaaa

SEQ ID NO: 206731 - RNA, 19 nt, Artificial Sequence
  Description of Artificial Sequence: Synthetic oligonucleotide
ccauuaaacauggcggcau

SEQ ID NO: 206732 - RNA, 19 nt, Artificial Sequence
  Description of Artificial Sequence: Synthetic oligonucleotide
ccacgaugccugucacuuc

SEQ ID NO: 206733 - RNA, 19 nt, Artificial Sequence
  Description of Artificial Sequence: Synthetic oligonucleotide
gucaggcuacucagucacu

SEQ ID NO: 206734 - RNA, 19 nt, Artificial Sequence
  Description of Artificial Sequence: Synthetic oligonucleotide
cguccccuagaaucuuuca

SEQ ID NO: 206735 - RNA, 19 nt, Artificial Sequence
  Description of Artificial Sequence: Synthetic oligonucleotide
cccuagaaucuuucagcuu

SEQ ID NO: 206736 - RNA, 19 nt, Artificial Sequence
  Description of Artificial Sequence: Synthetic oligonucleotide
ccauaccgauuuaguuaua

SEQ ID NO: 206737 - RNA, 19 nt, Artificial Sequence
  Description of Artificial Sequence: Synthetic oligonucleotide
cagcaagcaucgguuuauu

SEQ ID NO: 206738 - RNA, 19 nt, Artificial Sequence
  Description of Artificial Sequence: Synthetic oligonucleotide
cugucacuucuggguggua

SEQ ID NO: 206739 - RNA, 19 nt, Artificial Sequence
  Description of Artificial Sequence: Synthetic oligonucleotide
cgaugacauuggagacguc

SEQ ID NO: 206740 - RNA, 19 nt, Artificial Sequence
  Description of Artificial Sequence: Synthetic oligonucleotide
caccuggggccuccacgau

SEQ ID NO: 206741 - RNA, 19 nt, Artificial Sequence
  Description of Artificial Sequence: Synthetic oligonucleotide
cagcggcauuuccgagagu

SEQ ID NO: 206742 - RNA, 19 nt, Artificial Sequence
  Description of Artificial Sequence: Synthetic oligonucleotide
aaaacugugucugagaggc

SEQ ID NO: 206743 - RNA, 19 nt, Artificial Sequence
  Description of Artificial Sequence: Synthetic oligonucleotide
aacguuaauaaguuggcac

SEQ ID NO: 206744 - RNA, 19 nt, Artificial Sequence
  Description of Artificial Sequence: Synthetic oligonucleotide
uuauuugugaguaaaaccu

SEQ ID NO: 206745 - RNA, 19 nt, Artificial Sequence
  Description of Artificial Sequence: Synthetic oligonucleotide
uauaugaugagaaagggaa

SEQ ID NO: 206746 - RNA, 19 nt, Artificial Sequence
  Description of Artificial Sequence: Synthetic oligonucleotide
uauggauguaauaaaaggc

SEQ ID NO: 206747 - RNA, 19 nt, Artificial Sequence
  Description of Artificial Sequence: Synthetic oligonucleotide
aauuagacuagaaaagugg

SEQ ID NO: 206748 - RNA, 19 nt, Artificial Sequence
  Description of Artificial Sequence: Synthetic oligonucleotide
uuuauuugugaguaaaacc

SEQ ID NO: 206749 - RNA, 19 nt, Artificial Sequence
  Description of Artificial Sequence: Synthetic oligonucleotide
aauauaugaugagaaaggg

SEQ ID NO: 206750 - RNA, 19 nt, Artificial Sequence
  Description of Artificial Sequence: Synthetic oligonucleotide
uucaauggaacaaacaggu

SEQ ID NO: 206751 - RNA, 19 nt, Artificial Sequence
  Description of Artificial Sequence: Synthetic oligonucleotide
ugaaaacugugucugagag

SEQ ID NO: 206752 - RNA, 19 nt, Artificial Sequence
  Description of Artificial Sequence: Synthetic oligonucleotide
aaugccaugauagucauga

SEQ ID NO: 206753 - RNA, 19 nt, Artificial Sequence
  Description of Artificial Sequence: Synthetic oligonucleotide
acguuaauaaguuggcacc

SEQ ID NO: 206754 - RNA, 19 nt, Artificial Sequence
  Description of Artificial Sequence: Synthetic oligonucleotide
aaaacguuaauaaguuggc

SEQ ID NO: 206755 - RNA, 19 nt, Artificial Sequence
  Description of Artificial Sequence: Synthetic oligonucleotide
ucugugagcguguugaagg

SEQ ID NO: 206756 - RNA, 19 nt, Artificial Sequence
  Description of Artificial Sequence: Synthetic oligonucleotide
auuccggagaaugagaacc

SEQ ID NO: 206757 - RNA, 19 nt, Artificial Sequence
  Description of Artificial Sequence: Synthetic oligonucleotide
aagaauuagacuagaaaag

SEQ ID NO: 206758 - RNA, 19 nt, Artificial Sequence
  Description of Artificial Sequence: Synthetic oligonucleotide
agugaccuuuuauaaaacc

SEQ ID NO: 206759 - RNA, 19 nt, Artificial Sequence
  Description of Artificial Sequence: Synthetic oligonucleotide
aauucaauauucacaacag

SEQ ID NO: 206760 - RNA, 19 nt, Artificial Sequence
  Description of Artificial Sequence: Synthetic oligonucleotide
aguuagaccaugcauagca

SEQ ID NO: 206761 - RNA, 19 nt, Artificial Sequence
  Description of Artificial Sequence: Synthetic oligonucleotide
aauuacauggggcugguau

SEQ ID NO: 206762 - RNA, 19 nt, Artificial Sequence
  Description of Artificial Sequence: Synthetic oligonucleotide
ugagaggcgaacaagugcc

SEQ ID NO: 206763 - RNA, 19 nt, Artificial Sequence
  Description of Artificial Sequence: Synthetic oligonucleotide
aauacgaccgucaacuaag

SEQ ID NO: 206764 - RNA, 19 nt, Artificial Sequence
  Description of Artificial Sequence: Synthetic oligonucleotide
aguucuguagcccagauua

SEQ ID NO: 206765 - RNA, 19 nt, Artificial Sequence
  Description of Artificial Sequence: Synthetic oligonucleotide
auauaugcaaugguauucc

SEQ ID NO: 206766 - RNA, 19 nt, Artificial Sequence
  Description of Artificial Sequence: Synthetic oligonucleotide
uuagacaugacagugugca

SEQ ID NO: 206767 - RNA, 19 nt, Artificial Sequence
  Description of Artificial Sequence: Synthetic oligonucleotide
uuacaaugaggaaaggaca

SEQ ID NO: 206768 - RNA, 19 nt, Artificial Sequence
  Description of Artificial Sequence: Synthetic oligonucleotide
uaggcuaaauugcaaaccc

SEQ ID NO: 206769 - RNA, 19 nt, Artificial Sequence
  Description of Artificial Sequence: Synthetic oligonucleotide
agguggaaguucuaugucc

SEQ ID NO: 206770 - RNA, 19 nt, Artificial Sequence
  Description of Artificial Sequence: Synthetic oligonucleotide
uccaagucuauccauauau

SEQ ID NO: 206771 - RNA, 19 nt, Artificial Sequence
  Description of Artificial Sequence: Synthetic oligonucleotide
aagguuauggauguaauaa

SEQ ID NO: 206772 - RNA, 19 nt, Artificial Sequence
  Description of Artificial Sequence: Synthetic oligonucleotide
agaguguuuucucagacca

SEQ ID NO: 206773 - RNA, 19 nt, Artificial Sequence
  Description of Artificial Sequence: Synthetic oligonucleotide
auaggcuaaauugcaaacc

SEQ ID NO: 206774 - RNA, 19 nt, Artificial Sequence
  Description of Artificial Sequence: Synthetic oligonucleotide
ucgagcauccgcauaagag

SEQ ID NO: 206775 - RNA, 19 nt, Artificial Sequence
  Description of Artificial Sequence: Synthetic oligonucleotide
uuggguuaguguucaaugg

SEQ ID NO: 206776 - RNA, 19 nt, Artificial Sequence
  Description of Artificial Sequence: Synthetic oligonucleotide
guuacaaugaggaaaggac

SEQ ID NO: 206777 - RNA, 19 nt, Artificial Sequence
  Description of Artificial Sequence: Synthetic oligonucleotide
acaacagaaggagagagag

SEQ ID NO: 206778 - RNA, 19 nt, Artificial Sequence
  Description of Artificial Sequence: Synthetic oligonucleotide
uucuagaaaggacucuucc

SEQ ID NO: 206779 - RNA, 19 nt, Artificial Sequence
  Description of Artificial Sequence: Synthetic oligonucleotide
caagacuccaguaagauaa

SEQ ID NO: 206780 - RNA, 19 nt, Artificial Sequence
  Description of Artificial Sequence: Synthetic oligonucleotide
uauuugugaguaaaaccug

SEQ ID NO: 206781 - RNA, 19 nt, Artificial Sequence
  Description of Artificial Sequence: Synthetic oligonucleotide
ucuuuaguccacuuagucu

SEQ ID NO: 206782 - RNA, 19 nt, Artificial Sequence
  Description of Artificial Sequence: Synthetic oligonucleotide
acaacucagaggugcaggc

SEQ ID NO: 206783 - RNA, 19 nt, Artificial Sequence
  Description of Artificial Sequence: Synthetic oligonucleotide
agggaaaccaagcagacaa

SEQ ID NO: 206784 - RNA, 19 nt, Artificial Sequence
  Description of Artificial Sequence: Synthetic oligonucleotide
gauguaauaaaaggccucc

SEQ ID NO: 206785 - RNA, 19 nt, Artificial Sequence
  Description of Artificial Sequence: Synthetic oligonucleotide
aacuuuaaggcagccacag

SEQ ID NO: 206786 - RNA, 19 nt, Artificial Sequence
  Description of Artificial Sequence: Synthetic oligonucleotide
ugacgcuguaaccagagcu

SEQ ID NO: 206787 - RNA, 19 nt, Artificial Sequence
  Description of Artificial Sequence: Synthetic oligonucleotide
uaucgauaaggguagccag

SEQ ID NO: 206788 - RNA, 19 nt, Artificial Sequence
  Description of Artificial Sequence: Synthetic oligonucleotide
agcggcaaggcucaggagg

SEQ ID NO: 206789 - RNA, 19 nt, Artificial Sequence
  Description of Artificial Sequence: Synthetic oligonucleotide
ucacaugcaaccacaaggu

SEQ ID NO: 206790 - RNA, 19 nt, Artificial Sequence
  Description of Artificial Sequence: Synthetic oligonucleotide
aucacuacaccacacaaaa

SEQ ID NO: 206791 - RNA, 19 nt, Artificial Sequence
  Description of Artificial Sequence: Synthetic oligonucleotide
aagaaaguucuagaaagga

SEQ ID NO: 206792 - RNA, 19 nt, Artificial Sequence
  Description of Artificial Sequence: Synthetic oligonucleotide
uccauauaugcaaugguau

SEQ ID NO: 206793 - RNA, 19 nt, Artificial Sequence
  Description of Artificial Sequence: Synthetic oligonucleotide
uguaauaaaaggccuccuc

SEQ ID NO: 206794 - RNA, 19 nt, Artificial Sequence
  Description of Artificial Sequence: Synthetic oligonucleotide
uuaucgagcauccgcauaa

SEQ ID NO: 206795 - RNA, 19 nt, Artificial Sequence
  Description of Artificial Sequence: Synthetic oligonucleotide
uauaggcuaaauugcaaac

SEQ ID NO: 206796 - RNA, 19 nt, Artificial Sequence
  Description of Artificial Sequence: Synthetic oligonucleotide
ugcaaaacguuaauaaguu

SEQ ID NO: 206797 - RNA, 19 nt, Artificial Sequence
  Description of Artificial Sequence: Synthetic oligonucleotide
gaauuagacuagaaaagug

SEQ ID NO: 206798 - RNA, 19 nt, Artificial Sequence
  Description of Artificial Sequence: Synthetic oligonucleotide
aauaaguuggcaccuccaa

SEQ ID NO: 206799 - RNA, 19 nt, Artificial Sequence
  Description of Artificial Sequence: Synthetic oligonucleotide
cagauuaucgagcauccgc

SEQ ID NO: 206800 - RNA, 19 nt, Artificial Sequence
  Description of Artificial Sequence: Synthetic oligonucleotide
augaugagaaagggaaucc

SEQ ID NO: 206801 - RNA, 19 nt, Artificial Sequence
  Description of Artificial Sequence: Synthetic oligonucleotide
acugacaucaccgagcaga

SEQ ID NO: 206802 - RNA, 19 nt, Artificial Sequence
  Description of Artificial Sequence: Synthetic oligonucleotide
aaagugggaggucauugca

SEQ ID NO: 206803 - RNA, 19 nt, Artificial Sequence
  Description of Artificial Sequence: Synthetic oligonucleotide
acgaccgucaacuaagaca

SEQ ID NO: 206804 - RNA, 19 nt, Artificial Sequence
  Description of Artificial Sequence: Synthetic oligonucleotide
auuccauuacacaagagga

SEQ ID NO: 206805 - RNA, 19 nt, Artificial Sequence
  Description of Artificial Sequence: Synthetic oligonucleotide
guaucuguucccuaugaug

SEQ ID NO: 206806 - RNA, 19 nt, Artificial Sequence
  Description of Artificial Sequence: Synthetic oligonucleotide
uauccauauaugcaauggu

SEQ ID NO: 206807 - RNA, 19 nt, Artificial Sequence
  Description of Artificial Sequence: Synthetic oligonucleotide
ugaacgaggcuucugucca

SEQ ID NO: 206808 - RNA, 19 nt, Artificial Sequence
  Description of Artificial Sequence: Synthetic oligonucleotide
aggagggugacgcuguaac

SEQ ID NO: 206809 - RNA, 19 nt, Artificial Sequence
  Description of Artificial Sequence: Synthetic oligonucleotide
uaaacuaugaacgccugaa

SEQ ID NO: 206810 - RNA, 19 nt, Artificial Sequence
  Description of Artificial Sequence: Synthetic oligonucleotide
gcaggcucaaacuuuaagg

SEQ ID NO: 206811 - RNA, 19 nt, Artificial Sequence
  Description of Artificial Sequence: Synthetic oligonucleotide
uaugaacgccugaaucugg

SEQ ID NO: 206812 - RNA, 19 nt, Artificial Sequence
  Description of Artificial Sequence: Synthetic oligonucleotide
uagucuucgacuugggacu

SEQ ID NO: 206813 - RNA, 19 nt, Artificial Sequence
  Description of Artificial Sequence: Synthetic oligonucleotide
agaguucgaaccuggaucu

SEQ ID NO: 206814 - RNA, 19 nt, Artificial Sequence
  Description of Artificial Sequence: Synthetic oligonucleotide
acgguauuccucuaguuca

SEQ ID NO: 206815 - RNA, 19 nt, Artificial Sequence
  Description of Artificial Sequence: Synthetic oligonucleotide
agucaaguguucugcaguc

SEQ ID NO: 206816 - RNA, 19 nt, Artificial Sequence
  Description of Artificial Sequence: Synthetic oligonucleotide
gggagaguuggcuugaagg

SEQ ID NO: 206817 - RNA, 19 nt, Artificial Sequence
  Description of Artificial Sequence: Synthetic oligonucleotide
uguagcccagauuaucgag

SEQ ID NO: 206818 - RNA, 19 nt, Artificial Sequence
  Description of Artificial Sequence: Synthetic oligonucleotide
augauagucaugauaagca

SEQ ID NO: 206819 - RNA, 19 nt, Artificial Sequence
  Description of Artificial Sequence: Synthetic oligonucleotide
aaaccuucccacacaaguc

SEQ ID NO: 206820 - RNA, 19 nt, Artificial Sequence
  Description of Artificial Sequence: Synthetic oligonucleotide
ugaguaaaaccuguuacaa

SEQ ID NO: 206821 - RNA, 19 nt, Artificial Sequence
  Description of Artificial Sequence: Synthetic oligonucleotide
uggguuaguguucaaugga

SEQ ID NO: 206822 - RNA, 19 nt, Artificial Sequence
  Description of Artificial Sequence: Synthetic oligonucleotide
ugauuccggagaaugagaa

SEQ ID NO: 206823 - RNA, 19 nt, Artificial Sequence
  Description of Artificial Sequence: Synthetic oligonucleotide
ucuaccaugagugaccuuu

SEQ ID NO: 206824 - RNA, 19 nt, Artificial Sequence
  Description of Artificial Sequence: Synthetic oligonucleotide
gucaacuaagacaaaggag

SEQ ID NO: 206825 - RNA, 19 nt, Artificial Sequence
  Description of Artificial Sequence: Synthetic oligonucleotide
auucacagucaaaauauag

SEQ ID NO: 206826 - RNA, 19 nt, Artificial Sequence
  Description of Artificial Sequence: Synthetic oligonucleotide
gaacaagugcccgaauacg

SEQ ID NO: 206827 - RNA, 19 nt, Artificial Sequence
  Description of Artificial Sequence: Synthetic oligonucleotide
accuuuuauaaaaccuucc

SEQ ID NO: 206828 - RNA, 19 nt, Artificial Sequence
  Description of Artificial Sequence: Synthetic oligonucleotide
uccaacugacacaagccca

SEQ ID NO: 206829 - RNA, 19 nt, Artificial Sequence
  Description of Artificial Sequence: Synthetic oligonucleotide
cauaugugggauaaaagaa

SEQ ID NO: 206830 - RNA, 19 nt, Artificial Sequence
  Description of Artificial Sequence: Synthetic oligonucleotide
aguccacuuagucuucgac

SEQ ID NO: 206831 - RNA, 19 nt, Artificial Sequence
  Description of Artificial Sequence: Synthetic oligonucleotide
gaaagugaccuccggggag

SEQ ID NO: 206832 - RNA, 19 nt, Artificial Sequence
  Description of Artificial Sequence: Synthetic oligonucleotide
augaugggaauccaagacu

SEQ ID NO: 206833 - RNA, 19 nt, Artificial Sequence
  Description of Artificial Sequence: Synthetic oligonucleotide
uucgacuugggacugcuuc

SEQ ID NO: 206834 - RNA, 19 nt, Artificial Sequence
  Description of Artificial Sequence: Synthetic oligonucleotide
ugucucguccagauuaucu

SEQ ID NO: 206835 - RNA, 19 nt, Artificial Sequence
  Description of Artificial Sequence: Synthetic oligonucleotide
ucucgaaucuuguuccuca

SEQ ID NO: 206836 - RNA, 19 nt, Artificial Sequence
  Description of Artificial Sequence: Synthetic oligonucleotide
cagaguucgaaccuggauc

SEQ ID NO: 206837 - RNA, 19 nt, Artificial Sequence
  Description of Artificial Sequence: Synthetic oligonucleotide
aggcuaagcccauuucccc

SEQ ID NO: 206838 - RNA, 19 nt, Artificial Sequence
  Description of Artificial Sequence: Synthetic oligonucleotide
ucugagaggcgaacaagug

SEQ ID NO: 206839 - RNA, 19 nt, Artificial Sequence
  Description of Artificial Sequence: Synthetic oligonucleotide
aagggaaagugaccuccgg

SEQ ID NO: 206840 - RNA, 19 nt, Artificial Sequence
  Description of Artificial Sequence: Synthetic oligonucleotide
agauaaacuaugaacgccu

SEQ ID NO: 206841 - RNA, 19 nt, Artificial Sequence
  Description of Artificial Sequence: Synthetic oligonucleotide
cauauaugcaaugguauuc

SEQ ID NO: 206842 - RNA, 19 nt, Artificial Sequence
  Description of Artificial Sequence: Synthetic oligonucleotide
uucccuaugaugggaaucc

SEQ ID NO: 206843 - RNA, 19 nt, Artificial Sequence
  Description of Artificial Sequence: Synthetic oligonucleotide
guaggacuaaguugucugg

SEQ ID NO: 206844 - RNA, 19 nt, Artificial Sequence
  Description of Artificial Sequence: Synthetic oligonucleotide
ggaaccaugggcuuccucc

SEQ ID NO: 206845 - RNA, 19 nt, Artificial Sequence
  Description of Artificial Sequence: Synthetic oligonucleotide
guugagcacacacucauca

SEQ ID NO: 206846 - RNA, 19 nt, Artificial Sequence
  Description of Artificial Sequence: Synthetic oligonucleotide
ugauagucaugauaagcaa

SEQ ID NO: 206847 - RNA, 19 nt, Artificial Sequence
  Description of Artificial Sequence: Synthetic oligonucleotide
ugcaaacccacugaaagaa

SEQ ID NO: 206848 - RNA, 19 nt, Artificial Sequence
  Description of Artificial Sequence: Synthetic oligonucleotide
auucaauauucacaacaga

SEQ ID NO: 206849 - RNA, 19 nt, Artificial Sequence
  Description of Artificial Sequence: Synthetic oligonucleotide
agggaaagugaccuccggg

SEQ ID NO: 206850 - RNA, 19 nt, Artificial Sequence
  Description of Artificial Sequence: Synthetic oligonucleotide
gggauaacugacaucaccg

SEQ ID NO: 206851 - RNA, 19 nt, Artificial Sequence
  Description of Artificial Sequence: Synthetic oligonucleotide
ugauaagcaacaucuccaa

SEQ ID NO: 206852 - RNA, 19 nt, Artificial Sequence
  Description of Artificial Sequence: Synthetic oligonucleotide
aaguucugcucucgaaucu

SEQ ID NO: 206853 - RNA, 19 nt, Artificial Sequence
  Description of Artificial Sequence: Synthetic oligonucleotide
cacaauaggauggaucaag

SEQ ID NO: 206854 - RNA, 19 nt, Artificial Sequence
  Description of Artificial Sequence: Synthetic oligonucleotide
cugaacgaggcuucugucc

SEQ ID NO: 206855 - RNA, 19 nt, Artificial Sequence
  Description of Artificial Sequence: Synthetic oligonucleotide
aggacuaaguugucugguc

SEQ ID NO: 206856 - RNA, 19 nt, Artificial Sequence
  Description of Artificial Sequence: Synthetic oligonucleotide
gggaaagugaccuccgggg

SEQ ID NO: 206857 - RNA, 19 nt, Artificial Sequence
  Description of Artificial Sequence: Synthetic oligonucleotide
uccacuuagucuucgacuu

SEQ ID NO: 206858 - RNA, 19 nt, Artificial Sequence
  Description of Artificial Sequence: Synthetic oligonucleotide
aguguuuucucagaccaug

SEQ ID NO: 206859 - RNA, 19 nt, Artificial Sequence
  Description of Artificial Sequence: Synthetic oligonucleotide
cugagaggcgaacaagugc

SEQ ID NO: 206860 - RNA, 19 nt, Artificial Sequence
  Description of Artificial Sequence: Synthetic oligonucleotide
uguccaucacuacaccaca

SEQ ID NO: 206861 - RNA, 19 nt, Artificial Sequence
  Description of Artificial Sequence: Synthetic oligonucleotide
ugucauccccagaugucgg

SEQ ID NO: 206862 - RNA, 19 nt, Artificial Sequence
  Description of Artificial Sequence: Synthetic oligonucleotide
aacugacacaagcccauga

SEQ ID NO: 206863 - RNA, 19 nt, Artificial Sequence
  Description of Artificial Sequence: Synthetic oligonucleotide
aaacguuaauaaguuggca

SEQ ID NO: 206864 - RNA, 19 nt, Artificial Sequence
  Description of Artificial Sequence: Synthetic oligonucleotide
ucucacaugcaaccacaag

SEQ ID NO: 206865 - RNA, 19 nt, Artificial Sequence
  Description of Artificial Sequence: Synthetic oligonucleotide
caggcuaagcccauuuccc

SEQ ID NO: 206866 - RNA, 19 nt, Artificial Sequence
  Description of Artificial Sequence: Synthetic oligonucleotide
uauuccucuaguucacggu

SEQ ID NO: 206867 - RNA, 19 nt, Artificial Sequence
  Description of Artificial Sequence: Synthetic oligonucleotide
aacaagugcccgaauacga

SEQ ID NO: 206868 - RNA, 19 nt, Artificial Sequence
  Description of Artificial Sequence: Synthetic oligonucleotide
ggaacaaacagguuaggga

SEQ ID NO: 206869 - RNA, 19 nt, Artificial Sequence
  Description of Artificial Sequence: Synthetic oligonucleotide
gugaguaaaaccuguuaca

SEQ ID NO: 206870 - RNA, 19 nt, Artificial Sequence
  Description of Artificial Sequence: Synthetic oligonucleotide
cacaauuacauggggcugg

SEQ ID NO: 206871 - RNA, 19 nt, Artificial Sequence
  Description of Artificial Sequence: Synthetic oligonucleotide
cacaagucaaguguucugc

SEQ ID NO: 206872 - RNA, 19 nt, Artificial Sequence
  Description of Artificial Sequence: Synthetic oligonucleotide
ggaucaagaaagucauggg

SEQ ID NO: 206873 - RNA, 19 nt, Artificial Sequence
  Description of Artificial Sequence: Synthetic oligonucleotide
uugcaaacccacugaaaga

SEQ ID NO: 206874 - RNA, 19 nt, Artificial Sequence
  Description of Artificial Sequence: Synthetic oligonucleotide
uguaaguucugcucucgaa

SEQ ID NO: 206875 - RNA, 19 nt, Artificial Sequence
  Description of Artificial Sequence: Synthetic oligonucleotide
cauugcagagaccgcagcc

SEQ ID NO: 206876 - RNA, 19 nt, Artificial Sequence
  Description of Artificial Sequence: Synthetic oligonucleotide
agcaggcucaaacuuuaag

SEQ ID NO: 206877 - RNA, 19 nt, Artificial Sequence
  Description of Artificial Sequence: Synthetic oligonucleotide
ugccaugauagucaugaua

SEQ ID NO: 206878 - RNA, 19 nt, Artificial Sequence
  Description of Artificial Sequence: Synthetic oligonucleotide
ugguaucuguucccuauga

SEQ ID NO: 206879 - RNA, 19 nt, Artificial Sequence
  Description of Artificial Sequence: Synthetic oligonucleotide
auuagacaugacagugugc

SEQ ID NO: 206880 - RNA, 19 nt, Artificial Sequence
  Description of Artificial Sequence: Synthetic oligonucleotide
caccugagacuccacaggg

SEQ ID NO: 206881 - RNA, 19 nt, Artificial Sequence
  Description of Artificial Sequence: Synthetic oligonucleotide
ucaugauaagcaacaucuc

SEQ ID NO: 206882 - RNA, 19 nt, Artificial Sequence
  Description of Artificial Sequence: Synthetic oligonucleotide
caugagugaccuuuuauaa

SEQ ID NO: 206883 - RNA, 19 nt, Artificial Sequence
  Description of Artificial Sequence: Synthetic oligonucleotide
ucgacuugggacugcuucc

SEQ ID NO: 206884 - RNA, 19 nt, Artificial Sequence
  Description of Artificial Sequence: Synthetic oligonucleotide
uucacggucugugagcgug

SEQ ID NO: 206885 - RNA, 19 nt, Artificial Sequence
  Description of Artificial Sequence: Synthetic oligonucleotide
acgggacuuggcuuuguac

SEQ ID NO: 206886 - RNA, 19 nt, Artificial Sequence
  Description of Artificial Sequence: Synthetic oligonucleotide
aacgccugaaucugguuuu

SEQ ID NO: 206887 - RNA, 19 nt, Artificial Sequence
  Description of Artificial Sequence: Synthetic oligonucleotide
cacuuagucuucgacuugg

SEQ ID NO: 206888 - RNA, 19 nt, Artificial Sequence
  Description of Artificial Sequence: Synthetic oligonucleotide
aggcucaaguuacauggag

SEQ ID NO: 206889 - RNA, 19 nt, Artificial Sequence
  Description of Artificial Sequence: Synthetic oligonucleotide
agauuaucgagcauccgca

SEQ ID NO: 206890 - RNA, 19 nt, Artificial Sequence
  Description of Artificial Sequence: Synthetic oligonucleotide
ucaccaguuagaccaugca

SEQ ID NO: 206891 - RNA, 19 nt, Artificial Sequence
  Description of Artificial Sequence: Synthetic oligonucleotide
agcaggguaucgauaaggg

SEQ ID NO: 206892 - RNA, 19 nt, Artificial Sequence
  Description of Artificial Sequence: Synthetic oligonucleotide
ucauugcagagaccgcagc

SEQ ID NO: 206893 - RNA, 19 nt, Artificial Sequence
  Description of Artificial Sequence: Synthetic oligonucleotide
uccuggaccucuuuugggu

SEQ ID NO: 206894 - RNA, 19 nt, Artificial Sequence
  Description of Artificial Sequence: Synthetic oligonucleotide
agguuauggauguaauaaa

SEQ ID NO: 206895 - RNA, 19 nt, Artificial Sequence
  Description of Artificial Sequence: Synthetic oligonucleotide
auuucauugcagagaccgc

SEQ ID NO: 206896 - RNA, 19 nt, Artificial Sequence
  Description of Artificial Sequence: Synthetic oligonucleotide
acacaagucaaguguucug

SEQ ID NO: 206897 - RNA, 19 nt, Artificial Sequence
  Description of Artificial Sequence: Synthetic oligonucleotide
uccaugaaugaugcaaaac

SEQ ID NO: 206898 - RNA, 19 nt, Artificial Sequence
  Description of Artificial Sequence: Synthetic oligonucleotide
uaaguugucugguccucca

SEQ ID NO: 206899 - RNA, 19 nt, Artificial Sequence
  Description of Artificial Sequence: Synthetic oligonucleotide
gaugucgguuccuggggag

SEQ ID NO: 206900 - RNA, 19 nt, Artificial Sequence
  Description of Artificial Sequence: Synthetic oligonucleotide
ccuaugaugggaauccaag

SEQ ID NO: 206901 - RNA, 19 nt, Artificial Sequence
  Description of Artificial Sequence: Synthetic oligonucleotide
guuuccguuccaccucucg

SEQ ID NO: 206902 - RNA, 19 nt, Artificial Sequence
  Description of Artificial Sequence: Synthetic oligonucleotide
gaauacgaccgucaacuaa

SEQ ID NO: 206903 - RNA, 19 nt, Artificial Sequence
  Description of Artificial Sequence: Synthetic oligonucleotide
cuaugaacgccugaaucug

SEQ ID NO: 206904 - RNA, 19 nt, Artificial Sequence
  Description of Artificial Sequence: Synthetic oligonucleotide
aggguaucgauaaggguag

SEQ ID NO: 206905 - RNA, 19 nt, Artificial Sequence
  Description of Artificial Sequence: Synthetic oligonucleotide
aaacccacugaaagaaagu

SEQ ID NO: 206906 - RNA, 19 nt, Artificial Sequence
  Description of Artificial Sequence: Synthetic oligonucleotide
cugugagcguguugaaggg

SEQ ID NO: 206907 - RNA, 19 nt, Artificial Sequence
  Description of Artificial Sequence: Synthetic oligonucleotide
ugugagcguguugaagggg

SEQ ID NO: 206908 - RNA, 19 nt, Artificial Sequence
  Description of Artificial Sequence: Synthetic oligonucleotide
gucgcucacugcuagagca

SEQ ID NO: 206909 - RNA, 19 nt, Artificial Sequence
  Description of Artificial Sequence: Synthetic oligonucleotide
cuuuaguccacuuagucuu

SEQ ID NO: 206910 - RNA, 19 nt, Artificial Sequence
  Description of Artificial Sequence: Synthetic oligonucleotide
aaugaggaaaggacacaca

SEQ ID NO: 206911 - RNA, 19 nt, Artificial Sequence
  Description of Artificial Sequence: Synthetic oligonucleotide
cugagacuccacagggugg

SEQ ID NO: 206912 - RNA, 19 nt, Artificial Sequence
  Description of Artificial Sequence: Synthetic oligonucleotide
auggggucaccaguuagac

SEQ ID NO: 206913 - RNA, 19 nt, Artificial Sequence
  Description of Artificial Sequence: Synthetic oligonucleotide
ucgacgguauuccucuagu

SEQ ID NO: 206914 - RNA, 19 nt, Artificial Sequence
  Description of Artificial Sequence: Synthetic oligonucleotide
acacaagcccaugauuccg

SEQ ID NO: 206915 - RNA, 19 nt, Artificial Sequence
  Description of Artificial Sequence: Synthetic oligonucleotide
cuaugaugggaauccaaga

SEQ ID NO: 206916 - RNA, 19 nt, Artificial Sequence
  Description of Artificial Sequence: Synthetic oligonucleotide
uuccucuaguucacggucu

SEQ ID NO: 206917 - RNA, 19 nt, Artificial Sequence
  Description of Artificial Sequence: Synthetic oligonucleotide
ggacuaaguugucuggucc

SEQ ID NO: 206918 - RNA, 19 nt, Artificial Sequence
  Description of Artificial Sequence: Synthetic oligonucleotide
cagaugucgguuccugggg

SEQ ID NO: 206919 - RNA, 19 nt, Artificial Sequence
  Description of Artificial Sequence: Synthetic oligonucleotide
ucacaauuacauggggcug

SEQ ID NO: 206920 - RNA, 19 nt, Artificial Sequence
  Description of Artificial Sequence: Synthetic oligonucleotide
cacaacucagaggugcagg

SEQ ID NO: 206921 - RNA, 19 nt, Artificial Sequence
  Description of Artificial Sequence: Synthetic oligonucleotide
caugaaugaugcaaaacgu

SEQ ID NO: 206922 - RNA, 19 nt, Artificial Sequence
  Description of Artificial Sequence: Synthetic oligonucleotide
ggauggaucaagaaaguca

SEQ ID NO: 206923 - RNA, 19 nt, Artificial Sequence
  Description of Artificial Sequence: Synthetic oligonucleotide
uuccggagaaugagaaccu

SEQ ID NO: 206924 - RNA, 19 nt, Artificial Sequence
  Description of Artificial Sequence: Synthetic oligonucleotide
ggggauaacugacaucacc

SEQ ID NO: 206925 - RNA, 19 nt, Artificial Sequence
  Description of Artificial Sequence: Synthetic oligonucleotide
agacuccaguaagauaaac

SEQ ID NO: 206926 - RNA, 19 nt, Artificial Sequence
  Description of Artificial Sequence: Synthetic oligonucleotide
gauuccggagaaugagaac

SEQ ID NO: 206927 - RNA, 19 nt, Artificial Sequence
  Description of Artificial Sequence: Synthetic oligonucleotide
uuuaguccacuuagucuuc

SEQ ID NO: 206928 - RNA, 19 nt, Artificial Sequence
  Description of Artificial Sequence: Synthetic oligonucleotide
acuaaguugucugguccuc

SEQ ID NO: 206929 - RNA, 19 nt, Artificial Sequence
  Description of Artificial Sequence: Synthetic oligonucleotide
augagaguguuuucucaga

SEQ ID NO: 206930 - RNA, 19 nt, Artificial Sequence
  Description of Artificial Sequence: Synthetic oligonucleotide
guaucgauaaggguagcca

SEQ ID NO: 206931 - RNA, 19 nt, Artificial Sequence
  Description of Artificial Sequence: Synthetic oligonucleotide
agcccauuuccccacagaa

SEQ ID NO: 206932 - RNA, 19 nt, Artificial Sequence
  Description of Artificial Sequence: Synthetic oligonucleotide
agggugacgcuguaaccag

SEQ ID NO: 206933 - RNA, 19 nt, Artificial Sequence
  Description of Artificial Sequence: Synthetic oligonucleotide
uucuauguccauccucuuu

SEQ ID NO: 206934 - RNA, 19 nt, Artificial Sequence
  Description of Artificial Sequence: Synthetic oligonucleotide
gagggugacgcuguaacca

SEQ ID NO: 206935 - RNA, 19 nt, Artificial Sequence
  Description of Artificial Sequence: Synthetic oligonucleotide
uccgcauaagagcuucaaa

SEQ ID NO: 206936 - RNA, 19 nt, Artificial Sequence
  Description of Artificial Sequence: Synthetic oligonucleotide
aggaggcucaaguuacaug

SEQ ID NO: 206937 - RNA, 19 nt, Artificial Sequence
  Description of Artificial Sequence: Synthetic oligonucleotide
ucacuacaccacacaaaac

SEQ ID NO: 206938 - RNA, 19 nt, Artificial Sequence
  Description of Artificial Sequence: Synthetic oligonucleotide
aguucuagaaaggacucuu

SEQ ID NO: 206939 - RNA, 19 nt, Artificial Sequence
  Description of Artificial Sequence: Synthetic oligonucleotide
ugcccgaauacgaccguca

SEQ ID NO: 206940 - RNA, 19 nt, Artificial Sequence
  Description of Artificial Sequence: Synthetic oligonucleotide
uauggggauaacugacauc

SEQ ID NO: 206941 - RNA, 19 nt, Artificial Sequence
  Description of Artificial Sequence: Synthetic oligonucleotide
accaugagugaccuuuuau

SEQ ID NO: 206942 - RNA, 19 nt, Artificial Sequence
  Description of Artificial Sequence: Synthetic oligonucleotide
agcguguugaagggguugg

SEQ ID NO: 206943 - RNA, 19 nt, Artificial Sequence
  Description of Artificial Sequence: Synthetic oligonucleotide
ugucgguuccuggggaggg

SEQ ID NO: 206944 - RNA, 19 nt, Artificial Sequence
  Description of Artificial Sequence: Synthetic oligonucleotide
gagguggaaguucuauguc

SEQ ID NO: 206945 - RNA, 19 nt, Artificial Sequence
  Description of Artificial Sequence: Synthetic oligonucleotide
uggagucccuggagaacgg

SEQ ID NO: 206946 - RNA, 19 nt, Artificial Sequence
  Description of Artificial Sequence: Synthetic oligonucleotide
aaccuguuacaaugaggaa

SEQ ID NO: 206947 - RNA, 19 nt, Artificial Sequence
  Description of Artificial Sequence: Synthetic oligonucleotide
ccaguuagaccaugcauag

SEQ ID NO: 206948 - RNA, 19 nt, Artificial Sequence
  Description of Artificial Sequence: Synthetic oligonucleotide
ucgcucacugcuagagcag

SEQ ID NO: 206949 - RNA, 19 nt, Artificial Sequence
  Description of Artificial Sequence: Synthetic oligonucleotide
acaauaggauggaucaaga

SEQ ID NO: 206950 - RNA, 19 nt, Artificial Sequence
  Description of Artificial Sequence: Synthetic oligonucleotide
acaugcaaccacaagguua

SEQ ID NO: 206951 - RNA, 19 nt, Artificial Sequence
  Description of Artificial Sequence: Synthetic oligonucleotide
ucaauggaacaaacagguu

SEQ ID NO: 206952 - RNA, 19 nt, Artificial Sequence
  Description of Artificial Sequence: Synthetic oligonucleotide
ccgucaacuaagacaaagg

SEQ ID NO: 206953 - RNA, 19 nt, Artificial Sequence
  Description of Artificial Sequence: Synthetic oligonucleotide
ggcucaaguuacauggagg

SEQ ID NO: 206954 - RNA, 19 nt, Artificial Sequence
  Description of Artificial Sequence: Synthetic oligonucleotide
auuaucgagcauccgcaua

SEQ ID NO: 206955 - RNA, 19 nt, Artificial Sequence
  Description of Artificial Sequence: Synthetic oligonucleotide
uggaaguucuauguccauc

SEQ ID NO: 206956 - RNA, 19 nt, Artificial Sequence
  Description of Artificial Sequence: Synthetic oligonucleotide
aguucgaaccuggaucuca

SEQ ID NO: 206957 - RNA, 19 nt, Artificial Sequence
  Description of Artificial Sequence: Synthetic oligonucleotide
gauucccuguguaugggga

SEQ ID NO: 206958 - RNA, 19 nt, Artificial Sequence
  Description of Artificial Sequence: Synthetic oligonucleotide
ggcuaaauugcaaacccac

SEQ ID NO: 206959 - RNA, 19 nt, Artificial Sequence
  Description of Artificial Sequence: Synthetic oligonucleotide
aggaaacugcuuaaagacu

SEQ ID NO: 206960 - RNA, 19 nt, Artificial Sequence
  Description of Artificial Sequence: Synthetic oligonucleotide
gcaaaacguuaauaaguug

SEQ ID NO: 206961 - RNA, 19 nt, Artificial Sequence
  Description of Artificial Sequence: Synthetic oligonucleotide
cauaggagaccccuccuca

SEQ ID NO: 206962 - RNA, 19 nt, Artificial Sequence
  Description of Artificial Sequence: Synthetic oligonucleotide
augggcaugagaguguuuu

SEQ ID NO: 206963 - RNA, 19 nt, Artificial Sequence
  Description of Artificial Sequence: Synthetic oligonucleotide
cugaaaacugugucugaga

SEQ ID NO: 206964 - RNA, 19 nt, Artificial Sequence
  Description of Artificial Sequence: Synthetic oligonucleotide
uacgaccgucaacuaagac

SEQ ID NO: 206965 - RNA, 19 nt, Artificial Sequence
  Description of Artificial Sequence: Synthetic oligonucleotide
augaaugaugcaaaacguu

SEQ ID NO: 206966 - RNA, 19 nt, Artificial Sequence
  Description of Artificial Sequence: Synthetic oligonucleotide
cgagcauccgcauaagagc

SEQ ID NO: 206967 - RNA, 19 nt, Artificial Sequence
  Description of Artificial Sequence: Synthetic oligonucleotide
aagccaaaucagccaccug

SEQ ID NO: 206968 - RNA, 19 nt, Artificial Sequence
  Description of Artificial Sequence: Synthetic oligonucleotide
cucgacgguauuccucuag

SEQ ID NO: 206969 - RNA, 19 nt, Artificial Sequence
  Description of Artificial Sequence: Synthetic oligonucleotide
aacugacaucaccgagcag

SEQ ID NO: 206970 - RNA, 19 nt, Artificial Sequence
  Description of Artificial Sequence: Synthetic oligonucleotide
agggagaguuggcuugaag

SEQ ID NO: 206971 - RNA, 19 nt, Artificial Sequence
  Description of Artificial Sequence: Synthetic oligonucleotide
guaaguucugcucucgaau

SEQ ID NO: 206972 - RNA, 19 nt, Artificial Sequence
  Description of Artificial Sequence: Synthetic oligonucleotide
gugaccuuuuauaaaaccu

SEQ ID NO: 206973 - RNA, 19 nt, Artificial Sequence
  Description of Artificial Sequence: Synthetic oligonucleotide
ugcaggcuaagcccauuuc

SEQ ID NO: 206974 - RNA, 19 nt, Artificial Sequence
  Description of Artificial Sequence: Synthetic oligonucleotide
acuuuaaggcagccacagu

SEQ ID NO: 206975 - RNA, 19 nt, Artificial Sequence
  Description of Artificial Sequence: Synthetic oligonucleotide
uggggucaccaguuagacc

SEQ ID NO: 206976 - RNA, 19 nt, Artificial Sequence
  Description of Artificial Sequence: Synthetic oligonucleotide
cauggggucaccaguuaga

SEQ ID NO: 206977 - RNA, 19 nt, Artificial Sequence
  Description of Artificial Sequence: Synthetic oligonucleotide
aucgagcauccgcauaaga

SEQ ID NO: 206978 - RNA, 19 nt, Artificial Sequence
  Description of Artificial Sequence: Synthetic oligonucleotide
auguaauaaaaggccuccu

SEQ ID NO: 206979 - RNA, 19 nt, Artificial Sequence
  Description of Artificial Sequence: Synthetic oligonucleotide
caguaagauaaacuaugaa

SEQ ID NO: 206980 - RNA, 19 nt, Artificial Sequence
  Description of Artificial Sequence: Synthetic oligonucleotide
ucuucgacuugggacugcu

SEQ ID NO: 206981 - RNA, 19 nt, Artificial Sequence
  Description of Artificial Sequence: Synthetic oligonucleotide
gucaccaguuagaccaugc

SEQ ID NO: 206982 - RNA, 19 nt, Artificial Sequence
  Description of Artificial Sequence: Synthetic oligonucleotide
caagcccaugauuccggag

SEQ ID NO: 206983 - RNA, 19 nt, Artificial Sequence
  Description of Artificial Sequence: Synthetic oligonucleotide
gggacuugccuggagaccc

SEQ ID NO: 206984 - RNA, 19 nt, Artificial Sequence
  Description of Artificial Sequence: Synthetic oligonucleotide
gaggcgaacaagugcccga

SEQ ID NO: 206985 - RNA, 19 nt, Artificial Sequence
  Description of Artificial Sequence: Synthetic oligonucleotide
gaccccuccucaguggcag

SEQ ID NO: 206986 - RNA, 19 nt, Artificial Sequence
  Description of Artificial Sequence: Synthetic oligonucleotide
uaucgagcauccgcauaag

SEQ ID NO: 206987 - RNA, 19 nt, Artificial Sequence
  Description of Artificial Sequence: Synthetic oligonucleotide
gguaucgauaaggguagcc

SEQ ID NO: 206988 - RNA, 19 nt, Artificial Sequence
  Description of Artificial Sequence: Synthetic oligonucleotide
cugguaucuguucccuaug

SEQ ID NO: 206989 - RNA, 19 nt, Artificial Sequence
  Description of Artificial Sequence: Synthetic oligonucleotide
accccggccagaguucagc

SEQ ID NO: 206990 - RNA, 19 nt, Artificial Sequence
  Description of Artificial Sequence: Synthetic oligonucleotide
uguucccuaugaugggaau

SEQ ID NO: 206991 - RNA, 19 nt, Artificial Sequence
  Description of Artificial Sequence: Synthetic oligonucleotide
augauuccggagaaugaga

SEQ ID NO: 206992 - RNA, 19 nt, Artificial Sequence
  Description of Artificial Sequence: Synthetic oligonucleotide
acuuagucuucgacuuggg

SEQ ID NO: 206993 - RNA, 19 nt, Artificial Sequence
  Description of Artificial Sequence: Synthetic oligonucleotide
agggucagccucagcaagg

SEQ ID NO: 206994 - RNA, 19 nt, Artificial Sequence
  Description of Artificial Sequence: Synthetic oligonucleotide
ggauaacugacaucaccga

SEQ ID NO: 206995 - RNA, 19 nt, Artificial Sequence
  Description of Artificial Sequence: Synthetic oligonucleotide
ucauugcauaugugggaua

SEQ ID NO: 206996 - RNA, 19 nt, Artificial Sequence
  Description of Artificial Sequence: Synthetic oligonucleotide
caccucucgacgguauucc

SEQ ID NO: 206997 - RNA, 19 nt, Artificial Sequence
  Description of Artificial Sequence: Synthetic oligonucleotide
gguuaguguucaauggaac

SEQ ID NO: 206998 - RNA, 19 nt, Artificial Sequence
  Description of Artificial Sequence: Synthetic oligonucleotide
aggggaggcuaccucuuca

SEQ ID NO: 206999 - RNA, 19 nt, Artificial Sequence
  Description of Artificial Sequence: Synthetic oligonucleotide
guccacuuagucuucgacu

SEQ ID NO: 207000 - RNA, 19 nt, Artificial Sequence
  Description of Artificial Sequence: Synthetic oligonucleotide
ugacaucaccgagcagagg

SEQ ID NO: 207001 - RNA, 19 nt, Artificial Sequence
  Description of Artificial Sequence: Synthetic oligonucleotide
cauccccagaugucgguuc

SEQ ID NO: 207002 - RNA, 19 nt, Artificial Sequence
  Description of Artificial Sequence: Synthetic oligonucleotide
gguagccaguucuguagcc

SEQ ID NO: 207003 - RNA, 19 nt, Artificial Sequence
  Description of Artificial Sequence: Synthetic oligonucleotide
caaugguauuccaugugua

SEQ ID NO: 207004 - RNA, 19 nt, Artificial Sequence
  Description of Artificial Sequence: Synthetic oligonucleotide
augucgguuccuggggagg

SEQ ID NO: 207005 - RNA, 19 nt, Artificial Sequence
  Description of Artificial Sequence: Synthetic oligonucleotide
gguauuccucuaguucacg

SEQ ID NO: 207006 - RNA, 19 nt, Artificial Sequence
  Description of Artificial Sequence: Synthetic oligonucleotide
uggggauaacugacaucac

SEQ ID NO: 207007 - RNA, 19 nt, Artificial Sequence
  Description of Artificial Sequence: Synthetic oligonucleotide
ggagaguuggcuugaaggu

SEQ ID NO: 207008 - RNA, 19 nt, Artificial Sequence
  Description of Artificial Sequence: Synthetic oligonucleotide
cagggucgcucacugcuag

SEQ ID NO: 207009 - RNA, 19 nt, Artificial Sequence
  Description of Artificial Sequence: Synthetic oligonucleotide
guucccuaugaugggaauc

SEQ ID NO: 207010 - RNA, 19 nt, Artificial Sequence
  Description of Artificial Sequence: Synthetic oligonucleotide
uaccaugagugaccuuuua

SEQ ID NO: 207011 - RNA, 19 nt, Artificial Sequence
  Description of Artificial Sequence: Synthetic oligonucleotide
gagcauccgcauaagagcu

SEQ ID NO: 207012 - RNA, 19 nt, Artificial Sequence
  Description of Artificial Sequence: Synthetic oligonucleotide
aggcuaaauugcaaaccca

SEQ ID NO: 207013 - RNA, 19 nt, Artificial Sequence
  Description of Artificial Sequence: Synthetic oligonucleotide
acaauuacauggggcuggu

SEQ ID NO: 207014 - RNA, 19 nt, Artificial Sequence
  Description of Artificial Sequence: Synthetic oligonucleotide
ggcuccaugaaugaugcaa

SEQ ID NO: 207015 - RNA, 19 nt, Artificial Sequence
  Description of Artificial Sequence: Synthetic oligonucleotide
cuguagcccagauuaucga

SEQ ID NO: 207016 - RNA, 19 nt, Artificial Sequence
  Description of Artificial Sequence: Synthetic oligonucleotide
ugggcaugagaguguuuuc

SEQ ID NO: 207017 - RNA, 19 nt, Artificial Sequence
  Description of Artificial Sequence: Synthetic oligonucleotide
guucgaaccuggaucucac

SEQ ID NO: 207018 - RNA, 19 nt, Artificial Sequence
  Description of Artificial Sequence: Synthetic oligonucleotide
gagaacgggacuuggcuuu

SEQ ID NO: 207019 - RNA, 19 nt, Artificial Sequence
  Description of Artificial Sequence: Synthetic oligonucleotide
cucucgacgguauuccucu

SEQ ID NO: 207020 - RNA, 19 nt, Artificial Sequence
  Description of Artificial Sequence: Synthetic oligonucleotide
ggagggugacgcuguaacc

SEQ ID NO: 207021 - RNA, 19 nt, Artificial Sequence
  Description of Artificial Sequence: Synthetic oligonucleotide
cgaacaagugcccgaauac

SEQ ID NO: 207022 - RNA, 19 nt, Artificial Sequence
  Description of Artificial Sequence: Synthetic oligonucleotide
gcaaugguauuccaugugu

SEQ ID NO: 207023 - RNA, 19 nt, Artificial Sequence
  Description of Artificial Sequence: Synthetic oligonucleotide
cccacugaaagaaaguucu

SEQ ID NO: 207024 - RNA, 19 nt, Artificial Sequence
  Description of Artificial Sequence: Synthetic oligonucleotide
aaguuacauggaggucuug

SEQ ID NO: 207025 - RNA, 19 nt, Artificial Sequence
  Description of Artificial Sequence: Synthetic oligonucleotide
ucacggucugugagcgugu

SEQ ID NO: 207026 - RNA, 19 nt, Artificial Sequence
  Description of Artificial Sequence: Synthetic oligonucleotide
gaaguucuauguccauccu

SEQ ID NO: 207027 - RNA, 19 nt, Artificial Sequence
  Description of Artificial Sequence: Synthetic oligonucleotide
aagacuccaguaagauaaa

SEQ ID NO: 207028 - RNA, 19 nt, Artificial Sequence
  Description of Artificial Sequence: Synthetic oligonucleotide
ugagcguguugaagggguu

SEQ ID NO: 207029 - RNA, 19 nt, Artificial Sequence
  Description of Artificial Sequence: Synthetic oligonucleotide
gugacgcuguaaccagagc

SEQ ID NO: 207030 - RNA, 19 nt, Artificial Sequence
  Description of Artificial Sequence: Synthetic oligonucleotide
gauuaucgagcauccgcau

SEQ ID NO: 207031 - RNA, 19 nt, Artificial Sequence
  Description of Artificial Sequence: Synthetic oligonucleotide
aggcuucuaccaugaguga

SEQ ID NO: 207032 - RNA, 19 nt, Artificial Sequence
  Description of Artificial Sequence: Synthetic oligonucleotide
ugagugggcucuggggaac

SEQ ID NO: 207033 - RNA, 19 nt, Artificial Sequence
  Description of Artificial Sequence: Synthetic oligonucleotide
gccaaaucagccaccugag

SEQ ID NO: 207034 - RNA, 19 nt, Artificial Sequence
  Description of Artificial Sequence: Synthetic oligonucleotide
cauucugccccuccucaga

SEQ ID NO: 207035 - RNA, 19 nt, Artificial Sequence
  Description of Artificial Sequence: Synthetic oligonucleotide
uuccaccucucgacgguau

SEQ ID NO: 207036 - RNA, 19 nt, Artificial Sequence
  Description of Artificial Sequence: Synthetic oligonucleotide
gcuaagcccauuuccccac

SEQ ID NO: 207037 - RNA, 19 nt, Artificial Sequence
  Description of Artificial Sequence: Synthetic oligonucleotide
agucuucgacuugggacug

SEQ ID NO: 207038 - RNA, 19 nt, Artificial Sequence
  Description of Artificial Sequence: Synthetic oligonucleotide
caguuagaccaugcauagc

SEQ ID NO: 207039 - RNA, 19 nt, Artificial Sequence
  Description of Artificial Sequence: Synthetic oligonucleotide
ccaaucugccaugugggag

SEQ ID NO: 207040 - RNA, 19 nt, Artificial Sequence
  Description of Artificial Sequence: Synthetic oligonucleotide
accgagcagaggaugccag

SEQ ID NO: 207041 - RNA, 19 nt, Artificial Sequence
  Description of Artificial Sequence: Synthetic oligonucleotide
ggcuaagcccauuucccca

SEQ ID NO: 207042 - RNA, 19 nt, Artificial Sequence
  Description of Artificial Sequence: Synthetic oligonucleotide
cuccggggagauaggcaag

SEQ ID NO: 207043 - RNA, 19 nt, Artificial Sequence
  Description of Artificial Sequence: Synthetic oligonucleotide
agugcccgaauacgaccgu

SEQ ID NO: 207044 - RNA, 19 nt, Artificial Sequence
  Description of Artificial Sequence: Synthetic oligonucleotide
ccggagaaugagaaccuug

SEQ ID NO: 207045 - RNA, 19 nt, Artificial Sequence
  Description of Artificial Sequence: Synthetic oligonucleotide
gcggcaaggcucaggaggg

SEQ ID NO: 207046 - RNA, 19 nt, Artificial Sequence
  Description of Artificial Sequence: Synthetic oligonucleotide
accucucgacgguauuccu

SEQ ID NO: 207047 - RNA, 19 nt, Artificial Sequence
  Description of Artificial Sequence: Synthetic oligonucleotide
ggcuucuaccaugagugac

SEQ ID NO: 207048 - RNA, 19 nt, Artificial Sequence
  Description of Artificial Sequence: Synthetic oligonucleotide
ucccuaugaugggaaucca

SEQ ID NO: 207049 - RNA, 19 nt, Artificial Sequence
  Description of Artificial Sequence: Synthetic oligonucleotide
ccaugagugaccuuuuaua

SEQ ID NO: 207050 - RNA, 19 nt, Artificial Sequence
  Description of Artificial Sequence: Synthetic oligonucleotide
ccaugcauagcauugugcu

SEQ ID NO: 207051 - RNA, 19 nt, Artificial Sequence
  Description of Artificial Sequence: Synthetic oligonucleotide
ucaccccggccagaguuca

SEQ ID NO: 207052 - RNA, 19 nt, Artificial Sequence
  Description of Artificial Sequence: Synthetic oligonucleotide
agaacgggacuuggcuuug

SEQ ID NO: 207053 - RNA, 19 nt, Artificial Sequence
  Description of Artificial Sequence: Synthetic oligonucleotide
cuguucccuaugaugggaa

SEQ ID NO: 207054 - RNA, 19 nt, Artificial Sequence
  Description of Artificial Sequence: Synthetic oligonucleotide
guggccuguucaaauucac

SEQ ID NO: 207055 - RNA, 19 nt, Artificial Sequence
  Description of Artificial Sequence: Synthetic oligonucleotide
auccgcauaagagcuucaa

SEQ ID NO: 207056 - RNA, 19 nt, Artificial Sequence
  Description of Artificial Sequence: Synthetic oligonucleotide
uccaccucucgacgguauu

SEQ ID NO: 207057 - RNA, 19 nt, Artificial Sequence
  Description of Artificial Sequence: Synthetic oligonucleotide
ccgaauacgaccgucaacu

SEQ ID NO: 207058 - RNA, 19 nt, Artificial Sequence
  Description of Artificial Sequence: Synthetic oligonucleotide
auacgaccgucaacuaaga

SEQ ID NO: 207059 - RNA, 19 nt, Artificial Sequence
  Description of Artificial Sequence: Synthetic oligonucleotide
gucucguccagauuaucuu

SEQ ID NO: 207060 - RNA, 19 nt, Artificial Sequence
  Description of Artificial Sequence: Synthetic oligonucleotide
gccaggucauuagacauga

SEQ ID NO: 207061 - RNA, 19 nt, Artificial Sequence
  Description of Artificial Sequence: Synthetic oligonucleotide
ggguuaguguucaauggaa

SEQ ID NO: 207062 - RNA, 19 nt, Artificial Sequence
  Description of Artificial Sequence: Synthetic oligonucleotide
uugucucguccagauuauc

SEQ ID NO: 207063 - RNA, 19 nt, Artificial Sequence
  Description of Artificial Sequence: Synthetic oligonucleotide
ucgguuccuggggaggguc

SEQ ID NO: 207064 - RNA, 19 nt, Artificial Sequence
  Description of Artificial Sequence: Synthetic oligonucleotide
cacacaagucaaguguucu

SEQ ID NO: 207065 - RNA, 19 nt, Artificial Sequence
  Description of Artificial Sequence: Synthetic oligonucleotide
gcgaacaagugcccgaaua

SEQ ID NO: 207066 - RNA, 19 nt, Artificial Sequence
  Description of Artificial Sequence: Synthetic oligonucleotide
gugagcguguugaaggggu

SEQ ID NO: 207067 - RNA, 19 nt, Artificial Sequence
  Description of Artificial Sequence: Synthetic oligonucleotide
caccaguuagaccaugcau

SEQ ID NO: 207068 - RNA, 19 nt, Artificial Sequence
  Description of Artificial Sequence: Synthetic oligonucleotide
ccgcauaagagcuucaaau

SEQ ID NO: 207069 - RNA, 19 nt, Artificial Sequence
  Description of Artificial Sequence: Synthetic oligonucleotide
cuggggaaccaugggcuuc

SEQ ID NO: 207070 - RNA, 19 nt, Artificial Sequence
  Description of Artificial Sequence: Synthetic oligonucleotide
accugagacuccacagggu

SEQ ID NO: 207071 - RNA, 19 nt, Artificial Sequence
  Description of Artificial Sequence: Synthetic oligonucleotide
gcauccgcauaagagcuuc

SEQ ID NO: 207072 - RNA, 19 nt, Artificial Sequence
  Description of Artificial Sequence: Synthetic oligonucleotide
ccugaacgaggcuucuguc

SEQ ID NO: 207073 - RNA, 19 nt, Artificial Sequence
  Description of Artificial Sequence: Synthetic oligonucleotide
acgccugaaucugguuuug

SEQ ID NO: 207074 - RNA, 19 nt, Artificial Sequence
  Description of Artificial Sequence: Synthetic oligonucleotide
cuaagcccauuuccccaca

SEQ ID NO: 207075 - RNA, 19 nt, Artificial Sequence
  Description of Artificial Sequence: Synthetic oligonucleotide
agggucgcucacugcuaga

SEQ ID NO: 207076 - RNA, 19 nt, Artificial Sequence
  Description of Artificial Sequence: Synthetic oligonucleotide
ccucucgacgguauuccuc

SEQ ID NO: 207077 - RNA, 19 nt, Artificial Sequence
  Description of Artificial Sequence: Synthetic oligonucleotide
cuugucucguccagauuau

SEQ ID NO: 207078 - RNA, 19 nt, Artificial Sequence
  Description of Artificial Sequence: Synthetic oligonucleotide
ucucgacgguauuccucua

SEQ ID NO: 207079 - RNA, 19 nt, Artificial Sequence
  Description of Artificial Sequence: Synthetic oligonucleotide
cauccgcauaagagcuuca

SEQ ID NO: 207080 - RNA, 19 nt, Artificial Sequence
  Description of Artificial Sequence: Synthetic oligonucleotide
cuccccaaucugccaugug

SEQ ID NO: 207081 - RNA, 19 nt, Artificial Sequence
  Description of Artificial Sequence: Synthetic oligonucleotide
cagagaccgcagccccugc

SEQ ID NO: 207082 - RNA, 19 nt, Artificial Sequence
  Description of Artificial Sequence: Synthetic oligonucleotide
gguguacacagggucgcuc

SEQ ID NO: 207083 - RNA, 19 nt, Artificial Sequence
  Description of Artificial Sequence: Synthetic oligonucleotide
gcuaaauugcaaacccacu

SEQ ID NO: 207084 - RNA, 19 nt, Artificial Sequence
  Description of Artificial Sequence: Synthetic oligonucleotide
cggggagauaggcaagagc

SEQ ID NO: 207085 - RNA, 19 nt, Artificial Sequence
  Description of Artificial Sequence: Synthetic oligonucleotide
cccgaauacgaccgucaac

SEQ ID NO: 207086 - RNA, 19 nt, Artificial Sequence
  Description of Artificial Sequence: Synthetic oligonucleotide
guuagaccaugcauagcau

SEQ ID NO: 207087 - RNA, 19 nt, Artificial Sequence
  Description of Artificial Sequence: Synthetic oligonucleotide
gguaucuguucccuaugau

SEQ ID NO: 207088 - RNA, 19 nt, Artificial Sequence
  Description of Artificial Sequence: Synthetic oligonucleotide
ccacuuagucuucgacuug

SEQ ID NO: 207089 - RNA, 19 nt, Artificial Sequence
  Description of Artificial Sequence: Synthetic oligonucleotide
uccccagaugucgguuccu

SEQ ID NO: 207090 - RNA, 19 nt, Artificial Sequence
  Description of Artificial Sequence: Synthetic oligonucleotide
gaggaggcucaaguuacau

SEQ ID NO: 207091 - RNA, 19 nt, Artificial Sequence
  Description of Artificial Sequence: Synthetic oligonucleotide
gucuucgacuugggacugc

SEQ ID NO: 207092 - RNA, 19 nt, Artificial Sequence
  Description of Artificial Sequence: Synthetic oligonucleotide
ggauccaguaggacuaagu

SEQ ID NO: 207093 - RNA, 19 nt, Artificial Sequence
  Description of Artificial Sequence: Synthetic oligonucleotide
ggaaaccaagcagacaauu

SEQ ID NO: 207094 - RNA, 19 nt, Artificial Sequence
  Description of Artificial Sequence: Synthetic oligonucleotide
cgguauuccucuaguucac

SEQ ID NO: 207095 - RNA, 19 nt, Artificial Sequence
  Description of Artificial Sequence: Synthetic oligonucleotide
gcguguugaagggguuggg

SEQ ID NO: 207096 - RNA, 19 nt, Artificial Sequence
  Description of Artificial Sequence: Synthetic oligonucleotide
caccgagcagaggaugcca

SEQ ID NO: 207097 - RNA, 19 nt, Artificial Sequence
  Description of Artificial Sequence: Synthetic oligonucleotide
gugcccgaauacgaccguc

SEQ ID NO: 207098 - RNA, 19 nt, Artificial Sequence
  Description of Artificial Sequence: Synthetic oligonucleotide
caaggcaggcuucuaccau

SEQ ID NO: 207099 - RNA, 19 nt, Artificial Sequence
  Description of Artificial Sequence: Synthetic oligonucleotide
agcacuggccagaguucga

SEQ ID NO: 207100 - RNA, 19 nt, Artificial Sequence
  Description of Artificial Sequence: Synthetic oligonucleotide
ccauauaugcaaugguauu

SEQ ID NO: 207101 - RNA, 19 nt, Artificial Sequence
  Description of Artificial Sequence: Synthetic oligonucleotide
agcauccgcauaagagcuu

SEQ ID NO: 207102 - RNA, 19 nt, Artificial Sequence
  Description of Artificial Sequence: Synthetic oligonucleotide
acagggucgcucacugcua

SEQ ID NO: 207103 - RNA, 19 nt, Artificial Sequence
  Description of Artificial Sequence: Synthetic oligonucleotide
ccaaaucagccaccugaga

SEQ ID NO: 207104 - RNA, 19 nt, Artificial Sequence
  Description of Artificial Sequence: Synthetic oligonucleotide
cccuaugaugggaauccaa

SEQ ID NO: 207105 - RNA, 19 nt, Artificial Sequence
  Description of Artificial Sequence: Synthetic oligonucleotide
cgcuguaaccagagcuggc

SEQ ID NO: 207106 - RNA, 19 nt, Artificial Sequence
  Description of Artificial Sequence: Synthetic oligonucleotide
caccccggccagaguucag

SEQ ID NO: 207107 - RNA, 19 nt, Artificial Sequence
  Description of Artificial Sequence: Synthetic oligonucleotide
gugcaggcuaagcccauuu

SEQ ID NO: 207108 - RNA, 19 nt, Artificial Sequence
  Description of Artificial Sequence: Synthetic oligonucleotide
ccaacugacacaagcccau

SEQ ID NO: 207109 - RNA, 19 nt, Artificial Sequence
  Description of Artificial Sequence: Synthetic oligonucleotide
cuaccaugagugaccuuuu

SEQ ID NO: 207110 - RNA, 19 nt, Artificial Sequence
  Description of Artificial Sequence: Synthetic oligonucleotide
ggguaucgauaaggguagc

SEQ ID NO: 207111 - RNA, 19 nt, Artificial Sequence
  Description of Artificial Sequence: Synthetic oligonucleotide
cccaaucugccauguggga

SEQ ID NO: 207112 - RNA, 19 nt, Artificial Sequence
  Description of Artificial Sequence: Synthetic oligonucleotide
cacaugcaaccacaagguu

SEQ ID NO: 207113 - RNA, 19 nt, Artificial Sequence
  Description of Artificial Sequence: Synthetic oligonucleotide
ggaggaggcucaaguuaca

SEQ ID NO: 207114 - RNA, 19 nt, Artificial Sequence
  Description of Artificial Sequence: Synthetic oligonucleotide
gcccgaauacgaccgucaa

SEQ ID NO: 207115 - RNA, 19 nt, Artificial Sequence
  Description of Artificial Sequence: Synthetic oligonucleotide
cauccucuuuaguccacuu

SEQ ID NO: 207116 - RNA, 19 nt, Artificial Sequence
  Description of Artificial Sequence: Synthetic oligonucleotide
ccaggucauuagacaugac

SEQ ID NO: 207117 - RNA, 19 nt, Artificial Sequence
  Description of Artificial Sequence: Synthetic oligonucleotide
cccugaacgaggcuucugu

SEQ ID NO: 207118 - RNA, 19 nt, Artificial Sequence
  Description of Artificial Sequence: Synthetic oligonucleotide
gacccaucgcugccagcau

SEQ ID NO: 207119 - RNA, 19 nt, Artificial Sequence
  Description of Artificial Sequence: Synthetic oligonucleotide
guucacggucugugagcgu

SEQ ID NO: 207120 - RNA, 19 nt, Artificial Sequence
  Description of Artificial Sequence: Synthetic oligonucleotide
cgccugaaucugguuuugg

SEQ ID NO: 207121 - RNA, 19 nt, Artificial Sequence
  Description of Artificial Sequence: Synthetic oligonucleotide
ggacuugccuggagaccca

SEQ ID NO: 207122 - RNA, 19 nt, Artificial Sequence
  Description of Artificial Sequence: Synthetic oligonucleotide
cuucgacuugggacugcuu

SEQ ID NO: 207123 - RNA, 19 nt, Artificial Sequence
  Description of Artificial Sequence: Synthetic oligonucleotide
gucgguuccuggggagggu

SEQ ID NO: 207124 - RNA, 19 nt, Artificial Sequence
  Description of Artificial Sequence: Synthetic oligonucleotide
cgaauacgaccgucaacua

SEQ ID NO: 207125 - RNA, 19 nt, Artificial Sequence
  Description of Artificial Sequence: Synthetic oligonucleotide
acccguccuccaagucuau

SEQ ID NO: 207126 - RNA, 19 nt, Artificial Sequence
  Description of Artificial Sequence: Synthetic oligonucleotide
cccguccuccaagucuauc

SEQ ID NO: 207127 - RNA, 19 nt, Artificial Sequence
  Description of Artificial Sequence: Synthetic oligonucleotide
ggcgaacaagugcccgaau

SEQ ID NO: 207128 - RNA, 19 nt, Artificial Sequence
  Description of Artificial Sequence: Synthetic oligonucleotide
gcuccccaaucugccaugu

SEQ ID NO: 207129 - RNA, 19 nt, Artificial Sequence
  Description of Artificial Sequence: Synthetic oligonucleotide
cguuccaccucucgacggu

SEQ ID NO: 207130 - RNA, 19 nt, Artificial Sequence
  Description of Artificial Sequence: Synthetic oligonucleotide
cacggucugugagcguguu

SEQ ID NO: 207131 - RNA, 19 nt, Artificial Sequence
  Description of Artificial Sequence: Synthetic oligonucleotide
gcaggggaggcuaccucuu

SEQ ID NO: 207132 - RNA, 19 nt, Artificial Sequence
  Description of Artificial Sequence: Synthetic oligonucleotide
auuaauguaguacauaggg

SEQ ID NO: 207133 - RNA, 19 nt, Artificial Sequence
  Description of Artificial Sequence: Synthetic oligonucleotide
aacucagucaaauuguccc

SEQ ID NO: 207134 - RNA, 19 nt, Artificial Sequence
  Description of Artificial Sequence: Synthetic oligonucleotide
aauaaagacuauuaaggag

SEQ ID NO: 207135 - RNA, 19 nt, Artificial Sequence
  Description of Artificial Sequence: Synthetic oligonucleotide
gauaauuuaggauuuugcg

SEQ ID NO: 207136 - RNA, 19 nt, Artificial Sequence
  Description of Artificial Sequence: Synthetic oligonucleotide
auaauuacaacucuggaug

SEQ ID NO: 207137 - RNA, 19 nt, Artificial Sequence
  Description of Artificial Sequence: Synthetic oligonucleotide
caaauugucccuuauaccc

SEQ ID NO: 207138 - RNA, 19 nt, Artificial Sequence
  Description of Artificial Sequence: Synthetic oligonucleotide
aaggauuagcuucagcugg

SEQ ID NO: 207139 - RNA, 19 nt, Artificial Sequence
  Description of Artificial Sequence: Synthetic oligonucleotide
uucaaccuaauccagcuag

SEQ ID NO: 207140 - RNA, 19 nt, Artificial Sequence
  Description of Artificial Sequence: Synthetic oligonucleotide
aaacuauuagguauucagc

SEQ ID NO: 207141 - RNA, 19 nt, Artificial Sequence
  Description of Artificial Sequence: Synthetic oligonucleotide
uaauguaguacauagggaa

SEQ ID NO: 207142 - RNA, 19 nt, Artificial Sequence
  Description of Artificial Sequence: Synthetic oligonucleotide
uauuugaguauuuacgcca

SEQ ID NO: 207143 - RNA, 19 nt, Artificial Sequence
  Description of Artificial Sequence: Synthetic oligonucleotide
uuaggguuaacucagucaa

SEQ ID NO: 207144 - RNA, 19 nt, Artificial Sequence
  Description of Artificial Sequence: Synthetic oligonucleotide
aaugcugcucaauuuaaca

SEQ ID NO: 207145 - RNA, 19 nt, Artificial Sequence
  Description of Artificial Sequence: Synthetic oligonucleotide
uuuauucaaccuaauccag

SEQ ID NO: 207146 - RNA, 19 nt, Artificial Sequence
  Description of Artificial Sequence: Synthetic oligonucleotide
aacacuacugaacaucagu

SEQ ID NO: 207147 - RNA, 19 nt, Artificial Sequence
  Description of Artificial Sequence: Synthetic oligonucleotide
uccacuagugcauuaauga

SEQ ID NO: 207148 - RNA, 19 nt, Artificial Sequence
  Description of Artificial Sequence: Synthetic oligonucleotide
cugacguaaauauugcugc

SEQ ID NO: 207149 - RNA, 19 nt, Artificial Sequence
  Description of Artificial Sequence: Synthetic oligonucleotide
uuauuugaguauuuacgcc

SEQ ID NO: 207150 - RNA, 19 nt, Artificial Sequence
  Description of Artificial Sequence: Synthetic oligonucleotide
aacaaacccagguuuacca

SEQ ID NO: 207151 - RNA, 19 nt, Artificial Sequence
  Description of Artificial Sequence: Synthetic oligonucleotide
cuuuauucaaccuaaucca

SEQ ID NO: 207152 - RNA, 19 nt, Artificial Sequence
  Description of Artificial Sequence: Synthetic oligonucleotide
ugugaacucagauugcuga

SEQ ID NO: 207153 - RNA, 19 nt, Artificial Sequence
  Description of Artificial Sequence: Synthetic oligonucleotide
ugucgcaauaguaggaaag

SEQ ID NO: 207154 - RNA, 19 nt, Artificial Sequence
  Description of Artificial Sequence: Synthetic oligonucleotide
uuaauguaguacauaggga

SEQ ID NO: 207155 - RNA, 19 nt, Artificial Sequence
  Description of Artificial Sequence: Synthetic oligonucleotide
ugaccuaaauucauuguug

SEQ ID NO: 207156 - RNA, 19 nt, Artificial Sequence
  Description of Artificial Sequence: Synthetic oligonucleotide
uuuauggccuaccaccugc

SEQ ID NO: 207157 - RNA, 19 nt, Artificial Sequence
  Description of Artificial Sequence: Synthetic oligonucleotide
gucaaauugucccuuauac

SEQ ID NO: 207158 - RNA, 19 nt, Artificial Sequence
  Description of Artificial Sequence: Synthetic oligonucleotide
uuggcuauccuauaaauuu

SEQ ID NO: 207159 - RNA, 19 nt, Artificial Sequence
  Description of Artificial Sequence: Synthetic oligonucleotide
cuauugucgcaauaguagg

SEQ ID NO: 207160 - RNA, 19 nt, Artificial Sequence
  Description of Artificial Sequence: Synthetic oligonucleotide
auuagaaucuaaagagggc

SEQ ID NO: 207161 - RNA, 19 nt, Artificial Sequence
  Description of Artificial Sequence: Synthetic oligonucleotide
uuauucaaccuaauccagc

SEQ ID NO: 207162 - RNA, 19 nt, Artificial Sequence
  Description of Artificial Sequence: Synthetic oligonucleotide
agcagaauuagcaaggcag

SEQ ID NO: 207163 - RNA, 19 nt, Artificial Sequence
  Description of Artificial Sequence: Synthetic oligonucleotide
ugggaauuauagaagccag

SEQ ID NO: 207164 - RNA, 19 nt, Artificial Sequence
  Description of Artificial Sequence: Synthetic oligonucleotide
auccuauaaauuuacauuu

SEQ ID NO: 207165 - RNA, 19 nt, Artificial Sequence
  Description of Artificial Sequence: Synthetic oligonucleotide
acuauugucgcaauaguag

SEQ ID NO: 207166 - RNA, 19 nt, Artificial Sequence
  Description of Artificial Sequence: Synthetic oligonucleotide
gguuaacucagucaaauug

SEQ ID NO: 207167 - RNA, 19 nt, Artificial Sequence
  Description of Artificial Sequence: Synthetic oligonucleotide
gaguauuuacgccauaguc

SEQ ID NO: 207168 - RNA, 19 nt, Artificial Sequence
  Description of Artificial Sequence: Synthetic oligonucleotide
agggacauuaauguaguac

SEQ ID NO: 207169 - RNA, 19 nt, Artificial Sequence
  Description of Artificial Sequence: Synthetic oligonucleotide
ucaaauuaugccagugaga

SEQ ID NO: 207170 - RNA, 19 nt, Artificial Sequence
  Description of Artificial Sequence: Synthetic oligonucleotide
uuugcggugugccugacgu

SEQ ID NO: 207171 - RNA, 19 nt, Artificial Sequence
  Description of Artificial Sequence: Synthetic oligonucleotide
uagugcauuaaugauggag

SEQ ID NO: 207172 - RNA, 19 nt, Artificial Sequence
  Description of Artificial Sequence: Synthetic oligonucleotide
aguuuaccaacuauugucg

SEQ ID NO: 207173 - RNA, 19 nt, Artificial Sequence
  Description of Artificial Sequence: Synthetic oligonucleotide
aaguauguaaugaacaaua

SEQ ID NO: 207174 - RNA, 19 nt, Artificial Sequence
  Description of Artificial Sequence: Synthetic oligonucleotide
uguacuaaucauugaauua

SEQ ID NO: 207175 - RNA, 19 nt, Artificial Sequence
  Description of Artificial Sequence: Synthetic oligonucleotide
cucaaucuauauuuguuac

SEQ ID NO: 207176 - RNA, 19 nt, Artificial Sequence
  Description of Artificial Sequence: Synthetic oligonucleotide
uuacacuccaaaagaaagu

SEQ ID NO: 207177 - RNA, 19 nt, Artificial Sequence
  Description of Artificial Sequence: Synthetic oligonucleotide
acaugaccuaaauucauug

SEQ ID NO: 207178 - RNA, 19 nt, Artificial Sequence
  Description of Artificial Sequence: Synthetic oligonucleotide
ugaaucguauccuuaguuc

SEQ ID NO: 207179 - RNA, 19 nt, Artificial Sequence
  Description of Artificial Sequence: Synthetic oligonucleotide
aguauuuacgccauagucu

SEQ ID NO: 207180 - RNA, 19 nt, Artificial Sequence
  Description of Artificial Sequence: Synthetic oligonucleotide
aauuuaggauuuugcggug

SEQ ID NO: 207181 - RNA, 19 nt, Artificial Sequence
  Description of Artificial Sequence: Synthetic oligonucleotide
acccuagauaauuacaacu

SEQ ID NO: 207182 - RNA, 19 nt, Artificial Sequence
  Description of Artificial Sequence: Synthetic oligonucleotide
auaaugguuuagccaacgg

SEQ ID NO: 207183 - RNA, 19 nt, Artificial Sequence
  Description of Artificial Sequence: Synthetic oligonucleotide
cacugggaauuauagaagc

SEQ ID NO: 207184 - RNA, 19 nt, Artificial Sequence
  Description of Artificial Sequence: Synthetic oligonucleotide
uuuaccaacuauugucgca

SEQ ID NO: 207185 - RNA, 19 nt, Artificial Sequence
  Description of Artificial Sequence: Synthetic oligonucleotide
uacauagggaacugagugc

SEQ ID NO: 207186 - RNA, 19 nt, Artificial Sequence
  Description of Artificial Sequence: Synthetic oligonucleotide
agguuuaccaugcuaagau

SEQ ID NO: 207187 - RNA, 19 nt, Artificial Sequence
  Description of Artificial Sequence: Synthetic oligonucleotide
aaucuauauuuguuacacu

SEQ ID NO: 207188 - RNA, 19 nt, Artificial Sequence
  Description of Artificial Sequence: Synthetic oligonucleotide
aaccagguugaaucguauc

SEQ ID NO: 207189 - RNA, 19 nt, Artificial Sequence
  Description of Artificial Sequence: Synthetic oligonucleotide
agauaauuacaacucugga

SEQ ID NO: 207190 - RNA, 19 nt, Artificial Sequence
  Description of Artificial Sequence: Synthetic oligonucleotide
cacuagugcauuaaugaug

SEQ ID NO: 207191 - RNA, 19 nt, Artificial Sequence
  Description of Artificial Sequence: Synthetic oligonucleotide
caaccauuauuccugcugc

SEQ ID NO: 207192 - RNA, 19 nt, Artificial Sequence
  Description of Artificial Sequence: Synthetic oligonucleotide
uuguacuaaucauugaauu

SEQ ID NO: 207193 - RNA, 19 nt, Artificial Sequence
  Description of Artificial Sequence: Synthetic oligonucleotide
aacauagcucaaucuauau

SEQ ID NO: 207194 - RNA, 19 nt, Artificial Sequence
  Description of Artificial Sequence: Synthetic oligonucleotide
uuaacucagucaaauuguc

SEQ ID NO: 207195 - RNA, 19 nt, Artificial Sequence
  Description of Artificial Sequence: Synthetic oligonucleotide
ugugauugggaggaucagg

SEQ ID NO: 207196 - RNA, 19 nt, Artificial Sequence
  Description of Artificial Sequence: Synthetic oligonucleotide
cacaguaccuucauuugag

SEQ ID NO: 207197 - RNA, 19 nt, Artificial Sequence
  Description of Artificial Sequence: Synthetic oligonucleotide
agugcauuaaugauggagu

SEQ ID NO: 207198 - RNA, 19 nt, Artificial Sequence
  Description of Artificial Sequence: Synthetic oligonucleotide
aaccuacagaaagauauca

SEQ ID NO: 207199 - RNA, 19 nt, Artificial Sequence
  Description of Artificial Sequence: Synthetic oligonucleotide
ugcauacaaauaaccaggu

SEQ ID NO: 207200 - RNA, 19 nt, Artificial Sequence
  Description of Artificial Sequence: Synthetic oligonucleotide
aauauugcugcuguuugaa

SEQ ID NO: 207201 - RNA, 19 nt, Artificial Sequence
  Description of Artificial Sequence: Synthetic oligonucleotide
ugguauuccuaagaaaaca

SEQ ID NO: 207202 - RNA, 19 nt, Artificial Sequence
  Description of Artificial Sequence: Synthetic oligonucleotide
cauuuauuaucaugcauca

SEQ ID NO: 207203 - RNA, 19 nt, Artificial Sequence
  Description of Artificial Sequence: Synthetic oligonucleotide
ucuggauaauuuaggauuu

SEQ ID NO: 207204 - RNA, 19 nt, Artificial Sequence
  Description of Artificial Sequence: Synthetic oligonucleotide
aagaaaguauccacuucuc

SEQ ID NO: 207205 - RNA, 19 nt, Artificial Sequence
  Description of Artificial Sequence: Synthetic oligonucleotide
ucagcuaaaggauuagcuu

SEQ ID NO: 207206 - RNA, 19 nt, Artificial Sequence
  Description of Artificial Sequence: Synthetic oligonucleotide
uugguauuccuaagaaaac

SEQ ID NO: 207207 - RNA, 19 nt, Artificial Sequence
  Description of Artificial Sequence: Synthetic oligonucleotide
uauuggcuauccuauaaau

SEQ ID NO: 207208 - RNA, 19 nt, Artificial Sequence
  Description of Artificial Sequence: Synthetic oligonucleotide
accuaauccagcuaguauu

SEQ ID NO: 207209 - RNA, 19 nt, Artificial Sequence
  Description of Artificial Sequence: Synthetic oligonucleotide
uucacaagucuccacuagu

SEQ ID NO: 207210 - RNA, 19 nt, Artificial Sequence
  Description of Artificial Sequence: Synthetic oligonucleotide
aucaguauuggcuauccua

SEQ ID NO: 207211 - RNA, 19 nt, Artificial Sequence
  Description of Artificial Sequence: Synthetic oligonucleotide
acguaaauauugcugcugu

SEQ ID NO: 207212 - RNA, 19 nt, Artificial Sequence
  Description of Artificial Sequence: Synthetic oligonucleotide
caauagauagauccaacca

SEQ ID NO: 207213 - RNA, 19 nt, Artificial Sequence
  Description of Artificial Sequence: Synthetic oligonucleotide
uugaaucguauccuuaguu

SEQ ID NO: 207214 - RNA, 19 nt, Artificial Sequence
  Description of Artificial Sequence: Synthetic oligonucleotide
acugggaauuauagaagcc

SEQ ID NO: 207215 - RNA, 19 nt, Artificial Sequence
  Description of Artificial Sequence: Synthetic oligonucleotide
auuagcaaggcagugacua

SEQ ID NO: 207216 - RNA, 19 nt, Artificial Sequence
  Description of Artificial Sequence: Synthetic oligonucleotide
auuuacgccauagucugag

SEQ ID NO: 207217 - RNA, 19 nt, Artificial Sequence
  Description of Artificial Sequence: Synthetic oligonucleotide
auccaaccauuauuccugc

SEQ ID NO: 207218 - RNA, 19 nt, Artificial Sequence
  Description of Artificial Sequence: Synthetic oligonucleotide
uaggauuuugcggugugcc

SEQ ID NO: 207219 - RNA, 19 nt, Artificial Sequence
  Description of Artificial Sequence: Synthetic oligonucleotide
gaucagucuaucugcaaga

SEQ ID NO: 207220 - RNA, 19 nt, Artificial Sequence
  Description of Artificial Sequence: Synthetic oligonucleotide
gggacauuaauguaguaca

SEQ ID NO: 207221 - RNA, 19 nt, Artificial Sequence
  Description of Artificial Sequence: Synthetic oligonucleotide
aauugguaguguuuaccua

SEQ ID NO: 207222 - RNA, 19 nt, Artificial Sequence
  Description of Artificial Sequence: Synthetic oligonucleotide
agcuucacaagucuccacu

SEQ ID NO: 207223 - RNA, 19 nt, Artificial Sequence
  Description of Artificial Sequence: Synthetic oligonucleotide
auaugaacaaacccagguu

SEQ ID NO: 207224 - RNA, 19 nt, Artificial Sequence
  Description of Artificial Sequence: Synthetic oligonucleotide
ccauaaaacucagauaucc

SEQ ID NO: 207225 - RNA, 19 nt, Artificial Sequence
  Description of Artificial Sequence: Synthetic oligonucleotide
uugaguugguauuccuaag

SEQ ID NO: 207226 - RNA, 19 nt, Artificial Sequence
  Description of Artificial Sequence: Synthetic oligonucleotide
aggacaaccaaucccugga

SEQ ID NO: 207227 - RNA, 19 nt, Artificial Sequence
  Description of Artificial Sequence: Synthetic oligonucleotide
gaaucguauccuuaguucu

SEQ ID NO: 207228 - RNA, 19 nt, Artificial Sequence
  Description of Artificial Sequence: Synthetic oligonucleotide
aaauugucccuuauacccu

SEQ ID NO: 207229 - RNA, 19 nt, Artificial Sequence
  Description of Artificial Sequence: Synthetic oligonucleotide
ccaauagauagauccaacc

SEQ ID NO: 207230 - RNA, 19 nt, Artificial Sequence
  Description of Artificial Sequence: Synthetic oligonucleotide
aaucguauccuuaguucug

SEQ ID NO: 207231 - RNA, 19 nt, Artificial Sequence
  Description of Artificial Sequence: Synthetic oligonucleotide
gaaagauaucagucuuuac

SEQ ID NO: 207232 - RNA, 19 nt, Artificial Sequence
  Description of Artificial Sequence: Synthetic oligonucleotide
uaacacuacugaacaucag

SEQ ID NO: 207233 - RNA, 19 nt, Artificial Sequence
  Description of Artificial Sequence: Synthetic oligonucleotide
aucagcuaaaggauuagcu

SEQ ID NO: 207234 - RNA, 19 nt, Artificial Sequence
  Description of Artificial Sequence: Synthetic oligonucleotide
ggauaauuuaggauuuugc

SEQ ID NO: 207235 - RNA, 19 nt, Artificial Sequence
  Description of Artificial Sequence: Synthetic oligonucleotide
auaaagggucagcucgcuc

SEQ ID NO: 207236 - RNA, 19 nt, Artificial Sequence
  Description of Artificial Sequence: Synthetic oligonucleotide
acuaaugaagucacuagau

SEQ ID NO: 207237 - RNA, 19 nt, Artificial Sequence
  Description of Artificial Sequence: Synthetic oligonucleotide
aggaugagaggccucagaa

SEQ ID NO: 207238 - RNA, 19 nt, Artificial Sequence
  Description of Artificial Sequence: Synthetic oligonucleotide
cucccagcgaaucauuuug

SEQ ID NO: 207239 - RNA, 19 nt, Artificial Sequence
  Description of Artificial Sequence: Synthetic oligonucleotide
augacaauuagaaucuaaa

SEQ ID NO: 207240 - RNA, 19 nt, Artificial Sequence
  Description of Artificial Sequence: Synthetic oligonucleotide
gaauuguacuaaucauuga

SEQ ID NO: 207241 - RNA, 19 nt, Artificial Sequence
  Description of Artificial Sequence: Synthetic oligonucleotide
aacuauugucgcaauagua

SEQ ID NO: 207242 - RNA, 19 nt, Artificial Sequence
  Description of Artificial Sequence: Synthetic oligonucleotide
cacaagucuccacuagugc

SEQ ID NO: 207243 - RNA, 19 nt, Artificial Sequence
  Description of Artificial Sequence: Synthetic oligonucleotide
cacuuaguagauccucugc

SEQ ID NO: 207244 - RNA, 19 nt, Artificial Sequence
  Description of Artificial Sequence: Synthetic oligonucleotide
uacgccauagucugagcac

SEQ ID NO: 207245 - RNA, 19 nt, Artificial Sequence
  Description of Artificial Sequence: Synthetic oligonucleotide
uuuugcggugugccugacg

SEQ ID NO: 207246 - RNA, 19 nt, Artificial Sequence
  Description of Artificial Sequence: Synthetic oligonucleotide
cuaaaggauuagcuucagc

SEQ ID NO: 207247 - RNA, 19 nt, Artificial Sequence
  Description of Artificial Sequence: Synthetic oligonucleotide
agcaguguuaggguuaacu

SEQ ID NO: 207248 - RNA, 19 nt, Artificial Sequence
  Description of Artificial Sequence: Synthetic oligonucleotide
ugacguaaauauugcugcu

SEQ ID NO: 207249 - RNA, 19 nt, Artificial Sequence
  Description of Artificial Sequence: Synthetic oligonucleotide
auuguacuaaucauugaau

SEQ ID NO: 207250 - RNA, 19 nt, Artificial Sequence
  Description of Artificial Sequence: Synthetic oligonucleotide
cuccacuagugcauuaaug

SEQ ID NO: 207251 - RNA, 19 nt, Artificial Sequence
  Description of Artificial Sequence: Synthetic oligonucleotide
cuucacaagucuccacuag

SEQ ID NO: 207252 - RNA, 19 nt, Artificial Sequence
  Description of Artificial Sequence: Synthetic oligonucleotide
ugaucagcuaaaggauuag

SEQ ID NO: 207253 - RNA, 19 nt, Artificial Sequence
  Description of Artificial Sequence: Synthetic oligonucleotide
ucaaccuaauccagcuagu

SEQ ID NO: 207254 - RNA, 19 nt, Artificial Sequence
  Description of Artificial Sequence: Synthetic oligonucleotide
ugucccuuauacccuagau

SEQ ID NO: 207255 - RNA, 19 nt, Artificial Sequence
  Description of Artificial Sequence: Synthetic oligonucleotide
caggacaaccaaucccugg

SEQ ID NO: 207256 - RNA, 19 nt, Artificial Sequence
  Description of Artificial Sequence: Synthetic oligonucleotide
ucagcucgcuccauaacau

SEQ ID NO: 207257 - RNA, 19 nt, Artificial Sequence
  Description of Artificial Sequence: Synthetic oligonucleotide
uuauggcaacaaaagcaau

SEQ ID NO: 207258 - RNA, 19 nt, Artificial Sequence
  Description of Artificial Sequence: Synthetic oligonucleotide
uggcuauccuauaaauuua

SEQ ID NO: 207259 - RNA, 19 nt, Artificial Sequence
  Description of Artificial Sequence: Synthetic oligonucleotide
uuagccaacggcugucaaa

SEQ ID NO: 207260 - RNA, 19 nt, Artificial Sequence
  Description of Artificial Sequence: Synthetic oligonucleotide
ucgccugugauugggagga

SEQ ID NO: 207261 - RNA, 19 nt, Artificial Sequence
  Description of Artificial Sequence: Synthetic oligonucleotide
acauaaacgacuggaccca

SEQ ID NO: 207262 - RNA, 19 nt, Artificial Sequence
  Description of Artificial Sequence: Synthetic oligonucleotide
ugguuuagccaacggcugu

SEQ ID NO: 207263 - RNA, 19 nt, Artificial Sequence
  Description of Artificial Sequence: Synthetic oligonucleotide
cucuggauaauuuaggauu

SEQ ID NO: 207264 - RNA, 19 nt, Artificial Sequence
  Description of Artificial Sequence: Synthetic oligonucleotide
agacaagggcuccacacaa

SEQ ID NO: 207265 - RNA, 19 nt, Artificial Sequence
  Description of Artificial Sequence: Synthetic oligonucleotide
ccaacuauugucgcaauag

SEQ ID NO: 207266 - RNA, 19 nt, Artificial Sequence
  Description of Artificial Sequence: Synthetic oligonucleotide
agcuagacaucuaaguuau

SEQ ID NO: 207267 - RNA, 19 nt, Artificial Sequence
  Description of Artificial Sequence: Synthetic oligonucleotide
guuaacucagucaaauugu

SEQ ID NO: 207268 - RNA, 19 nt, Artificial Sequence
  Description of Artificial Sequence: Synthetic oligonucleotide
agaggauccccugcccugc

SEQ ID NO: 207269 - RNA, 19 nt, Artificial Sequence
  Description of Artificial Sequence: Synthetic oligonucleotide
auaguccucccagcgaauc

SEQ ID NO: 207270 - RNA, 19 nt, Artificial Sequence
  Description of Artificial Sequence: Synthetic oligonucleotide
gauuuugcggugugccuga

SEQ ID NO: 207271 - RNA, 19 nt, Artificial Sequence
  Description of Artificial Sequence: Synthetic oligonucleotide
auugucgcaauaguaggaa

SEQ ID NO: 207272 - RNA, 19 nt, Artificial Sequence
  Description of Artificial Sequence: Synthetic oligonucleotide
aggguuaacucagucaaau

SEQ ID NO: 207273 - RNA, 19 nt, Artificial Sequence
  Description of Artificial Sequence: Synthetic oligonucleotide
gugcauuaaugauggaguc

SEQ ID NO: 207274 - RNA, 19 nt, Artificial Sequence
  Description of Artificial Sequence: Synthetic oligonucleotide
uauuuacgccauagucuga

SEQ ID NO: 207275 - RNA, 19 nt, Artificial Sequence
  Description of Artificial Sequence: Synthetic oligonucleotide
ugugaaaaugcugcucaau

SEQ ID NO: 207276 - RNA, 19 nt, Artificial Sequence
  Description of Artificial Sequence: Synthetic oligonucleotide
gugauugggaggaucagga

SEQ ID NO: 207277 - RNA, 19 nt, Artificial Sequence
  Description of Artificial Sequence: Synthetic oligonucleotide
ucgcaauaguaggaaagac

SEQ ID NO: 207278 - RNA, 19 nt, Artificial Sequence
  Description of Artificial Sequence: Synthetic oligonucleotide
aagauaggagcaguagcuu

SEQ ID NO: 207279 - RNA, 19 nt, Artificial Sequence
  Description of Artificial Sequence: Synthetic oligonucleotide
uaguccucccagcgaauca

SEQ ID NO: 207280 - RNA, 19 nt, Artificial Sequence
  Description of Artificial Sequence: Synthetic oligonucleotide
uguagacaagccugaugaa

SEQ ID NO: 207281 - RNA, 19 nt, Artificial Sequence
  Description of Artificial Sequence: Synthetic oligonucleotide
uaaccagguugaaucguau

SEQ ID NO: 207282 - RNA, 19 nt, Artificial Sequence
  Description of Artificial Sequence: Synthetic oligonucleotide
ccuaauccagcuaguauug

SEQ ID NO: 207283 - RNA, 19 nt, Artificial Sequence
  Description of Artificial Sequence: Synthetic oligonucleotide
ucuccacuagugcauuaau

SEQ ID NO: 207284 - RNA, 19 nt, Artificial Sequence
  Description of Artificial Sequence: Synthetic oligonucleotide
cuaacauagcucaaucuau

SEQ ID NO: 207285 - RNA, 19 nt, Artificial Sequence
  Description of Artificial Sequence: Synthetic oligonucleotide
uuuagccaacggcugucaa

SEQ ID NO: 207286 - RNA, 19 nt, Artificial Sequence
  Description of Artificial Sequence: Synthetic oligonucleotide
aggcuagccuauguaagag

SEQ ID NO: 207287 - RNA, 19 nt, Artificial Sequence
  Description of Artificial Sequence: Synthetic oligonucleotide
cugaugaacccacuuagua

SEQ ID NO: 207288 - RNA, 19 nt, Artificial Sequence
  Description of Artificial Sequence: Synthetic oligonucleotide
uugucgcaauaguaggaaa

SEQ ID NO: 207289 - RNA, 19 nt, Artificial Sequence
  Description of Artificial Sequence: Synthetic oligonucleotide
cagaauuagcaaggcagug

SEQ ID NO: 207290 - RNA, 19 nt, Artificial Sequence
  Description of Artificial Sequence: Synthetic oligonucleotide
uccaaccuacagaaagaua

SEQ ID NO: 207291 - RNA, 19 nt, Artificial Sequence
  Description of Artificial Sequence: Synthetic oligonucleotide
agcuguccaauagauagau

SEQ ID NO: 207292 - RNA, 19 nt, Artificial Sequence
  Description of Artificial Sequence: Synthetic oligonucleotide
gccuuagcucaauugguag

SEQ ID NO: 207293 - RNA, 19 nt, Artificial Sequence
  Description of Artificial Sequence: Synthetic oligonucleotide
ggaauuauagaagccagua

SEQ ID NO: 207294 - RNA, 19 nt, Artificial Sequence
  Description of Artificial Sequence: Synthetic oligonucleotide
ccagcgaaucauuuugccc

SEQ ID NO: 207295 - RNA, 19 nt, Artificial Sequence
  Description of Artificial Sequence: Synthetic oligonucleotide
gucgcaauaguaggaaaga

SEQ ID NO: 207296 - RNA, 19 nt, Artificial Sequence
  Description of Artificial Sequence: Synthetic oligonucleotide
acgacuggacccaacuuug

SEQ ID NO: 207297 - RNA, 19 nt, Artificial Sequence
  Description of Artificial Sequence: Synthetic oligonucleotide
gcuagccuauguaagagac

SEQ ID NO: 207298 - RNA, 19 nt, Artificial Sequence
  Description of Artificial Sequence: Synthetic oligonucleotide
auuugaguauuuacgccau

SEQ ID NO: 207299 - RNA, 19 nt, Artificial Sequence
  Description of Artificial Sequence: Synthetic oligonucleotide
aucguauccuuaguucugu

SEQ ID NO: 207300 - RNA, 19 nt, Artificial Sequence
  Description of Artificial Sequence: Synthetic oligonucleotide
ccaacggcugucaaagcag

SEQ ID NO: 207301 - RNA, 19 nt, Artificial Sequence
  Description of Artificial Sequence: Synthetic oligonucleotide
ucguauccuuaguucugug

SEQ ID NO: 207302 - RNA, 19 nt, Artificial Sequence
  Description of Artificial Sequence: Synthetic oligonucleotide
ggauuuugcggugugccug

SEQ ID NO: 207303 - RNA, 19 nt, Artificial Sequence
  Description of Artificial Sequence: Synthetic oligonucleotide
agccugaugaacccacuua

SEQ ID NO: 207304 - RNA, 19 nt, Artificial Sequence
  Description of Artificial Sequence: Synthetic oligonucleotide
cugagaggauccccugccc

SEQ ID NO: 207305 - RNA, 19 nt, Artificial Sequence
  Description of Artificial Sequence: Synthetic oligonucleotide
gucccuuauacccuagaua

SEQ ID NO: 207306 - RNA, 19 nt, Artificial Sequence
  Description of Artificial Sequence: Synthetic oligonucleotide
auucaaccuaauccagcua

SEQ ID NO: 207307 - RNA, 19 nt, Artificial Sequence
  Description of Artificial Sequence: Synthetic oligonucleotide
guaagagacccugacucaa

SEQ ID NO: 207308 - RNA, 19 nt, Artificial Sequence
  Description of Artificial Sequence: Synthetic oligonucleotide
acaacucuggauguucaua

SEQ ID NO: 207309 - RNA, 19 nt, Artificial Sequence
  Description of Artificial Sequence: Synthetic oligonucleotide
ggcuauccuauaaauuuac

SEQ ID NO: 207310 - RNA, 19 nt, Artificial Sequence
  Description of Artificial Sequence: Synthetic oligonucleotide
uccaaccauuauuccugcu

SEQ ID NO: 207311 - RNA, 19 nt, Artificial Sequence
  Description of Artificial Sequence: Synthetic oligonucleotide
uccucccagcgaaucauuu

SEQ ID NO: 207312 - RNA, 19 nt, Artificial Sequence
  Description of Artificial Sequence: Synthetic oligonucleotide
ugcuugcauaacugugaaa

SEQ ID NO: 207313 - RNA, 19 nt, Artificial Sequence
  Description of Artificial Sequence: Synthetic oligonucleotide
augaacaaacccagguuua

SEQ ID NO: 207314 - RNA, 19 nt, Artificial Sequence
  Description of Artificial Sequence: Synthetic oligonucleotide
guugaaucguauccuuagu

SEQ ID NO: 207315 - RNA, 19 nt, Artificial Sequence
  Description of Artificial Sequence: Synthetic oligonucleotide
aacccacuuaguagauccu

SEQ ID NO: 207316 - RNA, 19 nt, Artificial Sequence
  Description of Artificial Sequence: Synthetic oligonucleotide
ccuacagaaagauaucagu

SEQ ID NO: 207317 - RNA, 19 nt, Artificial Sequence
  Description of Artificial Sequence: Synthetic oligonucleotide
cccagcgaaucauuuugcc

SEQ ID NO: 207318 - RNA, 19 nt, Artificial Sequence
  Description of Artificial Sequence: Synthetic oligonucleotide
aggugcgauggugcucgcc

SEQ ID NO: 207319 - RNA, 19 nt, Artificial Sequence
  Description of Artificial Sequence: Synthetic oligonucleotide
cagguuuaccaugcuaaga

SEQ ID NO: 207320 - RNA, 19 nt, Artificial Sequence
  Description of Artificial Sequence: Synthetic oligonucleotide
aguccucccagcgaaucau

SEQ ID NO: 207321 - RNA, 19 nt, Artificial Sequence
  Description of Artificial Sequence: Synthetic oligonucleotide
aggcccggggacaauagca

SEQ ID NO: 207322 - RNA, 19 nt, Artificial Sequence
  Description of Artificial Sequence: Synthetic oligonucleotide
cccagguuuaccaugcuaa

SEQ ID NO: 207323 - RNA, 19 nt, Artificial Sequence
  Description of Artificial Sequence: Synthetic oligonucleotide
cgcaauaguaggaaagaca

SEQ ID NO: 207324 - RNA, 19 nt, Artificial Sequence
  Description of Artificial Sequence: Synthetic oligonucleotide
cccagcguuguagacaagc

SEQ ID NO: 207325 - RNA, 19 nt, Artificial Sequence
  Description of Artificial Sequence: Synthetic oligonucleotide
agucuaucugcaagaucca

SEQ ID NO: 207326 - RNA, 19 nt, Artificial Sequence
  Description of Artificial Sequence: Synthetic oligonucleotide
auuuugcggugugccugac

SEQ ID NO: 207327 - RNA, 19 nt, Artificial Sequence
  Description of Artificial Sequence: Synthetic oligonucleotide
caacuauugucgcaauagu

SEQ ID NO: 207328 - RNA, 19 nt, Artificial Sequence
  Description of Artificial Sequence: Synthetic oligonucleotide
cagagcucauaauuucucu

SEQ ID NO: 207329 - RNA, 19 nt, Artificial Sequence
  Description of Artificial Sequence: Synthetic oligonucleotide
guuuagccaacggcuguca

SEQ ID NO: 207330 - RNA, 19 nt, Artificial Sequence
  Description of Artificial Sequence: Synthetic oligonucleotide
gguuuaccaugcuaagaua

SEQ ID NO: 207331 - RNA, 19 nt, Artificial Sequence
  Description of Artificial Sequence: Synthetic oligonucleotide
gguaguguuuaccuagcau

SEQ ID NO: 207332 - RNA, 19 nt, Artificial Sequence
  Description of Artificial Sequence: Synthetic oligonucleotide
ggcuagccuauguaagaga

SEQ ID NO: 207333 - RNA, 19 nt, Artificial Sequence
  Description of Artificial Sequence: Synthetic oligonucleotide
augagaggccucagaacaa

SEQ ID NO: 207334 - RNA, 19 nt, Artificial Sequence
  Description of Artificial Sequence: Synthetic oligonucleotide
cccggggacaauagcacug

SEQ ID NO: 207335 - RNA, 19 nt, Artificial Sequence
  Description of Artificial Sequence: Synthetic oligonucleotide
gcuauccuauaaauuuaca

SEQ ID NO: 207336 - RNA, 19 nt, Artificial Sequence
  Description of Artificial Sequence: Synthetic oligonucleotide
cacuuagauggaguuaacu

SEQ ID NO: 207337 - RNA, 19 nt, Artificial Sequence
  Description of Artificial Sequence: Synthetic oligonucleotide
ggcgccgagcugcugccgg

SEQ ID NO: 207338 - RNA, 19 nt, Artificial Sequence
  Description of Artificial Sequence: Synthetic oligonucleotide
cacuacugaacaucaguuu

SEQ ID NO: 207339 - RNA, 19 nt, Artificial Sequence
  Description of Artificial Sequence: Synthetic oligonucleotide
gguuuagccaacggcuguc

SEQ ID NO: 207340 - RNA, 19 nt, Artificial Sequence
  Description of Artificial Sequence: Synthetic oligonucleotide
caaccuaauccagcuagua

SEQ ID NO: 207341 - RNA, 19 nt, Artificial Sequence
  Description of Artificial Sequence: Synthetic oligonucleotide
cacugaggacaugccacuc

SEQ ID NO: 207342 - RNA, 19 nt, Artificial Sequence
  Description of Artificial Sequence: Synthetic oligonucleotide
ugccgguccgcccgggguu

SEQ ID NO: 207343 - RNA, 19 nt, Artificial Sequence
  Description of Artificial Sequence: Synthetic oligonucleotide
ggucagcucgcuccauaac

SEQ ID NO: 207344 - RNA, 19 nt, Artificial Sequence
  Description of Artificial Sequence: Synthetic oligonucleotide
gugccuuagcucaauuggu

SEQ ID NO: 207345 - RNA, 19 nt, Artificial Sequence
  Description of Artificial Sequence: Synthetic oligonucleotide
gcagaauuagcaaggcagu

SEQ ID NO: 207346 - RNA, 19 nt, Artificial Sequence
  Description of Artificial Sequence: Synthetic oligonucleotide
uugcggugugccugacgua

SEQ ID NO: 207347 - RNA, 19 nt, Artificial Sequence
  Description of Artificial Sequence: Synthetic oligonucleotide
cuucgaucauuugguaagu

SEQ ID NO: 207348 - RNA, 19 nt, Artificial Sequence
  Description of Artificial Sequence: Synthetic oligonucleotide
ccacuuagauggaguuaac

SEQ ID NO: 207349 - RNA, 19 nt, Artificial Sequence
  Description of Artificial Sequence: Synthetic oligonucleotide
gggaauuauagaagccagu

SEQ ID NO: 207350 - RNA, 19 nt, Artificial Sequence
  Description of Artificial Sequence: Synthetic oligonucleotide
ccggguuccugccgguccg

SEQ ID NO: 207351 - RNA, 19 nt, Artificial Sequence
  Description of Artificial Sequence: Synthetic oligonucleotide
cugugauuacugagaggau

SEQ ID NO: 207352 - RNA, 19 nt, Artificial Sequence
  Description of Artificial Sequence: Synthetic oligonucleotide
gcaagcuuuugagaucagu

SEQ ID NO: 207353 - RNA, 19 nt, Artificial Sequence
  Description of Artificial Sequence: Synthetic oligonucleotide
gcccugcgugcuuuauuac

SEQ ID NO: 207354 - RNA, 19 nt, Artificial Sequence
  Description of Artificial Sequence: Synthetic oligonucleotide
ggguuaacucagucaaauu

SEQ ID NO: 207355 - RNA, 19 nt, Artificial Sequence
  Description of Artificial Sequence: Synthetic oligonucleotide
ccggcaucuuccgcggagc

SEQ ID NO: 207356 - RNA, 19 nt, Artificial Sequence
  Description of Artificial Sequence: Synthetic oligonucleotide
cagcaguguuaggguuaac

SEQ ID NO: 207357 - RNA, 19 nt, Artificial Sequence
  Description of Artificial Sequence: Synthetic oligonucleotide
gccauagucugagcacaua

SEQ ID NO: 207358 - RNA, 19 nt, Artificial Sequence
  Description of Artificial Sequence: Synthetic oligonucleotide
ccacccaagauuguccuuu

SEQ ID NO: 207359 - RNA, 19 nt, Artificial Sequence
  Description of Artificial Sequence: Synthetic oligonucleotide
cugcccugcgugcuuuauu

SEQ ID NO: 207360 - RNA, 19 nt, Artificial Sequence
  Description of Artificial Sequence: Synthetic oligonucleotide
cccuuauacccuagauaau

SEQ ID NO: 207361 - RNA, 19 nt, Artificial Sequence
  Description of Artificial Sequence: Synthetic oligonucleotide
ccucccagcgaaucauuuu

SEQ ID NO: 207362 - RNA, 19 nt, Artificial Sequence
  Description of Artificial Sequence: Synthetic oligonucleotide
gcggugugccugacguaaa

SEQ ID NO: 207363 - RNA, 19 nt, Artificial Sequence
  Description of Artificial Sequence: Synthetic oligonucleotide
gccgguccgcccgggguuc

SEQ ID NO: 207364 - RNA, 19 nt, Artificial Sequence
  Description of Artificial Sequence: Synthetic oligonucleotide
ccgguccgcccgggguucc

SEQ ID NO: 207365 - RNA, 19 nt, Artificial Sequence
  Description of Artificial Sequence: Synthetic oligonucleotide
cgccauagucugagcacau

SEQ ID NO: 207366 - RNA, 19 nt, Artificial Sequence
  Description of Artificial Sequence: Synthetic oligonucleotide
cggugugccugacguaaau

SEQ ID NO: 207367 - RNA, 19 nt, Artificial Sequence
  Description of Artificial Sequence: Synthetic oligonucleotide
ccgccggggcgccgagcug

SEQ ID NO: 207368 - RNA, 19 nt, Artificial Sequence
  Description of Artificial Sequence: Synthetic oligonucleotide
ccgcggagccggcgagcuc

SEQ ID NO: 207369 - RNA, 19 nt, Artificial Sequence
  Description of Artificial Sequence: Synthetic oligonucleotide
gcgcggccggcgggcgucc

SEQ ID NO: 207370 - RNA, 19 nt, Artificial Sequence
  Description of Artificial Sequence: Synthetic oligonucleotide
aauuauaccaauuuuacca

SEQ ID NO: 207371 - RNA, 19 nt, Artificial Sequence
  Description of Artificial Sequence: Synthetic oligonucleotide
aaugguucaaaauacuacc

SEQ ID NO: 207372 - RNA, 19 nt, Artificial Sequence
  Description of Artificial Sequence: Synthetic oligonucleotide
aaucaaaucaauuuuaugu

SEQ ID NO: 207373 - RNA, 19 nt, Artificial Sequence
  Description of Artificial Sequence: Synthetic oligonucleotide
aauagaaauuucuaaguac

SEQ ID NO: 207374 - RNA, 19 nt, Artificial Sequence
  Description of Artificial Sequence: Synthetic oligonucleotide
uauguuaucuacaagcagg

SEQ ID NO: 207375 - RNA, 19 nt, Artificial Sequence
  Description of Artificial Sequence: Synthetic oligonucleotide
gaaaauuacagccugcacg

SEQ ID NO: 207376 - RNA, 19 nt, Artificial Sequence
  Description of Artificial Sequence: Synthetic oligonucleotide
aauacgucugauuagcuuc

SEQ ID NO: 207377 - RNA, 19 nt, Artificial Sequence
  Description of Artificial Sequence: Synthetic oligonucleotide
ugcuuuaugaguaugaaca

SEQ ID NO: 207378 - RNA, 19 nt, Artificial Sequence
  Description of Artificial Sequence: Synthetic oligonucleotide
aauuuugugagguaccuag

SEQ ID NO: 207379 - RNA, 19 nt, Artificial Sequence
  Description of Artificial Sequence: Synthetic oligonucleotide
aggguuuuaaguuacaccg

SEQ ID NO: 207380 - RNA, 19 nt, Artificial Sequence
  Description of Artificial Sequence: Synthetic oligonucleotide
aaacauuaggcguacgcac

SEQ ID NO: 207381 - RNA, 19 nt, Artificial Sequence
  Description of Artificial Sequence: Synthetic oligonucleotide
aacaauacgucugauuagc

SEQ ID NO: 207382 - RNA, 19 nt, Artificial Sequence
  Description of Artificial Sequence: Synthetic oligonucleotide
aaacuauuacucaucaagc

SEQ ID NO: 207383 - RNA, 19 nt, Artificial Sequence
  Description of Artificial Sequence: Synthetic oligonucleotide
gauuacagcacuucagugg

SEQ ID NO: 207384 - RNA, 19 nt, Artificial Sequence
  Description of Artificial Sequence: Synthetic oligonucleotide
uccaauuagagccucuugg

SEQ ID NO: 207385 - RNA, 19 nt, Artificial Sequence
  Description of Artificial Sequence: Synthetic oligonucleotide
ugaacaauacgucugauua

SEQ ID NO: 207386 - RNA, 19 nt, Artificial Sequence
  Description of Artificial Sequence: Synthetic oligonucleotide
uccgcauucauuuaacggg

SEQ ID NO: 207387 - RNA, 19 nt, Artificial Sequence
  Description of Artificial Sequence: Synthetic oligonucleotide
uuauauggggcaaagacau

SEQ ID NO: 207388 - RNA, 19 nt, Artificial Sequence
  Description of Artificial Sequence: Synthetic oligonucleotide
acugucgccacgcagagcg

SEQ ID NO: 207389 - RNA, 19 nt, Artificial Sequence
  Description of Artificial Sequence: Synthetic oligonucleotide
agcaaaaugguuuaacuga

SEQ ID NO: 207390 - RNA, 19 nt, Artificial Sequence
  Description of Artificial Sequence: Synthetic oligonucleotide
aacgggucuguuuacagag

SEQ ID NO: 207391 - RNA, 19 nt, Artificial Sequence
  Description of Artificial Sequence: Synthetic oligonucleotide
ucgacuuccgcucagguug

SEQ ID NO: 207392 - RNA, 19 nt, Artificial Sequence
  Description of Artificial Sequence: Synthetic oligonucleotide
ucaauccaaaagcagguag

SEQ ID NO: 207393 - RNA, 19 nt, Artificial Sequence
  Description of Artificial Sequence: Synthetic oligonucleotide
ugaguaugaacaaaaccug

SEQ ID NO: 207394 - RNA, 19 nt, Artificial Sequence
  Description of Artificial Sequence: Synthetic oligonucleotide
ucuacuuuugaagucaagc

SEQ ID NO: 207395 - RNA, 19 nt, Artificial Sequence
  Description of Artificial Sequence: Synthetic oligonucleotide
aaaccuacugcaaucuccc

SEQ ID NO: 207396 - RNA, 19 nt, Artificial Sequence
  Description of Artificial Sequence: Synthetic oligonucleotide
aacuauuacucaucaagca

SEQ ID NO: 207397 - RNA, 19 nt, Artificial Sequence
  Description of Artificial Sequence: Synthetic oligonucleotide
uguuuucuuaacacggugc

SEQ ID NO: 207398 - RNA, 19 nt, Artificial Sequence
  Description of Artificial Sequence: Synthetic oligonucleotide
ucuaaagguagcuuaguac

SEQ ID NO: 207399 - RNA, 19 nt, Artificial Sequence
  Description of Artificial Sequence: Synthetic oligonucleotide
agguaaaccuaucuuuccc

SEQ ID NO: 207400 - RNA, 19 nt, Artificial Sequence
  Description of Artificial Sequence: Synthetic oligonucleotide
cacauuaacugccaguccg

SEQ ID NO: 207401 - RNA, 19 nt, Artificial Sequence
  Description of Artificial Sequence: Synthetic oligonucleotide
uuaaaacuaacagccacag

SEQ ID NO: 207402 - RNA, 19 nt, Artificial Sequence
  Description of Artificial Sequence: Synthetic oligonucleotide
uaacuuccuaccauguuag

SEQ ID NO: 207403 - RNA, 19 nt, Artificial Sequence
  Description of Artificial Sequence: Synthetic oligonucleotide
agaacuuuagcacuuacuu

SEQ ID NO: 207404 - RNA, 19 nt, Artificial Sequence
  Description of Artificial Sequence: Synthetic oligonucleotide
cauuuaaacugccagucag

SEQ ID NO: 207405 - RNA, 19 nt, Artificial Sequence
  Description of Artificial Sequence: Synthetic oligonucleotide
aacucuaaaacuaaacaaa

SEQ ID NO: 207406 - RNA, 19 nt, Artificial Sequence
  Description of Artificial Sequence: Synthetic oligonucleotide
uuaaugguucaaaauacua

SEQ ID NO: 207407 - RNA, 19 nt, Artificial Sequence
  Description of Artificial Sequence: Synthetic oligonucleotide
aacacggugcuuuaugagu

SEQ ID NO: 207408 - RNA, 19 nt, Artificial Sequence
  Description of Artificial Sequence: Synthetic oligonucleotide
ucuaaaucuggaaugugau

SEQ ID NO: 207409 - RNA, 19 nt, Artificial Sequence
  Description of Artificial Sequence: Synthetic oligonucleotide
uagcuuaguacuaagugaa

SEQ ID NO: 207410 - RNA, 19 nt, Artificial Sequence
  Description of Artificial Sequence: Synthetic oligonucleotide
agaaaauuacagccugcac

SEQ ID NO: 207411 - RNA, 19 nt, Artificial Sequence
  Description of Artificial Sequence: Synthetic oligonucleotide
uguuacacgguaaugguuu

SEQ ID NO: 207412 - RNA, 19 nt, Artificial Sequence
  Description of Artificial Sequence: Synthetic oligonucleotide
ccuugcuaaacgaagaugg

SEQ ID NO: 207413 - RNA, 19 nt, Artificial Sequence
  Description of Artificial Sequence: Synthetic oligonucleotide
uaggcguacgcacaaaugu

SEQ ID NO: 207414 - RNA, 19 nt, Artificial Sequence
  Description of Artificial Sequence: Synthetic oligonucleotide
ucguucuuuagauuugcag

SEQ ID NO: 207415 - RNA, 19 nt, Artificial Sequence
  Description of Artificial Sequence: Synthetic oligonucleotide
ucuauauaccuucuggauu

SEQ ID NO: 207416 - RNA, 19 nt, Artificial Sequence
  Description of Artificial Sequence: Synthetic oligonucleotide
aguuucguucuuuagauuu

SEQ ID NO: 207417 - RNA, 19 nt, Artificial Sequence
  Description of Artificial Sequence: Synthetic oligonucleotide
guaggaauccuuaagguac

SEQ ID NO: 207418 - RNA, 19 nt, Artificial Sequence
  Description of Artificial Sequence: Synthetic oligonucleotide
aagaaaauuacagccugca

SEQ ID NO: 207419 - RNA, 19 nt, Artificial Sequence
  Description of Artificial Sequence: Synthetic oligonucleotide
ugguacacaaacagauuag

SEQ ID NO: 207420 - RNA, 19 nt, Artificial Sequence
  Description of Artificial Sequence: Synthetic oligonucleotide
uauggagagacuugcaaaa

SEQ ID NO: 207421 - RNA, 19 nt, Artificial Sequence
  Description of Artificial Sequence: Synthetic oligonucleotide
uuuaaguuacaccggucac

SEQ ID NO: 207422 - RNA, 19 nt, Artificial Sequence
  Description of Artificial Sequence: Synthetic oligonucleotide
auuuuaccaccuuguaagg

SEQ ID NO: 207423 - RNA, 19 nt, Artificial Sequence
  Description of Artificial Sequence: Synthetic oligonucleotide
acgaaggccgaauuguggg

SEQ ID NO: 207424 - RNA, 19 nt, Artificial Sequence
  Description of Artificial Sequence: Synthetic oligonucleotide
cagugaauuacacauuaac

SEQ ID NO: 207425 - RNA, 19 nt, Artificial Sequence
  Description of Artificial Sequence: Synthetic oligonucleotide
uggaauuaggaggaaaaga

SEQ ID NO: 207426 - RNA, 19 nt, Artificial Sequence
  Description of Artificial Sequence: Synthetic oligonucleotide
augucuauucaacagcccu

SEQ ID NO: 207427 - RNA, 19 nt, Artificial Sequence
  Description of Artificial Sequence: Synthetic oligonucleotide
aucacuugaacaauacguc

SEQ ID NO: 207428 - RNA, 19 nt, Artificial Sequence
  Description of Artificial Sequence: Synthetic oligonucleotide
uuaacgggucuguuuacag

SEQ ID NO: 207429 - RNA, 19 nt, Artificial Sequence
  Description of Artificial Sequence: Synthetic oligonucleotide
aguuacauuuggcauguca

SEQ ID NO: 207430 - RNA, 19 nt, Artificial Sequence
  Description of Artificial Sequence: Synthetic oligonucleotide
ucgaaagucgacuuccgcu

SEQ ID NO: 207431 - RNA, 19 nt, Artificial Sequence
  Description of Artificial Sequence: Synthetic oligonucleotide
aacggcaucuuauuucuaa

SEQ ID NO: 207432 - RNA, 19 nt, Artificial Sequence
  Description of Artificial Sequence: Synthetic oligonucleotide
gguagcuuaguacuaagug

SEQ ID NO: 207433 - RNA, 19 nt, Artificial Sequence
  Description of Artificial Sequence: Synthetic oligonucleotide
uucuauauaccuucuggau

SEQ ID NO: 207434 - RNA, 19 nt, Artificial Sequence
  Description of Artificial Sequence: Synthetic oligonucleotide
aaaauguuagaugguuuga

SEQ ID NO: 207435 - RNA, 19 nt, Artificial Sequence
  Description of Artificial Sequence: Synthetic oligonucleotide
guccgcauucauuuaacgg

SEQ ID NO: 207436 - RNA, 19 nt, Artificial Sequence
  Description of Artificial Sequence: Synthetic oligonucleotide
acgaugcuccacaauaucc

SEQ ID NO: 207437 - RNA, 19 nt, Artificial Sequence
  Description of Artificial Sequence: Synthetic oligonucleotide
uccuguucaccacaguaca

SEQ ID NO: 207438 - RNA, 19 nt, Artificial Sequence
  Description of Artificial Sequence: Synthetic oligonucleotide
cuugcuaaacgaagauggg

SEQ ID NO: 207439 - RNA, 19 nt, Artificial Sequence
  Description of Artificial Sequence: Synthetic oligonucleotide
acgguaaugguuugcaacu

SEQ ID NO: 207440 - RNA, 19 nt, Artificial Sequence
  Description of Artificial Sequence: Synthetic oligonucleotide
caaucucacagcagcagcc

SEQ ID NO: 207441 - RNA, 19 nt, Artificial Sequence
  Description of Artificial Sequence: Synthetic oligonucleotide
cagucuaccugacuggugc

SEQ ID NO: 207442 - RNA, 19 nt, Artificial Sequence
  Description of Artificial Sequence: Synthetic oligonucleotide
uuaaguuacaccggucaca

SEQ ID NO: 207443 - RNA, 19 nt, Artificial Sequence
  Description of Artificial Sequence: Synthetic oligonucleotide
uaugucuauucaacagccc

SEQ ID NO: 207444 - RNA, 19 nt, Artificial Sequence
  Description of Artificial Sequence: Synthetic oligonucleotide
uuaggcguacgcacaaaug

SEQ ID NO: 207445 - RNA, 19 nt, Artificial Sequence
  Description of Artificial Sequence: Synthetic oligonucleotide
guaguauuauuaaugguga

SEQ ID NO: 207446 - RNA, 19 nt, Artificial Sequence
  Description of Artificial Sequence: Synthetic oligonucleotide
cacuugaacaauacgucug

SEQ ID NO: 207447 - RNA, 19 nt, Artificial Sequence
  Description of Artificial Sequence: Synthetic oligonucleotide
aaauguuagaugguuugau

SEQ ID NO: 207448 - RNA, 19 nt, Artificial Sequence
  Description of Artificial Sequence: Synthetic oligonucleotide
uacaguugcucaaggaauc

SEQ ID NO: 207449 - RNA, 19 nt, Artificial Sequence
  Description of Artificial Sequence: Synthetic oligonucleotide
cacgguaaugguuugcaac

SEQ ID NO: 207450 - RNA, 19 nt, Artificial Sequence
  Description of Artificial Sequence: Synthetic oligonucleotide
ugguuuaacugacuuuccu

SEQ ID NO: 207451 - RNA, 19 nt, Artificial Sequence
  Description of Artificial Sequence: Synthetic oligonucleotide
acagguuucuggcagcgug

SEQ ID NO: 207452 - RNA, 19 nt, Artificial Sequence
  Description of Artificial Sequence: Synthetic oligonucleotide
uaacacggugcuuuaugag

SEQ ID NO: 207453 - RNA, 19 nt, Artificial Sequence
  Description of Artificial Sequence: Synthetic oligonucleotide
acuaccuugcuaaacgaag

SEQ ID NO: 207454 - RNA, 19 nt, Artificial Sequence
  Description of Artificial Sequence: Synthetic oligonucleotide
aaauuacagccugcacgcc

SEQ ID NO: 207455 - RNA, 19 nt, Artificial Sequence
  Description of Artificial Sequence: Synthetic oligonucleotide
uuugugagguaccuagaau

SEQ ID NO: 207456 - RNA, 19 nt, Artificial Sequence
  Description of Artificial Sequence: Synthetic oligonucleotide
aguauguuaucuacaagca

SEQ ID NO: 207457 - RNA, 19 nt, Artificial Sequence
  Description of Artificial Sequence: Synthetic oligonucleotide
gaaacauuaggcguacgca

SEQ ID NO: 207458 - RNA, 19 nt, Artificial Sequence
  Description of Artificial Sequence: Synthetic oligonucleotide
aguccgcauucauuuaacg

SEQ ID NO: 207459 - RNA, 19 nt, Artificial Sequence
  Description of Artificial Sequence: Synthetic oligonucleotide
aacuaugagguaaaccuau

SEQ ID NO: 207460 - RNA, 19 nt, Artificial Sequence
  Description of Artificial Sequence: Synthetic oligonucleotide
cuggcugcgucgaaagucg

SEQ ID NO: 207461 - RNA, 19 nt, Artificial Sequence
  Description of Artificial Sequence: Synthetic oligonucleotide
cugaacggcaucuuauuuc

SEQ ID NO: 207462 - RNA, 19 nt, Artificial Sequence
  Description of Artificial Sequence: Synthetic oligonucleotide
cucuaaaucuggaauguga

SEQ ID NO: 207463 - RNA, 19 nt, Artificial Sequence
  Description of Artificial Sequence: Synthetic oligonucleotide
auauuuggauacucugugu

SEQ ID NO: 207464 - RNA, 19 nt, Artificial Sequence
  Description of Artificial Sequence: Synthetic oligonucleotide
uuaguacuaagugaauuua

SEQ ID NO: 207465 - RNA, 19 nt, Artificial Sequence
  Description of Artificial Sequence: Synthetic oligonucleotide
cacucuaaagguagcuuag

SEQ ID NO: 207466 - RNA, 19 nt, Artificial Sequence
  Description of Artificial Sequence: Synthetic oligonucleotide
aaagucgacuuccgcucag

SEQ ID NO: 207467 - RNA, 19 nt, Artificial Sequence
  Description of Artificial Sequence: Synthetic oligonucleotide
cuagaauauuauaauggaa

SEQ ID NO: 207468 - RNA, 19 nt, Artificial Sequence
  Description of Artificial Sequence: Synthetic oligonucleotide
uugcuaaacgaagauggga

SEQ ID NO: 207469 - RNA, 19 nt, Artificial Sequence
  Description of Artificial Sequence: Synthetic oligonucleotide
aggacgaugcuccacaaua

SEQ ID NO: 207470 - RNA, 19 nt, Artificial Sequence
  Description of Artificial Sequence: Synthetic oligonucleotide
acauuaacugccaguccgc

SEQ ID NO: 207471 - RNA, 19 nt, Artificial Sequence
  Description of Artificial Sequence: Synthetic oligonucleotide
agucuaccugacuggugcc

SEQ ID NO: 207472 - RNA, 19 nt, Artificial Sequence
  Description of Artificial Sequence: Synthetic oligonucleotide
auucaauccaaaagcaggu

SEQ ID NO: 207473 - RNA, 19 nt, Artificial Sequence
  Description of Artificial Sequence: Synthetic oligonucleotide
gguaguuucguucuuuaga

SEQ ID NO: 207474 - RNA, 19 nt, Artificial Sequence
  Description of Artificial Sequence: Synthetic oligonucleotide
ugucuauucaacagcccua

SEQ ID NO: 207475 - RNA, 19 nt, Artificial Sequence
  Description of Artificial Sequence: Synthetic oligonucleotide
caauuacauucucagacca

SEQ ID NO: 207476 - RNA, 19 nt, Artificial Sequence
  Description of Artificial Sequence: Synthetic oligonucleotide
ugguaguuucguucuuuag

SEQ ID NO: 207477 - RNA, 19 nt, Artificial Sequence
  Description of Artificial Sequence: Synthetic oligonucleotide
aauccuuaagguacaguaa

SEQ ID NO: 207478 - RNA, 19 nt, Artificial Sequence
  Description of Artificial Sequence: Synthetic oligonucleotide
cuaacuuccuaccauguua

SEQ ID NO: 207479 - RNA, 19 nt, Artificial Sequence
  Description of Artificial Sequence: Synthetic oligonucleotide
auuaggcguacgcacaaau

SEQ ID NO: 207480 - RNA, 19 nt, Artificial Sequence
  Description of Artificial Sequence: Synthetic oligonucleotide
cuuccgcucagguugugag

SEQ ID NO: 207481 - RNA, 19 nt, Artificial Sequence
  Description of Artificial Sequence: Synthetic oligonucleotide
cauuuaacgggucuguuua

SEQ ID NO: 207482 - RNA, 19 nt, Artificial Sequence
  Description of Artificial Sequence: Synthetic oligonucleotide
auaaacuauuacucaucaa

SEQ ID NO: 207483 - RNA, 19 nt, Artificial Sequence
  Description of Artificial Sequence: Synthetic oligonucleotide
agcagguaguauuauuaau

SEQ ID NO: 207484 - RNA, 19 nt, Artificial Sequence
  Description of Artificial Sequence: Synthetic oligonucleotide
ugccaguccgcauucauuu

SEQ ID NO: 207485 - RNA, 19 nt, Artificial Sequence
  Description of Artificial Sequence: Synthetic oligonucleotide
uugcgguucucacagguuu

SEQ ID NO: 207486 - RNA, 19 nt, Artificial Sequence
  Description of Artificial Sequence: Synthetic oligonucleotide
uaccuugcuaaacgaagau

SEQ ID NO: 207487 - RNA, 19 nt, Artificial Sequence
  Description of Artificial Sequence: Synthetic oligonucleotide
gugcuuuaugaguaugaac

SEQ ID NO: 207488 - RNA, 19 nt, Artificial Sequence
  Description of Artificial Sequence: Synthetic oligonucleotide
ucagucuaccugacuggug

SEQ ID NO: 207489 - RNA, 19 nt, Artificial Sequence
  Description of Artificial Sequence: Synthetic oligonucleotide
agaacacaaccuuuagguu

SEQ ID NO: 207490 - RNA, 19 nt, Artificial Sequence
  Description of Artificial Sequence: Synthetic oligonucleotide
cuaccuugcuaaacgaaga

SEQ ID NO: 207491 - RNA, 19 nt, Artificial Sequence
  Description of Artificial Sequence: Synthetic oligonucleotide
uguucaccacaguacaguu

SEQ ID NO: 207492 - RNA, 19 nt, Artificial Sequence
  Description of Artificial Sequence: Synthetic oligonucleotide
guuaguccuguucaccaca

SEQ ID NO: 207493 - RNA, 19 nt, Artificial Sequence
  Description of Artificial Sequence: Synthetic oligonucleotide
cugccucaugaaaaguuac

SEQ ID NO: 207494 - RNA, 19 nt, Artificial Sequence
  Description of Artificial Sequence: Synthetic oligonucleotide
ccuagaauauuauaaugga

SEQ ID NO: 207495 - RNA, 19 nt, Artificial Sequence
  Description of Artificial Sequence: Synthetic oligonucleotide
uuuagcuguagaguugguu

SEQ ID NO: 207496 - RNA, 19 nt, Artificial Sequence
  Description of Artificial Sequence: Synthetic oligonucleotide
caguaggcacuacagaaca

SEQ ID NO: 207497 - RNA, 19 nt, Artificial Sequence
  Description of Artificial Sequence: Synthetic oligonucleotide
guuacacgguaaugguuug

SEQ ID NO: 207498 - RNA, 19 nt, Artificial Sequence
  Description of Artificial Sequence: Synthetic oligonucleotide
aauauccuguaugcauccu

SEQ ID NO: 207499 - RNA, 19 nt, Artificial Sequence
  Description of Artificial Sequence: Synthetic oligonucleotide
aagucgacuuccgcucagg

SEQ ID NO: 207500 - RNA, 19 nt, Artificial Sequence
  Description of Artificial Sequence: Synthetic oligonucleotide
agcacuuacuuaaaacuaa

SEQ ID NO: 207501 - RNA, 19 nt, Artificial Sequence
  Description of Artificial Sequence: Synthetic oligonucleotide
aguaugaacaaaaccuguu

SEQ ID NO: 207502 - RNA, 19 nt, Artificial Sequence
  Description of Artificial Sequence: Synthetic oligonucleotide
gacuaguccaugugugaga

SEQ ID NO: 207503 - RNA, 19 nt, Artificial Sequence
  Description of Artificial Sequence: Synthetic oligonucleotide
gugguauugguuguaccug

SEQ ID NO: 207504 - RNA, 19 nt, Artificial Sequence
  Description of Artificial Sequence: Synthetic oligonucleotide
uuacaccggucacaucugu

SEQ ID NO: 207505 - RNA, 19 nt, Artificial Sequence
  Description of Artificial Sequence: Synthetic oligonucleotide
gcucacaucaacaauuaca

SEQ ID NO: 207506 - RNA, 19 nt, Artificial Sequence
  Description of Artificial Sequence: Synthetic oligonucleotide
gaaagucgacuuccgcuca

SEQ ID NO: 207507 - RNA, 19 nt, Artificial Sequence
  Description of Artificial Sequence: Synthetic oligonucleotide
gucgaaagucgacuuccgc

SEQ ID NO: 207508 - RNA, 19 nt, Artificial Sequence
  Description of Artificial Sequence: Synthetic oligonucleotide
accuugcuaaacgaagaug

SEQ ID NO: 207509 - RNA, 19 nt, Artificial Sequence
  Description of Artificial Sequence: Synthetic oligonucleotide
acauuaggcguacgcacaa

SEQ ID NO: 207510 - RNA, 19 nt, Artificial Sequence
  Description of Artificial Sequence: Synthetic oligonucleotide
uuacacgguaaugguuugc

SEQ ID NO: 207511 - RNA, 19 nt, Artificial Sequence
  Description of Artificial Sequence: Synthetic oligonucleotide
agggugguauugguuguac

SEQ ID NO: 207512 - RNA, 19 nt, Artificial Sequence
  Description of Artificial Sequence: Synthetic oligonucleotide
uugaaacauuaggcguacg

SEQ ID NO: 207513 - RNA, 19 nt, Artificial Sequence
  Description of Artificial Sequence: Synthetic oligonucleotide
uauauggggcaaagacauc

SEQ ID NO: 207514 - RNA, 19 nt, Artificial Sequence
  Description of Artificial Sequence: Synthetic oligonucleotide
accucaggguuuuaaguua

SEQ ID NO: 207515 - RNA, 19 nt, Artificial Sequence
  Description of Artificial Sequence: Synthetic oligonucleotide
gagcuuauggagagacuug

SEQ ID NO: 207516 - RNA, 19 nt, Artificial Sequence
  Description of Artificial Sequence: Synthetic oligonucleotide
ugcgucgaaagucgacuuc

SEQ ID NO: 207517 - RNA, 19 nt, Artificial Sequence
  Description of Artificial Sequence: Synthetic oligonucleotide
cuguaugcauccuuuggaa

SEQ ID NO: 207518 - RNA, 19 nt, Artificial Sequence
  Description of Artificial Sequence: Synthetic oligonucleotide
gugagcgucgucggggugg

SEQ ID NO: 207519 - RNA, 19 nt, Artificial Sequence
  Description of Artificial Sequence: Synthetic oligonucleotide
ggcugguuacggucgaggg

SEQ ID NO: 207520 - RNA, 19 nt, Artificial Sequence
  Description of Artificial Sequence: Synthetic oligonucleotide
ggagacgaaggccgaauug

SEQ ID NO: 207521 - RNA, 19 nt, Artificial Sequence
  Description of Artificial Sequence: Synthetic oligonucleotide
agauaauauuuugguuuca

SEQ ID NO: 207522 - RNA, 19 nt, Artificial Sequence
  Description of Artificial Sequence: Synthetic oligonucleotide
uucaauccaaaagcaggua

SEQ ID NO: 207523 - RNA, 19 nt, Artificial Sequence
  Description of Artificial Sequence: Synthetic oligonucleotide
cacaggagcuucaaauuaa

SEQ ID NO: 207524 - RNA, 19 nt, Artificial Sequence
  Description of Artificial Sequence: Synthetic oligonucleotide
gagacgaaggccgaauugu

SEQ ID NO: 207525 - RNA, 19 nt, Artificial Sequence
  Description of Artificial Sequence: Synthetic oligonucleotide
gguuuuaaguuacaccggu

SEQ ID NO: 207526 - RNA, 19 nt, Artificial Sequence
  Description of Artificial Sequence: Synthetic oligonucleotide
aaggccgaauuguggguuu

SEQ ID NO: 207527 - RNA, 19 nt, Artificial Sequence
  Description of Artificial Sequence: Synthetic oligonucleotide
guuuuaaguuacaccgguc

SEQ ID NO: 207528 - RNA, 19 nt, Artificial Sequence
  Description of Artificial Sequence: Synthetic oligonucleotide
ggugguauugguuguaccu

SEQ ID NO: 207529 - RNA, 19 nt, Artificial Sequence
  Description of Artificial Sequence: Synthetic oligonucleotide
gaguaugaacaaaaccugu

SEQ ID NO: 207530 - RNA, 19 nt, Artificial Sequence
  Description of Artificial Sequence: Synthetic oligonucleotide
ggacuaguccaugugugag

SEQ ID NO: 207531 - RNA, 19 nt, Artificial Sequence
  Description of Artificial Sequence: Synthetic oligonucleotide
agucgacuuccgcucaggu

SEQ ID NO: 207532 - RNA, 19 nt, Artificial Sequence
  Description of Artificial Sequence: Synthetic oligonucleotide
guuacggucgagggcucgg

SEQ ID NO: 207533 - RNA, 19 nt, Artificial Sequence
  Description of Artificial Sequence: Synthetic oligonucleotide
guucaccacaguacaguug

SEQ ID NO: 207534 - RNA, 19 nt, Artificial Sequence
  Description of Artificial Sequence: Synthetic oligonucleotide
cucuaaagguagcuuagua

SEQ ID NO: 207535 - RNA, 19 nt, Artificial Sequence
  Description of Artificial Sequence: Synthetic oligonucleotide
auacgucugauuagcuucu

SEQ ID NO: 207536 - RNA, 19 nt, Artificial Sequence
  Description of Artificial Sequence: Synthetic oligonucleotide
auuuugugagguaccuaga

SEQ ID NO: 207537 - RNA, 19 nt, Artificial Sequence
  Description of Artificial Sequence: Synthetic oligonucleotide
uaguuucguucuuuagauu

SEQ ID NO: 207538 - RNA, 19 nt, Artificial Sequence
  Description of Artificial Sequence: Synthetic oligonucleotide
aggcguacgcacaaaugug

SEQ ID NO: 207539 - RNA, 19 nt, Artificial Sequence
  Description of Artificial Sequence: Synthetic oligonucleotide
uucauuuaacgggucuguu

SEQ ID NO: 207540 - RNA, 19 nt, Artificial Sequence
  Description of Artificial Sequence: Synthetic oligonucleotide
acaauacgucugauuagcu

SEQ ID NO: 207541 - RNA, 19 nt, Artificial Sequence
  Description of Artificial Sequence: Synthetic oligonucleotide
gucacuaacuuccuaccau

SEQ ID NO: 207542 - RNA, 19 nt, Artificial Sequence
  Description of Artificial Sequence: Synthetic oligonucleotide
caguacaguugcucaagga

SEQ ID NO: 207543 - RNA, 19 nt, Artificial Sequence
  Description of Artificial Sequence: Synthetic oligonucleotide
accggucacaucuguuaga

SEQ ID NO: 207544 - RNA, 19 nt, Artificial Sequence
  Description of Artificial Sequence: Synthetic oligonucleotide
guuacggugcuguucugcu

SEQ ID NO: 207545 - RNA, 19 nt, Artificial Sequence
  Description of Artificial Sequence: Synthetic oligonucleotide
uauauaccuucuggauuaa

SEQ ID NO: 207546 - RNA, 19 nt, Artificial Sequence
  Description of Artificial Sequence: Synthetic oligonucleotide
agagugugguaguuucguu

SEQ ID NO: 207547 - RNA, 19 nt, Artificial Sequence
  Description of Artificial Sequence: Synthetic oligonucleotide
caaagugauugucucauuu

SEQ ID NO: 207548 - RNA, 19 nt, Artificial Sequence
  Description of Artificial Sequence: Synthetic oligonucleotide
cauuuauauggggcaaaga

SEQ ID NO: 207549 - RNA, 19 nt, Artificial Sequence
  Description of Artificial Sequence: Synthetic oligonucleotide
cugguuacggucgagggcu

SEQ ID NO: 207550 - RNA, 19 nt, Artificial Sequence
  Description of Artificial Sequence: Synthetic oligonucleotide
acacgguaaugguuugcaa

SEQ ID NO: 207551 - RNA, 19 nt, Artificial Sequence
  Description of Artificial Sequence: Synthetic oligonucleotide
aggagacgaaggccgaauu

SEQ ID NO: 207552 - RNA, 19 nt, Artificial Sequence
  Description of Artificial Sequence: Synthetic oligonucleotide
acacggugcuuuaugagua

SEQ ID NO: 207553 - RNA, 19 nt, Artificial Sequence
  Description of Artificial Sequence: Synthetic oligonucleotide
gguuacggugcuguucugc

SEQ ID NO: 207554 - RNA, 19 nt, Artificial Sequence
  Description of Artificial Sequence: Synthetic oligonucleotide
gcgucgaaagucgacuucc

SEQ ID NO: 207555 - RNA, 19 nt, Artificial Sequence
  Description of Artificial Sequence: Synthetic oligonucleotide
aucaagcacaacacucuaa

SEQ ID NO: 207556 - RNA, 19 nt, Artificial Sequence
  Description of Artificial Sequence: Synthetic oligonucleotide
acggugcuuuaugaguaug

SEQ ID NO: 207557 - RNA, 19 nt, Artificial Sequence
  Description of Artificial Sequence: Synthetic oligonucleotide
uccuaccauguuagagcaa

SEQ ID NO: 207558 - RNA, 19 nt, Artificial Sequence
  Description of Artificial Sequence: Synthetic oligonucleotide
ggcgugagcgucgucgggg

SEQ ID NO: 207559 - RNA, 19 nt, Artificial Sequence
  Description of Artificial Sequence: Synthetic oligonucleotide
gggugguauugguuguacc

SEQ ID NO: 207560 - RNA, 19 nt, Artificial Sequence
  Description of Artificial Sequence: Synthetic oligonucleotide
ugagcgucgucgggguggc

SEQ ID NO: 207561 - RNA, 19 nt, Artificial Sequence
  Description of Artificial Sequence: Synthetic oligonucleotide
cuguugcgguucucacagg

SEQ ID NO: 207562 - RNA, 19 nt, Artificial Sequence
  Description of Artificial Sequence: Synthetic oligonucleotide
acgucugauuagcuucuuu

SEQ ID NO: 207563 - RNA, 19 nt, Artificial Sequence
  Description of Artificial Sequence: Synthetic oligonucleotide
ccaaaagcagguaguauua

SEQ ID NO: 207564 - RNA, 19 nt, Artificial Sequence
  Description of Artificial Sequence: Synthetic oligonucleotide
agggcucggucacguuggg

SEQ ID NO: 207565 - RNA, 19 nt, Artificial Sequence
  Description of Artificial Sequence: Synthetic oligonucleotide
gggguuacggugcuguucu

SEQ ID NO: 207566 - RNA, 19 nt, Artificial Sequence
  Description of Artificial Sequence: Synthetic oligonucleotide
ggugcuuuaugaguaugaa

SEQ ID NO: 207567 - RNA, 19 nt, Artificial Sequence
  Description of Artificial Sequence: Synthetic oligonucleotide
uggcugcgucgaaagucga

SEQ ID NO: 207568 - RNA, 19 nt, Artificial Sequence
  Description of Artificial Sequence: Synthetic oligonucleotide
caauacgucugauuagcuu

SEQ ID NO: 207569 - RNA, 19 nt, Artificial Sequence
  Description of Artificial Sequence: Synthetic oligonucleotide
gcacaggauaccacuuucc

SEQ ID NO: 207570 - RNA, 19 nt, Artificial Sequence
  Description of Artificial Sequence: Synthetic oligonucleotide
ucggucacguugggaguug

SEQ ID NO: 207571 - RNA, 19 nt, Artificial Sequence
  Description of Artificial Sequence: Synthetic oligonucleotide
uuacggucgagggcucggu

SEQ ID NO: 207572 - RNA, 19 nt, Artificial Sequence
  Description of Artificial Sequence: Synthetic oligonucleotide
gcuggcugcgucgaaaguc

SEQ ID NO: 207573 - RNA, 19 nt, Artificial Sequence
  Description of Artificial Sequence: Synthetic oligonucleotide
agcuuaguacuaagugaau

SEQ ID NO: 207574 - RNA, 19 nt, Artificial Sequence
  Description of Artificial Sequence: Synthetic oligonucleotide
uuacagccugcacgcccaa

SEQ ID NO: 207575 - RNA, 19 nt, Artificial Sequence
  Description of Artificial Sequence: Synthetic oligonucleotide
gucuauucaacagcccuau

SEQ ID NO: 207576 - RNA, 19 nt, Artificial Sequence
  Description of Artificial Sequence: Synthetic oligonucleotide
ugguuacggucgagggcuc

SEQ ID NO: 207577 - RNA, 19 nt, Artificial Sequence
  Description of Artificial Sequence: Synthetic oligonucleotide
gguuacggucgagggcucg

SEQ ID NO: 207578 - RNA, 19 nt, Artificial Sequence
  Description of Artificial Sequence: Synthetic oligonucleotide
gccgaauuguggguuuagc

SEQ ID NO: 207579 - RNA, 19 nt, Artificial Sequence
  Description of Artificial Sequence: Synthetic oligonucleotide
cuguuacacgguaaugguu

SEQ ID NO: 207580 - RNA, 19 nt, Artificial Sequence
  Description of Artificial Sequence: Synthetic oligonucleotide
ggucacguugggaguuggg

SEQ ID NO: 207581 - RNA, 19 nt, Artificial Sequence
  Description of Artificial Sequence: Synthetic oligonucleotide
gaaggccgaauuguggguu

SEQ ID NO: 207582 - RNA, 19 nt, Artificial Sequence
  Description of Artificial Sequence: Synthetic oligonucleotide
gcuuaguacuaagugaauu

SEQ ID NO: 207583 - RNA, 19 nt, Artificial Sequence
  Description of Artificial Sequence: Synthetic oligonucleotide
acgggucuguuuacagagu

SEQ ID NO: 207584 - RNA, 19 nt, Artificial Sequence
  Description of Artificial Sequence: Synthetic oligonucleotide
ggccgaauuguggguuuag

SEQ ID NO: 207585 - RNA, 19 nt, Artificial Sequence
  Description of Artificial Sequence: Synthetic oligonucleotide
caaaagcagguaguauuau

SEQ ID NO: 207586 - RNA, 19 nt, Artificial Sequence
  Description of Artificial Sequence: Synthetic oligonucleotide
gcugcgucgaaagucgacu

SEQ ID NO: 207587 - RNA, 19 nt, Artificial Sequence
  Description of Artificial Sequence: Synthetic oligonucleotide
gcguacgcacaaaugugca

SEQ ID NO: 207588 - RNA, 19 nt, Artificial Sequence
  Description of Artificial Sequence: Synthetic oligonucleotide
ccaguccgcauucauuuaa

SEQ ID NO: 207589 - RNA, 19 nt, Artificial Sequence
  Description of Artificial Sequence: Synthetic oligonucleotide
cacugucgccacgcagagc

SEQ ID NO: 207590 - RNA, 19 nt, Artificial Sequence
  Description of Artificial Sequence: Synthetic oligonucleotide
cauuaggcguacgcacaaa

SEQ ID NO: 207591 - RNA, 19 nt, Artificial Sequence
  Description of Artificial Sequence: Synthetic oligonucleotide
gacuuccgcucagguugug

SEQ ID NO: 207592 - RNA, 19 nt, Artificial Sequence
  Description of Artificial Sequence: Synthetic oligonucleotide
gaacggcaucuuauuucua

SEQ ID NO: 207593 - RNA, 19 nt, Artificial Sequence
  Description of Artificial Sequence: Synthetic oligonucleotide
ccgcauucauuuaacgggu

SEQ ID NO: 207594 - RNA, 19 nt, Artificial Sequence
  Description of Artificial Sequence: Synthetic oligonucleotide
ggcugcgucgaaagucgac

SEQ ID NO: 207595 - RNA, 19 nt, Artificial Sequence
  Description of Artificial Sequence: Synthetic oligonucleotide
aggccgaauuguggguuua

SEQ ID NO: 207596 - RNA, 19 nt, Artificial Sequence
  Description of Artificial Sequence: Synthetic oligonucleotide
ccugcacgcccaagacaag

SEQ ID NO: 207597 - RNA, 19 nt, Artificial Sequence
  Description of Artificial Sequence: Synthetic oligonucleotide
ggguuacggugcuguucug

SEQ ID NO: 207598 - RNA, 19 nt, Artificial Sequence
  Description of Artificial Sequence: Synthetic oligonucleotide
cacggugcuuuaugaguau

SEQ ID NO: 207599 - RNA, 19 nt, Artificial Sequence
  Description of Artificial Sequence: Synthetic oligonucleotide
cugcgucgaaagucgacuu

SEQ ID NO: 207600 - RNA, 19 nt, Artificial Sequence
  Description of Artificial Sequence: Synthetic oligonucleotide
ggacgaugcuccacaauau

SEQ ID NO: 207601 - RNA, 19 nt, Artificial Sequence
  Description of Artificial Sequence: Synthetic oligonucleotide
guugcgguucucacagguu

SEQ ID NO: 207602 - RNA, 19 nt, Artificial Sequence
  Description of Artificial Sequence: Synthetic oligonucleotide
cguacgcacaaaugugcaa

SEQ ID NO: 207603 - RNA, 19 nt, Artificial Sequence
  Description of Artificial Sequence: Synthetic oligonucleotide
ccacaacuuacagaaaguu

SEQ ID NO: 207604 - RNA, 19 nt, Artificial Sequence
  Description of Artificial Sequence: Synthetic oligonucleotide
ccaucucagucugucuuaa

SEQ ID NO: 207605 - RNA, 19 nt, Artificial Sequence
  Description of Artificial Sequence: Synthetic oligonucleotide
gccacgcagagcgcggcca

SEQ ID NO: 207606 - RNA, 19 nt, Artificial Sequence
  Description of Artificial Sequence: Synthetic oligonucleotide
cccugaacggcaucuuauu

SEQ ID NO: 207607 - RNA, 19 nt, Artificial Sequence
  Description of Artificial Sequence: Synthetic oligonucleotide
gucgucgggguggcuggcu

SEQ ID NO: 207608 - RNA, 19 nt, Artificial Sequence
  Description of Artificial Sequence: Synthetic oligonucleotide
gggcucggucacguuggga

SEQ ID NO: 207609 - RNA, 19 nt, Artificial Sequence
  Description of Artificial Sequence: Synthetic oligonucleotide
cgugagcgucgucggggug

SEQ ID NO: 207610 - RNA, 19 nt, Artificial Sequence
  Description of Artificial Sequence: Synthetic oligonucleotide
ggugggcgugagcgucguc

SEQ ID NO: 207611 - RNA, 19 nt, Artificial Sequence
  Description of Artificial Sequence: Synthetic oligonucleotide
cgacuuccgcucagguugu

SEQ ID NO: 207612 - RNA, 19 nt, Artificial Sequence
  Description of Artificial Sequence: Synthetic oligonucleotide
gagcgucgucgggguggcu

SEQ ID NO: 207613 - RNA, 19 nt, Artificial Sequence
  Description of Artificial Sequence: Synthetic oligonucleotide
cgguaaugguuugcaacuu

SEQ ID NO: 207614 - RNA, 19 nt, Artificial Sequence
  Description of Artificial Sequence: Synthetic oligonucleotide
cccaaaccucaggguuuua

SEQ ID NO: 207615 - RNA, 19 nt, Artificial Sequence
  Description of Artificial Sequence: Synthetic oligonucleotide
  modified_base (6)..(6): a, c, u, g, unknown or other
aaaacnccuaucuugcugg

SEQ ID NO: 207616 - RNA, 19 nt, Artificial Sequence
  Description of Artificial Sequence: Synthetic oligonucleotide
aaugaaaccuuuuauccag

SEQ ID NO: 207617 - RNA, 19 nt, Artificial Sequence
  Description of Artificial Sequence: Synthetic oligonucleotide
agagauuuuagcuugggag

SEQ ID NO: 207618 - RNA, 19 nt, Artificial Sequence
  Description of Artificial Sequence: Synthetic oligonucleotide
agacaauaaaaucucuugc

SEQ ID NO: 207619 - RNA, 19 nt, Artificial Sequence
  Description of Artificial Sequence: Synthetic oligonucleotide
agcaacuacaacuuucucc

SEQ ID NO: 207620 - RNA, 19 nt, Artificial Sequence
  Description of Artificial Sequence: Synthetic oligonucleotide
uguaacgugccuuugaacc

SEQ ID NO: 207621 - RNA, 19 nt, Artificial Sequence
  Description of Artificial Sequence: Synthetic oligonucleotide
aaaccuuuuauccaguccu

SEQ ID NO: 207622 - RNA, 19 nt, Artificial Sequence
  Description of Artificial Sequence: Synthetic oligonucleotide
aucacaauggaucaauggg

SEQ ID NO: 207623 - RNA, 19 nt, Artificial Sequence
  Description of Artificial Sequence: Synthetic oligonucleotide
uuaguuauacaucuuaaaa

SEQ ID NO: 207624 - RNA, 19 nt, Artificial Sequence
  Description of Artificial Sequence: Synthetic oligonucleotide
uuaugaacaaacacgauau

SEQ ID NO: 207625 - RNA, 19 nt, Artificial Sequence
  Description of Artificial Sequence: Synthetic oligonucleotide
uguuacaacauccaucuac

SEQ ID NO: 207626 - RNA, 19 nt, Artificial Sequence
  Description of Artificial Sequence: Synthetic oligonucleotide
aacuacaacuuucuccuac

SEQ ID NO: 207627 - RNA, 19 nt, Artificial Sequence
  Description of Artificial Sequence: Synthetic oligonucleotide
ugaauauccaaguaaagua

SEQ ID NO: 207628 - RNA, 19 nt, Artificial Sequence
  Description of Artificial Sequence: Synthetic oligonucleotide
uauauuacaugaauaucca

SEQ ID NO: 207629 - RNA, 19 nt, Artificial Sequence
  Description of Artificial Sequence: Synthetic oligonucleotide
aacucacacagaugaaagc

SEQ ID NO: 207630 - RNA, 19 nt, Artificial Sequence
  Description of Artificial Sequence: Synthetic oligonucleotide
ugaaugauggggcaggccc

SEQ ID NO: 207631 - RNA, 19 nt, Artificial Sequence
  Description of Artificial Sequence: Synthetic oligonucleotide
uuaaccaacuuuauaccag

SEQ ID NO: 207632 - RNA, 19 nt, Artificial Sequence
  Description of Artificial Sequence: Synthetic oligonucleotide
uaaugaucuaccaacagau

SEQ ID NO: 207633 - RNA, 19 nt, Artificial Sequence
  Description of Artificial Sequence: Synthetic oligonucleotide
acaauuguaaggugugggc

SEQ ID NO: 207634 - RNA, 19 nt, Artificial Sequence
  Description of Artificial Sequence: Synthetic oligonucleotide
guucgauugaugcugauag

SEQ ID NO: 207635 - RNA, 19 nt, Artificial Sequence
  Description of Artificial Sequence: Synthetic oligonucleotide
aauaaauuaguuaagccuu

SEQ ID NO: 207636 - RNA, 19 nt, Artificial Sequence
  Description of Artificial Sequence: Synthetic oligonucleotide
aaauacacuaauuucccaa

SEQ ID NO: 207637 - RNA, 19 nt, Artificial Sequence
  Description of Artificial Sequence: Synthetic oligonucleotide
uuauaucaccuaaugaucu

SEQ ID NO: 207638 - RNA, 19 nt, Artificial Sequence
  Description of Artificial Sequence: Synthetic oligonucleotide
  modified_base (6)..(6): a, c, u, g, unknown or other
aaaacnucucccuuucuca

SEQ ID NO: 207639 - RNA, 19 nt, Artificial Sequence
  Description of Artificial Sequence: Synthetic oligonucleotide
ugacauauacacaccaugc

SEQ ID NO: 207640 - RNA, 19 nt, Artificial Sequence
  Description of Artificial Sequence: Synthetic oligonucleotide
aacgcucaaauaccaaaac

SEQ ID NO: 207641 - RNA, 19 nt, Artificial Sequence
  Description of Artificial Sequence: Synthetic oligonucleotide
uguaacaagcccuuguuac

SEQ ID NO: 207642 - RNA, 19 nt, Artificial Sequence
  Description of Artificial Sequence: Synthetic oligonucleotide
acaaacaacaggccuggcc

SEQ ID NO: 207643 - RNA, 19 nt, Artificial Sequence
  Description of Artificial Sequence: Synthetic oligonucleotide
uguuuuauauauauauaaa

SEQ ID NO: 207644 - RNA, 19 nt, Artificial Sequence
  Description of Artificial Sequence: Synthetic oligonucleotide
agacauagagauuuuagcu

SEQ ID NO: 207645 - RNA, 19 nt, Artificial Sequence
  Description of Artificial Sequence: Synthetic oligonucleotide
uuugaaccagccauccucg

SEQ ID NO: 207646 - RNA, 19 nt, Artificial Sequence
  Description of Artificial Sequence: Synthetic oligonucleotide
uuauaaggguugaacauca

SEQ ID NO: 207647 - RNA, 19 nt, Artificial Sequence
  Description of Artificial Sequence: Synthetic oligonucleotide
cauuuagacaguacaaggc

SEQ ID NO: 207648 - RNA, 19 nt, Artificial Sequence
  Description of Artificial Sequence: Synthetic oligonucleotide
ugguuaacaggaaugauuc

SEQ ID NO: 207649 - RNA, 19 nt, Artificial Sequence
  Description of Artificial Sequence: Synthetic oligonucleotide
gguaacacaugcaagaugg

SEQ ID NO: 207650 - RNA, 19 nt, Artificial Sequence
  Description of Artificial Sequence: Synthetic oligonucleotide
  modified_base (7)..(7): a, c, u, g, unknown or other
gaaaacnccuaucuugcug

SEQ ID NO: 207651 - RNA, 19 nt, Artificial Sequence
  Description of Artificial Sequence: Synthetic oligonucleotide
uaaaccuuccuguauaggu

SEQ ID NO: 207652 - RNA, 19 nt, Artificial Sequence
  Description of Artificial Sequence: Synthetic oligonucleotide
guuuuauauauauauaaaa

SEQ ID NO: 207653 - RNA, 19 nt, Artificial Sequence
  Description of Artificial Sequence: Synthetic oligonucleotide
auuaguuaagccuuguaaa

SEQ ID NO: 207654 - RNA, 19 nt, Artificial Sequence
  Description of Artificial Sequence: Synthetic oligonucleotide
aagcccacacauuauauca

SEQ ID NO: 207655 - RNA, 19 nt, Artificial Sequence
  Description of Artificial Sequence: Synthetic oligonucleotide
uuaguuaagccuuguaaac

SEQ ID NO: 207656 - RNA, 19 nt, Artificial Sequence
  Description of Artificial Sequence: Synthetic oligonucleotide
auuauaucaccuaaugauc

SEQ ID NO: 207657 - RNA, 19 nt, Artificial Sequence
  Description of Artificial Sequence: Synthetic oligonucleotide
ucauaauccaaagaauuug

SEQ ID NO: 207658 - RNA, 19 nt, Artificial Sequence
  Description of Artificial Sequence: Synthetic oligonucleotide
ugcuauuacaagaaaguuc

SEQ ID NO: 207659 - RNA, 19 nt, Artificial Sequence
  Description of Artificial Sequence: Synthetic oligonucleotide
ugugcucuuccuaugacgc

SEQ ID NO: 207660 - RNA, 19 nt, Artificial Sequence
  Description of Artificial Sequence: Synthetic oligonucleotide
uccuguauaggucaauucu

SEQ ID NO: 207661 - RNA, 19 nt, Artificial Sequence
  Description of Artificial Sequence: Synthetic oligonucleotide
auuaugacacauugguguc

SEQ ID NO: 207662 - RNA, 19 nt, Artificial Sequence
  Description of Artificial Sequence: Synthetic oligonucleotide
cuugcgauggaaagcaucc

SEQ ID NO: 207663 - RNA, 19 nt, Artificial Sequence
  Description of Artificial Sequence: Synthetic oligonucleotide
gcugauagcagcaacaugg

SEQ ID NO: 207664 - RNA, 19 nt, Artificial Sequence
  Description of Artificial Sequence: Synthetic oligonucleotide
acaucagaagccccgaggg

SEQ ID NO: 207665 - RNA, 19 nt, Artificial Sequence
  Description of Artificial Sequence: Synthetic oligonucleotide
cuagcggcaauucaggacc

SEQ ID NO: 207666 - RNA, 19 nt, Artificial Sequence
  Description of Artificial Sequence: Synthetic oligonucleotide
cucuguauagcccauuuag

SEQ ID NO: 207667 - RNA, 19 nt, Artificial Sequence
  Description of Artificial Sequence: Synthetic oligonucleotide
ucucuuaccaccacugucu

SEQ ID NO: 207668 - RNA, 19 nt, Artificial Sequence
  Description of Artificial Sequence: Synthetic oligonucleotide
  modified_base (4)..(4): a, c, u, g, unknown or other
aacnucucccuuucucaac

SEQ ID NO: 207669 - RNA, 19 nt, Artificial Sequence
  Description of Artificial Sequence: Synthetic oligonucleotide
uguauagcccauuuagaca

SEQ ID NO: 207670 - RNA, 19 nt, Artificial Sequence
  Description of Artificial Sequence: Synthetic oligonucleotide
agagcuucaacagucacag

SEQ ID NO: 207671 - RNA, 19 nt, Artificial Sequence
  Description of Artificial Sequence: Synthetic oligonucleotide
uacaacauccaucuacugu

SEQ ID NO: 207672 - RNA, 19 nt, Artificial Sequence
  Description of Artificial Sequence: Synthetic oligonucleotide
gauggucacuguucgaccg

SEQ ID NO: 207673 - RNA, 19 nt, Artificial Sequence
  Description of Artificial Sequence: Synthetic oligonucleotide
guguuuuauauauauauaa

SEQ ID NO: 207674 - RNA, 19 nt, Artificial Sequence
  Description of Artificial Sequence: Synthetic oligonucleotide
cuguauagcccauuuagac

SEQ ID NO: 207675 - RNA, 19 nt, Artificial Sequence
  Description of Artificial Sequence: Synthetic oligonucleotide
uuagacaguacaaggcaca

SEQ ID NO: 207676 - RNA, 19 nt, Artificial Sequence
  Description of Artificial Sequence: Synthetic oligonucleotide
uucaacagucacaggagcc

SEQ ID NO: 207677 - RNA, 19 nt, Artificial Sequence
  Description of Artificial Sequence: Synthetic oligonucleotide
caccuaaugaucuaccaac

SEQ ID NO: 207678 - RNA, 19 nt, Artificial Sequence
  Description of Artificial Sequence: Synthetic oligonucleotide
uccgguaacacaugcaaga

SEQ ID NO: 207679 - RNA, 19 nt, Artificial Sequence
  Description of Artificial Sequence: Synthetic oligonucleotide
auagcugaaaauauggaga

SEQ ID NO: 207680 - RNA, 19 nt, Artificial Sequence
  Description of Artificial Sequence: Synthetic oligonucleotide
ucaucuuaacuuguaguag

SEQ ID NO: 207681 - RNA, 19 nt, Artificial Sequence
  Description of Artificial Sequence: Synthetic oligonucleotide
aggaaugauaaauuguaau

SEQ ID NO: 207682 - RNA, 19 nt, Artificial Sequence
  Description of Artificial Sequence: Synthetic oligonucleotide
ucuguauagcccauuuaga

SEQ ID NO: 207683 - RNA, 19 nt, Artificial Sequence
  Description of Artificial Sequence: Synthetic oligonucleotide
gaucacuugaggguaacag

SEQ ID NO: 207684 - RNA, 19 nt, Artificial Sequence
  Description of Artificial Sequence: Synthetic oligonucleotide
caugucaauauuucccagc

SEQ ID NO: 207685 - RNA, 19 nt, Artificial Sequence
  Description of Artificial Sequence: Synthetic oligonucleotide
ugugaugcgauguuacccu

SEQ ID NO: 207686 - RNA, 19 nt, Artificial Sequence
  Description of Artificial Sequence: Synthetic oligonucleotide
ugaucuaccaacagaugaa

SEQ ID NO: 207687 - RNA, 19 nt, Artificial Sequence
  Description of Artificial Sequence: Synthetic oligonucleotide
  modified_base (9)..(9): a, c, u, g, unknown or other
accaaaacnucucccuuuc

SEQ ID NO: 207688 - RNA, 19 nt, Artificial Sequence
  Description of Artificial Sequence: Synthetic oligonucleotide
uuuacugugucuugggcau

SEQ ID NO: 207689 - RNA, 19 nt, Artificial Sequence
  Description of Artificial Sequence: Synthetic oligonucleotide
aucaucuuaacuuguagua

SEQ ID NO: 207690 - RNA, 19 nt, Artificial Sequence
  Description of Artificial Sequence: Synthetic oligonucleotide
aagcccuuguuacaacauc

SEQ ID NO: 207691 - RNA, 19 nt, Artificial Sequence
  Description of Artificial Sequence: Synthetic oligonucleotide
uuuguaacgugccuuugaa

SEQ ID NO: 207692 - RNA, 19 nt, Artificial Sequence
  Description of Artificial Sequence: Synthetic oligonucleotide
aaaucauaauccaaagaau

SEQ ID NO: 207693 - RNA, 19 nt, Artificial Sequence
  Description of Artificial Sequence: Synthetic oligonucleotide
gauguuuuccacaaagcuc

SEQ ID NO: 207694 - RNA, 19 nt, Artificial Sequence
  Description of Artificial Sequence: Synthetic oligonucleotide
ucaugugaugcgauguuac

SEQ ID NO: 207695 - RNA, 19 nt, Artificial Sequence
  Description of Artificial Sequence: Synthetic oligonucleotide
guagacauagagauuuuag

SEQ ID NO: 207696 - RNA, 19 nt, Artificial Sequence
  Description of Artificial Sequence: Synthetic oligonucleotide
auaucaccuaaugaucuac

SEQ ID NO: 207697 - RNA, 19 nt, Artificial Sequence
  Description of Artificial Sequence: Synthetic oligonucleotide
ugcgauguuacccuugcuc

SEQ ID NO: 207698 - RNA, 19 nt, Artificial Sequence
  Description of Artificial Sequence: Synthetic oligonucleotide
gagggauggucacuguucg

SEQ ID NO: 207699 - RNA, 19 nt, Artificial Sequence
  Description of Artificial Sequence: Synthetic oligonucleotide
  modified_base (7)..(7): a, c, u, g, unknown or other
caaaacnucucccuuucuc

SEQ ID NO: 207700 - RNA, 19 nt, Artificial Sequence
  Description of Artificial Sequence: Synthetic oligonucleotide
uaucaccuaaugaucuacc

SEQ ID NO: 207701 - RNA, 19 nt, Artificial Sequence
  Description of Artificial Sequence: Synthetic oligonucleotide
  modified_base (3)..(3): a, c, u, g, unknown or other
acnccuaucuugcuggugu

SEQ ID NO: 207702 - RNA, 19 nt, Artificial Sequence
  Description of Artificial Sequence: Synthetic oligonucleotide
aguuaagccuuguaaacaa

SEQ ID NO: 207703 - RNA, 19 nt, Artificial Sequence
  Description of Artificial Sequence: Synthetic oligonucleotide
aaacaacaggccuggccuc

SEQ ID NO: 207704 - RNA, 19 nt, Artificial Sequence
  Description of Artificial Sequence: Synthetic oligonucleotide
augugcucuuccuaugacg

SEQ ID NO: 207705 - RNA, 19 nt, Artificial Sequence
  Description of Artificial Sequence: Synthetic oligonucleotide
agaugcaggaccgaggcag

SEQ ID NO: 207706 - RNA, 19 nt, Artificial Sequence
  Description of Artificial Sequence: Synthetic oligonucleotide
aggaccuuagccugaggac

SEQ ID NO: 207707 - RNA, 19 nt, Artificial Sequence
  Description of Artificial Sequence: Synthetic oligonucleotide
ugagcuaaggaugcugucc

SEQ ID NO: 207708 - RNA, 19 nt, Artificial Sequence
  Description of Artificial Sequence: Synthetic oligonucleotide
uuaagccuuguaaacaauu

SEQ ID NO: 207709 - RNA, 19 nt, Artificial Sequence
  Description of Artificial Sequence: Synthetic oligonucleotide
uuagucaugugaugcgaug

SEQ ID NO: 207710 - RNA, 19 nt, Artificial Sequence
  Description of Artificial Sequence: Synthetic oligonucleotide
  modified_base (5)..(5): a, c, u, g, unknown or other
aaacnucucccuuucucaa

SEQ ID NO: 207711 - RNA, 19 nt, Artificial Sequence
  Description of Artificial Sequence: Synthetic oligonucleotide
gaugcgauguuacccuugc

SEQ ID NO: 207712 - RNA, 19 nt, Artificial Sequence
  Description of Artificial Sequence: Synthetic oligonucleotide
acacgagugcaucucuuac

SEQ ID NO: 207713 - RNA, 19 nt, Artificial Sequence
  Description of Artificial Sequence: Synthetic oligonucleotide
uggagaaaagacagguuaa

SEQ ID NO: 207714 - RNA, 19 nt, Artificial Sequence
  Description of Artificial Sequence: Synthetic oligonucleotide
agcccauuuagacaguaca

SEQ ID NO: 207715 - RNA, 19 nt, Artificial Sequence
  Description of Artificial Sequence: Synthetic oligonucleotide
agccuuguaaacaauuguc

SEQ ID NO: 207716 - RNA, 19 nt, Artificial Sequence
  Description of Artificial Sequence: Synthetic oligonucleotide
acugugggaauccgguaac

SEQ ID NO: 207717 - RNA, 19 nt, Artificial Sequence
  Description of Artificial Sequence: Synthetic oligonucleotide
uuaccagggauauuucagu

SEQ ID NO: 207718 - RNA, 19 nt, Artificial Sequence
  Description of Artificial Sequence: Synthetic oligonucleotide
aaauuaguuaagccuugua

SEQ ID NO: 207719 - RNA, 19 nt, Artificial Sequence
  Description of Artificial Sequence: Synthetic oligonucleotide
uccuaacuaaaguucauuu

SEQ ID NO: 207720 - RNA, 19 nt, Artificial Sequence
  Description of Artificial Sequence: Synthetic oligonucleotide
uaguuaagccuuguaaaca

SEQ ID NO: 207721 - RNA, 19 nt, Artificial Sequence
  Description of Artificial Sequence: Synthetic oligonucleotide
acaaacacgauaucgccuu

SEQ ID NO: 207722 - RNA, 19 nt, Artificial Sequence
  Description of Artificial Sequence: Synthetic oligonucleotide
accgacuggguucagucuc

SEQ ID NO: 207723 - RNA, 19 nt, Artificial Sequence
  Description of Artificial Sequence: Synthetic oligonucleotide
aaguaccugcagcgcaggc

SEQ ID NO: 207724 - RNA, 19 nt, Artificial Sequence
  Description of Artificial Sequence: Synthetic oligonucleotide
aguaccugcagcgcaggcc

SEQ ID NO: 207725 - RNA, 19 nt, Artificial Sequence
  Description of Artificial Sequence: Synthetic oligonucleotide
caaugggagagaauccagc

SEQ ID NO: 207726 - RNA, 19 nt, Artificial Sequence
  Description of Artificial Sequence: Synthetic oligonucleotide
ugccuuucacaaacaacag

SEQ ID NO: 207727 - RNA, 19 nt, Artificial Sequence
  Description of Artificial Sequence: Synthetic oligonucleotide
aagauggcggaggaaucac

SEQ ID NO: 207728 - RNA, 19 nt, Artificial Sequence
  Description of Artificial Sequence: Synthetic oligonucleotide
auuucuuuguaacgugccu

SEQ ID NO: 207729 - RNA, 19 nt, Artificial Sequence
  Description of Artificial Sequence: Synthetic oligonucleotide
acccgcaguagacauagag

SEQ ID NO: 207730 - RNA, 19 nt, Artificial Sequence
  Description of Artificial Sequence: Synthetic oligonucleotide
ugacccgcaguagacauag

SEQ ID NO: 207731 - RNA, 19 nt, Artificial Sequence
  Description of Artificial Sequence: Synthetic oligonucleotide
acgagugcaucucuuacca

SEQ ID NO: 207732 - RNA, 19 nt, Artificial Sequence
  Description of Artificial Sequence: Synthetic oligonucleotide
ucaacucacacagaugaaa

SEQ ID NO: 207733 - RNA, 19 nt, Artificial Sequence
  Description of Artificial Sequence: Synthetic oligonucleotide
guaaggugugggcacagcc

SEQ ID NO: 207734 - RNA, 19 nt, Artificial Sequence
  Description of Artificial Sequence: Synthetic oligonucleotide
agagaaguaccugcagcgc

SEQ ID NO: 207735 - RNA, 19 nt, Artificial Sequence
  Description of Artificial Sequence: Synthetic oligonucleotide
uguguaacaagcccuuguu

SEQ ID NO: 207736 - RNA, 19 nt, Artificial Sequence
  Description of Artificial Sequence: Synthetic oligonucleotide
  modified_base (19)..(19): a, c, u, g, unknown or other
acgcucaaauaccaaaacn

SEQ ID NO: 207737 - RNA, 19 nt, Artificial Sequence
  Description of Artificial Sequence: Synthetic oligonucleotide
ucuccuacuucccaugcau

SEQ ID NO: 207738 - RNA, 19 nt, Artificial Sequence
  Description of Artificial Sequence: Synthetic oligonucleotide
ucaacagucacaggagcca

SEQ ID NO: 207739 - RNA, 19 nt, Artificial Sequence
  Description of Artificial Sequence: Synthetic oligonucleotide
aacaaacacgauaucgccu

SEQ ID NO: 207740 - RNA, 19 nt, Artificial Sequence
  Description of Artificial Sequence: Synthetic oligonucleotide
uaaaaucucuugccauuac

SEQ ID NO: 207741 - RNA, 19 nt, Artificial Sequence
  Description of Artificial Sequence: Synthetic oligonucleotide
  modified_base (3)..(3): a, c, u, g, unknown or other
acnucucccuuucucaacu

SEQ ID NO: 207742 - RNA, 19 nt, Artificial Sequence
  Description of Artificial Sequence: Synthetic oligonucleotide
  modified_base (19)..(19): a, c, u, g, unknown or other
auaguugccggggaaaacn

SEQ ID NO: 207743 - RNA, 19 nt, Artificial Sequence
  Description of Artificial Sequence: Synthetic oligonucleotide
acaugaauauccaaguaaa

SEQ ID NO: 207744 - RNA, 19 nt, Artificial Sequence
  Description of Artificial Sequence: Synthetic oligonucleotide
uuuagucaugugaugcgau

SEQ ID NO: 207745 - RNA, 19 nt, Artificial Sequence
  Description of Artificial Sequence: Synthetic oligonucleotide
auucugagugaaaacuggg

SEQ ID NO: 207746 - RNA, 19 nt, Artificial Sequence
  Description of Artificial Sequence: Synthetic oligonucleotide
cacaucagaagccccgagg

SEQ ID NO: 207747 - RNA, 19 nt, Artificial Sequence
  Description of Artificial Sequence: Synthetic oligonucleotide
cacuguucgaccgacuggg

SEQ ID NO: 207748 - RNA, 19 nt, Artificial Sequence
  Description of Artificial Sequence: Synthetic oligonucleotide
gcgauguuacccuugcucg

SEQ ID NO: 207749 - RNA, 19 nt, Artificial Sequence
  Description of Artificial Sequence: Synthetic oligonucleotide
gaggauaggaaaccaccac

SEQ ID NO: 207750 - RNA, 19 nt, Artificial Sequence
  Description of Artificial Sequence: Synthetic oligonucleotide
guuuggguuggccagagaa

SEQ ID NO: 207751 - RNA, 19 nt, Artificial Sequence
  Description of Artificial Sequence: Synthetic oligonucleotide
aaugaucuaccaacagaug

SEQ ID NO: 207752 - RNA, 19 nt, Artificial Sequence
  Description of Artificial Sequence: Synthetic oligonucleotide
caugugaugcgauguuacc

SEQ ID NO: 207753 - RNA, 19 nt, Artificial Sequence
  Description of Artificial Sequence: Synthetic oligonucleotide
ucaacacgagugcaucucu

SEQ ID NO: 207754 - RNA, 19 nt, Artificial Sequence
  Description of Artificial Sequence: Synthetic oligonucleotide
gggagcauugguucgauug

SEQ ID NO: 207755 - RNA, 19 nt, Artificial Sequence
  Description of Artificial Sequence: Synthetic oligonucleotide
gaugcugauagcagcaaca

SEQ ID NO: 207756 - RNA, 19 nt, Artificial Sequence
  Description of Artificial Sequence: Synthetic oligonucleotide
cacauuggugucaacucac

SEQ ID NO: 207757 - RNA, 19 nt, Artificial Sequence
  Description of Artificial Sequence: Synthetic oligonucleotide
auaaauuaguuaagccuug

SEQ ID NO: 207758 - RNA, 19 nt, Artificial Sequence
  Description of Artificial Sequence: Synthetic oligonucleotide
uuuauccaguccucaaaau

SEQ ID NO: 207759 - RNA, 19 nt, Artificial Sequence
  Description of Artificial Sequence: Synthetic oligonucleotide
uugucuggaugugagcugc

SEQ ID NO: 207760 - RNA, 19 nt, Artificial Sequence
  Description of Artificial Sequence: Synthetic oligonucleotide
caucgaugucccuuugacc

SEQ ID NO: 207761 - RNA, 19 nt, Artificial Sequence
  Description of Artificial Sequence: Synthetic oligonucleotide
uauggagaaaagacagguu

SEQ ID NO: 207762 - RNA, 19 nt, Artificial Sequence
  Description of Artificial Sequence: Synthetic oligonucleotide
uaaauuaguuaagccuugu

SEQ ID NO: 207763 - RNA, 19 nt, Artificial Sequence
  Description of Artificial Sequence: Synthetic oligonucleotide
gagaaguaccugcagcgca

SEQ ID NO: 207764 - RNA, 19 nt, Artificial Sequence
  Description of Artificial Sequence: Synthetic oligonucleotide
cacgagugcaucucuuacc

SEQ ID NO: 207765 - RNA, 19 nt, Artificial Sequence
  Description of Artificial Sequence: Synthetic oligonucleotide
uccuuaaaccuuccuguau

SEQ ID NO: 207766 - RNA, 19 nt, Artificial Sequence
  Description of Artificial Sequence: Synthetic oligonucleotide
aaggaaugauaaauuguaa

SEQ ID NO: 207767 - RNA, 19 nt, Artificial Sequence
  Description of Artificial Sequence: Synthetic oligonucleotide
ugcugauagcagcaacaug

SEQ ID NO: 207768 - RNA, 19 nt, Artificial Sequence
  Description of Artificial Sequence: Synthetic oligonucleotide
uugaggguaacagggaaau

SEQ ID NO: 207769 - RNA, 19 nt, Artificial Sequence
  Description of Artificial Sequence: Synthetic oligonucleotide
gccgccuucacucugcccg

SEQ ID NO: 207770 - RNA, 19 nt, Artificial Sequence
  Description of Artificial Sequence: Synthetic oligonucleotide
uucgauugaugcugauagc

SEQ ID NO: 207771 - RNA, 19 nt, Artificial Sequence
  Description of Artificial Sequence: Synthetic oligonucleotide
ugaugcgauguuacccuug

SEQ ID NO: 207772 - RNA, 19 nt, Artificial Sequence
  Description of Artificial Sequence: Synthetic oligonucleotide
aacacgagugcaucucuua

SEQ ID NO: 207773 - RNA, 19 nt, Artificial Sequence
  Description of Artificial Sequence: Synthetic oligonucleotide
uguggcgucuccucagaug

SEQ ID NO: 207774 - RNA, 19 nt, Artificial Sequence
  Description of Artificial Sequence: Synthetic oligonucleotide
cuuccaaccacauuacaua

SEQ ID NO: 207775 - RNA, 19 nt, Artificial Sequence
  Description of Artificial Sequence: Synthetic oligonucleotide
uaacgugccuuugaaccag

SEQ ID NO: 207776 - RNA, 19 nt, Artificial Sequence
  Description of Artificial Sequence: Synthetic oligonucleotide
ucuucaguucaugucaaua

SEQ ID NO: 207777 - RNA, 19 nt, Artificial Sequence
  Description of Artificial Sequence: Synthetic oligonucleotide
aauggaucaaugggaacuu

SEQ ID NO: 207778 - RNA, 19 nt, Artificial Sequence
  Description of Artificial Sequence: Synthetic oligonucleotide
guugggaggccagugaaug

SEQ ID NO: 207779 - RNA, 19 nt, Artificial Sequence
  Description of Artificial Sequence: Synthetic oligonucleotide
accaacuuuauaccaggaa

SEQ ID NO: 207780 - RNA, 19 nt, Artificial Sequence
  Description of Artificial Sequence: Synthetic oligonucleotide
uggcaacgcucaaauacca

SEQ ID NO: 207781 - RNA, 19 nt, Artificial Sequence
  Description of Artificial Sequence: Synthetic oligonucleotide
  modified_base (5)..(5): a, c, u, g, unknown or other
aaacnccuaucuugcuggu

SEQ ID NO: 207782 - RNA, 19 nt, Artificial Sequence
  Description of Artificial Sequence: Synthetic oligonucleotide
cugaggacuugucuggaug

SEQ ID NO: 207783 - RNA, 19 nt, Artificial Sequence
  Description of Artificial Sequence: Synthetic oligonucleotide
uuucuuuguaacgugccuu

SEQ ID NO: 207784 - RNA, 19 nt, Artificial Sequence
  Description of Artificial Sequence: Synthetic oligonucleotide
uccucaaaauuaacauaaa

SEQ ID NO: 207785 - RNA, 19 nt, Artificial Sequence
  Description of Artificial Sequence: Synthetic oligonucleotide
  modified_base (9)..(9): a, c, u, g, unknown or other
gggaaaacnccuaucuugc

SEQ ID NO: 207786 - RNA, 19 nt, Artificial Sequence
  Description of Artificial Sequence: Synthetic oligonucleotide
agccgugggaaccaugcug

SEQ ID NO: 207787 - RNA, 19 nt, Artificial Sequence
  Description of Artificial Sequence: Synthetic oligonucleotide
uuguaacgugccuuugaac

SEQ ID NO: 207788 - RNA, 19 nt, Artificial Sequence
  Description of Artificial Sequence: Synthetic oligonucleotide
agggauauuucagucacau

SEQ ID NO: 207789 - RNA, 19 nt, Artificial Sequence
  Description of Artificial Sequence: Synthetic oligonucleotide
accguuuccuuggagcuuc

SEQ ID NO: 207790 - RNA, 19 nt, Artificial Sequence
  Description of Artificial Sequence: Synthetic oligonucleotide
aaacacgauaucgccuucu

SEQ ID NO: 207791 - RNA, 19 nt, Artificial Sequence
  Description of Artificial Sequence: Synthetic oligonucleotide
gaauauccaaguaaaguau

SEQ ID NO: 207792 - RNA, 19 nt, Artificial Sequence
  Description of Artificial Sequence: Synthetic oligonucleotide
acgauaucgccuucuuuga

SEQ ID NO: 207793 - RNA, 19 nt, Artificial Sequence
  Description of Artificial Sequence: Synthetic oligonucleotide
aguguuuuauauauauaua

SEQ ID NO: 207794 - RNA, 19 nt, Artificial Sequence
  Description of Artificial Sequence: Synthetic oligonucleotide
uugguucgauugaugcuga

SEQ ID NO: 207795 - RNA, 19 nt, Artificial Sequence
  Description of Artificial Sequence: Synthetic oligonucleotide
guaacgugccuuugaacca

SEQ ID NO: 207796 - RNA, 19 nt, Artificial Sequence
  Description of Artificial Sequence: Synthetic oligonucleotide
aacacgauaucgccuucuu

SEQ ID NO: 207797 - RNA, 19 nt, Artificial Sequence
  Description of Artificial Sequence: Synthetic oligonucleotide
cuugucuggaugugagcug

SEQ ID NO: 207798 - RNA, 19 nt, Artificial Sequence
  Description of Artificial Sequence: Synthetic oligonucleotide
agaugaaagcugauugaug

SEQ ID NO: 207799 - RNA, 19 nt, Artificial Sequence
  Description of Artificial Sequence: Synthetic oligonucleotide
uucaacacgagugcaucuc

SEQ ID NO: 207800 - RNA, 19 nt, Artificial Sequence
  Description of Artificial Sequence: Synthetic oligonucleotide
ggaauccgguaacacaugc

SEQ ID NO: 207801 - RNA, 19 nt, Artificial Sequence
  Description of Artificial Sequence: Synthetic oligonucleotide
ugcagaucacuugagggua

SEQ ID NO: 207802 - RNA, 19 nt, Artificial Sequence
  Description of Artificial Sequence: Synthetic oligonucleotide
uaacuuguaguagucuuuu

SEQ ID NO: 207803 - RNA, 19 nt, Artificial Sequence
  Description of Artificial Sequence: Synthetic oligonucleotide
caucagaagccccgagggg

SEQ ID NO: 207804 - RNA, 19 nt, Artificial Sequence
  Description of Artificial Sequence: Synthetic oligonucleotide
uccuaugacgcugcuuuug

SEQ ID NO: 207805 - RNA, 19 nt, Artificial Sequence
  Description of Artificial Sequence: Synthetic oligonucleotide
ccuguauaggucaauucug

SEQ ID NO: 207806 - RNA, 19 nt, Artificial Sequence
  Description of Artificial Sequence: Synthetic oligonucleotide
ucgaugucccuuugaccag

SEQ ID NO: 207807 - RNA, 19 nt, Artificial Sequence
  Description of Artificial Sequence: Synthetic oligonucleotide
agaaguaccugcagcgcag

SEQ ID NO: 207808 - RNA, 19 nt, Artificial Sequence
  Description of Artificial Sequence: Synthetic oligonucleotide
  modified_base (4)..(4): a, c, u, g, unknown or other
aacnccuaucuugcuggug

SEQ ID NO: 207809 - RNA, 19 nt, Artificial Sequence
  Description of Artificial Sequence: Synthetic oligonucleotide
ccuuguuacaacauccauc

SEQ ID NO: 207810 - RNA, 19 nt, Artificial Sequence
  Description of Artificial Sequence: Synthetic oligonucleotide
  modified_base (17)..(17): a, c, u, g, unknown or other
aguugccggggaaaacncc

SEQ ID NO: 207811 - RNA, 19 nt, Artificial Sequence
  Description of Artificial Sequence: Synthetic oligonucleotide
ggaugacauauacacacca

SEQ ID NO: 207812 - RNA, 19 nt, Artificial Sequence
  Description of Artificial Sequence: Synthetic oligonucleotide
cuauuaccagggauauuuc

SEQ ID NO: 207813 - RNA, 19 nt, Artificial Sequence
  Description of Artificial Sequence: Synthetic oligonucleotide
auccuggcaacgcucaaau

SEQ ID NO: 207814 - RNA, 19 nt, Artificial Sequence
  Description of Artificial Sequence: Synthetic oligonucleotide
uuccccaaaccuuuauaua

SEQ ID NO: 207815 - RNA, 19 nt, Artificial Sequence
  Description of Artificial Sequence: Synthetic oligonucleotide
cuuuguaacgugccuuuga

SEQ ID NO: 207816 - RNA, 19 nt, Artificial Sequence
  Description of Artificial Sequence: Synthetic oligonucleotide
caucuuaacuuguaguagu

SEQ ID NO: 207817 - RNA, 19 nt, Artificial Sequence
  Description of Artificial Sequence: Synthetic oligonucleotide
aacgugccuuugaaccagc

SEQ ID NO: 207818 - RNA, 19 nt, Artificial Sequence
  Description of Artificial Sequence: Synthetic oligonucleotide
guuacccuugcucggugug

SEQ ID NO: 207819 - RNA, 19 nt, Artificial Sequence
  Description of Artificial Sequence: Synthetic oligonucleotide
agccacauaguugccgggg

SEQ ID NO: 207820 - RNA, 19 nt, Artificial Sequence
  Description of Artificial Sequence: Synthetic oligonucleotide
gccuuguaaacaauugucc

SEQ ID NO: 207821 - RNA, 19 nt, Artificial Sequence
  Description of Artificial Sequence: Synthetic oligonucleotide
agcccacacauuauaucac

SEQ ID NO: 207822 - RNA, 19 nt, Artificial Sequence
  Description of Artificial Sequence: Synthetic oligonucleotide
gacccugccacaauuguaa

SEQ ID NO: 207823 - RNA, 19 nt, Artificial Sequence
  Description of Artificial Sequence: Synthetic oligonucleotide
cuguaacuguccucacagc

SEQ ID NO: 207824 - RNA, 19 nt, Artificial Sequence
  Description of Artificial Sequence: Synthetic oligonucleotide
ggcggaggaaucacaaugg

SEQ ID NO: 207825 - RNA, 19 nt, Artificial Sequence
  Description of Artificial Sequence: Synthetic oligonucleotide
gaugcaggaccgaggcagg

SEQ ID NO: 207826 - RNA, 19 nt, Artificial Sequence
  Description of Artificial Sequence: Synthetic oligonucleotide
ugugcucuuuagucaugug

SEQ ID NO: 207827 - RNA, 19 nt, Artificial Sequence
  Description of Artificial Sequence: Synthetic oligonucleotide
uguuacccuugcucggugu

SEQ ID NO: 207828 - RNA, 19 nt, Artificial Sequence
  Description of Artificial Sequence: Synthetic oligonucleotide
caacgcucaaauaccaaaa

SEQ ID NO: 207829 - RNA, 19 nt, Artificial Sequence
  Description of Artificial Sequence: Synthetic oligonucleotide
gucacggcucuugugacug

SEQ ID NO: 207830 - RNA, 19 nt, Artificial Sequence
  Description of Artificial Sequence: Synthetic oligonucleotide
ucuuaccaccacugucuca

SEQ ID NO: 207831 - RNA, 19 nt, Artificial Sequence
  Description of Artificial Sequence: Synthetic oligonucleotide
agugcaucucuuaccacca

SEQ ID NO: 207832 - RNA, 19 nt, Artificial Sequence
  Description of Artificial Sequence: Synthetic oligonucleotide
ccuaaugaucuaccaacag

SEQ ID NO: 207833 - RNA, 19 nt, Artificial Sequence
  Description of Artificial Sequence: Synthetic oligonucleotide
aggaaacuauuaccaggga

SEQ ID NO: 207834 - RNA, 19 nt, Artificial Sequence
  Description of Artificial Sequence: Synthetic oligonucleotide
uuccuaacuaaaguucauu

SEQ ID NO: 207835 - RNA, 19 nt, Artificial Sequence
  Description of Artificial Sequence: Synthetic oligonucleotide
ugggguagcccaccgggaa

SEQ ID NO: 207836 - RNA, 19 nt, Artificial Sequence
  Description of Artificial Sequence: Synthetic oligonucleotide
aguccauaucacuguggga

SEQ ID NO: 207837 - RNA, 19 nt, Artificial Sequence
  Description of Artificial Sequence: Synthetic oligonucleotide
gguuaacaggaaugauucc

SEQ ID NO: 207838 - RNA, 19 nt, Artificial Sequence
  Description of Artificial Sequence: Synthetic oligonucleotide
ucccuuugaccagccaucc

SEQ ID NO: 207839 - RNA, 19 nt, Artificial Sequence
  Description of Artificial Sequence: Synthetic oligonucleotide
cuaugacgcugcuuuugug

SEQ ID NO: 207840 - RNA, 19 nt, Artificial Sequence
  Description of Artificial Sequence: Synthetic oligonucleotide
auauccaaguaaaguauuu

SEQ ID NO: 207841 - RNA, 19 nt, Artificial Sequence
  Description of Artificial Sequence: Synthetic oligonucleotide
cuuccuaugacgcugcuuu

SEQ ID NO: 207842 - RNA, 19 nt, Artificial Sequence
  Description of Artificial Sequence: Synthetic oligonucleotide
cuuuagucaugugaugcga

SEQ ID NO: 207843 - RNA, 19 nt, Artificial Sequence
  Description of Artificial Sequence: Synthetic oligonucleotide
ugucaauauuucccagcuu

SEQ ID NO: 207844 - RNA, 19 nt, Artificial Sequence
  Description of Artificial Sequence: Synthetic oligonucleotide
aaccaacuuuauaccagga

SEQ ID NO: 207845 - RNA, 19 nt, Artificial Sequence
  Description of Artificial Sequence: Synthetic oligonucleotide
accuaaugaucuaccaaca

SEQ ID NO: 207846 - RNA, 19 nt, Artificial Sequence
  Description of Artificial Sequence: Synthetic oligonucleotide
ugccugacccgcaguagac

SEQ ID NO: 207847 - RNA, 19 nt, Artificial Sequence
  Description of Artificial Sequence: Synthetic oligonucleotide
uuaccaccacuguguaaca

SEQ ID NO: 207848 - RNA, 19 nt, Artificial Sequence
  Description of Artificial Sequence: Synthetic oligonucleotide
cuuagccugaggacuuguc

SEQ ID NO: 207849 - RNA, 19 nt, Artificial Sequence
  Description of Artificial Sequence: Synthetic oligonucleotide
aguagacauagagauuuua

SEQ ID NO: 207850 - RNA, 19 nt, Artificial Sequence
  Description of Artificial Sequence: Synthetic oligonucleotide
agucaugugaugcgauguu

SEQ ID NO: 207851 - RNA, 19 nt, Artificial Sequence
  Description of Artificial Sequence: Synthetic oligonucleotide
ugaagucgaagggcugacc

SEQ ID NO: 207852 - RNA, 19 nt, Artificial Sequence
  Description of Artificial Sequence: Synthetic oligonucleotide
gcaucgaugucccuuugac

SEQ ID NO: 207853 - RNA, 19 nt, Artificial Sequence
  Description of Artificial Sequence: Synthetic oligonucleotide
auuuuagcuugggaggcau

SEQ ID NO: 207854 - RNA, 19 nt, Artificial Sequence
  Description of Artificial Sequence: Synthetic oligonucleotide
caugcaagauggcggagga

SEQ ID NO: 207855 - RNA, 19 nt, Artificial Sequence
  Description of Artificial Sequence: Synthetic oligonucleotide
ugucacggcucuugugacu

SEQ ID NO: 207856 - RNA, 19 nt, Artificial Sequence
  Description of Artificial Sequence: Synthetic oligonucleotide
uagcggcaauucaggaccc

SEQ ID NO: 207857 - RNA, 19 nt, Artificial Sequence
  Description of Artificial Sequence: Synthetic oligonucleotide
gauaggaaaccaccacccu

SEQ ID NO: 207858 - RNA, 19 nt, Artificial Sequence
  Description of Artificial Sequence: Synthetic oligonucleotide
agucaggugcccauccuug

SEQ ID NO: 207859 - RNA, 19 nt, Artificial Sequence
  Description of Artificial Sequence: Synthetic oligonucleotide
gacccauugcuccuugcaa

SEQ ID NO: 207860 - RNA, 19 nt, Artificial Sequence
  Description of Artificial Sequence: Synthetic oligonucleotide
cuggacccugccacaauug

SEQ ID NO: 207861 - RNA, 19 nt, Artificial Sequence
  Description of Artificial Sequence: Synthetic oligonucleotide
ggauggucacuguucgacc

SEQ ID NO: 207862 - RNA, 19 nt, Artificial Sequence
  Description of Artificial Sequence: Synthetic oligonucleotide
ucacagcguuucuuacagc

SEQ ID NO: 207863 - RNA, 19 nt, Artificial Sequence
  Description of Artificial Sequence: Synthetic oligonucleotide
agggagcuugccuugcgau

SEQ ID NO: 207864 - RNA, 19 nt, Artificial Sequence
  Description of Artificial Sequence: Synthetic oligonucleotide
gccgugggaaccaugcugg

SEQ ID NO: 207865 - RNA, 19 nt, Artificial Sequence
  Description of Artificial Sequence: Synthetic oligonucleotide
uacccuugcucgguguggc

SEQ ID NO: 207866 - RNA, 19 nt, Artificial Sequence
  Description of Artificial Sequence: Synthetic oligonucleotide
auguuacccuugcucggug

SEQ ID NO: 207867 - RNA, 19 nt, Artificial Sequence
  Description of Artificial Sequence: Synthetic oligonucleotide
auccgguaacacaugcaag

SEQ ID NO: 207868 - RNA, 19 nt, Artificial Sequence
  Description of Artificial Sequence: Synthetic oligonucleotide
ggugucaacucacacagau

SEQ ID NO: 207869 - RNA, 19 nt, Artificial Sequence
  Description of Artificial Sequence: Synthetic oligonucleotide
gguuaugugcuguaacugu

SEQ ID NO: 207870 - RNA, 19 nt, Artificial Sequence
  Description of Artificial Sequence: Synthetic oligonucleotide
gcgggacccacacaggugc

SEQ ID NO: 207871 - RNA, 19 nt, Artificial Sequence
  Description of Artificial Sequence: Synthetic oligonucleotide
cugagcuaaggaugcuguc

SEQ ID NO: 207872 - RNA, 19 nt, Artificial Sequence
  Description of Artificial Sequence: Synthetic oligonucleotide
cauaguugccggggaaaac

SEQ ID NO: 207873 - RNA, 19 nt, Artificial Sequence
  Description of Artificial Sequence: Synthetic oligonucleotide
gcaacgcucaaauaccaaa

SEQ ID NO: 207874 - RNA, 19 nt, Artificial Sequence
  Description of Artificial Sequence: Synthetic oligonucleotide
gcaauucaggacccauugc

SEQ ID NO: 207875 - RNA, 19 nt, Artificial Sequence
  Description of Artificial Sequence: Synthetic oligonucleotide
augcugauagcagcaacau

SEQ ID NO: 207876 - RNA, 19 nt, Artificial Sequence
  Description of Artificial Sequence: Synthetic oligonucleotide
  modified_base (16)..(16): a, c, u, g, unknown or other
guugccggggaaaacnccu

SEQ ID NO: 207877 - RNA, 19 nt, Artificial Sequence
  Description of Artificial Sequence: Synthetic oligonucleotide
aggacuugucuggauguga

SEQ ID NO: 207878 - RNA, 19 nt, Artificial Sequence
  Description of Artificial Sequence: Synthetic oligonucleotide
cucuuaccaccacugucuc

SEQ ID NO: 207879 - RNA, 19 nt, Artificial Sequence
  Description of Artificial Sequence: Synthetic oligonucleotide
gggauggucacuguucgac

SEQ ID NO: 207880 - RNA, 19 nt, Artificial Sequence
  Description of Artificial Sequence: Synthetic oligonucleotide
uuuuagcuugggaggcauu

SEQ ID NO: 207881 - RNA, 19 nt, Artificial Sequence
  Description of Artificial Sequence: Synthetic oligonucleotide
cacugugggaauccgguaa

SEQ ID NO: 207882 - RNA, 19 nt, Artificial Sequence
  Description of Artificial Sequence: Synthetic oligonucleotide
gccguuccugguuaugugc

SEQ ID NO: 207883 - RNA, 19 nt, Artificial Sequence
  Description of Artificial Sequence: Synthetic oligonucleotide
ggaaacuauuaccagggau

SEQ ID NO: 207884 - RNA, 19 nt, Artificial Sequence
  Description of Artificial Sequence: Synthetic oligonucleotide
cugccucgcucugaggagg

SEQ ID NO: 207885 - RNA, 19 nt, Artificial Sequence
  Description of Artificial Sequence: Synthetic oligonucleotide
  modified_base (2)..(2): a, c, u, g, unknown or other
cnccuaucuugcuggugug

SEQ ID NO: 207886 - RNA, 19 nt, Artificial Sequence
  Description of Artificial Sequence: Synthetic oligonucleotide
ccuagcggcaauucaggac

SEQ ID NO: 207887 - RNA, 19 nt, Artificial Sequence
  Description of Artificial Sequence: Synthetic oligonucleotide
gguaacagggaaauuacau

SEQ ID NO: 207888 - RNA, 19 nt, Artificial Sequence
  Description of Artificial Sequence: Synthetic oligonucleotide
ucgaagggcugaccauagu

SEQ ID NO: 207889 - RNA, 19 nt, Artificial Sequence
  Description of Artificial Sequence: Synthetic oligonucleotide
ccugguuaugugcuguaac

SEQ ID NO: 207890 - RNA, 19 nt, Artificial Sequence
  Description of Artificial Sequence: Synthetic oligonucleotide
accgggaaucuggagucag

SEQ ID NO: 207891 - RNA, 19 nt, Artificial Sequence
  Description of Artificial Sequence: Synthetic oligonucleotide
gggcaugcagaucacuuga

SEQ ID NO: 207892 - RNA, 19 nt, Artificial Sequence
  Description of Artificial Sequence: Synthetic oligonucleotide
uacuugccugacccgcagu

SEQ ID NO: 207893 - RNA, 19 nt, Artificial Sequence
  Description of Artificial Sequence: Synthetic oligonucleotide
gauguuacccuugcucggu

SEQ ID NO: 207894 - RNA, 19 nt, Artificial Sequence
  Description of Artificial Sequence: Synthetic oligonucleotide
cauugguucgauugaugcu

SEQ ID NO: 207895 - RNA, 19 nt, Artificial Sequence
  Description of Artificial Sequence: Synthetic oligonucleotide
caguggucuccuuaaaccu

SEQ ID NO: 207896 - RNA, 19 nt, Artificial Sequence
  Description of Artificial Sequence: Synthetic oligonucleotide
ugccucgcucugaggagga

SEQ ID NO: 207897 - RNA, 19 nt, Artificial Sequence
  Description of Artificial Sequence: Synthetic oligonucleotide
acauuggugucaacucaca

SEQ ID NO: 207898 - RNA, 19 nt, Artificial Sequence
  Description of Artificial Sequence: Synthetic oligonucleotide
  modified_base (2)..(2): a, c, u, g, unknown or other
cnucucccuuucucaacuc

SEQ ID NO: 207899 - RNA, 19 nt, Artificial Sequence
  Description of Artificial Sequence: Synthetic oligonucleotide
uuacugugucuugggcaug

SEQ ID NO: 207900 - RNA, 19 nt, Artificial Sequence
  Description of Artificial Sequence: Synthetic oligonucleotide
gucccuuugaccagccauc

SEQ ID NO: 207901 - RNA, 19 nt, Artificial Sequence
  Description of Artificial Sequence: Synthetic oligonucleotide
caaacacgauaucgccuuc

SEQ ID NO: 207902 - RNA, 19 nt, Artificial Sequence
  Description of Artificial Sequence: Synthetic oligonucleotide
gggaugacauauacacacc

SEQ ID NO: 207903 - RNA, 19 nt, Artificial Sequence
  Description of Artificial Sequence: Synthetic oligonucleotide
acccuugcucgguguggcg

SEQ ID NO: 207904 - RNA, 19 nt, Artificial Sequence
  Description of Artificial Sequence: Synthetic oligonucleotide
aacuauuaccagggauauu

SEQ ID NO: 207905 - RNA, 19 nt, Artificial Sequence
  Description of Artificial Sequence: Synthetic oligonucleotide
uccugguuaugugcuguaa

SEQ ID NO: 207906 - RNA, 19 nt, Artificial Sequence
  Description of Artificial Sequence: Synthetic oligonucleotide
aguggucuccuuaaaccuu

SEQ ID NO: 207907 - RNA, 19 nt, Artificial Sequence
  Description of Artificial Sequence: Synthetic oligonucleotide
ggaggagcaggccugccga

SEQ ID NO: 207908 - RNA, 19 nt, Artificial Sequence
  Description of Artificial Sequence: Synthetic oligonucleotide
ccuugcgauggaaagcauc

SEQ ID NO: 207909 - RNA, 19 nt, Artificial Sequence
  Description of Artificial Sequence: Synthetic oligonucleotide
aggaaucacaauggaucaa

SEQ ID NO: 207910 - RNA, 19 nt, Artificial Sequence
  Description of Artificial Sequence: Synthetic oligonucleotide
cagcaacuacaacuuucuc

SEQ ID NO: 207911 - RNA, 19 nt, Artificial Sequence
  Description of Artificial Sequence: Synthetic oligonucleotide
ccccuagcggcaauucagg

SEQ ID NO: 207912 - RNA, 19 nt, Artificial Sequence
  Description of Artificial Sequence: Synthetic oligonucleotide
cuacuucccaugcauucua

SEQ ID NO: 207913 - RNA, 19 nt, Artificial Sequence
  Description of Artificial Sequence: Synthetic oligonucleotide
cagaucacuugaggguaac

SEQ ID NO: 207914 - RNA, 19 nt, Artificial Sequence
  Description of Artificial Sequence: Synthetic oligonucleotide
gcaguggucauguuugggu

SEQ ID NO: 207915 - RNA, 19 nt, Artificial Sequence
  Description of Artificial Sequence: Synthetic oligonucleotide
auccaucuacugucgccaa

SEQ ID NO: 207916 - RNA, 19 nt, Artificial Sequence
  Description of Artificial Sequence: Synthetic oligonucleotide
cgauguuacccuugcucgg

SEQ ID NO: 207917 - RNA, 19 nt, Artificial Sequence
  Description of Artificial Sequence: Synthetic oligonucleotide
cugugccuuucacaaacaa

SEQ ID NO: 207918 - RNA, 19 nt, Artificial Sequence
  Description of Artificial Sequence: Synthetic oligonucleotide
uuccuaugacgcugcuuuu

SEQ ID NO: 207919 - RNA, 19 nt, Artificial Sequence
  Description of Artificial Sequence: Synthetic oligonucleotide
uugugacuggagccacaua

SEQ ID NO: 207920 - RNA, 19 nt, Artificial Sequence
  Description of Artificial Sequence: Synthetic oligonucleotide
gucaugugaugcgauguua

SEQ ID NO: 207921 - RNA, 19 nt, Artificial Sequence
  Description of Artificial Sequence: Synthetic oligonucleotide
cuucaacacgagugcaucu

SEQ ID NO: 207922 - RNA, 19 nt, Artificial Sequence
  Description of Artificial Sequence: Synthetic oligonucleotide
augcgauguuacccuugcu

SEQ ID NO: 207923 - RNA, 19 nt, Artificial Sequence
  Description of Artificial Sequence: Synthetic oligonucleotide
gcggaguccagggagcuug

SEQ ID NO: 207924 - RNA, 19 nt, Artificial Sequence
  Description of Artificial Sequence: Synthetic oligonucleotide
cacuuccaaccacauuaca

SEQ ID NO: 207925 - RNA, 19 nt, Artificial Sequence
  Description of Artificial Sequence: Synthetic oligonucleotide
guucgaccgacuggguuca

SEQ ID NO: 207926 - RNA, 19 nt, Artificial Sequence
  Description of Artificial Sequence: Synthetic oligonucleotide
ggaaucacaauggaucaau

SEQ ID NO: 207927 - RNA, 19 nt, Artificial Sequence
  Description of Artificial Sequence: Synthetic oligonucleotide
ccucagauguuuuccacaa

SEQ ID NO: 207928 - RNA, 19 nt, Artificial Sequence
  Description of Artificial Sequence: Synthetic oligonucleotide
caggaccgaggcaggcggc

SEQ ID NO: 207929 - RNA, 19 nt, Artificial Sequence
  Description of Artificial Sequence: Synthetic oligonucleotide
cccgcaguagacauagaga

SEQ ID NO: 207930 - RNA, 19 nt, Artificial Sequence
  Description of Artificial Sequence: Synthetic oligonucleotide
ccaacagaaagcccacaca

SEQ ID NO: 207931 - RNA, 19 nt, Artificial Sequence
  Description of Artificial Sequence: Synthetic oligonucleotide
ucgaccgacuggguucagu

SEQ ID NO: 207932 - RNA, 19 nt, Artificial Sequence
  Description of Artificial Sequence: Synthetic oligonucleotide
caggagacguggggagucc

SEQ ID NO: 207933 - RNA, 19 nt, Artificial Sequence
  Description of Artificial Sequence: Synthetic oligonucleotide
gugcaucucuuaccaccac

SEQ ID NO: 207934 - RNA, 19 nt, Artificial Sequence
  Description of Artificial Sequence: Synthetic oligonucleotide
ggccguuccugguuaugug

SEQ ID NO: 207935 - RNA, 19 nt, Artificial Sequence
  Description of Artificial Sequence: Synthetic oligonucleotide
ccgcaguagacauagagau

SEQ ID NO: 207936 - RNA, 19 nt, Artificial Sequence
  Description of Artificial Sequence: Synthetic oligonucleotide
gaccgacuggguucagucu

SEQ ID NO: 207937 - RNA, 19 nt, Artificial Sequence
  Description of Artificial Sequence: Synthetic oligonucleotide
cacaaacaacaggccuggc

SEQ ID NO: 207938 - RNA, 19 nt, Artificial Sequence
  Description of Artificial Sequence: Synthetic oligonucleotide
cccuacuugccugacccgc

SEQ ID NO: 207939 - RNA, 19 nt, Artificial Sequence
  Description of Artificial Sequence: Synthetic oligonucleotide
accuuagccugaggacuug

SEQ ID NO: 207940 - RNA, 19 nt, Artificial Sequence
  Description of Artificial Sequence: Synthetic oligonucleotide
ccgacuggguucagucucc

SEQ ID NO: 207941 - RNA, 19 nt, Artificial Sequence
  Description of Artificial Sequence: Synthetic oligonucleotide
gcggaggaaucacaaugga

SEQ ID NO: 207942 - RNA, 19 nt, Artificial Sequence
  Description of Artificial Sequence: Synthetic oligonucleotide
ggguaacagggaaauuaca

SEQ ID NO: 207943 - RNA, 19 nt, Artificial Sequence
  Description of Artificial Sequence: Synthetic oligonucleotide
  modified_base (8)..(8): a, c, u, g, unknown or other
ggaaaacnccuaucuugcu

SEQ ID NO: 207944 - RNA, 19 nt, Artificial Sequence
  Description of Artificial Sequence: Synthetic oligonucleotide
gggacccacacaggugccg

SEQ ID NO: 207945 - RNA, 19 nt, Artificial Sequence
  Description of Artificial Sequence: Synthetic oligonucleotide
ccugccgaggugguggagc

SEQ ID NO: 207946 - RNA, 19 nt, Artificial Sequence
  Description of Artificial Sequence: Synthetic oligonucleotide
cgaggugguggagcgaugg

SEQ ID NO: 207947 - RNA, 19 nt, Artificial Sequence
  Description of Artificial Sequence: Synthetic oligonucleotide
gggaauccgguaacacaug

SEQ ID NO: 207948 - RNA, 19 nt, Artificial Sequence
  Description of Artificial Sequence: Synthetic oligonucleotide
gguucgauugaugcugaua

SEQ ID NO: 207949 - RNA, 19 nt, Artificial Sequence
  Description of Artificial Sequence: Synthetic oligonucleotide
cuggaccuggauggguguc

SEQ ID NO: 207950 - RNA, 19 nt, Artificial Sequence
  Description of Artificial Sequence: Synthetic oligonucleotide
gggaaccaugcugggauuc

SEQ ID NO: 207951 - RNA, 19 nt, Artificial Sequence
  Description of Artificial Sequence: Synthetic oligonucleotide
cgaccgacuggguucaguc

SEQ ID NO: 207952 - RNA, 19 nt, Artificial Sequence
  Description of Artificial Sequence: Synthetic oligonucleotide
cugugggaauccgguaaca

SEQ ID NO: 207953 - RNA, 19 nt, Artificial Sequence
  Description of Artificial Sequence: Synthetic oligonucleotide
agcguuucuuacagccuuu

SEQ ID NO: 207954 - RNA, 19 nt, Artificial Sequence
  Description of Artificial Sequence: Synthetic oligonucleotide
cuugugacuggagccacau

SEQ ID NO: 207955 - RNA, 19 nt, Artificial Sequence
  Description of Artificial Sequence: Synthetic oligonucleotide
  modified_base (12)..(12): a, c, u, g, unknown or other
ccggggaaaacnccuaucu

SEQ ID NO: 207956 - RNA, 19 nt, Artificial Sequence
  Description of Artificial Sequence: Synthetic oligonucleotide
ccugagcuaaggaugcugu

SEQ ID NO: 207957 - RNA, 19 nt, Artificial Sequence
  Description of Artificial Sequence: Synthetic oligonucleotide
cuaucuugcuggugugcau

SEQ ID NO: 207958 - RNA, 19 nt, Artificial Sequence
  Description of Artificial Sequence: Synthetic oligonucleotide
gaccuuagccugaggacuu

SEQ ID NO: 207959 - RNA, 19 nt, Artificial Sequence
  Description of Artificial Sequence: Synthetic oligonucleotide
aggggagcauugguucgau

SEQ ID NO: 207960 - RNA, 19 nt, Artificial Sequence
  Description of Artificial Sequence: Synthetic oligonucleotide
gcauugcgggccugguuga

SEQ ID NO: 207961 - RNA, 19 nt, Artificial Sequence
  Description of Artificial Sequence: Synthetic oligonucleotide
ccuacuugccugacccgca

SEQ ID NO: 207962 - RNA, 19 nt, Artificial Sequence
  Description of Artificial Sequence: Synthetic oligonucleotide
uucgaccgacuggguucag

SEQ ID NO: 207963 - RNA, 19 nt, Artificial Sequence
  Description of Artificial Sequence: Synthetic oligonucleotide
ccccuacuugccugacccg

SEQ ID NO: 207964 - RNA, 19 nt, Artificial Sequence
  Description of Artificial Sequence: Synthetic oligonucleotide
cguggccgccccuagcggc

SEQ ID NO: 207965 - RNA, 19 nt, Artificial Sequence
  Description of Artificial Sequence: Synthetic oligonucleotide
cugacccgcaguagacaua

SEQ ID NO: 207966 - RNA, 19 nt, Artificial Sequence
  Description of Artificial Sequence: Synthetic oligonucleotide
cacaggugccgccuucacu

SEQ ID NO: 207967 - RNA, 19 nt, Artificial Sequence
  Description of Artificial Sequence: Synthetic oligonucleotide
ccuaugacgcugcuuuugu

SEQ ID NO: 207968 - RNA, 19 nt, Artificial Sequence
  Description of Artificial Sequence: Synthetic oligonucleotide
caacacgagugcaucucuu

SEQ ID NO: 207969 - RNA, 19 nt, Artificial Sequence
  Description of Artificial Sequence: Synthetic oligonucleotide
ggcaacgcucaaauaccaa

SEQ ID NO: 207970 - RNA, 19 nt, Artificial Sequence
  Description of Artificial Sequence: Synthetic oligonucleotide
gugaugcgauguuacccuu

SEQ ID NO: 207971 - RNA, 19 nt, Artificial Sequence
  Description of Artificial Sequence: Synthetic oligonucleotide
gcuugccuugcgauggaaa

SEQ ID NO: 207972 - RNA, 19 nt, Artificial Sequence
  Description of Artificial Sequence: Synthetic oligonucleotide
ccacaccguuuccuuggag

SEQ ID NO: 207973 - RNA, 19 nt, Artificial Sequence
  Description of Artificial Sequence: Synthetic oligonucleotide
  modified_base (13)..(13): a, c, u, g, unknown or other
gccggggaaaacnccuauc

SEQ ID NO: 207974 - RNA, 19 nt, Artificial Sequence
  Description of Artificial Sequence: Synthetic oligonucleotide
uugcucgguguggcgucuc

SEQ ID NO: 207975 - RNA, 19 nt, Artificial Sequence
  Description of Artificial Sequence: Synthetic oligonucleotide
cccuagcggcaauucagga

SEQ ID NO: 207976 - RNA, 19 nt, Artificial Sequence
  Description of Artificial Sequence: Synthetic oligonucleotide
ggacccugccacaauugua

SEQ ID NO: 207977 - RNA, 19 nt, Artificial Sequence
  Description of Artificial Sequence: Synthetic oligonucleotide
cccaugcauucuaugucaa

SEQ ID NO: 207978 - RNA, 19 nt, Artificial Sequence
  Description of Artificial Sequence: Synthetic oligonucleotide
gcuggacccugccacaauu

SEQ ID NO: 207979 - RNA, 19 nt, Artificial Sequence
  Description of Artificial Sequence: Synthetic oligonucleotide
cguuucuuacagccuuuga

SEQ ID NO: 207980 - RNA, 19 nt, Artificial Sequence
  Description of Artificial Sequence: Synthetic oligonucleotide
caccgggaaucuggaguca

SEQ ID NO: 207981 - RNA, 19 nt, Artificial Sequence
  Description of Artificial Sequence: Synthetic oligonucleotide
ccguuccugguuaugugcu

SEQ ID NO: 207982 - RNA, 19 nt, Artificial Sequence
  Description of Artificial Sequence: Synthetic oligonucleotide
ccguggccgccccuagcgg

SEQ ID NO: 207983 - RNA, 19 nt, Artificial Sequence
  Description of Artificial Sequence: Synthetic oligonucleotide
guguggcgucuccucagau

SEQ ID NO: 207984 - RNA, 19 nt, Artificial Sequence
  Description of Artificial Sequence: Synthetic oligonucleotide
gaccgaggcaggcggcauu

SEQ ID NO: 207985 - RNA, 19 nt, Artificial Sequence
  Description of Artificial Sequence: Synthetic oligonucleotide
gcucggcuggacccugcca

SEQ ID NO: 207986 - RNA, 19 nt, Artificial Sequence
  Description of Artificial Sequence: Synthetic oligonucleotide
gcgaugggcacugcggagu

SEQ ID NO: 207987 - RNA, 19 nt, Artificial Sequence
  Description of Artificial Sequence: Synthetic oligonucleotide
guggagcgaugggcacugc

SEQ ID NO: 207988 - RNA, 19 nt, Artificial Sequence
  Description of Artificial Sequence: Synthetic oligonucleotide
gacccgcaguagacauaga

SEQ ID NO: 207989 - RNA, 19 nt, Artificial Sequence
  Description of Artificial Sequence: Synthetic oligonucleotide
cuugcucgguguggcgucu

SEQ ID NO: 207990 - RNA, 19 nt, Artificial Sequence
  Description of Artificial Sequence: Synthetic oligonucleotide
  modified_base (8)..(8): a, c, u, g, unknown or other
ccaaaacnucucccuuucu

SEQ ID NO: 207991 - RNA, 19 nt, Artificial Sequence
  Description of Artificial Sequence: Synthetic oligonucleotide
cccuuguuacaacauccau

SEQ ID NO: 207992 - RNA, 19 nt, Artificial Sequence
  Description of Artificial Sequence: Synthetic oligonucleotide
ggccugccgagguggugga

SEQ ID NO: 207993 - RNA, 19 nt, Artificial Sequence
  Description of Artificial Sequence: Synthetic oligonucleotide
ccgaggugguggagcgaug

SEQ ID NO: 207994 - RNA, 19 nt, Artificial Sequence
  Description of Artificial Sequence: Synthetic oligonucleotide
gccuggccucauucaugac

SEQ ID NO: 207995 - RNA, 19 nt, Artificial Sequence
  Description of Artificial Sequence: Synthetic oligonucleotide
ccacugucucacaaauuuu

SEQ ID NO: 207996 - RNA, 19 nt, Artificial Sequence
  Description of Artificial Sequence: Synthetic oligonucleotide
gguagcccaccgggaaucu

SEQ ID NO: 207997 - RNA, 19 nt, Artificial Sequence
  Description of Artificial Sequence: Synthetic oligonucleotide
cagcauugcgggccugguu

SEQ ID NO: 207998 - RNA, 19 nt, Artificial Sequence
  Description of Artificial Sequence: Synthetic oligonucleotide
gugggccguuccugguuau

SEQ ID NO: 207999 - RNA, 19 nt, Artificial Sequence
  Description of Artificial Sequence: Synthetic oligonucleotide
gcggcaauucaggacccau

SEQ ID NO: 208000 - RNA, 19 nt, Artificial Sequence
  Description of Artificial Sequence: Synthetic oligonucleotide
ggucacuguucgaccgacu

SEQ ID NO: 208001 - RNA, 19 nt, Artificial Sequence
  Description of Artificial Sequence: Synthetic oligonucleotide
gggcucggcuggacccugc

SEQ ID NO: 208002 - RNA, 19 nt, Artificial Sequence
  Description of Artificial Sequence: Synthetic oligonucleotide
gccugccgaggugguggag

SEQ ID NO: 208003 - RNA, 19 nt, Artificial Sequence
  Description of Artificial Sequence: Synthetic oligonucleotide
caccguuuccuuggagcuu

SEQ ID NO: 208004 - RNA, 19 nt, Artificial Sequence
  Description of Artificial Sequence: Synthetic oligonucleotide
cgccccuagcggcaauuca

SEQ ID NO: 208005 - RNA, 19 nt, Artificial Sequence
  Description of Artificial Sequence: Synthetic oligonucleotide
ccgccccuagcggcaauuc

SEQ ID NO: 208006 - RNA, 19 nt, Artificial Sequence
  Description of Artificial Sequence: Synthetic oligonucleotide
ccuuagccugaggacuugu

SEQ ID NO: 208007 - RNA, 19 nt, Artificial Sequence
  Description of Artificial Sequence: Synthetic oligonucleotide
ggggagcauugguucgauu

SEQ ID NO: 208008 - RNA, 19 nt, Artificial Sequence
  Description of Artificial Sequence: Synthetic oligonucleotide
  modified_base (11)..(11): a, c, u, g, unknown or other
cggggaaaacnccuaucuu

SEQ ID NO: 208009 - RNA, 19 nt, Artificial Sequence
  Description of Artificial Sequence: Synthetic oligonucleotide
ggcauuugucacggcucuu

SEQ ID NO: 208010 - RNA, 19 nt, Artificial Sequence
  Description of Artificial Sequence: Synthetic oligonucleotide
cggcaauucaggacccauu

SEQ ID NO: 208011 - RNA, 19 nt, Artificial Sequence
  Description of Artificial Sequence: Synthetic oligonucleotide
ggccgccccuagcggcaau

SEQ ID NO: 208012 - RNA, 19 nt, Artificial Sequence
  Description of Artificial Sequence: Synthetic oligonucleotide
  modified_base (1)..(1): a, c, u, g, unknown or other
nccuaucuugcuggugugc

SEQ ID NO: 208013 - RNA, 19 nt, Artificial Sequence
  Description of Artificial Sequence: Synthetic oligonucleotide
ucuaaaaucacagauaaac

SEQ ID NO: 208014 - RNA, 19 nt, Artificial Sequence
  Description of Artificial Sequence: Synthetic oligonucleotide
aaugugacaacuaaaguuc

SEQ ID NO: 208015 - RNA, 19 nt, Artificial Sequence
  Description of Artificial Sequence: Synthetic oligonucleotide
uuugauucuguguuuaugg

SEQ ID NO: 208016 - RNA, 19 nt, Artificial Sequence
  Description of Artificial Sequence: Synthetic oligonucleotide
uucaguaugucaaagaccu

SEQ ID NO: 208017 - RNA, 19 nt, Artificial Sequence
  Description of Artificial Sequence: Synthetic oligonucleotide
uuaaccuuaauuugaaugc

SEQ ID NO: 208018 - RNA, 19 nt, Artificial Sequence
  Description of Artificial Sequence: Synthetic oligonucleotide
agugcgagaagccauaccc

SEQ ID NO: 208019 - RNA, 19 nt, Artificial Sequence
  Description of Artificial Sequence: Synthetic oligonucleotide
uuaauuugaaugcacaacu

SEQ ID NO: 208020 - RNA, 19 nt, Artificial Sequence
  Description of Artificial Sequence: Synthetic oligonucleotide
gaaagcauuauuuaggauc

SEQ ID NO: 208021 - RNA, 19 nt, Artificial Sequence
  Description of Artificial Sequence: Synthetic oligonucleotide
augcaauggaauuucaggc

SEQ ID NO: 208022 - RNA, 19 nt, Artificial Sequence
  Description of Artificial Sequence: Synthetic oligonucleotide
acuguaucacucuuggugc

SEQ ID NO: 208023 - RNA, 19 nt, Artificial Sequence
  Description of Artificial Sequence: Synthetic oligonucleotide
aaagugaucccacuguaag

SEQ ID NO: 208024 - RNA, 19 nt, Artificial Sequence
  Description of Artificial Sequence: Synthetic oligonucleotide
uacaauaguaaaaugcaga

SEQ ID NO: 208025 - RNA, 19 nt, Artificial Sequence
  Description of Artificial Sequence: Synthetic oligonucleotide
aauuugaaugcacaacugu

SEQ ID NO: 208026 - RNA, 19 nt, Artificial Sequence
  Description of Artificial Sequence: Synthetic oligonucleotide
uuauuuaggauccccagac

SEQ ID NO: 208027 - RNA, 19 nt, Artificial Sequence
  Description of Artificial Sequence: Synthetic oligonucleotide
aauccguagugcgagaagc

SEQ ID NO: 208028 - RNA, 19 nt, Artificial Sequence
  Description of Artificial Sequence: Synthetic oligonucleotide
auagcagugagcugucucc

SEQ ID NO: 208029 - RNA, 19 nt, Artificial Sequence
  Description of Artificial Sequence: Synthetic oligonucleotide
uuuuauuacucaucaaggu

SEQ ID NO: 208030 - RNA, 19 nt, Artificial Sequence
  Description of Artificial Sequence: Synthetic oligonucleotide
uuuauuacucaucaaggua

SEQ ID NO: 208031 - RNA, 19 nt, Artificial Sequence
  Description of Artificial Sequence: Synthetic oligonucleotide
uggucuauaaggagugucg

SEQ ID NO: 208032 - RNA, 19 nt, Artificial Sequence
  Description of Artificial Sequence: Synthetic oligonucleotide
agauaaaccacauuagaaa

SEQ ID NO: 208033 - RNA, 19 nt, Artificial Sequence
  Description of Artificial Sequence: Synthetic oligonucleotide
uugguuuacacaguguggg

SEQ ID NO: 208034 - RNA, 19 nt, Artificial Sequence
  Description of Artificial Sequence: Synthetic oligonucleotide
ucaucagaugugaacacag

SEQ ID NO: 208035 - RNA, 19 nt, Artificial Sequence
  Description of Artificial Sequence: Synthetic oligonucleotide
auauguagcgguguagucc

SEQ ID NO: 208036 - RNA, 19 nt, Artificial Sequence
  Description of Artificial Sequence: Synthetic oligonucleotide
cuuggcaagcuguagagcc

SEQ ID NO: 208037 - RNA, 19 nt, Artificial Sequence
  Description of Artificial Sequence: Synthetic oligonucleotide
aagaaugacccggugggcc

SEQ ID NO: 208038 - RNA, 19 nt, Artificial Sequence
  Description of Artificial Sequence: Synthetic oligonucleotide
auauucucagcauggauug

SEQ ID NO: 208039 - RNA, 19 nt, Artificial Sequence
  Description of Artificial Sequence: Synthetic oligonucleotide
ugauaccuuuuaaugacag

SEQ ID NO: 208040 - RNA, 19 nt, Artificial Sequence
  Description of Artificial Sequence: Synthetic oligonucleotide
ucguccaggucauagagag

SEQ ID NO: 208041 - RNA, 19 nt, Artificial Sequence
  Description of Artificial Sequence: Synthetic oligonucleotide
acuaaaguucauuuuagaa

SEQ ID NO: 208042 - RNA, 19 nt, Artificial Sequence
  Description of Artificial Sequence: Synthetic oligonucleotide
uaucccgaaagccagcgcc

SEQ ID NO: 208043 - RNA, 19 nt, Artificial Sequence
  Description of Artificial Sequence: Synthetic oligonucleotide
aggugucugauacagauca

SEQ ID NO: 208044 - RNA, 19 nt, Artificial Sequence
  Description of Artificial Sequence: Synthetic oligonucleotide
ucuuccauggggaaugaca

SEQ ID NO: 208045 - RNA, 19 nt, Artificial Sequence
  Description of Artificial Sequence: Synthetic oligonucleotide
auauuguuaaguucaugug

SEQ ID NO: 208046 - RNA, 19 nt, Artificial Sequence
  Description of Artificial Sequence: Synthetic oligonucleotide
aaggaagccaaauucggaa

SEQ ID NO: 208047 - RNA, 19 nt, Artificial Sequence
  Description of Artificial Sequence: Synthetic oligonucleotide
auuuagaccuuccccauug

SEQ ID NO: 208048 - RNA, 19 nt, Artificial Sequence
  Description of Artificial Sequence: Synthetic oligonucleotide
auucaguaugucaaagacc

SEQ ID NO: 208049 - RNA, 19 nt, Artificial Sequence
  Description of Artificial Sequence: Synthetic oligonucleotide
auugcuagauaccaucuga

SEQ ID NO: 208050 - RNA, 19 nt, Artificial Sequence
  Description of Artificial Sequence: Synthetic oligonucleotide
auuacggccaagugcaaag

SEQ ID NO: 208051 - RNA, 19 nt, Artificial Sequence
  Description of Artificial Sequence: Synthetic oligonucleotide
ugaaugugacaacuaaagu

SEQ ID NO: 208052 - RNA, 19 nt, Artificial Sequence
  Description of Artificial Sequence: Synthetic oligonucleotide
uaguacaucaucagaugug

SEQ ID NO: 208053 - RNA, 19 nt, Artificial Sequence
  Description of Artificial Sequence: Synthetic oligonucleotide
ucuauaaggagugucgccu

SEQ ID NO: 208054 - RNA, 19 nt, Artificial Sequence
  Description of Artificial Sequence: Synthetic oligonucleotide
aguguaagacacugucccc

SEQ ID NO: 208055 - RNA, 19 nt, Artificial Sequence
  Description of Artificial Sequence: Synthetic oligonucleotide
ugguuucccauucaguaug

SEQ ID NO: 208056 - RNA, 19 nt, Artificial Sequence
  Description of Artificial Sequence: Synthetic oligonucleotide
augacagugcaacuguauc

SEQ ID NO: 208057 - RNA, 19 nt, Artificial Sequence
  Description of Artificial Sequence: Synthetic oligonucleotide
agcauuauuuaggaucccc

SEQ ID NO: 208058 - RNA, 19 nt, Artificial Sequence
  Description of Artificial Sequence: Synthetic oligonucleotide
uugaaugcacaacuguacu

SEQ ID NO: 208059 - RNA, 19 nt, Artificial Sequence
  Description of Artificial Sequence: Synthetic oligonucleotide
acgccagacuuccuuaucc

SEQ ID NO: 208060 - RNA, 19 nt, Artificial Sequence
  Description of Artificial Sequence: Synthetic oligonucleotide
ugauacagaucauuccuca

SEQ ID NO: 208061 - RNA, 19 nt, Artificial Sequence
  Description of Artificial Sequence: Synthetic oligonucleotide
uuagaccuuccccauuggg

SEQ ID NO: 208062 - RNA, 19 nt, Artificial Sequence
  Description of Artificial Sequence: Synthetic oligonucleotide
cauuauuuaggauccccag

SEQ ID NO: 208063 - RNA, 19 nt, Artificial Sequence
  Description of Artificial Sequence: Synthetic oligonucleotide
uguuuaugguuccaugggu

SEQ ID NO: 208064 - RNA, 19 nt, Artificial Sequence
  Description of Artificial Sequence: Synthetic oligonucleotide
auacagaucauuccucaug

SEQ ID NO: 208065 - RNA, 19 nt, Artificial Sequence
  Description of Artificial Sequence: Synthetic oligonucleotide
ugucugauacagaucauuc

SEQ ID NO: 208066 - RNA, 19 nt, Artificial Sequence
  Description of Artificial Sequence: Synthetic oligonucleotide
guagucccaucauaggugg

SEQ ID NO: 208067 - RNA, 19 nt, Artificial Sequence
  Description of Artificial Sequence: Synthetic oligonucleotide
guguuuaugguuccauggg

SEQ ID NO: 208068 - RNA, 19 nt, Artificial Sequence
  Description of Artificial Sequence: Synthetic oligonucleotide
aaccuuaauuugaaugcac

SEQ ID NO: 208069 - RNA, 19 nt, Artificial Sequence
  Description of Artificial Sequence: Synthetic oligonucleotide
auuauuuaggauccccaga

SEQ ID NO: 208070 - RNA, 19 nt, Artificial Sequence
  Description of Artificial Sequence: Synthetic oligonucleotide
uuuaugguuccauggguga

SEQ ID NO: 208071 - RNA, 19 nt, Artificial Sequence
  Description of Artificial Sequence: Synthetic oligonucleotide
aagccaaauucggaaggcc

SEQ ID NO: 208072 - RNA, 19 nt, Artificial Sequence
  Description of Artificial Sequence: Synthetic oligonucleotide
ugggugaucccagaguugg

SEQ ID NO: 208073 - RNA, 19 nt, Artificial Sequence
  Description of Artificial Sequence: Synthetic oligonucleotide
agaugugacuucuagcaga

SEQ ID NO: 208074 - RNA, 19 nt, Artificial Sequence
  Description of Artificial Sequence: Synthetic oligonucleotide
uggauuuaguggcuccagg

SEQ ID NO: 208075 - RNA, 19 nt, Artificial Sequence
  Description of Artificial Sequence: Synthetic oligonucleotide
ugugaacacaggcucauau

SEQ ID NO: 208076 - RNA, 19 nt, Artificial Sequence
  Description of Artificial Sequence: Synthetic oligonucleotide
aaauccguagugcgagaag

SEQ ID NO: 208077 - RNA, 19 nt, Artificial Sequence
  Description of Artificial Sequence: Synthetic oligonucleotide
ugauugcuagauaccaucu

SEQ ID NO: 208078 - RNA, 19 nt, Artificial Sequence
  Description of Artificial Sequence: Synthetic oligonucleotide
cacuguaaggaggaaaucc

SEQ ID NO: 208079 - RNA, 19 nt, Artificial Sequence
  Description of Artificial Sequence: Synthetic oligonucleotide
agcagaguuaccccagcgg

SEQ ID NO: 208080 - RNA, 19 nt, Artificial Sequence
  Description of Artificial Sequence: Synthetic oligonucleotide
guaauccaggagcagcugg

SEQ ID NO: 208081 - RNA, 19 nt, Artificial Sequence
  Description of Artificial Sequence: Synthetic oligonucleotide
aacgagauguugucguacu

SEQ ID NO: 208082 - RNA, 19 nt, Artificial Sequence
  Description of Artificial Sequence: Synthetic oligonucleotide
auagagaggcucaaaguuc

SEQ ID NO: 208083 - RNA, 19 nt, Artificial Sequence
  Description of Artificial Sequence: Synthetic oligonucleotide
uauuuaggauccccagacc

SEQ ID NO: 208084 - RNA, 19 nt, Artificial Sequence
  Description of Artificial Sequence: Synthetic oligonucleotide
uggaucagggaucuccagc

SEQ ID NO: 208085 - RNA, 19 nt, Artificial Sequence
  Description of Artificial Sequence: Synthetic oligonucleotide
uucagagauagcagugagc

SEQ ID NO: 208086 - RNA, 19 nt, Artificial Sequence
  Description of Artificial Sequence: Synthetic oligonucleotide
gcuagauaccaucugaaug

SEQ ID NO: 208087 - RNA, 19 nt, Artificial Sequence
  Description of Artificial Sequence: Synthetic oligonucleotide
auuuuagaacccagaaagg

SEQ ID NO: 208088 - RNA, 19 nt, Artificial Sequence
  Description of Artificial Sequence: Synthetic oligonucleotide
gaugauggcuaaguguaag

SEQ ID NO: 208089 - RNA, 19 nt, Artificial Sequence
  Description of Artificial Sequence: Synthetic oligonucleotide
gauggcuaaguguaagaca

SEQ ID NO: 208090 - RNA, 19 nt, Artificial Sequence
  Description of Artificial Sequence: Synthetic oligonucleotide
uuuagaccuuccccauugg

SEQ ID NO: 208091 - RNA, 19 nt, Artificial Sequence
  Description of Artificial Sequence: Synthetic oligonucleotide
agcucaagccacugauugc

SEQ ID NO: 208092 - RNA, 19 nt, Artificial Sequence
  Description of Artificial Sequence: Synthetic oligonucleotide
guugucguacuccacggcc

SEQ ID NO: 208093 - RNA, 19 nt, Artificial Sequence
  Description of Artificial Sequence: Synthetic oligonucleotide
gauugcuagauaccaucug

SEQ ID NO: 208094 - RNA, 19 nt, Artificial Sequence
  Description of Artificial Sequence: Synthetic oligonucleotide
uguagagccuucucaagaa

SEQ ID NO: 208095 - RNA, 19 nt, Artificial Sequence
  Description of Artificial Sequence: Synthetic oligonucleotide
ucaagccacugauugcuag

SEQ ID NO: 208096 - RNA, 19 nt, Artificial Sequence
  Description of Artificial Sequence: Synthetic oligonucleotide
aguacaucaucagauguga

SEQ ID NO: 208097 - RNA, 19 nt, Artificial Sequence
  Description of Artificial Sequence: Synthetic oligonucleotide
gcaacuguaucacucuugg

SEQ ID NO: 208098 - RNA, 19 nt, Artificial Sequence
  Description of Artificial Sequence: Synthetic oligonucleotide
gugauuacggccaagugca

SEQ ID NO: 208099 - RNA, 19 nt, Artificial Sequence
  Description of Artificial Sequence: Synthetic oligonucleotide
caucgcguagucgaaaagg

SEQ ID NO: 208100 - RNA, 19 nt, Artificial Sequence
  Description of Artificial Sequence: Synthetic oligonucleotide
uuucagaagagcugccagu

SEQ ID NO: 208101 - RNA, 19 nt, Artificial Sequence
  Description of Artificial Sequence: Synthetic oligonucleotide
ugcgagaagccauacccug

SEQ ID NO: 208102 - RNA, 19 nt, Artificial Sequence
  Description of Artificial Sequence: Synthetic oligonucleotide
cuaugugaauggcauuuag

SEQ ID NO: 208103 - RNA, 19 nt, Artificial Sequence
  Description of Artificial Sequence: Synthetic oligonucleotide
cagauaaaccacauuagaa

SEQ ID NO: 208104 - RNA, 19 nt, Artificial Sequence
  Description of Artificial Sequence: Synthetic oligonucleotide
agugucgccuuucuguucu

SEQ ID NO: 208105 - RNA, 19 nt, Artificial Sequence
  Description of Artificial Sequence: Synthetic oligonucleotide
aaaucaagaaugacccggu

SEQ ID NO: 208106 - RNA, 19 nt, Artificial Sequence
  Description of Artificial Sequence: Synthetic oligonucleotide
uguccaucagaguuuuaga

SEQ ID NO: 208107 - RNA, 19 nt, Artificial Sequence
  Description of Artificial Sequence: Synthetic oligonucleotide
ucaauggccucuguguagc

SEQ ID NO: 208108 - RNA, 19 nt, Artificial Sequence
  Description of Artificial Sequence: Synthetic oligonucleotide
ugauggcuaaguguaagac

SEQ ID NO: 208109 - RNA, 19 nt, Artificial Sequence
  Description of Artificial Sequence: Synthetic oligonucleotide
cuuccugcccauaauugug

SEQ ID NO: 208110 - RNA, 19 nt, Artificial Sequence
  Description of Artificial Sequence: Synthetic oligonucleotide
ggcuagaaagaacaccagg

SEQ ID NO: 208111 - RNA, 19 nt, Artificial Sequence
  Description of Artificial Sequence: Synthetic oligonucleotide
aaaggaagccaaauucgga

SEQ ID NO: 208112 - RNA, 19 nt, Artificial Sequence
  Description of Artificial Sequence: Synthetic oligonucleotide
ugugcgcccagacuucugc

SEQ ID NO: 208113 - RNA, 19 nt, Artificial Sequence
  Description of Artificial Sequence: Synthetic oligonucleotide
guuuaugguuccaugggug

SEQ ID NO: 208114 - RNA, 19 nt, Artificial Sequence
  Description of Artificial Sequence: Synthetic oligonucleotide
gaguuuuagaaggggcagg

SEQ ID NO: 208115 - RNA, 19 nt, Artificial Sequence
  Description of Artificial Sequence: Synthetic oligonucleotide
guuaucccgaaagccagcg

SEQ ID NO: 208116 - RNA, 19 nt, Artificial Sequence
  Description of Artificial Sequence: Synthetic oligonucleotide
uguucagagauagcaguga

SEQ ID NO: 208117 - RNA, 19 nt, Artificial Sequence
  Description of Artificial Sequence: Synthetic oligonucleotide
agcugcuauauguagcggu

SEQ ID NO: 208118 - RNA, 19 nt, Artificial Sequence
  Description of Artificial Sequence: Synthetic oligonucleotide
agauucagagccucucugu

SEQ ID NO: 208119 - RNA, 19 nt, Artificial Sequence
  Description of Artificial Sequence: Synthetic oligonucleotide
aucgcguagucgaaaaggg

SEQ ID NO: 208120 - RNA, 19 nt, Artificial Sequence
  Description of Artificial Sequence: Synthetic oligonucleotide
uauauguagcgguguaguc

SEQ ID NO: 208121 - RNA, 19 nt, Artificial Sequence
  Description of Artificial Sequence: Synthetic oligonucleotide
cuucuauagguccuuccug

SEQ ID NO: 208122 - RNA, 19 nt, Artificial Sequence
  Description of Artificial Sequence: Synthetic oligonucleotide
uggauuguagcaucuuuua

SEQ ID NO: 208123 - RNA, 19 nt, Artificial Sequence
  Description of Artificial Sequence: Synthetic oligonucleotide
aggcgcaccacacucaagu

SEQ ID NO: 208124 - RNA, 19 nt, Artificial Sequence
  Description of Artificial Sequence: Synthetic oligonucleotide
gguaguacaucaucagaug

SEQ ID NO: 208125 - RNA, 19 nt, Artificial Sequence
  Description of Artificial Sequence: Synthetic oligonucleotide
uguacuguagauggcuaga

SEQ ID NO: 208126 - RNA, 19 nt, Artificial Sequence
  Description of Artificial Sequence: Synthetic oligonucleotide
uuuaggauccccagaccua

SEQ ID NO: 208127 - RNA, 19 nt, Artificial Sequence
  Description of Artificial Sequence: Synthetic oligonucleotide
gccacugauugcuagauac

SEQ ID NO: 208128 - RNA, 19 nt, Artificial Sequence
  Description of Artificial Sequence: Synthetic oligonucleotide
ugucgugcccuucucuggc

SEQ ID NO: 208129 - RNA, 19 nt, Artificial Sequence
  Description of Artificial Sequence: Synthetic oligonucleotide
ucaucgcguagucgaaaag

SEQ ID NO: 208130 - RNA, 19 nt, Artificial Sequence
  Description of Artificial Sequence: Synthetic oligonucleotide
uugucguacuccacggcca

SEQ ID NO: 208131 - RNA, 19 nt, Artificial Sequence
  Description of Artificial Sequence: Synthetic oligonucleotide
uagucgaaaagggcauugg

SEQ ID NO: 208132 - RNA, 19 nt, Artificial Sequence
  Description of Artificial Sequence: Synthetic oligonucleotide
uaccgaacaugccuccacc

SEQ ID NO: 208133 - RNA, 19 nt, Artificial Sequence
  Description of Artificial Sequence: Synthetic oligonucleotide
gucuauaaggagugucgcc

SEQ ID NO: 208134 - RNA, 19 nt, Artificial Sequence
  Description of Artificial Sequence: Synthetic oligonucleotide
agagacucuguaaagcuga

SEQ ID NO: 208135 - RNA, 19 nt, Artificial Sequence
  Description of Artificial Sequence: Synthetic oligonucleotide
uguuaaguucauguguuuu

SEQ ID NO: 208136 - RNA, 19 nt, Artificial Sequence
  Description of Artificial Sequence: Synthetic oligonucleotide
uguugucguacuccacggc

SEQ ID NO: 208137 - RNA, 19 nt, Artificial Sequence
  Description of Artificial Sequence: Synthetic oligonucleotide
caggcuauugcucaucaca

SEQ ID NO: 208138 - RNA, 19 nt, Artificial Sequence
  Description of Artificial Sequence: Synthetic oligonucleotide
aacaugccuccaccgcccg

SEQ ID NO: 208139 - RNA, 19 nt, Artificial Sequence
  Description of Artificial Sequence: Synthetic oligonucleotide
caugaggcgcaccacacuc

SEQ ID NO: 208140 - RNA, 19 nt, Artificial Sequence
  Description of Artificial Sequence: Synthetic oligonucleotide
caaguguaauccaggagca

SEQ ID NO: 208141 - RNA, 19 nt, Artificial Sequence
  Description of Artificial Sequence: Synthetic oligonucleotide
auaauauucucagcaugga

SEQ ID NO: 208142 - RNA, 19 nt, Artificial Sequence
  Description of Artificial Sequence: Synthetic oligonucleotide
aaggugucugauacagauc

SEQ ID NO: 208143 - RNA, 19 nt, Artificial Sequence
  Description of Artificial Sequence: Synthetic oligonucleotide
gcaugaagguggaugaugg

SEQ ID NO: 208144 - RNA, 19 nt, Artificial Sequence
  Description of Artificial Sequence: Synthetic oligonucleotide
ucgcguagucgaaaagggc

SEQ ID NO: 208145 - RNA, 19 nt, Artificial Sequence
  Description of Artificial Sequence: Synthetic oligonucleotide
cacgucuccugucaucgcg

SEQ ID NO: 208146 - RNA, 19 nt, Artificial Sequence
  Description of Artificial Sequence: Synthetic oligonucleotide
aggucaacaaugugcuugu

SEQ ID NO: 208147 - RNA, 19 nt, Artificial Sequence
  Description of Artificial Sequence: Synthetic oligonucleotide
uguccgagaaguugggcau

SEQ ID NO: 208148 - RNA, 19 nt, Artificial Sequence
  Description of Artificial Sequence: Synthetic oligonucleotide
auuugaaugcacaacugua

SEQ ID NO: 208149 - RNA, 19 nt, Artificial Sequence
  Description of Artificial Sequence: Synthetic oligonucleotide
ugaggaucuugucgugccc

SEQ ID NO: 208150 - RNA, 19 nt, Artificial Sequence
  Description of Artificial Sequence: Synthetic oligonucleotide
uacuguagauggcuagaaa

SEQ ID NO: 208151 - RNA, 19 nt, Artificial Sequence
  Description of Artificial Sequence: Synthetic oligonucleotide
ggcaucgcccuccagaagc

SEQ ID NO: 208152 - RNA, 19 nt, Artificial Sequence
  Description of Artificial Sequence: Synthetic oligonucleotide
ugcuagauaccaucugaau

SEQ ID NO: 208153 - RNA, 19 nt, Artificial Sequence
  Description of Artificial Sequence: Synthetic oligonucleotide
uagcgguguagucccauca

SEQ ID NO: 208154 - RNA, 19 nt, Artificial Sequence
  Description of Artificial Sequence: Synthetic oligonucleotide
gccggaaagcauuauuuag

SEQ ID NO: 208155 - RNA, 19 nt, Artificial Sequence
  Description of Artificial Sequence: Synthetic oligonucleotide
aaguguaauccaggagcag

SEQ ID NO: 208156 - RNA, 19 nt, Artificial Sequence
  Description of Artificial Sequence: Synthetic oligonucleotide
guaucacucuuggugcugg

SEQ ID NO: 208157 - RNA, 19 nt, Artificial Sequence
  Description of Artificial Sequence: Synthetic oligonucleotide
ugcuauauguagcggugua

SEQ ID NO: 208158 - RNA, 19 nt, Artificial Sequence
  Description of Artificial Sequence: Synthetic oligonucleotide
acgagauguugucguacuc

SEQ ID NO: 208159 - RNA, 19 nt, Artificial Sequence
  Description of Artificial Sequence: Synthetic oligonucleotide
ugcuuguccuuuuauuaua

SEQ ID NO: 208160 - RNA, 19 nt, Artificial Sequence
  Description of Artificial Sequence: Synthetic oligonucleotide
gauuuaguggcuccagggu

SEQ ID NO: 208161 - RNA, 19 nt, Artificial Sequence
  Description of Artificial Sequence: Synthetic oligonucleotide
gacagugauaccuuuuaau

SEQ ID NO: 208162 - RNA, 19 nt, Artificial Sequence
  Description of Artificial Sequence: Synthetic oligonucleotide
guaguacaucaucagaugu

SEQ ID NO: 208163 - RNA, 19 nt, Artificial Sequence
  Description of Artificial Sequence: Synthetic oligonucleotide
caugaagguggaugauggc

SEQ ID NO: 208164 - RNA, 19 nt, Artificial Sequence
  Description of Artificial Sequence: Synthetic oligonucleotide
gucgaaaagggcauuggca

SEQ ID NO: 208165 - RNA, 19 nt, Artificial Sequence
  Description of Artificial Sequence: Synthetic oligonucleotide
cagugugggaaauggccag

SEQ ID NO: 208166 - RNA, 19 nt, Artificial Sequence
  Description of Artificial Sequence: Synthetic oligonucleotide
auccguagugcgagaagcc

SEQ ID NO: 208167 - RNA, 19 nt, Artificial Sequence
  Description of Artificial Sequence: Synthetic oligonucleotide
gaucagggaucuccagcag

SEQ ID NO: 208168 - RNA, 19 nt, Artificial Sequence
  Description of Artificial Sequence: Synthetic oligonucleotide
uuaucccgaaagccagcgc

SEQ ID NO: 208169 - RNA, 19 nt, Artificial Sequence
  Description of Artificial Sequence: Synthetic oligonucleotide
caucaagguacucauuuaa

SEQ ID NO: 208170 - RNA, 19 nt, Artificial Sequence
  Description of Artificial Sequence: Synthetic oligonucleotide
ucaguaugucaaagaccug

SEQ ID NO: 208171 - RNA, 19 nt, Artificial Sequence
  Description of Artificial Sequence: Synthetic oligonucleotide
uagugcgagaagccauacc

SEQ ID NO: 208172 - RNA, 19 nt, Artificial Sequence
  Description of Artificial Sequence: Synthetic oligonucleotide
uguaucacucuuggugcug

SEQ ID NO: 208173 - RNA, 19 nt, Artificial Sequence
  Description of Artificial Sequence: Synthetic oligonucleotide
uuggauucacucugccuuc

SEQ ID NO: 208174 - RNA, 19 nt, Artificial Sequence
  Description of Artificial Sequence: Synthetic oligonucleotide
guagucgaaaagggcauug

SEQ ID NO: 208175 - RNA, 19 nt, Artificial Sequence
  Description of Artificial Sequence: Synthetic oligonucleotide
aaagggcauuggcaugccu

SEQ ID NO: 208176 - RNA, 19 nt, Artificial Sequence
  Description of Artificial Sequence: Synthetic oligonucleotide
caggcuaaauuuugccuuc

SEQ ID NO: 208177 - RNA, 19 nt, Artificial Sequence
  Description of Artificial Sequence: Synthetic oligonucleotide
ucuuggcaagcuguagagc

SEQ ID NO: 208178 - RNA, 19 nt, Artificial Sequence
  Description of Artificial Sequence: Synthetic oligonucleotide
accguggugagauggcgcu

SEQ ID NO: 208179 - RNA, 19 nt, Artificial Sequence
  Description of Artificial Sequence: Synthetic oligonucleotide
cauagagaggcucaaaguu

SEQ ID NO: 208180 - RNA, 19 nt, Artificial Sequence
  Description of Artificial Sequence: Synthetic oligonucleotide
aucccgaaagccagcgccc

SEQ ID NO: 208181 - RNA, 19 nt, Artificial Sequence
  Description of Artificial Sequence: Synthetic oligonucleotide
accgccacuaccgaacaug

SEQ ID NO: 208182 - RNA, 19 nt, Artificial Sequence
  Description of Artificial Sequence: Synthetic oligonucleotide
ugggcaucgcccuccagaa

SEQ ID NO: 208183 - RNA, 19 nt, Artificial Sequence
  Description of Artificial Sequence: Synthetic oligonucleotide
ccaagagucguccagguca

SEQ ID NO: 208184 - RNA, 19 nt, Artificial Sequence
  Description of Artificial Sequence: Synthetic oligonucleotide
uaugguuccaugggugauc

SEQ ID NO: 208185 - RNA, 19 nt, Artificial Sequence
  Description of Artificial Sequence: Synthetic oligonucleotide
guuuccuucucagagagau

SEQ ID NO: 208186 - RNA, 19 nt, Artificial Sequence
  Description of Artificial Sequence: Synthetic oligonucleotide
uccugcaccguggugagau

SEQ ID NO: 208187 - RNA, 19 nt, Artificial Sequence
  Description of Artificial Sequence: Synthetic oligonucleotide
cuaccgaacaugccuccac

SEQ ID NO: 208188 - RNA, 19 nt, Artificial Sequence
  Description of Artificial Sequence: Synthetic oligonucleotide
accgccgaaacuguccgag

SEQ ID NO: 208189 - RNA, 19 nt, Artificial Sequence
  Description of Artificial Sequence: Synthetic oligonucleotide
gguacucccuccaccaccg

SEQ ID NO: 208190 - RNA, 19 nt, Artificial Sequence
  Description of Artificial Sequence: Synthetic oligonucleotide
cagaucaaaccagauguga

SEQ ID NO: 208191 - RNA, 19 nt, Artificial Sequence
  Description of Artificial Sequence: Synthetic oligonucleotide
gaugagagaggcagcaugu

SEQ ID NO: 208192 - RNA, 19 nt, Artificial Sequence
  Description of Artificial Sequence: Synthetic oligonucleotide
agguggaugauggcuaagu

SEQ ID NO: 208193 - RNA, 19 nt, Artificial Sequence
  Description of Artificial Sequence: Synthetic oligonucleotide
gaccugagaguuggcagcc

SEQ ID NO: 208194 - RNA, 19 nt, Artificial Sequence
  Description of Artificial Sequence: Synthetic oligonucleotide
agccggaaagcauuauuua

SEQ ID NO: 208195 - RNA, 19 nt, Artificial Sequence
  Description of Artificial Sequence: Synthetic oligonucleotide
cugcaccguggugagaugg

SEQ ID NO: 208196 - RNA, 19 nt, Artificial Sequence
  Description of Artificial Sequence: Synthetic oligonucleotide
agccaacgagauguugucg

SEQ ID NO: 208197 - RNA, 19 nt, Artificial Sequence
  Description of Artificial Sequence: Synthetic oligonucleotide
cacuaccgaacaugccucc

SEQ ID NO: 208198 - RNA, 19 nt, Artificial Sequence
  Description of Artificial Sequence: Synthetic oligonucleotide
uccugucaucgcguagucg

SEQ ID NO: 208199 - RNA, 19 nt, Artificial Sequence
  Description of Artificial Sequence: Synthetic oligonucleotide
gaagguggaugauggcuaa

SEQ ID NO: 208200 - RNA, 19 nt, Artificial Sequence
  Description of Artificial Sequence: Synthetic oligonucleotide
cauccugcaccguggugag

SEQ ID NO: 208201 - RNA, 19 nt, Artificial Sequence
  Description of Artificial Sequence: Synthetic oligonucleotide
gaaauccguagugcgagaa

SEQ ID NO: 208202 - RNA, 19 nt, Artificial Sequence
  Description of Artificial Sequence: Synthetic oligonucleotide
ggucuauaaggagugucgc

SEQ ID NO: 208203 - RNA, 19 nt, Artificial Sequence
  Description of Artificial Sequence: Synthetic oligonucleotide
caccguggugagauggcgc

SEQ ID NO: 208204 - RNA, 19 nt, Artificial Sequence
  Description of Artificial Sequence: Synthetic oligonucleotide
gagacucuguaaagcugag

SEQ ID NO: 208205 - RNA, 19 nt, Artificial Sequence
  Description of Artificial Sequence: Synthetic oligonucleotide
auggauuguagcaucuuuu

SEQ ID NO: 208206 - RNA, 19 nt, Artificial Sequence
  Description of Artificial Sequence: Synthetic oligonucleotide
cagaguuaccccagcgguc

SEQ ID NO: 208207 - RNA, 19 nt, Artificial Sequence
  Description of Artificial Sequence: Synthetic oligonucleotide
guuccaugggugaucccag

SEQ ID NO: 208208 - RNA, 19 nt, Artificial Sequence
  Description of Artificial Sequence: Synthetic oligonucleotide
ccugucaucgcguagucga

SEQ ID NO: 208209 - RNA, 19 nt, Artificial Sequence
  Description of Artificial Sequence: Synthetic oligonucleotide
cuucacgucuccugucauc

SEQ ID NO: 208210 - RNA, 19 nt, Artificial Sequence
  Description of Artificial Sequence: Synthetic oligonucleotide
acaugccuccaccgcccgc

SEQ ID NO: 208211 - RNA, 19 nt, Artificial Sequence
  Description of Artificial Sequence: Synthetic oligonucleotide
aguggcuccaggguggaaa

SEQ ID NO: 208212 - RNA, 19 nt, Artificial Sequence
  Description of Artificial Sequence: Synthetic oligonucleotide
acggccaagugcaaaggug

SEQ ID NO: 208213 - RNA, 19 nt, Artificial Sequence
  Description of Artificial Sequence: Synthetic oligonucleotide
caagaaugacccggugggc

SEQ ID NO: 208214 - RNA, 19 nt, Artificial Sequence
  Description of Artificial Sequence: Synthetic oligonucleotide
guggucuauaaggaguguc

SEQ ID NO: 208215 - RNA, 19 nt, Artificial Sequence
  Description of Artificial Sequence: Synthetic oligonucleotide
agaucccucacaagcugag

SEQ ID NO: 208216 - RNA, 19 nt, Artificial Sequence
  Description of Artificial Sequence: Synthetic oligonucleotide
uccgagaaguugggcauga

SEQ ID NO: 208217 - RNA, 19 nt, Artificial Sequence
  Description of Artificial Sequence: Synthetic oligonucleotide
gcuauauguagcgguguag

SEQ ID NO: 208218 - RNA, 19 nt, Artificial Sequence
  Description of Artificial Sequence: Synthetic oligonucleotide
aagaugagagaggcagcau

SEQ ID NO: 208219 - RNA, 19 nt, Artificial Sequence
  Description of Artificial Sequence: Synthetic oligonucleotide
acuguccacgugggcaucg

SEQ ID NO: 208220 - RNA, 19 nt, Artificial Sequence
  Description of Artificial Sequence: Synthetic oligonucleotide
gucaucgcguagucgaaaa

SEQ ID NO: 208221 - RNA, 19 nt, Artificial Sequence
  Description of Artificial Sequence: Synthetic oligonucleotide
gaucuugucgugcccuucu

SEQ ID NO: 208222 - RNA, 19 nt, Artificial Sequence
  Description of Artificial Sequence: Synthetic oligonucleotide
uccccagaccuaacuucug

SEQ ID NO: 208223 - RNA, 19 nt, Artificial Sequence
  Description of Artificial Sequence: Synthetic oligonucleotide
cuauauguagcgguguagu

SEQ ID NO: 208224 - RNA, 19 nt, Artificial Sequence
  Description of Artificial Sequence: Synthetic oligonucleotide
gauuacggccaagugcaaa

SEQ ID NO: 208225 - RNA, 19 nt, Artificial Sequence
  Description of Artificial Sequence: Synthetic oligonucleotide
agcgguguagucccaucau

SEQ ID NO: 208226 - RNA, 19 nt, Artificial Sequence
  Description of Artificial Sequence: Synthetic oligonucleotide
gcagaucccucacaagcug

SEQ ID NO: 208227 - RNA, 19 nt, Artificial Sequence
  Description of Artificial Sequence: Synthetic oligonucleotide
cugucgccacucuugucac

SEQ ID NO: 208228 - RNA, 19 nt, Artificial Sequence
  Description of Artificial Sequence: Synthetic oligonucleotide
gugauaccuuuuaaugaca

SEQ ID NO: 208229 - RNA, 19 nt, Artificial Sequence
  Description of Artificial Sequence: Synthetic oligonucleotide
gcugcuauauguagcggug

SEQ ID NO: 208230 - RNA, 19 nt, Artificial Sequence
  Description of Artificial Sequence: Synthetic oligonucleotide
agaguuggauuuaguggcu

SEQ ID NO: 208231 - RNA, 19 nt, Artificial Sequence
  Description of Artificial Sequence: Synthetic oligonucleotide
ccacugauugcuagauacc

SEQ ID NO: 208232 - RNA, 19 nt, Artificial Sequence
  Description of Artificial Sequence: Synthetic oligonucleotide
ugauuacggccaagugcaa

SEQ ID NO: 208233 - RNA, 19 nt, Artificial Sequence
  Description of Artificial Sequence: Synthetic oligonucleotide
ugucaucgcguagucgaaa

SEQ ID NO: 208234 - RNA, 19 nt, Artificial Sequence
  Description of Artificial Sequence: Synthetic oligonucleotide
ggauuguagcaucuuuuaa

SEQ ID NO: 208235 - RNA, 19 nt, Artificial Sequence
  Description of Artificial Sequence: Synthetic oligonucleotide
cgguguagucccaucauag

SEQ ID NO: 208236 - RNA, 19 nt, Artificial Sequence
  Description of Artificial Sequence: Synthetic oligonucleotide
agucccaucauagguggua

SEQ ID NO: 208237 - RNA, 19 nt, Artificial Sequence
  Description of Artificial Sequence: Synthetic oligonucleotide
gcauuauuuaggaucccca

SEQ ID NO: 208238 - RNA, 19 nt, Artificial Sequence
  Description of Artificial Sequence: Synthetic oligonucleotide
cagaucccucacaagcuga

SEQ ID NO: 208239 - RNA, 19 nt, Artificial Sequence
  Description of Artificial Sequence: Synthetic oligonucleotide
ggguggucuauaaggagug

SEQ ID NO: 208240 - RNA, 19 nt, Artificial Sequence
  Description of Artificial Sequence: Synthetic oligonucleotide
gaccucguaguuguccauc

SEQ ID NO: 208241 - RNA, 19 nt, Artificial Sequence
  Description of Artificial Sequence: Synthetic oligonucleotide
gccgaaacuguccgagaag

SEQ ID NO: 208242 - RNA, 19 nt, Artificial Sequence
  Description of Artificial Sequence: Synthetic oligonucleotide
caggcucauaugguuuccc

SEQ ID NO: 208243 - RNA, 19 nt, Artificial Sequence
  Description of Artificial Sequence: Synthetic oligonucleotide
agauaccaucugaauguga

SEQ ID NO: 208244 - RNA, 19 nt, Artificial Sequence
  Description of Artificial Sequence: Synthetic oligonucleotide
cuuccgguacucccuccac

SEQ ID NO: 208245 - RNA, 19 nt, Artificial Sequence
  Description of Artificial Sequence: Synthetic oligonucleotide
uguagcgguguagucccau

SEQ ID NO: 208246 - RNA, 19 nt, Artificial Sequence
  Description of Artificial Sequence: Synthetic oligonucleotide
acagaucauuccucauguu

SEQ ID NO: 208247 - RNA, 19 nt, Artificial Sequence
  Description of Artificial Sequence: Synthetic oligonucleotide
aggccuugaaugaaaucaa

SEQ ID NO: 208248 - RNA, 19 nt, Artificial Sequence
  Description of Artificial Sequence: Synthetic oligonucleotide
ggccuugaaugaaaucaag

SEQ ID NO: 208249 - RNA, 19 nt, Artificial Sequence
  Description of Artificial Sequence: Synthetic oligonucleotide
acuaccgaacaugccucca

SEQ ID NO: 208250 - RNA, 19 nt, Artificial Sequence
  Description of Artificial Sequence: Synthetic oligonucleotide
gacuucuagcagaucccuc

SEQ ID NO: 208251 - RNA, 19 nt, Artificial Sequence
  Description of Artificial Sequence: Synthetic oligonucleotide
cuguaaggaggaaauccgu

SEQ ID NO: 208252 - RNA, 19 nt, Artificial Sequence
  Description of Artificial Sequence: Synthetic oligonucleotide
guagcgguguagucccauc

SEQ ID NO: 208253 - RNA, 19 nt, Artificial Sequence
  Description of Artificial Sequence: Synthetic oligonucleotide
gccuucuauagguccuucc

SEQ ID NO: 208254 - RNA, 19 nt, Artificial Sequence
  Description of Artificial Sequence: Synthetic oligonucleotide
guagugcgagaagccauac

SEQ ID NO: 208255 - RNA, 19 nt, Artificial Sequence
  Description of Artificial Sequence: Synthetic oligonucleotide
gcuaaauuuugccuucuau

SEQ ID NO: 208256 - RNA, 19 nt, Artificial Sequence
  Description of Artificial Sequence: Synthetic oligonucleotide
cagcugcuauauguagcgg

SEQ ID NO: 208257 - RNA, 19 nt, Artificial Sequence
  Description of Artificial Sequence: Synthetic oligonucleotide
gaaugacagugcaacugua

SEQ ID NO: 208258 - RNA, 19 nt, Artificial Sequence
  Description of Artificial Sequence: Synthetic oligonucleotide
ugucgccacucuugucaca

SEQ ID NO: 208259 - RNA, 19 nt, Artificial Sequence
  Description of Artificial Sequence: Synthetic oligonucleotide
ggaugucuccacaccacug

SEQ ID NO: 208260 - RNA, 19 nt, Artificial Sequence
  Description of Artificial Sequence: Synthetic oligonucleotide
gcagaguuaccccagcggu

SEQ ID NO: 208261 - RNA, 19 nt, Artificial Sequence
  Description of Artificial Sequence: Synthetic oligonucleotide
gcgagaagccauacccugg

SEQ ID NO: 208262 - RNA, 19 nt, Artificial Sequence
  Description of Artificial Sequence: Synthetic oligonucleotide
aggcuaaauuuugccuucu

SEQ ID NO: 208263 - RNA, 19 nt, Artificial Sequence
  Description of Artificial Sequence: Synthetic oligonucleotide
cgcguagucgaaaagggca

SEQ ID NO: 208264 - RNA, 19 nt, Artificial Sequence
  Description of Artificial Sequence: Synthetic oligonucleotide
ccucauguugaugauguca

SEQ ID NO: 208265 - RNA, 19 nt, Artificial Sequence
  Description of Artificial Sequence: Synthetic oligonucleotide
caagugcaaaggugucuga

SEQ ID NO: 208266 - RNA, 19 nt, Artificial Sequence
  Description of Artificial Sequence: Synthetic oligonucleotide
ccacuaccgaacaugccuc

SEQ ID NO: 208267 - RNA, 19 nt, Artificial Sequence
  Description of Artificial Sequence: Synthetic oligonucleotide
ccaccgccgaaacuguccg

SEQ ID NO: 208268 - RNA, 19 nt, Artificial Sequence
  Description of Artificial Sequence: Synthetic oligonucleotide
auacccugggccaggacuu

SEQ ID NO: 208269 - RNA, 19 nt, Artificial Sequence
  Description of Artificial Sequence: Synthetic oligonucleotide
cuggcguuuccucuggacu

SEQ ID NO: 208270 - RNA, 19 nt, Artificial Sequence
  Description of Artificial Sequence: Synthetic oligonucleotide
cacgccagacuuccuuauc

SEQ ID NO: 208271 - RNA, 19 nt, Artificial Sequence
  Description of Artificial Sequence: Synthetic oligonucleotide
ccgccacuaccgaacaugc

SEQ ID NO: 208272 - RNA, 19 nt, Artificial Sequence
  Description of Artificial Sequence: Synthetic oligonucleotide
cccagaccuaacuucugug

SEQ ID NO: 208273 - RNA, 19 nt, Artificial Sequence
  Description of Artificial Sequence: Synthetic oligonucleotide
cauggauuguagcaucuuu

SEQ ID NO: 208274 - RNA, 19 nt, Artificial Sequence
  Description of Artificial Sequence: Synthetic oligonucleotide
cugugaacaugaggcgcac

SEQ ID NO: 208275 - RNA, 19 nt, Artificial Sequence
  Description of Artificial Sequence: Synthetic oligonucleotide
ccaaauucggaaggccuug

SEQ ID NO: 208276 - RNA, 19 nt, Artificial Sequence
  Description of Artificial Sequence: Synthetic oligonucleotide
cagccggaaagcauuauuu

SEQ ID NO: 208277 - RNA, 19 nt, Artificial Sequence
  Description of Artificial Sequence: Synthetic oligonucleotide
uggacacgccagacuuccu

SEQ ID NO: 208278 - RNA, 19 nt, Artificial Sequence
  Description of Artificial Sequence: Synthetic oligonucleotide
gguuaucccgaaagccagc

SEQ ID NO: 208279 - RNA, 19 nt, Artificial Sequence
  Description of Artificial Sequence: Synthetic oligonucleotide
caaauucggaaggccuuga

SEQ ID NO: 208280 - RNA, 19 nt, Artificial Sequence
  Description of Artificial Sequence: Synthetic oligonucleotide
aaugacccggugggccggu

SEQ ID NO: 208281 - RNA, 19 nt, Artificial Sequence
  Description of Artificial Sequence: Synthetic oligonucleotide
augaggcgcaccacacuca

SEQ ID NO: 208282 - RNA, 19 nt, Artificial Sequence
  Description of Artificial Sequence: Synthetic oligonucleotide
ccaacccucagcaaguccu

SEQ ID NO: 208283 - RNA, 19 nt, Artificial Sequence
  Description of Artificial Sequence: Synthetic oligonucleotide
gcaccguggugagauggcg

SEQ ID NO: 208284 - RNA, 19 nt, Artificial Sequence
  Description of Artificial Sequence: Synthetic oligonucleotide
cccggagcucaucuaagug

SEQ ID NO: 208285 - RNA, 19 nt, Artificial Sequence
  Description of Artificial Sequence: Synthetic oligonucleotide
ugccuucuauagguccuuc

SEQ ID NO: 208286 - RNA, 19 nt, Artificial Sequence
  Description of Artificial Sequence: Synthetic oligonucleotide
ggaaauccguagugcgaga

SEQ ID NO: 208287 - RNA, 19 nt, Artificial Sequence
  Description of Artificial Sequence: Synthetic oligonucleotide
cugccuggcggaugaucuc

SEQ ID NO: 208288 - RNA, 19 nt, Artificial Sequence
  Description of Artificial Sequence: Synthetic oligonucleotide
cuguaucacucuuggugcu

SEQ ID NO: 208289 - RNA, 19 nt, Artificial Sequence
  Description of Artificial Sequence: Synthetic oligonucleotide
gaggcgcaccacacucaag

SEQ ID NO: 208290 - RNA, 19 nt, Artificial Sequence
  Description of Artificial Sequence: Synthetic oligonucleotide
gccgguaauccuccagcac

SEQ ID NO: 208291 - RNA, 19 nt, Artificial Sequence
  Description of Artificial Sequence: Synthetic oligonucleotide
aggucagccccaacccuca

SEQ ID NO: 208292 - RNA, 19 nt, Artificial Sequence
  Description of Artificial Sequence: Synthetic oligonucleotide
cugugcgcccagacuucug

SEQ ID NO: 208293 - RNA, 19 nt, Artificial Sequence
  Description of Artificial Sequence: Synthetic oligonucleotide
cuauaaggagugucgccuu

SEQ ID NO: 208294 - RNA, 19 nt, Artificial Sequence
  Description of Artificial Sequence: Synthetic oligonucleotide
ggacuuccgguacucccuc

SEQ ID NO: 208295 - RNA, 19 nt, Artificial Sequence
  Description of Artificial Sequence: Synthetic oligonucleotide
guaccuggcaccacucccu

SEQ ID NO: 208296 - RNA, 19 nt, Artificial Sequence
  Description of Artificial Sequence: Synthetic oligonucleotide
gggguggucuauaaggagu

SEQ ID NO: 208297 - RNA, 19 nt, Artificial Sequence
  Description of Artificial Sequence: Synthetic oligonucleotide
gucgugcccuucucuggca

SEQ ID NO: 208298 - RNA, 19 nt, Artificial Sequence
  Description of Artificial Sequence: Synthetic oligonucleotide
caagagucguccaggucau

SEQ ID NO: 208299 - RNA, 19 nt, Artificial Sequence
  Description of Artificial Sequence: Synthetic oligonucleotide
ccuucuauagguccuuccu

SEQ ID NO: 208300 - RNA, 19 nt, Artificial Sequence
  Description of Artificial Sequence: Synthetic oligonucleotide
ccagacuuccuuauccugu

SEQ ID NO: 208301 - RNA, 19 nt, Artificial Sequence
  Description of Artificial Sequence: Synthetic oligonucleotide
agcgguccagaaggcucag

SEQ ID NO: 208302 - RNA, 19 nt, Artificial Sequence
  Description of Artificial Sequence: Synthetic oligonucleotide
uacuguccacgugggcauc

SEQ ID NO: 208303 - RNA, 19 nt, Artificial Sequence
  Description of Artificial Sequence: Synthetic oligonucleotide
acucagccggaaagcauua

SEQ ID NO: 208304 - RNA, 19 nt, Artificial Sequence
  Description of Artificial Sequence: Synthetic oligonucleotide
ccaucugaaugugacaacu

SEQ ID NO: 208305 - RNA, 19 nt, Artificial Sequence
  Description of Artificial Sequence: Synthetic oligonucleotide
acgugggcaucgcccucca

SEQ ID NO: 208306 - RNA, 19 nt, Artificial Sequence
  Description of Artificial Sequence: Synthetic oligonucleotide
cagucugguggagccucug

SEQ ID NO: 208307 - RNA, 19 nt, Artificial Sequence
  Description of Artificial Sequence: Synthetic oligonucleotide
gugcgagaagccauacccu

SEQ ID NO: 208308 - RNA, 19 nt, Artificial Sequence
  Description of Artificial Sequence: Synthetic oligonucleotide
gucuccgggugaagcugcc

SEQ ID NO: 208309 - RNA, 19 nt, Artificial Sequence
  Description of Artificial Sequence: Synthetic oligonucleotide
cccggugggccgguaaucc

SEQ ID NO: 208310 - RNA, 19 nt, Artificial Sequence
  Description of Artificial Sequence: Synthetic oligonucleotide
cauuuagaccuuccccauu

SEQ ID NO: 208311 - RNA, 19 nt, Artificial Sequence
  Description of Artificial Sequence: Synthetic oligonucleotide
gggcaucgcccuccagaag

SEQ ID NO: 208312 - RNA, 19 nt, Artificial Sequence
  Description of Artificial Sequence: Synthetic oligonucleotide
cugcuauauguagcggugu

SEQ ID NO: 208313 - RNA, 19 nt, Artificial Sequence
  Description of Artificial Sequence: Synthetic oligonucleotide
gcuaaguguaagacacugu

SEQ ID NO: 208314 - RNA, 19 nt, Artificial Sequence
  Description of Artificial Sequence: Synthetic oligonucleotide
ggaucuugucgugcccuuc

SEQ ID NO: 208315 - RNA, 19 nt, Artificial Sequence
  Description of Artificial Sequence: Synthetic oligonucleotide
gcgguguagucccaucaua

SEQ ID NO: 208316 - RNA, 19 nt, Artificial Sequence
  Description of Artificial Sequence: Synthetic oligonucleotide
ccgaaacuguccgagaagu

SEQ ID NO: 208317 - RNA, 19 nt, Artificial Sequence
  Description of Artificial Sequence: Synthetic oligonucleotide
ggcaggacucagccggaaa

SEQ ID NO: 208318 - RNA, 19 nt, Artificial Sequence
  Description of Artificial Sequence: Synthetic oligonucleotide
ccacuguaaggaggaaauc

SEQ ID NO: 208319 - RNA, 19 nt, Artificial Sequence
  Description of Artificial Sequence: Synthetic oligonucleotide
gacccggugggccgguaau

SEQ ID NO: 208320 - RNA, 19 nt, Artificial Sequence
  Description of Artificial Sequence: Synthetic oligonucleotide
ggcaccacucccucauccu

SEQ ID NO: 208321 - RNA, 19 nt, Artificial Sequence
  Description of Artificial Sequence: Synthetic oligonucleotide
guaagacacuguccccauu

SEQ ID NO: 208322 - RNA, 19 nt, Artificial Sequence
  Description of Artificial Sequence: Synthetic oligonucleotide
gcaugugggccugagcagu

SEQ ID NO: 208323 - RNA, 19 nt, Artificial Sequence
  Description of Artificial Sequence: Synthetic oligonucleotide
gugcgcccagacuucugcu

SEQ ID NO: 208324 - RNA, 19 nt, Artificial Sequence
  Description of Artificial Sequence: Synthetic oligonucleotide
auguagcgguguaguccca

SEQ ID NO: 208325 - RNA, 19 nt, Artificial Sequence
  Description of Artificial Sequence: Synthetic oligonucleotide
caccgccgaaacuguccga

SEQ ID NO: 208326 - RNA, 19 nt, Artificial Sequence
  Description of Artificial Sequence: Synthetic oligonucleotide
cggugggccgguaauccuc

SEQ ID NO: 208327 - RNA, 19 nt, Artificial Sequence
  Description of Artificial Sequence: Synthetic oligonucleotide
uaguggcuccaggguggaa

SEQ ID NO: 208328 - RNA, 19 nt, Artificial Sequence
  Description of Artificial Sequence: Synthetic oligonucleotide
cguagugcgagaagccaua

SEQ ID NO: 208329 - RNA, 19 nt, Artificial Sequence
  Description of Artificial Sequence: Synthetic oligonucleotide
cacggggcuggaggcugug

SEQ ID NO: 208330 - RNA, 19 nt, Artificial Sequence
  Description of Artificial Sequence: Synthetic oligonucleotide
ccgguacucccuccaccac

SEQ ID NO: 208331 - RNA, 19 nt, Artificial Sequence
  Description of Artificial Sequence: Synthetic oligonucleotide
gcguagucgaaaagggcau

SEQ ID NO: 208332 - RNA, 19 nt, Artificial Sequence
  Description of Artificial Sequence: Synthetic oligonucleotide
gguggucuauaaggagugu

SEQ ID NO: 208333 - RNA, 19 nt, Artificial Sequence
  Description of Artificial Sequence: Synthetic oligonucleotide
cgccgaaacuguccgagaa

SEQ ID NO: 208334 - RNA, 19 nt, Artificial Sequence
  Description of Artificial Sequence: Synthetic oligonucleotide
ccauacccugggccaggac

SEQ ID NO: 208335 - RNA, 19 nt, Artificial Sequence
  Description of Artificial Sequence: Synthetic oligonucleotide
gggugaucccagaguugga

SEQ ID NO: 208336 - RNA, 19 nt, Artificial Sequence
  Description of Artificial Sequence: Synthetic oligonucleotide
ccaccgccacuaccgaaca

SEQ ID NO: 208337 - RNA, 19 nt, Artificial Sequence
  Description of Artificial Sequence: Synthetic oligonucleotide
ccccagaccuaacuucugu

SEQ ID NO: 208338 - RNA, 19 nt, Artificial Sequence
  Description of Artificial Sequence: Synthetic oligonucleotide
ccgcuccggcuccacugcc

SEQ ID NO: 208339 - RNA, 19 nt, Artificial Sequence
  Description of Artificial Sequence: Synthetic oligonucleotide
ggugucugauacagaucau

SEQ ID NO: 208340 - RNA, 19 nt, Artificial Sequence
  Description of Artificial Sequence: Synthetic oligonucleotide
cucagccggaaagcauuau

SEQ ID NO: 208341 - RNA, 19 nt, Artificial Sequence
  Description of Artificial Sequence: Synthetic oligonucleotide
ccguggugagauggcgcug

SEQ ID NO: 208342 - RNA, 19 nt, Artificial Sequence
  Description of Artificial Sequence: Synthetic oligonucleotide
ccgccgaaacuguccgaga

SEQ ID NO: 208343 - RNA, 19 nt, Artificial Sequence
  Description of Artificial Sequence: Synthetic oligonucleotide
ggccagcaggcuaaauuuu

SEQ ID NO: 208344 - RNA, 19 nt, Artificial Sequence
  Description of Artificial Sequence: Synthetic oligonucleotide
gcccauaauuguggggcau

SEQ ID NO: 208345 - RNA, 19 nt, Artificial Sequence
  Description of Artificial Sequence: Synthetic oligonucleotide
cgccagacuuccuuauccu

SEQ ID NO: 208346 - RNA, 19 nt, Artificial Sequence
  Description of Artificial Sequence: Synthetic oligonucleotide
gugucgccuuucuguucuu

SEQ ID NO: 208347 - RNA, 19 nt, Artificial Sequence
  Description of Artificial Sequence: Synthetic oligonucleotide
caccgccacuaccgaacau

SEQ ID NO: 208348 - RNA, 19 nt, Artificial Sequence
  Description of Artificial Sequence: Synthetic oligonucleotide
cgaaacuguccgagaaguu

SEQ ID NO: 208349 - RNA, 19 nt, Artificial Sequence
  Description of Artificial Sequence: Synthetic oligonucleotide
cagggaucuccagcagcuu

SEQ ID NO: 208350 - RNA, 19 nt, Artificial Sequence
  Description of Artificial Sequence: Synthetic oligonucleotide
ccgaaagccagcgccccau

SEQ ID NO: 208351 - RNA, 19 nt, Artificial Sequence
  Description of Artificial Sequence: Synthetic oligonucleotide
cguagucgaaaagggcauu

SEQ ID NO: 208352 - RNA, 19 nt, Artificial Sequence
  Description of Artificial Sequence: Synthetic oligonucleotide
aaagacaugauauacguag

SEQ ID NO: 208353 - RNA, 19 nt, Artificial Sequence
  Description of Artificial Sequence: Synthetic oligonucleotide
aaauaaauguuguaaguag

SEQ ID NO: 208354 - RNA, 19 nt, Artificial Sequence
  Description of Artificial Sequence: Synthetic oligonucleotide
aaucuuaagauguuaauga

SEQ ID NO: 208355 - RNA, 19 nt, Artificial Sequence
  Description of Artificial Sequence: Synthetic oligonucleotide
gauguuaaaguauagcuug

SEQ ID NO: 208356 - RNA, 19 nt, Artificial Sequence
  Description of Artificial Sequence: Synthetic oligonucleotide
auuaacuucguauacaaug

SEQ ID NO: 208357 - RNA, 19 nt, Artificial Sequence
  Description of Artificial Sequence: Synthetic oligonucleotide
auauauugaagcuugacug

SEQ ID NO: 208358 - RNA, 19 nt, Artificial Sequence
  Description of Artificial Sequence: Synthetic oligonucleotide
uauacguagauuuugcuca

SEQ ID NO: 208359 - RNA, 19 nt, Artificial Sequence
  Description of Artificial Sequence: Synthetic oligonucleotide
auaccugggaaccagaaac

SEQ ID NO: 208360 - RNA, 19 nt, Artificial Sequence
  Description of Artificial Sequence: Synthetic oligonucleotide
uuuaggaugacccuuauuu

SEQ ID NO: 208361 - RNA, 19 nt, Artificial Sequence
  Description of Artificial Sequence: Synthetic oligonucleotide
guaagauagauauaaagac

SEQ ID NO: 208362 - RNA, 19 nt, Artificial Sequence
  Description of Artificial Sequence: Synthetic oligonucleotide
uauauauugaagcuugacu

SEQ ID NO: 208363 - RNA, 19 nt, Artificial Sequence
  Description of Artificial Sequence: Synthetic oligonucleotide
aauuaguaacacaagguuc

SEQ ID NO: 208364 - RNA, 19 nt, Artificial Sequence
  Description of Artificial Sequence: Synthetic oligonucleotide
aagcccuaugccuugaugg

SEQ ID NO: 208365 - RNA, 19 nt, Artificial Sequence
  Description of Artificial Sequence: Synthetic oligonucleotide
agcauugaaagauacaaug

SEQ ID NO: 208366 - RNA, 19 nt, Artificial Sequence
  Description of Artificial Sequence: Synthetic oligonucleotide
uucguauacaaugaaagag

SEQ ID NO: 208367 - RNA, 19 nt, Artificial Sequence
  Description of Artificial Sequence: Synthetic oligonucleotide
uccuagaagaguuaaagcu

SEQ ID NO: 208368 - RNA, 19 nt, Artificial Sequence
  Description of Artificial Sequence: Synthetic oligonucleotide
cauacauagaauacauugg

SEQ ID NO: 208369 - RNA, 19 nt, Artificial Sequence
  Description of Artificial Sequence: Synthetic oligonucleotide
uauagcacgaacuuuucug

SEQ ID NO: 208370 - RNA, 19 nt, Artificial Sequence
  Description of Artificial Sequence: Synthetic oligonucleotide
auauacguagauuuugcuc

SEQ ID NO: 208371 - RNA, 19 nt, Artificial Sequence
  Description of Artificial Sequence: Synthetic oligonucleotide
uuugcucacaauuaguaac

SEQ ID NO: 208372 - RNA, 19 nt, Artificial Sequence
  Description of Artificial Sequence: Synthetic oligonucleotide
uacacaugcuccuagaaga

SEQ ID NO: 208373 - RNA, 19 nt, Artificial Sequence
  Description of Artificial Sequence: Synthetic oligonucleotide
ugagggacaacucaauagc

SEQ ID NO: 208374 - RNA, 19 nt, Artificial Sequence
  Description of Artificial Sequence: Synthetic oligonucleotide
ucgauauauguacauaaca

SEQ ID NO: 208375 - RNA, 19 nt, Artificial Sequence
  Description of Artificial Sequence: Synthetic oligonucleotide
augugcuacaacuugguuc

SEQ ID NO: 208376 - RNA, 19 nt, Artificial Sequence
  Description of Artificial Sequence: Synthetic oligonucleotide
uguacuuaucuuaauuuac

SEQ ID NO: 208377 - RNA, 19 nt, Artificial Sequence
  Description of Artificial Sequence: Synthetic oligonucleotide
auaggaguugccuugaaca

SEQ ID NO: 208378 - RNA, 19 nt, Artificial Sequence
  Description of Artificial Sequence: Synthetic oligonucleotide
aaugagcauugaaagauac

SEQ ID NO: 208379 - RNA, 19 nt, Artificial Sequence
  Description of Artificial Sequence: Synthetic oligonucleotide
uuucgauauauguacauaa

SEQ ID NO: 208380 - RNA, 19 nt, Artificial Sequence
  Description of Artificial Sequence: Synthetic oligonucleotide
aacaucggguccuauagca

SEQ ID NO: 208381 - RNA, 19 nt, Artificial Sequence
  Description of Artificial Sequence: Synthetic oligonucleotide
uugagggacaacucaauag

SEQ ID NO: 208382 - RNA, 19 nt, Artificial Sequence
  Description of Artificial Sequence: Synthetic oligonucleotide
acaugauauacguagauuu

SEQ ID NO: 208383 - RNA, 19 nt, Artificial Sequence
  Description of Artificial Sequence: Synthetic oligonucleotide
acaguauacagcuuuacaa

SEQ ID NO: 208384 - RNA, 19 nt, Artificial Sequence
  Description of Artificial Sequence: Synthetic oligonucleotide
acuucguauacaaugaaag

SEQ ID NO: 208385 - RNA, 19 nt, Artificial Sequence
  Description of Artificial Sequence: Synthetic oligonucleotide
gauuccuauaagcugagga

SEQ ID NO: 208386 - RNA, 19 nt, Artificial Sequence
  Description of Artificial Sequence: Synthetic oligonucleotide
uaaucauugccgauaucag

SEQ ID NO: 208387 - RNA, 19 nt, Artificial Sequence
  Description of Artificial Sequence: Synthetic oligonucleotide
gaugauguuaaaguauagc

SEQ ID NO: 208388 - RNA, 19 nt, Artificial Sequence
  Description of Artificial Sequence: Synthetic oligonucleotide
gaacuuuugaguguugcag

SEQ ID NO: 208389 - RNA, 19 nt, Artificial Sequence
  Description of Artificial Sequence: Synthetic oligonucleotide
aaccauaagagccuuuaau

SEQ ID NO: 208390 - RNA, 19 nt, Artificial Sequence
  Description of Artificial Sequence: Synthetic oligonucleotide
aacuuuugaguguugcaga

SEQ ID NO: 208391 - RNA, 19 nt, Artificial Sequence
  Description of Artificial Sequence: Synthetic oligonucleotide
ugauguuaaaguauagcuu

SEQ ID NO: 208392 - RNA, 19 nt, Artificial Sequence
  Description of Artificial Sequence: Synthetic oligonucleotide
aacaccuacuuauagccau

SEQ ID NO: 208393 - RNA, 19 nt, Artificial Sequence
  Description of Artificial Sequence: Synthetic oligonucleotide
ugacacaucgcuucgagau

SEQ ID NO: 208394 - RNA, 19 nt, Artificial Sequence
  Description of Artificial Sequence: Synthetic oligonucleotide
aacuaaccauugcauuugg

SEQ ID NO: 208395 - RNA, 19 nt, Artificial Sequence
  Description of Artificial Sequence: Synthetic oligonucleotide
ugcaaaucgaaaacaguuc

SEQ ID NO: 208396 - RNA, 19 nt, Artificial Sequence
  Description of Artificial Sequence: Synthetic oligonucleotide
gcauuuagcagaaacaugc

SEQ ID NO: 208397 - RNA, 19 nt, Artificial Sequence
  Description of Artificial Sequence: Synthetic oligonucleotide
gaaccaauagcugggaaug

SEQ ID NO: 208398 - RNA, 19 nt, Artificial Sequence
  Description of Artificial Sequence: Synthetic oligonucleotide
uucgauauauguacauaac

SEQ ID NO: 208399 - RNA, 19 nt, Artificial Sequence
  Description of Artificial Sequence: Synthetic oligonucleotide
uggguaagaagccuggguc

SEQ ID NO: 208400 - RNA, 19 nt, Artificial Sequence
  Description of Artificial Sequence: Synthetic oligonucleotide
uauuagguccugcauucug

SEQ ID NO: 208401 - RNA, 19 nt, Artificial Sequence
  Description of Artificial Sequence: Synthetic oligonucleotide
agguucuuaaucauugccg

SEQ ID NO: 208402 - RNA, 19 nt, Artificial Sequence
  Description of Artificial Sequence: Synthetic oligonucleotide
ucgucaagaacuguaauaa

SEQ ID NO: 208403 - RNA, 19 nt, Artificial Sequence
  Description of Artificial Sequence: Synthetic oligonucleotide
uuuacaaccuaaugaccac

SEQ ID NO: 208404 - RNA, 19 nt, Artificial Sequence
  Description of Artificial Sequence: Synthetic oligonucleotide
guuaaugaaucuccuacca

SEQ ID NO: 208405 - RNA, 19 nt, Artificial Sequence
  Description of Artificial Sequence: Synthetic oligonucleotide
acaauuaguaacacaaggu

SEQ ID NO: 208406 - RNA, 19 nt, Artificial Sequence
  Description of Artificial Sequence: Synthetic oligonucleotide
uaggaguugccuugaacag

SEQ ID NO: 208407 - RNA, 19 nt, Artificial Sequence
  Description of Artificial Sequence: Synthetic oligonucleotide
uaaccauugcauuugggua

SEQ ID NO: 208408 - RNA, 19 nt, Artificial Sequence
  Description of Artificial Sequence: Synthetic oligonucleotide
agauaguguacuuaucuua

SEQ ID NO: 208409 - RNA, 19 nt, Artificial Sequence
  Description of Artificial Sequence: Synthetic oligonucleotide
cuggauauaccugggaacc

SEQ ID NO: 208410 - RNA, 19 nt, Artificial Sequence
  Description of Artificial Sequence: Synthetic oligonucleotide
uuaggguuagagacgugug

SEQ ID NO: 208411 - RNA, 19 nt, Artificial Sequence
  Description of Artificial Sequence: Synthetic oligonucleotide
ugaacuuuugaguguugca

SEQ ID NO: 208412 - RNA, 19 nt, Artificial Sequence
  Description of Artificial Sequence: Synthetic oligonucleotide
uggagcauaaugccaaaau

SEQ ID NO: 208413 - RNA, 19 nt, Artificial Sequence
  Description of Artificial Sequence: Synthetic oligonucleotide
auuuaaugugacacaacag

SEQ ID NO: 208414 - RNA, 19 nt, Artificial Sequence
  Description of Artificial Sequence: Synthetic oligonucleotide
uguaguguuaguuccuuuu

SEQ ID NO: 208415 - RNA, 19 nt, Artificial Sequence
  Description of Artificial Sequence: Synthetic oligonucleotide
aaagcccuaugccuugaug

SEQ ID NO: 208416 - RNA, 19 nt, Artificial Sequence
  Description of Artificial Sequence: Synthetic oligonucleotide
guuaaaguauagcuuggca

SEQ ID NO: 208417 - RNA, 19 nt, Artificial Sequence
  Description of Artificial Sequence: Synthetic oligonucleotide
acagauuccuauaagcuga

SEQ ID NO: 208418 - RNA, 19 nt, Artificial Sequence
  Description of Artificial Sequence: Synthetic oligonucleotide
auaacauuugccacagcag

SEQ ID NO: 208419 - RNA, 19 nt, Artificial Sequence
  Description of Artificial Sequence: Synthetic oligonucleotide
ugggauaggaguugccuug

SEQ ID NO: 208420 - RNA, 19 nt, Artificial Sequence
  Description of Artificial Sequence: Synthetic oligonucleotide
uacaaccuaaugaccaccu

SEQ ID NO: 208421 - RNA, 19 nt, Artificial Sequence
  Description of Artificial Sequence: Synthetic oligonucleotide
auacguagauuuugcucac

SEQ ID NO: 208422 - RNA, 19 nt, Artificial Sequence
  Description of Artificial Sequence: Synthetic oligonucleotide
uaguguacuuaucuuaauu

SEQ ID NO: 208423 - RNA, 19 nt, Artificial Sequence
  Description of Artificial Sequence: Synthetic oligonucleotide
gaccagguaauuucacaag

SEQ ID NO: 208424 - RNA, 19 nt, Artificial Sequence
  Description of Artificial Sequence: Synthetic oligonucleotide
agacgugugauucaauuuu

SEQ ID NO: 208425 - RNA, 19 nt, Artificial Sequence
  Description of Artificial Sequence: Synthetic oligonucleotide
uccuggauauaccugggaa

SEQ ID NO: 208426 - RNA, 19 nt, Artificial Sequence
  Description of Artificial Sequence: Synthetic oligonucleotide
ggaacaucggguccuauag

SEQ ID NO: 208427 - RNA, 19 nt, Artificial Sequence
  Description of Artificial Sequence: Synthetic oligonucleotide
uccuauaagcugaggaaaa

SEQ ID NO: 208428 - RNA, 19 nt, Artificial Sequence
  Description of Artificial Sequence: Synthetic oligonucleotide
auuagguccugcauucugg

SEQ ID NO: 208429 - RNA, 19 nt, Artificial Sequence
  Description of Artificial Sequence: Synthetic oligonucleotide
aaaguauagcuuggcaccu

SEQ ID NO: 208430 - RNA, 19 nt, Artificial Sequence
  Description of Artificial Sequence: Synthetic oligonucleotide
aucuuaagauguuaaugaa

SEQ ID NO: 208431 - RNA, 19 nt, Artificial Sequence
  Description of Artificial Sequence: Synthetic oligonucleotide
uaggguuagagacguguga

SEQ ID NO: 208432 - RNA, 19 nt, Artificial Sequence
  Description of Artificial Sequence: Synthetic oligonucleotide
cagcuuuacaaccuaauga

SEQ ID NO: 208433 - RNA, 19 nt, Artificial Sequence
  Description of Artificial Sequence: Synthetic oligonucleotide
uuggguaagaagccugggu

SEQ ID NO: 208434 - RNA, 19 nt, Artificial Sequence
  Description of Artificial Sequence: Synthetic oligonucleotide
gauaguguacuuaucuuaa

SEQ ID NO: 208435 - RNA, 19 nt, Artificial Sequence
  Description of Artificial Sequence: Synthetic oligonucleotide
uaugguucacucuucucau

SEQ ID NO: 208436 - RNA, 19 nt, Artificial Sequence
  Description of Artificial Sequence: Synthetic oligonucleotide
ucuaaagagucagugcaaa

SEQ ID NO: 208437 - RNA, 19 nt, Artificial Sequence
  Description of Artificial Sequence: Synthetic oligonucleotide
acgacugcauauaauacug

SEQ ID NO: 208438 - RNA, 19 nt, Artificial Sequence
  Description of Artificial Sequence: Synthetic oligonucleotide
augaaguuacauuucgaua

SEQ ID NO: 208439 - RNA, 19 nt, Artificial Sequence
  Description of Artificial Sequence: Synthetic oligonucleotide
uggugguuaguuaggagau

SEQ ID NO: 208440 - RNA, 19 nt, Artificial Sequence
  Description of Artificial Sequence: Synthetic oligonucleotide
uuacaaccuaaugaccacc

SEQ ID NO: 208441 - RNA, 19 nt, Artificial Sequence
  Description of Artificial Sequence: Synthetic oligonucleotide
uuccuauaagcugaggaaa

SEQ ID NO: 208442 - RNA, 19 nt, Artificial Sequence
  Description of Artificial Sequence: Synthetic oligonucleotide
gagagcggaguuugcagag

SEQ ID NO: 208443 - RNA, 19 nt, Artificial Sequence
  Description of Artificial Sequence: Synthetic oligonucleotide
cuauauauugaagcuugac

SEQ ID NO: 208444 - RNA, 19 nt, Artificial Sequence
  Description of Artificial Sequence: Synthetic oligonucleotide
agacgacugcauauaauac

SEQ ID NO: 208445 - RNA, 19 nt, Artificial Sequence
  Description of Artificial Sequence: Synthetic oligonucleotide
uuaggaugacccuuauuua

SEQ ID NO: 208446 - RNA, 19 nt, Artificial Sequence
  Description of Artificial Sequence: Synthetic oligonucleotide
aguaguggguaggaacuac

SEQ ID NO: 208447 - RNA, 19 nt, Artificial Sequence
  Description of Artificial Sequence: Synthetic oligonucleotide
uggcugauuaucacuggga

SEQ ID NO: 208448 - RNA, 19 nt, Artificial Sequence
  Description of Artificial Sequence: Synthetic oligonucleotide
auauagcacgaacuuuucu

SEQ ID NO: 208449 - RNA, 19 nt, Artificial Sequence
  Description of Artificial Sequence: Synthetic oligonucleotide
agcccuaugccuugauggg

SEQ ID NO: 208450 - RNA, 19 nt, Artificial Sequence
  Description of Artificial Sequence: Synthetic oligonucleotide
gaccucuaaagagucagug

SEQ ID NO: 208451 - RNA, 19 nt, Artificial Sequence
  Description of Artificial Sequence: Synthetic oligonucleotide
agagacgugugauucaauu

SEQ ID NO: 208452 - RNA, 19 nt, Artificial Sequence
  Description of Artificial Sequence: Synthetic oligonucleotide
agguaauuucacaagacaa

SEQ ID NO: 208453 - RNA, 19 nt, Artificial Sequence
  Description of Artificial Sequence: Synthetic oligonucleotide
uauaccugggaaccagaaa

SEQ ID NO: 208454 - RNA, 19 nt, Artificial Sequence
  Description of Artificial Sequence: Synthetic oligonucleotide
agacaugauauacguagau

SEQ ID NO: 208455 - RNA, 19 nt, Artificial Sequence
  Description of Artificial Sequence: Synthetic oligonucleotide
cuucguauacaaugaaaga

SEQ ID NO: 208456 - RNA, 19 nt, Artificial Sequence
  Description of Artificial Sequence: Synthetic oligonucleotide
gacaacucaauagcuuuug

SEQ ID NO: 208457 - RNA, 19 nt, Artificial Sequence
  Description of Artificial Sequence: Synthetic oligonucleotide
aacuucguauacaaugaaa

SEQ ID NO: 208458 - RNA, 19 nt, Artificial Sequence
  Description of Artificial Sequence: Synthetic oligonucleotide
ucacugucgucaagaacug

SEQ ID NO: 208459 - RNA, 19 nt, Artificial Sequence
  Description of Artificial Sequence: Synthetic oligonucleotide
uugccgauaucagacuaag

SEQ ID NO: 208460 - RNA, 19 nt, Artificial Sequence
  Description of Artificial Sequence: Synthetic oligonucleotide
uuagagacgugugauucaa

SEQ ID NO: 208461 - RNA, 19 nt, Artificial Sequence
  Description of Artificial Sequence: Synthetic oligonucleotide
ugcggaucauucuuaaauu

SEQ ID NO: 208462 - RNA, 19 nt, Artificial Sequence
  Description of Artificial Sequence: Synthetic oligonucleotide
aucgcuucgagaugaagua

SEQ ID NO: 208463 - RNA, 19 nt, Artificial Sequence
  Description of Artificial Sequence: Synthetic oligonucleotide
ugccuucgggucaaugugc

SEQ ID NO: 208464 - RNA, 19 nt, Artificial Sequence
  Description of Artificial Sequence: Synthetic oligonucleotide
cccuuauuuaauacguugc

SEQ ID NO: 208465 - RNA, 19 nt, Artificial Sequence
  Description of Artificial Sequence: Synthetic oligonucleotide
agcacgaacuuuucugccu

SEQ ID NO: 208466 - RNA, 19 nt, Artificial Sequence
  Description of Artificial Sequence: Synthetic oligonucleotide
gguucuuaaucauugccga

SEQ ID NO: 208467 - RNA, 19 nt, Artificial Sequence
  Description of Artificial Sequence: Synthetic oligonucleotide
gaacaucggguccuauagc

SEQ ID NO: 208468 - RNA, 19 nt, Artificial Sequence
  Description of Artificial Sequence: Synthetic oligonucleotide
uagcacgaacuuuucugcc

SEQ ID NO: 208469 - RNA, 19 nt, Artificial Sequence
  Description of Artificial Sequence: Synthetic oligonucleotide
ugugacacaacaggacaac

SEQ ID NO: 208470 - RNA, 19 nt, Artificial Sequence
  Description of Artificial Sequence: Synthetic oligonucleotide
gauauacguagauuuugcu

SEQ ID NO: 208471 - RNA, 19 nt, Artificial Sequence
  Description of Artificial Sequence: Synthetic oligonucleotide
uugaguauuugaacuuguu

SEQ ID NO: 208472 - RNA, 19 nt, Artificial Sequence
  Description of Artificial Sequence: Synthetic oligonucleotide
gacacaucgcuucgagaug

SEQ ID NO: 208473 - RNA, 19 nt, Artificial Sequence
  Description of Artificial Sequence: Synthetic oligonucleotide
aggguaguugacugcuguc

SEQ ID NO: 208474 - RNA, 19 nt, Artificial Sequence
  Description of Artificial Sequence: Synthetic oligonucleotide
uucauguuggugguuaguu

SEQ ID NO: 208475 - RNA, 19 nt, Artificial Sequence
  Description of Artificial Sequence: Synthetic oligonucleotide
ucuacucuaacugcaccaa

SEQ ID NO: 208476 - RNA, 19 nt, Artificial Sequence
  Description of Artificial Sequence: Synthetic oligonucleotide
ucauugccgauaucagacu

SEQ ID NO: 208477 - RNA, 19 nt, Artificial Sequence
  Description of Artificial Sequence: Synthetic oligonucleotide
acguugcuuacuucacuag

SEQ ID NO: 208478 - RNA, 19 nt, Artificial Sequence
  Description of Artificial Sequence: Synthetic oligonucleotide
agaagaguuaaagcuugca

SEQ ID NO: 208479 - RNA, 19 nt, Artificial Sequence
  Description of Artificial Sequence: Synthetic oligonucleotide
uacccucuugaguauuuga

SEQ ID NO: 208480 - RNA, 19 nt, Artificial Sequence
  Description of Artificial Sequence: Synthetic oligonucleotide
cuuuugaguguugcagacc

SEQ ID NO: 208481 - RNA, 19 nt, Artificial Sequence
  Description of Artificial Sequence: Synthetic oligonucleotide
acagaacuaaccauugcau

SEQ ID NO: 208482 - RNA, 19 nt, Artificial Sequence
  Description of Artificial Sequence: Synthetic oligonucleotide
agugcaaaucgaaaacagu

SEQ ID NO: 208483 - RNA, 19 nt, Artificial Sequence
  Description of Artificial Sequence: Synthetic oligonucleotide
cugguauauggugacauca

SEQ ID NO: 208484 - RNA, 19 nt, Artificial Sequence
  Description of Artificial Sequence: Synthetic oligonucleotide
ucagacuaagcugcggauc

SEQ ID NO: 208485 - RNA, 19 nt, Artificial Sequence
  Description of Artificial Sequence: Synthetic oligonucleotide
cugcuacuaauuaaacaca

SEQ ID NO: 208486 - RNA, 19 nt, Artificial Sequence
  Description of Artificial Sequence: Synthetic oligonucleotide
gccgauaucagacuaagcu

SEQ ID NO: 208487 - RNA, 19 nt, Artificial Sequence
  Description of Artificial Sequence: Synthetic oligonucleotide
ugccuugaacagaacuaac

SEQ ID NO: 208488 - RNA, 19 nt, Artificial Sequence
  Description of Artificial Sequence: Synthetic oligonucleotide
uugcuuucgcuuguucugc

SEQ ID NO: 208489 - RNA, 19 nt, Artificial Sequence
  Description of Artificial Sequence: Synthetic oligonucleotide
guaaguaguuucauuccuc

SEQ ID NO: 208490 - RNA, 19 nt, Artificial Sequence
  Description of Artificial Sequence: Synthetic oligonucleotide
ggaacauuauucuacucua

SEQ ID NO: 208491 - RNA, 19 nt, Artificial Sequence
  Description of Artificial Sequence: Synthetic oligonucleotide
guuagagacgugugauuca

SEQ ID NO: 208492 - RNA, 19 nt, Artificial Sequence
  Description of Artificial Sequence: Synthetic oligonucleotide
cacaguauacagcuuuaca

SEQ ID NO: 208493 - RNA, 19 nt, Artificial Sequence
  Description of Artificial Sequence: Synthetic oligonucleotide
acacaucgcuucgagauga

SEQ ID NO: 208494 - RNA, 19 nt, Artificial Sequence
  Description of Artificial Sequence: Synthetic oligonucleotide
ccgauaucagacuaagcug

SEQ ID NO: 208495 - RNA, 19 nt, Artificial Sequence
  Description of Artificial Sequence: Synthetic oligonucleotide
caauuaguaacacaagguu

SEQ ID NO: 208496 - RNA, 19 nt, Artificial Sequence
  Description of Artificial Sequence: Synthetic oligonucleotide
ugccgauaucagacuaagc

SEQ ID NO: 208497 - RNA, 19 nt, Artificial Sequence
  Description of Artificial Sequence: Synthetic oligonucleotide
gcuacuguaugcuggugug

SEQ ID NO: 208498 - RNA, 19 nt, Artificial Sequence
  Description of Artificial Sequence: Synthetic oligonucleotide
aucagacuaagcugcggau

SEQ ID NO: 208499 - RNA, 19 nt, Artificial Sequence
  Description of Artificial Sequence: Synthetic oligonucleotide
gggaacauuauucuacucu

SEQ ID NO: 208500 - RNA, 19 nt, Artificial Sequence
  Description of Artificial Sequence: Synthetic oligonucleotide
aaguauagcuuggcaccug

SEQ ID NO: 208501 - RNA, 19 nt, Artificial Sequence
  Description of Artificial Sequence: Synthetic oligonucleotide
guuugauacacaugcuccu

SEQ ID NO: 208502 - RNA, 19 nt, Artificial Sequence
  Description of Artificial Sequence: Synthetic oligonucleotide
cuccuaccauugucaaugg

SEQ ID NO: 208503 - RNA, 19 nt, Artificial Sequence
  Description of Artificial Sequence: Synthetic oligonucleotide
gaaugcuuucuaucaauau

SEQ ID NO: 208504 - RNA, 19 nt, Artificial Sequence
  Description of Artificial Sequence: Synthetic oligonucleotide
ucuaugcauugccucuauc

SEQ ID NO: 208505 - RNA, 19 nt, Artificial Sequence
  Description of Artificial Sequence: Synthetic oligonucleotide
uuuggcuaccagagcugga

SEQ ID NO: 208506 - RNA, 19 nt, Artificial Sequence
  Description of Artificial Sequence: Synthetic oligonucleotide
ucuacccucuugaguauuu

SEQ ID NO: 208507 - RNA, 19 nt, Artificial Sequence
  Description of Artificial Sequence: Synthetic oligonucleotide
gggucaaugugcuacaacu

SEQ ID NO: 208508 - RNA, 19 nt, Artificial Sequence
  Description of Artificial Sequence: Synthetic oligonucleotide
caucggguccuauagcaga

SEQ ID NO: 208509 - RNA, 19 nt, Artificial Sequence
  Description of Artificial Sequence: Synthetic oligonucleotide
uagguaccacuuugagcag

SEQ ID NO: 208510 - RNA, 19 nt, Artificial Sequence
  Description of Artificial Sequence: Synthetic oligonucleotide
aggguuagagacgugugau

SEQ ID NO: 208511 - RNA, 19 nt, Artificial Sequence
  Description of Artificial Sequence: Synthetic oligonucleotide
caucgcuucgagaugaagu

SEQ ID NO: 208512 - RNA, 19 nt, Artificial Sequence
  Description of Artificial Sequence: Synthetic oligonucleotide
gacauauuagguccugcau

SEQ ID NO: 208513 - RNA, 19 nt, Artificial Sequence
  Description of Artificial Sequence: Synthetic oligonucleotide
gccuugaacagaacuaacc

SEQ ID NO: 208514 - RNA, 19 nt, Artificial Sequence
  Description of Artificial Sequence: Synthetic oligonucleotide
gauauaccugggaaccaga

SEQ ID NO: 208515 - RNA, 19 nt, Artificial Sequence
  Description of Artificial Sequence: Synthetic oligonucleotide
guaaccaaguagguaccac

SEQ ID NO: 208516 - RNA, 19 nt, Artificial Sequence
  Description of Artificial Sequence: Synthetic oligonucleotide
acugucgucaagaacugua

SEQ ID NO: 208517 - RNA, 19 nt, Artificial Sequence
  Description of Artificial Sequence: Synthetic oligonucleotide
uccacaauaccuggagcau

SEQ ID NO: 208518 - RNA, 19 nt, Artificial Sequence
  Description of Artificial Sequence: Synthetic oligonucleotide
gacaaucaucuuguaacaa

SEQ ID NO: 208519 - RNA, 19 nt, Artificial Sequence
  Description of Artificial Sequence: Synthetic oligonucleotide
agauuccuauaagcugagg

SEQ ID NO: 208520 - RNA, 19 nt, Artificial Sequence
  Description of Artificial Sequence: Synthetic oligonucleotide
acuauauauugaagcuuga

SEQ ID NO: 208521 - RNA, 19 nt, Artificial Sequence
  Description of Artificial Sequence: Synthetic oligonucleotide
aggaacaucggguccuaua

SEQ ID NO: 208522 - RNA, 19 nt, Artificial Sequence
  Description of Artificial Sequence: Synthetic oligonucleotide
agagcggaguuugcagagg

SEQ ID NO: 208523 - RNA, 19 nt, Artificial Sequence
  Description of Artificial Sequence: Synthetic oligonucleotide
uggcucuauuguuucuuuc

SEQ ID NO: 208524 - RNA, 19 nt, Artificial Sequence
  Description of Artificial Sequence: Synthetic oligonucleotide
caaaucgaaaacaguucua

SEQ ID NO: 208525 - RNA, 19 nt, Artificial Sequence
  Description of Artificial Sequence: Synthetic oligonucleotide
guauagcuuggcaccuggg

SEQ ID NO: 208526 - RNA, 19 nt, Artificial Sequence
  Description of Artificial Sequence: Synthetic oligonucleotide
aggaguugccuugaacaga

SEQ ID NO: 208527 - RNA, 19 nt, Artificial Sequence
  Description of Artificial Sequence: Synthetic oligonucleotide
aucggguccuauagcagag

SEQ ID NO: 208528 - RNA, 19 nt, Artificial Sequence
  Description of Artificial Sequence: Synthetic oligonucleotide
ugggacauauuagguccug

SEQ ID NO: 208529 - RNA, 19 nt, Artificial Sequence
  Description of Artificial Sequence: Synthetic oligonucleotide
ccuacuuauagccauuuua

SEQ ID NO: 208530 - RNA, 19 nt, Artificial Sequence
  Description of Artificial Sequence: Synthetic oligonucleotide
auauaccugggaaccagaa

SEQ ID NO: 208531 - RNA, 19 nt, Artificial Sequence
  Description of Artificial Sequence: Synthetic oligonucleotide
acaucgcuucgagaugaag

SEQ ID NO: 208532 - RNA, 19 nt, Artificial Sequence
  Description of Artificial Sequence: Synthetic oligonucleotide
cuuuaugguucacucuucu

SEQ ID NO: 208533 - RNA, 19 nt, Artificial Sequence
  Description of Artificial Sequence: Synthetic oligonucleotide
auauuagguccugcauucu

SEQ ID NO: 208534 - RNA, 19 nt, Artificial Sequence
  Description of Artificial Sequence: Synthetic oligonucleotide
agcugcggaucauucuuaa

SEQ ID NO: 208535 - RNA, 19 nt, Artificial Sequence
  Description of Artificial Sequence: Synthetic oligonucleotide
ggagagcggaguuugcaga

SEQ ID NO: 208536 - RNA, 19 nt, Artificial Sequence
  Description of Artificial Sequence: Synthetic oligonucleotide
caugauauacguagauuuu

SEQ ID NO: 208537 - RNA, 19 nt, Artificial Sequence
  Description of Artificial Sequence: Synthetic oligonucleotide
cauugccgauaucagacua

SEQ ID NO: 208538 - RNA, 19 nt, Artificial Sequence
  Description of Artificial Sequence: Synthetic oligonucleotide
acaaccuaaugaccaccuu

SEQ ID NO: 208539 - RNA, 19 nt, Artificial Sequence
  Description of Artificial Sequence: Synthetic oligonucleotide
uagagacgugugauucaau

SEQ ID NO: 208540 - RNA, 19 nt, Artificial Sequence
  Description of Artificial Sequence: Synthetic oligonucleotide
cuacccucuugaguauuug

SEQ ID NO: 208541 - RNA, 19 nt, Artificial Sequence
  Description of Artificial Sequence: Synthetic oligonucleotide
accuacuuauagccauuuu

SEQ ID NO: 208542 - RNA, 19 nt, Artificial Sequence
  Description of Artificial Sequence: Synthetic oligonucleotide
augcuccuagaagaguuaa

SEQ ID NO: 208543 - RNA, 19 nt, Artificial Sequence
  Description of Artificial Sequence: Synthetic oligonucleotide
ccuauaagcugaggaaaac

SEQ ID NO: 208544 - RNA, 19 nt, Artificial Sequence
  Description of Artificial Sequence: Synthetic oligonucleotide
gggacaacucaauagcuuu

SEQ ID NO: 208545 - RNA, 19 nt, Artificial Sequence
  Description of Artificial Sequence: Synthetic oligonucleotide
cuacucuaacugcaccaaa

SEQ ID NO: 208546 - RNA, 19 nt, Artificial Sequence
  Description of Artificial Sequence: Synthetic oligonucleotide
aagcugcggaucauucuua

SEQ ID NO: 208547 - RNA, 19 nt, Artificial Sequence
  Description of Artificial Sequence: Synthetic oligonucleotide
caaccauaagagccuuuaa

SEQ ID NO: 208548 - RNA, 19 nt, Artificial Sequence
  Description of Artificial Sequence: Synthetic oligonucleotide
gggacauauuagguccugc

SEQ ID NO: 208549 - RNA, 19 nt, Artificial Sequence
  Description of Artificial Sequence: Synthetic oligonucleotide
ccuuauuuaauacguugcu

SEQ ID NO: 208550 - RNA, 19 nt, Artificial Sequence
  Description of Artificial Sequence: Synthetic oligonucleotide
ggcugauuaucacugggau

SEQ ID NO: 208551 - RNA, 19 nt, Artificial Sequence
  Description of Artificial Sequence: Synthetic oligonucleotide
ccaguaguggguaggaacu

SEQ ID NO: 208552 - RNA, 19 nt, Artificial Sequence
  Description of Artificial Sequence: Synthetic oligonucleotide
ucgggucaaugugcuacaa

SEQ ID NO: 208553 - RNA, 19 nt, Artificial Sequence
  Description of Artificial Sequence: Synthetic oligonucleotide
caccuuguuccuuaagguu

SEQ ID NO: 208554 - RNA, 19 nt, Artificial Sequence
  Description of Artificial Sequence: Synthetic oligonucleotide
cggguccuauagcagagcc

SEQ ID NO: 208555 - RNA, 19 nt, Artificial Sequence
  Description of Artificial Sequence: Synthetic oligonucleotide
acaccuacuuauagccauu

SEQ ID NO: 208556 - RNA, 19 nt, Artificial Sequence
  Description of Artificial Sequence: Synthetic oligonucleotide
ggguaguugacugcugucu

SEQ ID NO: 208557 - RNA, 19 nt, Artificial Sequence
  Description of Artificial Sequence: Synthetic oligonucleotide
agacuaagcugcggaucau

SEQ ID NO: 208558 - RNA, 19 nt, Artificial Sequence
  Description of Artificial Sequence: Synthetic oligonucleotide
gguaguugacugcugucuu

SEQ ID NO: 208559 - RNA, 19 nt, Artificial Sequence
  Description of Artificial Sequence: Synthetic oligonucleotide
gacccuuauuuaauacguu

SEQ ID NO: 208560 - RNA, 19 nt, Artificial Sequence
  Description of Artificial Sequence: Synthetic oligonucleotide
caccagacgacugcauaua

SEQ ID NO: 208561 - RNA, 19 nt, Artificial Sequence
  Description of Artificial Sequence: Synthetic oligonucleotide
cuuuaggaugacccuuauu

SEQ ID NO: 208562 - RNA, 19 nt, Artificial Sequence
  Description of Artificial Sequence: Synthetic oligonucleotide
cacucccuguaaccaagua

SEQ ID NO: 208563 - RNA, 19 nt, Artificial Sequence
  Description of Artificial Sequence: Synthetic oligonucleotide
gggcagaccucuaaagagu

SEQ ID NO: 208564 - RNA, 19 nt, Artificial Sequence
  Description of Artificial Sequence: Synthetic oligonucleotide
cacaucgcuucgagaugaa

SEQ ID NO: 208565 - RNA, 19 nt, Artificial Sequence
  Description of Artificial Sequence: Synthetic oligonucleotide
gcugcggaucauucuuaaa

SEQ ID NO: 208566 - RNA, 19 nt, Artificial Sequence
  Description of Artificial Sequence: Synthetic oligonucleotide
caguaguggguaggaacua

SEQ ID NO: 208567 - RNA, 19 nt, Artificial Sequence
  Description of Artificial Sequence: Synthetic oligonucleotide
gguucacucuucucauaau

SEQ ID NO: 208568 - RNA, 19 nt, Artificial Sequence
  Description of Artificial Sequence: Synthetic oligonucleotide
ggucaaugugcuacaacuu

SEQ ID NO: 208569 - RNA, 19 nt, Artificial Sequence
  Description of Artificial Sequence: Synthetic oligonucleotide
ggacaacucaauagcuuuu

SEQ ID NO: 208570 - RNA, 19 nt, Artificial Sequence
  Description of Artificial Sequence: Synthetic oligonucleotide
caccuacuuauagccauuu

SEQ ID NO: 208571 - RNA, 19 nt, Artificial Sequence
  Description of Artificial Sequence: Synthetic oligonucleotide
ccacaauaccuggagcaua

SEQ ID NO: 208572 - RNA, 19 nt, Artificial Sequence
  Description of Artificial Sequence: Synthetic oligonucleotide
gaggaacaucggguccuau

SEQ ID NO: 208573 - RNA, 19 nt, Artificial Sequence
  Description of Artificial Sequence: Synthetic oligonucleotide
cccuaugccuugauggguu

SEQ ID NO: 208574 - RNA, 19 nt, Artificial Sequence
  Description of Artificial Sequence: Synthetic oligonucleotide
cacugucgucaagaacugu

SEQ ID NO: 208575 - RNA, 19 nt, Artificial Sequence
  Description of Artificial Sequence: Synthetic oligonucleotide
gcccuaugccuugaugggu

SEQ ID NO: 208576 - RNA, 19 nt, Artificial Sequence
  Description of Artificial Sequence: Synthetic oligonucleotide
ggugguuaguuaggagauu

SEQ ID NO: 208577 - RNA, 19 nt, Artificial Sequence
  Description of Artificial Sequence: Synthetic oligonucleotide
ccuaugccuugauggguuu

SEQ ID NO: 208578 - RNA, 19 nt, Artificial Sequence
  Description of Artificial Sequence: Synthetic oligonucleotide
ugaugcacaaauaaaaugg

SEQ ID NO: 208579 - RNA, 19 nt, Artificial Sequence
  Description of Artificial Sequence: Synthetic oligonucleotide
uuucacuagaaaaucaugg

SEQ ID NO: 208580 - RNA, 19 nt, Artificial Sequence
  Description of Artificial Sequence: Synthetic oligonucleotide
aguauugagaaucuuugcc

SEQ ID NO: 208581 - RNA, 19 nt, Artificial Sequence
  Description of Artificial Sequence: Synthetic oligonucleotide
guaucaaugauacaguacg

SEQ ID NO: 208582 - RNA, 19 nt, Artificial Sequence
  Description of Artificial Sequence: Synthetic oligonucleotide
uuaguaacagucauauucg

SEQ ID NO: 208583 - RNA, 19 nt, Artificial Sequence
  Description of Artificial Sequence: Synthetic oligonucleotide
aauaccgaguuccaucagc

SEQ ID NO: 208584 - RNA, 19 nt, Artificial Sequence
  Description of Artificial Sequence: Synthetic oligonucleotide
aacucgguuaaauauauca

SEQ ID NO: 208585 - RNA, 19 nt, Artificial Sequence
  Description of Artificial Sequence: Synthetic oligonucleotide
acuaucauaaguuuaagaa

SEQ ID NO: 208586 - RNA, 19 nt, Artificial Sequence
  Description of Artificial Sequence: Synthetic oligonucleotide
uauaucuuaagccugcgcu

SEQ ID NO: 208587 - RNA, 19 nt, Artificial Sequence
  Description of Artificial Sequence: Synthetic oligonucleotide
uuaccuaaagcgauuaaag

SEQ ID NO: 208588 - RNA, 19 nt, Artificial Sequence
  Description of Artificial Sequence: Synthetic oligonucleotide
aauggaauuagcaaguaug

SEQ ID NO: 208589 - RNA, 19 nt, Artificial Sequence
  Description of Artificial Sequence: Synthetic oligonucleotide
uguuaaacgcauaagcagc

SEQ ID NO: 208590 - RNA, 19 nt, Artificial Sequence
  Description of Artificial Sequence: Synthetic oligonucleotide
uaucauaaguuuaagaaua

SEQ ID NO: 208591 - RNA, 19 nt, Artificial Sequence
  Description of Artificial Sequence: Synthetic oligonucleotide
ucuguuaaacgcauaagca

SEQ ID NO: 208592 - RNA, 19 nt, Artificial Sequence
  Description of Artificial Sequence: Synthetic oligonucleotide
caaugauacaguacgaugc

SEQ ID NO: 208593 - RNA, 19 nt, Artificial Sequence
  Description of Artificial Sequence: Synthetic oligonucleotide
guuuugacuaucauaaggg

SEQ ID NO: 208594 - RNA, 19 nt, Artificial Sequence
  Description of Artificial Sequence: Synthetic oligonucleotide
uuauuauuauuauuuauua

SEQ ID NO: 208595 - RNA, 19 nt, Artificial Sequence
  Description of Artificial Sequence: Synthetic oligonucleotide
uguacuuaaagguacucac

SEQ ID NO: 208596 - RNA, 19 nt, Artificial Sequence
  Description of Artificial Sequence: Synthetic oligonucleotide
uaacucuuaguacuacugg

SEQ ID NO: 208597 - RNA, 19 nt, Artificial Sequence
  Description of Artificial Sequence: Synthetic oligonucleotide
uccagcauuaacauaaauc

SEQ ID NO: 208598 - RNA, 19 nt, Artificial Sequence
  Description of Artificial Sequence: Synthetic oligonucleotide
uuuucuagcaauaccgagu

SEQ ID NO: 208599 - RNA, 19 nt, Artificial Sequence
  Description of Artificial Sequence: Synthetic oligonucleotide
caaauuaaucaccugcugc

SEQ ID NO: 208600 - RNA, 19 nt, Artificial Sequence
  Description of Artificial Sequence: Synthetic oligonucleotide
aguacuacuggguauauau

SEQ ID NO: 208601 - RNA, 19 nt, Artificial Sequence
  Description of Artificial Sequence: Synthetic oligonucleotide
uuaacugacuccuguagcc

SEQ ID NO: 208602 - RNA, 19 nt, Artificial Sequence
  Description of Artificial Sequence: Synthetic oligonucleotide
uuuaacugacuccuguagc

SEQ ID NO: 208603 - RNA, 19 nt, Artificial Sequence
  Description of Artificial Sequence: Synthetic oligonucleotide
aguacgaugcucauuauuc

SEQ ID NO: 208604 - RNA, 19 nt, Artificial Sequence
  Description of Artificial Sequence: Synthetic oligonucleotide
cucuguuaaacgcauaagc

SEQ ID NO: 208605 - RNA, 19 nt, Artificial Sequence
  Description of Artificial Sequence: Synthetic oligonucleotide
ugauacaguacgaugcuca

SEQ ID NO: 208606 - RNA, 19 nt, Artificial Sequence
  Description of Artificial Sequence: Synthetic oligonucleotide
aacuaucauaaguuuaaga

SEQ ID NO: 208607 - RNA, 19 nt, Artificial Sequence
  Description of Artificial Sequence: Synthetic oligonucleotide
uagugauagucauucaucc

SEQ ID NO: 208608 - RNA, 19 nt, Artificial Sequence
  Description of Artificial Sequence: Synthetic oligonucleotide
guaaguaucgcucauuauc

SEQ ID NO: 208609 - RNA, 19 nt, Artificial Sequence
  Description of Artificial Sequence: Synthetic oligonucleotide
gaauaguuuacaaggugcg

SEQ ID NO: 208610 - RNA, 19 nt, Artificial Sequence
  Description of Artificial Sequence: Synthetic oligonucleotide
uacaguacgaugcucauua

SEQ ID NO: 208611 - RNA, 19 nt, Artificial Sequence
  Description of Artificial Sequence: Synthetic oligonucleotide
agucacucaaaauagggga

SEQ ID NO: 208612 - RNA, 19 nt, Artificial Sequence
  Description of Artificial Sequence: Synthetic oligonucleotide
uuauucgaaucucacugcc

SEQ ID NO: 208613 - RNA, 19 nt, Artificial Sequence
  Description of Artificial Sequence: Synthetic oligonucleotide
ucgaccuucaccgaucugg

SEQ ID NO: 208614 - RNA, 19 nt, Artificial Sequence
  Description of Artificial Sequence: Synthetic oligonucleotide
auuaggagaagcccuuuuc

SEQ ID NO: 208615 - RNA, 19 nt, Artificial Sequence
  Description of Artificial Sequence: Synthetic oligonucleotide
aaacuauacucuugcuauc

SEQ ID NO: 208616 - RNA, 19 nt, Artificial Sequence
  Description of Artificial Sequence: Synthetic oligonucleotide
ucugaauuaggagaagccc

SEQ ID NO: 208617 - RNA, 19 nt, Artificial Sequence
  Description of Artificial Sequence: Synthetic oligonucleotide
aaaguacuuucuguaacuc

SEQ ID NO: 208618 - RNA, 19 nt, Artificial Sequence
  Description of Artificial Sequence: Synthetic oligonucleotide
aaaaggaguuucaaaaccu

SEQ ID NO: 208619 - RNA, 19 nt, Artificial Sequence
  Description of Artificial Sequence: Synthetic oligonucleotide
ucuacuacaaagccaccga

SEQ ID NO: 208620 - RNA, 19 nt, Artificial Sequence
  Description of Artificial Sequence: Synthetic oligonucleotide
ucucaaccaaacaaaguac

SEQ ID NO: 208621 - RNA, 19 nt, Artificial Sequence
  Description of Artificial Sequence: Synthetic oligonucleotide
uaccuaaagcgauuaaagc

SEQ ID NO: 208622 - RNA, 19 nt, Artificial Sequence
  Description of Artificial Sequence: Synthetic oligonucleotide
uucacuagaaaaucauggu

SEQ ID NO: 208623 - RNA, 19 nt, Artificial Sequence
  Description of Artificial Sequence: Synthetic oligonucleotide
ucgguuaaauauaucagua

SEQ ID NO: 208624 - RNA, 19 nt, Artificial Sequence
  Description of Artificial Sequence: Synthetic oligonucleotide
aucugaauuaggagaagcc

SEQ ID NO: 208625 - RNA, 19 nt, Artificial Sequence
  Description of Artificial Sequence: Synthetic oligonucleotide
uguagccauacucugaaua

SEQ ID NO: 208626 - RNA, 19 nt, Artificial Sequence
  Description of Artificial Sequence: Synthetic oligonucleotide
uuugacuaucauaaggguu

SEQ ID NO: 208627 - RNA, 19 nt, Artificial Sequence
  Description of Artificial Sequence: Synthetic oligonucleotide
ucacgaauaauaucucugu

SEQ ID NO: 208628 - RNA, 19 nt, Artificial Sequence
  Description of Artificial Sequence: Synthetic oligonucleotide
auugccacgcccaacaauc

SEQ ID NO: 208629 - RNA, 19 nt, Artificial Sequence
  Description of Artificial Sequence: Synthetic oligonucleotide
aacuuaaaccugaagacaa

SEQ ID NO: 208630 - RNA, 19 nt, Artificial Sequence
  Description of Artificial Sequence: Synthetic oligonucleotide
cuuauucgaaucucacugc

SEQ ID NO: 208631 - RNA, 19 nt, Artificial Sequence
  Description of Artificial Sequence: Synthetic oligonucleotide
ucuugccucggcuacaggc

SEQ ID NO: 208632 - RNA, 19 nt, Artificial Sequence
  Description of Artificial Sequence: Synthetic oligonucleotide
uucccuacuccaauaagga

SEQ ID NO: 208633 - RNA, 19 nt, Artificial Sequence
  Description of Artificial Sequence: Synthetic oligonucleotide
aggaauaguuuacaaggug

SEQ ID NO: 208634 - RNA, 19 nt, Artificial Sequence
  Description of Artificial Sequence: Synthetic oligonucleotide
aguagugauagucauucau

SEQ ID NO: 208635 - RNA, 19 nt, Artificial Sequence
  Description of Artificial Sequence: Synthetic oligonucleotide
ugauugugucaucacacac

SEQ ID NO: 208636 - RNA, 19 nt, Artificial Sequence
  Description of Artificial Sequence: Synthetic oligonucleotide
uucucuuauucgaaucuca

SEQ ID NO: 208637 - RNA, 19 nt, Artificial Sequence
  Description of Artificial Sequence: Synthetic oligonucleotide
auaucuuaagccugcgcug

SEQ ID NO: 208638 - RNA, 19 nt, Artificial Sequence
  Description of Artificial Sequence: Synthetic oligonucleotide
aaggguuccuaaauuaaug

SEQ ID NO: 208639 - RNA, 19 nt, Artificial Sequence
  Description of Artificial Sequence: Synthetic oligonucleotide
aacuauacucuugcuauca

SEQ ID NO: 208640 - RNA, 19 nt, Artificial Sequence
  Description of Artificial Sequence: Synthetic oligonucleotide
auguauaucuuaagccugc

SEQ ID NO: 208641 - RNA, 19 nt, Artificial Sequence
  Description of Artificial Sequence: Synthetic oligonucleotide
gaguauugagaaucuuugc

SEQ ID NO: 208642 - RNA, 19 nt, Artificial Sequence
  Description of Artificial Sequence: Synthetic oligonucleotide
uaucaaugauacaguacga

SEQ ID NO: 208643 - RNA, 19 nt, Artificial Sequence
  Description of Artificial Sequence: Synthetic oligonucleotide
ugaucucuacugauccggg

SEQ ID NO: 208644 - RNA, 19 nt, Artificial Sequence
  Description of Artificial Sequence: Synthetic oligonucleotide
auauucguaagcaaucuga

SEQ ID NO: 208645 - RNA, 19 nt, Artificial Sequence
  Description of Artificial Sequence: Synthetic oligonucleotide
guagccauacucugaauac

SEQ ID NO: 208646 - RNA, 19 nt, Artificial Sequence
  Description of Artificial Sequence: Synthetic oligonucleotide
uuucuaauugcugcuauau

SEQ ID NO: 208647 - RNA, 19 nt, Artificial Sequence
  Description of Artificial Sequence: Synthetic oligonucleotide
acgaauaauaucucuguua

SEQ ID NO: 208648 - RNA, 19 nt, Artificial Sequence
  Description of Artificial Sequence: Synthetic oligonucleotide
ucggcuacaggcccgcccg

SEQ ID NO: 208649 - RNA, 19 nt, Artificial Sequence
  Description of Artificial Sequence: Synthetic oligonucleotide
aucauaaggguuccuaaau

SEQ ID NO: 208650 - RNA, 19 nt, Artificial Sequence
  Description of Artificial Sequence: Synthetic oligonucleotide
aaaucgaccuucaccgauc

SEQ ID NO: 208651 - RNA, 19 nt, Artificial Sequence
  Description of Artificial Sequence: Synthetic oligonucleotide
auaacucuuaguacuacug

SEQ ID NO: 208652 - RNA, 19 nt, Artificial Sequence
  Description of Artificial Sequence: Synthetic oligonucleotide
aaugggaucccgaguauug

SEQ ID NO: 208653 - RNA, 19 nt, Artificial Sequence
  Description of Artificial Sequence: Synthetic oligonucleotide
cuaauugcugcuauaugca

SEQ ID NO: 208654 - RNA, 19 nt, Artificial Sequence
  Description of Artificial Sequence: Synthetic oligonucleotide
auauaacucuuaguacuac

SEQ ID NO: 208655 - RNA, 19 nt, Artificial Sequence
  Description of Artificial Sequence: Synthetic oligonucleotide
ucaauacuacaucugugua

SEQ ID NO: 208656 - RNA, 19 nt, Artificial Sequence
  Description of Artificial Sequence: Synthetic oligonucleotide
aaagguaaccaaaacccau

SEQ ID NO: 208657 - RNA, 19 nt, Artificial Sequence
  Description of Artificial Sequence: Synthetic oligonucleotide
aauaguuuacaaggugcgu

SEQ ID NO: 208658 - RNA, 19 nt, Artificial Sequence
  Description of Artificial Sequence: Synthetic oligonucleotide
gcuauaugcaagaauagug

SEQ ID NO: 208659 - RNA, 19 nt, Artificial Sequence
  Description of Artificial Sequence: Synthetic oligonucleotide
agaacuaucauaaguuuaa

SEQ ID NO: 208660 - RNA, 19 nt, Artificial Sequence
  Description of Artificial Sequence: Synthetic oligonucleotide
cugaucucuacugauccgg

SEQ ID NO: 208661 - RNA, 19 nt, Artificial Sequence
  Description of Artificial Sequence: Synthetic oligonucleotide
uguauaucuuaagccugcg

SEQ ID NO: 208662 - RNA, 19 nt, Artificial Sequence
  Description of Artificial Sequence: Synthetic oligonucleotide
agcgauuaaagcugcuuca

SEQ ID NO: 208663 - RNA, 19 nt, Artificial Sequence
  Description of Artificial Sequence: Synthetic oligonucleotide
gcuaucauuacugucauca

SEQ ID NO: 208664 - RNA, 19 nt, Artificial Sequence
  Description of Artificial Sequence: Synthetic oligonucleotide
aggccaguguaacugguuc

SEQ ID NO: 208665 - RNA, 19 nt, Artificial Sequence
  Description of Artificial Sequence: Synthetic oligonucleotide
agucuggucucauggaaug

SEQ ID NO: 208666 - RNA, 19 nt, Artificial Sequence
  Description of Artificial Sequence: Synthetic oligonucleotide
aucacgaauaauaucucug

SEQ ID NO: 208667 - RNA, 19 nt, Artificial Sequence
  Description of Artificial Sequence: Synthetic oligonucleotide
auuaccuaaagcgauuaaa

SEQ ID NO: 208668 - RNA, 19 nt, Artificial Sequence
  Description of Artificial Sequence: Synthetic oligonucleotide
uggguauauauaauuccau

SEQ ID NO: 208669 - RNA, 19 nt, Artificial Sequence
  Description of Artificial Sequence: Synthetic oligonucleotide
aaucgaccuucaccgaucu

SEQ ID NO: 208670 - RNA, 19 nt, Artificial Sequence
  Description of Artificial Sequence: Synthetic oligonucleotide
aucucuacugauccgggga

SEQ ID NO: 208671 - RNA, 19 nt, Artificial Sequence
  Description of Artificial Sequence: Synthetic oligonucleotide
cuugccucggcuacaggcc

SEQ ID NO: 208672 - RNA, 19 nt, Artificial Sequence
  Description of Artificial Sequence: Synthetic oligonucleotide
ugcguugcugcucuacuac

SEQ ID NO: 208673 - RNA, 19 nt, Artificial Sequence
  Description of Artificial Sequence: Synthetic oligonucleotide
aauagaguagucacucaaa

SEQ ID NO: 208674 - RNA, 19 nt, Artificial Sequence
  Description of Artificial Sequence: Synthetic oligonucleotide
agugauagucauucaucca

SEQ ID NO: 208675 - RNA, 19 nt, Artificial Sequence
  Description of Artificial Sequence: Synthetic oligonucleotide
ugcgaauuucccaacuuuu

SEQ ID NO: 208676 - RNA, 19 nt, Artificial Sequence
  Description of Artificial Sequence: Synthetic oligonucleotide
ugcaagaauagugaagcua

SEQ ID NO: 208677 - RNA, 19 nt, Artificial Sequence
  Description of Artificial Sequence: Synthetic oligonucleotide
ucuacugauccggggaaag

SEQ ID NO: 208678 - RNA, 19 nt, Artificial Sequence
  Description of Artificial Sequence: Synthetic oligonucleotide
ucgcucauuaucuuucauc

SEQ ID NO: 208679 - RNA, 19 nt, Artificial Sequence
  Description of Artificial Sequence: Synthetic oligonucleotide
aguucucuagucauggcug

SEQ ID NO: 208680 - RNA, 19 nt, Artificial Sequence
  Description of Artificial Sequence: Synthetic oligonucleotide
uaucuuaagccugcgcuga

SEQ ID NO: 208681 - RNA, 19 nt, Artificial Sequence
  Description of Artificial Sequence: Synthetic oligonucleotide
cugauacucauuaguaaca

SEQ ID NO: 208682 - RNA, 19 nt, Artificial Sequence
  Description of Artificial Sequence: Synthetic oligonucleotide
aaucgucccugacgacagc

SEQ ID NO: 208683 - RNA, 19 nt, Artificial Sequence
  Description of Artificial Sequence: Synthetic oligonucleotide
uacgaugcucauuauucaa

SEQ ID NO: 208684 - RNA, 19 nt, Artificial Sequence
  Description of Artificial Sequence: Synthetic oligonucleotide
ucaccgaucugguuaauuu

SEQ ID NO: 208685 - RNA, 19 nt, Artificial Sequence
  Description of Artificial Sequence: Synthetic oligonucleotide
aagaauagugaagcuacuu

SEQ ID NO: 208686 - RNA, 19 nt, Artificial Sequence
  Description of Artificial Sequence: Synthetic oligonucleotide
agggauccgggacaauuuc

SEQ ID NO: 208687 - RNA, 19 nt, Artificial Sequence
  Description of Artificial Sequence: Synthetic oligonucleotide
gcaagaauagugaagcuac

SEQ ID NO: 208688 - RNA, 19 nt, Artificial Sequence
  Description of Artificial Sequence: Synthetic oligonucleotide
ugggaucccgaguauugag

SEQ ID NO: 208689 - RNA, 19 nt, Artificial Sequence
  Description of Artificial Sequence: Synthetic oligonucleotide
acgcccaacaaucuuucug

SEQ ID NO: 208690 - RNA, 19 nt, Artificial Sequence
  Description of Artificial Sequence: Synthetic oligonucleotide
caaucgucccugacgacag

SEQ ID NO: 208691 - RNA, 19 nt, Artificial Sequence
  Description of Artificial Sequence: Synthetic oligonucleotide
uuauaccuggccccagaac

SEQ ID NO: 208692 - RNA, 19 nt, Artificial Sequence
  Description of Artificial Sequence: Synthetic oligonucleotide
guauaucuuaagccugcgc

SEQ ID NO: 208693 - RNA, 19 nt, Artificial Sequence
  Description of Artificial Sequence: Synthetic oligonucleotide
accuucaccgaucugguua

SEQ ID NO: 208694 - RNA, 19 nt, Artificial Sequence
  Description of Artificial Sequence: Synthetic oligonucleotide
aguaucgcucauuaucuuu

SEQ ID NO: 208695 - RNA, 19 nt, Artificial Sequence
  Description of Artificial Sequence: Synthetic oligonucleotide
ucuggucucauggaaugca

SEQ ID NO: 208696 - RNA, 19 nt, Artificial Sequence
  Description of Artificial Sequence: Synthetic oligonucleotide
uauuaccuaaagcgauuaa

SEQ ID NO: 208697 - RNA, 19 nt, Artificial Sequence
  Description of Artificial Sequence: Synthetic oligonucleotide
aauguaugaugaaaaucuu

SEQ ID NO: 208698 - RNA, 19 nt, Artificial Sequence
  Description of Artificial Sequence: Synthetic oligonucleotide
gaaguucucuagucauggc

SEQ ID NO: 208699 - RNA, 19 nt, Artificial Sequence
  Description of Artificial Sequence: Synthetic oligonucleotide
ggaaagacugcagggaucc

SEQ ID NO: 208700 - RNA, 19 nt, Artificial Sequence
  Description of Artificial Sequence: Synthetic oligonucleotide
ugguaccacaaccuacgga

SEQ ID NO: 208701 - RNA, 19 nt, Artificial Sequence
  Description of Artificial Sequence: Synthetic oligonucleotide
ggguuccuaaauuaaugcc

SEQ ID NO: 208702 - RNA, 19 nt, Artificial Sequence
  Description of Artificial Sequence: Synthetic oligonucleotide
aaacucgguuaaauauauc

SEQ ID NO: 208703 - RNA, 19 nt, Artificial Sequence
  Description of Artificial Sequence: Synthetic oligonucleotide
auuauaccuggccccagaa

SEQ ID NO: 208704 - RNA, 19 nt, Artificial Sequence
  Description of Artificial Sequence: Synthetic oligonucleotide
guuaaacgcauaagcagca

SEQ ID NO: 208705 - RNA, 19 nt, Artificial Sequence
  Description of Artificial Sequence: Synthetic oligonucleotide
caacuuaaaccugaagaca

SEQ ID NO: 208706 - RNA, 19 nt, Artificial Sequence
  Description of Artificial Sequence: Synthetic oligonucleotide
cucgguuaaauauaucagu

SEQ ID NO: 208707 - RNA, 19 nt, Artificial Sequence
  Description of Artificial Sequence: Synthetic oligonucleotide
acaaacucgguuaaauaua

SEQ ID NO: 208708 - RNA, 19 nt, Artificial Sequence
  Description of Artificial Sequence: Synthetic oligonucleotide
guacgaugcucauuauuca

SEQ ID NO: 208709 - RNA, 19 nt, Artificial Sequence
  Description of Artificial Sequence: Synthetic oligonucleotide
cgaguauugagaaucuuug

SEQ ID NO: 208710 - RNA, 19 nt, Artificial Sequence
  Description of Artificial Sequence: Synthetic oligonucleotide
ucccuacuccaauaaggac

SEQ ID NO: 208711 - RNA, 19 nt, Artificial Sequence
  Description of Artificial Sequence: Synthetic oligonucleotide
guaccaaacuauacucuug

SEQ ID NO: 208712 - RNA, 19 nt, Artificial Sequence
  Description of Artificial Sequence: Synthetic oligonucleotide
cuucagugccaauccgggc

SEQ ID NO: 208713 - RNA, 19 nt, Artificial Sequence
  Description of Artificial Sequence: Synthetic oligonucleotide
ucccgaguauugagaaucu

SEQ ID NO: 208714 - RNA, 19 nt, Artificial Sequence
  Description of Artificial Sequence: Synthetic oligonucleotide
cgugguaccacaaccuacg

SEQ ID NO: 208715 - RNA, 19 nt, Artificial Sequence
  Description of Artificial Sequence: Synthetic oligonucleotide
guggguaccaaacuauacu

SEQ ID NO: 208716 - RNA, 19 nt, Artificial Sequence
  Description of Artificial Sequence: Synthetic oligonucleotide
agccagauucaaaaggagu

SEQ ID NO: 208717 - RNA, 19 nt, Artificial Sequence
  Description of Artificial Sequence: Synthetic oligonucleotide
ucgucccugacgacagcag

SEQ ID NO: 208718 - RNA, 19 nt, Artificial Sequence
  Description of Artificial Sequence: Synthetic oligonucleotide
aaccuacggaaagacugca

SEQ ID NO: 208719 - RNA, 19 nt, Artificial Sequence
  Description of Artificial Sequence: Synthetic oligonucleotide
gugguaccacaaccuacgg

SEQ ID NO: 208720 - RNA, 19 nt, Artificial Sequence
  Description of Artificial Sequence: Synthetic oligonucleotide
aauccgggcccaagguggg

SEQ ID NO: 208721 - RNA, 19 nt, Artificial Sequence
  Description of Artificial Sequence: Synthetic oligonucleotide
guacuuaaagguacucaca

SEQ ID NO: 208722 - RNA, 19 nt, Artificial Sequence
  Description of Artificial Sequence: Synthetic oligonucleotide
aucuuucauccaaauauaa

SEQ ID NO: 208723 - RNA, 19 nt, Artificial Sequence
  Description of Artificial Sequence: Synthetic oligonucleotide
cugugagguauugccacgc

SEQ ID NO: 208724 - RNA, 19 nt, Artificial Sequence
  Description of Artificial Sequence: Synthetic oligonucleotide
cagaccagucauuauaccu

SEQ ID NO: 208725 - RNA, 19 nt, Artificial Sequence
  Description of Artificial Sequence: Synthetic oligonucleotide
acuacuggguauauauaau

SEQ ID NO: 208726 - RNA, 19 nt, Artificial Sequence
  Description of Artificial Sequence: Synthetic oligonucleotide
gccaccgaguuauuccugg

SEQ ID NO: 208727 - RNA, 19 nt, Artificial Sequence
  Description of Artificial Sequence: Synthetic oligonucleotide
uucgggccuaagugcaggc

SEQ ID NO: 208728 - RNA, 19 nt, Artificial Sequence
  Description of Artificial Sequence: Synthetic oligonucleotide
caaacucgguuaaauauau

SEQ ID NO: 208729 - RNA, 19 nt, Artificial Sequence
  Description of Artificial Sequence: Synthetic oligonucleotide
guaagcaaucugaggccag

SEQ ID NO: 208730 - RNA, 19 nt, Artificial Sequence
  Description of Artificial Sequence: Synthetic oligonucleotide
cuucgggccuaagugcagg

SEQ ID NO: 208731 - RNA, 19 nt, Artificial Sequence
  Description of Artificial Sequence: Synthetic oligonucleotide
ggguauauauaauuccaua

SEQ ID NO: 208732 - RNA, 19 nt, Artificial Sequence
  Description of Artificial Sequence: Synthetic oligonucleotide
uaucucuguuaaacgcaua

SEQ ID NO: 208733 - RNA, 19 nt, Artificial Sequence
  Description of Artificial Sequence: Synthetic oligonucleotide
gguuccuaaauuaaugccu

SEQ ID NO: 208734 - RNA, 19 nt, Artificial Sequence
  Description of Artificial Sequence: Synthetic oligonucleotide
cucuuaguacuacugggua

SEQ ID NO: 208735 - RNA, 19 nt, Artificial Sequence
  Description of Artificial Sequence: Synthetic oligonucleotide
gaaagacugcagggauccg

SEQ ID NO: 208736 - RNA, 19 nt, Artificial Sequence
  Description of Artificial Sequence: Synthetic oligonucleotide
cgaauaauaucucuguuaa

SEQ ID NO: 208737 - RNA, 19 nt, Artificial Sequence
  Description of Artificial Sequence: Synthetic oligonucleotide
guggaagcguuagaccacc

SEQ ID NO: 208738 - RNA, 19 nt, Artificial Sequence
  Description of Artificial Sequence: Synthetic oligonucleotide
uggcguagcccaugcaauc

SEQ ID NO: 208739 - RNA, 19 nt, Artificial Sequence
  Description of Artificial Sequence: Synthetic oligonucleotide
uaggacaauuaaagccuuu

SEQ ID NO: 208740 - RNA, 19 nt, Artificial Sequence
  Description of Artificial Sequence: Synthetic oligonucleotide
uggcucuagcucugguccc

SEQ ID NO: 208741 - RNA, 19 nt, Artificial Sequence
  Description of Artificial Sequence: Synthetic oligonucleotide
gggccuaaauauuucccac

SEQ ID NO: 208742 - RNA, 19 nt, Artificial Sequence
  Description of Artificial Sequence: Synthetic oligonucleotide
uugccacgcccaacaaucu

SEQ ID NO: 208743 - RNA, 19 nt, Artificial Sequence
  Description of Artificial Sequence: Synthetic oligonucleotide
ggggccuaaauauuuccca

SEQ ID NO: 208744 - RNA, 19 nt, Artificial Sequence
  Description of Artificial Sequence: Synthetic oligonucleotide
aacauccgcucaguaaguu

SEQ ID NO: 208745 - RNA, 19 nt, Artificial Sequence
  Description of Artificial Sequence: Synthetic oligonucleotide
aucgucagaccagucauua

SEQ ID NO: 208746 - RNA, 19 nt, Artificial Sequence
  Description of Artificial Sequence: Synthetic oligonucleotide
gucauuauaccuggcccca

SEQ ID NO: 208747 - RNA, 19 nt, Artificial Sequence
  Description of Artificial Sequence: Synthetic oligonucleotide
acgcauaagcagcauuauu

SEQ ID NO: 208748 - RNA, 19 nt, Artificial Sequence
  Description of Artificial Sequence: Synthetic oligonucleotide
cagacccucaaaucgaccu

SEQ ID NO: 208749 - RNA, 19 nt, Artificial Sequence
  Description of Artificial Sequence: Synthetic oligonucleotide
aggugcguugcugcucuac

SEQ ID NO: 208750 - RNA, 19 nt, Artificial Sequence
  Description of Artificial Sequence: Synthetic oligonucleotide
acauuucuaauugcugcua

SEQ ID NO: 208751 - RNA, 19 nt, Artificial Sequence
  Description of Artificial Sequence: Synthetic oligonucleotide
cucggcuacaggcccgccc

SEQ ID NO: 208752 - RNA, 19 nt, Artificial Sequence
  Description of Artificial Sequence: Synthetic oligonucleotide
ucaguaaguuuggcugcga

SEQ ID NO: 208753 - RNA, 19 nt, Artificial Sequence
  Description of Artificial Sequence: Synthetic oligonucleotide
ugggaacauccgcucagua

SEQ ID NO: 208754 - RNA, 19 nt, Artificial Sequence
  Description of Artificial Sequence: Synthetic oligonucleotide
acgaugcucauuauucaaa

SEQ ID NO: 208755 - RNA, 19 nt, Artificial Sequence
  Description of Artificial Sequence: Synthetic oligonucleotide
cuacuggguauauauaauu

SEQ ID NO: 208756 - RNA, 19 nt, Artificial Sequence
  Description of Artificial Sequence: Synthetic oligonucleotide
gauccggggaaaguuccuc

SEQ ID NO: 208757 - RNA, 19 nt, Artificial Sequence
  Description of Artificial Sequence: Synthetic oligonucleotide
aucgucccugacgacagca

SEQ ID NO: 208758 - RNA, 19 nt, Artificial Sequence
  Description of Artificial Sequence: Synthetic oligonucleotide
aucgcucauuaucuuucau

SEQ ID NO: 208759 - RNA, 19 nt, Artificial Sequence
  Description of Artificial Sequence: Synthetic oligonucleotide
gugauucugagcgggcuca

SEQ ID NO: 208760 - RNA, 19 nt, Artificial Sequence
  Description of Artificial Sequence: Synthetic oligonucleotide
caucucaaccaaacaaagu

SEQ ID NO: 208761 - RNA, 19 nt, Artificial Sequence
  Description of Artificial Sequence: Synthetic oligonucleotide
agacccucaaaucgaccuu

SEQ ID NO: 208762 - RNA, 19 nt, Artificial Sequence
  Description of Artificial Sequence: Synthetic oligonucleotide
uuaagccugcgcugauuuu

SEQ ID NO: 208763 - RNA, 19 nt, Artificial Sequence
  Description of Artificial Sequence: Synthetic oligonucleotide
gguggguaccaaacuauac

SEQ ID NO: 208764 - RNA, 19 nt, Artificial Sequence
  Description of Artificial Sequence: Synthetic oligonucleotide
uucaccgaucugguuaauu

SEQ ID NO: 208765 - RNA, 19 nt, Artificial Sequence
  Description of Artificial Sequence: Synthetic oligonucleotide
cacucaaaauaggggaaga

SEQ ID NO: 208766 - RNA, 19 nt, Artificial Sequence
  Description of Artificial Sequence: Synthetic oligonucleotide
aacuucccuugcucaguua

SEQ ID NO: 208767 - RNA, 19 nt, Artificial Sequence
  Description of Artificial Sequence: Synthetic oligonucleotide
accuacggaaagacugcag

SEQ ID NO: 208768 - RNA, 19 nt, Artificial Sequence
  Description of Artificial Sequence: Synthetic oligonucleotide
cuuuggggccuaaauauuu

SEQ ID NO: 208769 - RNA, 19 nt, Artificial Sequence
  Description of Artificial Sequence: Synthetic oligonucleotide
ucgucagaccagucauuau

SEQ ID NO: 208770 - RNA, 19 nt, Artificial Sequence
  Description of Artificial Sequence: Synthetic oligonucleotide
gggaacauccgcucaguaa

SEQ ID NO: 208771 - RNA, 19 nt, Artificial Sequence
  Description of Artificial Sequence: Synthetic oligonucleotide
ucgggccuaagugcaggcc

SEQ ID NO: 208772 - RNA, 19 nt, Artificial Sequence
  Description of Artificial Sequence: Synthetic oligonucleotide
ugccacgcccaacaaucuu

SEQ ID NO: 208773 - RNA, 19 nt, Artificial Sequence
  Description of Artificial Sequence: Synthetic oligonucleotide
gcaaucgucccugacgaca

SEQ ID NO: 208774 - RNA, 19 nt, Artificial Sequence
  Description of Artificial Sequence: Synthetic oligonucleotide
gguaccaaacuauacucuu

SEQ ID NO: 208775 - RNA, 19 nt, Artificial Sequence
  Description of Artificial Sequence: Synthetic oligonucleotide
cuuaagccugcgcugauuu

SEQ ID NO: 208776 - RNA, 19 nt, Artificial Sequence
  Description of Artificial Sequence: Synthetic oligonucleotide
cgauuaaagcugcuucaag

SEQ ID NO: 208777 - RNA, 19 nt, Artificial Sequence
  Description of Artificial Sequence: Synthetic oligonucleotide
uaguacuacuggguauaua

SEQ ID NO: 208778 - RNA, 19 nt, Artificial Sequence
  Description of Artificial Sequence: Synthetic oligonucleotide
aucgaccuucaccgaucug

SEQ ID NO: 208779 - RNA, 19 nt, Artificial Sequence
  Description of Artificial Sequence: Synthetic oligonucleotide
uugcugcuauaugcaagaa

SEQ ID NO: 208780 - RNA, 19 nt, Artificial Sequence
  Description of Artificial Sequence: Synthetic oligonucleotide
auacaguacgaugcucauu

SEQ ID NO: 208781 - RNA, 19 nt, Artificial Sequence
  Description of Artificial Sequence: Synthetic oligonucleotide
ccaucaauacuacaucugu

SEQ ID NO: 208782 - RNA, 19 nt, Artificial Sequence
  Description of Artificial Sequence: Synthetic oligonucleotide
caaggugcguugcugcucu

SEQ ID NO: 208783 - RNA, 19 nt, Artificial Sequence
  Description of Artificial Sequence: Synthetic oligonucleotide
gcucuccgagcccucguag

SEQ ID NO: 208784 - RNA, 19 nt, Artificial Sequence
  Description of Artificial Sequence: Synthetic oligonucleotide
ccacaaccuacggaaagac

SEQ ID NO: 208785 - RNA, 19 nt, Artificial Sequence
  Description of Artificial Sequence: Synthetic oligonucleotide
ggccuaaauauuucccacu

SEQ ID NO: 208786 - RNA, 19 nt, Artificial Sequence
  Description of Artificial Sequence: Synthetic oligonucleotide
cacaaccuacggaaagacu

SEQ ID NO: 208787 - RNA, 19 nt, Artificial Sequence
  Description of Artificial Sequence: Synthetic oligonucleotide
agguggguaccaaacuaua

SEQ ID NO: 208788 - RNA, 19 nt, Artificial Sequence
  Description of Artificial Sequence: Synthetic oligonucleotide
gggaucccgaguauugaga

SEQ ID NO: 208789 - RNA, 19 nt, Artificial Sequence
  Description of Artificial Sequence: Synthetic oligonucleotide
guucaaucgagaagugauu

SEQ ID NO: 208790 - RNA, 19 nt, Artificial Sequence
  Description of Artificial Sequence: Synthetic oligonucleotide
cugagcgggcucauuuucu

SEQ ID NO: 208791 - RNA, 19 nt, Artificial Sequence
  Description of Artificial Sequence: Synthetic oligonucleotide
guaccacaaccuacggaaa

SEQ ID NO: 208792 - RNA, 19 nt, Artificial Sequence
  Description of Artificial Sequence: Synthetic oligonucleotide
gcgauuaaagcugcuucaa

SEQ ID NO: 208793 - RNA, 19 nt, Artificial Sequence
  Description of Artificial Sequence: Synthetic oligonucleotide
ccuggcguagcccaugcaa

SEQ ID NO: 208794 - RNA, 19 nt, Artificial Sequence
  Description of Artificial Sequence: Synthetic oligonucleotide
gcgugguaccacaaccuac

SEQ ID NO: 208795 - RNA, 19 nt, Artificial Sequence
  Description of Artificial Sequence: Synthetic oligonucleotide
ccuucaccgaucugguuaa

SEQ ID NO: 208796 - RNA, 19 nt, Artificial Sequence
  Description of Artificial Sequence: Synthetic oligonucleotide
cagauggcaccugagcccu

SEQ ID NO: 208797 - RNA, 19 nt, Artificial Sequence
  Description of Artificial Sequence: Synthetic oligonucleotide
gcgaauuucccaacuuuua

SEQ ID NO: 208798 - RNA, 19 nt, Artificial Sequence
  Description of Artificial Sequence: Synthetic oligonucleotide
gcguugcugcucuacuaca

SEQ ID NO: 208799 - RNA, 19 nt, Artificial Sequence
  Description of Artificial Sequence: Synthetic oligonucleotide
caguacgaugcucauuauu

SEQ ID NO: 208800 - RNA, 19 nt, Artificial Sequence
  Description of Artificial Sequence: Synthetic oligonucleotide
aagagggcuucgggccuaa

SEQ ID NO: 208801 - RNA, 19 nt, Artificial Sequence
  Description of Artificial Sequence: Synthetic oligonucleotide
ggugcguugcugcucuacu

SEQ ID NO: 208802 - RNA, 19 nt, Artificial Sequence
  Description of Artificial Sequence: Synthetic oligonucleotide
ccgcaauauguagccauac

SEQ ID NO: 208803 - RNA, 19 nt, Artificial Sequence
  Description of Artificial Sequence: Synthetic oligonucleotide
ggcgugguaccacaaccua

SEQ ID NO: 208804 - RNA, 19 nt, Artificial Sequence
  Description of Artificial Sequence: Synthetic oligonucleotide
ggccaguguaacugguucu

SEQ ID NO: 208805 - RNA, 19 nt, Artificial Sequence
  Description of Artificial Sequence: Synthetic oligonucleotide
cucuacugauccggggaaa

SEQ ID NO: 208806 - RNA, 19 nt, Artificial Sequence
  Description of Artificial Sequence: Synthetic oligonucleotide
ccacccaaaucacgaauaa

SEQ ID NO: 208807 - RNA, 19 nt, Artificial Sequence
  Description of Artificial Sequence: Synthetic oligonucleotide
ccgaguauugagaaucuuu

SEQ ID NO: 208808 - RNA, 19 nt, Artificial Sequence
  Description of Artificial Sequence: Synthetic oligonucleotide
gcuucgggccuaagugcag

SEQ ID NO: 208809 - RNA, 19 nt, Artificial Sequence
  Description of Artificial Sequence: Synthetic oligonucleotide
gcugcgaauuucccaacuu

SEQ ID NO: 208810 - RNA, 19 nt, Artificial Sequence
  Description of Artificial Sequence: Synthetic oligonucleotide
cuacaggcccgcccgcccu

SEQ ID NO: 208811 - RNA, 19 nt, Artificial Sequence
  Description of Artificial Sequence: Synthetic oligonucleotide
cccgcaauauguagccaua

SEQ ID NO: 208812 - RNA, 19 nt, Artificial Sequence
  Description of Artificial Sequence: Synthetic oligonucleotide
ccgggcccaagguggguac

SEQ ID NO: 208813 - RNA, 19 nt, Artificial Sequence
  Description of Artificial Sequence: Synthetic oligonucleotide
ccgaucugguuaauuuccu

SEQ ID NO: 208814 - RNA, 19 nt, Artificial Sequence
  Description of Artificial Sequence: Synthetic oligonucleotide
ccgcucaguaaguuuggcu

SEQ ID NO: 208815 - RNA, 19 nt, Artificial Sequence
  Description of Artificial Sequence: Synthetic oligonucleotide
gcguuagaccaccuccuuu

SEQ ID NO: 208816 - RNA, 19 nt, Artificial Sequence
  Description of Artificial Sequence: Synthetic oligonucleotide
ccuuuggggccuaaauauu

SEQ ID NO: 208817 - RNA, 19 nt, Artificial Sequence
  Description of Artificial Sequence: Synthetic oligonucleotide
gccacgcccaacaaucuuu

SEQ ID NO: 208818 - RNA, 19 nt, Artificial Sequence
  Description of Artificial Sequence: Synthetic oligonucleotide
ccggggaaaguuccucccu

SEQ ID NO: 208819 - RNA, 19 nt, Artificial Sequence
  Description of Artificial Sequence: Synthetic oligonucleotide
cuucaccgaucugguuaau

SEQ ID NO: 208820 - RNA, 19 nt, Artificial Sequence
  Description of Artificial Sequence: Synthetic oligonucleotide
cgaguuauuccuggcuuuu

SEQ ID NO: 208821 - RNA, 19 nt, Artificial Sequence
  Description of Artificial Sequence: Synthetic oligonucleotide
aaacaggucauucagaccg

SEQ ID NO: 208822 - RNA, 19 nt, Artificial Sequence
  Description of Artificial Sequence: Synthetic oligonucleotide
uauugaugaauacacaagg

SEQ ID NO: 208823 - RNA, 19 nt, Artificial Sequence
  Description of Artificial Sequence: Synthetic oligonucleotide
aacucuaaaacccugacuu

SEQ ID NO: 208824 - RNA, 19 nt, Artificial Sequence
  Description of Artificial Sequence: Synthetic oligonucleotide
guuguaauuagacaggcag

SEQ ID NO: 208825 - RNA, 19 nt, Artificial Sequence
  Description of Artificial Sequence: Synthetic oligonucleotide
uggacaauuagguugaugu

SEQ ID NO: 208826 - RNA, 19 nt, Artificial Sequence
  Description of Artificial Sequence: Synthetic oligonucleotide
uuauugaugaauacacaag

SEQ ID NO: 208827 - RNA, 19 nt, Artificial Sequence
  Description of Artificial Sequence: Synthetic oligonucleotide
uguacauucagguaacuga

SEQ ID NO: 208828 - RNA, 19 nt, Artificial Sequence
  Description of Artificial Sequence: Synthetic oligonucleotide
auagaugugcccuuggcgg

SEQ ID NO: 208829 - RNA, 19 nt, Artificial Sequence
  Description of Artificial Sequence: Synthetic oligonucleotide
uuaacuagccaccugcaag

SEQ ID NO: 208830 - RNA, 19 nt, Artificial Sequence
  Description of Artificial Sequence: Synthetic oligonucleotide
aagccuuuagccuuuacug

SEQ ID NO: 208831 - RNA, 19 nt, Artificial Sequence
  Description of Artificial Sequence: Synthetic oligonucleotide
uauagaugugcccuuggcg

SEQ ID NO: 208832 - RNA, 19 nt, Artificial Sequence
  Description of Artificial Sequence: Synthetic oligonucleotide
  modified_base (14)..(14): a, c, u, g, unknown or other
ucaaguaaguugcnguuug

SEQ ID NO: 208833 - RNA, 19 nt, Artificial Sequence
  Description of Artificial Sequence: Synthetic oligonucleotide
uaugagaucccguagagaa

SEQ ID NO: 208834 - RNA, 19 nt, Artificial Sequence
  Description of Artificial Sequence: Synthetic oligonucleotide
  modified_base (10)..(10): a, c, u, g, unknown or other
guaaguugcnguuugggug

SEQ ID NO: 208835 - RNA, 19 nt, Artificial Sequence
  Description of Artificial Sequence: Synthetic oligonucleotide
aagccauuaaggucuauuc

SEQ ID NO: 208836 - RNA, 19 nt, Artificial Sequence
  Description of Artificial Sequence: Synthetic oligonucleotide
uuaggcaacaauucuagga

SEQ ID NO: 208837 - RNA, 19 nt, Artificial Sequence
  Description of Artificial Sequence: Synthetic oligonucleotide
ucggccaaaauccaaauac

SEQ ID NO: 208838 - RNA, 19 nt, Artificial Sequence
  Description of Artificial Sequence: Synthetic oligonucleotide
ugcaguuuauguuucagug

SEQ ID NO: 208839 - RNA, 19 nt, Artificial Sequence
  Description of Artificial Sequence: Synthetic oligonucleotide
auagauagggucauuguac

SEQ ID NO: 208840 - RNA, 19 nt, Artificial Sequence
  Description of Artificial Sequence: Synthetic oligonucleotide
ugugcuuacacaucguucu

SEQ ID NO: 208841 - RNA, 19 nt, Artificial Sequence
  Description of Artificial Sequence: Synthetic oligonucleotide
  modified_base (16)..(16): a, c, u, g, unknown or other
aaucaaguaaguugcnguu

SEQ ID NO: 208842 - RNA, 19 nt, Artificial Sequence
  Description of Artificial Sequence: Synthetic oligonucleotide
uacaauccaaaucauggcu

SEQ ID NO: 208843 - RNA, 19 nt, Artificial Sequence
  Description of Artificial Sequence: Synthetic oligonucleotide
auggaguauggaaagagcc

SEQ ID NO: 208844 - RNA, 19 nt, Artificial Sequence
  Description of Artificial Sequence: Synthetic oligonucleotide
ucguagaccugauagaugu

SEQ ID NO: 208845 - RNA, 19 nt, Artificial Sequence
  Description of Artificial Sequence: Synthetic oligonucleotide
uuaaaugacacuccuuaau

SEQ ID NO: 208846 - RNA, 19 nt, Artificial Sequence
  Description of Artificial Sequence: Synthetic oligonucleotide
agcauauuguaguagucag

SEQ ID NO: 208847 - RNA, 19 nt, Artificial Sequence
  Description of Artificial Sequence: Synthetic oligonucleotide
guuacucgcucacagaugc

SEQ ID NO: 208848 - RNA, 19 nt, Artificial Sequence
  Description of Artificial Sequence: Synthetic oligonucleotide
guuaccuggauguacauuc

SEQ ID NO: 208849 - RNA, 19 nt, Artificial Sequence
  Description of Artificial Sequence: Synthetic oligonucleotide
agcgacagcguauaauugg

SEQ ID NO: 208850 - RNA, 19 nt, Artificial Sequence
  Description of Artificial Sequence: Synthetic oligonucleotide
aacauagauagggucauug

SEQ ID NO: 208851 - RNA, 19 nt, Artificial Sequence
  Description of Artificial Sequence: Synthetic oligonucleotide
ucgagcaucgggcucaucc

SEQ ID NO: 208852 - RNA, 19 nt, Artificial Sequence
  Description of Artificial Sequence: Synthetic oligonucleotide
  modified_base (9)..(9): a, c, u, g, unknown or other
uaaguugcnguuuggguga

SEQ ID NO: 208853 - RNA, 19 nt, Artificial Sequence
  Description of Artificial Sequence: Synthetic oligonucleotide
aaugguggagcaccaaacu

SEQ ID NO: 208854 - RNA, 19 nt, Artificial Sequence
  Description of Artificial Sequence: Synthetic oligonucleotide
uuaggagccacguauccgc

SEQ ID NO: 208855 - RNA, 19 nt, Artificial Sequence
  Description of Artificial Sequence: Synthetic oligonucleotide
ucuuggaccacauaauuua

SEQ ID NO: 208856 - RNA, 19 nt, Artificial Sequence
  Description of Artificial Sequence: Synthetic oligonucleotide
agccuuuagccuuuacugc

SEQ ID NO: 208857 - RNA, 19 nt, Artificial Sequence
  Description of Artificial Sequence: Synthetic oligonucleotide
ggcaaugauacuuucauac

SEQ ID NO: 208858 - RNA, 19 nt, Artificial Sequence
  Description of Artificial Sequence: Synthetic oligonucleotide
uaagccuuuagccuuuacu

SEQ ID NO: 208859 - RNA, 19 nt, Artificial Sequence
  Description of Artificial Sequence: Synthetic oligonucleotide
uauccuuccaugucgcaag

SEQ ID NO: 208860 - RNA, 19 nt, Artificial Sequence
  Description of Artificial Sequence: Synthetic oligonucleotide
ugcuuuaauuaauuuguac

SEQ ID NO: 208861 - RNA, 19 nt, Artificial Sequence
  Description of Artificial Sequence: Synthetic oligonucleotide
ucaguuaaccuuucuacuc

SEQ ID NO: 208862 - RNA, 19 nt, Artificial Sequence
  Description of Artificial Sequence: Synthetic oligonucleotide
uuaggguuguaauuagaca

SEQ ID NO: 208863 - RNA, 19 nt, Artificial Sequence
  Description of Artificial Sequence: Synthetic oligonucleotide
  modified_base (11)..(11): a, c, u, g, unknown or other
aguaaguugcnguuugggu

SEQ ID NO: 208864 - RNA, 19 nt, Artificial Sequence
  Description of Artificial Sequence: Synthetic oligonucleotide
uuguaauuagacaggcagu

SEQ ID NO: 208865 - RNA, 19 nt, Artificial Sequence
  Description of Artificial Sequence: Synthetic oligonucleotide
uucuccuacaauccaaauc

SEQ ID NO: 208866 - RNA, 19 nt, Artificial Sequence
  Description of Artificial Sequence: Synthetic oligonucleotide
uuauugauauucugagggu

SEQ ID NO: 208867 - RNA, 19 nt, Artificial Sequence
  Description of Artificial Sequence: Synthetic oligonucleotide
ugcuaugagaucccguaga

SEQ ID NO: 208868 - RNA, 19 nt, Artificial Sequence
  Description of Artificial Sequence: Synthetic oligonucleotide
uuccauauagaugugcccu

SEQ ID NO: 208869 - RNA, 19 nt, Artificial Sequence
  Description of Artificial Sequence: Synthetic oligonucleotide
aggaguuacucgcucacag

SEQ ID NO: 208870 - RNA, 19 nt, Artificial Sequence
  Description of Artificial Sequence: Synthetic oligonucleotide
uguccuacagcuccugugu

SEQ ID NO: 208871 - RNA, 19 nt, Artificial Sequence
  Description of Artificial Sequence: Synthetic oligonucleotide
uauacccguggaaagcuca

SEQ ID NO: 208872 - RNA, 19 nt, Artificial Sequence
  Description of Artificial Sequence: Synthetic oligonucleotide
ucugcuaugagaucccgua

SEQ ID NO: 208873 - RNA, 19 nt, Artificial Sequence
  Description of Artificial Sequence: Synthetic oligonucleotide
augguggagcaccaaacuc

SEQ ID NO: 208874 - RNA, 19 nt, Artificial Sequence
  Description of Artificial Sequence: Synthetic oligonucleotide
gcauuaucgauucuuucgg

SEQ ID NO: 208875 - RNA, 19 nt, Artificial Sequence
  Description of Artificial Sequence: Synthetic oligonucleotide
ucuuucggcauauucuccu

SEQ ID NO: 208876 - RNA, 19 nt, Artificial Sequence
  Description of Artificial Sequence: Synthetic oligonucleotide
aaugccgcaacagcauuag

SEQ ID NO: 208877 - RNA, 19 nt, Artificial Sequence
  Description of Artificial Sequence: Synthetic oligonucleotide
uagauagggucauuguacu

SEQ ID NO: 208878 - RNA, 19 nt, Artificial Sequence
  Description of Artificial Sequence: Synthetic oligonucleotide
uauucuccuacaauccaaa

SEQ ID NO: 208879 - RNA, 19 nt, Artificial Sequence
  Description of Artificial Sequence: Synthetic oligonucleotide
cuaaaaugcugucguagac

SEQ ID NO: 208880 - RNA, 19 nt, Artificial Sequence
  Description of Artificial Sequence: Synthetic oligonucleotide
  modified_base (19)..(19): a, c, u, g, unknown or other
ucaaaucaaguaaguugcn

SEQ ID NO: 208881 - RNA, 19 nt, Artificial Sequence
  Description of Artificial Sequence: Synthetic oligonucleotide
ucauucagaccgcugcuga

SEQ ID NO: 208882 - RNA, 19 nt, Artificial Sequence
  Description of Artificial Sequence: Synthetic oligonucleotide
aaguccgucauaugcugca

SEQ ID NO: 208883 - RNA, 19 nt, Artificial Sequence
  Description of Artificial Sequence: Synthetic oligonucleotide
auaauugggguuuccuggu

SEQ ID NO: 208884 - RNA, 19 nt, Artificial Sequence
  Description of Artificial Sequence: Synthetic oligonucleotide
uuuaacuagccaccugcaa

SEQ ID NO: 208885 - RNA, 19 nt, Artificial Sequence
  Description of Artificial Sequence: Synthetic oligonucleotide
ucgggaugacaccaaagcu

SEQ ID NO: 208886 - RNA, 19 nt, Artificial Sequence
  Description of Artificial Sequence: Synthetic oligonucleotide
  modified_base (18)..(18): a, c, u, g, unknown or other
caaaucaaguaaguugcng

SEQ ID NO: 208887 - RNA, 19 nt, Artificial Sequence
  Description of Artificial Sequence: Synthetic oligonucleotide
ggucaguuaaccuuucuac

SEQ ID NO: 208888 - RNA, 19 nt, Artificial Sequence
  Description of Artificial Sequence: Synthetic oligonucleotide
agugaaugugcccgagauc

SEQ ID NO: 208889 - RNA, 19 nt, Artificial Sequence
  Description of Artificial Sequence: Synthetic oligonucleotide
  modified_base (13)..(13): a, c, u, g, unknown or other
caaguaaguugcnguuugg

SEQ ID NO: 208890 - RNA, 19 nt, Artificial Sequence
  Description of Artificial Sequence: Synthetic oligonucleotide
uagccagacggccuuagga

SEQ ID NO: 208891 - RNA, 19 nt, Artificial Sequence
  Description of Artificial Sequence: Synthetic oligonucleotide
agccagacggccuuaggag

SEQ ID NO: 208892 - RNA, 19 nt, Artificial Sequence
  Description of Artificial Sequence: Synthetic oligonucleotide
cauuaucgauucuuucggc

SEQ ID NO: 208893 - RNA, 19 nt, Artificial Sequence
  Description of Artificial Sequence: Synthetic oligonucleotide
uucuacucaauuucucauc

SEQ ID NO: 208894 - RNA, 19 nt, Artificial Sequence
  Description of Artificial Sequence: Synthetic oligonucleotide
uugcgaacaaaguccacgu

SEQ ID NO: 208895 - RNA, 19 nt, Artificial Sequence
  Description of Artificial Sequence: Synthetic oligonucleotide
aggcgccaugccuauaccc

SEQ ID NO: 208896 - RNA, 19 nt, Artificial Sequence
  Description of Artificial Sequence: Synthetic oligonucleotide
uccuuaggcaacaauucua

SEQ ID NO: 208897 - RNA, 19 nt, Artificial Sequence
  Description of Artificial Sequence: Synthetic oligonucleotide
accgggaagccgaugaagc

SEQ ID NO: 208898 - RNA, 19 nt, Artificial Sequence
  Description of Artificial Sequence: Synthetic oligonucleotide
cacaucguucugcugauug

SEQ ID NO: 208899 - RNA, 19 nt, Artificial Sequence
  Description of Artificial Sequence: Synthetic oligonucleotide
agucagaguccuuaggcaa

SEQ ID NO: 208900 - RNA, 19 nt, Artificial Sequence
  Description of Artificial Sequence: Synthetic oligonucleotide
gacuuucacggcugaaagc

SEQ ID NO: 208901 - RNA, 19 nt, Artificial Sequence
  Description of Artificial Sequence: Synthetic oligonucleotide
aacucagcauggaguaugg

SEQ ID NO: 208902 - RNA, 19 nt, Artificial Sequence
  Description of Artificial Sequence: Synthetic oligonucleotide
agacacauugagugggaug

SEQ ID NO: 208903 - RNA, 19 nt, Artificial Sequence
  Description of Artificial Sequence: Synthetic oligonucleotide
aaguuauucagagguucca

SEQ ID NO: 208904 - RNA, 19 nt, Artificial Sequence
  Description of Artificial Sequence: Synthetic oligonucleotide
ugccuauacccguggaaag

SEQ ID NO: 208905 - RNA, 19 nt, Artificial Sequence
  Description of Artificial Sequence: Synthetic oligonucleotide
uuggcggugagugaaugug

SEQ ID NO: 208906 - RNA, 19 nt, Artificial Sequence
  Description of Artificial Sequence: Synthetic oligonucleotide
uggucaguuaaccuuucua

SEQ ID NO: 208907 - RNA, 19 nt, Artificial Sequence
  Description of Artificial Sequence: Synthetic oligonucleotide
cuuuugcgaacaaagucca

SEQ ID NO: 208908 - RNA, 19 nt, Artificial Sequence
  Description of Artificial Sequence: Synthetic oligonucleotide
cguagcucggccaaaaucc

SEQ ID NO: 208909 - RNA, 19 nt, Artificial Sequence
  Description of Artificial Sequence: Synthetic oligonucleotide
uuucggcauauucuccuac

SEQ ID NO: 208910 - RNA, 19 nt, Artificial Sequence
  Description of Artificial Sequence: Synthetic oligonucleotide
uucggcauauucuccuaca

SEQ ID NO: 208911 - RNA, 19 nt, Artificial Sequence
  Description of Artificial Sequence: Synthetic oligonucleotide
guagaccugauagauguac

SEQ ID NO: 208912 - RNA, 19 nt, Artificial Sequence
  Description of Artificial Sequence: Synthetic oligonucleotide
cuuucuacucauuauucua

SEQ ID NO: 208913 - RNA, 19 nt, Artificial Sequence
  Description of Artificial Sequence: Synthetic oligonucleotide
ggacuuucacggcugaaag

SEQ ID NO: 208914 - RNA, 19 nt, Artificial Sequence
  Description of Artificial Sequence: Synthetic oligonucleotide
caugucgcaaggaagaccu

SEQ ID NO: 208915 - RNA, 19 nt, Artificial Sequence
  Description of Artificial Sequence: Synthetic oligonucleotide
ggggcucuacacuucagcg

SEQ ID NO: 208916 - RNA, 19 nt, Artificial Sequence
  Description of Artificial Sequence: Synthetic oligonucleotide
cacguauccgccaggcgcc

SEQ ID NO: 208917 - RNA, 19 nt, Artificial Sequence
  Description of Artificial Sequence: Synthetic oligonucleotide
ugacacuccuuaaucugaa

SEQ ID NO: 208918 - RNA, 19 nt, Artificial Sequence
  Description of Artificial Sequence: Synthetic oligonucleotide
acagcguauaauugggguu

SEQ ID NO: 208919 - RNA, 19 nt, Artificial Sequence
  Description of Artificial Sequence: Synthetic oligonucleotide
cauaccgggaagccgauga

SEQ ID NO: 208920 - RNA, 19 nt, Artificial Sequence
  Description of Artificial Sequence: Synthetic oligonucleotide
ucccguagagaauccagaa

SEQ ID NO: 208921 - RNA, 19 nt, Artificial Sequence
  Description of Artificial Sequence: Synthetic oligonucleotide
ucggcauauucuccuacaa

SEQ ID NO: 208922 - RNA, 19 nt, Artificial Sequence
  Description of Artificial Sequence: Synthetic oligonucleotide
auuaggacuuucacggcug

SEQ ID NO: 208923 - RNA, 19 nt, Artificial Sequence
  Description of Artificial Sequence: Synthetic oligonucleotide
guuuuccgaacauaggggu

SEQ ID NO: 208924 - RNA, 19 nt, Artificial Sequence
  Description of Artificial Sequence: Synthetic oligonucleotide
gcuaugagaucccguagag

SEQ ID NO: 208925 - RNA, 19 nt, Artificial Sequence
  Description of Artificial Sequence: Synthetic oligonucleotide
caguuaaccuuucuacuca

SEQ ID NO: 208926 - RNA, 19 nt, Artificial Sequence
  Description of Artificial Sequence: Synthetic oligonucleotide
agugcucgggaugacacca

SEQ ID NO: 208927 - RNA, 19 nt, Artificial Sequence
  Description of Artificial Sequence: Synthetic oligonucleotide
auaucaaacuacacucaga

SEQ ID NO: 208928 - RNA, 19 nt, Artificial Sequence
  Description of Artificial Sequence: Synthetic oligonucleotide
uuuugcgaacaaaguccac

SEQ ID NO: 208929 - RNA, 19 nt, Artificial Sequence
  Description of Artificial Sequence: Synthetic oligonucleotide
gaguuacucgcucacagau

SEQ ID NO: 208930 - RNA, 19 nt, Artificial Sequence
  Description of Artificial Sequence: Synthetic oligonucleotide
caacaauucuaggaauuuc

SEQ ID NO: 208931 - RNA, 19 nt, Artificial Sequence
  Description of Artificial Sequence: Synthetic oligonucleotide
uagaugugcccuuggcggu

SEQ ID NO: 208932 - RNA, 19 nt, Artificial Sequence
  Description of Artificial Sequence: Synthetic oligonucleotide
gguaacugagaagauguca

SEQ ID NO: 208933 - RNA, 19 nt, Artificial Sequence
  Description of Artificial Sequence: Synthetic oligonucleotide
cugcuaugagaucccguag

SEQ ID NO: 208934 - RNA, 19 nt, Artificial Sequence
  Description of Artificial Sequence: Synthetic oligonucleotide
caccugacaccagugaaug

SEQ ID NO: 208935 - RNA, 19 nt, Artificial Sequence
  Description of Artificial Sequence: Synthetic oligonucleotide
augccuauacccguggaaa

SEQ ID NO: 208936 - RNA, 19 nt, Artificial Sequence
  Description of Artificial Sequence: Synthetic oligonucleotide
uccauauagaugugcccuu

SEQ ID NO: 208937 - RNA, 19 nt, Artificial Sequence
  Description of Artificial Sequence: Synthetic oligonucleotide
ugcucgagcaucgggcuca

SEQ ID NO: 208938 - RNA, 19 nt, Artificial Sequence
  Description of Artificial Sequence: Synthetic oligonucleotide
uucagcgacagcguauaau

SEQ ID NO: 208939 - RNA, 19 nt, Artificial Sequence
  Description of Artificial Sequence: Synthetic oligonucleotide
uaggagccacguauccgcc

SEQ ID NO: 208940 - RNA, 19 nt, Artificial Sequence
  Description of Artificial Sequence: Synthetic oligonucleotide
cucuaguaacucaucugca

SEQ ID NO: 208941 - RNA, 19 nt, Artificial Sequence
  Description of Artificial Sequence: Synthetic oligonucleotide
acgggauggaaggacuguc

SEQ ID NO: 208942 - RNA, 19 nt, Artificial Sequence
  Description of Artificial Sequence: Synthetic oligonucleotide
augccgcaacagcauuagc

SEQ ID NO: 208943 - RNA, 19 nt, Artificial Sequence
  Description of Artificial Sequence: Synthetic oligonucleotide
ugccugugaaaugagcuuu

SEQ ID NO: 208944 - RNA, 19 nt, Artificial Sequence
  Description of Artificial Sequence: Synthetic oligonucleotide
gagaguggcaaugauacuu

SEQ ID NO: 208945 - RNA, 19 nt, Artificial Sequence
  Description of Artificial Sequence: Synthetic oligonucleotide
agccauaccgggaagccga

SEQ ID NO: 208946 - RNA, 19 nt, Artificial Sequence
  Description of Artificial Sequence: Synthetic oligonucleotide
aaauaccauuagugaguuu

SEQ ID NO: 208947 - RNA, 19 nt, Artificial Sequence
  Description of Artificial Sequence: Synthetic oligonucleotide
gaucucagacaaugccgca

SEQ ID NO: 208948 - RNA, 19 nt, Artificial Sequence
  Description of Artificial Sequence: Synthetic oligonucleotide
cagcgacagcguauaauug

SEQ ID NO: 208949 - RNA, 19 nt, Artificial Sequence
  Description of Artificial Sequence: Synthetic oligonucleotide
cuagccaccugcaaguuau

SEQ ID NO: 208950 - RNA, 19 nt, Artificial Sequence
  Description of Artificial Sequence: Synthetic oligonucleotide
gaaacugugucagcauuua

SEQ ID NO: 208951 - RNA, 19 nt, Artificial Sequence
  Description of Artificial Sequence: Synthetic oligonucleotide
gcgacagcguauaauuggg

SEQ ID NO: 208952 - RNA, 19 nt, Artificial Sequence
  Description of Artificial Sequence: Synthetic oligonucleotide
agguaacugagaagauguc

SEQ ID NO: 208953 - RNA, 19 nt, Artificial Sequence
  Description of Artificial Sequence: Synthetic oligonucleotide
aguuacucgcucacagaug

SEQ ID NO: 208954 - RNA, 19 nt, Artificial Sequence
  Description of Artificial Sequence: Synthetic oligonucleotide
auaccauuagugaguuuca

SEQ ID NO: 208955 - RNA, 19 nt, Artificial Sequence
  Description of Artificial Sequence: Synthetic oligonucleotide
agcguauaauugggguuuc

SEQ ID NO: 208956 - RNA, 19 nt, Artificial Sequence
  Description of Artificial Sequence: Synthetic oligonucleotide
uaauugggguuuccugguu

SEQ ID NO: 208957 - RNA, 19 nt, Artificial Sequence
  Description of Artificial Sequence: Synthetic oligonucleotide
  modified_base (15)..(15): a, c, u, g, unknown or other
aucaaguaaguugcnguuu

SEQ ID NO: 208958 - RNA, 19 nt, Artificial Sequence
  Description of Artificial Sequence: Synthetic oligonucleotide
acaaugccgcaacagcauu

SEQ ID NO: 208959 - RNA, 19 nt, Artificial Sequence
  Description of Artificial Sequence: Synthetic oligonucleotide
cuauacccguggaaagcuc

SEQ ID NO: 208960 - RNA, 19 nt, Artificial Sequence
  Description of Artificial Sequence: Synthetic oligonucleotide
uugggagugcaagacggau

SEQ ID NO: 208961 - RNA, 19 nt, Artificial Sequence
  Description of Artificial Sequence: Synthetic oligonucleotide
  modified_base (8)..(8): a, c, u, g, unknown or other
aaguugcnguuugggugag

SEQ ID NO: 208962 - RNA, 19 nt, Artificial Sequence
  Description of Artificial Sequence: Synthetic oligonucleotide
gucgcaaggaagaccuggc

SEQ ID NO: 208963 - RNA, 19 nt, Artificial Sequence
  Description of Artificial Sequence: Synthetic oligonucleotide
agauagggucauuguacuu

SEQ ID NO: 208964 - RNA, 19 nt, Artificial Sequence
  Description of Artificial Sequence: Synthetic oligonucleotide
cauuaggacuuucacggcu

SEQ ID NO: 208965 - RNA, 19 nt, Artificial Sequence
  Description of Artificial Sequence: Synthetic oligonucleotide
uuacucgcucacagaugcu

SEQ ID NO: 208966 - RNA, 19 nt, Artificial Sequence
  Description of Artificial Sequence: Synthetic oligonucleotide
gaguccuuaggcaacaauu

SEQ ID NO: 208967 - RNA, 19 nt, Artificial Sequence
  Description of Artificial Sequence: Synthetic oligonucleotide
gggaaugacggaagggacc

SEQ ID NO: 208968 - RNA, 19 nt, Artificial Sequence
  Description of Artificial Sequence: Synthetic oligonucleotide
ugcucgggaugacaccaaa

SEQ ID NO: 208969 - RNA, 19 nt, Artificial Sequence
  Description of Artificial Sequence: Synthetic oligonucleotide
uuuccugguuggauccgua

SEQ ID NO: 208970 - RNA, 19 nt, Artificial Sequence
  Description of Artificial Sequence: Synthetic oligonucleotide
gucguagaccugauagaug

SEQ ID NO: 208971 - RNA, 19 nt, Artificial Sequence
  Description of Artificial Sequence: Synthetic oligonucleotide
aucucagacaaugccgcaa

SEQ ID NO: 208972 - RNA, 19 nt, Artificial Sequence
  Description of Artificial Sequence: Synthetic oligonucleotide
caagacggaucaugauguc

SEQ ID NO: 208973 - RNA, 19 nt, Artificial Sequence
  Description of Artificial Sequence: Synthetic oligonucleotide
guauccgccaggcgccaug

SEQ ID NO: 208974 - RNA, 19 nt, Artificial Sequence
  Description of Artificial Sequence: Synthetic oligonucleotide
caugccuauacccguggaa

SEQ ID NO: 208975 - RNA, 19 nt, Artificial Sequence
  Description of Artificial Sequence: Synthetic oligonucleotide
  modified_base (2)..(2): a, c, u, g, unknown or other
cnguuugggugagauucac

SEQ ID NO: 208976 - RNA, 19 nt, Artificial Sequence
  Description of Artificial Sequence: Synthetic oligonucleotide
gacggaagggacccauuua

SEQ ID NO: 208977 - RNA, 19 nt, Artificial Sequence
  Description of Artificial Sequence: Synthetic oligonucleotide
gccagacggccuuaggagc

SEQ ID NO: 208978 - RNA, 19 nt, Artificial Sequence
  Description of Artificial Sequence: Synthetic oligonucleotide
acacauugagugggaugag

SEQ ID NO: 208979 - RNA, 19 nt, Artificial Sequence
  Description of Artificial Sequence: Synthetic oligonucleotide
aggucuauucuaacucuaa

SEQ ID NO: 208980 - RNA, 19 nt, Artificial Sequence
  Description of Artificial Sequence: Synthetic oligonucleotide
uccguagcucggccaaaau

SEQ ID NO: 208981 - RNA, 19 nt, Artificial Sequence
  Description of Artificial Sequence: Synthetic oligonucleotide
ggcguauuccuucaacucu

SEQ ID NO: 208982 - RNA, 19 nt, Artificial Sequence
  Description of Artificial Sequence: Synthetic oligonucleotide
caauaguguaaacauuguu

SEQ ID NO: 208983 - RNA, 19 nt, Artificial Sequence
  Description of Artificial Sequence: Synthetic oligonucleotide
ggaguuacucgcucacaga

SEQ ID NO: 208984 - RNA, 19 nt, Artificial Sequence
  Description of Artificial Sequence: Synthetic oligonucleotide
cuaugagaucccguagaga

SEQ ID NO: 208985 - RNA, 19 nt, Artificial Sequence
  Description of Artificial Sequence: Synthetic oligonucleotide
agaugugcccuuggcggug

SEQ ID NO: 208986 - RNA, 19 nt, Artificial Sequence
  Description of Artificial Sequence: Synthetic oligonucleotide
aaugugcccgagaucucua

SEQ ID NO: 208987 - RNA, 19 nt, Artificial Sequence
  Description of Artificial Sequence: Synthetic oligonucleotide
gcaagacggaucaugaugu

SEQ ID NO: 208988 - RNA, 19 nt, Artificial Sequence
  Description of Artificial Sequence: Synthetic oligonucleotide
gcaaugauacuuucauacu

SEQ ID NO: 208989 - RNA, 19 nt, Artificial Sequence
  Description of Artificial Sequence: Synthetic oligonucleotide
ggcggugagugaaugugcc

SEQ ID NO: 208990 - RNA, 19 nt, Artificial Sequence
  Description of Artificial Sequence: Synthetic oligonucleotide
  modified_base (6)..(6): a, c, u, g, unknown or other
guugcnguuugggugagau

SEQ ID NO: 208991 - RNA, 19 nt, Artificial Sequence
  Description of Artificial Sequence: Synthetic oligonucleotide
gccaugccuauacccgugg

SEQ ID NO: 208992 - RNA, 19 nt, Artificial Sequence
  Description of Artificial Sequence: Synthetic oligonucleotide
ucaaccucgguggcguauu

SEQ ID NO: 208993 - RNA, 19 nt, Artificial Sequence
  Description of Artificial Sequence: Synthetic oligonucleotide
guagcucggccaaaaucca

SEQ ID NO: 208994 - RNA, 19 nt, Artificial Sequence
  Description of Artificial Sequence: Synthetic oligonucleotide
ggcacaccguccaauggcc

SEQ ID NO: 208995 - RNA, 19 nt, Artificial Sequence
  Description of Artificial Sequence: Synthetic oligonucleotide
aacuagccaccugcaaguu

SEQ ID NO: 208996 - RNA, 19 nt, Artificial Sequence
  Description of Artificial Sequence: Synthetic oligonucleotide
gaggaguuacucgcucaca

SEQ ID NO: 208997 - RNA, 19 nt, Artificial Sequence
  Description of Artificial Sequence: Synthetic oligonucleotide
gccuauacccguggaaagc

SEQ ID NO: 208998 - RNA, 19 nt, Artificial Sequence
  Description of Artificial Sequence: Synthetic oligonucleotide
ugcugucguagaccugaua

SEQ ID NO: 208999 - RNA, 19 nt, Artificial Sequence
  Description of Artificial Sequence: Synthetic oligonucleotide
caaugccgcaacagcauua

SEQ ID NO: 209000 - RNA, 19 nt, Artificial Sequence
  Description of Artificial Sequence: Synthetic oligonucleotide
caggcgccaugccuauacc

SEQ ID NO: 209001 - RNA, 19 nt, Artificial Sequence
  Description of Artificial Sequence: Synthetic oligonucleotide
ccaggcgccaugccuauac

SEQ ID NO: 209002 - RNA, 19 nt, Artificial Sequence
  Description of Artificial Sequence: Synthetic oligonucleotide
cuuucggcauauucuccua

SEQ ID NO: 209003 - RNA, 19 nt, Artificial Sequence
  Description of Artificial Sequence: Synthetic oligonucleotide
cagcuuuugcgaacaaagu

SEQ ID NO: 209004 - RNA, 19 nt, Artificial Sequence
  Description of Artificial Sequence: Synthetic oligonucleotide
cauggaguuuugccacaca

SEQ ID NO: 209005 - RNA, 19 nt, Artificial Sequence
  Description of Artificial Sequence: Synthetic oligonucleotide
gcagagagacaucaaugcu

SEQ ID NO: 209006 - RNA, 19 nt, Artificial Sequence
  Description of Artificial Sequence: Synthetic oligonucleotide
agacggccuuaggagccac

SEQ ID NO: 209007 - RNA, 19 nt, Artificial Sequence
  Description of Artificial Sequence: Synthetic oligonucleotide
ggauuaaaucaagcaaugu

SEQ ID NO: 209008 - RNA, 19 nt, Artificial Sequence
  Description of Artificial Sequence: Synthetic oligonucleotide
gcauauuguaguagucaga

SEQ ID NO: 209009 - RNA, 19 nt, Artificial Sequence
  Description of Artificial Sequence: Synthetic oligonucleotide
ccgaugaagcuucagggaa

SEQ ID NO: 209010 - RNA, 19 nt, Artificial Sequence
  Description of Artificial Sequence: Synthetic oligonucleotide
gauguacauucagguaacu

SEQ ID NO: 209011 - RNA, 19 nt, Artificial Sequence
  Description of Artificial Sequence: Synthetic oligonucleotide
ccaugucgcaaggaagacc

SEQ ID NO: 209012 - RNA, 19 nt, Artificial Sequence
  Description of Artificial Sequence: Synthetic oligonucleotide
ccguagcucggccaaaauc

SEQ ID NO: 209013 - RNA, 19 nt, Artificial Sequence
  Description of Artificial Sequence: Synthetic oligonucleotide
caaauaccauuagugaguu

SEQ ID NO: 209014 - RNA, 19 nt, Artificial Sequence
  Description of Artificial Sequence: Synthetic oligonucleotide
uacccguggaaagcucaaa

SEQ ID NO: 209015 - RNA, 19 nt, Artificial Sequence
  Description of Artificial Sequence: Synthetic oligonucleotide
agggacccauuuauuaguu

SEQ ID NO: 209016 - RNA, 19 nt, Artificial Sequence
  Description of Artificial Sequence: Synthetic oligonucleotide
gcagcauauuguaguaguc

SEQ ID NO: 209017 - RNA, 19 nt, Artificial Sequence
  Description of Artificial Sequence: Synthetic oligonucleotide
cccguggaaagcucaaaca

SEQ ID NO: 209018 - RNA, 19 nt, Artificial Sequence
  Description of Artificial Sequence: Synthetic oligonucleotide
ccucacagcuuuugcgaac

SEQ ID NO: 209019 - RNA, 19 nt, Artificial Sequence
  Description of Artificial Sequence: Synthetic oligonucleotide
gccacguauccgccaggcg

SEQ ID NO: 209020 - RNA, 19 nt, Artificial Sequence
  Description of Artificial Sequence: Synthetic oligonucleotide
gaugugcccuuggcgguga

SEQ ID NO: 209021 - RNA, 19 nt, Artificial Sequence
  Description of Artificial Sequence: Synthetic oligonucleotide
  modified_base (7)..(7): a, c, u, g, unknown or other
aguugcnguuugggugaga

SEQ ID NO: 209022 - RNA, 19 nt, Artificial Sequence
  Description of Artificial Sequence: Synthetic oligonucleotide
caauuagguugauguuucu

SEQ ID NO: 209023 - RNA, 19 nt, Artificial Sequence
  Description of Artificial Sequence: Synthetic oligonucleotide
auacccguggaaagcucaa

SEQ ID NO: 209024 - RNA, 19 nt, Artificial Sequence
  Description of Artificial Sequence: Synthetic oligonucleotide
cugcucgagcaucgggcuc

SEQ ID NO: 209025 - RNA, 19 nt, Artificial Sequence
  Description of Artificial Sequence: Synthetic oligonucleotide
caaccucgguggcguauuc

SEQ ID NO: 209026 - RNA, 19 nt, Artificial Sequence
  Description of Artificial Sequence: Synthetic oligonucleotide
gcgaagguugcaggcacug

SEQ ID NO: 209027 - RNA, 19 nt, Artificial Sequence
  Description of Artificial Sequence: Synthetic oligonucleotide
agcgaagguugcaggcacu

SEQ ID NO: 209028 - RNA, 19 nt, Artificial Sequence
  Description of Artificial Sequence: Synthetic oligonucleotide
cgaggaguuacucgcucac

SEQ ID NO: 209029 - RNA, 19 nt, Artificial Sequence
  Description of Artificial Sequence: Synthetic oligonucleotide
cagcguauaauugggguuu

SEQ ID NO: 209030 - RNA, 19 nt, Artificial Sequence
  Description of Artificial Sequence: Synthetic oligonucleotide
  modified_base (3)..(3): a, c, u, g, unknown or other
gcnguuugggugagauuca

SEQ ID NO: 209031 - RNA, 19 nt, Artificial Sequence
  Description of Artificial Sequence: Synthetic oligonucleotide
gcguauaauugggguuucc

SEQ ID NO: 209032 - RNA, 19 nt, Artificial Sequence
  Description of Artificial Sequence: Synthetic oligonucleotide
gaccacggcaggaguaggu

SEQ ID NO: 209033 - RNA, 19 nt, Artificial Sequence
  Description of Artificial Sequence: Synthetic oligonucleotide
gugcaagacggaucaugau

SEQ ID NO: 209034 - RNA, 19 nt, Artificial Sequence
  Description of Artificial Sequence: Synthetic oligonucleotide
augucgcaaggaagaccug

SEQ ID NO: 209035 - RNA, 19 nt, Artificial Sequence
  Description of Artificial Sequence: Synthetic oligonucleotide
gcaacaauucuaggaauuu

SEQ ID NO: 209036 - RNA, 19 nt, Artificial Sequence
  Description of Artificial Sequence: Synthetic oligonucleotide
cuccuacaauccaaaucau

SEQ ID NO: 209037 - RNA, 19 nt, Artificial Sequence
  Description of Artificial Sequence: Synthetic oligonucleotide
cacagagaguggcaaugau

SEQ ID NO: 209038 - RNA, 19 nt, Artificial Sequence
  Description of Artificial Sequence: Synthetic oligonucleotide
gccuuaggagccacguauc

SEQ ID NO: 209039 - RNA, 19 nt, Artificial Sequence
  Description of Artificial Sequence: Synthetic oligonucleotide
caaguggaggcgcuagcuu

SEQ ID NO: 209040 - RNA, 19 nt, Artificial Sequence
  Description of Artificial Sequence: Synthetic oligonucleotide
ccgaggaguuacucgcuca

SEQ ID NO: 209041 - RNA, 19 nt, Artificial Sequence
  Description of Artificial Sequence: Synthetic oligonucleotide
uggccccauucaguacacu

SEQ ID NO: 209042 - RNA, 19 nt, Artificial Sequence
  Description of Artificial Sequence: Synthetic oligonucleotide
gcacaccguccaauggccc

SEQ ID NO: 209043 - RNA, 19 nt, Artificial Sequence
  Description of Artificial Sequence: Synthetic oligonucleotide
augacggaagggacccauu

SEQ ID NO: 209044 - RNA, 19 nt, Artificial Sequence
  Description of Artificial Sequence: Synthetic oligonucleotide
acguauccgccaggcgcca

SEQ ID NO: 209045 - RNA, 19 nt, Artificial Sequence
  Description of Artificial Sequence: Synthetic oligonucleotide
ccggcaguaguaaacuuuu

SEQ ID NO: 209046 - RNA, 19 nt, Artificial Sequence
  Description of Artificial Sequence: Synthetic oligonucleotide
guccuacagcuccuguguu

SEQ ID NO: 209047 - RNA, 19 nt, Artificial Sequence
  Description of Artificial Sequence: Synthetic oligonucleotide
cguauaauugggguuuccu

SEQ ID NO: 209048 - RNA, 19 nt, Artificial Sequence
  Description of Artificial Sequence: Synthetic oligonucleotide
ccaugccuauacccgugga

SEQ ID NO: 209049 - RNA, 19 nt, Artificial Sequence
  Description of Artificial Sequence: Synthetic oligonucleotide
gugcucgggaugacaccaa

SEQ ID NO: 209050 - RNA, 19 nt, Artificial Sequence
  Description of Artificial Sequence: Synthetic oligonucleotide
ccccauucaguacacucau

SEQ ID NO: 209051 - RNA, 19 nt, Artificial Sequence
  Description of Artificial Sequence: Synthetic oligonucleotide
gccccggcaguaguaaacu

SEQ ID NO: 209052 - RNA, 19 nt, Artificial Sequence
  Description of Artificial Sequence: Synthetic oligonucleotide
ccauaccgggaagccgaug

SEQ ID NO: 209053 - RNA, 19 nt, Artificial Sequence
  Description of Artificial Sequence: Synthetic oligonucleotide
cggcauauucuccuacaau

SEQ ID NO: 209054 - RNA, 19 nt, Artificial Sequence
  Description of Artificial Sequence: Synthetic oligonucleotide
cccauucaguacacucauu

SEQ ID NO: 209055 - RNA, 19 nt, Artificial Sequence
  Description of Artificial Sequence: Synthetic oligonucleotide
cgggaagccgaugaagcuu

SEQ ID NO: 209056 - RNA, 19 nt, Artificial Sequence
  Description of Artificial Sequence: Synthetic oligonucleotide
gccauaccgggaagccgau

SEQ ID NO: 209057 - RNA, 19 nt, Artificial Sequence
  Description of Artificial Sequence: Synthetic oligonucleotide
ccccggcaguaguaaacuu

SEQ ID NO: 209058 - RNA, 19 nt, Artificial Sequence
  Description of Artificial Sequence: Synthetic oligonucleotide
cggccuuaggagccacgua

SEQ ID NO: 209059 - RNA, 19 nt, Artificial Sequence
  Description of Artificial Sequence: Synthetic oligonucleotide
gccaggcgccaugccuaua

SEQ ID NO: 209060 - RNA, 19 nt, Artificial Sequence
  Description of Artificial Sequence: Synthetic oligonucleotide
ugaauuacauuuuagauag

SEQ ID NO: 209061 - RNA, 19 nt, Artificial Sequence
  Description of Artificial Sequence: Synthetic oligonucleotide
uauauauauauauauacag

SEQ ID NO: 209062 - RNA, 19 nt, Artificial Sequence
  Description of Artificial Sequence: Synthetic oligonucleotide
aaagauaccagcuuacuag

SEQ ID NO: 209063 - RNA, 19 nt, Artificial Sequence
  Description of Artificial Sequence: Synthetic oligonucleotide
uauauauauauauauauac

SEQ ID NO: 209064 - RNA, 19 nt, Artificial Sequence
  Description of Artificial Sequence: Synthetic oligonucleotide
ucuauaauuuccuucaggg

SEQ ID NO: 209065 - RNA, 19 nt, Artificial Sequence
  Description of Artificial Sequence: Synthetic oligonucleotide
aaauagucuacacugacag

SEQ ID NO: 209066 - RNA, 19 nt, Artificial Sequence
  Description of Artificial Sequence: Synthetic oligonucleotide
auagaaaucaguucagccc

SEQ ID NO: 209067 - RNA, 19 nt, Artificial Sequence
  Description of Artificial Sequence: Synthetic oligonucleotide
aagugauauacuuauuugg

SEQ ID NO: 209068 - RNA, 19 nt, Artificial Sequence
  Description of Artificial Sequence: Synthetic oligonucleotide
aaagauuaaacaccaaucu

SEQ ID NO: 209069 - RNA, 19 nt, Artificial Sequence
  Description of Artificial Sequence: Synthetic oligonucleotide
uauauauauauauauauau

SEQ ID NO: 209070 - RNA, 19 nt, Artificial Sequence
  Description of Artificial Sequence: Synthetic oligonucleotide
uuaaguaaagacaugcaug

SEQ ID NO: 209071 - RNA, 19 nt, Artificial Sequence
  Description of Artificial Sequence: Synthetic oligonucleotide
uguauauauauauauauau

SEQ ID NO: 209072 - RNA, 19 nt, Artificial Sequence
  Description of Artificial Sequence: Synthetic oligonucleotide
aucucuaaaagcuaucugg

SEQ ID NO: 209073 - RNA, 19 nt, Artificial Sequence
  Description of Artificial Sequence: Synthetic oligonucleotide
uauauauauauauacagua

SEQ ID NO: 209074 - RNA, 19 nt, Artificial Sequence
  Description of Artificial Sequence: Synthetic oligonucleotide
aaugcuacgauguuauuca

SEQ ID NO: 209075 - RNA, 19 nt, Artificial Sequence
  Description of Artificial Sequence: Synthetic oligonucleotide
ucuguuaccaacaaauaca

SEQ ID NO: 209076 - RNA, 19 nt, Artificial Sequence
  Description of Artificial Sequence: Synthetic oligonucleotide
uuaucagagaaccaaagac

SEQ ID NO: 209077 - RNA, 19 nt, Artificial Sequence
  Description of Artificial Sequence: Synthetic oligonucleotide
aauucuaacagcaugaaaa

SEQ ID NO: 209078 - RNA, 19 nt, Artificial Sequence
  Description of Artificial Sequence: Synthetic oligonucleotide
uguaaagugcauuuuauac

SEQ ID NO: 209079 - RNA, 19 nt, Artificial Sequence
  Description of Artificial Sequence: Synthetic oligonucleotide
ugucauacaaauaaugggu

SEQ ID NO: 209080 - RNA, 19 nt, Artificial Sequence
  Description of Artificial Sequence: Synthetic oligonucleotide
agacucuuaagauucaaac

SEQ ID NO: 209081 - RNA, 19 nt, Artificial Sequence
  Description of Artificial Sequence: Synthetic oligonucleotide
uuugucaggacaaaggaac

SEQ ID NO: 209082 - RNA, 19 nt, Artificial Sequence
  Description of Artificial Sequence: Synthetic oligonucleotide
cugauuuaagucaugaaag

SEQ ID NO: 209083 - RNA, 19 nt, Artificial Sequence
  Description of Artificial Sequence: Synthetic oligonucleotide
aaagaguauauuguguaac

SEQ ID NO: 209084 - RNA, 19 nt, Artificial Sequence
  Description of Artificial Sequence: Synthetic oligonucleotide
uguguauauauauauauau

SEQ ID NO: 209085 - RNA, 19 nt, Artificial Sequence
  Description of Artificial Sequence: Synthetic oligonucleotide
ucaugauuuauaaugggca

SEQ ID NO: 209086 - RNA, 19 nt, Artificial Sequence
  Description of Artificial Sequence: Synthetic oligonucleotide
aaacuagaauccuacaugu

SEQ ID NO: 209087 - RNA, 19 nt, Artificial Sequence
  Description of Artificial Sequence: Synthetic oligonucleotide
cuuaucuuaaaacucauuc

SEQ ID NO: 209088 - RNA, 19 nt, Artificial Sequence
  Description of Artificial Sequence: Synthetic oligonucleotide
ugacuuuccacauaaagcu

SEQ ID NO: 209089 - RNA, 19 nt, Artificial Sequence
  Description of Artificial Sequence: Synthetic oligonucleotide
uauauauauauacaguaua

SEQ ID NO: 209090 - RNA, 19 nt, Artificial Sequence
  Description of Artificial Sequence: Synthetic oligonucleotide
augucauacaaauaauggg

SEQ ID NO: 209091 - RNA, 19 nt, Artificial Sequence
  Description of Artificial Sequence: Synthetic oligonucleotide
aaauaagucacuaaacaca

SEQ ID NO: 209092 - RNA, 19 nt, Artificial Sequence
  Description of Artificial Sequence: Synthetic oligonucleotide
gaaacuagaauccuacaug

SEQ ID NO: 209093 - RNA, 19 nt, Artificial Sequence
  Description of Artificial Sequence: Synthetic oligonucleotide
uucaguaagaaaccccugg

SEQ ID NO: 209094 - RNA, 19 nt, Artificial Sequence
  Description of Artificial Sequence: Synthetic oligonucleotide
cacuaaauaauacugaauc

SEQ ID NO: 209095 - RNA, 19 nt, Artificial Sequence
  Description of Artificial Sequence: Synthetic oligonucleotide
uauguguauauauauauau

SEQ ID NO: 209096 - RNA, 19 nt, Artificial Sequence
  Description of Artificial Sequence: Synthetic oligonucleotide
aaagaggcuaaauuaucag

SEQ ID NO: 209097 - RNA, 19 nt, Artificial Sequence
  Description of Artificial Sequence: Synthetic oligonucleotide
ugcuaaaaugguuauuccg

SEQ ID NO: 209098 - RNA, 19 nt, Artificial Sequence
  Description of Artificial Sequence: Synthetic oligonucleotide
agcucuauucccuaauagc

SEQ ID NO: 209099 - RNA, 19 nt, Artificial Sequence
  Description of Artificial Sequence: Synthetic oligonucleotide
ugaauuugaggcaagaguu

SEQ ID NO: 209100 - RNA, 19 nt, Artificial Sequence
  Description of Artificial Sequence: Synthetic oligonucleotide
acagcaacgaacuugagau

SEQ ID NO: 209101 - RNA, 19 nt, Artificial Sequence
  Description of Artificial Sequence: Synthetic oligonucleotide
aaauaauacugaaucauug

SEQ ID NO: 209102 - RNA, 19 nt, Artificial Sequence
  Description of Artificial Sequence: Synthetic oligonucleotide
aaguguuggcaucaguaac

SEQ ID NO: 209103 - RNA, 19 nt, Artificial Sequence
  Description of Artificial Sequence: Synthetic oligonucleotide
uugaauuugaggcaagagu

SEQ ID NO: 209104 - RNA, 19 nt, Artificial Sequence
  Description of Artificial Sequence: Synthetic oligonucleotide
ucuaccgaauacaaaagca

SEQ ID NO: 209105 - RNA, 19 nt, Artificial Sequence
  Description of Artificial Sequence: Synthetic oligonucleotide
aauagucuacacugacagc

SEQ ID NO: 209106 - RNA, 19 nt, Artificial Sequence
  Description of Artificial Sequence: Synthetic oligonucleotide
ucgucaucugcauaggugg

SEQ ID NO: 209107 - RNA, 19 nt, Artificial Sequence
  Description of Artificial Sequence: Synthetic oligonucleotide
uucaacuaguuaaugggag

SEQ ID NO: 209108 - RNA, 19 nt, Artificial Sequence
  Description of Artificial Sequence: Synthetic oligonucleotide
ugugguacagcaacgaacu

SEQ ID NO: 209109 - RNA, 19 nt, Artificial Sequence
  Description of Artificial Sequence: Synthetic oligonucleotide
cugacuuuccacauaaagc

SEQ ID NO: 209110 - RNA, 19 nt, Artificial Sequence
  Description of Artificial Sequence: Synthetic oligonucleotide
ucuaacugaccuuugucag

SEQ ID NO: 209111 - RNA, 19 nt, Artificial Sequence
  Description of Artificial Sequence: Synthetic oligonucleotide
uagucuaccgaauacaaaa

SEQ ID NO: 209112 - RNA, 19 nt, Artificial Sequence
  Description of Artificial Sequence: Synthetic oligonucleotide
aaccguugaagucaguuca

SEQ ID NO: 209113 - RNA, 19 nt, Artificial Sequence
  Description of Artificial Sequence: Synthetic oligonucleotide
uuauaaugggcauuucagc

SEQ ID NO: 209114 - RNA, 19 nt, Artificial Sequence
  Description of Artificial Sequence: Synthetic oligonucleotide
uuaacuuucccaccuauau

SEQ ID NO: 209115 - RNA, 19 nt, Artificial Sequence
  Description of Artificial Sequence: Synthetic oligonucleotide
auaugcauauaucaauuug

SEQ ID NO: 209116 - RNA, 19 nt, Artificial Sequence
  Description of Artificial Sequence: Synthetic oligonucleotide
ucaacuaguuaaugggagg

SEQ ID NO: 209117 - RNA, 19 nt, Artificial Sequence
  Description of Artificial Sequence: Synthetic oligonucleotide
uaacaaagaggcuaaauua

SEQ ID NO: 209118 - RNA, 19 nt, Artificial Sequence
  Description of Artificial Sequence: Synthetic oligonucleotide
auuaaguaaagacaugcau

SEQ ID NO: 209119 - RNA, 19 nt, Artificial Sequence
  Description of Artificial Sequence: Synthetic oligonucleotide
agugccauaagguaguccu

SEQ ID NO: 209120 - RNA, 19 nt, Artificial Sequence
  Description of Artificial Sequence: Synthetic oligonucleotide
uuggcuacaagugacaaca

SEQ ID NO: 209121 - RNA, 19 nt, Artificial Sequence
  Description of Artificial Sequence: Synthetic oligonucleotide
aguuauagcugcuuccuag

SEQ ID NO: 209122 - RNA, 19 nt, Artificial Sequence
  Description of Artificial Sequence: Synthetic oligonucleotide
auauaucaauuuguuaagc

SEQ ID NO: 209123 - RNA, 19 nt, Artificial Sequence
  Description of Artificial Sequence: Synthetic oligonucleotide
cauauaucaauuuguuaag

SEQ ID NO: 209124 - RNA, 19 nt, Artificial Sequence
  Description of Artificial Sequence: Synthetic oligonucleotide
guaguccugaucuauuugg

SEQ ID NO: 209125 - RNA, 19 nt, Artificial Sequence
  Description of Artificial Sequence: Synthetic oligonucleotide
uuauuuggcuacaagugac

SEQ ID NO: 209126 - RNA, 19 nt, Artificial Sequence
  Description of Artificial Sequence: Synthetic oligonucleotide
ucagaagauagaaacuaga

SEQ ID NO: 209127 - RNA, 19 nt, Artificial Sequence
  Description of Artificial Sequence: Synthetic oligonucleotide
ucucuaaaagcuaucugga

SEQ ID NO: 209128 - RNA, 19 nt, Artificial Sequence
  Description of Artificial Sequence: Synthetic oligonucleotide
agauuaaacaccaaucucu

SEQ ID NO: 209129 - RNA, 19 nt, Artificial Sequence
  Description of Artificial Sequence: Synthetic oligonucleotide
auagaggauguacaguguc

SEQ ID NO: 209130 - RNA, 19 nt, Artificial Sequence
  Description of Artificial Sequence: Synthetic oligonucleotide
ucgaaauaauucuacaaau

SEQ ID NO: 209131 - RNA, 19 nt, Artificial Sequence
  Description of Artificial Sequence: Synthetic oligonucleotide
uccaacuuguaacauaaaa

SEQ ID NO: 209132 - RNA, 19 nt, Artificial Sequence
  Description of Artificial Sequence: Synthetic oligonucleotide
ucccuaauagcagagauac

SEQ ID NO: 209133 - RNA, 19 nt, Artificial Sequence
  Description of Artificial Sequence: Synthetic oligonucleotide
cuuaagauucaaacauucc

SEQ ID NO: 209134 - RNA, 19 nt, Artificial Sequence
  Description of Artificial Sequence: Synthetic oligonucleotide
aagcucuauucccuaauag

SEQ ID NO: 209135 - RNA, 19 nt, Artificial Sequence
  Description of Artificial Sequence: Synthetic oligonucleotide
caaauaaugggugggaaag

SEQ ID NO: 209136 - RNA, 19 nt, Artificial Sequence
  Description of Artificial Sequence: Synthetic oligonucleotide
acuacuagagccaaaggag

SEQ ID NO: 209137 - RNA, 19 nt, Artificial Sequence
  Description of Artificial Sequence: Synthetic oligonucleotide
auagucuacacugacagca

SEQ ID NO: 209138 - RNA, 19 nt, Artificial Sequence
  Description of Artificial Sequence: Synthetic oligonucleotide
uugaccuuuguacacaguc

SEQ ID NO: 209139 - RNA, 19 nt, Artificial Sequence
  Description of Artificial Sequence: Synthetic oligonucleotide
aauaagucacuaaacacaa

SEQ ID NO: 209140 - RNA, 19 nt, Artificial Sequence
  Description of Artificial Sequence: Synthetic oligonucleotide
auacaguugacccuugugu

SEQ ID NO: 209141 - RNA, 19 nt, Artificial Sequence
  Description of Artificial Sequence: Synthetic oligonucleotide
agaagugauauacuuauuu

SEQ ID NO: 209142 - RNA, 19 nt, Artificial Sequence
  Description of Artificial Sequence: Synthetic oligonucleotide
uuagaucucuaaaagcuau

SEQ ID NO: 209143 - RNA, 19 nt, Artificial Sequence
  Description of Artificial Sequence: Synthetic oligonucleotide
aucucaguaagucuuggug

SEQ ID NO: 209144 - RNA, 19 nt, Artificial Sequence
  Description of Artificial Sequence: Synthetic oligonucleotide
aauccaacgaugacacuac

SEQ ID NO: 209145 - RNA, 19 nt, Artificial Sequence
  Description of Artificial Sequence: Synthetic oligonucleotide
guucaugauuuauaauggg

SEQ ID NO: 209146 - RNA, 19 nt, Artificial Sequence
  Description of Artificial Sequence: Synthetic oligonucleotide
aaacaccaaucucuuaucu

SEQ ID NO: 209147 - RNA, 19 nt, Artificial Sequence
  Description of Artificial Sequence: Synthetic oligonucleotide
aaaugguuauuccgaaaga

SEQ ID NO: 209148 - RNA, 19 nt, Artificial Sequence
  Description of Artificial Sequence: Synthetic oligonucleotide
auauauauauauauauaca

SEQ ID NO: 209149 - RNA, 19 nt, Artificial Sequence
  Description of Artificial Sequence: Synthetic oligonucleotide
agaagauagaaacuagaau

SEQ ID NO: 209150 - RNA, 19 nt, Artificial Sequence
  Description of Artificial Sequence: Synthetic oligonucleotide
cauuccaugaguuauagcu

SEQ ID NO: 209151 - RNA, 19 nt, Artificial Sequence
  Description of Artificial Sequence: Synthetic oligonucleotide
cuagacaagucuaacugac

SEQ ID NO: 209152 - RNA, 19 nt, Artificial Sequence
  Description of Artificial Sequence: Synthetic oligonucleotide
accgaauacaaaagcaacc

SEQ ID NO: 209153 - RNA, 19 nt, Artificial Sequence
  Description of Artificial Sequence: Synthetic oligonucleotide
gcauauaucaauuuguuaa

SEQ ID NO: 209154 - RNA, 19 nt, Artificial Sequence
  Description of Artificial Sequence: Synthetic oligonucleotide
gauaccaggauuaaguaaa

SEQ ID NO: 209155 - RNA, 19 nt, Artificial Sequence
  Description of Artificial Sequence: Synthetic oligonucleotide
uuccguucaauauuuccag

SEQ ID NO: 209156 - RNA, 19 nt, Artificial Sequence
  Description of Artificial Sequence: Synthetic oligonucleotide
aaagcuaucuggagaacag

SEQ ID NO: 209157 - RNA, 19 nt, Artificial Sequence
  Description of Artificial Sequence: Synthetic oligonucleotide
uuccacauaaagcugggaa

SEQ ID NO: 209158 - RNA, 19 nt, Artificial Sequence
  Description of Artificial Sequence: Synthetic oligonucleotide
uuauuccgaaagaacacac

SEQ ID NO: 209159 - RNA, 19 nt, Artificial Sequence
  Description of Artificial Sequence: Synthetic oligonucleotide
aaaagcuaucuggagaaca

SEQ ID NO: 209160 - RNA, 19 nt, Artificial Sequence
  Description of Artificial Sequence: Synthetic oligonucleotide
agucacuaaacacaaaaua

SEQ ID NO: 209161 - RNA, 19 nt, Artificial Sequence
  Description of Artificial Sequence: Synthetic oligonucleotide
auucgaaauaauucuacaa

SEQ ID NO: 209162 - RNA, 19 nt, Artificial Sequence
  Description of Artificial Sequence: Synthetic oligonucleotide
agagauaccaggauuaagu

SEQ ID NO: 209163 - RNA, 19 nt, Artificial Sequence
  Description of Artificial Sequence: Synthetic oligonucleotide
auauauauauauauacagu

SEQ ID NO: 209164 - RNA, 19 nt, Artificial Sequence
  Description of Artificial Sequence: Synthetic oligonucleotide
uuacuagacaagucuaacu

SEQ ID NO: 209165 - RNA, 19 nt, Artificial Sequence
  Description of Artificial Sequence: Synthetic oligonucleotide
aauuugaggcaagaguuga

SEQ ID NO: 209166 - RNA, 19 nt, Artificial Sequence
  Description of Artificial Sequence: Synthetic oligonucleotide
ucaaugucuuuucaggaau

SEQ ID NO: 209167 - RNA, 19 nt, Artificial Sequence
  Description of Artificial Sequence: Synthetic oligonucleotide
uagauagauuuucaaagua

SEQ ID NO: 209168 - RNA, 19 nt, Artificial Sequence
  Description of Artificial Sequence: Synthetic oligonucleotide
ucaguaacaaagaggcuaa

SEQ ID NO: 209169 - RNA, 19 nt, Artificial Sequence
  Description of Artificial Sequence: Synthetic oligonucleotide
agugguucaugauuuauaa

SEQ ID NO: 209170 - RNA, 19 nt, Artificial Sequence
  Description of Artificial Sequence: Synthetic oligonucleotide
acacuagucuaccgaauac

SEQ ID NO: 209171 - RNA, 19 nt, Artificial Sequence
  Description of Artificial Sequence: Synthetic oligonucleotide
uuugaggcaagaguugaag

SEQ ID NO: 209172 - RNA, 19 nt, Artificial Sequence
  Description of Artificial Sequence: Synthetic oligonucleotide
agcaaaauccauugggaga

SEQ ID NO: 209173 - RNA, 19 nt, Artificial Sequence
  Description of Artificial Sequence: Synthetic oligonucleotide
acauucgaaauaauucuac

SEQ ID NO: 209174 - RNA, 19 nt, Artificial Sequence
  Description of Artificial Sequence: Synthetic oligonucleotide
aacaaagaggcuaaauuau

SEQ ID NO: 209175 - RNA, 19 nt, Artificial Sequence
  Description of Artificial Sequence: Synthetic oligonucleotide
guuaccaacaaauacaguu

SEQ ID NO: 209176 - RNA, 19 nt, Artificial Sequence
  Description of Artificial Sequence: Synthetic oligonucleotide
aaauucuaacagcaugaaa

SEQ ID NO: 209177 - RNA, 19 nt, Artificial Sequence
  Description of Artificial Sequence: Synthetic oligonucleotide
uguguuuugucauggugcu

SEQ ID NO: 209178 - RNA, 19 nt, Artificial Sequence
  Description of Artificial Sequence: Synthetic oligonucleotide
aaaccccuggucuguuacc

SEQ ID NO: 209179 - RNA, 19 nt, Artificial Sequence
  Description of Artificial Sequence: Synthetic oligonucleotide
guuuccguucaauauuucc

SEQ ID NO: 209180 - RNA, 19 nt, Artificial Sequence
  Description of Artificial Sequence: Synthetic oligonucleotide
acgcuuagaucucuaaaag

SEQ ID NO: 209181 - RNA, 19 nt, Artificial Sequence
  Description of Artificial Sequence: Synthetic oligonucleotide
gacacuacacuugugguac

SEQ ID NO: 209182 - RNA, 19 nt, Artificial Sequence
  Description of Artificial Sequence: Synthetic oligonucleotide
aacgaugacacuacacuug

SEQ ID NO: 209183 - RNA, 19 nt, Artificial Sequence
  Description of Artificial Sequence: Synthetic oligonucleotide
agcacccucacauagagua

SEQ ID NO: 209184 - RNA, 19 nt, Artificial Sequence
  Description of Artificial Sequence: Synthetic oligonucleotide
acaaauucuaacagcauga

SEQ ID NO: 209185 - RNA, 19 nt, Artificial Sequence
  Description of Artificial Sequence: Synthetic oligonucleotide
uaauccaacgaugacacua

SEQ ID NO: 209186 - RNA, 19 nt, Artificial Sequence
  Description of Artificial Sequence: Synthetic oligonucleotide
caacuaguuaaugggaggg

SEQ ID NO: 209187 - RNA, 19 nt, Artificial Sequence
  Description of Artificial Sequence: Synthetic oligonucleotide
uaaagaguauauuguguaa

SEQ ID NO: 209188 - RNA, 19 nt, Artificial Sequence
  Description of Artificial Sequence: Synthetic oligonucleotide
cuaacugaccuuugucagg

SEQ ID NO: 209189 - RNA, 19 nt, Artificial Sequence
  Description of Artificial Sequence: Synthetic oligonucleotide
gaucucuaaaagcuaucug

SEQ ID NO: 209190 - RNA, 19 nt, Artificial Sequence
  Description of Artificial Sequence: Synthetic oligonucleotide
uauuuggcuacaagugaca

SEQ ID NO: 209191 - RNA, 19 nt, Artificial Sequence
  Description of Artificial Sequence: Synthetic oligonucleotide
ugacuacuagagccaaagg

SEQ ID NO: 209192 - RNA, 19 nt, Artificial Sequence
  Description of Artificial Sequence: Synthetic oligonucleotide
augacuacuagagccaaag

SEQ ID NO: 209193 - RNA, 19 nt, Artificial Sequence
  Description of Artificial Sequence: Synthetic oligonucleotide
acuagacaagucuaacuga

SEQ ID NO: 209194 - RNA, 19 nt, Artificial Sequence
  Description of Artificial Sequence: Synthetic oligonucleotide
cucacauagaguaaacgga

SEQ ID NO: 209195 - RNA, 19 nt, Artificial Sequence
  Description of Artificial Sequence: Synthetic oligonucleotide
gacaaaggaacauugaauu

SEQ ID NO: 209196 - RNA, 19 nt, Artificial Sequence
  Description of Artificial Sequence: Synthetic oligonucleotide
gauaccagcuuacuagaca

SEQ ID NO: 209197 - RNA, 19 nt, Artificial Sequence
  Description of Artificial Sequence: Synthetic oligonucleotide
gaguaaacggacugcaaca

SEQ ID NO: 209198 - RNA, 19 nt, Artificial Sequence
  Description of Artificial Sequence: Synthetic oligonucleotide
cuuguugaccuuuguacac

SEQ ID NO: 209199 - RNA, 19 nt, Artificial Sequence
  Description of Artificial Sequence: Synthetic oligonucleotide
ccucacauagaguaaacgg

SEQ ID NO: 209200 - RNA, 19 nt, Artificial Sequence
  Description of Artificial Sequence: Synthetic oligonucleotide
uccacauaaagcugggaaa

SEQ ID NO: 209201 - RNA, 19 nt, Artificial Sequence
  Description of Artificial Sequence: Synthetic oligonucleotide
aagucuaacugaccuuugu

SEQ ID NO: 209202 - RNA, 19 nt, Artificial Sequence
  Description of Artificial Sequence: Synthetic oligonucleotide
aggcuaaauuaucagagaa

SEQ ID NO: 209203 - RNA, 19 nt, Artificial Sequence
  Description of Artificial Sequence: Synthetic oligonucleotide
ugacccuuguguuuuguca

SEQ ID NO: 209204 - RNA, 19 nt, Artificial Sequence
  Description of Artificial Sequence: Synthetic oligonucleotide
ccaacuuguaacauaaaac

SEQ ID NO: 209205 - RNA, 19 nt, Artificial Sequence
  Description of Artificial Sequence: Synthetic oligonucleotide
ugauuuauaaugggcauuu

SEQ ID NO: 209206 - RNA, 19 nt, Artificial Sequence
  Description of Artificial Sequence: Synthetic oligonucleotide
aguccugaucuauuugguc

SEQ ID NO: 209207 - RNA, 19 nt, Artificial Sequence
  Description of Artificial Sequence: Synthetic oligonucleotide
agacgguagguacuggguc

SEQ ID NO: 209208 - RNA, 19 nt, Artificial Sequence
  Description of Artificial Sequence: Synthetic oligonucleotide
augguaugucaguugagug

SEQ ID NO: 209209 - RNA, 19 nt, Artificial Sequence
  Description of Artificial Sequence: Synthetic oligonucleotide
ccaaagacucuuaagauuc

SEQ ID NO: 209210 - RNA, 19 nt, Artificial Sequence
  Description of Artificial Sequence: Synthetic oligonucleotide
uuugacaaauaagucacua

SEQ ID NO: 209211 - RNA, 19 nt, Artificial Sequence
  Description of Artificial Sequence: Synthetic oligonucleotide
caaagaggcuaaauuauca

SEQ ID NO: 209212 - RNA, 19 nt, Artificial Sequence
  Description of Artificial Sequence: Synthetic oligonucleotide
ucuauuuggucuuguugac

SEQ ID NO: 209213 - RNA, 19 nt, Artificial Sequence
  Description of Artificial Sequence: Synthetic oligonucleotide
ugguacagcaacgaacuug

SEQ ID NO: 209214 - RNA, 19 nt, Artificial Sequence
  Description of Artificial Sequence: Synthetic oligonucleotide
ucuugacacuagucuaccg

SEQ ID NO: 209215 - RNA, 19 nt, Artificial Sequence
  Description of Artificial Sequence: Synthetic oligonucleotide
ggugucaugcccuaaaaga

SEQ ID NO: 209216 - RNA, 19 nt, Artificial Sequence
  Description of Artificial Sequence: Synthetic oligonucleotide
uccguucaauauuuccagg

SEQ ID NO: 209217 - RNA, 19 nt, Artificial Sequence
  Description of Artificial Sequence: Synthetic oligonucleotide
gucuaccgaauacaaaagc

SEQ ID NO: 209218 - RNA, 19 nt, Artificial Sequence
  Description of Artificial Sequence: Synthetic oligonucleotide
uucccaccuauauucaaug

SEQ ID NO: 209219 - RNA, 19 nt, Artificial Sequence
  Description of Artificial Sequence: Synthetic oligonucleotide
auauauauauauacaguau

SEQ ID NO: 209220 - RNA, 19 nt, Artificial Sequence
  Description of Artificial Sequence: Synthetic oligonucleotide
ugaaucauugugucagaaa

SEQ ID NO: 209221 - RNA, 19 nt, Artificial Sequence
  Description of Artificial Sequence: Synthetic oligonucleotide
auauauauauauauauaua

SEQ ID NO: 209222 - RNA, 19 nt, Artificial Sequence
  Description of Artificial Sequence: Synthetic oligonucleotide
agucuugacacuagucuac

SEQ ID NO: 209223 - RNA, 19 nt, Artificial Sequence
  Description of Artificial Sequence: Synthetic oligonucleotide
uagaauccuacauguaaaa

SEQ ID NO: 209224 - RNA, 19 nt, Artificial Sequence
  Description of Artificial Sequence: Synthetic oligonucleotide
cauagaguaaacggacugc

SEQ ID NO: 209225 - RNA, 19 nt, Artificial Sequence
  Description of Artificial Sequence: Synthetic oligonucleotide
uaacugaccuuugucagga

SEQ ID NO: 209226 - RNA, 19 nt, Artificial Sequence
  Description of Artificial Sequence: Synthetic oligonucleotide
uugacacuagucuaccgaa

SEQ ID NO: 209227 - RNA, 19 nt, Artificial Sequence
  Description of Artificial Sequence: Synthetic oligonucleotide
aacaaauagucuacacuga

SEQ ID NO: 209228 - RNA, 19 nt, Artificial Sequence
  Description of Artificial Sequence: Synthetic oligonucleotide
uuguaacauaaaacuccag

SEQ ID NO: 209229 - RNA, 19 nt, Artificial Sequence
  Description of Artificial Sequence: Synthetic oligonucleotide
aagcuaucuggagaacagg

SEQ ID NO: 209230 - RNA, 19 nt, Artificial Sequence
  Description of Artificial Sequence: Synthetic oligonucleotide
gaauuugaggcaagaguug

SEQ ID NO: 209231 - RNA, 19 nt, Artificial Sequence
  Description of Artificial Sequence: Synthetic oligonucleotide
ugacuugcacaccaucaga

SEQ ID NO: 209232 - RNA, 19 nt, Artificial Sequence
  Description of Artificial Sequence: Synthetic oligonucleotide
uggcauuuacucaggagaa

SEQ ID NO: 209233 - RNA, 19 nt, Artificial Sequence
  Description of Artificial Sequence: Synthetic oligonucleotide
acuaguuaaugggagggug

SEQ ID NO: 209234 - RNA, 19 nt, Artificial Sequence
  Description of Artificial Sequence: Synthetic oligonucleotide
aacaagagcaaaauccauu

SEQ ID NO: 209235 - RNA, 19 nt, Artificial Sequence
  Description of Artificial Sequence: Synthetic oligonucleotide
cacuaaaccacaaacaaau

SEQ ID NO: 209236 - RNA, 19 nt, Artificial Sequence
  Description of Artificial Sequence: Synthetic oligonucleotide
cuauucccuaauagcagag

SEQ ID NO: 209237 - RNA, 19 nt, Artificial Sequence
  Description of Artificial Sequence: Synthetic oligonucleotide
aacaaacauucugacagau

SEQ ID NO: 209238 - RNA, 19 nt, Artificial Sequence
  Description of Artificial Sequence: Synthetic oligonucleotide
agaucucuaaaagcuaucu

SEQ ID NO: 209239 - RNA, 19 nt, Artificial Sequence
  Description of Artificial Sequence: Synthetic oligonucleotide
caugaguuauagcugcuuc

SEQ ID NO: 209240 - RNA, 19 nt, Artificial Sequence
  Description of Artificial Sequence: Synthetic oligonucleotide
cucaaaguguggcauuuac

SEQ ID NO: 209241 - RNA, 19 nt, Artificial Sequence
  Description of Artificial Sequence: Synthetic oligonucleotide
ugucaugcccuaaaagaua

SEQ ID NO: 209242 - RNA, 19 nt, Artificial Sequence
  Description of Artificial Sequence: Synthetic oligonucleotide
aacaaugauuauauguaua

SEQ ID NO: 209243 - RNA, 19 nt, Artificial Sequence
  Description of Artificial Sequence: Synthetic oligonucleotide
ucggacugccuaccaaggg

SEQ ID NO: 209244 - RNA, 19 nt, Artificial Sequence
  Description of Artificial Sequence: Synthetic oligonucleotide
ucccugacuuuccacauaa

SEQ ID NO: 209245 - RNA, 19 nt, Artificial Sequence
  Description of Artificial Sequence: Synthetic oligonucleotide
cuuacuagacaagucuaac

SEQ ID NO: 209246 - RNA, 19 nt, Artificial Sequence
  Description of Artificial Sequence: Synthetic oligonucleotide
uagggcauuucuguuagga

SEQ ID NO: 209247 - RNA, 19 nt, Artificial Sequence
  Description of Artificial Sequence: Synthetic oligonucleotide
gacagaucagacauuuuca

SEQ ID NO: 209248 - RNA, 19 nt, Artificial Sequence
  Description of Artificial Sequence: Synthetic oligonucleotide
acgaugacacuacacuugu

SEQ ID NO: 209249 - RNA, 19 nt, Artificial Sequence
  Description of Artificial Sequence: Synthetic oligonucleotide
gaaccguugaagucaguuc

SEQ ID NO: 209250 - RNA, 19 nt, Artificial Sequence
  Description of Artificial Sequence: Synthetic oligonucleotide
agccaaaggagcucggacu

SEQ ID NO: 209251 - RNA, 19 nt, Artificial Sequence
  Description of Artificial Sequence: Synthetic oligonucleotide
agaggcucgucuguccucc

SEQ ID NO: 209252 - RNA, 19 nt, Artificial Sequence
  Description of Artificial Sequence: Synthetic oligonucleotide
uccaaaagugaaacuugaa

SEQ ID NO: 209253 - RNA, 19 nt, Artificial Sequence
  Description of Artificial Sequence: Synthetic oligonucleotide
cagaagauagaaacuagaa

SEQ ID NO: 209254 - RNA, 19 nt, Artificial Sequence
  Description of Artificial Sequence: Synthetic oligonucleotide
guauauauauauauauaua

SEQ ID NO: 209255 - RNA, 19 nt, Artificial Sequence
  Description of Artificial Sequence: Synthetic oligonucleotide
cauucgaaauaauucuaca

SEQ ID NO: 209256 - RNA, 19 nt, Artificial Sequence
  Description of Artificial Sequence: Synthetic oligonucleotide
uacaguugacccuuguguu

SEQ ID NO: 209257 - RNA, 19 nt, Artificial Sequence
  Description of Artificial Sequence: Synthetic oligonucleotide
cuugacacuagucuaccga

SEQ ID NO: 209258 - RNA, 19 nt, Artificial Sequence
  Description of Artificial Sequence: Synthetic oligonucleotide
ugaguggcuguauuguuua

SEQ ID NO: 209259 - RNA, 19 nt, Artificial Sequence
  Description of Artificial Sequence: Synthetic oligonucleotide
uauuccuagucuugacacu

SEQ ID NO: 209260 - RNA, 19 nt, Artificial Sequence
  Description of Artificial Sequence: Synthetic oligonucleotide
uaagcucuauucccuaaua

SEQ ID NO: 209261 - RNA, 19 nt, Artificial Sequence
  Description of Artificial Sequence: Synthetic oligonucleotide
aaauccauugggagaucag

SEQ ID NO: 209262 - RNA, 19 nt, Artificial Sequence
  Description of Artificial Sequence: Synthetic oligonucleotide
ugauaguacugagaggcuc

SEQ ID NO: 209263 - RNA, 19 nt, Artificial Sequence
  Description of Artificial Sequence: Synthetic oligonucleotide
uaaacgcuuagaucucuaa

SEQ ID NO: 209264 - RNA, 19 nt, Artificial Sequence
  Description of Artificial Sequence: Synthetic oligonucleotide
caaauagucuacacugaca

SEQ ID NO: 209265 - RNA, 19 nt, Artificial Sequence
  Description of Artificial Sequence: Synthetic oligonucleotide
agacaaguuuuagaggugu

SEQ ID NO: 209266 - RNA, 19 nt, Artificial Sequence
  Description of Artificial Sequence: Synthetic oligonucleotide
aguugaguggcuguauugu

SEQ ID NO: 209267 - RNA, 19 nt, Artificial Sequence
  Description of Artificial Sequence: Synthetic oligonucleotide
gaaaaguaaaguucuucau

SEQ ID NO: 209268 - RNA, 19 nt, Artificial Sequence
  Description of Artificial Sequence: Synthetic oligonucleotide
agcauucugcaagguaccc

SEQ ID NO: 209269 - RNA, 19 nt, Artificial Sequence
  Description of Artificial Sequence: Synthetic oligonucleotide
ugacacuacacuuguggua

SEQ ID NO: 209270 - RNA, 19 nt, Artificial Sequence
  Description of Artificial Sequence: Synthetic oligonucleotide
uguugcagugacagugcca

SEQ ID NO: 209271 - RNA, 19 nt, Artificial Sequence
  Description of Artificial Sequence: Synthetic oligonucleotide
uacaaauaaugggugggaa

SEQ ID NO: 209272 - RNA, 19 nt, Artificial Sequence
  Description of Artificial Sequence: Synthetic oligonucleotide
aggagcucggacugccuac

SEQ ID NO: 209273 - RNA, 19 nt, Artificial Sequence
  Description of Artificial Sequence: Synthetic oligonucleotide
uugaguggcuguauuguuu

SEQ ID NO: 209274 - RNA, 19 nt, Artificial Sequence
  Description of Artificial Sequence: Synthetic oligonucleotide
aacuaguuaaugggagggu

SEQ ID NO: 209275 - RNA, 19 nt, Artificial Sequence
  Description of Artificial Sequence: Synthetic oligonucleotide
aaaugacuacuagagccaa

SEQ ID NO: 209276 - RNA, 19 nt, Artificial Sequence
  Description of Artificial Sequence: Synthetic oligonucleotide
acacugauuuaagucauga

SEQ ID NO: 209277 - RNA, 19 nt, Artificial Sequence
  Description of Artificial Sequence: Synthetic oligonucleotide
uuccuagucuugacacuag

SEQ ID NO: 209278 - RNA, 19 nt, Artificial Sequence
  Description of Artificial Sequence: Synthetic oligonucleotide
cuguuuuacacuugaugga

SEQ ID NO: 209279 - RNA, 19 nt, Artificial Sequence
  Description of Artificial Sequence: Synthetic oligonucleotide
ugaaccguugaagucaguu

SEQ ID NO: 209280 - RNA, 19 nt, Artificial Sequence
  Description of Artificial Sequence: Synthetic oligonucleotide
ccugacuuuccacauaaag

SEQ ID NO: 209281 - RNA, 19 nt, Artificial Sequence
  Description of Artificial Sequence: Synthetic oligonucleotide
gucaugcccuaaaagauac

SEQ ID NO: 209282 - RNA, 19 nt, Artificial Sequence
  Description of Artificial Sequence: Synthetic oligonucleotide
agugaaacuugaaauuuaa

SEQ ID NO: 209283 - RNA, 19 nt, Artificial Sequence
  Description of Artificial Sequence: Synthetic oligonucleotide
cuauuuggucuuguugacc

SEQ ID NO: 209284 - RNA, 19 nt, Artificial Sequence
  Description of Artificial Sequence: Synthetic oligonucleotide
agucuaccgaauacaaaag

SEQ ID NO: 209285 - RNA, 19 nt, Artificial Sequence
  Description of Artificial Sequence: Synthetic oligonucleotide
agcaacgaacuugagauua

SEQ ID NO: 209286 - RNA, 19 nt, Artificial Sequence
  Description of Artificial Sequence: Synthetic oligonucleotide
acaaacauucugacagauc

SEQ ID NO: 209287 - RNA, 19 nt, Artificial Sequence
  Description of Artificial Sequence: Synthetic oligonucleotide
guuaccugagaaaaguaaa

SEQ ID NO: 209288 - RNA, 19 nt, Artificial Sequence
  Description of Artificial Sequence: Synthetic oligonucleotide
acaagucuaacugaccuuu

SEQ ID NO: 209289 - RNA, 19 nt, Artificial Sequence
  Description of Artificial Sequence: Synthetic oligonucleotide
uuaaacgcuuagaucucua

SEQ ID NO: 209290 - RNA, 19 nt, Artificial Sequence
  Description of Artificial Sequence: Synthetic oligonucleotide
ucauuccaugaguuauagc

SEQ ID NO: 209291 - RNA, 19 nt, Artificial Sequence
  Description of Artificial Sequence: Synthetic oligonucleotide
cucggacugccuaccaagg

SEQ ID NO: 209292 - RNA, 19 nt, Artificial Sequence
  Description of Artificial Sequence: Synthetic oligonucleotide
uguuaagcucuauucccua

SEQ ID NO: 209293 - RNA, 19 nt, Artificial Sequence
  Description of Artificial Sequence: Synthetic oligonucleotide
gacacuagucuaccgaaua

SEQ ID NO: 209294 - RNA, 19 nt, Artificial Sequence
  Description of Artificial Sequence: Synthetic oligonucleotide
aggggcuuuaaacgcuuag

SEQ ID NO: 209295 - RNA, 19 nt, Artificial Sequence
  Description of Artificial Sequence: Synthetic oligonucleotide
aacggacugcaacaaugau

SEQ ID NO: 209296 - RNA, 19 nt, Artificial Sequence
  Description of Artificial Sequence: Synthetic oligonucleotide
uagaguaaacggacugcaa

SEQ ID NO: 209297 - RNA, 19 nt, Artificial Sequence
  Description of Artificial Sequence: Synthetic oligonucleotide
ucuugggauuugcucccag

SEQ ID NO: 209298 - RNA, 19 nt, Artificial Sequence
  Description of Artificial Sequence: Synthetic oligonucleotide
agugauuaugucauacaaa

SEQ ID NO: 209299 - RNA, 19 nt, Artificial Sequence
  Description of Artificial Sequence: Synthetic oligonucleotide
agauucaaacauuccuuua

SEQ ID NO: 209300 - RNA, 19 nt, Artificial Sequence
  Description of Artificial Sequence: Synthetic oligonucleotide
caugcccuaaaagauacca

SEQ ID NO: 209301 - RNA, 19 nt, Artificial Sequence
  Description of Artificial Sequence: Synthetic oligonucleotide
caaauauuccuagucuuga

SEQ ID NO: 209302 - RNA, 19 nt, Artificial Sequence
  Description of Artificial Sequence: Synthetic oligonucleotide
uuaaugggagggugucaug

SEQ ID NO: 209303 - RNA, 19 nt, Artificial Sequence
  Description of Artificial Sequence: Synthetic oligonucleotide
acccuccuguuuuaucuuc

SEQ ID NO: 209304 - RNA, 19 nt, Artificial Sequence
  Description of Artificial Sequence: Synthetic oligonucleotide
uccuagucuugacacuagu

SEQ ID NO: 209305 - RNA, 19 nt, Artificial Sequence
  Description of Artificial Sequence: Synthetic oligonucleotide
caguaagaaaccccugguc

SEQ ID NO: 209306 - RNA, 19 nt, Artificial Sequence
  Description of Artificial Sequence: Synthetic oligonucleotide
cuucaguaagaaaccccug

SEQ ID NO: 209307 - RNA, 19 nt, Artificial Sequence
  Description of Artificial Sequence: Synthetic oligonucleotide
agauaccagcuuacuagac

SEQ ID NO: 209308 - RNA, 19 nt, Artificial Sequence
  Description of Artificial Sequence: Synthetic oligonucleotide
caagcauuggggaguggug

SEQ ID NO: 209309 - RNA, 19 nt, Artificial Sequence
  Description of Artificial Sequence: Synthetic oligonucleotide
ccaaauauuccuagucuug

SEQ ID NO: 209310 - RNA, 19 nt, Artificial Sequence
  Description of Artificial Sequence: Synthetic oligonucleotide
gccacauucgaaauaauuc

SEQ ID NO: 209311 - RNA, 19 nt, Artificial Sequence
  Description of Artificial Sequence: Synthetic oligonucleotide
gagaaccaaagacucuuaa

SEQ ID NO: 209312 - RNA, 19 nt, Artificial Sequence
  Description of Artificial Sequence: Synthetic oligonucleotide
ucaugcccuaaaagauacc

SEQ ID NO: 209313 - RNA, 19 nt, Artificial Sequence
  Description of Artificial Sequence: Synthetic oligonucleotide
uuccugaaccguugaaguc

SEQ ID NO: 209314 - RNA, 19 nt, Artificial Sequence
  Description of Artificial Sequence: Synthetic oligonucleotide
caaacauuccuuuaugauu

SEQ ID NO: 209315 - RNA, 19 nt, Artificial Sequence
  Description of Artificial Sequence: Synthetic oligonucleotide
aguaaacggacugcaacaa

SEQ ID NO: 209316 - RNA, 19 nt, Artificial Sequence
  Description of Artificial Sequence: Synthetic oligonucleotide
gguacagcaacgaacuuga

SEQ ID NO: 209317 - RNA, 19 nt, Artificial Sequence
  Description of Artificial Sequence: Synthetic oligonucleotide
ugaucuauuuggucuuguu

SEQ ID NO: 209318 - RNA, 19 nt, Artificial Sequence
  Description of Artificial Sequence: Synthetic oligonucleotide
caaaggagcucggacugcc

SEQ ID NO: 209319 - RNA, 19 nt, Artificial Sequence
  Description of Artificial Sequence: Synthetic oligonucleotide
aaccccuggucuguuacca

SEQ ID NO: 209320 - RNA, 19 nt, Artificial Sequence
  Description of Artificial Sequence: Synthetic oligonucleotide
acuagucuaccgaauacaa

SEQ ID NO: 209321 - RNA, 19 nt, Artificial Sequence
  Description of Artificial Sequence: Synthetic oligonucleotide
guaaagacaugcaugaauu

SEQ ID NO: 209322 - RNA, 19 nt, Artificial Sequence
  Description of Artificial Sequence: Synthetic oligonucleotide
gacugcaacaaugauuaua

SEQ ID NO: 209323 - RNA, 19 nt, Artificial Sequence
  Description of Artificial Sequence: Synthetic oligonucleotide
acugggucuuccuuuccgu

SEQ ID NO: 209324 - RNA, 19 nt, Artificial Sequence
  Description of Artificial Sequence: Synthetic oligonucleotide
guguauauauauauauaua

SEQ ID NO: 209325 - RNA, 19 nt, Artificial Sequence
  Description of Artificial Sequence: Synthetic oligonucleotide
gcucuauucccuaauagca

SEQ ID NO: 209326 - RNA, 19 nt, Artificial Sequence
  Description of Artificial Sequence: Synthetic oligonucleotide
ugacacuagucuaccgaau

SEQ ID NO: 209327 - RNA, 19 nt, Artificial Sequence
  Description of Artificial Sequence: Synthetic oligonucleotide
auauguguauauauauaua

SEQ ID NO: 209328 - RNA, 19 nt, Artificial Sequence
  Description of Artificial Sequence: Synthetic oligonucleotide
augaugccacauucgaaau

SEQ ID NO: 209329 - RNA, 19 nt, Artificial Sequence
  Description of Artificial Sequence: Synthetic oligonucleotide
gguaguccugaucuauuug

SEQ ID NO: 209330 - RNA, 19 nt, Artificial Sequence
  Description of Artificial Sequence: Synthetic oligonucleotide
acacuaaauaauacugaau

SEQ ID NO: 209331 - RNA, 19 nt, Artificial Sequence
  Description of Artificial Sequence: Synthetic oligonucleotide
gaucaggcacagacgguag

SEQ ID NO: 209332 - RNA, 19 nt, Artificial Sequence
  Description of Artificial Sequence: Synthetic oligonucleotide
auguguauauauauauaua

SEQ ID NO: 209333 - RNA, 19 nt, Artificial Sequence
  Description of Artificial Sequence: Synthetic oligonucleotide
acaguugacccuuguguuu

SEQ ID NO: 209334 - RNA, 19 nt, Artificial Sequence
  Description of Artificial Sequence: Synthetic oligonucleotide
agaucaggcacagacggua

SEQ ID NO: 209335 - RNA, 19 nt, Artificial Sequence
  Description of Artificial Sequence: Synthetic oligonucleotide
cacaauccaugguauguca

SEQ ID NO: 209336 - RNA, 19 nt, Artificial Sequence
  Description of Artificial Sequence: Synthetic oligonucleotide
augauuuauaaugggcauu

SEQ ID NO: 209337 - RNA, 19 nt, Artificial Sequence
  Description of Artificial Sequence: Synthetic oligonucleotide
caagucuaacugaccuuug

SEQ ID NO: 209338 - RNA, 19 nt, Artificial Sequence
  Description of Artificial Sequence: Synthetic oligonucleotide
guaggcgcauguuaggugu

SEQ ID NO: 209339 - RNA, 19 nt, Artificial Sequence
  Description of Artificial Sequence: Synthetic oligonucleotide
uaccaggauuaaguaaaga

SEQ ID NO: 209340 - RNA, 19 nt, Artificial Sequence
  Description of Artificial Sequence: Synthetic oligonucleotide
cacauucgaaauaauucua

SEQ ID NO: 209341 - RNA, 19 nt, Artificial Sequence
  Description of Artificial Sequence: Synthetic oligonucleotide
aguguggcauuuacucagg

SEQ ID NO: 209342 - RNA, 19 nt, Artificial Sequence
  Description of Artificial Sequence: Synthetic oligonucleotide
auaccaggauuaaguaaag

SEQ ID NO: 209343 - RNA, 19 nt, Artificial Sequence
  Description of Artificial Sequence: Synthetic oligonucleotide
agguaguccugaucuauuu

SEQ ID NO: 209344 - RNA, 19 nt, Artificial Sequence
  Description of Artificial Sequence: Synthetic oligonucleotide
gccaaaggagcucggacug

SEQ ID NO: 209345 - RNA, 19 nt, Artificial Sequence
  Description of Artificial Sequence: Synthetic oligonucleotide
caugauuuauaaugggcau

SEQ ID NO: 209346 - RNA, 19 nt, Artificial Sequence
  Description of Artificial Sequence: Synthetic oligonucleotide
gggugucaugcccuaaaag

SEQ ID NO: 209347 - RNA, 19 nt, Artificial Sequence
  Description of Artificial Sequence: Synthetic oligonucleotide
acccuuguguuuugucaug

SEQ ID NO: 209348 - RNA, 19 nt, Artificial Sequence
  Description of Artificial Sequence: Synthetic oligonucleotide
cugcauaggugguucccac

SEQ ID NO: 209349 - RNA, 19 nt, Artificial Sequence
  Description of Artificial Sequence: Synthetic oligonucleotide
gcucggacugccuaccaag

SEQ ID NO: 209350 - RNA, 19 nt, Artificial Sequence
  Description of Artificial Sequence: Synthetic oligonucleotide
cauuggggagugguggaag

SEQ ID NO: 209351 - RNA, 19 nt, Artificial Sequence
  Description of Artificial Sequence: Synthetic oligonucleotide
cagcuuacuagacaagucu

SEQ ID NO: 209352 - RNA, 19 nt, Artificial Sequence
  Description of Artificial Sequence: Synthetic oligonucleotide
gacgguagguacugggucu

SEQ ID NO: 209353 - RNA, 19 nt, Artificial Sequence
  Description of Artificial Sequence: Synthetic oligonucleotide
cuaguuaaugggagggugu

SEQ ID NO: 209354 - RNA, 19 nt, Artificial Sequence
  Description of Artificial Sequence: Synthetic oligonucleotide
acugccuaccaaggggcuc

SEQ ID NO: 209355 - RNA, 19 nt, Artificial Sequence
  Description of Artificial Sequence: Synthetic oligonucleotide
cacuagucuaccgaauaca

SEQ ID NO: 209356 - RNA, 19 nt, Artificial Sequence
  Description of Artificial Sequence: Synthetic oligonucleotide
agcuguuaccugagaaaag

SEQ ID NO: 209357 - RNA, 19 nt, Artificial Sequence
  Description of Artificial Sequence: Synthetic oligonucleotide
gguaggcgcauguuaggug

SEQ ID NO: 209358 - RNA, 19 nt, Artificial Sequence
  Description of Artificial Sequence: Synthetic oligonucleotide
caccaaauauuccuagucu

SEQ ID NO: 209359 - RNA, 19 nt, Artificial Sequence
  Description of Artificial Sequence: Synthetic oligonucleotide
uggcuacaagugacaacac

SEQ ID NO: 209360 - RNA, 19 nt, Artificial Sequence
  Description of Artificial Sequence: Synthetic oligonucleotide
uucagugguucaugauuua

SEQ ID NO: 209361 - RNA, 19 nt, Artificial Sequence
  Description of Artificial Sequence: Synthetic oligonucleotide
aaugacuacuagagccaaa

SEQ ID NO: 209362 - RNA, 19 nt, Artificial Sequence
  Description of Artificial Sequence: Synthetic oligonucleotide
gagguuccuugcguuuccg

SEQ ID NO: 209363 - RNA, 19 nt, Artificial Sequence
  Description of Artificial Sequence: Synthetic oligonucleotide
cuucagugguucaugauuu

SEQ ID NO: 209364 - RNA, 19 nt, Artificial Sequence
  Description of Artificial Sequence: Synthetic oligonucleotide
aagguacccuccuguuuua

SEQ ID NO: 209365 - RNA, 19 nt, Artificial Sequence
  Description of Artificial Sequence: Synthetic oligonucleotide
agcuuacuagacaagucua

SEQ ID NO: 209366 - RNA, 19 nt, Artificial Sequence
  Description of Artificial Sequence: Synthetic oligonucleotide
ucaauauuuccaggcuguu

SEQ ID NO: 209367 - RNA, 19 nt, Artificial Sequence
  Description of Artificial Sequence: Synthetic oligonucleotide
agggugucaugcccuaaaa

SEQ ID NO: 209368 - RNA, 19 nt, Artificial Sequence
  Description of Artificial Sequence: Synthetic oligonucleotide
ccuagucuugacacuaguc

SEQ ID NO: 209369 - RNA, 19 nt, Artificial Sequence
  Description of Artificial Sequence: Synthetic oligonucleotide
cugggucuuccuuuccguc

SEQ ID NO: 209370 - RNA, 19 nt, Artificial Sequence
  Description of Artificial Sequence: Synthetic oligonucleotide
gacccuuguguuuugucau

SEQ ID NO: 209371 - RNA, 19 nt, Artificial Sequence
  Description of Artificial Sequence: Synthetic oligonucleotide
caugguaugucaguugagu

SEQ ID NO: 209372 - RNA, 19 nt, Artificial Sequence
  Description of Artificial Sequence: Synthetic oligonucleotide
cagugguucaugauuuaua

SEQ ID NO: 209373 - RNA, 19 nt, Artificial Sequence
  Description of Artificial Sequence: Synthetic oligonucleotide
cgaaagaacacacagaguu

SEQ ID NO: 209374 - RNA, 19 nt, Artificial Sequence
  Description of Artificial Sequence: Synthetic oligonucleotide
ccacauucgaaauaauucu

SEQ ID NO: 209375 - RNA, 19 nt, Artificial Sequence
  Description of Artificial Sequence: Synthetic oligonucleotide
guuaaugggagggugucau

SEQ ID NO: 209376 - RNA, 19 nt, Artificial Sequence
  Description of Artificial Sequence: Synthetic oligonucleotide
cccugugauggguaggcgc

SEQ ID NO: 209377 - RNA, 19 nt, Artificial Sequence
  Description of Artificial Sequence: Synthetic oligonucleotide
ccugaaccguugaagucag

SEQ ID NO: 209378 - RNA, 19 nt, Artificial Sequence
  Description of Artificial Sequence: Synthetic oligonucleotide
ccgaauacaaaagcaacca

SEQ ID NO: 209379 - RNA, 19 nt, Artificial Sequence
  Description of Artificial Sequence: Synthetic oligonucleotide
cugccaugguauuucaacu

SEQ ID NO: 209380 - RNA, 19 nt, Artificial Sequence
  Description of Artificial Sequence: Synthetic oligonucleotide
caccaaucucuuaucuuaa

SEQ ID NO: 209381 - RNA, 19 nt, Artificial Sequence
  Description of Artificial Sequence: Synthetic oligonucleotide
agcaaccacaaaauauauu

SEQ ID NO: 209382 - RNA, 19 nt, Artificial Sequence
  Description of Artificial Sequence: Synthetic oligonucleotide
gaguccauuuucacacuaa

SEQ ID NO: 209383 - RNA, 19 nt, Artificial Sequence
  Description of Artificial Sequence: Synthetic oligonucleotide
cacacaauccaugguaugu

SEQ ID NO: 209384 - RNA, 19 nt, Artificial Sequence
  Description of Artificial Sequence: Synthetic oligonucleotide
ccaccuauauucaaugucu

SEQ ID NO: 209385 - RNA, 19 nt, Artificial Sequence
  Description of Artificial Sequence: Synthetic oligonucleotide
auuuggucuuguugaccuu

SEQ ID NO: 209386 - RNA, 19 nt, Artificial Sequence
  Description of Artificial Sequence: Synthetic oligonucleotide
gguagguacugggucuucc

SEQ ID NO: 209387 - RNA, 19 nt, Artificial Sequence
  Description of Artificial Sequence: Synthetic oligonucleotide
cagugccauaagguagucc

SEQ ID NO: 209388 - RNA, 19 nt, Artificial Sequence
  Description of Artificial Sequence: Synthetic oligonucleotide
gacaagucuaacugaccuu

SEQ ID NO: 209389 - RNA, 19 nt, Artificial Sequence
  Description of Artificial Sequence: Synthetic oligonucleotide
gcuuccuagggcauuucug

SEQ ID NO: 209390 - RNA, 19 nt, Artificial Sequence
  Description of Artificial Sequence: Synthetic oligonucleotide
cggacugccuaccaagggg

SEQ ID NO: 209391 - RNA, 19 nt, Artificial Sequence
  Description of Artificial Sequence: Synthetic oligonucleotide
auuugaggcaagaguugaa

SEQ ID NO: 209392 - RNA, 19 nt, Artificial Sequence
  Description of Artificial Sequence: Synthetic oligonucleotide
aggcgcauguuagguguuc

SEQ ID NO: 209393 - RNA, 19 nt, Artificial Sequence
  Description of Artificial Sequence: Synthetic oligonucleotide
ccaacgaugacacuacacu

SEQ ID NO: 209394 - RNA, 19 nt, Artificial Sequence
  Description of Artificial Sequence: Synthetic oligonucleotide
gguauuucaacuaguuaau

SEQ ID NO: 209395 - RNA, 19 nt, Artificial Sequence
  Description of Artificial Sequence: Synthetic oligonucleotide
caacgaugacacuacacuu

SEQ ID NO: 209396 - RNA, 19 nt, Artificial Sequence
  Description of Artificial Sequence: Synthetic oligonucleotide
ggucgaagauggaauucug

SEQ ID NO: 209397 - RNA, 19 nt, Artificial Sequence
  Description of Artificial Sequence: Synthetic oligonucleotide
acucauuccaugaguuaua

SEQ ID NO: 209398 - RNA, 19 nt, Artificial Sequence
  Description of Artificial Sequence: Synthetic oligonucleotide
acaacaguuccaacuugua

SEQ ID NO: 209399 - RNA, 19 nt, Artificial Sequence
  Description of Artificial Sequence: Synthetic oligonucleotide
cagccaccggccaccugcg

SEQ ID NO: 209400 - RNA, 19 nt, Artificial Sequence
  Description of Artificial Sequence: Synthetic oligonucleotide
guacacagucucaggaucu

SEQ ID NO: 209401 - RNA, 19 nt, Artificial Sequence
  Description of Artificial Sequence: Synthetic oligonucleotide
cacagacgguagguacugg

SEQ ID NO: 209402 - RNA, 19 nt, Artificial Sequence
  Description of Artificial Sequence: Synthetic oligonucleotide
cauaaaacuccagcucaua

SEQ ID NO: 209403 - RNA, 19 nt, Artificial Sequence
  Description of Artificial Sequence: Synthetic oligonucleotide
acgauguuauucacugguu

SEQ ID NO: 209404 - RNA, 19 nt, Artificial Sequence
  Description of Artificial Sequence: Synthetic oligonucleotide
ggggcuuuaaacgcuuaga

SEQ ID NO: 209405 - RNA, 19 nt, Artificial Sequence
  Description of Artificial Sequence: Synthetic oligonucleotide
agagaaccaaagacucuua

SEQ ID NO: 209406 - RNA, 19 nt, Artificial Sequence
  Description of Artificial Sequence: Synthetic oligonucleotide
ugauggguaggcgcauguu

SEQ ID NO: 209407 - RNA, 19 nt, Artificial Sequence
  Description of Artificial Sequence: Synthetic oligonucleotide
cuugggauuugcucccagu

SEQ ID NO: 209408 - RNA, 19 nt, Artificial Sequence
  Description of Artificial Sequence: Synthetic oligonucleotide
uaggcgcauguuagguguu

SEQ ID NO: 209409 - RNA, 19 nt, Artificial Sequence
  Description of Artificial Sequence: Synthetic oligonucleotide
guugaguggcuguauuguu

SEQ ID NO: 209410 - RNA, 19 nt, Artificial Sequence
  Description of Artificial Sequence: Synthetic oligonucleotide
cacccucacauagaguaaa

SEQ ID NO: 209411 - RNA, 19 nt, Artificial Sequence
  Description of Artificial Sequence: Synthetic oligonucleotide
ugcauccuaccaggggcaa

SEQ ID NO: 209412 - RNA, 19 nt, Artificial Sequence
  Description of Artificial Sequence: Synthetic oligonucleotide
caacgaacuugagauuaaa

SEQ ID NO: 209413 - RNA, 19 nt, Artificial Sequence
  Description of Artificial Sequence: Synthetic oligonucleotide
cagacgguagguacugggu

SEQ ID NO: 209414 - RNA, 19 nt, Artificial Sequence
  Description of Artificial Sequence: Synthetic oligonucleotide
ccuaucucugccaugguau

SEQ ID NO: 209415 - RNA, 19 nt, Artificial Sequence
  Description of Artificial Sequence: Synthetic oligonucleotide
gcacagacgguagguacug

SEQ ID NO: 209416 - RNA, 19 nt, Artificial Sequence
  Description of Artificial Sequence: Synthetic oligonucleotide
cugauaguacugagaggcu

SEQ ID NO: 209417 - RNA, 19 nt, Artificial Sequence
  Description of Artificial Sequence: Synthetic oligonucleotide
caucaguaacaaagaggcu

SEQ ID NO: 209418 - RNA, 19 nt, Artificial Sequence
  Description of Artificial Sequence: Synthetic oligonucleotide
cccuaauagcagagauacc

SEQ ID NO: 209419 - RNA, 19 nt, Artificial Sequence
  Description of Artificial Sequence: Synthetic oligonucleotide
gugauggguaggcgcaugu

SEQ ID NO: 209420 - RNA, 19 nt, Artificial Sequence
  Description of Artificial Sequence: Synthetic oligonucleotide
guaagucuuggugcucaaa

SEQ ID NO: 209421 - RNA, 19 nt, Artificial Sequence
  Description of Artificial Sequence: Synthetic oligonucleotide
cucugccuaaagcugacuu

SEQ ID NO: 209422 - RNA, 19 nt, Artificial Sequence
  Description of Artificial Sequence: Synthetic oligonucleotide
ccuauauucaaugucuuuu

SEQ ID NO: 209423 - RNA, 19 nt, Artificial Sequence
  Description of Artificial Sequence: Synthetic oligonucleotide
accaagcauuggggagugg

SEQ ID NO: 209424 - RNA, 19 nt, Artificial Sequence
  Description of Artificial Sequence: Synthetic oligonucleotide
caccuauauucaaugucuu

SEQ ID NO: 209425 - RNA, 19 nt, Artificial Sequence
  Description of Artificial Sequence: Synthetic oligonucleotide
gguuuccuaucucugccau

SEQ ID NO: 209426 - RNA, 19 nt, Artificial Sequence
  Description of Artificial Sequence: Synthetic oligonucleotide
gcauguuagguguucuuuu

SEQ ID NO: 209427 - RNA, 19 nt, Artificial Sequence
  Description of Artificial Sequence: Synthetic oligonucleotide
gagaucaggcacagacggu

SEQ ID NO: 209428 - RNA, 19 nt, Artificial Sequence
  Description of Artificial Sequence: Synthetic oligonucleotide
gacaaguuuuagagguguu

SEQ ID NO: 209429 - RNA, 19 nt, Artificial Sequence
  Description of Artificial Sequence: Synthetic oligonucleotide
ggaggucgaagauggaauu

SEQ ID NO: 209430 - RNA, 19 nt, Artificial Sequence
  Description of Artificial Sequence: Synthetic oligonucleotide
ccaaaggagcucggacugc

SEQ ID NO: 209431 - RNA, 19 nt, Artificial Sequence
  Description of Artificial Sequence: Synthetic oligonucleotide
agguacccuccuguuuuau

SEQ ID NO: 209432 - RNA, 19 nt, Artificial Sequence
  Description of Artificial Sequence: Synthetic oligonucleotide
ccugaucuauuuggucuug

SEQ ID NO: 209433 - RNA, 19 nt, Artificial Sequence
  Description of Artificial Sequence: Synthetic oligonucleotide
gcaacgaacuugagauuaa

SEQ ID NO: 209434 - RNA, 19 nt, Artificial Sequence
  Description of Artificial Sequence: Synthetic oligonucleotide
guucagcccugugaugggu

SEQ ID NO: 209435 - RNA, 19 nt, Artificial Sequence
  Description of Artificial Sequence: Synthetic oligonucleotide
gucaguugaguggcuguau

SEQ ID NO: 209436 - RNA, 19 nt, Artificial Sequence
  Description of Artificial Sequence: Synthetic oligonucleotide
guugaccuuuguacacagu

SEQ ID NO: 209437 - RNA, 19 nt, Artificial Sequence
  Description of Artificial Sequence: Synthetic oligonucleotide
guguuuugucauggugcua

SEQ ID NO: 209438 - RNA, 19 nt, Artificial Sequence
  Description of Artificial Sequence: Synthetic oligonucleotide
cguuuccguucaauauuuc

SEQ ID NO: 209439 - RNA, 19 nt, Artificial Sequence
  Description of Artificial Sequence: Synthetic oligonucleotide
ccaagcauuggggaguggu

SEQ ID NO: 209440 - RNA, 19 nt, Artificial Sequence
  Description of Artificial Sequence: Synthetic oligonucleotide
ccgaaagaacacacagagu

SEQ ID NO: 209441 - RNA, 19 nt, Artificial Sequence
  Description of Artificial Sequence: Synthetic oligonucleotide
gugguacagcaacgaacuu

SEQ ID NO: 209442 - RNA, 19 nt, Artificial Sequence
  Description of Artificial Sequence: Synthetic oligonucleotide
cagcaacgaacuugagauu

SEQ ID NO: 209443 - RNA, 19 nt, Artificial Sequence
  Description of Artificial Sequence: Synthetic oligonucleotide
gcguuuccguucaauauuu

SEQ ID NO: 209444 - RNA, 19 nt, Artificial Sequence
  Description of Artificial Sequence: Synthetic oligonucleotide
guacagugucugugaugau

SEQ ID NO: 209445 - RNA, 19 nt, Artificial Sequence
  Description of Artificial Sequence: Synthetic oligonucleotide
ggcgcauguuagguguucu

SEQ ID NO: 209446 - RNA, 19 nt, Artificial Sequence
  Description of Artificial Sequence: Synthetic oligonucleotide
cugaaccguugaagucagu

SEQ ID NO: 209447 - RNA, 19 nt, Artificial Sequence
  Description of Artificial Sequence: Synthetic oligonucleotide
gccuaccaaggggcucugc

SEQ ID NO: 209448 - RNA, 19 nt, Artificial Sequence
  Description of Artificial Sequence: Synthetic oligonucleotide
ccuuuccgucaucgucauc

SEQ ID NO: 209449 - RNA, 19 nt, Artificial Sequence
  Description of Artificial Sequence: Synthetic oligonucleotide
ggacugcaacaaugauuau

SEQ ID NO: 209450 - RNA, 19 nt, Artificial Sequence
  Description of Artificial Sequence: Synthetic oligonucleotide
gcgcauguuagguguucuu

SEQ ID NO: 209451 - RNA, 19 nt, Artificial Sequence
  Description of Artificial Sequence: Synthetic oligonucleotide
aaaugauccuauuugguac

SEQ ID NO: 209452 - RNA, 19 nt, Artificial Sequence
  Description of Artificial Sequence: Synthetic oligonucleotide
aauagaucaaaauuaagaa

SEQ ID NO: 209453 - RNA, 19 nt, Artificial Sequence
  Description of Artificial Sequence: Synthetic oligonucleotide
guuuguaucauucugaaug

SEQ ID NO: 209454 - RNA, 19 nt, Artificial Sequence
  Description of Artificial Sequence: Synthetic oligonucleotide
ucaauuggcaauaugaaac

SEQ ID NO: 209455 - RNA, 19 nt, Artificial Sequence
  Description of Artificial Sequence: Synthetic oligonucleotide
auuaagaaugucuacacug

SEQ ID NO: 209456 - RNA, 19 nt, Artificial Sequence
  Description of Artificial Sequence: Synthetic oligonucleotide
auaugaaaccagcauaccc

SEQ ID NO: 209457 - RNA, 19 nt, Artificial Sequence
  Description of Artificial Sequence: Synthetic oligonucleotide
ugagauuuaucuuuuaucu

SEQ ID NO: 209458 - RNA, 19 nt, Artificial Sequence
  Description of Artificial Sequence: Synthetic oligonucleotide
ucuucuauaagguucacga

SEQ ID NO: 209459 - RNA, 19 nt, Artificial Sequence
  Description of Artificial Sequence: Synthetic oligonucleotide
ugugguauuuguaauauga

SEQ ID NO: 209460 - RNA, 19 nt, Artificial Sequence
  Description of Artificial Sequence: Synthetic oligonucleotide
cucacuaauaaauagauca

SEQ ID NO: 209461 - RNA, 19 nt, Artificial Sequence
  Description of Artificial Sequence: Synthetic oligonucleotide
uguaauaugaaagugucca

SEQ ID NO: 209462 - RNA, 19 nt, Artificial Sequence
  Description of Artificial Sequence: Synthetic oligonucleotide
aauaaagccucugaacuac

SEQ ID NO: 209463 - RNA, 19 nt, Artificial Sequence
  Description of Artificial Sequence: Synthetic oligonucleotide
aaguuagcuucucacagcg

SEQ ID NO: 209464 - RNA, 19 nt, Artificial Sequence
  Description of Artificial Sequence: Synthetic oligonucleotide
gaagcuuucgugcaagugg

SEQ ID NO: 209465 - RNA, 19 nt, Artificial Sequence
  Description of Artificial Sequence: Synthetic oligonucleotide
uaugaaaccagcauaccca

SEQ ID NO: 209466 - RNA, 19 nt, Artificial Sequence
  Description of Artificial Sequence: Synthetic oligonucleotide
uguggaaugaaccaccaca

SEQ ID NO: 209467 - RNA, 19 nt, Artificial Sequence
  Description of Artificial Sequence: Synthetic oligonucleotide
uucuaaaauccucuguggg

SEQ ID NO: 209468 - RNA, 19 nt, Artificial Sequence
  Description of Artificial Sequence: Synthetic oligonucleotide
  modified_base (2)..(2): a, c, u, g, unknown or other
  modified_base (6)..(6): a, c, u, g, unknown or other
unuuunuuuauuuauuaau

SEQ ID NO: 209469 - RNA, 19 nt, Artificial Sequence
  Description of Artificial Sequence: Synthetic oligonucleotide
aaucaagguggcuauuugg

SEQ ID NO: 209470 - RNA, 19 nt, Artificial Sequence
  Description of Artificial Sequence: Synthetic oligonucleotide
ugauagaccuuaaaggacc

SEQ ID NO: 209471 - RNA, 19 nt, Artificial Sequence
  Description of Artificial Sequence: Synthetic oligonucleotide
uguaauuuacgcacuguag

SEQ ID NO: 209472 - RNA, 19 nt, Artificial Sequence
  Description of Artificial Sequence: Synthetic oligonucleotide
  modified_base (4)..(4): a, c, u, g, unknown or other
  modified_base (8)..(8): a, c, u, g, unknown or other
uuunuuunuuuauuuauua

SEQ ID NO: 209473 - RNA, 19 nt, Artificial Sequence
  Description of Artificial Sequence: Synthetic oligonucleotide
aaguccuacagguuuauug

SEQ ID NO: 209474 - RNA, 19 nt, Artificial Sequence
  Description of Artificial Sequence: Synthetic oligonucleotide
ucuauaagguucacgaucu

SEQ ID NO: 209475 - RNA, 19 nt, Artificial Sequence
  Description of Artificial Sequence: Synthetic oligonucleotide
aaucaaaugugguauuugu

SEQ ID NO: 209476 - RNA, 19 nt, Artificial Sequence
  Description of Artificial Sequence: Synthetic oligonucleotide
uacaaguaaggucacuggg

SEQ ID NO: 209477 - RNA, 19 nt, Artificial Sequence
  Description of Artificial Sequence: Synthetic oligonucleotide
  modified_base (3)..(3): a, c, u, g, unknown or other
  modified_base (7)..(7): a, c, u, g, unknown or other
uunuuunuuuauuuauuaa

SEQ ID NO: 209478 - RNA, 19 nt, Artificial Sequence
  Description of Artificial Sequence: Synthetic oligonucleotide
acugggagccuucuuaucc

SEQ ID NO: 209479 - RNA, 19 nt, Artificial Sequence
  Description of Artificial Sequence: Synthetic oligonucleotide
ucaagaugcaggaauaagu

SEQ ID NO: 209480 - RNA, 19 nt, Artificial Sequence
  Description of Artificial Sequence: Synthetic oligonucleotide
augaguacaccacacuggc

SEQ ID NO: 209481 - RNA, 19 nt, Artificial Sequence
  Description of Artificial Sequence: Synthetic oligonucleotide
uguuguauccucaggaugu

SEQ ID NO: 209482 - RNA, 19 nt, Artificial Sequence
  Description of Artificial Sequence: Synthetic oligonucleotide
ucaaaugugguauuuguaa

SEQ ID NO: 209483 - RNA, 19 nt, Artificial Sequence
  Description of Artificial Sequence: Synthetic oligonucleotide
uuuagaaacaggaccagaa

SEQ ID NO: 209484 - RNA, 19 nt, Artificial Sequence
  Description of Artificial Sequence: Synthetic oligonucleotide
agaagaaaugaguacacca

SEQ ID NO: 209485 - RNA, 19 nt, Artificial Sequence
  Description of Artificial Sequence: Synthetic oligonucleotide
ucaaacgguggcaacgucg

SEQ ID NO: 209486 - RNA, 19 nt, Artificial Sequence
  Description of Artificial Sequence: Synthetic oligonucleotide
auuugugaggcuuugaaaa

SEQ ID NO: 209487 - RNA, 19 nt, Artificial Sequence
  Description of Artificial Sequence: Synthetic oligonucleotide
auucaccuaauauugcaac

SEQ ID NO: 209488 - RNA, 19 nt, Artificial Sequence
  Description of Artificial Sequence: Synthetic oligonucleotide
gaguacaccacacuggcag

SEQ ID NO: 209489 - RNA, 19 nt, Artificial Sequence
  Description of Artificial Sequence: Synthetic oligonucleotide
aaugaguacaccacacugg

SEQ ID NO: 209490 - RNA, 19 nt, Artificial Sequence
  Description of Artificial Sequence: Synthetic oligonucleotide
uucuauaagguucacgauc

SEQ ID NO: 209491 - RNA, 19 nt, Artificial Sequence
  Description of Artificial Sequence: Synthetic oligonucleotide
aacaccauccagucguggg

SEQ ID NO: 209492 - RNA, 19 nt, Artificial Sequence
  Description of Artificial Sequence: Synthetic oligonucleotide
aaaaguugguggaaagugg

SEQ ID NO: 209493 - RNA, 19 nt, Artificial Sequence
  Description of Artificial Sequence: Synthetic oligonucleotide
uauacaaguaaggucacug

SEQ ID NO: 209494 - RNA, 19 nt, Artificial Sequence
  Description of Artificial Sequence: Synthetic oligonucleotide
uguaagguggaucuuugca

SEQ ID NO: 209495 - RNA, 19 nt, Artificial Sequence
  Description of Artificial Sequence: Synthetic oligonucleotide
  modified_base (5)..(5): a, c, u, g, unknown or other
  modified_base (9)..(9): a, c, u, g, unknown or other
uuuunuuunuuuauuuauu

SEQ ID NO: 209496 - RNA, 19 nt, Artificial Sequence
  Description of Artificial Sequence: Synthetic oligonucleotide
cuagacagcaauucaaaug

SEQ ID NO: 209497 - RNA, 19 nt, Artificial Sequence
  Description of Artificial Sequence: Synthetic oligonucleotide
aauaugaaaguguccaguu

SEQ ID NO: 209498 - RNA, 19 nt, Artificial Sequence
  Description of Artificial Sequence: Synthetic oligonucleotide
acgacuuuucuccacaaag

SEQ ID NO: 209499 - RNA, 19 nt, Artificial Sequence
  Description of Artificial Sequence: Synthetic oligonucleotide
uugacauggguuuagguuc

SEQ ID NO: 209500 - RNA, 19 nt, Artificial Sequence
  Description of Artificial Sequence: Synthetic oligonucleotide
uguuuucaaggcuagccag

SEQ ID NO: 209501 - RNA, 19 nt, Artificial Sequence
  Description of Artificial Sequence: Synthetic oligonucleotide
aaauaaaccucaauuggca

SEQ ID NO: 209502 - RNA, 19 nt, Artificial Sequence
  Description of Artificial Sequence: Synthetic oligonucleotide
acgguauacaaguaagguc

SEQ ID NO: 209503 - RNA, 19 nt, Artificial Sequence
  Description of Artificial Sequence: Synthetic oligonucleotide
guaacucuguaauuuacgc

SEQ ID NO: 209504 - RNA, 19 nt, Artificial Sequence
  Description of Artificial Sequence: Synthetic oligonucleotide
ucauuacauggauacagcc

SEQ ID NO: 209505 - RNA, 19 nt, Artificial Sequence
  Description of Artificial Sequence: Synthetic oligonucleotide
auagaucaaaauuaagaau

SEQ ID NO: 209506 - RNA, 19 nt, Artificial Sequence
  Description of Artificial Sequence: Synthetic oligonucleotide
aagaguguugguaacagcu

SEQ ID NO: 209507 - RNA, 19 nt, Artificial Sequence
  Description of Artificial Sequence: Synthetic oligonucleotide
aaaucaagguggcuauuug

SEQ ID NO: 209508 - RNA, 19 nt, Artificial Sequence
  Description of Artificial Sequence: Synthetic oligonucleotide
uuuguaucauucugaaugu

SEQ ID NO: 209509 - RNA, 19 nt, Artificial Sequence
  Description of Artificial Sequence: Synthetic oligonucleotide
auacaaguaaggucacugg

SEQ ID NO: 209510 - RNA, 19 nt, Artificial Sequence
  Description of Artificial Sequence: Synthetic oligonucleotide
uauuggacuuuucacuuca

SEQ ID NO: 209511 - RNA, 19 nt, Artificial Sequence
  Description of Artificial Sequence: Synthetic oligonucleotide
acugccgucacucaagcug

SEQ ID NO: 209512 - RNA, 19 nt, Artificial Sequence
  Description of Artificial Sequence: Synthetic oligonucleotide
auuacagguacacuuuugu

SEQ ID NO: 209513 - RNA, 19 nt, Artificial Sequence
  Description of Artificial Sequence: Synthetic oligonucleotide
auauucaccuaauauugca

SEQ ID NO: 209514 - RNA, 19 nt, Artificial Sequence
  Description of Artificial Sequence: Synthetic oligonucleotide
auaaucaaagcggacuuuc

SEQ ID NO: 209515 - RNA, 19 nt, Artificial Sequence
  Description of Artificial Sequence: Synthetic oligonucleotide
acgaacaccauccagucgu

SEQ ID NO: 209516 - RNA, 19 nt, Artificial Sequence
  Description of Artificial Sequence: Synthetic oligonucleotide
ucaucaaacgguggcaacg

SEQ ID NO: 209517 - RNA, 19 nt, Artificial Sequence
  Description of Artificial Sequence: Synthetic oligonucleotide
cuucuacuuuguaaggugg

SEQ ID NO: 209518 - RNA, 19 nt, Artificial Sequence
  Description of Artificial Sequence: Synthetic oligonucleotide
acaaguaaggucacugggc

SEQ ID NO: 209519 - RNA, 19 nt, Artificial Sequence
  Description of Artificial Sequence: Synthetic oligonucleotide
uuuacugggagccuucuua

SEQ ID NO: 209520 - RNA, 19 nt, Artificial Sequence
  Description of Artificial Sequence: Synthetic oligonucleotide
ugggguuauugaaaguuag

SEQ ID NO: 209521 - RNA, 19 nt, Artificial Sequence
  Description of Artificial Sequence: Synthetic oligonucleotide
accaaguacuuauaauguc

SEQ ID NO: 209522 - RNA, 19 nt, Artificial Sequence
  Description of Artificial Sequence: Synthetic oligonucleotide
ccuuaaaggaccuuguugc

SEQ ID NO: 209523 - RNA, 19 nt, Artificial Sequence
  Description of Artificial Sequence: Synthetic oligonucleotide
uuuguaagguggaucuuug

SEQ ID NO: 209524 - RNA, 19 nt, Artificial Sequence
  Description of Artificial Sequence: Synthetic oligonucleotide
accauacacauucuuuagg

SEQ ID NO: 209525 - RNA, 19 nt, Artificial Sequence
  Description of Artificial Sequence: Synthetic oligonucleotide
aaaugugguauuuguaaua

SEQ ID NO: 209526 - RNA, 19 nt, Artificial Sequence
  Description of Artificial Sequence: Synthetic oligonucleotide
ucaccuaauauugcaacag

SEQ ID NO: 209527 - RNA, 19 nt, Artificial Sequence
  Description of Artificial Sequence: Synthetic oligonucleotide
uguugaauaugcauucguc

SEQ ID NO: 209528 - RNA, 19 nt, Artificial Sequence
  Description of Artificial Sequence: Synthetic oligonucleotide
guacuuauaaugucuggug

SEQ ID NO: 209529 - RNA, 19 nt, Artificial Sequence
  Description of Artificial Sequence: Synthetic oligonucleotide
ugggugaacgcccucacug

SEQ ID NO: 209530 - RNA, 19 nt, Artificial Sequence
  Description of Artificial Sequence: Synthetic oligonucleotide
uaaaggaccuuguugccug

SEQ ID NO: 209531 - RNA, 19 nt, Artificial Sequence
  Description of Artificial Sequence: Synthetic oligonucleotide
gguuuagguuccuugaagg

SEQ ID NO: 209532 - RNA, 19 nt, Artificial Sequence
  Description of Artificial Sequence: Synthetic oligonucleotide
ucauuaaccuucuguggag

SEQ ID NO: 209533 - RNA, 19 nt, Artificial Sequence
  Description of Artificial Sequence: Synthetic oligonucleotide
accuuaaaggaccuuguug

SEQ ID NO: 209534 - RNA, 19 nt, Artificial Sequence
  Description of Artificial Sequence: Synthetic oligonucleotide
aguccuacagguuuauuga

SEQ ID NO: 209535 - RNA, 19 nt, Artificial Sequence
  Description of Artificial Sequence: Synthetic oligonucleotide
ucagaaugcagaucuuuca

SEQ ID NO: 209536 - RNA, 19 nt, Artificial Sequence
  Description of Artificial Sequence: Synthetic oligonucleotide
ucacuaauaaauagaucaa

SEQ ID NO: 209537 - RNA, 19 nt, Artificial Sequence
  Description of Artificial Sequence: Synthetic oligonucleotide
aaauagauguaagaguguu

SEQ ID NO: 209538 - RNA, 19 nt, Artificial Sequence
  Description of Artificial Sequence: Synthetic oligonucleotide
uauugacuaaggcuagaca

SEQ ID NO: 209539 - RNA, 19 nt, Artificial Sequence
  Description of Artificial Sequence: Synthetic oligonucleotide
ugaaaugcucacuaauaaa

SEQ ID NO: 209540 - RNA, 19 nt, Artificial Sequence
  Description of Artificial Sequence: Synthetic oligonucleotide
cauauucaccuaauauugc

SEQ ID NO: 209541 - RNA, 19 nt, Artificial Sequence
  Description of Artificial Sequence: Synthetic oligonucleotide
auaugcauucguccugugg

SEQ ID NO: 209542 - RNA, 19 nt, Artificial Sequence
  Description of Artificial Sequence: Synthetic oligonucleotide
aggaauaagucauaaucaa

SEQ ID NO: 209543 - RNA, 19 nt, Artificial Sequence
  Description of Artificial Sequence: Synthetic oligonucleotide
auuuguaugugguaauaaa

SEQ ID NO: 209544 - RNA, 19 nt, Artificial Sequence
  Description of Artificial Sequence: Synthetic oligonucleotide
ucgacuuccaccucuauuu

SEQ ID NO: 209545 - RNA, 19 nt, Artificial Sequence
  Description of Artificial Sequence: Synthetic oligonucleotide
augauagaccuuaaaggac

SEQ ID NO: 209546 - RNA, 19 nt, Artificial Sequence
  Description of Artificial Sequence: Synthetic oligonucleotide
ucguccuguggaaugaacc

SEQ ID NO: 209547 - RNA, 19 nt, Artificial Sequence
  Description of Artificial Sequence: Synthetic oligonucleotide
uguuacugugcuccgggcc

SEQ ID NO: 209548 - RNA, 19 nt, Artificial Sequence
  Description of Artificial Sequence: Synthetic oligonucleotide
uauucaccuaauauugcaa

SEQ ID NO: 209549 - RNA, 19 nt, Artificial Sequence
  Description of Artificial Sequence: Synthetic oligonucleotide
uccacgucugaaucguugg

SEQ ID NO: 209550 - RNA, 19 nt, Artificial Sequence
  Description of Artificial Sequence: Synthetic oligonucleotide
uccucauaaaaugaugacu

SEQ ID NO: 209551 - RNA, 19 nt, Artificial Sequence
  Description of Artificial Sequence: Synthetic oligonucleotide
caggaauaagucauaauca

SEQ ID NO: 209552 - RNA, 19 nt, Artificial Sequence
  Description of Artificial Sequence: Synthetic oligonucleotide
uucaauaauggcggugggg

SEQ ID NO: 209553 - RNA, 19 nt, Artificial Sequence
  Description of Artificial Sequence: Synthetic oligonucleotide
guaagguggaucuuugcac

SEQ ID NO: 209554 - RNA, 19 nt, Artificial Sequence
  Description of Artificial Sequence: Synthetic oligonucleotide
uucaccuaauauugcaaca

SEQ ID NO: 209555 - RNA, 19 nt, Artificial Sequence
  Description of Artificial Sequence: Synthetic oligonucleotide
aguacuuauaaugucuggu

SEQ ID NO: 209556 - RNA, 19 nt, Artificial Sequence
  Description of Artificial Sequence: Synthetic oligonucleotide
ugaauguuacugugcuccg

SEQ ID NO: 209557 - RNA, 19 nt, Artificial Sequence
  Description of Artificial Sequence: Synthetic oligonucleotide
uguggaaugccuuuacuuu

SEQ ID NO: 209558 - RNA, 19 nt, Artificial Sequence
  Description of Artificial Sequence: Synthetic oligonucleotide
uagaccuuaaaggaccuug

SEQ ID NO: 209559 - RNA, 19 nt, Artificial Sequence
  Description of Artificial Sequence: Synthetic oligonucleotide
uguccagcgagcaaagauc

SEQ ID NO: 209560 - RNA, 19 nt, Artificial Sequence
  Description of Artificial Sequence: Synthetic oligonucleotide
acuaaggcuagacagcaau

SEQ ID NO: 209561 - RNA, 19 nt, Artificial Sequence
  Description of Artificial Sequence: Synthetic oligonucleotide
ucgugcaaguggaagacga

SEQ ID NO: 209562 - RNA, 19 nt, Artificial Sequence
  Description of Artificial Sequence: Synthetic oligonucleotide
aacgucgacuucuucuucu

SEQ ID NO: 209563 - RNA, 19 nt, Artificial Sequence
  Description of Artificial Sequence: Synthetic oligonucleotide
uucaagaugcaggaauaag

SEQ ID NO: 209564 - RNA, 19 nt, Artificial Sequence
  Description of Artificial Sequence: Synthetic oligonucleotide
gacucgguugcucugaguc

SEQ ID NO: 209565 - RNA, 19 nt, Artificial Sequence
  Description of Artificial Sequence: Synthetic oligonucleotide
uaauuuacgcacuguaguu

SEQ ID NO: 209566 - RNA, 19 nt, Artificial Sequence
  Description of Artificial Sequence: Synthetic oligonucleotide
gucauuaaccuucugugga

SEQ ID NO: 209567 - RNA, 19 nt, Artificial Sequence
  Description of Artificial Sequence: Synthetic oligonucleotide
cuuugaaggcacuuuuaug

SEQ ID NO: 209568 - RNA, 19 nt, Artificial Sequence
  Description of Artificial Sequence: Synthetic oligonucleotide
uuagcuucucacagcggag

SEQ ID NO: 209569 - RNA, 19 nt, Artificial Sequence
  Description of Artificial Sequence: Synthetic oligonucleotide
guuagcuucucacagcgga

SEQ ID NO: 209570 - RNA, 19 nt, Artificial Sequence
  Description of Artificial Sequence: Synthetic oligonucleotide
gaaugugucuuucccucag

SEQ ID NO: 209571 - RNA, 19 nt, Artificial Sequence
  Description of Artificial Sequence: Synthetic oligonucleotide
ugguaauaaauagaucagu

SEQ ID NO: 209572 - RNA, 19 nt, Artificial Sequence
  Description of Artificial Sequence: Synthetic oligonucleotide
auccacgauaucaucaaac

SEQ ID NO: 209573 - RNA, 19 nt, Artificial Sequence
  Description of Artificial Sequence: Synthetic oligonucleotide
uucccuuuugguuuguauc

SEQ ID NO: 209574 - RNA, 19 nt, Artificial Sequence
  Description of Artificial Sequence: Synthetic oligonucleotide
gaaucguugggauccacga

SEQ ID NO: 209575 - RNA, 19 nt, Artificial Sequence
  Description of Artificial Sequence: Synthetic oligonucleotide
cagguuuauugacuaaggc

SEQ ID NO: 209576 - RNA, 19 nt, Artificial Sequence
  Description of Artificial Sequence: Synthetic oligonucleotide
gugaguaucagcgguggcg

SEQ ID NO: 209577 - RNA, 19 nt, Artificial Sequence
  Description of Artificial Sequence: Synthetic oligonucleotide
cuauuugguacaucuacca

SEQ ID NO: 209578 - RNA, 19 nt, Artificial Sequence
  Description of Artificial Sequence: Synthetic oligonucleotide
uguaagaguguugguaaca

SEQ ID NO: 209579 - RNA, 19 nt, Artificial Sequence
  Description of Artificial Sequence: Synthetic oligonucleotide
uucuacuuuguaaggugga

SEQ ID NO: 209580 - RNA, 19 nt, Artificial Sequence
  Description of Artificial Sequence: Synthetic oligonucleotide
uuauugacuaaggcuagac

SEQ ID NO: 209581 - RNA, 19 nt, Artificial Sequence
  Description of Artificial Sequence: Synthetic oligonucleotide
uuauguaauaaggcagugu

SEQ ID NO: 209582 - RNA, 19 nt, Artificial Sequence
  Description of Artificial Sequence: Synthetic oligonucleotide
uuccucauaaaaugaugac

SEQ ID NO: 209583 - RNA, 19 nt, Artificial Sequence
  Description of Artificial Sequence: Synthetic oligonucleotide
guaauuuacgcacuguagu

SEQ ID NO: 209584 - RNA, 19 nt, Artificial Sequence
  Description of Artificial Sequence: Synthetic oligonucleotide
ugaguaucagcgguggcgc

SEQ ID NO: 209585 - RNA, 19 nt, Artificial Sequence
  Description of Artificial Sequence: Synthetic oligonucleotide
aguuauguaauaaggcagu

SEQ ID NO: 209586 - RNA, 19 nt, Artificial Sequence
  Description of Artificial Sequence: Synthetic oligonucleotide
aguuacugucugcuuuugg

SEQ ID NO: 209587 - RNA, 19 nt, Artificial Sequence
  Description of Artificial Sequence: Synthetic oligonucleotide
ugacauggguuuagguucc

SEQ ID NO: 209588 - RNA, 19 nt, Artificial Sequence
  Description of Artificial Sequence: Synthetic oligonucleotide
uuuauguucucuggagucu

SEQ ID NO: 209589 - RNA, 19 nt, Artificial Sequence
  Description of Artificial Sequence: Synthetic oligonucleotide
guaagaguguugguaacag

SEQ ID NO: 209590 - RNA, 19 nt, Artificial Sequence
  Description of Artificial Sequence: Synthetic oligonucleotide
uguccacuggugaugguga

SEQ ID NO: 209591 - RNA, 19 nt, Artificial Sequence
  Description of Artificial Sequence: Synthetic oligonucleotide
acagguuuauugacuaagg

SEQ ID NO: 209592 - RNA, 19 nt, Artificial Sequence
  Description of Artificial Sequence: Synthetic oligonucleotide
uuuuagaaacaggaccaga

SEQ ID NO: 209593 - RNA, 19 nt, Artificial Sequence
  Description of Artificial Sequence: Synthetic oligonucleotide
ugugggguuauugaaaguu

SEQ ID NO: 209594 - RNA, 19 nt, Artificial Sequence
  Description of Artificial Sequence: Synthetic oligonucleotide
cuuguguugcgucugcgug

SEQ ID NO: 209595 - RNA, 19 nt, Artificial Sequence
  Description of Artificial Sequence: Synthetic oligonucleotide
ucggauuuggaggacauau

SEQ ID NO: 209596 - RNA, 19 nt, Artificial Sequence
  Description of Artificial Sequence: Synthetic oligonucleotide
cacgauaucaucaaacggu

SEQ ID NO: 209597 - RNA, 19 nt, Artificial Sequence
  Description of Artificial Sequence: Synthetic oligonucleotide
ucuguggaguucuaccaac

SEQ ID NO: 209598 - RNA, 19 nt, Artificial Sequence
  Description of Artificial Sequence: Synthetic oligonucleotide
uaagaguguugguaacagc

SEQ ID NO: 209599 - RNA, 19 nt, Artificial Sequence
  Description of Artificial Sequence: Synthetic oligonucleotide
aaaggaccuuguugccugg

SEQ ID NO: 209600 - RNA, 19 nt, Artificial Sequence
  Description of Artificial Sequence: Synthetic oligonucleotide
agugaguaucagcgguggc

SEQ ID NO: 209601 - RNA, 19 nt, Artificial Sequence
  Description of Artificial Sequence: Synthetic oligonucleotide
ucuuuugacauggguuuag

SEQ ID NO: 209602 - RNA, 19 nt, Artificial Sequence
  Description of Artificial Sequence: Synthetic oligonucleotide
aauuuacgcacuguaguuu

SEQ ID NO: 209603 - RNA, 19 nt, Artificial Sequence
  Description of Artificial Sequence: Synthetic oligonucleotide
uuaaaggaccuuguugccu

SEQ ID NO: 209604 - RNA, 19 nt, Artificial Sequence
  Description of Artificial Sequence: Synthetic oligonucleotide
aaugcagaucuuucaugau

SEQ ID NO: 209605 - RNA, 19 nt, Artificial Sequence
  Description of Artificial Sequence: Synthetic oligonucleotide
auagacugcaacaaguuua

SEQ ID NO: 209606 - RNA, 19 nt, Artificial Sequence
  Description of Artificial Sequence: Synthetic oligonucleotide
uaaggcuagacagcaauuc

SEQ ID NO: 209607 - RNA, 19 nt, Artificial Sequence
  Description of Artificial Sequence: Synthetic oligonucleotide
ugcguguuuucaaggcuag

SEQ ID NO: 209608 - RNA, 19 nt, Artificial Sequence
  Description of Artificial Sequence: Synthetic oligonucleotide
ugucuuucccucaguguca

SEQ ID NO: 209609 - RNA, 19 nt, Artificial Sequence
  Description of Artificial Sequence: Synthetic oligonucleotide
aucuagguaugccuuguca

SEQ ID NO: 209610 - RNA, 19 nt, Artificial Sequence
  Description of Artificial Sequence: Synthetic oligonucleotide
auguuacugugcuccgggc

SEQ ID NO: 209611 - RNA, 19 nt, Artificial Sequence
  Description of Artificial Sequence: Synthetic oligonucleotide
ucagcgguggcgcacuaga

SEQ ID NO: 209612 - RNA, 19 nt, Artificial Sequence
  Description of Artificial Sequence: Synthetic oligonucleotide
auuuacgcacuguaguuuu

SEQ ID NO: 209613 - RNA, 19 nt, Artificial Sequence
  Description of Artificial Sequence: Synthetic oligonucleotide
ucuguggaaugccuuuacu

SEQ ID NO: 209614 - RNA, 19 nt, Artificial Sequence
  Description of Artificial Sequence: Synthetic oligonucleotide
gacauauucuccuccacgu

SEQ ID NO: 209615 - RNA, 19 nt, Artificial Sequence
  Description of Artificial Sequence: Synthetic oligonucleotide
aacgguggcaacgucgacu

SEQ ID NO: 209616 - RNA, 19 nt, Artificial Sequence
  Description of Artificial Sequence: Synthetic oligonucleotide
uaaccuucuguggaguucu

SEQ ID NO: 209617 - RNA, 19 nt, Artificial Sequence
  Description of Artificial Sequence: Synthetic oligonucleotide
agguaacucuguaauuuac

SEQ ID NO: 209618 - RNA, 19 nt, Artificial Sequence
  Description of Artificial Sequence: Synthetic oligonucleotide
acucgguugcucugagucg

SEQ ID NO: 209619 - RNA, 19 nt, Artificial Sequence
  Description of Artificial Sequence: Synthetic oligonucleotide
agauguaagaguguuggua

SEQ ID NO: 209620 - RNA, 19 nt, Artificial Sequence
  Description of Artificial Sequence: Synthetic oligonucleotide
caaaugauccuauuuggua

SEQ ID NO: 209621 - RNA, 19 nt, Artificial Sequence
  Description of Artificial Sequence: Synthetic oligonucleotide
uuugcuuguguugcgucug

SEQ ID NO: 209622 - RNA, 19 nt, Artificial Sequence
  Description of Artificial Sequence: Synthetic oligonucleotide
aaagauccaugguaccaua

SEQ ID NO: 209623 - RNA, 19 nt, Artificial Sequence
  Description of Artificial Sequence: Synthetic oligonucleotide
aauaugcauucguccugug

SEQ ID NO: 209624 - RNA, 19 nt, Artificial Sequence
  Description of Artificial Sequence: Synthetic oligonucleotide
cagaaagauccaugguacc

SEQ ID NO: 209625 - RNA, 19 nt, Artificial Sequence
  Description of Artificial Sequence: Synthetic oligonucleotide
caagugaguaucagcggug

SEQ ID NO: 209626 - RNA, 19 nt, Artificial Sequence
  Description of Artificial Sequence: Synthetic oligonucleotide
uagguuugcuuguguugcg

SEQ ID NO: 209627 - RNA, 19 nt, Artificial Sequence
  Description of Artificial Sequence: Synthetic oligonucleotide
acgauaucaucaaacggug

SEQ ID NO: 209628 - RNA, 19 nt, Artificial Sequence
  Description of Artificial Sequence: Synthetic oligonucleotide
gaagacgacuuuucuccac

SEQ ID NO: 209629 - RNA, 19 nt, Artificial Sequence
  Description of Artificial Sequence: Synthetic oligonucleotide
auuuguugugaucccugga

SEQ ID NO: 209630 - RNA, 19 nt, Artificial Sequence
  Description of Artificial Sequence: Synthetic oligonucleotide
aguaucagcgguggcgcac

SEQ ID NO: 209631 - RNA, 19 nt, Artificial Sequence
  Description of Artificial Sequence: Synthetic oligonucleotide
uggaaaguggcacgguaua

SEQ ID NO: 209632 - RNA, 19 nt, Artificial Sequence
  Description of Artificial Sequence: Synthetic oligonucleotide
aaacgguggcaacgucgac

SEQ ID NO: 209633 - RNA, 19 nt, Artificial Sequence
  Description of Artificial Sequence: Synthetic oligonucleotide
ugaacgcccucacuguggu

SEQ ID NO: 209634 - RNA, 19 nt, Artificial Sequence
  Description of Artificial Sequence: Synthetic oligonucleotide
guuauguaauaaggcagug

SEQ ID NO: 209635 - RNA, 19 nt, Artificial Sequence
  Description of Artificial Sequence: Synthetic oligonucleotide
cucgguugcucugagucgg

SEQ ID NO: 209636 - RNA, 19 nt, Artificial Sequence
  Description of Artificial Sequence: Synthetic oligonucleotide
gucugcguguuuucaaggc

SEQ ID NO: 209637 - RNA, 19 nt, Artificial Sequence
  Description of Artificial Sequence: Synthetic oligonucleotide
ugaaugcuccuguuagggu

SEQ ID NO: 209638 - RNA, 19 nt, Artificial Sequence
  Description of Artificial Sequence: Synthetic oligonucleotide
guaguuuuguccagcgagc

SEQ ID NO: 209639 - RNA, 19 nt, Artificial Sequence
  Description of Artificial Sequence: Synthetic oligonucleotide
auaugaaaguguccaguuu

SEQ ID NO: 209640 - RNA, 19 nt, Artificial Sequence
  Description of Artificial Sequence: Synthetic oligonucleotide
ccuauuugguacaucuacc

SEQ ID NO: 209641 - RNA, 19 nt, Artificial Sequence
  Description of Artificial Sequence: Synthetic oligonucleotide
agaguguugguaacagcuc

SEQ ID NO: 209642 - RNA, 19 nt, Artificial Sequence
  Description of Artificial Sequence: Synthetic oligonucleotide
aucaagguggcuauuuggu

SEQ ID NO: 209643 - RNA, 19 nt, Artificial Sequence
  Description of Artificial Sequence: Synthetic oligonucleotide
ccuagggaagcuuucgugc

SEQ ID NO: 209644 - RNA, 19 nt, Artificial Sequence
  Description of Artificial Sequence: Synthetic oligonucleotide
uggcacgguauacaaguaa

SEQ ID NO: 209645 - RNA, 19 nt, Artificial Sequence
  Description of Artificial Sequence: Synthetic oligonucleotide
cucacagcggaggugauuc

SEQ ID NO: 209646 - RNA, 19 nt, Artificial Sequence
  Description of Artificial Sequence: Synthetic oligonucleotide
aggaggagucuuuggaaga

SEQ ID NO: 209647 - RNA, 19 nt, Artificial Sequence
  Description of Artificial Sequence: Synthetic oligonucleotide
ucaaggcuagccaggcuaa

SEQ ID NO: 209648 - RNA, 19 nt, Artificial Sequence
  Description of Artificial Sequence: Synthetic oligonucleotide
aacgcccucacugugguuu

SEQ ID NO: 209649 - RNA, 19 nt, Artificial Sequence
  Description of Artificial Sequence: Synthetic oligonucleotide
uaguuuuguccagcgagca

SEQ ID NO: 209650 - RNA, 19 nt, Artificial Sequence
  Description of Artificial Sequence: Synthetic oligonucleotide
agaaugugucuuucccuca

SEQ ID NO: 209651 - RNA, 19 nt, Artificial Sequence
  Description of Artificial Sequence: Synthetic oligonucleotide
uuacuuucauauucaccua

SEQ ID NO: 209652 - RNA, 19 nt, Artificial Sequence
  Description of Artificial Sequence: Synthetic oligonucleotide
cucuguaauuuacgcacug

SEQ ID NO: 209653 - RNA, 19 nt, Artificial Sequence
  Description of Artificial Sequence: Synthetic oligonucleotide
gcgagcaaagaucaaaauc

SEQ ID NO: 209654 - RNA, 19 nt, Artificial Sequence
  Description of Artificial Sequence: Synthetic oligonucleotide
uucgacuuccaccucuauu

SEQ ID NO: 209655 - RNA, 19 nt, Artificial Sequence
  Description of Artificial Sequence: Synthetic oligonucleotide
ugaguacaccacacuggca

SEQ ID NO: 209656 - RNA, 19 nt, Artificial Sequence
  Description of Artificial Sequence: Synthetic oligonucleotide
augugguauuuguaauaug

SEQ ID NO: 209657 - RNA, 19 nt, Artificial Sequence
  Description of Artificial Sequence: Synthetic oligonucleotide
aucaaacgguggcaacguc

SEQ ID NO: 209658 - RNA, 19 nt, Artificial Sequence
  Description of Artificial Sequence: Synthetic oligonucleotide
ucuacuuuguaagguggau

SEQ ID NO: 209659 - RNA, 19 nt, Artificial Sequence
  Description of Artificial Sequence: Synthetic oligonucleotide
caugauggagaggugaaga

SEQ ID NO: 209660 - RNA, 19 nt, Artificial Sequence
  Description of Artificial Sequence: Synthetic oligonucleotide
ucguugggauccacgauau

SEQ ID NO: 209661 - RNA, 19 nt, Artificial Sequence
  Description of Artificial Sequence: Synthetic oligonucleotide
uucgugcaaguggaagacg

SEQ ID NO: 209662 - RNA, 19 nt, Artificial Sequence
  Description of Artificial Sequence: Synthetic oligonucleotide
agauuuguugugaucccug

SEQ ID NO: 209663 - RNA, 19 nt, Artificial Sequence
  Description of Artificial Sequence: Synthetic oligonucleotide
acaccauccagucgugggu

SEQ ID NO: 209664 - RNA, 19 nt, Artificial Sequence
  Description of Artificial Sequence: Synthetic oligonucleotide
aggaccuuguugccugguc

SEQ ID NO: 209665 - RNA, 19 nt, Artificial Sequence
  Description of Artificial Sequence: Synthetic oligonucleotide
uuacaggucuuuccaucuc

SEQ ID NO: 209666 - RNA, 19 nt, Artificial Sequence
  Description of Artificial Sequence: Synthetic oligonucleotide
ugaaaccagcauacccaga

SEQ ID NO: 209667 - RNA, 19 nt, Artificial Sequence
  Description of Artificial Sequence: Synthetic oligonucleotide
acgucugaaucguugggau

SEQ ID NO: 209668 - RNA, 19 nt, Artificial Sequence
  Description of Artificial Sequence: Synthetic oligonucleotide
caaacgguggcaacgucga

SEQ ID NO: 209669 - RNA, 19 nt, Artificial Sequence
  Description of Artificial Sequence: Synthetic oligonucleotide
ucuuauccugcuguccacu

SEQ ID NO: 209670 - RNA, 19 nt, Artificial Sequence
  Description of Artificial Sequence: Synthetic oligonucleotide
ggcacgguauacaaguaag

SEQ ID NO: 209671 - RNA, 19 nt, Artificial Sequence
  Description of Artificial Sequence: Synthetic oligonucleotide
uguggacauuacagguaca

SEQ ID NO: 209672 - RNA, 19 nt, Artificial Sequence
  Description of Artificial Sequence: Synthetic oligonucleotide
gguacacuuuuguuaaguc

SEQ ID NO: 209673 - RNA, 19 nt, Artificial Sequence
  Description of Artificial Sequence: Synthetic oligonucleotide
aaguuacugucugcuuuug

SEQ ID NO: 209674 - RNA, 19 nt, Artificial Sequence
  Description of Artificial Sequence: Synthetic oligonucleotide
uagguaugccuugucacau

SEQ ID NO: 209675 - RNA, 19 nt, Artificial Sequence
  Description of Artificial Sequence: Synthetic oligonucleotide
cauccacgggaccaaguac

SEQ ID NO: 209676 - RNA, 19 nt, Artificial Sequence
  Description of Artificial Sequence: Synthetic oligonucleotide
cacgaacaccauccagucg

SEQ ID NO: 209677 - RNA, 19 nt, Artificial Sequence
  Description of Artificial Sequence: Synthetic oligonucleotide
agcgagcaaagaucaaaau

SEQ ID NO: 209678 - RNA, 19 nt, Artificial Sequence
  Description of Artificial Sequence: Synthetic oligonucleotide
ccuggaagguucuuugaag

SEQ ID NO: 209679 - RNA, 19 nt, Artificial Sequence
  Description of Artificial Sequence: Synthetic oligonucleotide
ccuaauauugcaacaguaa

SEQ ID NO: 209680 - RNA, 19 nt, Artificial Sequence
  Description of Artificial Sequence: Synthetic oligonucleotide
guuguuaguuuucaauaau

SEQ ID NO: 209681 - RNA, 19 nt, Artificial Sequence
  Description of Artificial Sequence: Synthetic oligonucleotide
gaacaccauccagucgugg

SEQ ID NO: 209682 - RNA, 19 nt, Artificial Sequence
  Description of Artificial Sequence: Synthetic oligonucleotide
gugaacgcccucacugugg

SEQ ID NO: 209683 - RNA, 19 nt, Artificial Sequence
  Description of Artificial Sequence: Synthetic oligonucleotide
uccuccacgucugaaucgu

SEQ ID NO: 209684 - RNA, 19 nt, Artificial Sequence
  Description of Artificial Sequence: Synthetic oligonucleotide
accuaauauugcaacagua

SEQ ID NO: 209685 - RNA, 19 nt, Artificial Sequence
  Description of Artificial Sequence: Synthetic oligonucleotide
uccagguaacucuguaauu

SEQ ID NO: 209686 - RNA, 19 nt, Artificial Sequence
  Description of Artificial Sequence: Synthetic oligonucleotide
accuucuguggaguucuac

SEQ ID NO: 209687 - RNA, 19 nt, Artificial Sequence
  Description of Artificial Sequence: Synthetic oligonucleotide
agcagcagcagcagcagca

SEQ ID NO: 209688 - RNA, 19 nt, Artificial Sequence
  Description of Artificial Sequence: Synthetic oligonucleotide
agcagcagcagcagcagcu

SEQ ID NO: 209689 - RNA, 19 nt, Artificial Sequence
  Description of Artificial Sequence: Synthetic oligonucleotide
ccgucacucaagcugaccc

SEQ ID NO: 209690 - RNA, 19 nt, Artificial Sequence
  Description of Artificial Sequence: Synthetic oligonucleotide
uuaaguccuacagguuuau

SEQ ID NO: 209691 - RNA, 19 nt, Artificial Sequence
  Description of Artificial Sequence: Synthetic oligonucleotide
guagcagcagcagcagcag

SEQ ID NO: 209692 - RNA, 19 nt, Artificial Sequence
  Description of Artificial Sequence: Synthetic oligonucleotide
uguugcgucugcguguuuu

SEQ ID NO: 209693 - RNA, 19 nt, Artificial Sequence
  Description of Artificial Sequence: Synthetic oligonucleotide
gaauaugcauucguccugu

SEQ ID NO: 209694 - RNA, 19 nt, Artificial Sequence
  Description of Artificial Sequence: Synthetic oligonucleotide
ccaggcuaacucuuccugg

SEQ ID NO: 209695 - RNA, 19 nt, Artificial Sequence
  Description of Artificial Sequence: Synthetic oligonucleotide
gacccugcgacuucgacuu

SEQ ID NO: 209696 - RNA, 19 nt, Artificial Sequence
  Description of Artificial Sequence: Synthetic oligonucleotide
uagcagcagcagcagcagc

SEQ ID NO: 209697 - RNA, 19 nt, Artificial Sequence
  Description of Artificial Sequence: Synthetic oligonucleotide
uugucacauucaccauucu

SEQ ID NO: 209698 - RNA, 19 nt, Artificial Sequence
  Description of Artificial Sequence: Synthetic oligonucleotide
agaccuuaaaggaccuugu

SEQ ID NO: 209699 - RNA, 19 nt, Artificial Sequence
  Description of Artificial Sequence: Synthetic oligonucleotide
cuauaagguucacgaucug

SEQ ID NO: 209700 - RNA, 19 nt, Artificial Sequence
  Description of Artificial Sequence: Synthetic oligonucleotide
acuuucauauucaccuaau

SEQ ID NO: 209701 - RNA, 19 nt, Artificial Sequence
  Description of Artificial Sequence: Synthetic oligonucleotide
aguuagcuucucacagcgg

SEQ ID NO: 209702 - RNA, 19 nt, Artificial Sequence
  Description of Artificial Sequence: Synthetic oligonucleotide
gcauucguccuguggaaug

SEQ ID NO: 209703 - RNA, 19 nt, Artificial Sequence
  Description of Artificial Sequence: Synthetic oligonucleotide
uucagugguuuguuuucuu

SEQ ID NO: 209704 - RNA, 19 nt, Artificial Sequence
  Description of Artificial Sequence: Synthetic oligonucleotide
augcauucguccuguggaa

SEQ ID NO: 209705 - RNA, 19 nt, Artificial Sequence
  Description of Artificial Sequence: Synthetic oligonucleotide
gcacgguauacaaguaagg

SEQ ID NO: 209706 - RNA, 19 nt, Artificial Sequence
  Description of Artificial Sequence: Synthetic oligonucleotide
ggguuauugaaaguuagcu

SEQ ID NO: 209707 - RNA, 19 nt, Artificial Sequence
  Description of Artificial Sequence: Synthetic oligonucleotide
cagcgagcaaagaucaaaa

SEQ ID NO: 209708 - RNA, 19 nt, Artificial Sequence
  Description of Artificial Sequence: Synthetic oligonucleotide
gaaagauccaugguaccau

SEQ ID NO: 209709 - RNA, 19 nt, Artificial Sequence
  Description of Artificial Sequence: Synthetic oligonucleotide
ggaauaagucauaaucaaa

SEQ ID NO: 209710 - RNA, 19 nt, Artificial Sequence
  Description of Artificial Sequence: Synthetic oligonucleotide
uccagucgugggugaacgc

SEQ ID NO: 209711 - RNA, 19 nt, Artificial Sequence
  Description of Artificial Sequence: Synthetic oligonucleotide
cugccgucacucaagcuga

SEQ ID NO: 209712 - RNA, 19 nt, Artificial Sequence
  Description of Artificial Sequence: Synthetic oligonucleotide
acugcugcugcugcugcug

SEQ ID NO: 209713 - RNA, 19 nt, Artificial Sequence
  Description of Artificial Sequence: Synthetic oligonucleotide
cucaccugggcgcgguagc

SEQ ID NO: 209714 - RNA, 19 nt, Artificial Sequence
  Description of Artificial Sequence: Synthetic oligonucleotide
gacgacuuuucuccacaaa

SEQ ID NO: 209715 - RNA, 19 nt, Artificial Sequence
  Description of Artificial Sequence: Synthetic oligonucleotide
uguguugcgucugcguguu

SEQ ID NO: 209716 - RNA, 19 nt, Artificial Sequence
  Description of Artificial Sequence: Synthetic oligonucleotide
cuguggaaugaaccaccac

SEQ ID NO: 209717 - RNA, 19 nt, Artificial Sequence
  Description of Artificial Sequence: Synthetic oligonucleotide
acggcaagggcgcugcauu

SEQ ID NO: 209718 - RNA, 19 nt, Artificial Sequence
  Description of Artificial Sequence: Synthetic oligonucleotide
ggugaacgcccucacugug

SEQ ID NO: 209719 - RNA, 19 nt, Artificial Sequence
  Description of Artificial Sequence: Synthetic oligonucleotide
aggcuagacagcaauucaa

SEQ ID NO: 209720 - RNA, 19 nt, Artificial Sequence
  Description of Artificial Sequence: Synthetic oligonucleotide
acucuguaauuuacgcacu

SEQ ID NO: 209721 - RNA, 19 nt, Artificial Sequence
  Description of Artificial Sequence: Synthetic oligonucleotide
gguuauugaaaguuagcuu

SEQ ID NO: 209722 - RNA, 19 nt, Artificial Sequence
  Description of Artificial Sequence: Synthetic oligonucleotide
gggguuauugaaaguuagc

SEQ ID NO: 209723 - RNA, 19 nt, Artificial Sequence
  Description of Artificial Sequence: Synthetic oligonucleotide
guugcgucugcguguuuuc

SEQ ID NO: 209724 - RNA, 19 nt, Artificial Sequence
  Description of Artificial Sequence: Synthetic oligonucleotide
gccuagggaagcuuucgug

SEQ ID NO: 209725 - RNA, 19 nt, Artificial Sequence
  Description of Artificial Sequence: Synthetic oligonucleotide
uccacgggaccaaguacuu

SEQ ID NO: 209726 - RNA, 19 nt, Artificial Sequence
  Description of Artificial Sequence: Synthetic oligonucleotide
cagguaacucuguaauuua

SEQ ID NO: 209727 - RNA, 19 nt, Artificial Sequence
  Description of Artificial Sequence: Synthetic oligonucleotide
ggugaagguuguuugauuu

SEQ ID NO: 209728 - RNA, 19 nt, Artificial Sequence
  Description of Artificial Sequence: Synthetic oligonucleotide
ggcaacgucgacuucuucu

SEQ ID NO: 209729 - RNA, 19 nt, Artificial Sequence
  Description of Artificial Sequence: Synthetic oligonucleotide
cugcguguuuucaaggcua

SEQ ID NO: 209730 - RNA, 19 nt, Artificial Sequence
  Description of Artificial Sequence: Synthetic oligonucleotide
gauagaccuuaaaggaccu

SEQ ID NO: 209731 - RNA, 19 nt, Artificial Sequence
  Description of Artificial Sequence: Synthetic oligonucleotide
ugauccuauuugguacauc

SEQ ID NO: 209732 - RNA, 19 nt, Artificial Sequence
  Description of Artificial Sequence: Synthetic oligonucleotide
cacgguauacaaguaaggu

SEQ ID NO: 209733 - RNA, 19 nt, Artificial Sequence
  Description of Artificial Sequence: Synthetic oligonucleotide
cugcugcugcugcugcugg

SEQ ID NO: 209734 - RNA, 19 nt, Artificial Sequence
  Description of Artificial Sequence: Synthetic oligonucleotide
ugcauucguccuguggaau

SEQ ID NO: 209735 - RNA, 19 nt, Artificial Sequence
  Description of Artificial Sequence: Synthetic oligonucleotide
ucacagcggaggugauuca

SEQ ID NO: 209736 - RNA, 19 nt, Artificial Sequence
  Description of Artificial Sequence: Synthetic oligonucleotide
cacagcggaggugauucac

SEQ ID NO: 209737 - RNA, 19 nt, Artificial Sequence
  Description of Artificial Sequence: Synthetic oligonucleotide
aggcaguguguugaauaug

SEQ ID NO: 209738 - RNA, 19 nt, Artificial Sequence
  Description of Artificial Sequence: Synthetic oligonucleotide
aguguugguaacagcucaa

SEQ ID NO: 209739 - RNA, 19 nt, Artificial Sequence
  Description of Artificial Sequence: Synthetic oligonucleotide
agguuugcuuguguugcgu

SEQ ID NO: 209740 - RNA, 19 nt, Artificial Sequence
  Description of Artificial Sequence: Synthetic oligonucleotide
cacgucugaaucguuggga

SEQ ID NO: 209741 - RNA, 19 nt, Artificial Sequence
  Description of Artificial Sequence: Synthetic oligonucleotide
gcaacaaguuuaaaggacu

SEQ ID NO: 209742 - RNA, 19 nt, Artificial Sequence
  Description of Artificial Sequence: Synthetic oligonucleotide
gaaccaccacagaaagauc

SEQ ID NO: 209743 - RNA, 19 nt, Artificial Sequence
  Description of Artificial Sequence: Synthetic oligonucleotide
gguuugcuuguguugcguc

SEQ ID NO: 209744 - RNA, 19 nt, Artificial Sequence
  Description of Artificial Sequence: Synthetic oligonucleotide
cuguggaaugccuuuacuu

SEQ ID NO: 209745 - RNA, 19 nt, Artificial Sequence
  Description of Artificial Sequence: Synthetic oligonucleotide
cauucguccuguggaauga

SEQ ID NO: 209746 - RNA, 19 nt, Artificial Sequence
  Description of Artificial Sequence: Synthetic oligonucleotide
uacugcugcugcugcugcu

SEQ ID NO: 209747 - RNA, 19 nt, Artificial Sequence
  Description of Artificial Sequence: Synthetic oligonucleotide
uugugaucccuggaagguu

SEQ ID NO: 209748 - RNA, 19 nt, Artificial Sequence
  Description of Artificial Sequence: Synthetic oligonucleotide
gacaugagauuuaucuuuu

SEQ ID NO: 209749 - RNA, 19 nt, Artificial Sequence
  Description of Artificial Sequence: Synthetic oligonucleotide
cacgggaccaaguacuuau

SEQ ID NO: 209750 - RNA, 19 nt, Artificial Sequence
  Description of Artificial Sequence: Synthetic oligonucleotide
cagaaugcagaucuuucau

SEQ ID NO: 209751 - RNA, 19 nt, Artificial Sequence
  Description of Artificial Sequence: Synthetic oligonucleotide
caacgucgacuucuucuuc

SEQ ID NO: 209752 - RNA, 19 nt, Artificial Sequence
  Description of Artificial Sequence: Synthetic oligonucleotide
ucaccugggcgcgguagca

SEQ ID NO: 209753 - RNA, 19 nt, Artificial Sequence
  Description of Artificial Sequence: Synthetic oligonucleotide
ucgguugcucugagucgga

SEQ ID NO: 209754 - RNA, 19 nt, Artificial Sequence
  Description of Artificial Sequence: Synthetic oligonucleotide
uugguacaucuaccauguc

SEQ ID NO: 209755 - RNA, 19 nt, Artificial Sequence
  Description of Artificial Sequence: Synthetic oligonucleotide
cugcugcugcugcugcugc

SEQ ID NO: 209756 - RNA, 19 nt, Artificial Sequence
  Description of Artificial Sequence: Synthetic oligonucleotide
gaguaucagcgguggcgca

SEQ ID NO: 209757 - RNA, 19 nt, Artificial Sequence
  Description of Artificial Sequence: Synthetic oligonucleotide
accucuauuuacaggucuu

SEQ ID NO: 209758 - RNA, 19 nt, Artificial Sequence
  Description of Artificial Sequence: Synthetic oligonucleotide
gguggaaaguggcacggua

SEQ ID NO: 209759 - RNA, 19 nt, Artificial Sequence
  Description of Artificial Sequence: Synthetic oligonucleotide
cauccagucgugggugaac

SEQ ID NO: 209760 - RNA, 19 nt, Artificial Sequence
  Description of Artificial Sequence: Synthetic oligonucleotide
cuucuauaagguucacgau

SEQ ID NO: 209761 - RNA, 19 nt, Artificial Sequence
  Description of Artificial Sequence: Synthetic oligonucleotide
augauccuauuugguacau

SEQ ID NO: 209762 - RNA, 19 nt, Artificial Sequence
  Description of Artificial Sequence: Synthetic oligonucleotide
agucggauuuggaggacau

SEQ ID NO: 209763 - RNA, 19 nt, Artificial Sequence
  Description of Artificial Sequence: Synthetic oligonucleotide
cauagacugcaacaaguuu

SEQ ID NO: 209764 - RNA, 19 nt, Artificial Sequence
  Description of Artificial Sequence: Synthetic oligonucleotide
ugcugcugcugcugcugcu

SEQ ID NO: 209765 - RNA, 19 nt, Artificial Sequence
  Description of Artificial Sequence: Synthetic oligonucleotide
caccuaauauugcaacagu

SEQ ID NO: 209766 - RNA, 19 nt, Artificial Sequence
  Description of Artificial Sequence: Synthetic oligonucleotide
cuuuguaagguggaucuuu

SEQ ID NO: 209767 - RNA, 19 nt, Artificial Sequence
  Description of Artificial Sequence: Synthetic oligonucleotide
cagcagcagcagcagcagc

SEQ ID NO: 209768 - RNA, 19 nt, Artificial Sequence
  Description of Artificial Sequence: Synthetic oligonucleotide
caacaaguuuaaaggacuu

SEQ ID NO: 209769 - RNA, 19 nt, Artificial Sequence
  Description of Artificial Sequence: Synthetic oligonucleotide
ugcugcugcugcugcuggu

SEQ ID NO: 209770 - RNA, 19 nt, Artificial Sequence
  Description of Artificial Sequence: Synthetic oligonucleotide
aucagcgguggcgcacuag

SEQ ID NO: 209771 - RNA, 19 nt, Artificial Sequence
  Description of Artificial Sequence: Synthetic oligonucleotide
guaugccuugucacauuca

SEQ ID NO: 209772 - RNA, 19 nt, Artificial Sequence
  Description of Artificial Sequence: Synthetic oligonucleotide
cugcugcugcugcugcuac

SEQ ID NO: 209773 - RNA, 19 nt, Artificial Sequence
  Description of Artificial Sequence: Synthetic oligonucleotide
gaccuuaaaggaccuuguu

SEQ ID NO: 209774 - RNA, 19 nt, Artificial Sequence
  Description of Artificial Sequence: Synthetic oligonucleotide
ggugaguaaguuacugucu

SEQ ID NO: 209775 - RNA, 19 nt, Artificial Sequence
  Description of Artificial Sequence: Synthetic oligonucleotide
gguaccauacacauucuuu

SEQ ID NO: 209776 - RNA, 19 nt, Artificial Sequence
  Description of Artificial Sequence: Synthetic oligonucleotide
uggcaacgucgacuucuuc

SEQ ID NO: 209777 - RNA, 19 nt, Artificial Sequence
  Description of Artificial Sequence: Synthetic oligonucleotide
augguaccauacacauucu

SEQ ID NO: 209778 - RNA, 19 nt, Artificial Sequence
  Description of Artificial Sequence: Synthetic oligonucleotide
auagaccuuaaaggaccuu

SEQ ID NO: 209779 - RNA, 19 nt, Artificial Sequence
  Description of Artificial Sequence: Synthetic oligonucleotide
ggaccuuguugccuggucu

SEQ ID NO: 209780 - RNA, 19 nt, Artificial Sequence
  Description of Artificial Sequence: Synthetic oligonucleotide
auccuauuugguacaucua

SEQ ID NO: 209781 - RNA, 19 nt, Artificial Sequence
  Description of Artificial Sequence: Synthetic oligonucleotide
gcauccacgggaccaagua

SEQ ID NO: 209782 - RNA, 19 nt, Artificial Sequence
  Description of Artificial Sequence: Synthetic oligonucleotide
caaggcuagccaggcuaac

SEQ ID NO: 209783 - RNA, 19 nt, Artificial Sequence
  Description of Artificial Sequence: Synthetic oligonucleotide
gcagcagcagcagcagcag

SEQ ID NO: 209784 - RNA, 19 nt, Artificial Sequence
  Description of Artificial Sequence: Synthetic oligonucleotide
agcauccacgggaccaagu

SEQ ID NO: 209785 - RNA, 19 nt, Artificial Sequence
  Description of Artificial Sequence: Synthetic oligonucleotide
caucaaacgguggcaacgu

SEQ ID NO: 209786 - RNA, 19 nt, Artificial Sequence
  Description of Artificial Sequence: Synthetic oligonucleotide
ccaacucaucuagguaugc

SEQ ID NO: 209787 - RNA, 19 nt, Artificial Sequence
  Description of Artificial Sequence: Synthetic oligonucleotide
ggcuugggacggcaagggc

SEQ ID NO: 209788 - RNA, 19 nt, Artificial Sequence
  Description of Artificial Sequence: Synthetic oligonucleotide
guauacaaguaaggucacu

SEQ ID NO: 209789 - RNA, 19 nt, Artificial Sequence
  Description of Artificial Sequence: Synthetic oligonucleotide
guggaaaguggcacgguau

SEQ ID NO: 209790 - RNA, 19 nt, Artificial Sequence
  Description of Artificial Sequence: Synthetic oligonucleotide
agguuccuugaaggccauc

SEQ ID NO: 209791 - RNA, 19 nt, Artificial Sequence
  Description of Artificial Sequence: Synthetic oligonucleotide
ccuguggaaugaaccacca

SEQ ID NO: 209792 - RNA, 19 nt, Artificial Sequence
  Description of Artificial Sequence: Synthetic oligonucleotide
aggccaucuuaggaacuau

SEQ ID NO: 209793 - RNA, 19 nt, Artificial Sequence
  Description of Artificial Sequence: Synthetic oligonucleotide
gcugcugcugcugcugcug

SEQ ID NO: 209794 - RNA, 19 nt, Artificial Sequence
  Description of Artificial Sequence: Synthetic oligonucleotide
ggcucuuuugacauggguu

SEQ ID NO: 209795 - RNA, 19 nt, Artificial Sequence
  Description of Artificial Sequence: Synthetic oligonucleotide
cugggcgcgguagcagcag

SEQ ID NO: 209796 - RNA, 19 nt, Artificial Sequence
  Description of Artificial Sequence: Synthetic oligonucleotide
gaaaaucaagguggcuauu

SEQ ID NO: 209797 - RNA, 19 nt, Artificial Sequence
  Description of Artificial Sequence: Synthetic oligonucleotide
gggacggcaagggcgcugc

SEQ ID NO: 209798 - RNA, 19 nt, Artificial Sequence
  Description of Artificial Sequence: Synthetic oligonucleotide
caggacucgguugcucuga

SEQ ID NO: 209799 - RNA, 19 nt, Artificial Sequence
  Description of Artificial Sequence: Synthetic oligonucleotide
ggugucauucccucacaau

SEQ ID NO: 209800 - RNA, 19 nt, Artificial Sequence
  Description of Artificial Sequence: Synthetic oligonucleotide
gcaacgucgacuucuucuu

SEQ ID NO: 209801 - RNA, 19 nt, Artificial Sequence
  Description of Artificial Sequence: Synthetic oligonucleotide
cgugcaaguggaagacgac

SEQ ID NO: 209802 - RNA, 19 nt, Artificial Sequence
  Description of Artificial Sequence: Synthetic oligonucleotide
cauaaucaaagcggacuuu

SEQ ID NO: 209803 - RNA, 19 nt, Artificial Sequence
  Description of Artificial Sequence: Synthetic oligonucleotide
guaucagcgguggcgcacu

SEQ ID NO: 209804 - RNA, 19 nt, Artificial Sequence
  Description of Artificial Sequence: Synthetic oligonucleotide
gcaagggcgcugcauugaa

SEQ ID NO: 209805 - RNA, 19 nt, Artificial Sequence
  Description of Artificial Sequence: Synthetic oligonucleotide
gucgugggugaacgcccuc

SEQ ID NO: 209806 - RNA, 19 nt, Artificial Sequence
  Description of Artificial Sequence: Synthetic oligonucleotide
gggugaacgcccucacugu

SEQ ID NO: 209807 - RNA, 19 nt, Artificial Sequence
  Description of Artificial Sequence: Synthetic oligonucleotide
uugggacggcaagggcgcu

SEQ ID NO: 209808 - RNA, 19 nt, Artificial Sequence
  Description of Artificial Sequence: Synthetic oligonucleotide
uccucaccugggcgcggua

SEQ ID NO: 209809 - RNA, 19 nt, Artificial Sequence
  Description of Artificial Sequence: Synthetic oligonucleotide
ggcaagggcgcugcauuga

SEQ ID NO: 209810 - RNA, 19 nt, Artificial Sequence
  Description of Artificial Sequence: Synthetic oligonucleotide
gccaucuuaggaacuauuu

SEQ ID NO: 209811 - RNA, 19 nt, Artificial Sequence
  Description of Artificial Sequence: Synthetic oligonucleotide
gugggugaacgcccucacu

SEQ ID NO: 209812 - RNA, 19 nt, Artificial Sequence
  Description of Artificial Sequence: Synthetic oligonucleotide
aaccuucuguggaguucua

SEQ ID NO: 209813 - RNA, 19 nt, Artificial Sequence
  Description of Artificial Sequence: Synthetic oligonucleotide
gcagcagcagcagcagcuc

SEQ ID NO: 209814 - RNA, 19 nt, Artificial Sequence
  Description of Artificial Sequence: Synthetic oligonucleotide
cagcgguggcgcacuagaa

SEQ ID NO: 209815 - RNA, 19 nt, Artificial Sequence
  Description of Artificial Sequence: Synthetic oligonucleotide
gccgucacucaagcugacc

SEQ ID NO: 209816 - RNA, 19 nt, Artificial Sequence
  Description of Artificial Sequence: Synthetic oligonucleotide
guuguauccucaggauguu

SEQ ID NO: 209817 - RNA, 19 nt, Artificial Sequence
  Description of Artificial Sequence: Synthetic oligonucleotide
gguccccuccugccuucag

SEQ ID NO: 209818 - RNA, 19 nt, Artificial Sequence
  Description of Artificial Sequence: Synthetic oligonucleotide
ccucaccugggcgcgguag

SEQ ID NO: 209819 - RNA, 19 nt, Artificial Sequence
  Description of Artificial Sequence: Synthetic oligonucleotide
gcaaguggaagacgacuuu

SEQ ID NO: 209820 - RNA, 19 nt, Artificial Sequence
  Description of Artificial Sequence: Synthetic oligonucleotide
gucggauuuggaggacaua

SEQ ID NO: 209821 - RNA, 19 nt, Artificial Sequence
  Description of Artificial Sequence: Synthetic oligonucleotide
gccgcgcacgaacaccauc

SEQ ID NO: 209822 - RNA, 19 nt, Artificial Sequence
  Description of Artificial Sequence: Synthetic oligonucleotide
gacggcaagggcgcugcau

SEQ ID NO: 209823 - RNA, 19 nt, Artificial Sequence
  Description of Artificial Sequence: Synthetic oligonucleotide
gggccgcgcacgaacacca

SEQ ID NO: 209824 - RNA, 19 nt, Artificial Sequence
  Description of Artificial Sequence: Synthetic oligonucleotide
ggccuagggaagcuuucgu

SEQ ID NO: 209825 - RNA, 19 nt, Artificial Sequence
  Description of Artificial Sequence: Synthetic oligonucleotide
uugccuggucugggauggu

SEQ ID NO: 209826 - RNA, 19 nt, Artificial Sequence
  Description of Artificial Sequence: Synthetic oligonucleotide
cacugccgucacucaagcu

SEQ ID NO: 209827 - RNA, 19 nt, Artificial Sequence
  Description of Artificial Sequence: Synthetic oligonucleotide
gcugcugcugcugcugcua

SEQ ID NO: 209828 - RNA, 19 nt, Artificial Sequence
  Description of Artificial Sequence: Synthetic oligonucleotide
cuucgacuuccaccucuau

SEQ ID NO: 209829 - RNA, 19 nt, Artificial Sequence
  Description of Artificial Sequence: Synthetic oligonucleotide
ccugggcgcgguagcagca

SEQ ID NO: 209830 - RNA, 19 nt, Artificial Sequence
  Description of Artificial Sequence: Synthetic oligonucleotide
gggcgcgguagcagcagca

SEQ ID NO: 209831 - RNA, 19 nt, Artificial Sequence
  Description of Artificial Sequence: Synthetic oligonucleotide
gcuagccaggcuaacucuu

SEQ ID NO: 209832 - RNA, 19 nt, Artificial Sequence
  Description of Artificial Sequence: Synthetic oligonucleotide
ggacucgguugcucugagu

SEQ ID NO: 209833 - RNA, 19 nt, Artificial Sequence
  Description of Artificial Sequence: Synthetic oligonucleotide
gaacgcccucacugugguu

SEQ ID NO: 209834 - RNA, 19 nt, Artificial Sequence
  Description of Artificial Sequence: Synthetic oligonucleotide
ggccaucuuaggaacuauu

SEQ ID NO: 209835 - RNA, 19 nt, Artificial Sequence
  Description of Artificial Sequence: Synthetic oligonucleotide
cgggccgcgcacgaacacc

SEQ ID NO: 209836 - RNA, 19 nt, Artificial Sequence
  Description of Artificial Sequence: Synthetic oligonucleotide
ccgggccgcgcacgaacac

SEQ ID NO: 209837 - RNA, 19 nt, Artificial Sequence
  Description of Artificial Sequence: Synthetic oligonucleotide
cgacuuccaccucuauuua

SEQ ID NO: 209838 - RNA, 19 nt, Artificial Sequence
  Description of Artificial Sequence: Synthetic oligonucleotide
ggguccccuccugccuuca

SEQ ID NO: 209839 - RNA, 19 nt, Artificial Sequence
  Description of Artificial Sequence: Synthetic oligonucleotide
ccacgggaccaaguacuua

SEQ ID NO: 209840 - RNA, 19 nt, Artificial Sequence
  Description of Artificial Sequence: Synthetic oligonucleotide
guguugcgucugcguguuu

SEQ ID NO: 209841 - RNA, 19 nt, Artificial Sequence
  Description of Artificial Sequence: Synthetic oligonucleotide
aacaauaagguccccaggc

SEQ ID NO: 209842 - RNA, 19 nt, Artificial Sequence
  Description of Artificial Sequence: Synthetic oligonucleotide
aaaguguauauccaggauc

SEQ ID NO: 209843 - RNA, 19 nt, Artificial Sequence
  Description of Artificial Sequence: Synthetic oligonucleotide
auugaagaaagccacacgg

SEQ ID NO: 209844 - RNA, 19 nt, Artificial Sequence
  Description of Artificial Sequence: Synthetic oligonucleotide
uuacauaccagcuuucugg

SEQ ID NO: 209845 - RNA, 19 nt, Artificial Sequence
  Description of Artificial Sequence: Synthetic oligonucleotide
ugagauuccaagaugagug

SEQ ID NO: 209846 - RNA, 19 nt, Artificial Sequence
  Description of Artificial Sequence: Synthetic oligonucleotide
augagcauaauccaacgcc

SEQ ID NO: 209847 - RNA, 19 nt, Artificial Sequence
  Description of Artificial Sequence: Synthetic oligonucleotide
aauaacuggauguuugaag

SEQ ID NO: 209848 - RNA, 19 nt, Artificial Sequence
  Description of Artificial Sequence: Synthetic oligonucleotide
agaguaaccauuccaaugg

SEQ ID NO: 209849 - RNA, 19 nt, Artificial Sequence
  Description of Artificial Sequence: Synthetic oligonucleotide
aacacaugaugcuucagac

SEQ ID NO: 209850 - RNA, 19 nt, Artificial Sequence
  Description of Artificial Sequence: Synthetic oligonucleotide
guugauauuacauaccagc

SEQ ID NO: 209851 - RNA, 19 nt, Artificial Sequence
  Description of Artificial Sequence: Synthetic oligonucleotide
uguauauccaggaucacgc

SEQ ID NO: 209852 - RNA, 19 nt, Artificial Sequence
  Description of Artificial Sequence: Synthetic oligonucleotide
ucaaugaaccauauguuag

SEQ ID NO: 209853 - RNA, 19 nt, Artificial Sequence
  Description of Artificial Sequence: Synthetic oligonucleotide
aaauucauaauuggaguac

SEQ ID NO: 209854 - RNA, 19 nt, Artificial Sequence
  Description of Artificial Sequence: Synthetic oligonucleotide
aauccagacaaccauauaa

SEQ ID NO: 209855 - RNA, 19 nt, Artificial Sequence
  Description of Artificial Sequence: Synthetic oligonucleotide
uuuaguucgagguugguga

SEQ ID NO: 209856 - RNA, 19 nt, Artificial Sequence
  Description of Artificial Sequence: Synthetic oligonucleotide
uucauaagcaacccuacag

SEQ ID NO: 209857 - RNA, 19 nt, Artificial Sequence
  Description of Artificial Sequence: Synthetic oligonucleotide
aauuggaaacauuguacuc

SEQ ID NO: 209858 - RNA, 19 nt, Artificial Sequence
  Description of Artificial Sequence: Synthetic oligonucleotide
aucacuaauaaauucauaa

SEQ ID NO: 209859 - RNA, 19 nt, Artificial Sequence
  Description of Artificial Sequence: Synthetic oligonucleotide
ugcuagaauggucaggugg

SEQ ID NO: 209860 - RNA, 19 nt, Artificial Sequence
  Description of Artificial Sequence: Synthetic oligonucleotide
aacauugaguacuaaagaa

SEQ ID NO: 209861 - RNA, 19 nt, Artificial Sequence
  Description of Artificial Sequence: Synthetic oligonucleotide
aaauuagucucucugguau

SEQ ID NO: 209862 - RNA, 19 nt, Artificial Sequence
  Description of Artificial Sequence: Synthetic oligonucleotide
ucuaguuagccacacagga

SEQ ID NO: 209863 - RNA, 19 nt, Artificial Sequence
  Description of Artificial Sequence: Synthetic oligonucleotide
uguuauugcuugaaccucg

SEQ ID NO: 209864 - RNA, 19 nt, Artificial Sequence
  Description of Artificial Sequence: Synthetic oligonucleotide
uauuuuacugugcaugggc

SEQ ID NO: 209865 - RNA, 19 nt, Artificial Sequence
  Description of Artificial Sequence: Synthetic oligonucleotide
uauucggagagacucagcc

SEQ ID NO: 209866 - RNA, 19 nt, Artificial Sequence
  Description of Artificial Sequence: Synthetic oligonucleotide
uaauccaacgccaggaacc

SEQ ID NO: 209867 - RNA, 19 nt, Artificial Sequence
  Description of Artificial Sequence: Synthetic oligonucleotide
aauucugagauuccaagau

SEQ ID NO: 209868 - RNA, 19 nt, Artificial Sequence
  Description of Artificial Sequence: Synthetic oligonucleotide
aagaucuuccuggugauac

SEQ ID NO: 209869 - RNA, 19 nt, Artificial Sequence
  Description of Artificial Sequence: Synthetic oligonucleotide
aaugguuuccagccacacc

SEQ ID NO: 209870 - RNA, 19 nt, Artificial Sequence
  Description of Artificial Sequence: Synthetic oligonucleotide
agaauuggaaacauuguac

SEQ ID NO: 209871 - RNA, 19 nt, Artificial Sequence
  Description of Artificial Sequence: Synthetic oligonucleotide
uaaguaaggaggacgagga

SEQ ID NO: 209872 - RNA, 19 nt, Artificial Sequence
  Description of Artificial Sequence: Synthetic oligonucleotide
uuuguugauauuacauacc

SEQ ID NO: 209873 - RNA, 19 nt, Artificial Sequence
  Description of Artificial Sequence: Synthetic oligonucleotide
uccuaaauccaaaagaauu

SEQ ID NO: 209874 - RNA, 19 nt, Artificial Sequence
  Description of Artificial Sequence: Synthetic oligonucleotide
aguagcauagcgccaauuc

SEQ ID NO: 209875 - RNA, 19 nt, Artificial Sequence
  Description of Artificial Sequence: Synthetic oligonucleotide
uuugacugagguaguauag

SEQ ID NO: 209876 - RNA, 19 nt, Artificial Sequence
  Description of Artificial Sequence: Synthetic oligonucleotide
guucuaguuagccacacag

SEQ ID NO: 209877 - RNA, 19 nt, Artificial Sequence
  Description of Artificial Sequence: Synthetic oligonucleotide
ugauagaccuuucaugaug

SEQ ID NO: 209878 - RNA, 19 nt, Artificial Sequence
  Description of Artificial Sequence: Synthetic oligonucleotide
auaauuggaguacuuuguc

SEQ ID NO: 209879 - RNA, 19 nt, Artificial Sequence
  Description of Artificial Sequence: Synthetic oligonucleotide
aagauuucaugauccuuuc

SEQ ID NO: 209880 - RNA, 19 nt, Artificial Sequence
  Description of Artificial Sequence: Synthetic oligonucleotide
aaacaauaagguccccagg

SEQ ID NO: 209881 - RNA, 19 nt, Artificial Sequence
  Description of Artificial Sequence: Synthetic oligonucleotide
caaagaagggucaucagug

SEQ ID NO: 209882 - RNA, 19 nt, Artificial Sequence
  Description of Artificial Sequence: Synthetic oligonucleotide
ucuuguaauuuucaaucug

SEQ ID NO: 209883 - RNA, 19 nt, Artificial Sequence
  Description of Artificial Sequence: Synthetic oligonucleotide
aaucucuuacacuccaucu

SEQ ID NO: 209884 - RNA, 19 nt, Artificial Sequence
  Description of Artificial Sequence: Synthetic oligonucleotide
agagaaaguguauauccag

SEQ ID NO: 209885 - RNA, 19 nt, Artificial Sequence
  Description of Artificial Sequence: Synthetic oligonucleotide
aaaacacggacucuuccug

SEQ ID NO: 209886 - RNA, 19 nt, Artificial Sequence
  Description of Artificial Sequence: Synthetic oligonucleotide
uugauauuacauaccagcu

SEQ ID NO: 209887 - RNA, 19 nt, Artificial Sequence
  Description of Artificial Sequence: Synthetic oligonucleotide
ugggauacccaccacacug

SEQ ID NO: 209888 - RNA, 19 nt, Artificial Sequence
  Description of Artificial Sequence: Synthetic oligonucleotide
ucauaagcaacccuacaga

SEQ ID NO: 209889 - RNA, 19 nt, Artificial Sequence
  Description of Artificial Sequence: Synthetic oligonucleotide
uucucucggacuuuguagg

SEQ ID NO: 209890 - RNA, 19 nt, Artificial Sequence
  Description of Artificial Sequence: Synthetic oligonucleotide
agauauguuauucuccgcu

SEQ ID NO: 209891 - RNA, 19 nt, Artificial Sequence
  Description of Artificial Sequence: Synthetic oligonucleotide
auguccuaaauccaaaaga

SEQ ID NO: 209892 - RNA, 19 nt, Artificial Sequence
  Description of Artificial Sequence: Synthetic oligonucleotide
uagaguaaccauuccaaug

SEQ ID NO: 209893 - RNA, 19 nt, Artificial Sequence
  Description of Artificial Sequence: Synthetic oligonucleotide
ucugcguucgagaagcuga

SEQ ID NO: 209894 - RNA, 19 nt, Artificial Sequence
  Description of Artificial Sequence: Synthetic oligonucleotide
cuuacaggucuaaacacag

SEQ ID NO: 209895 - RNA, 19 nt, Artificial Sequence
  Description of Artificial Sequence: Synthetic oligonucleotide
auagaguuaucacuaauaa

SEQ ID NO: 209896 - RNA, 19 nt, Artificial Sequence
  Description of Artificial Sequence: Synthetic oligonucleotide
auauguuauucuccgcugg

SEQ ID NO: 209897 - RNA, 19 nt, Artificial Sequence
  Description of Artificial Sequence: Synthetic oligonucleotide
cacgguauugcagagauag

SEQ ID NO: 209898 - RNA, 19 nt, Artificial Sequence
  Description of Artificial Sequence: Synthetic oligonucleotide
uuaucucgaaccaaaugac

SEQ ID NO: 209899 - RNA, 19 nt, Artificial Sequence
  Description of Artificial Sequence: Synthetic oligonucleotide
auaauccaacgccaggaac

SEQ ID NO: 209900 - RNA, 19 nt, Artificial Sequence
  Description of Artificial Sequence: Synthetic oligonucleotide
uucuaguuagccacacagg

SEQ ID NO: 209901 - RNA, 19 nt, Artificial Sequence
  Description of Artificial Sequence: Synthetic oligonucleotide
uucgagaagcugaaaaugu

SEQ ID NO: 209902 - RNA, 19 nt, Artificial Sequence
  Description of Artificial Sequence: Synthetic oligonucleotide
cuuaggauguaagacauug

SEQ ID NO: 209903 - RNA, 19 nt, Artificial Sequence
  Description of Artificial Sequence: Synthetic oligonucleotide
uaccauguauuccucaaug

SEQ ID NO: 209904 - RNA, 19 nt, Artificial Sequence
  Description of Artificial Sequence: Synthetic oligonucleotide
aaguguauauccaggauca

SEQ ID NO: 209905 - RNA, 19 nt, Artificial Sequence
  Description of Artificial Sequence: Synthetic oligonucleotide
ugguauacugugaugacuc

SEQ ID NO: 209906 - RNA, 19 nt, Artificial Sequence
  Description of Artificial Sequence: Synthetic oligonucleotide
ucuucaacguguaccaugu

SEQ ID NO: 209907 - RNA, 19 nt, Artificial Sequence
  Description of Artificial Sequence: Synthetic oligonucleotide
ugaacugaugaaauuacuu

SEQ ID NO: 209908 - RNA, 19 nt, Artificial Sequence
  Description of Artificial Sequence: Synthetic oligonucleotide
uguugauauuacauaccag

SEQ ID NO: 209909 - RNA, 19 nt, Artificial Sequence
  Description of Artificial Sequence: Synthetic oligonucleotide
uguaggaaggguacaggcc

SEQ ID NO: 209910 - RNA, 19 nt, Artificial Sequence
  Description of Artificial Sequence: Synthetic oligonucleotide
agauagguguuauugcuug

SEQ ID NO: 209911 - RNA, 19 nt, Artificial Sequence
  Description of Artificial Sequence: Synthetic oligonucleotide
gauauguuauucuccgcug

SEQ ID NO: 209912 - RNA, 19 nt, Artificial Sequence
  Description of Artificial Sequence: Synthetic oligonucleotide
acaaagaagggucaucagu

SEQ ID NO: 209913 - RNA, 19 nt, Artificial Sequence
  Description of Artificial Sequence: Synthetic oligonucleotide
aucaauagggccuucuggu

SEQ ID NO: 209914 - RNA, 19 nt, Artificial Sequence
  Description of Artificial Sequence: Synthetic oligonucleotide
guaaguaaggaggacgagg

SEQ ID NO: 209915 - RNA, 19 nt, Artificial Sequence
  Description of Artificial Sequence: Synthetic oligonucleotide
aaauagaguuaucacuaau

SEQ ID NO: 209916 - RNA, 19 nt, Artificial Sequence
  Description of Artificial Sequence: Synthetic oligonucleotide
aauccauuuguauguuaug

SEQ ID NO: 209917 - RNA, 19 nt, Artificial Sequence
  Description of Artificial Sequence: Synthetic oligonucleotide
uccagacaaccauauaaag

SEQ ID NO: 209918 - RNA, 19 nt, Artificial Sequence
  Description of Artificial Sequence: Synthetic oligonucleotide
auuuguauguuauguguga

SEQ ID NO: 209919 - RNA, 19 nt, Artificial Sequence
  Description of Artificial Sequence: Synthetic oligonucleotide
uagcauagcgccaauucug

SEQ ID NO: 209920 - RNA, 19 nt, Artificial Sequence
  Description of Artificial Sequence: Synthetic oligonucleotide
accauguauuccucaaugg

SEQ ID NO: 209921 - RNA, 19 nt, Artificial Sequence
  Description of Artificial Sequence: Synthetic oligonucleotide
gaucaaguauuugacaaac

SEQ ID NO: 209922 - RNA, 19 nt, Artificial Sequence
  Description of Artificial Sequence: Synthetic oligonucleotide
aauagaguuaucacuaaua

SEQ ID NO: 209923 - RNA, 19 nt, Artificial Sequence
  Description of Artificial Sequence: Synthetic oligonucleotide
cucacuuacaggucuaaac

SEQ ID NO: 209924 - RNA, 19 nt, Artificial Sequence
  Description of Artificial Sequence: Synthetic oligonucleotide
accaaugauaucuccaggu

SEQ ID NO: 209925 - RNA, 19 nt, Artificial Sequence
  Description of Artificial Sequence: Synthetic oligonucleotide
cauaagcaacccuacagac

SEQ ID NO: 209926 - RNA, 19 nt, Artificial Sequence
  Description of Artificial Sequence: Synthetic oligonucleotide
uaaaacacggacucuuccu

SEQ ID NO: 209927 - RNA, 19 nt, Artificial Sequence
  Description of Artificial Sequence: Synthetic oligonucleotide
uguuaaucucuuacacucc

SEQ ID NO: 209928 - RNA, 19 nt, Artificial Sequence
  Description of Artificial Sequence: Synthetic oligonucleotide
ucugcuagaauggucaggu

SEQ ID NO: 209929 - RNA, 19 nt, Artificial Sequence
  Description of Artificial Sequence: Synthetic oligonucleotide
cauucugcguucgagaagc

SEQ ID NO: 209930 - RNA, 19 nt, Artificial Sequence
  Description of Artificial Sequence: Synthetic oligonucleotide
ugucaucuaaagaauggaa

SEQ ID NO: 209931 - RNA, 19 nt, Artificial Sequence
  Description of Artificial Sequence: Synthetic oligonucleotide
gaugcuucagacaaaauua

SEQ ID NO: 209932 - RNA, 19 nt, Artificial Sequence
  Description of Artificial Sequence: Synthetic oligonucleotide
auaagcaacccuacagacc

SEQ ID NO: 209933 - RNA, 19 nt, Artificial Sequence
  Description of Artificial Sequence: Synthetic oligonucleotide
uugcaugauuucauaagca

SEQ ID NO: 209934 - RNA, 19 nt, Artificial Sequence
  Description of Artificial Sequence: Synthetic oligonucleotide
cauuccaaugguuuccagc

SEQ ID NO: 209935 - RNA, 19 nt, Artificial Sequence
  Description of Artificial Sequence: Synthetic oligonucleotide
uguauguuaugugugagua

SEQ ID NO: 209936 - RNA, 19 nt, Artificial Sequence
  Description of Artificial Sequence: Synthetic oligonucleotide
aggauaaacugcaaucugg

SEQ ID NO: 209937 - RNA, 19 nt, Artificial Sequence
  Description of Artificial Sequence: Synthetic oligonucleotide
uuuguauguuaugugugag

SEQ ID NO: 209938 - RNA, 19 nt, Artificial Sequence
  Description of Artificial Sequence: Synthetic oligonucleotide
agcgccaauucugagauuc

SEQ ID NO: 209939 - RNA, 19 nt, Artificial Sequence
  Description of Artificial Sequence: Synthetic oligonucleotide
aaggguacaggccuguuuu

SEQ ID NO: 209940 - RNA, 19 nt, Artificial Sequence
  Description of Artificial Sequence: Synthetic oligonucleotide
acaauggggagcucgacca

SEQ ID NO: 209941 - RNA, 19 nt, Artificial Sequence
  Description of Artificial Sequence: Synthetic oligonucleotide
uucggagagacucagccau

SEQ ID NO: 209942 - RNA, 19 nt, Artificial Sequence
  Description of Artificial Sequence: Synthetic oligonucleotide
uacaauggggagcucgacc

SEQ ID NO: 209943 - RNA, 19 nt, Artificial Sequence
  Description of Artificial Sequence: Synthetic oligonucleotide
cuucucucggacuuuguag

SEQ ID NO: 209944 - RNA, 19 nt, Artificial Sequence
  Description of Artificial Sequence: Synthetic oligonucleotide
aacugggauacccaccaca

SEQ ID NO: 209945 - RNA, 19 nt, Artificial Sequence
  Description of Artificial Sequence: Synthetic oligonucleotide
auuacauaccagcuuucug

SEQ ID NO: 209946 - RNA, 19 nt, Artificial Sequence
  Description of Artificial Sequence: Synthetic oligonucleotide
gucagugcgucugacaugg

SEQ ID NO: 209947 - RNA, 19 nt, Artificial Sequence
  Description of Artificial Sequence: Synthetic oligonucleotide
uacauaauguggcaguguu

SEQ ID NO: 209948 - RNA, 19 nt, Artificial Sequence
  Description of Artificial Sequence: Synthetic oligonucleotide
cuaaaacacggacucuucc

SEQ ID NO: 209949 - RNA, 19 nt, Artificial Sequence
  Description of Artificial Sequence: Synthetic oligonucleotide
uauguuauucuccgcugga

SEQ ID NO: 209950 - RNA, 19 nt, Artificial Sequence
  Description of Artificial Sequence: Synthetic oligonucleotide
uaaucucuuacacuccauc

SEQ ID NO: 209951 - RNA, 19 nt, Artificial Sequence
  Description of Artificial Sequence: Synthetic oligonucleotide
uguugacaccuuuagagua

SEQ ID NO: 209952 - RNA, 19 nt, Artificial Sequence
  Description of Artificial Sequence: Synthetic oligonucleotide
ccuuaagauuucaugaucc

SEQ ID NO: 209953 - RNA, 19 nt, Artificial Sequence
  Description of Artificial Sequence: Synthetic oligonucleotide
uuacacuccaucucuauuu

SEQ ID NO: 209954 - RNA, 19 nt, Artificial Sequence
  Description of Artificial Sequence: Synthetic oligonucleotide
ucaacguguaccauguauu

SEQ ID NO: 209955 - RNA, 19 nt, Artificial Sequence
  Description of Artificial Sequence: Synthetic oligonucleotide
aguuucaacucccuucugu

SEQ ID NO: 209956 - RNA, 19 nt, Artificial Sequence
  Description of Artificial Sequence: Synthetic oligonucleotide
auagcgccaauucugagau

SEQ ID NO: 209957 - RNA, 19 nt, Artificial Sequence
  Description of Artificial Sequence: Synthetic oligonucleotide
uacauaccagcuuucuggc

SEQ ID NO: 209958 - RNA, 19 nt, Artificial Sequence
  Description of Artificial Sequence: Synthetic oligonucleotide
ugagguaguauagaucugu

SEQ ID NO: 209959 - RNA, 19 nt, Artificial Sequence
  Description of Artificial Sequence: Synthetic oligonucleotide
acguguaccauguauuccu

SEQ ID NO: 209960 - RNA, 19 nt, Artificial Sequence
  Description of Artificial Sequence: Synthetic oligonucleotide
uggucauuaucucgaacca

SEQ ID NO: 209961 - RNA, 19 nt, Artificial Sequence
  Description of Artificial Sequence: Synthetic oligonucleotide
auaagcaaucaugaagcag

SEQ ID NO: 209962 - RNA, 19 nt, Artificial Sequence
  Description of Artificial Sequence: Synthetic oligonucleotide
agauauaggcaccauguuu

SEQ ID NO: 209963 - RNA, 19 nt, Artificial Sequence
  Description of Artificial Sequence: Synthetic oligonucleotide
uuguggacggaucaaguau

SEQ ID NO: 209964 - RNA, 19 nt, Artificial Sequence
  Description of Artificial Sequence: Synthetic oligonucleotide
aaauaguagaugucaucua

SEQ ID NO: 209965 - RNA, 19 nt, Artificial Sequence
  Description of Artificial Sequence: Synthetic oligonucleotide
uuuacugugcaugggcuug

SEQ ID NO: 209966 - RNA, 19 nt, Artificial Sequence
  Description of Artificial Sequence: Synthetic oligonucleotide
agaggucucucagauauag

SEQ ID NO: 209967 - RNA, 19 nt, Artificial Sequence
  Description of Artificial Sequence: Synthetic oligonucleotide
cauuaucucgaaccaaaug

SEQ ID NO: 209968 - RNA, 19 nt, Artificial Sequence
  Description of Artificial Sequence: Synthetic oligonucleotide
uucaggauauguaggguau

SEQ ID NO: 209969 - RNA, 19 nt, Artificial Sequence
  Description of Artificial Sequence: Synthetic oligonucleotide
uccuaauggacagugaaua

SEQ ID NO: 209970 - RNA, 19 nt, Artificial Sequence
  Description of Artificial Sequence: Synthetic oligonucleotide
uucauucugcguucgagaa

SEQ ID NO: 209971 - RNA, 19 nt, Artificial Sequence
  Description of Artificial Sequence: Synthetic oligonucleotide
acacaaaacgucuguguca

SEQ ID NO: 209972 - RNA, 19 nt, Artificial Sequence
  Description of Artificial Sequence: Synthetic oligonucleotide
uguguaucgguuguguagu

SEQ ID NO: 209973 - RNA, 19 nt, Artificial Sequence
  Description of Artificial Sequence: Synthetic oligonucleotide
cacaaagaggcguuccacc

SEQ ID NO: 209974 - RNA, 19 nt, Artificial Sequence
  Description of Artificial Sequence: Synthetic oligonucleotide
ccuuuaacaaagaaggguc

SEQ ID NO: 209975 - RNA, 19 nt, Artificial Sequence
  Description of Artificial Sequence: Synthetic oligonucleotide
ucauucugcguucgagaag

SEQ ID NO: 209976 - RNA, 19 nt, Artificial Sequence
  Description of Artificial Sequence: Synthetic oligonucleotide
aaacacggacucuuccugu

SEQ ID NO: 209977 - RNA, 19 nt, Artificial Sequence
  Description of Artificial Sequence: Synthetic oligonucleotide
uuaguucgagguuggugag

SEQ ID NO: 209978 - RNA, 19 nt, Artificial Sequence
  Description of Artificial Sequence: Synthetic oligonucleotide
uuguauguuaugugugagu

SEQ ID NO: 209979 - RNA, 19 nt, Artificial Sequence
  Description of Artificial Sequence: Synthetic oligonucleotide
uucaacacaugaugcuuca

SEQ ID NO: 209980 - RNA, 19 nt, Artificial Sequence
  Description of Artificial Sequence: Synthetic oligonucleotide
gacuccaauaacuggaugu

SEQ ID NO: 209981 - RNA, 19 nt, Artificial Sequence
  Description of Artificial Sequence: Synthetic oligonucleotide
acugggauacccaccacac

SEQ ID NO: 209982 - RNA, 19 nt, Artificial Sequence
  Description of Artificial Sequence: Synthetic oligonucleotide
uaugugugaguacauuauu

SEQ ID NO: 209983 - RNA, 19 nt, Artificial Sequence
  Description of Artificial Sequence: Synthetic oligonucleotide
agaggcguuccaccagugc

SEQ ID NO: 209984 - RNA, 19 nt, Artificial Sequence
  Description of Artificial Sequence: Synthetic oligonucleotide
gauacaaggaggcagcuuu

SEQ ID NO: 209985 - RNA, 19 nt, Artificial Sequence
  Description of Artificial Sequence: Synthetic oligonucleotide
uauuacauaccagcuuucu

SEQ ID NO: 209986 - RNA, 19 nt, Artificial Sequence
  Description of Artificial Sequence: Synthetic oligonucleotide
ugacauggacuccaauaac

SEQ ID NO: 209987 - RNA, 19 nt, Artificial Sequence
  Description of Artificial Sequence: Synthetic oligonucleotide
uggaugaacugaacugaug

SEQ ID NO: 209988 - RNA, 19 nt, Artificial Sequence
  Description of Artificial Sequence: Synthetic oligonucleotide
aaacgucugugucacuuaa

SEQ ID NO: 209989 - RNA, 19 nt, Artificial Sequence
  Description of Artificial Sequence: Synthetic oligonucleotide
aaacugggauacccaccac

SEQ ID NO: 209990 - RNA, 19 nt, Artificial Sequence
  Description of Artificial Sequence: Synthetic oligonucleotide
guuauucuccgcuggacca

SEQ ID NO: 209991 - RNA, 19 nt, Artificial Sequence
  Description of Artificial Sequence: Synthetic oligonucleotide
guauuugacuguuucuauc

SEQ ID NO: 209992 - RNA, 19 nt, Artificial Sequence
  Description of Artificial Sequence: Synthetic oligonucleotide
gacggaucaaguauuugac

SEQ ID NO: 209993 - RNA, 19 nt, Artificial Sequence
  Description of Artificial Sequence: Synthetic oligonucleotide
ugauguccuaaauccaaaa

SEQ ID NO: 209994 - RNA, 19 nt, Artificial Sequence
  Description of Artificial Sequence: Synthetic oligonucleotide
uauugguauauuccuucau

SEQ ID NO: 209995 - RNA, 19 nt, Artificial Sequence
  Description of Artificial Sequence: Synthetic oligonucleotide
gucuucucggagcucaaag

SEQ ID NO: 209996 - RNA, 19 nt, Artificial Sequence
  Description of Artificial Sequence: Synthetic oligonucleotide
cucuuuaguucgagguugg

SEQ ID NO: 209997 - RNA, 19 nt, Artificial Sequence
  Description of Artificial Sequence: Synthetic oligonucleotide
aucucgaaccaaaugacca

SEQ ID NO: 209998 - RNA, 19 nt, Artificial Sequence
  Description of Artificial Sequence: Synthetic oligonucleotide
cacaaaacgucugugucac

SEQ ID NO: 209999 - RNA, 19 nt, Artificial Sequence
  Description of Artificial Sequence: Synthetic oligonucleotide
uguggacggaucaaguauu

SEQ ID NO: 210000 - RNA, 19 nt, Artificial Sequence
  Description of Artificial Sequence: Synthetic oligonucleotide
uuucaauccuccuccuuaa

SEQ ID NO: 210001 - RNA, 19 nt, Artificial Sequence
  Description of Artificial Sequence: Synthetic oligonucleotide
ugucugucaaugaaccaua

SEQ ID NO: 210002 - RNA, 19 nt, Artificial Sequence
  Description of Artificial Sequence: Synthetic oligonucleotide
cucagauauaggcaccaug

SEQ ID NO: 210003 - RNA, 19 nt, Artificial Sequence
  Description of Artificial Sequence: Synthetic oligonucleotide
aggucuaaacacagucucc

SEQ ID NO: 210004 - RNA, 19 nt, Artificial Sequence
  Description of Artificial Sequence: Synthetic oligonucleotide
uagguguuauugcuugaac

SEQ ID NO: 210005 - RNA, 19 nt, Artificial Sequence
  Description of Artificial Sequence: Synthetic oligonucleotide
uuaacaaagaagggucauc

SEQ ID NO: 210006 - RNA, 19 nt, Artificial Sequence
  Description of Artificial Sequence: Synthetic oligonucleotide
uguccaguggagaggccag

SEQ ID NO: 210007 - RNA, 19 nt, Artificial Sequence
  Description of Artificial Sequence: Synthetic oligonucleotide
acgucugugucacuuaaau

SEQ ID NO: 210008 - RNA, 19 nt, Artificial Sequence
  Description of Artificial Sequence: Synthetic oligonucleotide
acauugaguacuaaagaau

SEQ ID NO: 210009 - RNA, 19 nt, Artificial Sequence
  Description of Artificial Sequence: Synthetic oligonucleotide
ccauguauuccucaauggg

SEQ ID NO: 210010 - RNA, 19 nt, Artificial Sequence
  Description of Artificial Sequence: Synthetic oligonucleotide
accauguuugaagucucac

SEQ ID NO: 210011 - RNA, 19 nt, Artificial Sequence
  Description of Artificial Sequence: Synthetic oligonucleotide
ugaguguucgcugggugcc

SEQ ID NO: 210012 - RNA, 19 nt, Artificial Sequence
  Description of Artificial Sequence: Synthetic oligonucleotide
aauccaacgccaggaacca

SEQ ID NO: 210013 - RNA, 19 nt, Artificial Sequence
  Description of Artificial Sequence: Synthetic oligonucleotide
ugaggguucccacuugcuc

SEQ ID NO: 210014 - RNA, 19 nt, Artificial Sequence
  Description of Artificial Sequence: Synthetic oligonucleotide
guaucgguuguguagucca

SEQ ID NO: 210015 - RNA, 19 nt, Artificial Sequence
  Description of Artificial Sequence: Synthetic oligonucleotide
uacagaccugggaugaaaa

SEQ ID NO: 210016 - RNA, 19 nt, Artificial Sequence
  Description of Artificial Sequence: Synthetic oligonucleotide
auguuauucuccgcuggac

SEQ ID NO: 210017 - RNA, 19 nt, Artificial Sequence
  Description of Artificial Sequence: Synthetic oligonucleotide
uuccuaauggacagugaau

SEQ ID NO: 210018 - RNA, 19 nt, Artificial Sequence
  Description of Artificial Sequence: Synthetic oligonucleotide
aauagggccuucugguauu

SEQ ID NO: 210019 - RNA, 19 nt, Artificial Sequence
  Description of Artificial Sequence: Synthetic oligonucleotide
uguaucgguuguguagucc

SEQ ID NO: 210020 - RNA, 19 nt, Artificial Sequence
  Description of Artificial Sequence: Synthetic oligonucleotide
uucaauccuccuccuuaag

SEQ ID NO: 210021 - RNA, 19 nt, Artificial Sequence
  Description of Artificial Sequence: Synthetic oligonucleotide
ucgaaccaaaugaccaccu

SEQ ID NO: 210022 - RNA, 19 nt, Artificial Sequence
  Description of Artificial Sequence: Synthetic oligonucleotide
agccacacgguauugcaga

SEQ ID NO: 210023 - RNA, 19 nt, Artificial Sequence
  Description of Artificial Sequence: Synthetic oligonucleotide
aauaagguccccaggcaaa

SEQ ID NO: 210024 - RNA, 19 nt, Artificial Sequence
  Description of Artificial Sequence: Synthetic oligonucleotide
caugauguccuaaauccaa

SEQ ID NO: 210025 - RNA, 19 nt, Artificial Sequence
  Description of Artificial Sequence: Synthetic oligonucleotide
caacguguaccauguauuc

SEQ ID NO: 210026 - RNA, 19 nt, Artificial Sequence
  Description of Artificial Sequence: Synthetic oligonucleotide
uucagaguuucaacucccu

SEQ ID NO: 210027 - RNA, 19 nt, Artificial Sequence
  Description of Artificial Sequence: Synthetic oligonucleotide
aguucguuuccuucuaauu

SEQ ID NO: 210028 - RNA, 19 nt, Artificial Sequence
  Description of Artificial Sequence: Synthetic oligonucleotide
uaucgguuguguaguccag

SEQ ID NO: 210029 - RNA, 19 nt, Artificial Sequence
  Description of Artificial Sequence: Synthetic oligonucleotide
cugaacuaaauucuguugu

SEQ ID NO: 210030 - RNA, 19 nt, Artificial Sequence
  Description of Artificial Sequence: Synthetic oligonucleotide
accaaaugaccaccuauau

SEQ ID NO: 210031 - RNA, 19 nt, Artificial Sequence
  Description of Artificial Sequence: Synthetic oligonucleotide
aucgguuguguaguccagc

SEQ ID NO: 210032 - RNA, 19 nt, Artificial Sequence
  Description of Artificial Sequence: Synthetic oligonucleotide
ugguauucggagagacuca

SEQ ID NO: 210033 - RNA, 19 nt, Artificial Sequence
  Description of Artificial Sequence: Synthetic oligonucleotide
gagagaaaguguauaucca

SEQ ID NO: 210034 - RNA, 19 nt, Artificial Sequence
  Description of Artificial Sequence: Synthetic oligonucleotide
cucggacuuuguaggaagg

SEQ ID NO: 210035 - RNA, 19 nt, Artificial Sequence
  Description of Artificial Sequence: Synthetic oligonucleotide
ucauuccuagcuuguuucu

SEQ ID NO: 210036 - RNA, 19 nt, Artificial Sequence
  Description of Artificial Sequence: Synthetic oligonucleotide
aggaucacgccccgaagug

SEQ ID NO: 210037 - RNA, 19 nt, Artificial Sequence
  Description of Artificial Sequence: Synthetic oligonucleotide
uacugugaugacucuuaca

SEQ ID NO: 210038 - RNA, 19 nt, Artificial Sequence
  Description of Artificial Sequence: Synthetic oligonucleotide
cuuccuaauggacagugaa

SEQ ID NO: 210039 - RNA, 19 nt, Artificial Sequence
  Description of Artificial Sequence: Synthetic oligonucleotide
agcaacccuacagaccugg

SEQ ID NO: 210040 - RNA, 19 nt, Artificial Sequence
  Description of Artificial Sequence: Synthetic oligonucleotide
ucauggggacagaauauuu

SEQ ID NO: 210041 - RNA, 19 nt, Artificial Sequence
  Description of Artificial Sequence: Synthetic oligonucleotide
cauauguuagucugggucu

SEQ ID NO: 210042 - RNA, 19 nt, Artificial Sequence
  Description of Artificial Sequence: Synthetic oligonucleotide
aucacagaggucucucaga

SEQ ID NO: 210043 - RNA, 19 nt, Artificial Sequence
  Description of Artificial Sequence: Synthetic oligonucleotide
guauguuaugugugaguac

SEQ ID NO: 210044 - RNA, 19 nt, Artificial Sequence
  Description of Artificial Sequence: Synthetic oligonucleotide
guauugcagagauaggugu

SEQ ID NO: 210045 - RNA, 19 nt, Artificial Sequence
  Description of Artificial Sequence: Synthetic oligonucleotide
guauauccaggaucacgcc

SEQ ID NO: 210046 - RNA, 19 nt, Artificial Sequence
  Description of Artificial Sequence: Synthetic oligonucleotide
ucuuacacuccaucucuau

SEQ ID NO: 210047 - RNA, 19 nt, Artificial Sequence
  Description of Artificial Sequence: Synthetic oligonucleotide
caccaaugauaucuccagg

SEQ ID NO: 210048 - RNA, 19 nt, Artificial Sequence
  Description of Artificial Sequence: Synthetic oligonucleotide
uuuuacugugcaugggcuu

SEQ ID NO: 210049 - RNA, 19 nt, Artificial Sequence
  Description of Artificial Sequence: Synthetic oligonucleotide
uuauucuccgcuggaccag

SEQ ID NO: 210050 - RNA, 19 nt, Artificial Sequence
  Description of Artificial Sequence: Synthetic oligonucleotide
ucucugcuagaauggucag

SEQ ID NO: 210051 - RNA, 19 nt, Artificial Sequence
  Description of Artificial Sequence: Synthetic oligonucleotide
ggucuaaacacagucuccc

SEQ ID NO: 210052 - RNA, 19 nt, Artificial Sequence
  Description of Artificial Sequence: Synthetic oligonucleotide
cacuuaaauuacauaaugu

SEQ ID NO: 210053 - RNA, 19 nt, Artificial Sequence
  Description of Artificial Sequence: Synthetic oligonucleotide
guaggaaggguacaggccu

SEQ ID NO: 210054 - RNA, 19 nt, Artificial Sequence
  Description of Artificial Sequence: Synthetic oligonucleotide
aaauccagacaaccauaua

SEQ ID NO: 210055 - RNA, 19 nt, Artificial Sequence
  Description of Artificial Sequence: Synthetic oligonucleotide
gcuucagacaaaauuaguc

SEQ ID NO: 210056 - RNA, 19 nt, Artificial Sequence
  Description of Artificial Sequence: Synthetic oligonucleotide
ggacggaucaaguauuuga

SEQ ID NO: 210057 - RNA, 19 nt, Artificial Sequence
  Description of Artificial Sequence: Synthetic oligonucleotide
gguaguauagaucugucau

SEQ ID NO: 210058 - RNA, 19 nt, Artificial Sequence
  Description of Artificial Sequence: Synthetic oligonucleotide
aguucgagguuggugagga

SEQ ID NO: 210059 - RNA, 19 nt, Artificial Sequence
  Description of Artificial Sequence: Synthetic oligonucleotide
guuugacugagguaguaua

SEQ ID NO: 210060 - RNA, 19 nt, Artificial Sequence
  Description of Artificial Sequence: Synthetic oligonucleotide
cauugaguacuaaagaauu

SEQ ID NO: 210061 - RNA, 19 nt, Artificial Sequence
  Description of Artificial Sequence: Synthetic oligonucleotide
gagcauaauccaacgccag

SEQ ID NO: 210062 - RNA, 19 nt, Artificial Sequence
  Description of Artificial Sequence: Synthetic oligonucleotide
agugcgucugacauggacu

SEQ ID NO: 210063 - RNA, 19 nt, Artificial Sequence
  Description of Artificial Sequence: Synthetic oligonucleotide
gauagaccuuucaugaugu

SEQ ID NO: 210064 - RNA, 19 nt, Artificial Sequence
  Description of Artificial Sequence: Synthetic oligonucleotide
uuggccuuaacaagcuguu

SEQ ID NO: 210065 - RNA, 19 nt, Artificial Sequence
  Description of Artificial Sequence: Synthetic oligonucleotide
caaugggauggaaggcugc

SEQ ID NO: 210066 - RNA, 19 nt, Artificial Sequence
  Description of Artificial Sequence: Synthetic oligonucleotide
gucauuaucucgaaccaaa

SEQ ID NO: 210067 - RNA, 19 nt, Artificial Sequence
  Description of Artificial Sequence: Synthetic oligonucleotide
gauagguguuauugcuuga

SEQ ID NO: 210068 - RNA, 19 nt, Artificial Sequence
  Description of Artificial Sequence: Synthetic oligonucleotide
cuuaacaagcuguucuucu

SEQ ID NO: 210069 - RNA, 19 nt, Artificial Sequence
  Description of Artificial Sequence: Synthetic oligonucleotide
ucucucggacuuuguagga

SEQ ID NO: 210070 - RNA, 19 nt, Artificial Sequence
  Description of Artificial Sequence: Synthetic oligonucleotide
uucgagguuggugaggaua

SEQ ID NO: 210071 - RNA, 19 nt, Artificial Sequence
  Description of Artificial Sequence: Synthetic oligonucleotide
gagcaugucugucaaugaa

SEQ ID NO: 210072 - RNA, 19 nt, Artificial Sequence
  Description of Artificial Sequence: Synthetic oligonucleotide
agccacacaggaaaauaag

SEQ ID NO: 210073 - RNA, 19 nt, Artificial Sequence
  Description of Artificial Sequence: Synthetic oligonucleotide
ugucagugcgucugacaug

SEQ ID NO: 210074 - RNA, 19 nt, Artificial Sequence
  Description of Artificial Sequence: Synthetic oligonucleotide
caugucucacuuacagguc

SEQ ID NO: 210075 - RNA, 19 nt, Artificial Sequence
  Description of Artificial Sequence: Synthetic oligonucleotide
ucacuucaccugaccagug

SEQ ID NO: 210076 - RNA, 19 nt, Artificial Sequence
  Description of Artificial Sequence: Synthetic oligonucleotide
uguaggguauuugacuguu

SEQ ID NO: 210077 - RNA, 19 nt, Artificial Sequence
  Description of Artificial Sequence: Synthetic oligonucleotide
ucuguguaucgguugugua

SEQ ID NO: 210078 - RNA, 19 nt, Artificial Sequence
  Description of Artificial Sequence: Synthetic oligonucleotide
uguuaugugugaguacauu

SEQ ID NO: 210079 - RNA, 19 nt, Artificial Sequence
  Description of Artificial Sequence: Synthetic oligonucleotide
cuugagggcacagcagccc

SEQ ID NO: 210080 - RNA, 19 nt, Artificial Sequence
  Description of Artificial Sequence: Synthetic oligonucleotide
caagguuguggacggauca

SEQ ID NO: 210081 - RNA, 19 nt, Artificial Sequence
  Description of Artificial Sequence: Synthetic oligonucleotide
gccuccuuuaacaaagaag

SEQ ID NO: 210082 - RNA, 19 nt, Artificial Sequence
  Description of Artificial Sequence: Synthetic oligonucleotide
gaaaguguauauccaggau

SEQ ID NO: 210083 - RNA, 19 nt, Artificial Sequence
  Description of Artificial Sequence: Synthetic oligonucleotide
cacggacucuuccuguagc

SEQ ID NO: 210084 - RNA, 19 nt, Artificial Sequence
  Description of Artificial Sequence: Synthetic oligonucleotide
auagguguuauugcuugaa

SEQ ID NO: 210085 - RNA, 19 nt, Artificial Sequence
  Description of Artificial Sequence: Synthetic oligonucleotide
gaggucucucagauauagg

SEQ ID NO: 210086 - RNA, 19 nt, Artificial Sequence
  Description of Artificial Sequence: Synthetic oligonucleotide
auaguagaugucaucuaaa

SEQ ID NO: 210087 - RNA, 19 nt, Artificial Sequence
  Description of Artificial Sequence: Synthetic oligonucleotide
ucaacucccuucugucuuc

SEQ ID NO: 210088 - RNA, 19 nt, Artificial Sequence
  Description of Artificial Sequence: Synthetic oligonucleotide
cuucucaguaaaucacaga

SEQ ID NO: 210089 - RNA, 19 nt, Artificial Sequence
  Description of Artificial Sequence: Synthetic oligonucleotide
aagcaguaaaccacaugau

SEQ ID NO: 210090 - RNA, 19 nt, Artificial Sequence
  Description of Artificial Sequence: Synthetic oligonucleotide
uugacaccuuuagaguaac

SEQ ID NO: 210091 - RNA, 19 nt, Artificial Sequence
  Description of Artificial Sequence: Synthetic oligonucleotide
cucggagcucaaagaauug

SEQ ID NO: 210092 - RNA, 19 nt, Artificial Sequence
  Description of Artificial Sequence: Synthetic oligonucleotide
gugcgucugacauggacuc

SEQ ID NO: 210093 - RNA, 19 nt, Artificial Sequence
  Description of Artificial Sequence: Synthetic oligonucleotide
acccuacagaccugggaug

SEQ ID NO: 210094 - RNA, 19 nt, Artificial Sequence
  Description of Artificial Sequence: Synthetic oligonucleotide
cuaguuagccacacaggaa

SEQ ID NO: 210095 - RNA, 19 nt, Artificial Sequence
  Description of Artificial Sequence: Synthetic oligonucleotide
aggcaccauguuugaaguc

SEQ ID NO: 210096 - RNA, 19 nt, Artificial Sequence
  Description of Artificial Sequence: Synthetic oligonucleotide
augugugaguacauuauuu

SEQ ID NO: 210097 - RNA, 19 nt, Artificial Sequence
  Description of Artificial Sequence: Synthetic oligonucleotide
cauggggacagaauauuua

SEQ ID NO: 210098 - RNA, 19 nt, Artificial Sequence
  Description of Artificial Sequence: Synthetic oligonucleotide
cucugcuagaauggucagg

SEQ ID NO: 210099 - RNA, 19 nt, Artificial Sequence
  Description of Artificial Sequence: Synthetic oligonucleotide
guuguggacggaucaagua

SEQ ID NO: 210100 - RNA, 19 nt, Artificial Sequence
  Description of Artificial Sequence: Synthetic oligonucleotide
uuguguaguccagcugacc

SEQ ID NO: 210101 - RNA, 19 nt, Artificial Sequence
  Description of Artificial Sequence: Synthetic oligonucleotide
uggaguucguuuccuucua

SEQ ID NO: 210102 - RNA, 19 nt, Artificial Sequence
  Description of Artificial Sequence: Synthetic oligonucleotide
gacucucaggagucgaucu

SEQ ID NO: 210103 - RNA, 19 nt, Artificial Sequence
  Description of Artificial Sequence: Synthetic oligonucleotide
gagauuccaagaugagugu

SEQ ID NO: 210104 - RNA, 19 nt, Artificial Sequence
  Description of Artificial Sequence: Synthetic oligonucleotide
cugagguaguauagaucug

SEQ ID NO: 210105 - RNA, 19 nt, Artificial Sequence
  Description of Artificial Sequence: Synthetic oligonucleotide
gagguaguauagaucuguc

SEQ ID NO: 210106 - RNA, 19 nt, Artificial Sequence
  Description of Artificial Sequence: Synthetic oligonucleotide
aaccaguccaugcccgcua

SEQ ID NO: 210107 - RNA, 19 nt, Artificial Sequence
  Description of Artificial Sequence: Synthetic oligonucleotide
agcauagcgccaauucuga

SEQ ID NO: 210108 - RNA, 19 nt, Artificial Sequence
  Description of Artificial Sequence: Synthetic oligonucleotide
guaaccauuccaaugguuu

SEQ ID NO: 210109 - RNA, 19 nt, Artificial Sequence
  Description of Artificial Sequence: Synthetic oligonucleotide
agguuccauggggauuucc

SEQ ID NO: 210110 - RNA, 19 nt, Artificial Sequence
  Description of Artificial Sequence: Synthetic oligonucleotide
uguucgcugggugccauaa

SEQ ID NO: 210111 - RNA, 19 nt, Artificial Sequence
  Description of Artificial Sequence: Synthetic oligonucleotide
caauccuccuccuuaagau

SEQ ID NO: 210112 - RNA, 19 nt, Artificial Sequence
  Description of Artificial Sequence: Synthetic oligonucleotide
ugguacagccaaggguaag

SEQ ID NO: 210113 - RNA, 19 nt, Artificial Sequence
  Description of Artificial Sequence: Synthetic oligonucleotide
ccaccuauauaaaacaaua

SEQ ID NO: 210114 - RNA, 19 nt, Artificial Sequence
  Description of Artificial Sequence: Synthetic oligonucleotide
gucucacacaaaacgucug

SEQ ID NO: 210115 - RNA, 19 nt, Artificial Sequence
  Description of Artificial Sequence: Synthetic oligonucleotide
ugguucuaguuagccacac

SEQ ID NO: 210116 - RNA, 19 nt, Artificial Sequence
  Description of Artificial Sequence: Synthetic oligonucleotide
ucgaccacuugaacauuuu

SEQ ID NO: 210117 - RNA, 19 nt, Artificial Sequence
  Description of Artificial Sequence: Synthetic oligonucleotide
ucucacuuacaggucuaaa

SEQ ID NO: 210118 - RNA, 19 nt, Artificial Sequence
  Description of Artificial Sequence: Synthetic oligonucleotide
ccucuuuaguucgagguug

SEQ ID NO: 210119 - RNA, 19 nt, Artificial Sequence
  Description of Artificial Sequence: Synthetic oligonucleotide
gauaaacugcaaucugguu

SEQ ID NO: 210120 - RNA, 19 nt, Artificial Sequence
  Description of Artificial Sequence: Synthetic oligonucleotide
uuacugugcaugggcuuga

SEQ ID NO: 210121 - RNA, 19 nt, Artificial Sequence
  Description of Artificial Sequence: Synthetic oligonucleotide
gcucaaagaauuggaaaca

SEQ ID NO: 210122 - RNA, 19 nt, Artificial Sequence
  Description of Artificial Sequence: Synthetic oligonucleotide
ucuuuaguucgagguuggu

SEQ ID NO: 210123 - RNA, 19 nt, Artificial Sequence
  Description of Artificial Sequence: Synthetic oligonucleotide
gaucacgccccgaagugaa

SEQ ID NO: 210124 - RNA, 19 nt, Artificial Sequence
  Description of Artificial Sequence: Synthetic oligonucleotide
aguaaccauuccaaugguu

SEQ ID NO: 210125 - RNA, 19 nt, Artificial Sequence
  Description of Artificial Sequence: Synthetic oligonucleotide
ugcagagauagguguuauu

SEQ ID NO: 210126 - RNA, 19 nt, Artificial Sequence
  Description of Artificial Sequence: Synthetic oligonucleotide
agacaaccauauaaaggaa

SEQ ID NO: 210127 - RNA, 19 nt, Artificial Sequence
  Description of Artificial Sequence: Synthetic oligonucleotide
ugauacaaggaggcagcuu

SEQ ID NO: 210128 - RNA, 19 nt, Artificial Sequence
  Description of Artificial Sequence: Synthetic oligonucleotide
cugucaugauagaccuuuc

SEQ ID NO: 210129 - RNA, 19 nt, Artificial Sequence
  Description of Artificial Sequence: Synthetic oligonucleotide
acgguauugcagagauagg

SEQ ID NO: 210130 - RNA, 19 nt, Artificial Sequence
  Description of Artificial Sequence: Synthetic oligonucleotide
aguccaugcccgcuauuuu

SEQ ID NO: 210131 - RNA, 19 nt, Artificial Sequence
  Description of Artificial Sequence: Synthetic oligonucleotide
caacccuacagaccuggga

SEQ ID NO: 210132 - RNA, 19 nt, Artificial Sequence
  Description of Artificial Sequence: Synthetic oligonucleotide
aagaggcguuccaccagug

SEQ ID NO: 210133 - RNA, 19 nt, Artificial Sequence
  Description of Artificial Sequence: Synthetic oligonucleotide
gaguaaccauuccaauggu

SEQ ID NO: 210134 - RNA, 19 nt, Artificial Sequence
  Description of Artificial Sequence: Synthetic oligonucleotide
cuagaauggucaggugguc

SEQ ID NO: 210135 - RNA, 19 nt, Artificial Sequence
  Description of Artificial Sequence: Synthetic oligonucleotide
cucucagauauaggcacca

SEQ ID NO: 210136 - RNA, 19 nt, Artificial Sequence
  Description of Artificial Sequence: Synthetic oligonucleotide
caacgccaggaaccagucc

SEQ ID NO: 210137 - RNA, 19 nt, Artificial Sequence
  Description of Artificial Sequence: Synthetic oligonucleotide
ggcugucuacaauggggag

SEQ ID NO: 210138 - RNA, 19 nt, Artificial Sequence
  Description of Artificial Sequence: Synthetic oligonucleotide
guauucggagagacucagc

SEQ ID NO: 210139 - RNA, 19 nt, Artificial Sequence
  Description of Artificial Sequence: Synthetic oligonucleotide
guccccugaucaauagggc

SEQ ID NO: 210140 - RNA, 19 nt, Artificial Sequence
  Description of Artificial Sequence: Synthetic oligonucleotide
ggagcaugucugucaauga

SEQ ID NO: 210141 - RNA, 19 nt, Artificial Sequence
  Description of Artificial Sequence: Synthetic oligonucleotide
guucgcugggugccauaag

SEQ ID NO: 210142 - RNA, 19 nt, Artificial Sequence
  Description of Artificial Sequence: Synthetic oligonucleotide
cugguucuaguuagccaca

SEQ ID NO: 210143 - RNA, 19 nt, Artificial Sequence
  Description of Artificial Sequence: Synthetic oligonucleotide
gaguucguuuccuucuaau

SEQ ID NO: 210144 - RNA, 19 nt, Artificial Sequence
  Description of Artificial Sequence: Synthetic oligonucleotide
cugcuagaauggucaggug

SEQ ID NO: 210145 - RNA, 19 nt, Artificial Sequence
  Description of Artificial Sequence: Synthetic oligonucleotide
ccauguuugaagucucaca

SEQ ID NO: 210146 - RNA, 19 nt, Artificial Sequence
  Description of Artificial Sequence: Synthetic oligonucleotide
gagaauguccagaaacauu

SEQ ID NO: 210147 - RNA, 19 nt, Artificial Sequence
  Description of Artificial Sequence: Synthetic oligonucleotide
acuuccuaauggacaguga

SEQ ID NO: 210148 - RNA, 19 nt, Artificial Sequence
  Description of Artificial Sequence: Synthetic oligonucleotide
ggcugagauggucugaacu

SEQ ID NO: 210149 - RNA, 19 nt, Artificial Sequence
  Description of Artificial Sequence: Synthetic oligonucleotide
acaaaacgucugugucacu

SEQ ID NO: 210150 - RNA, 19 nt, Artificial Sequence
  Description of Artificial Sequence: Synthetic oligonucleotide
ggauaaacugcaaucuggu

SEQ ID NO: 210151 - RNA, 19 nt, Artificial Sequence
  Description of Artificial Sequence: Synthetic oligonucleotide
ucucagauauaggcaccau

SEQ ID NO: 210152 - RNA, 19 nt, Artificial Sequence
  Description of Artificial Sequence: Synthetic oligonucleotide
gguauuugacuguuucuau

SEQ ID NO: 210153 - RNA, 19 nt, Artificial Sequence
  Description of Artificial Sequence: Synthetic oligonucleotide
ucacgccccgaagugaauu

SEQ ID NO: 210154 - RNA, 19 nt, Artificial Sequence
  Description of Artificial Sequence: Synthetic oligonucleotide
cugagauuccaagaugagu

SEQ ID NO: 210155 - RNA, 19 nt, Artificial Sequence
  Description of Artificial Sequence: Synthetic oligonucleotide
ugcccgcuauuuucagagu

SEQ ID NO: 210156 - RNA, 19 nt, Artificial Sequence
  Description of Artificial Sequence: Synthetic oligonucleotide
acauaauguggcaguguuu

SEQ ID NO: 210157 - RNA, 19 nt, Artificial Sequence
  Description of Artificial Sequence: Synthetic oligonucleotide
ccuagcuuguuucuuguaa

SEQ ID NO: 210158 - RNA, 19 nt, Artificial Sequence
  Description of Artificial Sequence: Synthetic oligonucleotide
uggccuuaacaagcuguuc

SEQ ID NO: 210159 - RNA, 19 nt, Artificial Sequence
  Description of Artificial Sequence: Synthetic oligonucleotide
gaaggguacaggccuguuu

SEQ ID NO: 210160 - RNA, 19 nt, Artificial Sequence
  Description of Artificial Sequence: Synthetic oligonucleotide
caauagggccuucugguau

SEQ ID NO: 210161 - RNA, 19 nt, Artificial Sequence
  Description of Artificial Sequence: Synthetic oligonucleotide
cauccuccaguagcauagc

SEQ ID NO: 210162 - RNA, 19 nt, Artificial Sequence
  Description of Artificial Sequence: Synthetic oligonucleotide
guguaucgguuguguaguc

SEQ ID NO: 210163 - RNA, 19 nt, Artificial Sequence
  Description of Artificial Sequence: Synthetic oligonucleotide
ggagcucgaccacuugaac

SEQ ID NO: 210164 - RNA, 19 nt, Artificial Sequence
  Description of Artificial Sequence: Synthetic oligonucleotide
ggacuuuguaggaagggua

SEQ ID NO: 210165 - RNA, 19 nt, Artificial Sequence
  Description of Artificial Sequence: Synthetic oligonucleotide
caccauguuugaagucuca

SEQ ID NO: 210166 - RNA, 19 nt, Artificial Sequence
  Description of Artificial Sequence: Synthetic oligonucleotide
aggagucgaucugcaaggu

SEQ ID NO: 210167 - RNA, 19 nt, Artificial Sequence
  Description of Artificial Sequence: Synthetic oligonucleotide
ucuuggugcggagcauguc

SEQ ID NO: 210168 - RNA, 19 nt, Artificial Sequence
  Description of Artificial Sequence: Synthetic oligonucleotide
cccgaagugaauuuucugu

SEQ ID NO: 210169 - RNA, 19 nt, Artificial Sequence
  Description of Artificial Sequence: Synthetic oligonucleotide
cccgccacucaccugcucc

SEQ ID NO: 210170 - RNA, 19 nt, Artificial Sequence
  Description of Artificial Sequence: Synthetic oligonucleotide
gguucuaguuagccacaca

SEQ ID NO: 210171 - RNA, 19 nt, Artificial Sequence
  Description of Artificial Sequence: Synthetic oligonucleotide
gcuagaauggucagguggu

SEQ ID NO: 210172 - RNA, 19 nt, Artificial Sequence
  Description of Artificial Sequence: Synthetic oligonucleotide
ggggagcucgaccacuuga

SEQ ID NO: 210173 - RNA, 19 nt, Artificial Sequence
  Description of Artificial Sequence: Synthetic oligonucleotide
cugguauacugugaugacu

SEQ ID NO: 210174 - RNA, 19 nt, Artificial Sequence
  Description of Artificial Sequence: Synthetic oligonucleotide
aagcaacccuacagaccug

SEQ ID NO: 210175 - RNA, 19 nt, Artificial Sequence
  Description of Artificial Sequence: Synthetic oligonucleotide
cuacagaccugggaugaaa

SEQ ID NO: 210176 - RNA, 19 nt, Artificial Sequence
  Description of Artificial Sequence: Synthetic oligonucleotide
cuuacacuccaucucuauu

SEQ ID NO: 210177 - RNA, 19 nt, Artificial Sequence
  Description of Artificial Sequence: Synthetic oligonucleotide
ucagugcgucugacaugga

SEQ ID NO: 210178 - RNA, 19 nt, Artificial Sequence
  Description of Artificial Sequence: Synthetic oligonucleotide
ccuuaacaagcuguucuuc

SEQ ID NO: 210179 - RNA, 19 nt, Artificial Sequence
  Description of Artificial Sequence: Synthetic oligonucleotide
guccuaaauccaaaagaau

SEQ ID NO: 210180 - RNA, 19 nt, Artificial Sequence
  Description of Artificial Sequence: Synthetic oligonucleotide
cugcguucgagaagcugaa

SEQ ID NO: 210181 - RNA, 19 nt, Artificial Sequence
  Description of Artificial Sequence: Synthetic oligonucleotide
ccccgaagugaauuuucug

SEQ ID NO: 210182 - RNA, 19 nt, Artificial Sequence
  Description of Artificial Sequence: Synthetic oligonucleotide
ggucauuaucucgaaccaa

SEQ ID NO: 210183 - RNA, 19 nt, Artificial Sequence
  Description of Artificial Sequence: Synthetic oligonucleotide
ugcguucgagaagcugaaa

SEQ ID NO: 210184 - RNA, 19 nt, Artificial Sequence
  Description of Artificial Sequence: Synthetic oligonucleotide
gguacagccaaggguaagu

SEQ ID NO: 210185 - RNA, 19 nt, Artificial Sequence
  Description of Artificial Sequence: Synthetic oligonucleotide
acauuguacucugguucua

SEQ ID NO: 210186 - RNA, 19 nt, Artificial Sequence
  Description of Artificial Sequence: Synthetic oligonucleotide
ccaaaugaccaccuauaua

SEQ ID NO: 210187 - RNA, 19 nt, Artificial Sequence
  Description of Artificial Sequence: Synthetic oligonucleotide
gguauacugugaugacucu

SEQ ID NO: 210188 - RNA, 19 nt, Artificial Sequence
  Description of Artificial Sequence: Synthetic oligonucleotide
aguguucgcugggugccau

SEQ ID NO: 210189 - RNA, 19 nt, Artificial Sequence
  Description of Artificial Sequence: Synthetic oligonucleotide
guauacugugaugacucuu

SEQ ID NO: 210190 - RNA, 19 nt, Artificial Sequence
  Description of Artificial Sequence: Synthetic oligonucleotide
ccgcuauuuucagaguuuc

SEQ ID NO: 210191 - RNA, 19 nt, Artificial Sequence
  Description of Artificial Sequence: Synthetic oligonucleotide
ggaguucguuuccuucuaa

SEQ ID NO: 210192 - RNA, 19 nt, Artificial Sequence
  Description of Artificial Sequence: Synthetic oligonucleotide
ggacucucaggagucgauc

SEQ ID NO: 210193 - RNA, 19 nt, Artificial Sequence
  Description of Artificial Sequence: Synthetic oligonucleotide
gaaccaguccaugcccgcu

SEQ ID NO: 210194 - RNA, 19 nt, Artificial Sequence
  Description of Artificial Sequence: Synthetic oligonucleotide
gccaauucugagauuccaa

SEQ ID NO: 210195 - RNA, 19 nt, Artificial Sequence
  Description of Artificial Sequence: Synthetic oligonucleotide
ccaugcccgcuauuuucag

SEQ ID NO: 210196 - RNA, 19 nt, Artificial Sequence
  Description of Artificial Sequence: Synthetic oligonucleotide
gucucacuuacaggucuaa

SEQ ID NO: 210197 - RNA, 19 nt, Artificial Sequence
  Description of Artificial Sequence: Synthetic oligonucleotide
gaguguucgcugggugcca

SEQ ID NO: 210198 - RNA, 19 nt, Artificial Sequence
  Description of Artificial Sequence: Synthetic oligonucleotide
gcaacccuacagaccuggg

SEQ ID NO: 210199 - RNA, 19 nt, Artificial Sequence
  Description of Artificial Sequence: Synthetic oligonucleotide
ggaucacgccccgaaguga

SEQ ID NO: 210200 - RNA, 19 nt, Artificial Sequence
  Description of Artificial Sequence: Synthetic oligonucleotide
cugaucaauagggccuucu

SEQ ID NO: 210201 - RNA, 19 nt, Artificial Sequence
  Description of Artificial Sequence: Synthetic oligonucleotide
gcaccauguuugaagucuc

SEQ ID NO: 210202 - RNA, 19 nt, Artificial Sequence
  Description of Artificial Sequence: Synthetic oligonucleotide
gguuguggacggaucaagu

SEQ ID NO: 210203 - RNA, 19 nt, Artificial Sequence
  Description of Artificial Sequence: Synthetic oligonucleotide
cguguaccauguauuccuc

SEQ ID NO: 210204 - RNA, 19 nt, Artificial Sequence
  Description of Artificial Sequence: Synthetic oligonucleotide
ccuaauggacagugaauau

SEQ ID NO: 210205 - RNA, 19 nt, Artificial Sequence
  Description of Artificial Sequence: Synthetic oligonucleotide
uagcgccaauucugagauu

SEQ ID NO: 210206 - RNA, 19 nt, Artificial Sequence
  Description of Artificial Sequence: Synthetic oligonucleotide
cugggauacccaccacacu

SEQ ID NO: 210207 - RNA, 19 nt, Artificial Sequence
  Description of Artificial Sequence: Synthetic oligonucleotide
acgccccgaagugaauuuu

SEQ ID NO: 210208 - RNA, 19 nt, Artificial Sequence
  Description of Artificial Sequence: Synthetic oligonucleotide
gcgccaauucugagauucc

SEQ ID NO: 210209 - RNA, 19 nt, Artificial Sequence
  Description of Artificial Sequence: Synthetic oligonucleotide
cuucaacguguaccaugua

SEQ ID NO: 210210 - RNA, 19 nt, Artificial Sequence
  Description of Artificial Sequence: Synthetic oligonucleotide
cauuccuagcuuguuucuu

SEQ ID NO: 210211 - RNA, 19 nt, Artificial Sequence
  Description of Artificial Sequence: Synthetic oligonucleotide
cgguauugcagagauaggu

SEQ ID NO: 210212 - RNA, 19 nt, Artificial Sequence
  Description of Artificial Sequence: Synthetic oligonucleotide
gcccgcuauuuucagaguu

SEQ ID NO: 210213 - RNA, 19 nt, Artificial Sequence
  Description of Artificial Sequence: Synthetic oligonucleotide
cgccccgaagugaauuuuc

SEQ ID NO: 210214 - RNA, 19 nt, Artificial Sequence
  Description of Artificial Sequence: Synthetic oligonucleotide
acacgguauugcagagaua

SEQ ID NO: 210215 - RNA, 19 nt, Artificial Sequence
  Description of Artificial Sequence: Synthetic oligonucleotide
cacgccccgaagugaauuu

SEQ ID NO: 210216 - RNA, 19 nt, Artificial Sequence
  Description of Artificial Sequence: Synthetic oligonucleotide
cggagagacucagccauuc

SEQ ID NO: 210217 - RNA, 19 nt, Artificial Sequence
  Description of Artificial Sequence: Synthetic oligonucleotide
cagguuccauggggauuuc

SEQ ID NO: 210218 - RNA, 19 nt, Artificial Sequence
  Description of Artificial Sequence: Synthetic oligonucleotide
guaggguauuugacuguuu

SEQ ID NO: 210219 - RNA, 19 nt, Artificial Sequence
  Description of Artificial Sequence: Synthetic oligonucleotide
gcguuccaccagugcagca

SEQ ID NO: 210220 - RNA, 19 nt, Artificial Sequence
  Description of Artificial Sequence: Synthetic oligonucleotide
cgccaauucugagauucca

SEQ ID NO: 210221 - RNA, 19 nt, Artificial Sequence
  Description of Artificial Sequence: Synthetic oligonucleotide
cccgcuauuuucagaguuu

SEQ ID NO: 210222 - RNA, 19 nt, Artificial Sequence
  Description of Artificial Sequence: Synthetic oligonucleotide
caguagcauagcgccaauu

SEQ ID NO: 210223 - RNA, 19 nt, Artificial Sequence
  Description of Artificial Sequence: Synthetic oligonucleotide
gccaguccaccaccaacuu

SEQ ID NO: 210224 - RNA, 19 nt, Artificial Sequence
  Description of Artificial Sequence: Synthetic oligonucleotide
ccuacagaccugggaugaa

SEQ ID NO: 210225 - RNA, 19 nt, Artificial Sequence
  Description of Artificial Sequence: Synthetic oligonucleotide
ggaaggguacaggccuguu

SEQ ID NO: 210226 - RNA, 19 nt, Artificial Sequence
  Description of Artificial Sequence: Synthetic oligonucleotide
cccugaucaauagggccuu

SEQ ID NO: 210227 - RNA, 19 nt, Artificial Sequence
  Description of Artificial Sequence: Synthetic oligonucleotide
ccaguagcauagcgccaau

SEQ ID NO: 210228 - RNA, 19 nt, Artificial Sequence
  Description of Artificial Sequence: Synthetic oligonucleotide
aucgcauagaucuugagcc

SEQ ID NO: 210229 - RNA, 19 nt, Artificial Sequence
  Description of Artificial Sequence: Synthetic oligonucleotide
ugucuuaacaccaugguug

SEQ ID NO: 210230 - RNA, 19 nt, Artificial Sequence
  Description of Artificial Sequence: Synthetic oligonucleotide
gauagauucggaugaaacg

SEQ ID NO: 210231 - RNA, 19 nt, Artificial Sequence
  Description of Artificial Sequence: Synthetic oligonucleotide
auagggguaagacacaaac

SEQ ID NO: 210232 - RNA, 19 nt, Artificial Sequence
  Description of Artificial Sequence: Synthetic oligonucleotide
cauugauagucccagaccg

SEQ ID NO: 210233 - RNA, 19 nt, Artificial Sequence
  Description of Artificial Sequence: Synthetic oligonucleotide
uguagccccaauaucauag

SEQ ID NO: 210234 - RNA, 19 nt, Artificial Sequence
  Description of Artificial Sequence: Synthetic oligonucleotide
gaugaaacgagcuacaacu

SEQ ID NO: 210235 - RNA, 19 nt, Artificial Sequence
  Description of Artificial Sequence: Synthetic oligonucleotide
ugaaacgagcuacaacugg

SEQ ID NO: 210236 - RNA, 19 nt, Artificial Sequence
  Description of Artificial Sequence: Synthetic oligonucleotide
guaaauagagagcuccagg

SEQ ID NO: 210237 - RNA, 19 nt, Artificial Sequence
  Description of Artificial Sequence: Synthetic oligonucleotide
aaugcggugugauuccauc

SEQ ID NO: 210238 - RNA, 19 nt, Artificial Sequence
  Description of Artificial Sequence: Synthetic oligonucleotide
uuaguaugcagguagcuaa

SEQ ID NO: 210239 - RNA, 19 nt, Artificial Sequence
  Description of Artificial Sequence: Synthetic oligonucleotide
cuuaguuugaauugggcca

SEQ ID NO: 210240 - RNA, 19 nt, Artificial Sequence
  Description of Artificial Sequence: Synthetic oligonucleotide
agguggaccaauuucuuuc

SEQ ID NO: 210241 - RNA, 19 nt, Artificial Sequence
  Description of Artificial Sequence: Synthetic oligonucleotide
agcccagguaaauagagag

SEQ ID NO: 210242 - RNA, 19 nt, Artificial Sequence
  Description of Artificial Sequence: Synthetic oligonucleotide
gcaauuaguaugcagguag

SEQ ID NO: 210243 - RNA, 19 nt, Artificial Sequence
  Description of Artificial Sequence: Synthetic oligonucleotide
auagauucggaugaaacga

SEQ ID NO: 210244 - RNA, 19 nt, Artificial Sequence
  Description of Artificial Sequence: Synthetic oligonucleotide
aacgagcuacaacuggauc

SEQ ID NO: 210245 - RNA, 19 nt, Artificial Sequence
  Description of Artificial Sequence: Synthetic oligonucleotide
aaugccuugcucaucuguc

SEQ ID NO: 210246 - RNA, 19 nt, Artificial Sequence
  Description of Artificial Sequence: Synthetic oligonucleotide
uagauucggaugaaacgag

SEQ ID NO: 210247 - RNA, 19 nt, Artificial Sequence
  Description of Artificial Sequence: Synthetic oligonucleotide
uugaggaugcgccaguagu

SEQ ID NO: 210248 - RNA, 19 nt, Artificial Sequence
  Description of Artificial Sequence: Synthetic oligonucleotide
ugcguaaugaugccuguga

SEQ ID NO: 210249 - RNA, 19 nt, Artificial Sequence
  Description of Artificial Sequence: Synthetic oligonucleotide
ucagaaauccccgaaguuc

SEQ ID NO: 210250 - RNA, 19 nt, Artificial Sequence
  Description of Artificial Sequence: Synthetic oligonucleotide
caucgcauagaucuugagc

SEQ ID NO: 210251 - RNA, 19 nt, Artificial Sequence
  Description of Artificial Sequence: Synthetic oligonucleotide
uguugugaauggaaaugug

SEQ ID NO: 210252 - RNA, 19 nt, Artificial Sequence
  Description of Artificial Sequence: Synthetic oligonucleotide
agcggauagauucggauga

SEQ ID NO: 210253 - RNA, 19 nt, Artificial Sequence
  Description of Artificial Sequence: Synthetic oligonucleotide
ucgugaggggucaaugcgg

SEQ ID NO: 210254 - RNA, 19 nt, Artificial Sequence
  Description of Artificial Sequence: Synthetic oligonucleotide
gauagucccagaccgagga

SEQ ID NO: 210255 - RNA, 19 nt, Artificial Sequence
  Description of Artificial Sequence: Synthetic oligonucleotide
ugcauguugagccggcccc

SEQ ID NO: 210256 - RNA, 19 nt, Artificial Sequence
  Description of Artificial Sequence: Synthetic oligonucleotide
aauuaguaugcagguagcu

SEQ ID NO: 210257 - RNA, 19 nt, Artificial Sequence
  Description of Artificial Sequence: Synthetic oligonucleotide
guuauuguugggcacccug

SEQ ID NO: 210258 - RNA, 19 nt, Artificial Sequence
  Description of Artificial Sequence: Synthetic oligonucleotide
cuuguaacugugguggcgg

SEQ ID NO: 210259 - RNA, 19 nt, Artificial Sequence
  Description of Artificial Sequence: Synthetic oligonucleotide
uuauuguugggcacccugu

SEQ ID NO: 210260 - RNA, 19 nt, Artificial Sequence
  Description of Artificial Sequence: Synthetic oligonucleotide
aagaagguagucacaaagu

SEQ ID NO: 210261 - RNA, 19 nt, Artificial Sequence
  Description of Artificial Sequence: Synthetic oligonucleotide
uuguagguggaauuuccca

SEQ ID NO: 210262 - RNA, 19 nt, Artificial Sequence
  Description of Artificial Sequence: Synthetic oligonucleotide
aaguaauaguccaugucgu

SEQ ID NO: 210263 - RNA, 19 nt, Artificial Sequence
  Description of Artificial Sequence: Synthetic oligonucleotide
augcggugugauuccaucc

SEQ ID NO: 210264 - RNA, 19 nt, Artificial Sequence
  Description of Artificial Sequence: Synthetic oligonucleotide
ggaaaauagcaugaucugg

SEQ ID NO: 210265 - RNA, 19 nt, Artificial Sequence
  Description of Artificial Sequence: Synthetic oligonucleotide
uugauagucccagaccgag

SEQ ID NO: 210266 - RNA, 19 nt, Artificial Sequence
  Description of Artificial Sequence: Synthetic oligonucleotide
ugcggugugauuccauccc

SEQ ID NO: 210267 - RNA, 19 nt, Artificial Sequence
  Description of Artificial Sequence: Synthetic oligonucleotide
agcguucagggauugguag

SEQ ID NO: 210268 - RNA, 19 nt, Artificial Sequence
  Description of Artificial Sequence: Synthetic oligonucleotide
caauuaguaugcagguagc

SEQ ID NO: 210269 - RNA, 19 nt, Artificial Sequence
  Description of Artificial Sequence: Synthetic oligonucleotide
cagguugucagugauuacc

SEQ ID NO: 210270 - RNA, 19 nt, Artificial Sequence
  Description of Artificial Sequence: Synthetic oligonucleotide
auugaggcgucgaagccgc

SEQ ID NO: 210271 - RNA, 19 nt, Artificial Sequence
  Description of Artificial Sequence: Synthetic oligonucleotide
ugauagucccagaccgagg

SEQ ID NO: 210272 - RNA, 19 nt, Artificial Sequence
  Description of Artificial Sequence: Synthetic oligonucleotide
uuuguucccucauccggag

SEQ ID NO: 210273 - RNA, 19 nt, Artificial Sequence
  Description of Artificial Sequence: Synthetic oligonucleotide
ggacagguagcguucaggg

SEQ ID NO: 210274 - RNA, 19 nt, Artificial Sequence
  Description of Artificial Sequence: Synthetic oligonucleotide
agauucggaugaaacgagc

SEQ ID NO: 210275 - RNA, 19 nt, Artificial Sequence
  Description of Artificial Sequence: Synthetic oligonucleotide
ugcccaguugccaaacucu

SEQ ID NO: 210276 - RNA, 19 nt, Artificial Sequence
  Description of Artificial Sequence: Synthetic oligonucleotide
auagccaagaucucccgaa

SEQ ID NO: 210277 - RNA, 19 nt, Artificial Sequence
  Description of Artificial Sequence: Synthetic oligonucleotide
uccgagaucuccaucgcau

SEQ ID NO: 210278 - RNA, 19 nt, Artificial Sequence
  Description of Artificial Sequence: Synthetic oligonucleotide
agggccucgugguaaugcc

SEQ ID NO: 210279 - RNA, 19 nt, Artificial Sequence
  Description of Artificial Sequence: Synthetic oligonucleotide
uggauaccguggcaucugg

SEQ ID NO: 210280 - RNA, 19 nt, Artificial Sequence
  Description of Artificial Sequence: Synthetic oligonucleotide
aggcaauuaguaugcaggu

SEQ ID NO: 210281 - RNA, 19 nt, Artificial Sequence
  Description of Artificial Sequence: Synthetic oligonucleotide
cuuccgggacccuuugugg

SEQ ID NO: 210282 - RNA, 19 nt, Artificial Sequence
  Description of Artificial Sequence: Synthetic oligonucleotide
gaugccauucaccgagaug

SEQ ID NO: 210283 - RNA, 19 nt, Artificial Sequence
  Description of Artificial Sequence: Synthetic oligonucleotide
cauugaggcgucgaagccg

SEQ ID NO: 210284 - RNA, 19 nt, Artificial Sequence
  Description of Artificial Sequence: Synthetic oligonucleotide
cucaaugcggugugauucc

SEQ ID NO: 210285 - RNA, 19 nt, Artificial Sequence
  Description of Artificial Sequence: Synthetic oligonucleotide
gucaaugcggagaaugggc

SEQ ID NO: 210286 - RNA, 19 nt, Artificial Sequence
  Description of Artificial Sequence: Synthetic oligonucleotide
uguguagccccaauaucau

SEQ ID NO: 210287 - RNA, 19 nt, Artificial Sequence
  Description of Artificial Sequence: Synthetic oligonucleotide
acucucaugagggaacuug

SEQ ID NO: 210288 - RNA, 19 nt, Artificial Sequence
  Description of Artificial Sequence: Synthetic oligonucleotide
caaugcggagaaugggccg

SEQ ID NO: 210289 - RNA, 19 nt, Artificial Sequence
  Description of Artificial Sequence: Synthetic oligonucleotide
uucagaaauccccgaaguu

SEQ ID NO: 210290 - RNA, 19 nt, Artificial Sequence
  Description of Artificial Sequence: Synthetic oligonucleotide
agaccgaggauuccacuug

SEQ ID NO: 210291 - RNA, 19 nt, Artificial Sequence
  Description of Artificial Sequence: Synthetic oligonucleotide
ucgcauagaucuugagccc

SEQ ID NO: 210292 - RNA, 19 nt, Artificial Sequence
  Description of Artificial Sequence: Synthetic oligonucleotide
uccaucgcauagaucuuga

SEQ ID NO: 210293 - RNA, 19 nt, Artificial Sequence
  Description of Artificial Sequence: Synthetic oligonucleotide
gaauugggccagaauguug

SEQ ID NO: 210294 - RNA, 19 nt, Artificial Sequence
  Description of Artificial Sequence: Synthetic oligonucleotide
auggcccggacuucugugg

SEQ ID NO: 210295 - RNA, 19 nt, Artificial Sequence
  Description of Artificial Sequence: Synthetic oligonucleotide
acgguacucacccggguug

SEQ ID NO: 210296 - RNA, 19 nt, Artificial Sequence
  Description of Artificial Sequence: Synthetic oligonucleotide
gguagguuauuguugggca

SEQ ID NO: 210297 - RNA, 19 nt, Artificial Sequence
  Description of Artificial Sequence: Synthetic oligonucleotide
guagcuaaagucauugaua

SEQ ID NO: 210298 - RNA, 19 nt, Artificial Sequence
  Description of Artificial Sequence: Synthetic oligonucleotide
uauuguugggcacccugua

SEQ ID NO: 210299 - RNA, 19 nt, Artificial Sequence
  Description of Artificial Sequence: Synthetic oligonucleotide
aggaugcgccaguagucac

SEQ ID NO: 210300 - RNA, 19 nt, Artificial Sequence
  Description of Artificial Sequence: Synthetic oligonucleotide
cuguaugugcggguaauug

SEQ ID NO: 210301 - RNA, 19 nt, Artificial Sequence
  Description of Artificial Sequence: Synthetic oligonucleotide
cacuauuucuguguagguc

SEQ ID NO: 210302 - RNA, 19 nt, Artificial Sequence
  Description of Artificial Sequence: Synthetic oligonucleotide
auucggaugaaacgagcua

SEQ ID NO: 210303 - RNA, 19 nt, Artificial Sequence
  Description of Artificial Sequence: Synthetic oligonucleotide
uucagagguggaccaauuu

SEQ ID NO: 210304 - RNA, 19 nt, Artificial Sequence
  Description of Artificial Sequence: Synthetic oligonucleotide
cauaguuggggaucaagua

SEQ ID NO: 210305 - RNA, 19 nt, Artificial Sequence
  Description of Artificial Sequence: Synthetic oligonucleotide
caggcuaccguuccaggug

SEQ ID NO: 210306 - RNA, 19 nt, Artificial Sequence
  Description of Artificial Sequence: Synthetic oligonucleotide
ucccgaaugcgcuuccagu

SEQ ID NO: 210307 - RNA, 19 nt, Artificial Sequence
  Description of Artificial Sequence: Synthetic oligonucleotide
uaauuguggggcacuccuc

SEQ ID NO: 210308 - RNA, 19 nt, Artificial Sequence
  Description of Artificial Sequence: Synthetic oligonucleotide
gauccgcguguccuggacc

SEQ ID NO: 210309 - RNA, 19 nt, Artificial Sequence
  Description of Artificial Sequence: Synthetic oligonucleotide
ccgguucccauucauagcc

SEQ ID NO: 210310 - RNA, 19 nt, Artificial Sequence
  Description of Artificial Sequence: Synthetic oligonucleotide
uguugggaucccaguuuca

SEQ ID NO: 210311 - RNA, 19 nt, Artificial Sequence
  Description of Artificial Sequence: Synthetic oligonucleotide
ggaugaaacgagcuacaac

SEQ ID NO: 210312 - RNA, 19 nt, Artificial Sequence
  Description of Artificial Sequence: Synthetic oligonucleotide
augaaacgagcuacaacug

SEQ ID NO: 210313 - RNA, 19 nt, Artificial Sequence
  Description of Artificial Sequence: Synthetic oligonucleotide
gguuguagguggaauuucc

SEQ ID NO: 210314 - RNA, 19 nt, Artificial Sequence
  Description of Artificial Sequence: Synthetic oligonucleotide
augaagguaagcagcgccu

SEQ ID NO: 210315 - RNA, 19 nt, Artificial Sequence
  Description of Artificial Sequence: Synthetic oligonucleotide
gauucggaugaaacgagcu

SEQ ID NO: 210316 - RNA, 19 nt, Artificial Sequence
  Description of Artificial Sequence: Synthetic oligonucleotide
caucugcgcggccaccucg

SEQ ID NO: 210317 - RNA, 19 nt, Artificial Sequence
  Description of Artificial Sequence: Synthetic oligonucleotide
ucauccggagccgguacug

SEQ ID NO: 210318 - RNA, 19 nt, Artificial Sequence
  Description of Artificial Sequence: Synthetic oligonucleotide
gcggaaaauagcaugaucu

SEQ ID NO: 210319 - RNA, 19 nt, Artificial Sequence
  Description of Artificial Sequence: Synthetic oligonucleotide
ggucgugaggggucaaugc

SEQ ID NO: 210320 - RNA, 19 nt, Artificial Sequence
  Description of Artificial Sequence: Synthetic oligonucleotide
guagcuguggacaggcguc

SEQ ID NO: 210321 - RNA, 19 nt, Artificial Sequence
  Description of Artificial Sequence: Synthetic oligonucleotide
ugugaaccgaguuguccuu

SEQ ID NO: 210322 - RNA, 19 nt, Artificial Sequence
  Description of Artificial Sequence: Synthetic oligonucleotide
ggggucaugggucgugagg

SEQ ID NO: 210323 - RNA, 19 nt, Artificial Sequence
  Description of Artificial Sequence: Synthetic oligonucleotide
guacucacccggguugagg

SEQ ID NO: 210324 - RNA, 19 nt, Artificial Sequence
  Description of Artificial Sequence: Synthetic oligonucleotide
caccgagaugguagcauug

SEQ ID NO: 210325 - RNA, 19 nt, Artificial Sequence
  Description of Artificial Sequence: Synthetic oligonucleotide
ucacggggcagcucacucu

SEQ ID NO: 210326 - RNA, 19 nt, Artificial Sequence
  Description of Artificial Sequence: Synthetic oligonucleotide
aagccgcauuuguucccuc

SEQ ID NO: 210327 - RNA, 19 nt, Artificial Sequence
  Description of Artificial Sequence: Synthetic oligonucleotide
ucggaugacuccucaucau

SEQ ID NO: 210328 - RNA, 19 nt, Artificial Sequence
  Description of Artificial Sequence: Synthetic oligonucleotide
aggugagcggauagauucg

SEQ ID NO: 210329 - RNA, 19 nt, Artificial Sequence
  Description of Artificial Sequence: Synthetic oligonucleotide
ucgauccacugcguuuggg

SEQ ID NO: 210330 - RNA, 19 nt, Artificial Sequence
  Description of Artificial Sequence: Synthetic oligonucleotide
auaguccacguugcagguc

SEQ ID NO: 210331 - RNA, 19 nt, Artificial Sequence
  Description of Artificial Sequence: Synthetic oligonucleotide
gguagucacaaagucguca

SEQ ID NO: 210332 - RNA, 19 nt, Artificial Sequence
  Description of Artificial Sequence: Synthetic oligonucleotide
agccaugucauagggguaa

SEQ ID NO: 210333 - RNA, 19 nt, Artificial Sequence
  Description of Artificial Sequence: Synthetic oligonucleotide
ugguuguagguggaauuuc

SEQ ID NO: 210334 - RNA, 19 nt, Artificial Sequence
  Description of Artificial Sequence: Synthetic oligonucleotide
gcuacaacuggaucaggga

SEQ ID NO: 210335 - RNA, 19 nt, Artificial Sequence
  Description of Artificial Sequence: Synthetic oligonucleotide
acaccacgccccaucauag

SEQ ID NO: 210336 - RNA, 19 nt, Artificial Sequence
  Description of Artificial Sequence: Synthetic oligonucleotide
uucucccacucacggggca

SEQ ID NO: 210337 - RNA, 19 nt, Artificial Sequence
  Description of Artificial Sequence: Synthetic oligonucleotide
ggugagcggauagauucgg

SEQ ID NO: 210338 - RNA, 19 nt, Artificial Sequence
  Description of Artificial Sequence: Synthetic oligonucleotide
gccgguacuguagacggcg

SEQ ID NO: 210339 - RNA, 19 nt, Artificial Sequence
  Description of Artificial Sequence: Synthetic oligonucleotide
accacgccccaucauagua

SEQ ID NO: 210340 - RNA, 19 nt, Artificial Sequence
  Description of Artificial Sequence: Synthetic oligonucleotide
cucccgaaugcgcuuccag

SEQ ID NO: 210341 - RNA, 19 nt, Artificial Sequence
  Description of Artificial Sequence: Synthetic oligonucleotide
agccgcauuuguucccuca

SEQ ID NO: 210342 - RNA, 19 nt, Artificial Sequence
  Description of Artificial Sequence: Synthetic oligonucleotide
cacucaacacagguguguc

SEQ ID NO: 210343 - RNA, 19 nt, Artificial Sequence
  Description of Artificial Sequence: Synthetic oligonucleotide
ccucaaugcggugugauuc

SEQ ID NO: 210344 - RNA, 19 nt, Artificial Sequence
  Description of Artificial Sequence: Synthetic oligonucleotide
gcacuugauuuucuccacc

SEQ ID NO: 210345 - RNA, 19 nt, Artificial Sequence
  Description of Artificial Sequence: Synthetic oligonucleotide
agcucacucucaugaggga

SEQ ID NO: 210346 - RNA, 19 nt, Artificial Sequence
  Description of Artificial Sequence: Synthetic oligonucleotide
cccggguugaggaugcgcc

SEQ ID NO: 210347 - RNA, 19 nt, Artificial Sequence
  Description of Artificial Sequence: Synthetic oligonucleotide
uccucaaugcggugugauu

SEQ ID NO: 210348 - RNA, 19 nt, Artificial Sequence
  Description of Artificial Sequence: Synthetic oligonucleotide
cggaaaauagcaugaucug

SEQ ID NO: 210349 - RNA, 19 nt, Artificial Sequence
  Description of Artificial Sequence: Synthetic oligonucleotide
aguuugaauugggccagaa

SEQ ID NO: 210350 - RNA, 19 nt, Artificial Sequence
  Description of Artificial Sequence: Synthetic oligonucleotide
aaucucggcccugcguaau

SEQ ID NO: 210351 - RNA, 19 nt, Artificial Sequence
  Description of Artificial Sequence: Synthetic oligonucleotide
acugcguuugggagucguc

SEQ ID NO: 210352 - RNA, 19 nt, Artificial Sequence
  Description of Artificial Sequence: Synthetic oligonucleotide
ccucucaccaccauucaga

SEQ ID NO: 210353 - RNA, 19 nt, Artificial Sequence
  Description of Artificial Sequence: Synthetic oligonucleotide
gguaauuguggggcacucc

SEQ ID NO: 210354 - RNA, 19 nt, Artificial Sequence
  Description of Artificial Sequence: Synthetic oligonucleotide
cucgauccacugcguuugg

SEQ ID NO: 210355 - RNA, 19 nt, Artificial Sequence
  Description of Artificial Sequence: Synthetic oligonucleotide
cuagcaccucauugccgug

SEQ ID NO: 210356 - RNA, 19 nt, Artificial Sequence
  Description of Artificial Sequence: Synthetic oligonucleotide
uccaggcaauuaguaugca

SEQ ID NO: 210357 - RNA, 19 nt, Artificial Sequence
  Description of Artificial Sequence: Synthetic oligonucleotide
ucgguguccgagccauguc

SEQ ID NO: 210358 - RNA, 19 nt, Artificial Sequence
  Description of Artificial Sequence: Synthetic oligonucleotide
cacggaucugguuguccuc

SEQ ID NO: 210359 - RNA, 19 nt, Artificial Sequence
  Description of Artificial Sequence: Synthetic oligonucleotide
gggaucaaguagccauccc

SEQ ID NO: 210360 - RNA, 19 nt, Artificial Sequence
  Description of Artificial Sequence: Synthetic oligonucleotide
gaugcgccaguagucaccu

SEQ ID NO: 210361 - RNA, 19 nt, Artificial Sequence
  Description of Artificial Sequence: Synthetic oligonucleotide
gcgcauguccuuguaacug

SEQ ID NO: 210362 - RNA, 19 nt, Artificial Sequence
  Description of Artificial Sequence: Synthetic oligonucleotide
cugcguaaugaugccugug

SEQ ID NO: 210363 - RNA, 19 nt, Artificial Sequence
  Description of Artificial Sequence: Synthetic oligonucleotide
cggagaaugggccgguucc

SEQ ID NO: 210364 - RNA, 19 nt, Artificial Sequence
  Description of Artificial Sequence: Synthetic oligonucleotide
ugaggcgucgaagccgcau

SEQ ID NO: 210365 - RNA, 19 nt, Artificial Sequence
  Description of Artificial Sequence: Synthetic oligonucleotide
ggggaucaaguagccaucc

SEQ ID NO: 210366 - RNA, 19 nt, Artificial Sequence
  Description of Artificial Sequence: Synthetic oligonucleotide
ccacgccccaucauaguag

SEQ ID NO: 210367 - RNA, 19 nt, Artificial Sequence
  Description of Artificial Sequence: Synthetic oligonucleotide
cauagggguaagacacaaa

SEQ ID NO: 210368 - RNA, 19 nt, Artificial Sequence
  Description of Artificial Sequence: Synthetic oligonucleotide
gucgucauggaugcuggaa

SEQ ID NO: 210369 - RNA, 19 nt, Artificial Sequence
  Description of Artificial Sequence: Synthetic oligonucleotide
agccgguacuguagacggc

SEQ ID NO: 210370 - RNA, 19 nt, Artificial Sequence
  Description of Artificial Sequence: Synthetic oligonucleotide
ugguagcauugaggcgucg

SEQ ID NO: 210371 - RNA, 19 nt, Artificial Sequence
  Description of Artificial Sequence: Synthetic oligonucleotide
cugcgcggccaccucguag

SEQ ID NO: 210372 - RNA, 19 nt, Artificial Sequence
  Description of Artificial Sequence: Synthetic oligonucleotide
ggaugcgccaguagucacc

SEQ ID NO: 210373 - RNA, 19 nt, Artificial Sequence
  Description of Artificial Sequence: Synthetic oligonucleotide
ggauaccguggcaucuggg

SEQ ID NO: 210374 - RNA, 19 nt, Artificial Sequence
  Description of Artificial Sequence: Synthetic oligonucleotide
gggauugguagguuauugu

SEQ ID NO: 210375 - RNA, 19 nt, Artificial Sequence
  Description of Artificial Sequence: Synthetic oligonucleotide
cugucuuaacaccaugguu

SEQ ID NO: 210376 - RNA, 19 nt, Artificial Sequence
  Description of Artificial Sequence: Synthetic oligonucleotide
gaagccgcauuuguucccu

SEQ ID NO: 210377 - RNA, 19 nt, Artificial Sequence
  Description of Artificial Sequence: Synthetic oligonucleotide
guagccccaauaucauagu

SEQ ID NO: 210378 - RNA, 19 nt, Artificial Sequence
  Description of Artificial Sequence: Synthetic oligonucleotide
gccguugguguaguccugg

SEQ ID NO: 210379 - RNA, 19 nt, Artificial Sequence
  Description of Artificial Sequence: Synthetic oligonucleotide
ccaguuggagcgagccagg

SEQ ID NO: 210380 - RNA, 19 nt, Artificial Sequence
  Description of Artificial Sequence: Synthetic oligonucleotide
gagguggaccaauuucuuu

SEQ ID NO: 210381 - RNA, 19 nt, Artificial Sequence
  Description of Artificial Sequence: Synthetic oligonucleotide
gguagcauugaggcgucga

SEQ ID NO: 210382 - RNA, 19 nt, Artificial Sequence
  Description of Artificial Sequence: Synthetic oligonucleotide
auccggagccgguacugua

SEQ ID NO: 210383 - RNA, 19 nt, Artificial Sequence
  Description of Artificial Sequence: Synthetic oligonucleotide
cauagccauugguauacau

SEQ ID NO: 210384 - RNA, 19 nt, Artificial Sequence
  Description of Artificial Sequence: Synthetic oligonucleotide
guguagcggaacucgggcu

SEQ ID NO: 210385 - RNA, 19 nt, Artificial Sequence
  Description of Artificial Sequence: Synthetic oligonucleotide
gccgucacacgguacucac

SEQ ID NO: 210386 - RNA, 19 nt, Artificial Sequence
  Description of Artificial Sequence: Synthetic oligonucleotide
aggcgucgaagccgcauuu

SEQ ID NO: 210387 - RNA, 19 nt, Artificial Sequence
  Description of Artificial Sequence: Synthetic oligonucleotide
guguagccccaauaucaua

SEQ ID NO: 210388 - RNA, 19 nt, Artificial Sequence
  Description of Artificial Sequence: Synthetic oligonucleotide
caccagccugcauguugag

SEQ ID NO: 210389 - RNA, 19 nt, Artificial Sequence
  Description of Artificial Sequence: Synthetic oligonucleotide
gccuagcaccucauugccg

SEQ ID NO: 210390 - RNA, 19 nt, Artificial Sequence
  Description of Artificial Sequence: Synthetic oligonucleotide
ccgaguuguccuucuggug

SEQ ID NO: 210391 - RNA, 19 nt, Artificial Sequence
  Description of Artificial Sequence: Synthetic oligonucleotide
gccguggcgcagcauggag

SEQ ID NO: 210392 - RNA, 19 nt, Artificial Sequence
  Description of Artificial Sequence: Synthetic oligonucleotide
ggcccugcguaaugaugcc

SEQ ID NO: 210393 - RNA, 19 nt, Artificial Sequence
  Description of Artificial Sequence: Synthetic oligonucleotide
gggucgugaggggucaaug

SEQ ID NO: 210394 - RNA, 19 nt, Artificial Sequence
  Description of Artificial Sequence: Synthetic oligonucleotide
cagaccgaggauuccacuu

SEQ ID NO: 210395 - RNA, 19 nt, Artificial Sequence
  Description of Artificial Sequence: Synthetic oligonucleotide
ucgugcuccccaggguuau

SEQ ID NO: 210396 - RNA, 19 nt, Artificial Sequence
  Description of Artificial Sequence: Synthetic oligonucleotide
ccguugguguaguccuggg

SEQ ID NO: 210397 - RNA, 19 nt, Artificial Sequence
  Description of Artificial Sequence: Synthetic oligonucleotide
gugguagcauugaggcguc

SEQ ID NO: 210398 - RNA, 19 nt, Artificial Sequence
  Description of Artificial Sequence: Synthetic oligonucleotide
ugacggcaccagguggauc

SEQ ID NO: 210399 - RNA, 19 nt, Artificial Sequence
  Description of Artificial Sequence: Synthetic oligonucleotide
gucaugggucgugaggggu

SEQ ID NO: 210400 - RNA, 19 nt, Artificial Sequence
  Description of Artificial Sequence: Synthetic oligonucleotide
gcggugugauuccauccca

SEQ ID NO: 210401 - RNA, 19 nt, Artificial Sequence
  Description of Artificial Sequence: Synthetic oligonucleotide
ggcaauuaguaugcaggua

SEQ ID NO: 210402 - RNA, 19 nt, Artificial Sequence
  Description of Artificial Sequence: Synthetic oligonucleotide
gcggagaaugggccgguuc

SEQ ID NO: 210403 - RNA, 19 nt, Artificial Sequence
  Description of Artificial Sequence: Synthetic oligonucleotide
gguacucucggcacaggua

SEQ ID NO: 210404 - RNA, 19 nt, Artificial Sequence
  Description of Artificial Sequence: Synthetic oligonucleotide
caugggccgucacacggua

SEQ ID NO: 210405 - RNA, 19 nt, Artificial Sequence
  Description of Artificial Sequence: Synthetic oligonucleotide
gauuugcacccagcacgaa

SEQ ID NO: 210406 - RNA, 19 nt, Artificial Sequence
  Description of Artificial Sequence: Synthetic oligonucleotide
cgauccacugcguuuggga

SEQ ID NO: 210407 - RNA, 19 nt, Artificial Sequence
  Description of Artificial Sequence: Synthetic oligonucleotide
cucgugcuccccaggguua

SEQ ID NO: 210408 - RNA, 19 nt, Artificial Sequence
  Description of Artificial Sequence: Synthetic oligonucleotide
acgccccaucauaguaguc

SEQ ID NO: 210409 - RNA, 19 nt, Artificial Sequence
  Description of Artificial Sequence: Synthetic oligonucleotide
ggcgucgaagccgcauuug

SEQ ID NO: 210410 - RNA, 19 nt, Artificial Sequence
  Description of Artificial Sequence: Synthetic oligonucleotide
ccgucacacgguacucacc

SEQ ID NO: 210411 - RNA, 19 nt, Artificial Sequence
  Description of Artificial Sequence: Synthetic oligonucleotide
ugcgcacucugggguuccc

SEQ ID NO: 210412 - RNA, 19 nt, Artificial Sequence
  Description of Artificial Sequence: Synthetic oligonucleotide
ggcgcauguccuuguaacu

SEQ ID NO: 210413 - RNA, 19 nt, Artificial Sequence
  Description of Artificial Sequence: Synthetic oligonucleotide
ggguaauuguggggcacuc

SEQ ID NO: 210414 - RNA, 19 nt, Artificial Sequence
  Description of Artificial Sequence: Synthetic oligonucleotide
gccaugucauagggguaag

SEQ ID NO: 210415 - RNA, 19 nt, Artificial Sequence
  Description of Artificial Sequence: Synthetic oligonucleotide
cucgguguccgagccaugu

SEQ ID NO: 210416 - RNA, 19 nt, Artificial Sequence
  Description of Artificial Sequence: Synthetic oligonucleotide
caguuggagcgagccagga

SEQ ID NO: 210417 - RNA, 19 nt, Artificial Sequence
  Description of Artificial Sequence: Synthetic oligonucleotide
caaugcggugugauuccau

SEQ ID NO: 210418 - RNA, 19 nt, Artificial Sequence
  Description of Artificial Sequence: Synthetic oligonucleotide
gcgucgaagccgcauuugu

SEQ ID NO: 210419 - RNA, 19 nt, Artificial Sequence
  Description of Artificial Sequence: Synthetic oligonucleotide
ccucauugccguggauccc

SEQ ID NO: 210420 - RNA, 19 nt, Artificial Sequence
  Description of Artificial Sequence: Synthetic oligonucleotide
guagacggcgcugcugcau

SEQ ID NO: 210421 - RNA, 19 nt, Artificial Sequence
  Description of Artificial Sequence: Synthetic oligonucleotide
ccgcguguccuggaccagg

SEQ ID NO: 210422 - RNA, 19 nt, Artificial Sequence
  Description of Artificial Sequence: Synthetic oligonucleotide
caccacgccccaucauagu

SEQ ID NO: 210423 - RNA, 19 nt, Artificial Sequence
  Description of Artificial Sequence: Synthetic oligonucleotide
gggaaccucugauggcuau

SEQ ID NO: 210424 - RNA, 19 nt, Artificial Sequence
  Description of Artificial Sequence: Synthetic oligonucleotide
gcgccaguagucaccucca

SEQ ID NO: 210425 - RNA, 19 nt, Artificial Sequence
  Description of Artificial Sequence: Synthetic oligonucleotide
ccggguugaggaugcgcca

SEQ ID NO: 210426 - RNA, 19 nt, Artificial Sequence
  Description of Artificial Sequence: Synthetic oligonucleotide
cccgaaugcgcuuccaguu

SEQ ID NO: 210427 - RNA, 19 nt, Artificial Sequence
  Description of Artificial Sequence: Synthetic oligonucleotide
ggaucugguuguccucaau

SEQ ID NO: 210428 - RNA, 19 nt, Artificial Sequence
  Description of Artificial Sequence: Synthetic oligonucleotide
ccgagaucuccaucgcaua

SEQ ID NO: 210429 - RNA, 19 nt, Artificial Sequence
  Description of Artificial Sequence: Synthetic oligonucleotide
gcggauagauucggaugaa

SEQ ID NO: 210430 - RNA, 19 nt, Artificial Sequence
  Description of Artificial Sequence: Synthetic oligonucleotide
cagcggaaaauagcaugau

SEQ ID NO: 210431 - RNA, 19 nt, Artificial Sequence
  Description of Artificial Sequence: Synthetic oligonucleotide
ggcucgguguccgagccau

SEQ ID NO: 210432 - RNA, 19 nt, Artificial Sequence
  Description of Artificial Sequence: Synthetic oligonucleotide
cauccggagccgguacugu

SEQ ID NO: 210433 - RNA, 19 nt, Artificial Sequence
  Description of Artificial Sequence: Synthetic oligonucleotide
caccucgauccacugcguu

SEQ ID NO: 210434 - RNA, 19 nt, Artificial Sequence
  Description of Artificial Sequence: Synthetic oligonucleotide
cggagccgguacuguagac

SEQ ID NO: 210435 - RNA, 19 nt, Artificial Sequence
  Description of Artificial Sequence: Synthetic oligonucleotide
ccagaccgaggauuccacu

SEQ ID NO: 210436 - RNA, 19 nt, Artificial Sequence
  Description of Artificial Sequence: Synthetic oligonucleotide
gggccgguucccauucaua

SEQ ID NO: 210437 - RNA, 19 nt, Artificial Sequence
  Description of Artificial Sequence: Synthetic oligonucleotide
gcuguaugugcggguaauu

SEQ ID NO: 210438 - RNA, 19 nt, Artificial Sequence
  Description of Artificial Sequence: Synthetic oligonucleotide
ggguucccaucacgguacu

SEQ ID NO: 210439 - RNA, 19 nt, Artificial Sequence
  Description of Artificial Sequence: Synthetic oligonucleotide
gcccaucugcgcggccacc

SEQ ID NO: 210440 - RNA, 19 nt, Artificial Sequence
  Description of Artificial Sequence: Synthetic oligonucleotide
gcucgguguccgagccaug

SEQ ID NO: 210441 - RNA, 19 nt, Artificial Sequence
  Description of Artificial Sequence: Synthetic oligonucleotide
cccacucacggggcagcuc

SEQ ID NO: 210442 - RNA, 19 nt, Artificial Sequence
  Description of Artificial Sequence: Synthetic oligonucleotide
ggcccggacuucuguggau

SEQ ID NO: 210443 - RNA, 19 nt, Artificial Sequence
  Description of Artificial Sequence: Synthetic oligonucleotide
cacucucaugagggaacuu

SEQ ID NO: 210444 - RNA, 19 nt, Artificial Sequence
  Description of Artificial Sequence: Synthetic oligonucleotide
ccucgugguaaugccuggu

SEQ ID NO: 210445 - RNA, 19 nt, Artificial Sequence
  Description of Artificial Sequence: Synthetic oligonucleotide
aaauaucccaaaguaaugg

SEQ ID NO: 210446 - RNA, 19 nt, Artificial Sequence
  Description of Artificial Sequence: Synthetic oligonucleotide
ugcacaguacauuugauag

SEQ ID NO: 210447 - RNA, 19 nt, Artificial Sequence
  Description of Artificial Sequence: Synthetic oligonucleotide
ugccauuugacaaaacagg

SEQ ID NO: 210448 - RNA, 19 nt, Artificial Sequence
  Description of Artificial Sequence: Synthetic oligonucleotide
ugcuuguauacucagauac

SEQ ID NO: 210449 - RNA, 19 nt, Artificial Sequence
  Description of Artificial Sequence: Synthetic oligonucleotide
uauacugucagccagccau

SEQ ID NO: 210450 - RNA, 19 nt, Artificial Sequence
  Description of Artificial Sequence: Synthetic oligonucleotide
auaggaaguaauuuacuag

SEQ ID NO: 210451 - RNA, 19 nt, Artificial Sequence
  Description of Artificial Sequence: Synthetic oligonucleotide
aaccuguucacauuucauc

SEQ ID NO: 210452 - RNA, 19 nt, Artificial Sequence
  Description of Artificial Sequence: Synthetic oligonucleotide
ugcaucugaccauugaacg

SEQ ID NO: 210453 - RNA, 19 nt, Artificial Sequence
  Description of Artificial Sequence: Synthetic oligonucleotide
aauucuaagccuucugcug

SEQ ID NO: 210454 - RNA, 19 nt, Artificial Sequence
  Description of Artificial Sequence: Synthetic oligonucleotide
gaucuacuaguucuggugg

SEQ ID NO: 210455 - RNA, 19 nt, Artificial Sequence
  Description of Artificial Sequence: Synthetic oligonucleotide
aauaacgacucgcuaauaa

SEQ ID NO: 210456 - RNA, 19 nt, Artificial Sequence
  Description of Artificial Sequence: Synthetic oligonucleotide
guaucauuagaucauuuug

SEQ ID NO: 210457 - RNA, 19 nt, Artificial Sequence
  Description of Artificial Sequence: Synthetic oligonucleotide
aguuacccaaaauacagug

SEQ ID NO: 210458 - RNA, 19 nt, Artificial Sequence
  Description of Artificial Sequence: Synthetic oligonucleotide
uauccauacaagaaucuac

SEQ ID NO: 210459 - RNA, 19 nt, Artificial Sequence
  Description of Artificial Sequence: Synthetic oligonucleotide
aaacagacgugacucacug

SEQ ID NO: 210460 - RNA, 19 nt, Artificial Sequence
  Description of Artificial Sequence: Synthetic oligonucleotide
ugaauccucccuuagguug

SEQ ID NO: 210461 - RNA, 19 nt, Artificial Sequence
  Description of Artificial Sequence: Synthetic oligonucleotide
uugucaacgaagcuuguca

SEQ ID NO: 210462 - RNA, 19 nt, Artificial Sequence
  Description of Artificial Sequence: Synthetic oligonucleotide
aauaguuuccuaauuuaca

SEQ ID NO: 210463 - RNA, 19 nt, Artificial Sequence
  Description of Artificial Sequence: Synthetic oligonucleotide
ucuucggacguucaguucu

SEQ ID NO: 210464 - RNA, 19 nt, Artificial Sequence
  Description of Artificial Sequence: Synthetic oligonucleotide
acucuguaucauuagauca

SEQ ID NO: 210465 - RNA, 19 nt, Artificial Sequence
  Description of Artificial Sequence: Synthetic oligonucleotide
aaauccuugugucgcuacg

SEQ ID NO: 210466 - RNA, 19 nt, Artificial Sequence
  Description of Artificial Sequence: Synthetic oligonucleotide
ugucgcuacggucugaaug

SEQ ID NO: 210467 - RNA, 19 nt, Artificial Sequence
  Description of Artificial Sequence: Synthetic oligonucleotide
agaucuacuaguucuggug

SEQ ID NO: 210468 - RNA, 19 nt, Artificial Sequence
  Description of Artificial Sequence: Synthetic oligonucleotide
acagacgugacucacugug

SEQ ID NO: 210469 - RNA, 19 nt, Artificial Sequence
  Description of Artificial Sequence: Synthetic oligonucleotide
aggaugaauaacgacucgc

SEQ ID NO: 210470 - RNA, 19 nt, Artificial Sequence
  Description of Artificial Sequence: Synthetic oligonucleotide
caaacuuuaccaaggggag

SEQ ID NO: 210471 - RNA, 19 nt, Artificial Sequence
  Description of Artificial Sequence: Synthetic oligonucleotide
auaccuguccaacuugaac

SEQ ID NO: 210472 - RNA, 19 nt, Artificial Sequence
  Description of Artificial Sequence: Synthetic oligonucleotide
ucugcggucuuacaaacac

SEQ ID NO: 210473 - RNA, 19 nt, Artificial Sequence
  Description of Artificial Sequence: Synthetic oligonucleotide
aucaaacuuuaccaagggg

SEQ ID NO: 210474 - RNA, 19 nt, Artificial Sequence
  Description of Artificial Sequence: Synthetic oligonucleotide
uagguugaaaccuugucaa

SEQ ID NO: 210475 - RNA, 19 nt, Artificial Sequence
  Description of Artificial Sequence: Synthetic oligonucleotide
uugugcaaaucugagcugg

SEQ ID NO: 210476 - RNA, 19 nt, Artificial Sequence
  Description of Artificial Sequence: Synthetic oligonucleotide
uaaaugaggccucuccaug

SEQ ID NO: 210477 - RNA, 19 nt, Artificial Sequence
  Description of Artificial Sequence: Synthetic oligonucleotide
agucgugcccacuuugacc

SEQ ID NO: 210478 - RNA, 19 nt, Artificial Sequence
  Description of Artificial Sequence: Synthetic oligonucleotide
gaggcuugaaaauaacuca

SEQ ID NO: 210479 - RNA, 19 nt, Artificial Sequence
  Description of Artificial Sequence: Synthetic oligonucleotide
aaucguaaacugugggucu

SEQ ID NO: 210480 - RNA, 19 nt, Artificial Sequence
  Description of Artificial Sequence: Synthetic oligonucleotide
ucgucuuaaucugacaugc

SEQ ID NO: 210481 - RNA, 19 nt, Artificial Sequence
  Description of Artificial Sequence: Synthetic oligonucleotide
aacgguuugugcuuggcau

SEQ ID NO: 210482 - RNA, 19 nt, Artificial Sequence
  Description of Artificial Sequence: Synthetic oligonucleotide
augaauaacgacucgcuaa

SEQ ID NO: 210483 - RNA, 19 nt, Artificial Sequence
  Description of Artificial Sequence: Synthetic oligonucleotide
ugaauaacgacucgcuaau

SEQ ID NO: 210484 - RNA, 19 nt, Artificial Sequence
  Description of Artificial Sequence: Synthetic oligonucleotide
uaauuuacuagcugccggu

SEQ ID NO: 210485 - RNA, 19 nt, Artificial Sequence
  Description of Artificial Sequence: Synthetic oligonucleotide
ggucagguaauucuaagcc

SEQ ID NO: 210486 - RNA, 19 nt, Artificial Sequence
  Description of Artificial Sequence: Synthetic oligonucleotide
gaccauugaacguaggguc

SEQ ID NO: 210487 - RNA, 19 nt, Artificial Sequence
  Description of Artificial Sequence: Synthetic oligonucleotide
ugauaggaaguaauuuacu

SEQ ID NO: 210488 - RNA, 19 nt, Artificial Sequence
  Description of Artificial Sequence: Synthetic oligonucleotide
uaacgacucgcuaauaaau

SEQ ID NO: 210489 - RNA, 19 nt, Artificial Sequence
  Description of Artificial Sequence: Synthetic oligonucleotide
uccgaaucguaaacugugg

SEQ ID NO: 210490 - RNA, 19 nt, Artificial Sequence
  Description of Artificial Sequence: Synthetic oligonucleotide
ucagguaauucuaagccuu

SEQ ID NO: 210491 - RNA, 19 nt, Artificial Sequence
  Description of Artificial Sequence: Synthetic oligonucleotide
aacuggauggaaugcagaa

SEQ ID NO: 210492 - RNA, 19 nt, Artificial Sequence
  Description of Artificial Sequence: Synthetic oligonucleotide
cucguugcagcugacaucc

SEQ ID NO: 210493 - RNA, 19 nt, Artificial Sequence
  Description of Artificial Sequence: Synthetic oligonucleotide
ucagauaaccgcuuaucuc

SEQ ID NO: 210494 - RNA, 19 nt, Artificial Sequence
  Description of Artificial Sequence: Synthetic oligonucleotide
uccacauagcuauuuacaa

SEQ ID NO: 210495 - RNA, 19 nt, Artificial Sequence
  Description of Artificial Sequence: Synthetic oligonucleotide
aauuuacuagcugccgguc

SEQ ID NO: 210496 - RNA, 19 nt, Artificial Sequence
  Description of Artificial Sequence: Synthetic oligonucleotide
cugaccauugaacguaggg

SEQ ID NO: 210497 - RNA, 19 nt, Artificial Sequence
  Description of Artificial Sequence: Synthetic oligonucleotide
aacuuuaccaaggggagau

SEQ ID NO: 210498 - RNA, 19 nt, Artificial Sequence
  Description of Artificial Sequence: Synthetic oligonucleotide
gucgcuacggucugaaugc

SEQ ID NO: 210499 - RNA, 19 nt, Artificial Sequence
  Description of Artificial Sequence: Synthetic oligonucleotide
agucgucuuaaucugacau

SEQ ID NO: 210500 - RNA, 19 nt, Artificial Sequence
  Description of Artificial Sequence: Synthetic oligonucleotide
acacucuacuuauacuguc

SEQ ID NO: 210501 - RNA, 19 nt, Artificial Sequence
  Description of Artificial Sequence: Synthetic oligonucleotide
agcacuauauacacucuac

SEQ ID NO: 210502 - RNA, 19 nt, Artificial Sequence
  Description of Artificial Sequence: Synthetic oligonucleotide
aacagucgugcccacuuug

SEQ ID NO: 210503 - RNA, 19 nt, Artificial Sequence
  Description of Artificial Sequence: Synthetic oligonucleotide
aauacuggcucccguuacu

SEQ ID NO: 210504 - RNA, 19 nt, Artificial Sequence
  Description of Artificial Sequence: Synthetic oligonucleotide
uggcugucagacaauaccu

SEQ ID NO: 210505 - RNA, 19 nt, Artificial Sequence
  Description of Artificial Sequence: Synthetic oligonucleotide
acuccuacaugcccaagag

SEQ ID NO: 210506 - RNA, 19 nt, Artificial Sequence
  Description of Artificial Sequence: Synthetic oligonucleotide
uacucuguaucauuagauc

SEQ ID NO: 210507 - RNA, 19 nt, Artificial Sequence
  Description of Artificial Sequence: Synthetic oligonucleotide
uacacucuacuuauacugu

SEQ ID NO: 210508 - RNA, 19 nt, Artificial Sequence
  Description of Artificial Sequence: Synthetic oligonucleotide
ggugcuagaugcuacuuag

SEQ ID NO: 210509 - RNA, 19 nt, Artificial Sequence
  Description of Artificial Sequence: Synthetic oligonucleotide
uuuccuccgaaucguaaac

SEQ ID NO: 210510 - RNA, 19 nt, Artificial Sequence
  Description of Artificial Sequence: Synthetic oligonucleotide
gguugaaaccuugucaacg

SEQ ID NO: 210511 - RNA, 19 nt, Artificial Sequence
  Description of Artificial Sequence: Synthetic oligonucleotide
aauaacucuggggugcgcu

SEQ ID NO: 210512 - RNA, 19 nt, Artificial Sequence
  Description of Artificial Sequence: Synthetic oligonucleotide
accguuaaaacccucucau

SEQ ID NO: 210513 - RNA, 19 nt, Artificial Sequence
  Description of Artificial Sequence: Synthetic oligonucleotide
uaaccgcuuaucuccauug

SEQ ID NO: 210514 - RNA, 19 nt, Artificial Sequence
  Description of Artificial Sequence: Synthetic oligonucleotide
ugugcuacucaguucucug

SEQ ID NO: 210515 - RNA, 19 nt, Artificial Sequence
  Description of Artificial Sequence: Synthetic oligonucleotide
gucuuacaaacaccgaggc

SEQ ID NO: 210516 - RNA, 19 nt, Artificial Sequence
  Description of Artificial Sequence: Synthetic oligonucleotide
aaacgguuugugcuuggca

SEQ ID NO: 210517 - RNA, 19 nt, Artificial Sequence
  Description of Artificial Sequence: Synthetic oligonucleotide
ggugguaaaaccuuaaggu

SEQ ID NO: 210518 - RNA, 19 nt, Artificial Sequence
  Description of Artificial Sequence: Synthetic oligonucleotide
ugacaugcuuguauacuca

SEQ ID NO: 210519 - RNA, 19 nt, Artificial Sequence
  Description of Artificial Sequence: Synthetic oligonucleotide
acggugacguccaauagcg

SEQ ID NO: 210520 - RNA, 19 nt, Artificial Sequence
  Description of Artificial Sequence: Synthetic oligonucleotide
cuccgaaucguaaacugug

SEQ ID NO: 210521 - RNA, 19 nt, Artificial Sequence
  Description of Artificial Sequence: Synthetic oligonucleotide
ugccgcuccagcuaaacac

SEQ ID NO: 210522 - RNA, 19 nt, Artificial Sequence
  Description of Artificial Sequence: Synthetic oligonucleotide
cauuucgaugcucucucgg

SEQ ID NO: 210523 - RNA, 19 nt, Artificial Sequence
  Description of Artificial Sequence: Synthetic oligonucleotide
ugaccauugaacguagggu

SEQ ID NO: 210524 - RNA, 19 nt, Artificial Sequence
  Description of Artificial Sequence: Synthetic oligonucleotide
ucagucgucuuaaucugac

SEQ ID NO: 210525 - RNA, 19 nt, Artificial Sequence
  Description of Artificial Sequence: Synthetic oligonucleotide
auaacgacucgcuaauaaa

SEQ ID NO: 210526 - RNA, 19 nt, Artificial Sequence
  Description of Artificial Sequence: Synthetic oligonucleotide
aaugccgcuccagcuaaac

SEQ ID NO: 210527 - RNA, 19 nt, Artificial Sequence
  Description of Artificial Sequence: Synthetic oligonucleotide
acggucugaaugccgcucc

SEQ ID NO: 210528 - RNA, 19 nt, Artificial Sequence
  Description of Artificial Sequence: Synthetic oligonucleotide
uccuccgaaucguaaacug

SEQ ID NO: 210529 - RNA, 19 nt, Artificial Sequence
  Description of Artificial Sequence: Synthetic oligonucleotide
uggcaacagaccgagggcg

SEQ ID NO: 210530 - RNA, 19 nt, Artificial Sequence
  Description of Artificial Sequence: Synthetic oligonucleotide
ucucaagaaacaucuugaa

SEQ ID NO: 210531 - RNA, 19 nt, Artificial Sequence
  Description of Artificial Sequence: Synthetic oligonucleotide
accgcuuaucuccauuguc

SEQ ID NO: 210532 - RNA, 19 nt, Artificial Sequence
  Description of Artificial Sequence: Synthetic oligonucleotide
agguugaaaccuugucaac

SEQ ID NO: 210533 - RNA, 19 nt, Artificial Sequence
  Description of Artificial Sequence: Synthetic oligonucleotide
uccucccuuagguugaaac

SEQ ID NO: 210534 - RNA, 19 nt, Artificial Sequence
  Description of Artificial Sequence: Synthetic oligonucleotide
ucauuucgaugcucucucg

SEQ ID NO: 210535 - RNA, 19 nt, Artificial Sequence
  Description of Artificial Sequence: Synthetic oligonucleotide
aaauaacucuggggugcgc

SEQ ID NO: 210536 - RNA, 19 nt, Artificial Sequence
  Description of Artificial Sequence: Synthetic oligonucleotide
ggaaguaauuuacuagcug

SEQ ID NO: 210537 - RNA, 19 nt, Artificial Sequence
  Description of Artificial Sequence: Synthetic oligonucleotide
acgccaaguuuucugcacg

SEQ ID NO: 210538 - RNA, 19 nt, Artificial Sequence
  Description of Artificial Sequence: Synthetic oligonucleotide
ggucuuacaaacaccgagg

SEQ ID NO: 210539 - RNA, 19 nt, Artificial Sequence
  Description of Artificial Sequence: Synthetic oligonucleotide
ugcucaauacuucccacuu

SEQ ID NO: 210540 - RNA, 19 nt, Artificial Sequence
  Description of Artificial Sequence: Synthetic oligonucleotide
gucgugcccacuuugacca

SEQ ID NO: 210541 - RNA, 19 nt, Artificial Sequence
  Description of Artificial Sequence: Synthetic oligonucleotide
ugacucacugugaaacggu

SEQ ID NO: 210542 - RNA, 19 nt, Artificial Sequence
  Description of Artificial Sequence: Synthetic oligonucleotide
uuacaaacaccgaggcuuc

SEQ ID NO: 210543 - RNA, 19 nt, Artificial Sequence
  Description of Artificial Sequence: Synthetic oligonucleotide
uuucuucggacguucaguu

SEQ ID NO: 210544 - RNA, 19 nt, Artificial Sequence
  Description of Artificial Sequence: Synthetic oligonucleotide
ugacggugacguccaauag

SEQ ID NO: 210545 - RNA, 19 nt, Artificial Sequence
  Description of Artificial Sequence: Synthetic oligonucleotide
ugggguacaggcucaaaau

SEQ ID NO: 210546 - RNA, 19 nt, Artificial Sequence
  Description of Artificial Sequence: Synthetic oligonucleotide
auagcgcuugaacagucgu

SEQ ID NO: 210547 - RNA, 19 nt, Artificial Sequence
  Description of Artificial Sequence: Synthetic oligonucleotide
ugaaacgguuugugcuugg

SEQ ID NO: 210548 - RNA, 19 nt, Artificial Sequence
  Description of Artificial Sequence: Synthetic oligonucleotide
gaaauccuugugucgcuac

SEQ ID NO: 210549 - RNA, 19 nt, Artificial Sequence
  Description of Artificial Sequence: Synthetic oligonucleotide
auuucuucggacguucagu

SEQ ID NO: 210550 - RNA, 19 nt, Artificial Sequence
  Description of Artificial Sequence: Synthetic oligonucleotide
acgacucgcuaauaaauaa

SEQ ID NO: 210551 - RNA, 19 nt, Artificial Sequence
  Description of Artificial Sequence: Synthetic oligonucleotide
gaauacuggcucccguuac

SEQ ID NO: 210552 - RNA, 19 nt, Artificial Sequence
  Description of Artificial Sequence: Synthetic oligonucleotide
ugucaacgaagcuugucau

SEQ ID NO: 210553 - RNA, 19 nt, Artificial Sequence
  Description of Artificial Sequence: Synthetic oligonucleotide
uggggugcgcucuugauuu

SEQ ID NO: 210554 - RNA, 19 nt, Artificial Sequence
  Description of Artificial Sequence: Synthetic oligonucleotide
aaacuuuaccaaggggaga

SEQ ID NO: 210555 - RNA, 19 nt, Artificial Sequence
  Description of Artificial Sequence: Synthetic oligonucleotide
gucucaagaaacaucuuga

SEQ ID NO: 210556 - RNA, 19 nt, Artificial Sequence
  Description of Artificial Sequence: Synthetic oligonucleotide
ggacguucaguucucguag

SEQ ID NO: 210557 - RNA, 19 nt, Artificial Sequence
  Description of Artificial Sequence: Synthetic oligonucleotide
guaacagggacaagagggc

SEQ ID NO: 210558 - RNA, 19 nt, Artificial Sequence
  Description of Artificial Sequence: Synthetic oligonucleotide
ucucugcggucuuacaaac

SEQ ID NO: 210559 - RNA, 19 nt, Artificial Sequence
  Description of Artificial Sequence: Synthetic oligonucleotide
gaugaauaacgacucgcua

SEQ ID NO: 210560 - RNA, 19 nt, Artificial Sequence
  Description of Artificial Sequence: Synthetic oligonucleotide
uucugcacgcuuccaagaa

SEQ ID NO: 210561 - RNA, 19 nt, Artificial Sequence
  Description of Artificial Sequence: Synthetic oligonucleotide
caggccgugaguuggggag

SEQ ID NO: 210562 - RNA, 19 nt, Artificial Sequence
  Description of Artificial Sequence: Synthetic oligonucleotide
gugguaaaaccuuaaggua

SEQ ID NO: 210563 - RNA, 19 nt, Artificial Sequence
  Description of Artificial Sequence: Synthetic oligonucleotide
ucucagauaaccgcuuauc

SEQ ID NO: 210564 - RNA, 19 nt, Artificial Sequence
  Description of Artificial Sequence: Synthetic oligonucleotide
aaccgcuuaucuccauugu

SEQ ID NO: 210565 - RNA, 19 nt, Artificial Sequence
  Description of Artificial Sequence: Synthetic oligonucleotide
gcugugaucucguugcagc

SEQ ID NO: 210566 - RNA, 19 nt, Artificial Sequence
  Description of Artificial Sequence: Synthetic oligonucleotide
cuuacaaacaccgaggcuu

SEQ ID NO: 210567 - RNA, 19 nt, Artificial Sequence
  Description of Artificial Sequence: Synthetic oligonucleotide
uugaaaccuugucaacgaa

SEQ ID NO: 210568 - RNA, 19 nt, Artificial Sequence
  Description of Artificial Sequence: Synthetic oligonucleotide
uggagacgucuccagcugc

SEQ ID NO: 210569 - RNA, 19 nt, Artificial Sequence
  Description of Artificial Sequence: Synthetic oligonucleotide
guaauuucuucggacguuc

SEQ ID NO: 210570 - RNA, 19 nt, Artificial Sequence
  Description of Artificial Sequence: Synthetic oligonucleotide
acguucaguucucguagag

SEQ ID NO: 210571 - RNA, 19 nt, Artificial Sequence
  Description of Artificial Sequence: Synthetic oligonucleotide
agcucuaaaagguccugaa

SEQ ID NO: 210572 - RNA, 19 nt, Artificial Sequence
  Description of Artificial Sequence: Synthetic oligonucleotide
ugugaucucguugcagcug

SEQ ID NO: 210573 - RNA, 19 nt, Artificial Sequence
  Description of Artificial Sequence: Synthetic oligonucleotide
uagaugcuacuuaguuacc

SEQ ID NO: 210574 - RNA, 19 nt, Artificial Sequence
  Description of Artificial Sequence: Synthetic oligonucleotide
aacgacucgcuaauaaaua

SEQ ID NO: 210575 - RNA, 19 nt, Artificial Sequence
  Description of Artificial Sequence: Synthetic oligonucleotide
uggguagagucugagccca

SEQ ID NO: 210576 - RNA, 19 nt, Artificial Sequence
  Description of Artificial Sequence: Synthetic oligonucleotide
aucuacuaguucugguggu

SEQ ID NO: 210577 - RNA, 19 nt, Artificial Sequence
  Description of Artificial Sequence: Synthetic oligonucleotide
gacucgcuaauaaauaaua

SEQ ID NO: 210578 - RNA, 19 nt, Artificial Sequence
  Description of Artificial Sequence: Synthetic oligonucleotide
aggaaguaauuuacuagcu

SEQ ID NO: 210579 - RNA, 19 nt, Artificial Sequence
  Description of Artificial Sequence: Synthetic oligonucleotide
uucuacaugcugguguaaa

SEQ ID NO: 210580 - RNA, 19 nt, Artificial Sequence
  Description of Artificial Sequence: Synthetic oligonucleotide
gggucagguaauucuaagc

SEQ ID NO: 210581 - RNA, 19 nt, Artificial Sequence
  Description of Artificial Sequence: Synthetic oligonucleotide
auacuggcucccguuacuc

SEQ ID NO: 210582 - RNA, 19 nt, Artificial Sequence
  Description of Artificial Sequence: Synthetic oligonucleotide
uucuggugguaaaaccuua

SEQ ID NO: 210583 - RNA, 19 nt, Artificial Sequence
  Description of Artificial Sequence: Synthetic oligonucleotide
cuacuuauacugucagcca

SEQ ID NO: 210584 - RNA, 19 nt, Artificial Sequence
  Description of Artificial Sequence: Synthetic oligonucleotide
ccugaaauccuugugucgc

SEQ ID NO: 210585 - RNA, 19 nt, Artificial Sequence
  Description of Artificial Sequence: Synthetic oligonucleotide
caauagcgcuugaacaguc

SEQ ID NO: 210586 - RNA, 19 nt, Artificial Sequence
  Description of Artificial Sequence: Synthetic oligonucleotide
cugugggucuauagauucc

SEQ ID NO: 210587 - RNA, 19 nt, Artificial Sequence
  Description of Artificial Sequence: Synthetic oligonucleotide
auugaacguagggucaggu

SEQ ID NO: 210588 - RNA, 19 nt, Artificial Sequence
  Description of Artificial Sequence: Synthetic oligonucleotide
ucucucagauaaccgcuua

SEQ ID NO: 210589 - RNA, 19 nt, Artificial Sequence
  Description of Artificial Sequence: Synthetic oligonucleotide
cacucuacuuauacuguca

SEQ ID NO: 210590 - RNA, 19 nt, Artificial Sequence
  Description of Artificial Sequence: Synthetic oligonucleotide
uugaacguagggucaggua

SEQ ID NO: 210591 - RNA, 19 nt, Artificial Sequence
  Description of Artificial Sequence: Synthetic oligonucleotide
gaaacgguuugugcuuggc

SEQ ID NO: 210592 - RNA, 19 nt, Artificial Sequence
  Description of Artificial Sequence: Synthetic oligonucleotide
acaagagggcugcuggaau

SEQ ID NO: 210593 - RNA, 19 nt, Artificial Sequence
  Description of Artificial Sequence: Synthetic oligonucleotide
cugcggucuuacaaacacc

SEQ ID NO: 210594 - RNA, 19 nt, Artificial Sequence
  Description of Artificial Sequence: Synthetic oligonucleotide
aacagaccgagggcggaug

SEQ ID NO: 210595 - RNA, 19 nt, Artificial Sequence
  Description of Artificial Sequence: Synthetic oligonucleotide
acucgcuaauaaauaauau

SEQ ID NO: 210596 - RNA, 19 nt, Artificial Sequence
  Description of Artificial Sequence: Synthetic oligonucleotide
guagagucugagcccacca

SEQ ID NO: 210597 - RNA, 19 nt, Artificial Sequence
  Description of Artificial Sequence: Synthetic oligonucleotide
ggaugaaggcgguugaaaa

SEQ ID NO: 210598 - RNA, 19 nt, Artificial Sequence
  Description of Artificial Sequence: Synthetic oligonucleotide
ccuaggucuucaugcaggg

SEQ ID NO: 210599 - RNA, 19 nt, Artificial Sequence
  Description of Artificial Sequence: Synthetic oligonucleotide
gugacggugacguccaaua

SEQ ID NO: 210600 - RNA, 19 nt, Artificial Sequence
  Description of Artificial Sequence: Synthetic oligonucleotide
ccgaaucguaaacuguggg

SEQ ID NO: 210601 - RNA, 19 nt, Artificial Sequence
  Description of Artificial Sequence: Synthetic oligonucleotide
cagagcuuuugugacggug

SEQ ID NO: 210602 - RNA, 19 nt, Artificial Sequence
  Description of Artificial Sequence: Synthetic oligonucleotide
cucagauaaccgcuuaucu

SEQ ID NO: 210603 - RNA, 19 nt, Artificial Sequence
  Description of Artificial Sequence: Synthetic oligonucleotide
ucgggaacgccaaguuuuc

SEQ ID NO: 210604 - RNA, 19 nt, Artificial Sequence
  Description of Artificial Sequence: Synthetic oligonucleotide
gacguucaguucucguaga

SEQ ID NO: 210605 - RNA, 19 nt, Artificial Sequence
  Description of Artificial Sequence: Synthetic oligonucleotide
uucggacguucaguucucg

SEQ ID NO: 210606 - RNA, 19 nt, Artificial Sequence
  Description of Artificial Sequence: Synthetic oligonucleotide
ugugucgcuacggucugaa

SEQ ID NO: 210607 - RNA, 19 nt, Artificial Sequence
  Description of Artificial Sequence: Synthetic oligonucleotide
uucuucggacguucaguuc

SEQ ID NO: 210608 - RNA, 19 nt, Artificial Sequence
  Description of Artificial Sequence: Synthetic oligonucleotide
gugcaguacaagaaaagua

SEQ ID NO: 210609 - RNA, 19 nt, Artificial Sequence
  Description of Artificial Sequence: Synthetic oligonucleotide
caauacuucccacuucucu

SEQ ID NO: 210610 - RNA, 19 nt, Artificial Sequence
  Description of Artificial Sequence: Synthetic oligonucleotide
gagaucuacuaguucuggu

SEQ ID NO: 210611 - RNA, 19 nt, Artificial Sequence
  Description of Artificial Sequence: Synthetic oligonucleotide
cucccguuacucuguauca

SEQ ID NO: 210612 - RNA, 19 nt, Artificial Sequence
  Description of Artificial Sequence: Synthetic oligonucleotide
ucggacguucaguucucgu

SEQ ID NO: 210613 - RNA, 19 nt, Artificial Sequence
  Description of Artificial Sequence: Synthetic oligonucleotide
gcuacuuaguuacccaaaa

SEQ ID NO: 210614 - RNA, 19 nt, Artificial Sequence
  Description of Artificial Sequence: Synthetic oligonucleotide
guuaaaacccucucaucuu

SEQ ID NO: 210615 - RNA, 19 nt, Artificial Sequence
  Description of Artificial Sequence: Synthetic oligonucleotide
gcucccguuacucuguauc

SEQ ID NO: 210616 - RNA, 19 nt, Artificial Sequence
  Description of Artificial Sequence: Synthetic oligonucleotide
aucugaccauugaacguag

SEQ ID NO: 210617 - RNA, 19 nt, Artificial Sequence
  Description of Artificial Sequence: Synthetic oligonucleotide
acguagggucagguaauuc

SEQ ID NO: 210618 - RNA, 19 nt, Artificial Sequence
  Description of Artificial Sequence: Synthetic oligonucleotide
gcuacggucugaaugccgc

SEQ ID NO: 210619 - RNA, 19 nt, Artificial Sequence
  Description of Artificial Sequence: Synthetic oligonucleotide
ggugacguccaauagcgcu

SEQ ID NO: 210620 - RNA, 19 nt, Artificial Sequence
  Description of Artificial Sequence: Synthetic oligonucleotide
caccguuaaaacccucuca

SEQ ID NO: 210621 - RNA, 19 nt, Artificial Sequence
  Description of Artificial Sequence: Synthetic oligonucleotide
caucugaccauugaacgua

SEQ ID NO: 210622 - RNA, 19 nt, Artificial Sequence
  Description of Artificial Sequence: Synthetic oligonucleotide
acagaccgagggcggaugu

SEQ ID NO: 210623 - RNA, 19 nt, Artificial Sequence
  Description of Artificial Sequence: Synthetic oligonucleotide
agauaaccgcuuaucucca

SEQ ID NO: 210624 - RNA, 19 nt, Artificial Sequence
  Description of Artificial Sequence: Synthetic oligonucleotide
auuuuccuccgaaucguaa

SEQ ID NO: 210625 - RNA, 19 nt, Artificial Sequence
  Description of Artificial Sequence: Synthetic oligonucleotide
acgguuugugcuuggcauu

SEQ ID NO: 210626 - RNA, 19 nt, Artificial Sequence
  Description of Artificial Sequence: Synthetic oligonucleotide
cuucggacguucaguucuc

SEQ ID NO: 210627 - RNA, 19 nt, Artificial Sequence
  Description of Artificial Sequence: Synthetic oligonucleotide
cauggaauuggcaggccgu

SEQ ID NO: 210628 - RNA, 19 nt, Artificial Sequence
  Description of Artificial Sequence: Synthetic oligonucleotide
cucgggaacgccaaguuuu

SEQ ID NO: 210629 - RNA, 19 nt, Artificial Sequence
  Description of Artificial Sequence: Synthetic oligonucleotide
aacguagggucagguaauu

SEQ ID NO: 210630 - RNA, 19 nt, Artificial Sequence
  Description of Artificial Sequence: Synthetic oligonucleotide
cugcacgcuuccaagaagu

SEQ ID NO: 210631 - RNA, 19 nt, Artificial Sequence
  Description of Artificial Sequence: Synthetic oligonucleotide
agcuaaacacacaccguua

SEQ ID NO: 210632 - RNA, 19 nt, Artificial Sequence
  Description of Artificial Sequence: Synthetic oligonucleotide
uacaaacaccgaggcuuca

SEQ ID NO: 210633 - RNA, 19 nt, Artificial Sequence
  Description of Artificial Sequence: Synthetic oligonucleotide
ggcgguugaaaaggcaaug

SEQ ID NO: 210634 - RNA, 19 nt, Artificial Sequence
  Description of Artificial Sequence: Synthetic oligonucleotide
ucccguuacucuguaucau

SEQ ID NO: 210635 - RNA, 19 nt, Artificial Sequence
  Description of Artificial Sequence: Synthetic oligonucleotide
gcgcucuugauuucaguca

SEQ ID NO: 210636 - RNA, 19 nt, Artificial Sequence
  Description of Artificial Sequence: Synthetic oligonucleotide
cacaccguuaaaacccucu

SEQ ID NO: 210637 - RNA, 19 nt, Artificial Sequence
  Description of Artificial Sequence: Synthetic oligonucleotide
cguuaaaacccucucaucu

SEQ ID NO: 210638 - RNA, 19 nt, Artificial Sequence
  Description of Artificial Sequence: Synthetic oligonucleotide
ucgcuacggucugaaugcc

SEQ ID NO: 210639 - RNA, 19 nt, Artificial Sequence
  Description of Artificial Sequence: Synthetic oligonucleotide
aucguaaacugugggucua

SEQ ID NO: 210640 - RNA, 19 nt, Artificial Sequence
  Description of Artificial Sequence: Synthetic oligonucleotide
cacuuugccuuuugugcaa

SEQ ID NO: 210641 - RNA, 19 nt, Artificial Sequence
  Description of Artificial Sequence: Synthetic oligonucleotide
gucagucgucuuaaucuga

SEQ ID NO: 210642 - RNA, 19 nt, Artificial Sequence
  Description of Artificial Sequence: Synthetic oligonucleotide
ucguaaacugugggucuau

SEQ ID NO: 210643 - RNA, 19 nt, Artificial Sequence
  Description of Artificial Sequence: Synthetic oligonucleotide
cucugcggucuuacaaaca

SEQ ID NO: 210644 - RNA, 19 nt, Artificial Sequence
  Description of Artificial Sequence: Synthetic oligonucleotide
ggaugaauaacgacucgcu

SEQ ID NO: 210645 - RNA, 19 nt, Artificial Sequence
  Description of Artificial Sequence: Synthetic oligonucleotide
acacaccguuaaaacccuc

SEQ ID NO: 210646 - RNA, 19 nt, Artificial Sequence
  Description of Artificial Sequence: Synthetic oligonucleotide
cuacuuaguuacccaaaau

SEQ ID NO: 210647 - RNA, 19 nt, Artificial Sequence
  Description of Artificial Sequence: Synthetic oligonucleotide
acagagcuuuugugacggu

SEQ ID NO: 210648 - RNA, 19 nt, Artificial Sequence
  Description of Artificial Sequence: Synthetic oligonucleotide
caguucucguagagacuuc

SEQ ID NO: 210649 - RNA, 19 nt, Artificial Sequence
  Description of Artificial Sequence: Synthetic oligonucleotide
ccggucugaaucccuuucc

SEQ ID NO: 210650 - RNA, 19 nt, Artificial Sequence
  Description of Artificial Sequence: Synthetic oligonucleotide
ggcaaaagaaaaccugauu

SEQ ID NO: 210651 - RNA, 19 nt, Artificial Sequence
  Description of Artificial Sequence: Synthetic oligonucleotide
gaacguagggucagguaau

SEQ ID NO: 210652 - RNA, 19 nt, Artificial Sequence
  Description of Artificial Sequence: Synthetic oligonucleotide
ccguuaaaacccucucauc

SEQ ID NO: 210653 - RNA, 19 nt, Artificial Sequence
  Description of Artificial Sequence: Synthetic oligonucleotide
cagcucuaaaagguccuga

SEQ ID NO: 210654 - RNA, 19 nt, Artificial Sequence
  Description of Artificial Sequence: Synthetic oligonucleotide
gauaaccgcuuaucuccau

SEQ ID NO: 210655 - RNA, 19 nt, Artificial Sequence
  Description of Artificial Sequence: Synthetic oligonucleotide
ggugcgcucuugauuucag

SEQ ID NO: 210656 - RNA, 19 nt, Artificial Sequence
  Description of Artificial Sequence: Synthetic oligonucleotide
ggccaugcugaguuuugga

SEQ ID NO: 210657 - RNA, 19 nt, Artificial Sequence
  Description of Artificial Sequence: Synthetic oligonucleotide
ccgugaguuggggagcagg

SEQ ID NO: 210658 - RNA, 19 nt, Artificial Sequence
  Description of Artificial Sequence: Synthetic oligonucleotide
uugugucgcuacggucuga

SEQ ID NO: 210659 - RNA, 19 nt, Artificial Sequence
  Description of Artificial Sequence: Synthetic oligonucleotide
gccggucugaaucccuuuc

SEQ ID NO: 210660 - RNA, 19 nt, Artificial Sequence
  Description of Artificial Sequence: Synthetic oligonucleotide
agagagggcuuggucucau

SEQ ID NO: 210661 - RNA, 19 nt, Artificial Sequence
  Description of Artificial Sequence: Synthetic oligonucleotide
cagaccgagggcggaugug

SEQ ID NO: 210662 - RNA, 19 nt, Artificial Sequence
  Description of Artificial Sequence: Synthetic oligonucleotide
uugugacggugacguccaa

SEQ ID NO: 210663 - RNA, 19 nt, Artificial Sequence
  Description of Artificial Sequence: Synthetic oligonucleotide
gacguccaauagcgcuuga

SEQ ID NO: 210664 - RNA, 19 nt, Artificial Sequence
  Description of Artificial Sequence: Synthetic oligonucleotide
cucucagauaaccgcuuau

SEQ ID NO: 210665 - RNA, 19 nt, Artificial Sequence
  Description of Artificial Sequence: Synthetic oligonucleotide
gcuuguauacucagauacu

SEQ ID NO: 210666 - RNA, 19 nt, Artificial Sequence
  Description of Artificial Sequence: Synthetic oligonucleotide
cgcuacggucugaaugccg

SEQ ID NO: 210667 - RNA, 19 nt, Artificial Sequence
  Description of Artificial Sequence: Synthetic oligonucleotide
ggcaggccgugaguugggg

SEQ ID NO: 210668 - RNA, 19 nt, Artificial Sequence
  Description of Artificial Sequence: Synthetic oligonucleotide
ccagcucuaaaagguccug

SEQ ID NO: 210669 - RNA, 19 nt, Artificial Sequence
  Description of Artificial Sequence: Synthetic oligonucleotide
cgaaucguaaacugugggu

SEQ ID NO: 210670 - RNA, 19 nt, Artificial Sequence
  Description of Artificial Sequence: Synthetic oligonucleotide
gugacguccaauagcgcuu

SEQ ID NO: 210671 - RNA, 19 nt, Artificial Sequence
  Description of Artificial Sequence: Synthetic oligonucleotide
cuggcucccguuacucugu

SEQ ID NO: 210672 - RNA, 19 nt, Artificial Sequence
  Description of Artificial Sequence: Synthetic oligonucleotide
gguaauuucuucggacguu

SEQ ID NO: 210673 - RNA, 19 nt, Artificial Sequence
  Description of Artificial Sequence: Synthetic oligonucleotide
ggaauguagggaacuggau

SEQ ID NO: 210674 - RNA, 19 nt, Artificial Sequence
  Description of Artificial Sequence: Synthetic oligonucleotide
cuacggucugaaugccgcu

SEQ ID NO: 210675 - RNA, 19 nt, Artificial Sequence
  Description of Artificial Sequence: Synthetic oligonucleotide
cgagggcggaugugguugg

SEQ ID NO: 210676 - RNA, 19 nt, Artificial Sequence
  Description of Artificial Sequence: Synthetic oligonucleotide
gcaggccgugaguugggga

SEQ ID NO: 210677 - RNA, 19 nt, Artificial Sequence
  Description of Artificial Sequence: Synthetic oligonucleotide
cagagagggcuuggucuca

SEQ ID NO: 210678 - RNA, 19 nt, Artificial Sequence
  Description of Artificial Sequence: Synthetic oligonucleotide
ccuuagguugaaaccuugu

SEQ ID NO: 210679 - RNA, 19 nt, Artificial Sequence
  Description of Artificial Sequence: Synthetic oligonucleotide
gggugcgcucuugauuuca

SEQ ID NO: 210680 - RNA, 19 nt, Artificial Sequence
  Description of Artificial Sequence: Synthetic oligonucleotide
gaaugccgcuccagcuaaa

SEQ ID NO: 210681 - RNA, 19 nt, Artificial Sequence
  Description of Artificial Sequence: Synthetic oligonucleotide
cggacguucaguucucgua

SEQ ID NO: 210682 - RNA, 19 nt, Artificial Sequence
  Description of Artificial Sequence: Synthetic oligonucleotide
ccucauuucgaugcucucu

SEQ ID NO: 210683 - RNA, 19 nt, Artificial Sequence
  Description of Artificial Sequence: Synthetic oligonucleotide
cguucaguucucguagaga

SEQ ID NO: 210684 - RNA, 19 nt, Artificial Sequence
  Description of Artificial Sequence: Synthetic oligonucleotide
ccaauagcgcuugaacagu

SEQ ID NO: 210685 - RNA, 19 nt, Artificial Sequence
  Description of Artificial Sequence: Synthetic oligonucleotide
gcggucuuacaaacaccga

SEQ ID NO: 210686 - RNA, 19 nt, Artificial Sequence
  Description of Artificial Sequence: Synthetic oligonucleotide
cggugacguccaauagcgc

SEQ ID NO: 210687 - RNA, 19 nt, Artificial Sequence
  Description of Artificial Sequence: Synthetic oligonucleotide
ccgaggcuucaagccaaag

SEQ ID NO: 210688 - RNA, 19 nt, Artificial Sequence
  Description of Artificial Sequence: Synthetic oligonucleotide
ggguagagucugagcccac

SEQ ID NO: 210689 - RNA, 19 nt, Artificial Sequence
  Description of Artificial Sequence: Synthetic oligonucleotide
ccauggcguggagguagag

SEQ ID NO: 210690 - RNA, 19 nt, Artificial Sequence
  Description of Artificial Sequence: Synthetic oligonucleotide
gugucgcuacggucugaau

SEQ ID NO: 210691 - RNA, 19 nt, Artificial Sequence
  Description of Artificial Sequence: Synthetic oligonucleotide
caacagaccgagggcggau

SEQ ID NO: 210692 - RNA, 19 nt, Artificial Sequence
  Description of Artificial Sequence: Synthetic oligonucleotide
cccguuacucuguaucauu

SEQ ID NO: 210693 - RNA, 19 nt, Artificial Sequence
  Description of Artificial Sequence: Synthetic oligonucleotide
cacguguuucuugcuuaau

SEQ ID NO: 210694 - RNA, 19 nt, Artificial Sequence
  Description of Artificial Sequence: Synthetic oligonucleotide
gccgugaguuggggagcag

SEQ ID NO: 210695 - RNA, 19 nt, Artificial Sequence
  Description of Artificial Sequence: Synthetic oligonucleotide
ccuugucaacgaagcuugu

SEQ ID NO: 210696 - RNA, 19 nt, Artificial Sequence
  Description of Artificial Sequence: Synthetic oligonucleotide
ggcucccguuacucuguau

SEQ ID NO: 210697 - RNA, 19 nt, Artificial Sequence
  Description of Artificial Sequence: Synthetic oligonucleotide
cgggaacgccaaguuuucu

SEQ ID NO: 210698 - RNA, 19 nt, Artificial Sequence
  Description of Artificial Sequence: Synthetic oligonucleotide
aaugacguugaguuggucg

SEQ ID NO: 210699 - RNA, 19 nt, Artificial Sequence
  Description of Artificial Sequence: Synthetic oligonucleotide
gaggacauaacacaaagcc

SEQ ID NO: 210700 - RNA, 19 nt, Artificial Sequence
  Description of Artificial Sequence: Synthetic oligonucleotide
guagaagcgaguuacauag

SEQ ID NO: 210701 - RNA, 19 nt, Artificial Sequence
  Description of Artificial Sequence: Synthetic oligonucleotide
aaaucucgcacucaucugg

SEQ ID NO: 210702 - RNA, 19 nt, Artificial Sequence
  Description of Artificial Sequence: Synthetic oligonucleotide
acaaagaaggaccagucac

SEQ ID NO: 210703 - RNA, 19 nt, Artificial Sequence
  Description of Artificial Sequence: Synthetic oligonucleotide
aaagccgcaacccagcaag

SEQ ID NO: 210704 - RNA, 19 nt, Artificial Sequence
  Description of Artificial Sequence: Synthetic oligonucleotide
uucuuaucuaugcagaucu

SEQ ID NO: 210705 - RNA, 19 nt, Artificial Sequence
  Description of Artificial Sequence: Synthetic oligonucleotide
uggaacucggaauaggugg

SEQ ID NO: 210706 - RNA, 19 nt, Artificial Sequence
  Description of Artificial Sequence: Synthetic oligonucleotide
uuaucuaugcagaucuggg

SEQ ID NO: 210707 - RNA, 19 nt, Artificial Sequence
  Description of Artificial Sequence: Synthetic oligonucleotide
aguuacauagcucagggca

SEQ ID NO: 210708 - RNA, 19 nt, Artificial Sequence
  Description of Artificial Sequence: Synthetic oligonucleotide
aaaguguguccccaugcgc

SEQ ID NO: 210709 - RNA, 19 nt, Artificial Sequence
  Description of Artificial Sequence: Synthetic oligonucleotide
ugucugguaaaacacacca

SEQ ID NO: 210710 - RNA, 19 nt, Artificial Sequence
  Description of Artificial Sequence: Synthetic oligonucleotide
ucuaaaagccgcaacccag

SEQ ID NO: 210711 - RNA, 19 nt, Artificial Sequence
  Description of Artificial Sequence: Synthetic oligonucleotide
gauauagacaggaacucgg

SEQ ID NO: 210712 - RNA, 19 nt, Artificial Sequence
  Description of Artificial Sequence: Synthetic oligonucleotide
uggacaaaucaagagaggg

SEQ ID NO: 210713 - RNA, 19 nt, Artificial Sequence
  Description of Artificial Sequence: Synthetic oligonucleotide
agcaucguugaugaaaucc

SEQ ID NO: 210714 - RNA, 19 nt, Artificial Sequence
  Description of Artificial Sequence: Synthetic oligonucleotide
aagcgaguuacauagcuca

SEQ ID NO: 210715 - RNA, 19 nt, Artificial Sequence
  Description of Artificial Sequence: Synthetic oligonucleotide
aagaggaguggccuccucc

SEQ ID NO: 210716 - RNA, 19 nt, Artificial Sequence
  Description of Artificial Sequence: Synthetic oligonucleotide
uucacugugaguguggaag

SEQ ID NO: 210717 - RNA, 19 nt, Artificial Sequence
  Description of Artificial Sequence: Synthetic oligonucleotide
caugaugauauccaaaauc

SEQ ID NO: 210718 - RNA, 19 nt, Artificial Sequence
  Description of Artificial Sequence: Synthetic oligonucleotide
uuacucuucuaaaagccgc

SEQ ID NO: 210719 - RNA, 19 nt, Artificial Sequence
  Description of Artificial Sequence: Synthetic oligonucleotide
uucccucuaagacaguggg

SEQ ID NO: 210720 - RNA, 19 nt, Artificial Sequence
  Description of Artificial Sequence: Synthetic oligonucleotide
aauccggacacuucuuauc

SEQ ID NO: 210721 - RNA, 19 nt, Artificial Sequence
  Description of Artificial Sequence: Synthetic oligonucleotide
uuggcaaucucgaaguucu

SEQ ID NO: 210722 - RNA, 19 nt, Artificial Sequence
  Description of Artificial Sequence: Synthetic oligonucleotide
acuaccugaaugucugggc

SEQ ID NO: 210723 - RNA, 19 nt, Artificial Sequence
  Description of Artificial Sequence: Synthetic oligonucleotide
augacguugaguuggucgg

SEQ ID NO: 210724 - RNA, 19 nt, Artificial Sequence
  Description of Artificial Sequence: Synthetic oligonucleotide
uggauaaccagggaagccg

SEQ ID NO: 210725 - RNA, 19 nt, Artificial Sequence
  Description of Artificial Sequence: Synthetic oligonucleotide
aaagcuaacuaaaggaggu

SEQ ID NO: 210726 - RNA, 19 nt, Artificial Sequence
  Description of Artificial Sequence: Synthetic oligonucleotide
gaaacuaccugaaugucug

SEQ ID NO: 210727 - RNA, 19 nt, Artificial Sequence
  Description of Artificial Sequence: Synthetic oligonucleotide
ucuaugcagaucugggccg

SEQ ID NO: 210728 - RNA, 19 nt, Artificial Sequence
  Description of Artificial Sequence: Synthetic oligonucleotide
guuguuauccucucccggg

SEQ ID NO: 210729 - RNA, 19 nt, Artificial Sequence
  Description of Artificial Sequence: Synthetic oligonucleotide
accagucacuauuuuaagg

SEQ ID NO: 210730 - RNA, 19 nt, Artificial Sequence
  Description of Artificial Sequence: Synthetic oligonucleotide
agacgaagccucuagccac

SEQ ID NO: 210731 - RNA, 19 nt, Artificial Sequence
  Description of Artificial Sequence: Synthetic oligonucleotide
ugggacaauguucaggaac

SEQ ID NO: 210732 - RNA, 19 nt, Artificial Sequence
  Description of Artificial Sequence: Synthetic oligonucleotide
gguaaaacacaccacgaag

SEQ ID NO: 210733 - RNA, 19 nt, Artificial Sequence
  Description of Artificial Sequence: Synthetic oligonucleotide
acaaagcuaacuaaaggag

SEQ ID NO: 210734 - RNA, 19 nt, Artificial Sequence
  Description of Artificial Sequence: Synthetic oligonucleotide
uccgcauucccucuaagac

SEQ ID NO: 210735 - RNA, 19 nt, Artificial Sequence
  Description of Artificial Sequence: Synthetic oligonucleotide
aaaaucucgcacucaucug

SEQ ID NO: 210736 - RNA, 19 nt, Artificial Sequence
  Description of Artificial Sequence: Synthetic oligonucleotide
cuuaucuaugcagaucugg

SEQ ID NO: 210737 - RNA, 19 nt, Artificial Sequence
  Description of Artificial Sequence: Synthetic oligonucleotide
gaggccacuauacuguacc

SEQ ID NO: 210738 - RNA, 19 nt, Artificial Sequence
  Description of Artificial Sequence: Synthetic oligonucleotide
ucggucacugacaagcacc

SEQ ID NO: 210739 - RNA, 19 nt, Artificial Sequence
  Description of Artificial Sequence: Synthetic oligonucleotide
gauggugugaagauaccag

SEQ ID NO: 210740 - RNA, 19 nt, Artificial Sequence
  Description of Artificial Sequence: Synthetic oligonucleotide
agauuaggggagcaugggg

SEQ ID NO: 210741 - RNA, 19 nt, Artificial Sequence
  Description of Artificial Sequence: Synthetic oligonucleotide
acggauguggggcucauuc

SEQ ID NO: 210742 - RNA, 19 nt, Artificial Sequence
  Description of Artificial Sequence: Synthetic oligonucleotide
uugacggcuucuuugaagu

SEQ ID NO: 210743 - RNA, 19 nt, Artificial Sequence
  Description of Artificial Sequence: Synthetic oligonucleotide
agaagcgaguuacauagcu

SEQ ID NO: 210744 - RNA, 19 nt, Artificial Sequence
  Description of Artificial Sequence: Synthetic oligonucleotide
ugauugggcagguauaauc

SEQ ID NO: 210745 - RNA, 19 nt, Artificial Sequence
  Description of Artificial Sequence: Synthetic oligonucleotide
uucuaaaagccgcaaccca

SEQ ID NO: 210746 - RNA, 19 nt, Artificial Sequence
  Description of Artificial Sequence: Synthetic oligonucleotide
acuaaaggaggucuugaca

SEQ ID NO: 210747 - RNA, 19 nt, Artificial Sequence
  Description of Artificial Sequence: Synthetic oligonucleotide
accucuguauccuuuaggu

SEQ ID NO: 210748 - RNA, 19 nt, Artificial Sequence
  Description of Artificial Sequence: Synthetic oligonucleotide
gaagauaccaggaacaggu

SEQ ID NO: 210749 - RNA, 19 nt, Artificial Sequence
  Description of Artificial Sequence: Synthetic oligonucleotide
uguacuguaccacgccugc

SEQ ID NO: 210750 - RNA, 19 nt, Artificial Sequence
  Description of Artificial Sequence: Synthetic oligonucleotide
uuaagggcagcgaggagga

SEQ ID NO: 210751 - RNA, 19 nt, Artificial Sequence
  Description of Artificial Sequence: Synthetic oligonucleotide
uguaccacggcuacccgca

SEQ ID NO: 210752 - RNA, 19 nt, Artificial Sequence
  Description of Artificial Sequence: Synthetic oligonucleotide
cuaaaagccgcaacccagc

SEQ ID NO: 210753 - RNA, 19 nt, Artificial Sequence
  Description of Artificial Sequence: Synthetic oligonucleotide
aaucucgcacucaucuggc

SEQ ID NO: 210754 - RNA, 19 nt, Artificial Sequence
  Description of Artificial Sequence: Synthetic oligonucleotide
aacaccugagugugaacug

SEQ ID NO: 210755 - RNA, 19 nt, Artificial Sequence
  Description of Artificial Sequence: Synthetic oligonucleotide
uaguuuggaacucggaaua

SEQ ID NO: 210756 - RNA, 19 nt, Artificial Sequence
  Description of Artificial Sequence: Synthetic oligonucleotide
gaauagguggcgcucacca

SEQ ID NO: 210757 - RNA, 19 nt, Artificial Sequence
  Description of Artificial Sequence: Synthetic oligonucleotide
gaaguuguggcuaccaaca

SEQ ID NO: 210758 - RNA, 19 nt, Artificial Sequence
  Description of Artificial Sequence: Synthetic oligonucleotide
uccuguauggucaguggug

SEQ ID NO: 210759 - RNA, 19 nt, Artificial Sequence
  Description of Artificial Sequence: Synthetic oligonucleotide
aacucggaauagguggcgc

SEQ ID NO: 210760 - RNA, 19 nt, Artificial Sequence
  Description of Artificial Sequence: Synthetic oligonucleotide
agacugucugguaaaacac

SEQ ID NO: 210761 - RNA, 19 nt, Artificial Sequence
  Description of Artificial Sequence: Synthetic oligonucleotide
aaacuaccugaaugucugg

SEQ ID NO: 210762 - RNA, 19 nt, Artificial Sequence
  Description of Artificial Sequence: Synthetic oligonucleotide
cuaccugaaugucugggcc

SEQ ID NO: 210763 - RNA, 19 nt, Artificial Sequence
  Description of Artificial Sequence: Synthetic oligonucleotide
ugguaaaacacaccacgaa

SEQ ID NO: 210764 - RNA, 19 nt, Artificial Sequence
  Description of Artificial Sequence: Synthetic oligonucleotide
ucucgcacucaucuggccc

SEQ ID NO: 210765 - RNA, 19 nt, Artificial Sequence
  Description of Artificial Sequence: Synthetic oligonucleotide
ugugcaucuccgcauuccc

SEQ ID NO: 210766 - RNA, 19 nt, Artificial Sequence
  Description of Artificial Sequence: Synthetic oligonucleotide
ucaauggggccgcaugugc

SEQ ID NO: 210767 - RNA, 19 nt, Artificial Sequence
  Description of Artificial Sequence: Synthetic oligonucleotide
agaggacauaacacaaagc

SEQ ID NO: 210768 - RNA, 19 nt, Artificial Sequence
  Description of Artificial Sequence: Synthetic oligonucleotide
accccuuucacccaucagu

SEQ ID NO: 210769 - RNA, 19 nt, Artificial Sequence
  Description of Artificial Sequence: Synthetic oligonucleotide
cuggcuuagaccagauuag

SEQ ID NO: 210770 - RNA, 19 nt, Artificial Sequence
  Description of Artificial Sequence: Synthetic oligonucleotide
cugagugugaacuguccag

SEQ ID NO: 210771 - RNA, 19 nt, Artificial Sequence
  Description of Artificial Sequence: Synthetic oligonucleotide
gcagguauaauccggacac

SEQ ID NO: 210772 - RNA, 19 nt, Artificial Sequence
  Description of Artificial Sequence: Synthetic oligonucleotide
cuugacggcuucuuugaag

SEQ ID NO: 210773 - RNA, 19 nt, Artificial Sequence
  Description of Artificial Sequence: Synthetic oligonucleotide
uugaguuggucggagcccg

SEQ ID NO: 210774 - RNA, 19 nt, Artificial Sequence
  Description of Artificial Sequence: Synthetic oligonucleotide
uacuccgcggucuugccag

SEQ ID NO: 210775 - RNA, 19 nt, Artificial Sequence
  Description of Artificial Sequence: Synthetic oligonucleotide
uacucuucuaaaagccgca

SEQ ID NO: 210776 - RNA, 19 nt, Artificial Sequence
  Description of Artificial Sequence: Synthetic oligonucleotide
agagcgauucgguuguucu

SEQ ID NO: 210777 - RNA, 19 nt, Artificial Sequence
  Description of Artificial Sequence: Synthetic oligonucleotide
uggaucacccucaucucca

SEQ ID NO: 210778 - RNA, 19 nt, Artificial Sequence
  Description of Artificial Sequence: Synthetic oligonucleotide
gccacuauacuguaccacg

SEQ ID NO: 210779 - RNA, 19 nt, Artificial Sequence
  Description of Artificial Sequence: Synthetic oligonucleotide
aggaacucgggugagccac

SEQ ID NO: 210780 - RNA, 19 nt, Artificial Sequence
  Description of Artificial Sequence: Synthetic oligonucleotide
uccacaucggucacugaca

SEQ ID NO: 210781 - RNA, 19 nt, Artificial Sequence
  Description of Artificial Sequence: Synthetic oligonucleotide
augacaaagcuaacuaaag

SEQ ID NO: 210782 - RNA, 19 nt, Artificial Sequence
  Description of Artificial Sequence: Synthetic oligonucleotide
aagcuaacuaaaggagguc

SEQ ID NO: 210783 - RNA, 19 nt, Artificial Sequence
  Description of Artificial Sequence: Synthetic oligonucleotide
ggugguuucgaaguugugg

SEQ ID NO: 210784 - RNA, 19 nt, Artificial Sequence
  Description of Artificial Sequence: Synthetic oligonucleotide
ggaaccaugacaaagcuaa

SEQ ID NO: 210785 - RNA, 19 nt, Artificial Sequence
  Description of Artificial Sequence: Synthetic oligonucleotide
acauccguagcaucguuga

SEQ ID NO: 210786 - RNA, 19 nt, Artificial Sequence
  Description of Artificial Sequence: Synthetic oligonucleotide
ugacaagcaccugaugaag

SEQ ID NO: 210787 - RNA, 19 nt, Artificial Sequence
  Description of Artificial Sequence: Synthetic oligonucleotide
uguaccacgccugcaugcg

SEQ ID NO: 210788 - RNA, 19 nt, Artificial Sequence
  Description of Artificial Sequence: Synthetic oligonucleotide
cuuucacccaucagucccg

SEQ ID NO: 210789 - RNA, 19 nt, Artificial Sequence
  Description of Artificial Sequence: Synthetic oligonucleotide
auauagacaggaacucggg

SEQ ID NO: 210790 - RNA, 19 nt, Artificial Sequence
  Description of Artificial Sequence: Synthetic oligonucleotide
ugucaauggggccgcaugu

SEQ ID NO: 210791 - RNA, 19 nt, Artificial Sequence
  Description of Artificial Sequence: Synthetic oligonucleotide
gcagccgagaugcagagag

SEQ ID NO: 210792 - RNA, 19 nt, Artificial Sequence
  Description of Artificial Sequence: Synthetic oligonucleotide
auccggacacuucuuaucu

SEQ ID NO: 210793 - RNA, 19 nt, Artificial Sequence
  Description of Artificial Sequence: Synthetic oligonucleotide
uguaaacgugccuccggcc

SEQ ID NO: 210794 - RNA, 19 nt, Artificial Sequence
  Description of Artificial Sequence: Synthetic oligonucleotide
uaaaagccgcaacccagca

SEQ ID NO: 210795 - RNA, 19 nt, Artificial Sequence
  Description of Artificial Sequence: Synthetic oligonucleotide
gugccauuuaucccagggg

SEQ ID NO: 210796 - RNA, 19 nt, Artificial Sequence
  Description of Artificial Sequence: Synthetic oligonucleotide
caauaggacucucuucuug

SEQ ID NO: 210797 - RNA, 19 nt, Artificial Sequence
  Description of Artificial Sequence: Synthetic oligonucleotide
auagcucagggcaucauug

SEQ ID NO: 210798 - RNA, 19 nt, Artificial Sequence
  Description of Artificial Sequence: Synthetic oligonucleotide
gaccagucacuauuuuaag

SEQ ID NO: 210799 - RNA, 19 nt, Artificial Sequence
  Description of Artificial Sequence: Synthetic oligonucleotide
ugagugugaacuguccaga

SEQ ID NO: 210800 - RNA, 19 nt, Artificial Sequence
  Description of Artificial Sequence: Synthetic oligonucleotide
caaaggaucucuggauugg

SEQ ID NO: 210801 - RNA, 19 nt, Artificial Sequence
  Description of Artificial Sequence: Synthetic oligonucleotide
ucuuaucuaugcagaucug

SEQ ID NO: 210802 - RNA, 19 nt, Artificial Sequence
  Description of Artificial Sequence: Synthetic oligonucleotide
aaagaccuuggugguuucg

SEQ ID NO: 210803 - RNA, 19 nt, Artificial Sequence
  Description of Artificial Sequence: Synthetic oligonucleotide
uggcuuagaccagauuagg

SEQ ID NO: 210804 - RNA, 19 nt, Artificial Sequence
  Description of Artificial Sequence: Synthetic oligonucleotide
agcuaacuaaaggaggucu

SEQ ID NO: 210805 - RNA, 19 nt, Artificial Sequence
  Description of Artificial Sequence: Synthetic oligonucleotide
cuguaaacgugccuccggc

SEQ ID NO: 210806 - RNA, 19 nt, Artificial Sequence
  Description of Artificial Sequence: Synthetic oligonucleotide
gacgagcacacggaugugg

SEQ ID NO: 210807 - RNA, 19 nt, Artificial Sequence
  Description of Artificial Sequence: Synthetic oligonucleotide
uggggucccacuaccacca

SEQ ID NO: 210808 - RNA, 19 nt, Artificial Sequence
  Description of Artificial Sequence: Synthetic oligonucleotide
caugcgacugcccuggcuc

SEQ ID NO: 210809 - RNA, 19 nt, Artificial Sequence
  Description of Artificial Sequence: Synthetic oligonucleotide
auagguggcgcucaccaaa

SEQ ID NO: 210810 - RNA, 19 nt, Artificial Sequence
  Description of Artificial Sequence: Synthetic oligonucleotide
cuaacuaaaggaggucuug

SEQ ID NO: 210811 - RNA, 19 nt, Artificial Sequence
  Description of Artificial Sequence: Synthetic oligonucleotide
uacuguaccacgccugcau

SEQ ID NO: 210812 - RNA, 19 nt, Artificial Sequence
  Description of Artificial Sequence: Synthetic oligonucleotide
cuuggcggcaccuggugag

SEQ ID NO: 210813 - RNA, 19 nt, Artificial Sequence
  Description of Artificial Sequence: Synthetic oligonucleotide
ggauauagacaggaacucg

SEQ ID NO: 210814 - RNA, 19 nt, Artificial Sequence
  Description of Artificial Sequence: Synthetic oligonucleotide
agaacaccugagugugaac

SEQ ID NO: 210815 - RNA, 19 nt, Artificial Sequence
  Description of Artificial Sequence: Synthetic oligonucleotide
gaguuacauagcucagggc

SEQ ID NO: 210816 - RNA, 19 nt, Artificial Sequence
  Description of Artificial Sequence: Synthetic oligonucleotide
agauaccaggaacagguua

SEQ ID NO: 210817 - RNA, 19 nt, Artificial Sequence
  Description of Artificial Sequence: Synthetic oligonucleotide
ugagcucaugcaaggauuu

SEQ ID NO: 210818 - RNA, 19 nt, Artificial Sequence
  Description of Artificial Sequence: Synthetic oligonucleotide
cugucugguaaaacacacc

SEQ ID NO: 210819 - RNA, 19 nt, Artificial Sequence
  Description of Artificial Sequence: Synthetic oligonucleotide
guauaauccggacacuucu

SEQ ID NO: 210820 - RNA, 19 nt, Artificial Sequence
  Description of Artificial Sequence: Synthetic oligonucleotide
acguugaguuggucggagc

SEQ ID NO: 210821 - RNA, 19 nt, Artificial Sequence
  Description of Artificial Sequence: Synthetic oligonucleotide
gagcacacggauguggggc

SEQ ID NO: 210822 - RNA, 19 nt, Artificial Sequence
  Description of Artificial Sequence: Synthetic oligonucleotide
uggauugguucugacagaa

SEQ ID NO: 210823 - RNA, 19 nt, Artificial Sequence
  Description of Artificial Sequence: Synthetic oligonucleotide
cucgguaccccuuggcccc

SEQ ID NO: 210824 - RNA, 19 nt, Artificial Sequence
  Description of Artificial Sequence: Synthetic oligonucleotide
aucucgcacucaucuggcc

SEQ ID NO: 210825 - RNA, 19 nt, Artificial Sequence
  Description of Artificial Sequence: Synthetic oligonucleotide
aaaagccgcaacccagcaa

SEQ ID NO: 210826 - RNA, 19 nt, Artificial Sequence
  Description of Artificial Sequence: Synthetic oligonucleotide
agccgagaugcagagagag

SEQ ID NO: 210827 - RNA, 19 nt, Artificial Sequence
  Description of Artificial Sequence: Synthetic oligonucleotide
guaaacgugccuccggcca

SEQ ID NO: 210828 - RNA, 19 nt, Artificial Sequence
  Description of Artificial Sequence: Synthetic oligonucleotide
uauaauccggacacuucuu

SEQ ID NO: 210829 - RNA, 19 nt, Artificial Sequence
  Description of Artificial Sequence: Synthetic oligonucleotide
aggacauaacacaaagcca

SEQ ID NO: 210830 - RNA, 19 nt, Artificial Sequence
  Description of Artificial Sequence: Synthetic oligonucleotide
uaauccggacacuucuuau

SEQ ID NO: 210831 - RNA, 19 nt, Artificial Sequence
  Description of Artificial Sequence: Synthetic oligonucleotide
guuucgaaguuguggcuac

SEQ ID NO: 210832 - RNA, 19 nt, Artificial Sequence
  Description of Artificial Sequence: Synthetic oligonucleotide
auaauccggacacuucuua

SEQ ID NO: 210833 - RNA, 19 nt, Artificial Sequence
  Description of Artificial Sequence: Synthetic oligonucleotide
gguaguuuggaacucggaa

SEQ ID NO: 210834 - RNA, 19 nt, Artificial Sequence
  Description of Artificial Sequence: Synthetic oligonucleotide
aaaugacguugaguugguc

SEQ ID NO: 210835 - RNA, 19 nt, Artificial Sequence
  Description of Artificial Sequence: Synthetic oligonucleotide
cuguacuguaccacgccug

SEQ ID NO: 210836 - RNA, 19 nt, Artificial Sequence
  Description of Artificial Sequence: Synthetic oligonucleotide
aguuuggaacucggaauag

SEQ ID NO: 210837 - RNA, 19 nt, Artificial Sequence
  Description of Artificial Sequence: Synthetic oligonucleotide
cuggccgaggccacuauac

SEQ ID NO: 210838 - RNA, 19 nt, Artificial Sequence
  Description of Artificial Sequence: Synthetic oligonucleotide
uagaagcgaguuacauagc

SEQ ID NO: 210839 - RNA, 19 nt, Artificial Sequence
  Description of Artificial Sequence: Synthetic oligonucleotide
ugaugaaauccaugcuguc

SEQ ID NO: 210840 - RNA, 19 nt, Artificial Sequence
  Description of Artificial Sequence: Synthetic oligonucleotide
gcuggcuuagaccagauua

SEQ ID NO: 210841 - RNA, 19 nt, Artificial Sequence
  Description of Artificial Sequence: Synthetic oligonucleotide
gaacucggaauagguggcg

SEQ ID NO: 210842 - RNA, 19 nt, Artificial Sequence
  Description of Artificial Sequence: Synthetic oligonucleotide
aggcgcuuggcaaagaccu

SEQ ID NO: 210843 - RNA, 19 nt, Artificial Sequence
  Description of Artificial Sequence: Synthetic oligonucleotide
cuucuuaucuaugcagauc

SEQ ID NO: 210844 - RNA, 19 nt, Artificial Sequence
  Description of Artificial Sequence: Synthetic oligonucleotide
uucgaaguuguggcuacca

SEQ ID NO: 210845 - RNA, 19 nt, Artificial Sequence
  Description of Artificial Sequence: Synthetic oligonucleotide
gcaaaggaucucuggauug

SEQ ID NO: 210846 - RNA, 19 nt, Artificial Sequence
  Description of Artificial Sequence: Synthetic oligonucleotide
acuguaccacgccugcaug

SEQ ID NO: 210847 - RNA, 19 nt, Artificial Sequence
  Description of Artificial Sequence: Synthetic oligonucleotide
gauguggggcucauucacc

SEQ ID NO: 210848 - RNA, 19 nt, Artificial Sequence
  Description of Artificial Sequence: Synthetic oligonucleotide
ucuuggcggcaccugguga

SEQ ID NO: 210849 - RNA, 19 nt, Artificial Sequence
  Description of Artificial Sequence: Synthetic oligonucleotide
ucgaaguuguggcuaccaa

SEQ ID NO: 210850 - RNA, 19 nt, Artificial Sequence
  Description of Artificial Sequence: Synthetic oligonucleotide
acaucauacuccgcggucu

SEQ ID NO: 210851 - RNA, 19 nt, Artificial Sequence
  Description of Artificial Sequence: Synthetic oligonucleotide
guaguuuggaacucggaau

SEQ ID NO: 210852 - RNA, 19 nt, Artificial Sequence
  Description of Artificial Sequence: Synthetic oligonucleotide
cacccucaucuccaggugg

SEQ ID NO: 210853 - RNA, 19 nt, Artificial Sequence
  Description of Artificial Sequence: Synthetic oligonucleotide
cuggauaaccagggaagcc

SEQ ID NO: 210854 - RNA, 19 nt, Artificial Sequence
  Description of Artificial Sequence: Synthetic oligonucleotide
gagcgauucgguuguucug

SEQ ID NO: 210855 - RNA, 19 nt, Artificial Sequence
  Description of Artificial Sequence: Synthetic oligonucleotide
gaaaugucguuguuauccu

SEQ ID NO: 210856 - RNA, 19 nt, Artificial Sequence
  Description of Artificial Sequence: Synthetic oligonucleotide
ucggagcccgccacaaagc

SEQ ID NO: 210857 - RNA, 19 nt, Artificial Sequence
  Description of Artificial Sequence: Synthetic oligonucleotide
gacauaacacaaagccaac

SEQ ID NO: 210858 - RNA, 19 nt, Artificial Sequence
  Description of Artificial Sequence: Synthetic oligonucleotide
cuugcgacaacaggccuug

SEQ ID NO: 210859 - RNA, 19 nt, Artificial Sequence
  Description of Artificial Sequence: Synthetic oligonucleotide
ucggauguugggacuccgc

SEQ ID NO: 210860 - RNA, 19 nt, Artificial Sequence
  Description of Artificial Sequence: Synthetic oligonucleotide
cuguaccacggcuacccgc

SEQ ID NO: 210861 - RNA, 19 nt, Artificial Sequence
  Description of Artificial Sequence: Synthetic oligonucleotide
agggagauaccuggccggc

SEQ ID NO: 210862 - RNA, 19 nt, Artificial Sequence
  Description of Artificial Sequence: Synthetic oligonucleotide
gaacaccugagugugaacu

SEQ ID NO: 210863 - RNA, 19 nt, Artificial Sequence
  Description of Artificial Sequence: Synthetic oligonucleotide
gaagcgaguuacauagcuc

SEQ ID NO: 210864 - RNA, 19 nt, Artificial Sequence
  Description of Artificial Sequence: Synthetic oligonucleotide
aggaccagucacuauuuua

SEQ ID NO: 210865 - RNA, 19 nt, Artificial Sequence
  Description of Artificial Sequence: Synthetic oligonucleotide
cucgggugagccacagagg

SEQ ID NO: 210866 - RNA, 19 nt, Artificial Sequence
  Description of Artificial Sequence: Synthetic oligonucleotide
ccagacgaagccucuagcc

SEQ ID NO: 210867 - RNA, 19 nt, Artificial Sequence
  Description of Artificial Sequence: Synthetic oligonucleotide
ugugaacuguccagacgaa

SEQ ID NO: 210868 - RNA, 19 nt, Artificial Sequence
  Description of Artificial Sequence: Synthetic oligonucleotide
guugaguuggucggagccc

SEQ ID NO: 210869 - RNA, 19 nt, Artificial Sequence
  Description of Artificial Sequence: Synthetic oligonucleotide
ugguuucgaaguuguggcu

SEQ ID NO: 210870 - RNA, 19 nt, Artificial Sequence
  Description of Artificial Sequence: Synthetic oligonucleotide
agucacuauuuuaaggcaa

SEQ ID NO: 210871 - RNA, 19 nt, Artificial Sequence
  Description of Artificial Sequence: Synthetic oligonucleotide
uccucuagcccagugccac

SEQ ID NO: 210872 - RNA, 19 nt, Artificial Sequence
  Description of Artificial Sequence: Synthetic oligonucleotide
gacguugaguuggucggag

SEQ ID NO: 210873 - RNA, 19 nt, Artificial Sequence
  Description of Artificial Sequence: Synthetic oligonucleotide
cuaagacagugggacaaug

SEQ ID NO: 210874 - RNA, 19 nt, Artificial Sequence
  Description of Artificial Sequence: Synthetic oligonucleotide
uaaacgugccuccggccau

SEQ ID NO: 210875 - RNA, 19 nt, Artificial Sequence
  Description of Artificial Sequence: Synthetic oligonucleotide
ggcuuagaccagauuaggg

SEQ ID NO: 210876 - RNA, 19 nt, Artificial Sequence
  Description of Artificial Sequence: Synthetic oligonucleotide
cauugacauccguagcauc

SEQ ID NO: 210877 - RNA, 19 nt, Artificial Sequence
  Description of Artificial Sequence: Synthetic oligonucleotide
aacgugccuccggccaucc

SEQ ID NO: 210878 - RNA, 19 nt, Artificial Sequence
  Description of Artificial Sequence: Synthetic oligonucleotide
acucggaauagguggcgcu

SEQ ID NO: 210879 - RNA, 19 nt, Artificial Sequence
  Description of Artificial Sequence: Synthetic oligonucleotide
uucggauguugggacuccg

SEQ ID NO: 210880 - RNA, 19 nt, Artificial Sequence
  Description of Artificial Sequence: Synthetic oligonucleotide
gguggcgcucaccaaaggc

SEQ ID NO: 210881 - RNA, 19 nt, Artificial Sequence
  Description of Artificial Sequence: Synthetic oligonucleotide
agccacuaagggccaggac

SEQ ID NO: 210882 - RNA, 19 nt, Artificial Sequence
  Description of Artificial Sequence: Synthetic oligonucleotide
cugcaugcgacugcccugg

SEQ ID NO: 210883 - RNA, 19 nt, Artificial Sequence
  Description of Artificial Sequence: Synthetic oligonucleotide
ggauguggggcucauucac

SEQ ID NO: 210884 - RNA, 19 nt, Artificial Sequence
  Description of Artificial Sequence: Synthetic oligonucleotide
agguuucccgguagaagcg

SEQ ID NO: 210885 - RNA, 19 nt, Artificial Sequence
  Description of Artificial Sequence: Synthetic oligonucleotide
aaacgugccuccggccauc

SEQ ID NO: 210886 - RNA, 19 nt, Artificial Sequence
  Description of Artificial Sequence: Synthetic oligonucleotide
ggugaaaugucguuguuau

SEQ ID NO: 210887 - RNA, 19 nt, Artificial Sequence
  Description of Artificial Sequence: Synthetic oligonucleotide
aaggaccagucacuauuuu

SEQ ID NO: 210888 - RNA, 19 nt, Artificial Sequence
  Description of Artificial Sequence: Synthetic oligonucleotide
aagccgcaacccagcaagc

SEQ ID NO: 210889 - RNA, 19 nt, Artificial Sequence
  Description of Artificial Sequence: Synthetic oligonucleotide
uugacauccguagcaucgu

SEQ ID NO: 210890 - RNA, 19 nt, Artificial Sequence
  Description of Artificial Sequence: Synthetic oligonucleotide
ggauaaccagggaagccgg

SEQ ID NO: 210891 - RNA, 19 nt, Artificial Sequence
  Description of Artificial Sequence: Synthetic oligonucleotide
ucuugacggcuucuuugaa

SEQ ID NO: 210892 - RNA, 19 nt, Artificial Sequence
  Description of Artificial Sequence: Synthetic oligonucleotide
acggggugaaaugucguug

SEQ ID NO: 210893 - RNA, 19 nt, Artificial Sequence
  Description of Artificial Sequence: Synthetic oligonucleotide
ggucuuuacucuucuaaaa

SEQ ID NO: 210894 - RNA, 19 nt, Artificial Sequence
  Description of Artificial Sequence: Synthetic oligonucleotide
cacaucauacuccgcgguc

SEQ ID NO: 210895 - RNA, 19 nt, Artificial Sequence
  Description of Artificial Sequence: Synthetic oligonucleotide
gcauuucggauguugggac

SEQ ID NO: 210896 - RNA, 19 nt, Artificial Sequence
  Description of Artificial Sequence: Synthetic oligonucleotide
aaaaugcucuuggucuuua

SEQ ID NO: 210897 - RNA, 19 nt, Artificial Sequence
  Description of Artificial Sequence: Synthetic oligonucleotide
cauacuccgcggucuugcc

SEQ ID NO: 210898 - RNA, 19 nt, Artificial Sequence
  Description of Artificial Sequence: Synthetic oligonucleotide
ugggccucgguaccccuug

SEQ ID NO: 210899 - RNA, 19 nt, Artificial Sequence
  Description of Artificial Sequence: Synthetic oligonucleotide
uacauagcucagggcauca

SEQ ID NO: 210900 - RNA, 19 nt, Artificial Sequence
  Description of Artificial Sequence: Synthetic oligonucleotide
ucggaauagguggcgcuca

SEQ ID NO: 210901 - RNA, 19 nt, Artificial Sequence
  Description of Artificial Sequence: Synthetic oligonucleotide
guccaauggggccagccuc

SEQ ID NO: 210902 - RNA, 19 nt, Artificial Sequence
  Description of Artificial Sequence: Synthetic oligonucleotide
ccuguauggucaguggugg

SEQ ID NO: 210903 - RNA, 19 nt, Artificial Sequence
  Description of Artificial Sequence: Synthetic oligonucleotide
uuucggauguugggacucc

SEQ ID NO: 210904 - RNA, 19 nt, Artificial Sequence
  Description of Artificial Sequence: Synthetic oligonucleotide
cacggcuacccgcaccucc

SEQ ID NO: 210905 - RNA, 19 nt, Artificial Sequence
  Description of Artificial Sequence: Synthetic oligonucleotide
agcuguccaagcacgaaga

SEQ ID NO: 210906 - RNA, 19 nt, Artificial Sequence
  Description of Artificial Sequence: Synthetic oligonucleotide
ucuaagacagugggacaau

SEQ ID NO: 210907 - RNA, 19 nt, Artificial Sequence
  Description of Artificial Sequence: Synthetic oligonucleotide
cucuaagacagugggacaa

SEQ ID NO: 210908 - RNA, 19 nt, Artificial Sequence
  Description of Artificial Sequence: Synthetic oligonucleotide
ggugugaagauaccaggaa

SEQ ID NO: 210909 - RNA, 19 nt, Artificial Sequence
  Description of Artificial Sequence: Synthetic oligonucleotide
aggauuugcuucacuguga

SEQ ID NO: 210910 - RNA, 19 nt, Artificial Sequence
  Description of Artificial Sequence: Synthetic oligonucleotide
uuucgaaguuguggcuacc

SEQ ID NO: 210911 - RNA, 19 nt, Artificial Sequence
  Description of Artificial Sequence: Synthetic oligonucleotide
uggccgaggccacuauacu

SEQ ID NO: 210912 - RNA, 19 nt, Artificial Sequence
  Description of Artificial Sequence: Synthetic oligonucleotide
ggaccagucacuauuuuaa

SEQ ID NO: 210913 - RNA, 19 nt, Artificial Sequence
  Description of Artificial Sequence: Synthetic oligonucleotide
gucacuauuuuaaggcaaa

SEQ ID NO: 210914 - RNA, 19 nt, Artificial Sequence
  Description of Artificial Sequence: Synthetic oligonucleotide
ggaacucggaauagguggc

SEQ ID NO: 210915 - RNA, 19 nt, Artificial Sequence
  Description of Artificial Sequence: Synthetic oligonucleotide
gcaaucucgaaguucugaa

SEQ ID NO: 210916 - RNA, 19 nt, Artificial Sequence
  Description of Artificial Sequence: Synthetic oligonucleotide
aguuggucggagcccgcca

SEQ ID NO: 210917 - RNA, 19 nt, Artificial Sequence
  Description of Artificial Sequence: Synthetic oligonucleotide
cucgcacucaucuggccca

SEQ ID NO: 210918 - RNA, 19 nt, Artificial Sequence
  Description of Artificial Sequence: Synthetic oligonucleotide
gcgaguuacauagcucagg

SEQ ID NO: 210919 - RNA, 19 nt, Artificial Sequence
  Description of Artificial Sequence: Synthetic oligonucleotide
guuggucggagcccgccac

SEQ ID NO: 210920 - RNA, 19 nt, Artificial Sequence
  Description of Artificial Sequence: Synthetic oligonucleotide
guuucccgguagaagcgag

SEQ ID NO: 210921 - RNA, 19 nt, Artificial Sequence
  Description of Artificial Sequence: Synthetic oligonucleotide
gucugguaaaacacaccac

SEQ ID NO: 210922 - RNA, 19 nt, Artificial Sequence
  Description of Artificial Sequence: Synthetic oligonucleotide
ugucagccggggaggagaa

SEQ ID NO: 210923 - RNA, 19 nt, Artificial Sequence
  Description of Artificial Sequence: Synthetic oligonucleotide
gggauauagacaggaacuc

SEQ ID NO: 210924 - RNA, 19 nt, Artificial Sequence
  Description of Artificial Sequence: Synthetic oligonucleotide
uuggucggagcccgccaca

SEQ ID NO: 210925 - RNA, 19 nt, Artificial Sequence
  Description of Artificial Sequence: Synthetic oligonucleotide
gugaguguggaagacucaa

SEQ ID NO: 210926 - RNA, 19 nt, Artificial Sequence
  Description of Artificial Sequence: Synthetic oligonucleotide
gcuacccgcaccuccuggg

SEQ ID NO: 210927 - RNA, 19 nt, Artificial Sequence
  Description of Artificial Sequence: Synthetic oligonucleotide
guagcaucguugaugaaau

SEQ ID NO: 210928 - RNA, 19 nt, Artificial Sequence
  Description of Artificial Sequence: Synthetic oligonucleotide
gccuuggcaggaaaugacg

SEQ ID NO: 210929 - RNA, 19 nt, Artificial Sequence
  Description of Artificial Sequence: Synthetic oligonucleotide
ggacaaaucaagagaggga

SEQ ID NO: 210930 - RNA, 19 nt, Artificial Sequence
  Description of Artificial Sequence: Synthetic oligonucleotide
gacuccgcauguccacgug

SEQ ID NO: 210931 - RNA, 19 nt, Artificial Sequence
  Description of Artificial Sequence: Synthetic oligonucleotide
cguugaguuggucggagcc

SEQ ID NO: 210932 - RNA, 19 nt, Artificial Sequence
  Description of Artificial Sequence: Synthetic oligonucleotide
ucuagccacuaagggccag

SEQ ID NO: 210933 - RNA, 19 nt, Artificial Sequence
  Description of Artificial Sequence: Synthetic oligonucleotide
cccgguagaagcgaguuac

SEQ ID NO: 210934 - RNA, 19 nt, Artificial Sequence
  Description of Artificial Sequence: Synthetic oligonucleotide
agcgaguuacauagcucag

SEQ ID NO: 210935 - RNA, 19 nt, Artificial Sequence
  Description of Artificial Sequence: Synthetic oligonucleotide
ggccgaggccacuauacug

SEQ ID NO: 210936 - RNA, 19 nt, Artificial Sequence
  Description of Artificial Sequence: Synthetic oligonucleotide
caauggggccgcaugugca

SEQ ID NO: 210937 - RNA, 19 nt, Artificial Sequence
  Description of Artificial Sequence: Synthetic oligonucleotide
gucaauggggccgcaugug

SEQ ID NO: 210938 - RNA, 19 nt, Artificial Sequence
  Description of Artificial Sequence: Synthetic oligonucleotide
caucgucuagaagcucugc

SEQ ID NO: 210939 - RNA, 19 nt, Artificial Sequence
  Description of Artificial Sequence: Synthetic oligonucleotide
cacccaucagucccggguc

SEQ ID NO: 210940 - RNA, 19 nt, Artificial Sequence
  Description of Artificial Sequence: Synthetic oligonucleotide
ugacguugaguuggucgga

SEQ ID NO: 210941 - RNA, 19 nt, Artificial Sequence
  Description of Artificial Sequence: Synthetic oligonucleotide
caccuggggucccacuacc

SEQ ID NO: 210942 - RNA, 19 nt, Artificial Sequence
  Description of Artificial Sequence: Synthetic oligonucleotide
cacgccugcaugcgacugc

SEQ ID NO: 210943 - RNA, 19 nt, Artificial Sequence
  Description of Artificial Sequence: Synthetic oligonucleotide
cgaaguuguggcuaccaac

SEQ ID NO: 210944 - RNA, 19 nt, Artificial Sequence
  Description of Artificial Sequence: Synthetic oligonucleotide
gaguuggucggagcccgcc

SEQ ID NO: 210945 - RNA, 19 nt, Artificial Sequence
  Description of Artificial Sequence: Synthetic oligonucleotide
cacaucggucacugacaag

SEQ ID NO: 210946 - RNA, 19 nt, Artificial Sequence
  Description of Artificial Sequence: Synthetic oligonucleotide
cucggaauagguggcgcuc

SEQ ID NO: 210947 - RNA, 19 nt, Artificial Sequence
  Description of Artificial Sequence: Synthetic oligonucleotide
gugcacucgcagcaggaga

SEQ ID NO: 210948 - RNA, 19 nt, Artificial Sequence
  Description of Artificial Sequence: Synthetic oligonucleotide
cacugugaguguggaagac

SEQ ID NO: 210949 - RNA, 19 nt, Artificial Sequence
  Description of Artificial Sequence: Synthetic oligonucleotide
guauggucaguggugggaa

SEQ ID NO: 210950 - RNA, 19 nt, Artificial Sequence
  Description of Artificial Sequence: Synthetic oligonucleotide
ccuggauaaccagggaagc

SEQ ID NO: 210951 - RNA, 19 nt, Artificial Sequence
  Description of Artificial Sequence: Synthetic oligonucleotide
caucggucacugacaagca

SEQ ID NO: 210952 - RNA, 19 nt, Artificial Sequence
  Description of Artificial Sequence: Synthetic oligonucleotide
cuggauugguucugacaga

SEQ ID NO: 210953 - RNA, 19 nt, Artificial Sequence
  Description of Artificial Sequence: Synthetic oligonucleotide
agaccagauuaggggagca

SEQ ID NO: 210954 - RNA, 19 nt, Artificial Sequence
  Description of Artificial Sequence: Synthetic oligonucleotide
gccgcaacccagcaagcug

SEQ ID NO: 210955 - RNA, 19 nt, Artificial Sequence
  Description of Artificial Sequence: Synthetic oligonucleotide
uagcaucguugaugaaauc

SEQ ID NO: 210956 - RNA, 19 nt, Artificial Sequence
  Description of Artificial Sequence: Synthetic oligonucleotide
gccucgguaccccuuggcc

SEQ ID NO: 210957 - RNA, 19 nt, Artificial Sequence
  Description of Artificial Sequence: Synthetic oligonucleotide
uggcuguugcuggccgagg

SEQ ID NO: 210958 - RNA, 19 nt, Artificial Sequence
  Description of Artificial Sequence: Synthetic oligonucleotide
cggggaaaccuucugugcc

SEQ ID NO: 210959 - RNA, 19 nt, Artificial Sequence
  Description of Artificial Sequence: Synthetic oligonucleotide
ggcaaucucgaaguucuga

SEQ ID NO: 210960 - RNA, 19 nt, Artificial Sequence
  Description of Artificial Sequence: Synthetic oligonucleotide
ccgaggucccucuuucacc

SEQ ID NO: 210961 - RNA, 19 nt, Artificial Sequence
  Description of Artificial Sequence: Synthetic oligonucleotide
guuacauagcucagggcau

SEQ ID NO: 210962 - RNA, 19 nt, Artificial Sequence
  Description of Artificial Sequence: Synthetic oligonucleotide
ggccuugcgacaacaggcc

SEQ ID NO: 210963 - RNA, 19 nt, Artificial Sequence
  Description of Artificial Sequence: Synthetic oligonucleotide
acccggaucuccagggaug

SEQ ID NO: 210964 - RNA, 19 nt, Artificial Sequence
  Description of Artificial Sequence: Synthetic oligonucleotide
cagcggguccuggagcucc

SEQ ID NO: 210965 - RNA, 19 nt, Artificial Sequence
  Description of Artificial Sequence: Synthetic oligonucleotide
uguugggacuccgcauguc

SEQ ID NO: 210966 - RNA, 19 nt, Artificial Sequence
  Description of Artificial Sequence: Synthetic oligonucleotide
ccggguguacugcagcgcc

SEQ ID NO: 210967 - RNA, 19 nt, Artificial Sequence
  Description of Artificial Sequence: Synthetic oligonucleotide
ccggggaaaccuucugugc

SEQ ID NO: 210968 - RNA, 19 nt, Artificial Sequence
  Description of Artificial Sequence: Synthetic oligonucleotide
ccaugacaaagcuaacuaa

SEQ ID NO: 210969 - RNA, 19 nt, Artificial Sequence
  Description of Artificial Sequence: Synthetic oligonucleotide
ccgccacaaagccaaacac

SEQ ID NO: 210970 - RNA, 19 nt, Artificial Sequence
  Description of Artificial Sequence: Synthetic oligonucleotide
guaccccuuggccccuuug

SEQ ID NO: 210971 - RNA, 19 nt, Artificial Sequence
  Description of Artificial Sequence: Synthetic oligonucleotide
ugacgagcacacggaugug

SEQ ID NO: 210972 - RNA, 19 nt, Artificial Sequence
  Description of Artificial Sequence: Synthetic oligonucleotide
ggucccacuaccaccacaa

SEQ ID NO: 210973 - RNA, 19 nt, Artificial Sequence
  Description of Artificial Sequence: Synthetic oligonucleotide
accacgccugcaugcgacu

SEQ ID NO: 210974 - RNA, 19 nt, Artificial Sequence
  Description of Artificial Sequence: Synthetic oligonucleotide
gguuucgaaguuguggcua

SEQ ID NO: 210975 - RNA, 19 nt, Artificial Sequence
  Description of Artificial Sequence: Synthetic oligonucleotide
agccgcaacccagcaagcu

SEQ ID NO: 210976 - RNA, 19 nt, Artificial Sequence
  Description of Artificial Sequence: Synthetic oligonucleotide
ccggccuugcgacaacagg

SEQ ID NO: 210977 - RNA, 19 nt, Artificial Sequence
  Description of Artificial Sequence: Synthetic oligonucleotide
cauuucggauguugggacu

SEQ ID NO: 210978 - RNA, 19 nt, Artificial Sequence
  Description of Artificial Sequence: Synthetic oligonucleotide
ugcaugcgacugcccuggc

SEQ ID NO: 210979 - RNA, 19 nt, Artificial Sequence
  Description of Artificial Sequence: Synthetic oligonucleotide
ucgcacucaucuggcccag

SEQ ID NO: 210980 - RNA, 19 nt, Artificial Sequence
  Description of Artificial Sequence: Synthetic oligonucleotide
ggaauagguggcgcucacc

SEQ ID NO: 210981 - RNA, 19 nt, Artificial Sequence
  Description of Artificial Sequence: Synthetic oligonucleotide
gggacuccgcauguccacg

SEQ ID NO: 210982 - RNA, 19 nt, Artificial Sequence
  Description of Artificial Sequence: Synthetic oligonucleotide
uggccagcacuguguaguu

SEQ ID NO: 210983 - RNA, 19 nt, Artificial Sequence
  Description of Artificial Sequence: Synthetic oligonucleotide
ggccuuggcaggaaaugac

SEQ ID NO: 210984 - RNA, 19 nt, Artificial Sequence
  Description of Artificial Sequence: Synthetic oligonucleotide
caaguuugaguuggaaaau

SEQ ID NO: 210985 - RNA, 19 nt, Artificial Sequence
  Description of Artificial Sequence: Synthetic oligonucleotide
ggauccguccugccugcug

SEQ ID NO: 210986 - RNA, 19 nt, Artificial Sequence
  Description of Artificial Sequence: Synthetic oligonucleotide
gcggucuugccagugacga

SEQ ID NO: 210987 - RNA, 19 nt, Artificial Sequence
  Description of Artificial Sequence: Synthetic oligonucleotide
uggucggagcccgccacaa

SEQ ID NO: 210988 - RNA, 19 nt, Artificial Sequence
  Description of Artificial Sequence: Synthetic oligonucleotide
ccguccugccugcugacag

SEQ ID NO: 210989 - RNA, 19 nt, Artificial Sequence
  Description of Artificial Sequence: Synthetic oligonucleotide
gccgagaugcagagagagg

SEQ ID NO: 210990 - RNA, 19 nt, Artificial Sequence
  Description of Artificial Sequence: Synthetic oligonucleotide
ggaaaaugcucuuggucuu

SEQ ID NO: 210991 - RNA, 19 nt, Artificial Sequence
  Description of Artificial Sequence: Synthetic oligonucleotide
ccgcauucccucuaagaca

SEQ ID NO: 210992 - RNA, 19 nt, Artificial Sequence
  Description of Artificial Sequence: Synthetic oligonucleotide
guaccacgccugcaugcga

SEQ ID NO: 210993 - RNA, 19 nt, Artificial Sequence
  Description of Artificial Sequence: Synthetic oligonucleotide
uugcgacaacaggccuugg

SEQ ID NO: 210994 - RNA, 19 nt, Artificial Sequence
  Description of Artificial Sequence: Synthetic oligonucleotide
acggcuacccgcaccuccu

SEQ ID NO: 210995 - RNA, 19 nt, Artificial Sequence
  Description of Artificial Sequence: Synthetic oligonucleotide
cagauucacccgggucucc

SEQ ID NO: 210996 - RNA, 19 nt, Artificial Sequence
  Description of Artificial Sequence: Synthetic oligonucleotide
uccguccugccugcugaca

SEQ ID NO: 210997 - RNA, 19 nt, Artificial Sequence
  Description of Artificial Sequence: Synthetic oligonucleotide
caagcacgaagaggauguc

SEQ ID NO: 210998 - RNA, 19 nt, Artificial Sequence
  Description of Artificial Sequence: Synthetic oligonucleotide
ggcaaaggaucucuggauu

SEQ ID NO: 210999 - RNA, 19 nt, Artificial Sequence
  Description of Artificial Sequence: Synthetic oligonucleotide
cagagcguccaucugugau

SEQ ID NO: 211000 - RNA, 19 nt, Artificial Sequence
  Description of Artificial Sequence: Synthetic oligonucleotide
agccggucaaugaccuuga

SEQ ID NO: 211001 - RNA, 19 nt, Artificial Sequence
  Description of Artificial Sequence: Synthetic oligonucleotide
gugucccgcugagugucag

SEQ ID NO: 211002 - RNA, 19 nt, Artificial Sequence
  Description of Artificial Sequence: Synthetic oligonucleotide
ccgcaacccagcaagcuga

SEQ ID NO: 211003 - RNA, 19 nt, Artificial Sequence
  Description of Artificial Sequence: Synthetic oligonucleotide
guacuguaccacgccugca

SEQ ID NO: 211004 - RNA, 19 nt, Artificial Sequence
  Description of Artificial Sequence: Synthetic oligonucleotide
ugugguccucuagcccagu

SEQ ID NO: 211005 - RNA, 19 nt, Artificial Sequence
  Description of Artificial Sequence: Synthetic oligonucleotide
cucgcagcaggagacacau

SEQ ID NO: 211006 - RNA, 19 nt, Artificial Sequence
  Description of Artificial Sequence: Synthetic oligonucleotide
gguuucccgguagaagcga

SEQ ID NO: 211007 - RNA, 19 nt, Artificial Sequence
  Description of Artificial Sequence: Synthetic oligonucleotide
ccgagaugcagagagaggu

SEQ ID NO: 211008 - RNA, 19 nt, Artificial Sequence
  Description of Artificial Sequence: Synthetic oligonucleotide
ggauugguucugacagaac

SEQ ID NO: 211009 - RNA, 19 nt, Artificial Sequence
  Description of Artificial Sequence: Synthetic oligonucleotide
gcaggaaaugacguugagu

SEQ ID NO: 211010 - RNA, 19 nt, Artificial Sequence
  Description of Artificial Sequence: Synthetic oligonucleotide
guaccacggcuacccgcac

SEQ ID NO: 211011 - RNA, 19 nt, Artificial Sequence
  Description of Artificial Sequence: Synthetic oligonucleotide
cucaugcaaggauuugcuu

SEQ ID NO: 211012 - RNA, 19 nt, Artificial Sequence
  Description of Artificial Sequence: Synthetic oligonucleotide
uugcuggccgaggccacua

SEQ ID NO: 211013 - RNA, 19 nt, Artificial Sequence
  Description of Artificial Sequence: Synthetic oligonucleotide
acuccgcggucuugccagu

SEQ ID NO: 211014 - RNA, 19 nt, Artificial Sequence
  Description of Artificial Sequence: Synthetic oligonucleotide
ggauguugggacuccgcau

SEQ ID NO: 211015 - RNA, 19 nt, Artificial Sequence
  Description of Artificial Sequence: Synthetic oligonucleotide
gaugucaauggggccgcau

SEQ ID NO: 211016 - RNA, 19 nt, Artificial Sequence
  Description of Artificial Sequence: Synthetic oligonucleotide
ccucuaagacagugggaca

SEQ ID NO: 211017 - RNA, 19 nt, Artificial Sequence
  Description of Artificial Sequence: Synthetic oligonucleotide
cucuccuguaaacgugccu

SEQ ID NO: 211018 - RNA, 19 nt, Artificial Sequence
  Description of Artificial Sequence: Synthetic oligonucleotide
cagccgagaugcagagaga

SEQ ID NO: 211019 - RNA, 19 nt, Artificial Sequence
  Description of Artificial Sequence: Synthetic oligonucleotide
uggccggccuugcgacaac

SEQ ID NO: 211020 - RNA, 19 nt, Artificial Sequence
  Description of Artificial Sequence: Synthetic oligonucleotide
ccacaucggucacugacaa

SEQ ID NO: 211021 - RNA, 19 nt, Artificial Sequence
  Description of Artificial Sequence: Synthetic oligonucleotide
ggggccgcaugugcacucg

SEQ ID NO: 211022 - RNA, 19 nt, Artificial Sequence
  Description of Artificial Sequence: Synthetic oligonucleotide
gaugccgauggggccuucu

SEQ ID NO: 211023 - RNA, 19 nt, Artificial Sequence
  Description of Artificial Sequence: Synthetic oligonucleotide
gggaaccaugacaaagcua

SEQ ID NO: 211024 - RNA, 19 nt, Artificial Sequence
  Description of Artificial Sequence: Synthetic oligonucleotide
gaccagauuaggggagcau

SEQ ID NO: 211025 - RNA, 19 nt, Artificial Sequence
  Description of Artificial Sequence: Synthetic oligonucleotide
cgccucuccuguaaacgug

SEQ ID NO: 211026 - RNA, 19 nt, Artificial Sequence
  Description of Artificial Sequence: Synthetic oligonucleotide
cuccgcggucuugccagug

SEQ ID NO: 211027 - RNA, 19 nt, Artificial Sequence
  Description of Artificial Sequence: Synthetic oligonucleotide
cucuagcccagugccaccu

SEQ ID NO: 211028 - RNA, 19 nt, Artificial Sequence
  Description of Artificial Sequence: Synthetic oligonucleotide
gucccacuaccaccacaaa

SEQ ID NO: 211029 - RNA, 19 nt, Artificial Sequence
  Description of Artificial Sequence: Synthetic oligonucleotide
ucgguaccccuuggccccu

SEQ ID NO: 211030 - RNA, 19 nt, Artificial Sequence
  Description of Artificial Sequence: Synthetic oligonucleotide
cgucuagaagcucugcaua

SEQ ID NO: 211031 - RNA, 19 nt, Artificial Sequence
  Description of Artificial Sequence: Synthetic oligonucleotide
ccgauggggccuucucuuc

SEQ ID NO: 211032 - RNA, 19 nt, Artificial Sequence
  Description of Artificial Sequence: Synthetic oligonucleotide
cacggggugaaaugucguu

SEQ ID NO: 211033 - RNA, 19 nt, Artificial Sequence
  Description of Artificial Sequence: Synthetic oligonucleotide
gcuaacuaaaggaggucuu

SEQ ID NO: 211034 - RNA, 19 nt, Artificial Sequence
  Description of Artificial Sequence: Synthetic oligonucleotide
cgcucagcuaggcgcuugg

SEQ ID NO: 211035 - RNA, 19 nt, Artificial Sequence
  Description of Artificial Sequence: Synthetic oligonucleotide
caucauacuccgcggucuu

SEQ ID NO: 211036 - RNA, 19 nt, Artificial Sequence
  Description of Artificial Sequence: Synthetic oligonucleotide
acgugccuccggccaucca

SEQ ID NO: 211037 - RNA, 19 nt, Artificial Sequence
  Description of Artificial Sequence: Synthetic oligonucleotide
ccgcggucuugccagugac

SEQ ID NO: 211038 - RNA, 19 nt, Artificial Sequence
  Description of Artificial Sequence: Synthetic oligonucleotide
cgaggccacuauacuguac

SEQ ID NO: 211039 - RNA, 19 nt, Artificial Sequence
  Description of Artificial Sequence: Synthetic oligonucleotide
acacggauguggggcucau

SEQ ID NO: 211040 - RNA, 19 nt, Artificial Sequence
  Description of Artificial Sequence: Synthetic oligonucleotide
gugauugggcagguauaau

SEQ ID NO: 211041 - RNA, 19 nt, Artificial Sequence
  Description of Artificial Sequence: Synthetic oligonucleotide
gggccgcaugugcacucgc

SEQ ID NO: 211042 - RNA, 19 nt, Artificial Sequence
  Description of Artificial Sequence: Synthetic oligonucleotide
gcucagcuaggcgcuuggc

SEQ ID NO: 211043 - RNA, 19 nt, Artificial Sequence
  Description of Artificial Sequence: Synthetic oligonucleotide
cccggguguacugcagcgc

SEQ ID NO: 211044 - RNA, 19 nt, Artificial Sequence
  Description of Artificial Sequence: Synthetic oligonucleotide
gccggccuugcgacaacag

SEQ ID NO: 211045 - RNA, 19 nt, Artificial Sequence
  Description of Artificial Sequence: Synthetic oligonucleotide
cagugugcaucuccgcauu

SEQ ID NO: 211046 - RNA, 19 nt, Artificial Sequence
  Description of Artificial Sequence: Synthetic oligonucleotide
gcaucuccgcauucccucu

SEQ ID NO: 211047 - RNA, 19 nt, Artificial Sequence
  Description of Artificial Sequence: Synthetic oligonucleotide
cagguauaauccggacacu

SEQ ID NO: 211048 - RNA, 19 nt, Artificial Sequence
  Description of Artificial Sequence: Synthetic oligonucleotide
ccuggugagguuucccggu

SEQ ID NO: 211049 - RNA, 19 nt, Artificial Sequence
  Description of Artificial Sequence: Synthetic oligonucleotide
gcagcgccucuccuguaaa

SEQ ID NO: 211050 - RNA, 19 nt, Artificial Sequence
  Description of Artificial Sequence: Synthetic oligonucleotide
cauccguagcaucguugau

SEQ ID NO: 211051 - RNA, 19 nt, Artificial Sequence
  Description of Artificial Sequence: Synthetic oligonucleotide
ccgguagaagcgaguuaca

SEQ ID NO: 211052 - RNA, 19 nt, Artificial Sequence
  Description of Artificial Sequence: Synthetic oligonucleotide
ggcgcucaccaaaggccac

SEQ ID NO: 211053 - RNA, 19 nt, Artificial Sequence
  Description of Artificial Sequence: Synthetic oligonucleotide
gggucuccccuugggcccc

SEQ ID NO: 211054 - RNA, 19 nt, Artificial Sequence
  Description of Artificial Sequence: Synthetic oligonucleotide
cccgggucuccaacuucac

SEQ ID NO: 211055 - RNA, 19 nt, Artificial Sequence
  Description of Artificial Sequence: Synthetic oligonucleotide
cggaauagguggcgcucac

SEQ ID NO: 211056 - RNA, 19 nt, Artificial Sequence
  Description of Artificial Sequence: Synthetic oligonucleotide
ggccgcaugugcacucgca

SEQ ID NO: 211057 - RNA, 19 nt, Artificial Sequence
  Description of Artificial Sequence: Synthetic oligonucleotide
ccacgccugcaugcgacug

SEQ ID NO: 211058 - RNA, 19 nt, Artificial Sequence
  Description of Artificial Sequence: Synthetic oligonucleotide
ccacaucauacuccgcggu

SEQ ID NO: 211059 - RNA, 19 nt, Artificial Sequence
  Description of Artificial Sequence: Synthetic oligonucleotide
gccuugcgacaacaggccu

SEQ ID NO: 211060 - RNA, 19 nt, Artificial Sequence
  Description of Artificial Sequence: Synthetic oligonucleotide
gcacucgcagcaggagaca

SEQ ID NO: 211061 - RNA, 19 nt, Artificial Sequence
  Description of Artificial Sequence: Synthetic oligonucleotide
cgacugcccuggcucaaac

SEQ ID NO: 211062 - RNA, 19 nt, Artificial Sequence
  Description of Artificial Sequence: Synthetic oligonucleotide
ggucggagcccgccacaaa

SEQ ID NO: 211063 - RNA, 19 nt, Artificial Sequence
  Description of Artificial Sequence: Synthetic oligonucleotide
gccucaccgucugcuccag

SEQ ID NO: 211064 - RNA, 19 nt, Artificial Sequence
  Description of Artificial Sequence: Synthetic oligonucleotide
ccuugcgacaacaggccuu

SEQ ID NO: 211065 - RNA, 19 nt, Artificial Sequence
  Description of Artificial Sequence: Synthetic oligonucleotide
ggucucccggccucaccgu

SEQ ID NO: 211066 - RNA, 19 nt, Artificial Sequence
  Description of Artificial Sequence: Synthetic oligonucleotide
ggaugucaauggggccgca

SEQ ID NO: 211067 - RNA, 19 nt, Artificial Sequence
  Description of Artificial Sequence: Synthetic oligonucleotide
ccuggucucccggccucac

SEQ ID NO: 211068 - RNA, 19 nt, Artificial Sequence
  Description of Artificial Sequence: Synthetic oligonucleotide
ccccgaggucccucuuuca

SEQ ID NO: 211069 - RNA, 19 nt, Artificial Sequence
  Description of Artificial Sequence: Synthetic oligonucleotide
ccuggccggccuugcgaca

SEQ ID NO: 211070 - RNA, 19 nt, Artificial Sequence
  Description of Artificial Sequence: Synthetic oligonucleotide
gcgacugcccuggcucaaa

SEQ ID NO: 211071 - RNA, 19 nt, Artificial Sequence
  Description of Artificial Sequence: Synthetic oligonucleotide
agcccgccacaaagccaaa

SEQ ID NO: 211072 - RNA, 19 nt, Artificial Sequence
  Description of Artificial Sequence: Synthetic oligonucleotide
cgauucgguuguucugggu

SEQ ID NO: 211073 - RNA, 19 nt, Artificial Sequence
  Description of Artificial Sequence: Synthetic oligonucleotide
gucagccggggaggagaau

SEQ ID NO: 211074 - RNA, 19 nt, Artificial Sequence
  Description of Artificial Sequence: Synthetic oligonucleotide
ccgcugagugucagagcgu

SEQ ID NO: 211075 - RNA, 19 nt, Artificial Sequence
  Description of Artificial Sequence: Synthetic oligonucleotide
ggaugccgauggggccuuc

SEQ ID NO: 211076 - RNA, 19 nt, Artificial Sequence
  Description of Artificial Sequence: Synthetic oligonucleotide
cugagccaucgagcaggau

SEQ ID NO: 211077 - RNA, 19 nt, Artificial Sequence
  Description of Artificial Sequence: Synthetic oligonucleotide
cacggauguggggcucauu

SEQ ID NO: 211078 - RNA, 19 nt, Artificial Sequence
  Description of Artificial Sequence: Synthetic oligonucleotide
cggguguacugcagcgccu

SEQ ID NO: 211079 - RNA, 19 nt, Artificial Sequence
  Description of Artificial Sequence: Synthetic oligonucleotide
gggaugccgauggggccuu

SEQ ID NO: 211080 - RNA, 19 nt, Artificial Sequence
  Description of Artificial Sequence: Synthetic oligonucleotide
gggauccguccugccugcu

SEQ ID NO: 211081 - RNA, 19 nt, Artificial Sequence
  Description of Artificial Sequence: Synthetic oligonucleotide
ccgcaccuccugggaggga

SEQ ID NO: 211082 - RNA, 19 nt, Artificial Sequence
  Description of Artificial Sequence: Synthetic oligonucleotide
aauuguacuguaaagaagg

SEQ ID NO: 211083 - RNA, 19 nt, Artificial Sequence
  Description of Artificial Sequence: Synthetic oligonucleotide
ucuaagacuaauuauuggc

SEQ ID NO: 211084 - RNA, 19 nt, Artificial Sequence
  Description of Artificial Sequence: Synthetic oligonucleotide
cuaauuauuggcuucuagg

SEQ ID NO: 211085 - RNA, 19 nt, Artificial Sequence
  Description of Artificial Sequence: Synthetic oligonucleotide
uuagcuucgaggaauaugu

SEQ ID NO: 211086 - RNA, 19 nt, Artificial Sequence
  Description of Artificial Sequence: Synthetic oligonucleotide
uaauuauuggcuucuaggc

SEQ ID NO: 211087 - RNA, 19 nt, Artificial Sequence
  Description of Artificial Sequence: Synthetic oligonucleotide
aggaauaugugcuagucuc

SEQ ID NO: 211088 - RNA, 19 nt, Artificial Sequence
  Description of Artificial Sequence: Synthetic oligonucleotide
ugugcuagucucaucagcg

SEQ ID NO: 211089 - RNA, 19 nt, Artificial Sequence
  Description of Artificial Sequence: Synthetic oligonucleotide
uggcauaccacugugaggg

SEQ ID NO: 211090 - RNA, 19 nt, Artificial Sequence
  Description of Artificial Sequence: Synthetic oligonucleotide
ucuuuuacgagauuauaga

SEQ ID NO: 211091 - RNA, 19 nt, Artificial Sequence
  Description of Artificial Sequence: Synthetic oligonucleotide
uuuuacgagauuauagacu

SEQ ID NO: 211092 - RNA, 19 nt, Artificial Sequence
  Description of Artificial Sequence: Synthetic oligonucleotide
acauaacaaagucucggcc

SEQ ID NO: 211093 - RNA, 19 nt, Artificial Sequence
  Description of Artificial Sequence: Synthetic oligonucleotide
ucaaauuguacuguaaaga

SEQ ID NO: 211094 - RNA, 19 nt, Artificial Sequence
  Description of Artificial Sequence: Synthetic oligonucleotide
auugggugcccauuuaggc

SEQ ID NO: 211095 - RNA, 19 nt, Artificial Sequence
  Description of Artificial Sequence: Synthetic oligonucleotide
ugaaaaguggcuuccacga

SEQ ID NO: 211096 - RNA, 19 nt, Artificial Sequence
  Description of Artificial Sequence: Synthetic oligonucleotide
gaagucuuagcagagauac

SEQ ID NO: 211097 - RNA, 19 nt, Artificial Sequence
  Description of Artificial Sequence: Synthetic oligonucleotide
uuuacgagauuauagacuu

SEQ ID NO: 211098 - RNA, 19 nt, Artificial Sequence
  Description of Artificial Sequence: Synthetic oligonucleotide
ugaacggcuauccuucacg

SEQ ID NO: 211099 - RNA, 19 nt, Artificial Sequence
  Description of Artificial Sequence: Synthetic oligonucleotide
auaugugcuagucucauca

SEQ ID NO: 211100 - RNA, 19 nt, Artificial Sequence
  Description of Artificial Sequence: Synthetic oligonucleotide
acgcuuuuaguacuuaacg

SEQ ID NO: 211101 - RNA, 19 nt, Artificial Sequence
  Description of Artificial Sequence: Synthetic oligonucleotide
ugaucuaauguuuugcuau

SEQ ID NO: 211102 - RNA, 19 nt, Artificial Sequence
  Description of Artificial Sequence: Synthetic oligonucleotide
accacuauagaaaguaggc

SEQ ID NO: 211103 - RNA, 19 nt, Artificial Sequence
  Description of Artificial Sequence: Synthetic oligonucleotide
agucuuagcagagauacuc

SEQ ID NO: 211104 - RNA, 19 nt, Artificial Sequence
  Description of Artificial Sequence: Synthetic oligonucleotide
guaaaguggccucagaaac

SEQ ID NO: 211105 - RNA, 19 nt, Artificial Sequence
  Description of Artificial Sequence: Synthetic oligonucleotide
uuugaucuaauguuuugcu

SEQ ID NO: 211106 - RNA, 19 nt, Artificial Sequence
  Description of Artificial Sequence: Synthetic oligonucleotide
cauagcuuacacaacaguc

SEQ ID NO: 211107 - RNA, 19 nt, Artificial Sequence
  Description of Artificial Sequence: Synthetic oligonucleotide
uauugggugcccauuuagg

SEQ ID NO: 211108 - RNA, 19 nt, Artificial Sequence
  Description of Artificial Sequence: Synthetic oligonucleotide
cuuuuacgagauuauagac

SEQ ID NO: 211109 - RNA, 19 nt, Artificial Sequence
  Description of Artificial Sequence: Synthetic oligonucleotide
cuugaguucgcucagcgug

SEQ ID NO: 211110 - RNA, 19 nt, Artificial Sequence
  Description of Artificial Sequence: Synthetic oligonucleotide
ucucuuuauuaugagaaug

SEQ ID NO: 211111 - RNA, 19 nt, Artificial Sequence
  Description of Artificial Sequence: Synthetic oligonucleotide
cauaggacugcacacggcg

SEQ ID NO: 211112 - RNA, 19 nt, Artificial Sequence
  Description of Artificial Sequence: Synthetic oligonucleotide
auagaaaguaggcuguugu

SEQ ID NO: 211113 - RNA, 19 nt, Artificial Sequence
  Description of Artificial Sequence: Synthetic oligonucleotide
cuuggauucguugaguuag

SEQ ID NO: 211114 - RNA, 19 nt, Artificial Sequence
  Description of Artificial Sequence: Synthetic oligonucleotide
cuuaacguccucuucugcc

SEQ ID NO: 211115 - RNA, 19 nt, Artificial Sequence
  Description of Artificial Sequence: Synthetic oligonucleotide
acgcagaacagccacagag

SEQ ID NO: 211116 - RNA, 19 nt, Artificial Sequence
  Description of Artificial Sequence: Synthetic oligonucleotide
gauucguugaguuaguggu

SEQ ID NO: 211117 - RNA, 19 nt, Artificial Sequence
  Description of Artificial Sequence: Synthetic oligonucleotide
aguacuuaacgcuuugaga

SEQ ID NO: 211118 - RNA, 19 nt, Artificial Sequence
  Description of Artificial Sequence: Synthetic oligonucleotide
aauaugugcuagucucauc

SEQ ID NO: 211119 - RNA, 19 nt, Artificial Sequence
  Description of Artificial Sequence: Synthetic oligonucleotide
cauugaacgcuuuuaguac

SEQ ID NO: 211120 - RNA, 19 nt, Artificial Sequence
  Description of Artificial Sequence: Synthetic oligonucleotide
agcgaucucacuuacgcug

SEQ ID NO: 211121 - RNA, 19 nt, Artificial Sequence
  Description of Artificial Sequence: Synthetic oligonucleotide
uuaagguaccacaugccac

SEQ ID NO: 211122 - RNA, 19 nt, Artificial Sequence
  Description of Artificial Sequence: Synthetic oligonucleotide
uaugguuguguaaacaguu

SEQ ID NO: 211123 - RNA, 19 nt, Artificial Sequence
  Description of Artificial Sequence: Synthetic oligonucleotide
acuaauuauuggcuucuag

SEQ ID NO: 211124 - RNA, 19 nt, Artificial Sequence
  Description of Artificial Sequence: Synthetic oligonucleotide
ucauguuccgacguacucg

SEQ ID NO: 211125 - RNA, 19 nt, Artificial Sequence
  Description of Artificial Sequence: Synthetic oligonucleotide
aauuuagccuggaugcccg

SEQ ID NO: 211126 - RNA, 19 nt, Artificial Sequence
  Description of Artificial Sequence: Synthetic oligonucleotide
uaagguucucuucaucgug

SEQ ID NO: 211127 - RNA, 19 nt, Artificial Sequence
  Description of Artificial Sequence: Synthetic oligonucleotide
augugcuagucucaucagc

SEQ ID NO: 211128 - RNA, 19 nt, Artificial Sequence
  Description of Artificial Sequence: Synthetic oligonucleotide
uuagcucuucuccacauuc

SEQ ID NO: 211129 - RNA, 19 nt, Artificial Sequence
  Description of Artificial Sequence: Synthetic oligonucleotide
gaccacuauagaaaguagg

SEQ ID NO: 211130 - RNA, 19 nt, Artificial Sequence
  Description of Artificial Sequence: Synthetic oligonucleotide
gauuccacgcagaacagcc

SEQ ID NO: 211131 - RNA, 19 nt, Artificial Sequence
  Description of Artificial Sequence: Synthetic oligonucleotide
ucuaauguuuugcuauggu

SEQ ID NO: 211132 - RNA, 19 nt, Artificial Sequence
  Description of Artificial Sequence: Synthetic oligonucleotide
acuguaucauguuccgacg

SEQ ID NO: 211133 - RNA, 19 nt, Artificial Sequence
  Description of Artificial Sequence: Synthetic oligonucleotide
gagacuguaucauguuccg

SEQ ID NO: 211134 - RNA, 19 nt, Artificial Sequence
  Description of Artificial Sequence: Synthetic oligonucleotide
ugagguauucacuggguga

SEQ ID NO: 211135 - RNA, 19 nt, Artificial Sequence
  Description of Artificial Sequence: Synthetic oligonucleotide
aaccugucgaugcugguca

SEQ ID NO: 211136 - RNA, 19 nt, Artificial Sequence
  Description of Artificial Sequence: Synthetic oligonucleotide
augugaggacaguagcacc

SEQ ID NO: 211137 - RNA, 19 nt, Artificial Sequence
  Description of Artificial Sequence: Synthetic oligonucleotide
uccuugaacuaacaucgcc

SEQ ID NO: 211138 - RNA, 19 nt, Artificial Sequence
  Description of Artificial Sequence: Synthetic oligonucleotide
aguugagaccacuauagaa

SEQ ID NO: 211139 - RNA, 19 nt, Artificial Sequence
  Description of Artificial Sequence: Synthetic oligonucleotide
cuugaacuaacaucgccac

SEQ ID NO: 211140 - RNA, 19 nt, Artificial Sequence
  Description of Artificial Sequence: Synthetic oligonucleotide
cacauaacaaagucucggc

SEQ ID NO: 211141 - RNA, 19 nt, Artificial Sequence
  Description of Artificial Sequence: Synthetic oligonucleotide
aacuaacaucgccaccuuc

SEQ ID NO: 211142 - RNA, 19 nt, Artificial Sequence
  Description of Artificial Sequence: Synthetic oligonucleotide
agaacagccacagagucca

SEQ ID NO: 211143 - RNA, 19 nt, Artificial Sequence
  Description of Artificial Sequence: Synthetic oligonucleotide
uguuuggacccgcuguucc

SEQ ID NO: 211144 - RNA, 19 nt, Artificial Sequence
  Description of Artificial Sequence: Synthetic oligonucleotide
ugcaaguuaaagaggcgcu

SEQ ID NO: 211145 - RNA, 19 nt, Artificial Sequence
  Description of Artificial Sequence: Synthetic oligonucleotide
cacgccauaauagugcagg

SEQ ID NO: 211146 - RNA, 19 nt, Artificial Sequence
  Description of Artificial Sequence: Synthetic oligonucleotide
uaauuuagccuggaugccc

SEQ ID NO: 211147 - RNA, 19 nt, Artificial Sequence
  Description of Artificial Sequence: Synthetic oligonucleotide
cucauaggacugcacacgg

SEQ ID NO: 211148 - RNA, 19 nt, Artificial Sequence
  Description of Artificial Sequence: Synthetic oligonucleotide
accgugaucugcuuaacgu

SEQ ID NO: 211149 - RNA, 19 nt, Artificial Sequence
  Description of Artificial Sequence: Synthetic oligonucleotide
uaaacaguugagaccacua

SEQ ID NO: 211150 - RNA, 19 nt, Artificial Sequence
  Description of Artificial Sequence: Synthetic oligonucleotide
cuuacgcugacccugccac

SEQ ID NO: 211151 - RNA, 19 nt, Artificial Sequence
  Description of Artificial Sequence: Synthetic oligonucleotide
ucgaacauuaggagaagau

SEQ ID NO: 211152 - RNA, 19 nt, Artificial Sequence
  Description of Artificial Sequence: Synthetic oligonucleotide
ucuucaucguguaaacaua

SEQ ID NO: 211153 - RNA, 19 nt, Artificial Sequence
  Description of Artificial Sequence: Synthetic oligonucleotide
ugcuagucucaucagcgca

SEQ ID NO: 211154 - RNA, 19 nt, Artificial Sequence
  Description of Artificial Sequence: Synthetic oligonucleotide
uuugacaagcucuguguuc

SEQ ID NO: 211155 - RNA, 19 nt, Artificial Sequence
  Description of Artificial Sequence: Synthetic oligonucleotide
cauguaaaggugucaggug

SEQ ID NO: 211156 - RNA, 19 nt, Artificial Sequence
  Description of Artificial Sequence: Synthetic oligonucleotide
ggagcgaucucacuuacgc

SEQ ID NO: 211157 - RNA, 19 nt, Artificial Sequence
  Description of Artificial Sequence: Synthetic oligonucleotide
guauugggugcccauuuag

SEQ ID NO: 211158 - RNA, 19 nt, Artificial Sequence
  Description of Artificial Sequence: Synthetic oligonucleotide
gauuugacaagcucugugu

SEQ ID NO: 211159 - RNA, 19 nt, Artificial Sequence
  Description of Artificial Sequence: Synthetic oligonucleotide
auuagcuucgaggaauaug

SEQ ID NO: 211160 - RNA, 19 nt, Artificial Sequence
  Description of Artificial Sequence: Synthetic oligonucleotide
aaugugcgcagcugggcca

SEQ ID NO: 211161 - RNA, 19 nt, Artificial Sequence
  Description of Artificial Sequence: Synthetic oligonucleotide
augagguauucacugggug

SEQ ID NO: 211162 - RNA, 19 nt, Artificial Sequence
  Description of Artificial Sequence: Synthetic oligonucleotide
gaacggcuauccuucacgc

SEQ ID NO: 211163 - RNA, 19 nt, Artificial Sequence
  Description of Artificial Sequence: Synthetic oligonucleotide
uucacgccauaauagugca

SEQ ID NO: 211164 - RNA, 19 nt, Artificial Sequence
  Description of Artificial Sequence: Synthetic oligonucleotide
ggauucguugaguuagugg

SEQ ID NO: 211165 - RNA, 19 nt, Artificial Sequence
  Description of Artificial Sequence: Synthetic oligonucleotide
uuagccuggaugcccgacc

SEQ ID NO: 211166 - RNA, 19 nt, Artificial Sequence
  Description of Artificial Sequence: Synthetic oligonucleotide
uaugugcuagucucaucag

SEQ ID NO: 211167 - RNA, 19 nt, Artificial Sequence
  Description of Artificial Sequence: Synthetic oligonucleotide
ugcccauuuaggcuauccc

SEQ ID NO: 211168 - RNA, 19 nt, Artificial Sequence
  Description of Artificial Sequence: Synthetic oligonucleotide
agucagccgagacuguauc

SEQ ID NO: 211169 - RNA, 19 nt, Artificial Sequence
  Description of Artificial Sequence: Synthetic oligonucleotide
uugaacuaacaucgccacc

SEQ ID NO: 211170 - RNA, 19 nt, Artificial Sequence
  Description of Artificial Sequence: Synthetic oligonucleotide
uucagcgcaaaguuugguc

SEQ ID NO: 211171 - RNA, 19 nt, Artificial Sequence
  Description of Artificial Sequence: Synthetic oligonucleotide
cucguccugagaagaaucc

SEQ ID NO: 211172 - RNA, 19 nt, Artificial Sequence
  Description of Artificial Sequence: Synthetic oligonucleotide
uugaucuaauguuuugcua

SEQ ID NO: 211173 - RNA, 19 nt, Artificial Sequence
  Description of Artificial Sequence: Synthetic oligonucleotide
uaucauguuccgacguacu

SEQ ID NO: 211174 - RNA, 19 nt, Artificial Sequence
  Description of Artificial Sequence: Synthetic oligonucleotide
uuccacgcagaacagccac

SEQ ID NO: 211175 - RNA, 19 nt, Artificial Sequence
  Description of Artificial Sequence: Synthetic oligonucleotide
uguagcaugcggucagaga

SEQ ID NO: 211176 - RNA, 19 nt, Artificial Sequence
  Description of Artificial Sequence: Synthetic oligonucleotide
ugggauaaaggaugucacu

SEQ ID NO: 211177 - RNA, 19 nt, Artificial Sequence
  Description of Artificial Sequence: Synthetic oligonucleotide
accguauccuguagcaugc

SEQ ID NO: 211178 - RNA, 19 nt, Artificial Sequence
  Description of Artificial Sequence: Synthetic oligonucleotide
uucccuuaagguaccacau

SEQ ID NO: 211179 - RNA, 19 nt, Artificial Sequence
  Description of Artificial Sequence: Synthetic oligonucleotide
gagaccacuauagaaagua

SEQ ID NO: 211180 - RNA, 19 nt, Artificial Sequence
  Description of Artificial Sequence: Synthetic oligonucleotide
uguaucauguuccgacgua

SEQ ID NO: 211181 - RNA, 19 nt, Artificial Sequence
  Description of Artificial Sequence: Synthetic oligonucleotide
augcucugaacggcuaucc

SEQ ID NO: 211182 - RNA, 19 nt, Artificial Sequence
  Description of Artificial Sequence: Synthetic oligonucleotide
uggucgagagaaucgcacc

SEQ ID NO: 211183 - RNA, 19 nt, Artificial Sequence
  Description of Artificial Sequence: Synthetic oligonucleotide
uauccuguagcaugcgguc

SEQ ID NO: 211184 - RNA, 19 nt, Artificial Sequence
  Description of Artificial Sequence: Synthetic oligonucleotide
ugggugauuugacaagcuc

SEQ ID NO: 211185 - RNA, 19 nt, Artificial Sequence
  Description of Artificial Sequence: Synthetic oligonucleotide
ucgagagaaucgcaccgug

SEQ ID NO: 211186 - RNA, 19 nt, Artificial Sequence
  Description of Artificial Sequence: Synthetic oligonucleotide
ggucgagagaaucgcaccg

SEQ ID NO: 211187 - RNA, 19 nt, Artificial Sequence
  Description of Artificial Sequence: Synthetic oligonucleotide
ucccuuaagguaccacaug

SEQ ID NO: 211188 - RNA, 19 nt, Artificial Sequence
  Description of Artificial Sequence: Synthetic oligonucleotide
uggauuccacgcagaacag

SEQ ID NO: 211189 - RNA, 19 nt, Artificial Sequence
  Description of Artificial Sequence: Synthetic oligonucleotide
ucacuuacgcugacccugc

SEQ ID NO: 211190 - RNA, 19 nt, Artificial Sequence
  Description of Artificial Sequence: Synthetic oligonucleotide
cuaugugaggacaguagca

SEQ ID NO: 211191 - RNA, 19 nt, Artificial Sequence
  Description of Artificial Sequence: Synthetic oligonucleotide
uguuccgacguacucggua

SEQ ID NO: 211192 - RNA, 19 nt, Artificial Sequence
  Description of Artificial Sequence: Synthetic oligonucleotide
ucuggucgagagaaucgca

SEQ ID NO: 211193 - RNA, 19 nt, Artificial Sequence
  Description of Artificial Sequence: Synthetic oligonucleotide
ucauaggacugcacacggc

SEQ ID NO: 211194 - RNA, 19 nt, Artificial Sequence
  Description of Artificial Sequence: Synthetic oligonucleotide
agacuaauuauuggcuucu

SEQ ID NO: 211195 - RNA, 19 nt, Artificial Sequence
  Description of Artificial Sequence: Synthetic oligonucleotide
cuggcauaccacugugagg

SEQ ID NO: 211196 - RNA, 19 nt, Artificial Sequence
  Description of Artificial Sequence: Synthetic oligonucleotide
ugccuuauccagguaggag

SEQ ID NO: 211197 - RNA, 19 nt, Artificial Sequence
  Description of Artificial Sequence: Synthetic oligonucleotide
ugcuaugguuguguaaaca

SEQ ID NO: 211198 - RNA, 19 nt, Artificial Sequence
  Description of Artificial Sequence: Synthetic oligonucleotide
guugagacuacuucuggcu

SEQ ID NO: 211199 - RNA, 19 nt, Artificial Sequence
  Description of Artificial Sequence: Synthetic oligonucleotide
cagugccgcaggcagaucc

SEQ ID NO: 211200 - RNA, 19 nt, Artificial Sequence
  Description of Artificial Sequence: Synthetic oligonucleotide
uucgaacauuaggagaaga

SEQ ID NO: 211201 - RNA, 19 nt, Artificial Sequence
  Description of Artificial Sequence: Synthetic oligonucleotide
acucuggucgagagaaucg

SEQ ID NO: 211202 - RNA, 19 nt, Artificial Sequence
  Description of Artificial Sequence: Synthetic oligonucleotide
aaucgcaccgugaucugcu

SEQ ID NO: 211203 - RNA, 19 nt, Artificial Sequence
  Description of Artificial Sequence: Synthetic oligonucleotide
augccaccauagcuuacac

SEQ ID NO: 211204 - RNA, 19 nt, Artificial Sequence
  Description of Artificial Sequence: Synthetic oligonucleotide
uucaucguguaaacauaau

SEQ ID NO: 211205 - RNA, 19 nt, Artificial Sequence
  Description of Artificial Sequence: Synthetic oligonucleotide
cuucaucguguaaacauaa

SEQ ID NO: 211206 - RNA, 19 nt, Artificial Sequence
  Description of Artificial Sequence: Synthetic oligonucleotide
uuuggacccgcuguucccc

SEQ ID NO: 211207 - RNA, 19 nt, Artificial Sequence
  Description of Artificial Sequence: Synthetic oligonucleotide
cuuaaucugcacacuggga

SEQ ID NO: 211208 - RNA, 19 nt, Artificial Sequence
  Description of Artificial Sequence: Synthetic oligonucleotide
uugaggcaaguugagacua

SEQ ID NO: 211209 - RNA, 19 nt, Artificial Sequence
  Description of Artificial Sequence: Synthetic oligonucleotide
guggcaugagcaucaugag

SEQ ID NO: 211210 - RNA, 19 nt, Artificial Sequence
  Description of Artificial Sequence: Synthetic oligonucleotide
guaucauguuccgacguac

SEQ ID NO: 211211 - RNA, 19 nt, Artificial Sequence
  Description of Artificial Sequence: Synthetic oligonucleotide
acuggccgaguaugagccc

SEQ ID NO: 211212 - RNA, 19 nt, Artificial Sequence
  Description of Artificial Sequence: Synthetic oligonucleotide
ccacauaacaaagucucgg

SEQ ID NO: 211213 - RNA, 19 nt, Artificial Sequence
  Description of Artificial Sequence: Synthetic oligonucleotide
cuuagcagagauacucuaa

SEQ ID NO: 211214 - RNA, 19 nt, Artificial Sequence
  Description of Artificial Sequence: Synthetic oligonucleotide
cuagucucaucagcgcagg

SEQ ID NO: 211215 - RNA, 19 nt, Artificial Sequence
  Description of Artificial Sequence: Synthetic oligonucleotide
gaacgcuuuuaguacuuaa

SEQ ID NO: 211216 - RNA, 19 nt, Artificial Sequence
  Description of Artificial Sequence: Synthetic oligonucleotide
uucguugaguuagugguuu

SEQ ID NO: 211217 - RNA, 19 nt, Artificial Sequence
  Description of Artificial Sequence: Synthetic oligonucleotide
ucagccgagacuguaucau

SEQ ID NO: 211218 - RNA, 19 nt, Artificial Sequence
  Description of Artificial Sequence: Synthetic oligonucleotide
uagcuucgaggaauaugug

SEQ ID NO: 211219 - RNA, 19 nt, Artificial Sequence
  Description of Artificial Sequence: Synthetic oligonucleotide
uuggauucguugaguuagu

SEQ ID NO: 211220 - RNA, 19 nt, Artificial Sequence
  Description of Artificial Sequence: Synthetic oligonucleotide
guuuggacccgcuguuccc

SEQ ID NO: 211221 - RNA, 19 nt, Artificial Sequence
  Description of Artificial Sequence: Synthetic oligonucleotide
accauagcuuacacaacag

SEQ ID NO: 211222 - RNA, 19 nt, Artificial Sequence
  Description of Artificial Sequence: Synthetic oligonucleotide
agaccacuauagaaaguag

SEQ ID NO: 211223 - RNA, 19 nt, Artificial Sequence
  Description of Artificial Sequence: Synthetic oligonucleotide
ucgcuuacacacuguucca

SEQ ID NO: 211224 - RNA, 19 nt, Artificial Sequence
  Description of Artificial Sequence: Synthetic oligonucleotide
ucugaacggcuauccuuca

SEQ ID NO: 211225 - RNA, 19 nt, Artificial Sequence
  Description of Artificial Sequence: Synthetic oligonucleotide
uggauucguugaguuagug

SEQ ID NO: 211226 - RNA, 19 nt, Artificial Sequence
  Description of Artificial Sequence: Synthetic oligonucleotide
gaaucgcaccgugaucugc

SEQ ID NO: 211227 - RNA, 19 nt, Artificial Sequence
  Description of Artificial Sequence: Synthetic oligonucleotide
ugggagcgaucucacuuac

SEQ ID NO: 211228 - RNA, 19 nt, Artificial Sequence
  Description of Artificial Sequence: Synthetic oligonucleotide
gugcuagucucaucagcgc

SEQ ID NO: 211229 - RNA, 19 nt, Artificial Sequence
  Description of Artificial Sequence: Synthetic oligonucleotide
ccuuaagguaccacaugcc

SEQ ID NO: 211230 - RNA, 19 nt, Artificial Sequence
  Description of Artificial Sequence: Synthetic oligonucleotide
ccuugaacuaacaucgcca

SEQ ID NO: 211231 - RNA, 19 nt, Artificial Sequence
  Description of Artificial Sequence: Synthetic oligonucleotide
cagguggacccaagguucc

SEQ ID NO: 211232 - RNA, 19 nt, Artificial Sequence
  Description of Artificial Sequence: Synthetic oligonucleotide
gaaaaguggcuuccacgaa

SEQ ID NO: 211233 - RNA, 19 nt, Artificial Sequence
  Description of Artificial Sequence: Synthetic oligonucleotide
agauuguacuguucccuua

SEQ ID NO: 211234 - RNA, 19 nt, Artificial Sequence
  Description of Artificial Sequence: Synthetic oligonucleotide
ccagagggcaaauaccuuc

SEQ ID NO: 211235 - RNA, 19 nt, Artificial Sequence
  Description of Artificial Sequence: Synthetic oligonucleotide
uguucccuuaagguaccac

SEQ ID NO: 211236 - RNA, 19 nt, Artificial Sequence
  Description of Artificial Sequence: Synthetic oligonucleotide
uggcacagccugguauugg

SEQ ID NO: 211237 - RNA, 19 nt, Artificial Sequence
  Description of Artificial Sequence: Synthetic oligonucleotide
cucagcgugagcacaaacu

SEQ ID NO: 211238 - RNA, 19 nt, Artificial Sequence
  Description of Artificial Sequence: Synthetic oligonucleotide
ugaguucgcucagcgugag

SEQ ID NO: 211239 - RNA, 19 nt, Artificial Sequence
  Description of Artificial Sequence: Synthetic oligonucleotide
auaaccucgcuuacacacu

SEQ ID NO: 211240 - RNA, 19 nt, Artificial Sequence
  Description of Artificial Sequence: Synthetic oligonucleotide
uuuagccuggaugcccgac

SEQ ID NO: 211241 - RNA, 19 nt, Artificial Sequence
  Description of Artificial Sequence: Synthetic oligonucleotide
gaguuagugguuugcuacu

SEQ ID NO: 211242 - RNA, 19 nt, Artificial Sequence
  Description of Artificial Sequence: Synthetic oligonucleotide
aagucuuagcagagauacu

SEQ ID NO: 211243 - RNA, 19 nt, Artificial Sequence
  Description of Artificial Sequence: Synthetic oligonucleotide
guaugagccccucuguccu

SEQ ID NO: 211244 - RNA, 19 nt, Artificial Sequence
  Description of Artificial Sequence: Synthetic oligonucleotide
acgccauaauagugcaggu

SEQ ID NO: 211245 - RNA, 19 nt, Artificial Sequence
  Description of Artificial Sequence: Synthetic oligonucleotide
gcgcucaugcucugaacgg

SEQ ID NO: 211246 - RNA, 19 nt, Artificial Sequence
  Description of Artificial Sequence: Synthetic oligonucleotide
ggucguaaggcaguaagaa

SEQ ID NO: 211247 - RNA, 19 nt, Artificial Sequence
  Description of Artificial Sequence: Synthetic oligonucleotide
caugccaccauagcuuaca

SEQ ID NO: 211248 - RNA, 19 nt, Artificial Sequence
  Description of Artificial Sequence: Synthetic oligonucleotide
auaucgggccguguugcug

SEQ ID NO: 211249 - RNA, 19 nt, Artificial Sequence
  Description of Artificial Sequence: Synthetic oligonucleotide
cgaacauuaggagaagaug

SEQ ID NO: 211250 - RNA, 19 nt, Artificial Sequence
  Description of Artificial Sequence: Synthetic oligonucleotide
cugaacggcuauccuucac

SEQ ID NO: 211251 - RNA, 19 nt, Artificial Sequence
  Description of Artificial Sequence: Synthetic oligonucleotide
uuacgcugacccugccacu

SEQ ID NO: 211252 - RNA, 19 nt, Artificial Sequence
  Description of Artificial Sequence: Synthetic oligonucleotide
gaauaugugcuagucucau

SEQ ID NO: 211253 - RNA, 19 nt, Artificial Sequence
  Description of Artificial Sequence: Synthetic oligonucleotide
gucagccgagacuguauca

SEQ ID NO: 211254 - RNA, 19 nt, Artificial Sequence
  Description of Artificial Sequence: Synthetic oligonucleotide
cccauuuaggcuaucccca

SEQ ID NO: 211255 - RNA, 19 nt, Artificial Sequence
  Description of Artificial Sequence: Synthetic oligonucleotide
aagaauccccugccucauu

SEQ ID NO: 211256 - RNA, 19 nt, Artificial Sequence
  Description of Artificial Sequence: Synthetic oligonucleotide
aggucguaaggcaguaaga

SEQ ID NO: 211257 - RNA, 19 nt, Artificial Sequence
  Description of Artificial Sequence: Synthetic oligonucleotide
ccgaguaugagccccucug

SEQ ID NO: 211258 - RNA, 19 nt, Artificial Sequence
  Description of Artificial Sequence: Synthetic oligonucleotide
cacccaccggcucugugug

SEQ ID NO: 211259 - RNA, 19 nt, Artificial Sequence
  Description of Artificial Sequence: Synthetic oligonucleotide
aagaggcgcuugaguucgc

SEQ ID NO: 211260 - RNA, 19 nt, Artificial Sequence
  Description of Artificial Sequence: Synthetic oligonucleotide
gcuuaacguccucuucugc

SEQ ID NO: 211261 - RNA, 19 nt, Artificial Sequence
  Description of Artificial Sequence: Synthetic oligonucleotide
ggaauaugugcuagucuca

SEQ ID NO: 211262 - RNA, 19 nt, Artificial Sequence
  Description of Artificial Sequence: Synthetic oligonucleotide
cuacuauugucaagauugu

SEQ ID NO: 211263 - RNA, 19 nt, Artificial Sequence
  Description of Artificial Sequence: Synthetic oligonucleotide
uuggacccgcuguucccca

SEQ ID NO: 211264 - RNA, 19 nt, Artificial Sequence
  Description of Artificial Sequence: Synthetic oligonucleotide
agacuguaucauguuccga

SEQ ID NO: 211265 - RNA, 19 nt, Artificial Sequence
  Description of Artificial Sequence: Synthetic oligonucleotide
uuccgacguacucgguaau

SEQ ID NO: 211266 - RNA, 19 nt, Artificial Sequence
  Description of Artificial Sequence: Synthetic oligonucleotide
caucagcgcaggcaccauc

SEQ ID NO: 211267 - RNA, 19 nt, Artificial Sequence
  Description of Artificial Sequence: Synthetic oligonucleotide
ccgugaucugcuuaacguc

SEQ ID NO: 211268 - RNA, 19 nt, Artificial Sequence
  Description of Artificial Sequence: Synthetic oligonucleotide
uggccgaguaugagccccu

SEQ ID NO: 211269 - RNA, 19 nt, Artificial Sequence
  Description of Artificial Sequence: Synthetic oligonucleotide
ccucguccugagaagaauc

SEQ ID NO: 211270 - RNA, 19 nt, Artificial Sequence
  Description of Artificial Sequence: Synthetic oligonucleotide
ggacauugcugggagcuac

SEQ ID NO: 211271 - RNA, 19 nt, Artificial Sequence
  Description of Artificial Sequence: Synthetic oligonucleotide
ucgcaccgugaucugcuua

SEQ ID NO: 211272 - RNA, 19 nt, Artificial Sequence
  Description of Artificial Sequence: Synthetic oligonucleotide
gggugauuugacaagcucu

SEQ ID NO: 211273 - RNA, 19 nt, Artificial Sequence
  Description of Artificial Sequence: Synthetic oligonucleotide
cugggagcgaucucacuua

SEQ ID NO: 211274 - RNA, 19 nt, Artificial Sequence
  Description of Artificial Sequence: Synthetic oligonucleotide
cuguaucauguuccgacgu

SEQ ID NO: 211275 - RNA, 19 nt, Artificial Sequence
  Description of Artificial Sequence: Synthetic oligonucleotide
gagcgaucucacuuacgcu

SEQ ID NO: 211276 - RNA, 19 nt, Artificial Sequence
  Description of Artificial Sequence: Synthetic oligonucleotide
aaccucgcuuacacacugu

SEQ ID NO: 211277 - RNA, 19 nt, Artificial Sequence
  Description of Artificial Sequence: Synthetic oligonucleotide
accuugccuguagagugca

SEQ ID NO: 211278 - RNA, 19 nt, Artificial Sequence
  Description of Artificial Sequence: Synthetic oligonucleotide
gucgaugcuggucacucau

SEQ ID NO: 211279 - RNA, 19 nt, Artificial Sequence
  Description of Artificial Sequence: Synthetic oligonucleotide
guuagugguuugcuacuau

SEQ ID NO: 211280 - RNA, 19 nt, Artificial Sequence
  Description of Artificial Sequence: Synthetic oligonucleotide
uccgacguacucgguaauu

SEQ ID NO: 211281 - RNA, 19 nt, Artificial Sequence
  Description of Artificial Sequence: Synthetic oligonucleotide
gccucagaaacccaacagu

SEQ ID NO: 211282 - RNA, 19 nt, Artificial Sequence
  Description of Artificial Sequence: Synthetic oligonucleotide
cuggcacagccugguauug

SEQ ID NO: 211283 - RNA, 19 nt, Artificial Sequence
  Description of Artificial Sequence: Synthetic oligonucleotide
gacuaauuauuggcuucua

SEQ ID NO: 211284 - RNA, 19 nt, Artificial Sequence
  Description of Artificial Sequence: Synthetic oligonucleotide
gagauacucuaagacuaau

SEQ ID NO: 211285 - RNA, 19 nt, Artificial Sequence
  Description of Artificial Sequence: Synthetic oligonucleotide
cacuuacgcugacccugcc

SEQ ID NO: 211286 - RNA, 19 nt, Artificial Sequence
  Description of Artificial Sequence: Synthetic oligonucleotide
gcucaugagauuggcaaaa

SEQ ID NO: 211287 - RNA, 19 nt, Artificial Sequence
  Description of Artificial Sequence: Synthetic oligonucleotide
ccacgcagaacagccacag

SEQ ID NO: 211288 - RNA, 19 nt, Artificial Sequence
  Description of Artificial Sequence: Synthetic oligonucleotide
agcugcauaucgggccgug

SEQ ID NO: 211289 - RNA, 19 nt, Artificial Sequence
  Description of Artificial Sequence: Synthetic oligonucleotide
acgaacgccuucaguuccu

SEQ ID NO: 211290 - RNA, 19 nt, Artificial Sequence
  Description of Artificial Sequence: Synthetic oligonucleotide
ccucgcuuacacacuguuc

SEQ ID NO: 211291 - RNA, 19 nt, Artificial Sequence
  Description of Artificial Sequence: Synthetic oligonucleotide
gggagcgaucucacuuacg

SEQ ID NO: 211292 - RNA, 19 nt, Artificial Sequence
  Description of Artificial Sequence: Synthetic oligonucleotide
cugggugauuugacaagcu

SEQ ID NO: 211293 - RNA, 19 nt, Artificial Sequence
  Description of Artificial Sequence: Synthetic oligonucleotide
ggcauaccacugugagggc

SEQ ID NO: 211294 - RNA, 19 nt, Artificial Sequence
  Description of Artificial Sequence: Synthetic oligonucleotide
aucgcaccgugaucugcuu

SEQ ID NO: 211295 - RNA, 19 nt, Artificial Sequence
  Description of Artificial Sequence: Synthetic oligonucleotide
gcgcaaaguuuggucacug

SEQ ID NO: 211296 - RNA, 19 nt, Artificial Sequence
  Description of Artificial Sequence: Synthetic oligonucleotide
gucgagagaaucgcaccgu

SEQ ID NO: 211297 - RNA, 19 nt, Artificial Sequence
  Description of Artificial Sequence: Synthetic oligonucleotide
caguaagaacucccagccu

SEQ ID NO: 211298 - RNA, 19 nt, Artificial Sequence
  Description of Artificial Sequence: Synthetic oligonucleotide
guaagaacucccagccuuu

SEQ ID NO: 211299 - RNA, 19 nt, Artificial Sequence
  Description of Artificial Sequence: Synthetic oligonucleotide
gcgaucucacuuacgcuga

SEQ ID NO: 211300 - RNA, 19 nt, Artificial Sequence
  Description of Artificial Sequence: Synthetic oligonucleotide
cacgcagaacagccacaga

SEQ ID NO: 211301 - RNA, 19 nt, Artificial Sequence
  Description of Artificial Sequence: Synthetic oligonucleotide
ggcuuggauucguugaguu

SEQ ID NO: 211302 - RNA, 19 nt, Artificial Sequence
  Description of Artificial Sequence: Synthetic oligonucleotide
cucggccccugcagagcac

SEQ ID NO: 211303 - RNA, 19 nt, Artificial Sequence
  Description of Artificial Sequence: Synthetic oligonucleotide
cauaucgggccguguugcu

SEQ ID NO: 211304 - RNA, 19 nt, Artificial Sequence
  Description of Artificial Sequence: Synthetic oligonucleotide
cugcauaucgggccguguu

SEQ ID NO: 211305 - RNA, 19 nt, Artificial Sequence
  Description of Artificial Sequence: Synthetic oligonucleotide
ccacuauagaaaguaggcu

SEQ ID NO: 211306 - RNA, 19 nt, Artificial Sequence
  Description of Artificial Sequence: Synthetic oligonucleotide
ccgcuggcauaccacugug

SEQ ID NO: 211307 - RNA, 19 nt, Artificial Sequence
  Description of Artificial Sequence: Synthetic oligonucleotide
gcauaccacugugagggcu

SEQ ID NO: 211308 - RNA, 19 nt, Artificial Sequence
  Description of Artificial Sequence: Synthetic oligonucleotide
ccguauccuguagcaugcg

SEQ ID NO: 211309 - RNA, 19 nt, Artificial Sequence
  Description of Artificial Sequence: Synthetic oligonucleotide
cacuuaccugguucaguuu

SEQ ID NO: 211310 - RNA, 19 nt, Artificial Sequence
  Description of Artificial Sequence: Synthetic oligonucleotide
cauuagcuucgaggaauau

SEQ ID NO: 211311 - RNA, 19 nt, Artificial Sequence
  Description of Artificial Sequence: Synthetic oligonucleotide
cugugagggcuggaagaau

SEQ ID NO: 211312 - RNA, 19 nt, Artificial Sequence
  Description of Artificial Sequence: Synthetic oligonucleotide
gccgaguaugagccccucu

SEQ ID NO: 211313 - RNA, 19 nt, Artificial Sequence
  Description of Artificial Sequence: Synthetic oligonucleotide
cgaguaugagccccucugu

SEQ ID NO: 211314 - RNA, 19 nt, Artificial Sequence
  Description of Artificial Sequence: Synthetic oligonucleotide
ccgacguacucgguaauuu

SEQ ID NO: 211315 - RNA, 19 nt, Artificial Sequence
  Description of Artificial Sequence: Synthetic oligonucleotide
cgacguacucgguaauuuu

SEQ ID NO: 211316 - RNA, 19 nt, Artificial Sequence
  Description of Artificial Sequence: Synthetic oligonucleotide
gcccguuggccaacuuggu

SEQ ID NO: 211317 - RNA, 19 nt, Artificial Sequence
  Description of Artificial Sequence: Synthetic oligonucleotide
acaacuauaaauuuaaacc

SEQ ID NO: 211318 - RNA, 19 nt, Artificial Sequence
  Description of Artificial Sequence: Synthetic oligonucleotide
aauugcaauguuuuagcac

SEQ ID NO: 211319 - RNA, 19 nt, Artificial Sequence
  Description of Artificial Sequence: Synthetic oligonucleotide
aauauuacucuauacauuu

SEQ ID NO: 211320 - RNA, 19 nt, Artificial Sequence
  Description of Artificial Sequence: Synthetic oligonucleotide
aacgugucuaguuuacugc

SEQ ID NO: 211321 - RNA, 19 nt, Artificial Sequence
  Description of Artificial Sequence: Synthetic oligonucleotide
cugauauccguuuaaaccg

SEQ ID NO: 211322 - RNA, 19 nt, Artificial Sequence
  Description of Artificial Sequence: Synthetic oligonucleotide
uuuaacuggguucagcacc

SEQ ID NO: 211323 - RNA, 19 nt, Artificial Sequence
  Description of Artificial Sequence: Synthetic oligonucleotide
uuuauugcaaccucucugc

SEQ ID NO: 211324 - RNA, 19 nt, Artificial Sequence
  Description of Artificial Sequence: Synthetic oligonucleotide
aagguuaauucuuagcagu

SEQ ID NO: 211325 - RNA, 19 nt, Artificial Sequence
  Description of Artificial Sequence: Synthetic oligonucleotide
ugugcaaccaaauagucaa

SEQ ID NO: 211326 - RNA, 19 nt, Artificial Sequence
  Description of Artificial Sequence: Synthetic oligonucleotide
uuuaauguagugcauucgu

SEQ ID NO: 211327 - RNA, 19 nt, Artificial Sequence
  Description of Artificial Sequence: Synthetic oligonucleotide
uaauguagugcauucguag

SEQ ID NO: 211328 - RNA, 19 nt, Artificial Sequence
  Description of Artificial Sequence: Synthetic oligonucleotide
ugugaaucuacuuaagaaa

SEQ ID NO: 211329 - RNA, 19 nt, Artificial Sequence
  Description of Artificial Sequence: Synthetic oligonucleotide
agugcauucguagaaaagg

SEQ ID NO: 211330 - RNA, 19 nt, Artificial Sequence
  Description of Artificial Sequence: Synthetic oligonucleotide
aaagauuaguggaaccucg

SEQ ID NO: 211331 - RNA, 19 nt, Artificial Sequence
  Description of Artificial Sequence: Synthetic oligonucleotide
aaacgugucuaguuuacug

SEQ ID NO: 211332 - RNA, 19 nt, Artificial Sequence
  Description of Artificial Sequence: Synthetic oligonucleotide
auaauagguauguagcugu

SEQ ID NO: 211333 - RNA, 19 nt, Artificial Sequence
  Description of Artificial Sequence: Synthetic oligonucleotide
ucaacuagucuuaagguua

SEQ ID NO: 211334 - RNA, 19 nt, Artificial Sequence
  Description of Artificial Sequence: Synthetic oligonucleotide
uauugccuaaauauuacuc

SEQ ID NO: 211335 - RNA, 19 nt, Artificial Sequence
  Description of Artificial Sequence: Synthetic oligonucleotide
aauguagugcauucguaga

SEQ ID NO: 211336 - RNA, 19 nt, Artificial Sequence
  Description of Artificial Sequence: Synthetic oligonucleotide
auccguuuaaaccggacuc

SEQ ID NO: 211337 - RNA, 19 nt, Artificial Sequence
  Description of Artificial Sequence: Synthetic oligonucleotide
uuacaccauaauuacuggg

SEQ ID NO: 211338 - RNA, 19 nt, Artificial Sequence
  Description of Artificial Sequence: Synthetic oligonucleotide
agauuaguggaaccucggc

SEQ ID NO: 211339 - RNA, 19 nt, Artificial Sequence
  Description of Artificial Sequence: Synthetic oligonucleotide
acgugucuaguuuacugcc

SEQ ID NO: 211340 - RNA, 19 nt, Artificial Sequence
  Description of Artificial Sequence: Synthetic oligonucleotide
gucaugauuuagaagaugc

SEQ ID NO: 211341 - RNA, 19 nt, Artificial Sequence
  Description of Artificial Sequence: Synthetic oligonucleotide
cagaauaacgccgagacuc

SEQ ID NO: 211342 - RNA, 19 nt, Artificial Sequence
  Description of Artificial Sequence: Synthetic oligonucleotide
ccugauauccguuuaaacc

SEQ ID NO: 211343 - RNA, 19 nt, Artificial Sequence
  Description of Artificial Sequence: Synthetic oligonucleotide
aauggaaacgagacagagg

SEQ ID NO: 211344 - RNA, 19 nt, Artificial Sequence
  Description of Artificial Sequence: Synthetic oligonucleotide
aaccggacuccauucagag

SEQ ID NO: 211345 - RNA, 19 nt, Artificial Sequence
  Description of Artificial Sequence: Synthetic oligonucleotide
uuuaaaccggacuccauuc

SEQ ID NO: 211346 - RNA, 19 nt, Artificial Sequence
  Description of Artificial Sequence: Synthetic oligonucleotide
ugcauucguagaaaaggcc

SEQ ID NO: 211347 - RNA, 19 nt, Artificial Sequence
  Description of Artificial Sequence: Synthetic oligonucleotide
uccgaagauacauugcgac

SEQ ID NO: 211348 - RNA, 19 nt, Artificial Sequence
  Description of Artificial Sequence: Synthetic oligonucleotide
auacguugcgguucgccgc

SEQ ID NO: 211349 - RNA, 19 nt, Artificial Sequence
  Description of Artificial Sequence: Synthetic oligonucleotide
uguuuggaugauuuaaaau

SEQ ID NO: 211350 - RNA, 19 nt, Artificial Sequence
  Description of Artificial Sequence: Synthetic oligonucleotide
gguucugaccgucaaaggg

SEQ ID NO: 211351 - RNA, 19 nt, Artificial Sequence
  Description of Artificial Sequence: Synthetic oligonucleotide
acuaccacaaaacgugucu

SEQ ID NO: 211352 - RNA, 19 nt, Artificial Sequence
  Description of Artificial Sequence: Synthetic oligonucleotide
uauccguuuaaaccggacu

SEQ ID NO: 211353 - RNA, 19 nt, Artificial Sequence
  Description of Artificial Sequence: Synthetic oligonucleotide
cauuauacguugcgguucg

SEQ ID NO: 211354 - RNA, 19 nt, Artificial Sequence
  Description of Artificial Sequence: Synthetic oligonucleotide
aaauggcuuaagcucgucu

SEQ ID NO: 211355 - RNA, 19 nt, Artificial Sequence
  Description of Artificial Sequence: Synthetic oligonucleotide
ugggccauuauacguugcg

SEQ ID NO: 211356 - RNA, 19 nt, Artificial Sequence
  Description of Artificial Sequence: Synthetic oligonucleotide
acuaguaaugcuggcugcc

SEQ ID NO: 211357 - RNA, 19 nt, Artificial Sequence
  Description of Artificial Sequence: Synthetic oligonucleotide
ucauauccgcaucuaauaa

SEQ ID NO: 211358 - RNA, 19 nt, Artificial Sequence
  Description of Artificial Sequence: Synthetic oligonucleotide
auuugcucgagagugccac

SEQ ID NO: 211359 - RNA, 19 nt, Artificial Sequence
  Description of Artificial Sequence: Synthetic oligonucleotide
aaacgagacagaggcacgg

SEQ ID NO: 211360 - RNA, 19 nt, Artificial Sequence
  Description of Artificial Sequence: Synthetic oligonucleotide
uucuuagcaguuauucagu

SEQ ID NO: 211361 - RNA, 19 nt, Artificial Sequence
  Description of Artificial Sequence: Synthetic oligonucleotide
uuaaaccggacuccauuca

SEQ ID NO: 211362 - RNA, 19 nt, Artificial Sequence
  Description of Artificial Sequence: Synthetic oligonucleotide
cauauccgcaucuaauaac

SEQ ID NO: 211363 - RNA, 19 nt, Artificial Sequence
  Description of Artificial Sequence: Synthetic oligonucleotide
uagugcauucguagaaaag

SEQ ID NO: 211364 - RNA, 19 nt, Artificial Sequence
  Description of Artificial Sequence: Synthetic oligonucleotide
ugcauucccaagcauggga

SEQ ID NO: 211365 - RNA, 19 nt, Artificial Sequence
  Description of Artificial Sequence: Synthetic oligonucleotide
auuaguggaaccucggcuu

SEQ ID NO: 211366 - RNA, 19 nt, Artificial Sequence
  Description of Artificial Sequence: Synthetic oligonucleotide
auagguauguagcugugau

SEQ ID NO: 211367 - RNA, 19 nt, Artificial Sequence
  Description of Artificial Sequence: Synthetic oligonucleotide
auagucgcaguuauuggcg

SEQ ID NO: 211368 - RNA, 19 nt, Artificial Sequence
  Description of Artificial Sequence: Synthetic oligonucleotide
agcgaauccgaucuggggu

SEQ ID NO: 211369 - RNA, 19 nt, Artificial Sequence
  Description of Artificial Sequence: Synthetic oligonucleotide
aagauuaguggaaccucgg

SEQ ID NO: 211370 - RNA, 19 nt, Artificial Sequence
  Description of Artificial Sequence: Synthetic oligonucleotide
cccaauaauagguauguag

SEQ ID NO: 211371 - RNA, 19 nt, Artificial Sequence
  Description of Artificial Sequence: Synthetic oligonucleotide
ucccguuccucucauauuc

SEQ ID NO: 211372 - RNA, 19 nt, Artificial Sequence
  Description of Artificial Sequence: Synthetic oligonucleotide
acuuucgggagggaauucc

SEQ ID NO: 211373 - RNA, 19 nt, Artificial Sequence
  Description of Artificial Sequence: Synthetic oligonucleotide
auaucugcuuuauugggau

SEQ ID NO: 211374 - RNA, 19 nt, Artificial Sequence
  Description of Artificial Sequence: Synthetic oligonucleotide
uuaauguagugcauucgua

SEQ ID NO: 211375 - RNA, 19 nt, Artificial Sequence
  Description of Artificial Sequence: Synthetic oligonucleotide
agugccacguuuaacuggg

SEQ ID NO: 211376 - RNA, 19 nt, Artificial Sequence
  Description of Artificial Sequence: Synthetic oligonucleotide
aucaacuagucuuaagguu

SEQ ID NO: 211377 - RNA, 19 nt, Artificial Sequence
  Description of Artificial Sequence: Synthetic oligonucleotide
uuauugcaaccucucugcc

SEQ ID NO: 211378 - RNA, 19 nt, Artificial Sequence
  Description of Artificial Sequence: Synthetic oligonucleotide
uggaauagugcuguuuucu

SEQ ID NO: 211379 - RNA, 19 nt, Artificial Sequence
  Description of Artificial Sequence: Synthetic oligonucleotide
cuagcguccagcucugaag

SEQ ID NO: 211380 - RNA, 19 nt, Artificial Sequence
  Description of Artificial Sequence: Synthetic oligonucleotide
ugccgcuugacuuucggga

SEQ ID NO: 211381 - RNA, 19 nt, Artificial Sequence
  Description of Artificial Sequence: Synthetic oligonucleotide
gcuaaaguuccccuugccg

SEQ ID NO: 211382 - RNA, 19 nt, Artificial Sequence
  Description of Artificial Sequence: Synthetic oligonucleotide
auauccgcaucuaauaaca

SEQ ID NO: 211383 - RNA, 19 nt, Artificial Sequence
  Description of Artificial Sequence: Synthetic oligonucleotide
ugcgcucaggaauaucugc

SEQ ID NO: 211384 - RNA, 19 nt, Artificial Sequence
  Description of Artificial Sequence: Synthetic oligonucleotide
caaaacgugucuaguuuac

SEQ ID NO: 211385 - RNA, 19 nt, Artificial Sequence
  Description of Artificial Sequence: Synthetic oligonucleotide
uauugcaaccucucugccu

SEQ ID NO: 211386 - RNA, 19 nt, Artificial Sequence
  Description of Artificial Sequence: Synthetic oligonucleotide
cauauggaggacuaccaca

SEQ ID NO: 211387 - RNA, 19 nt, Artificial Sequence
  Description of Artificial Sequence: Synthetic oligonucleotide
uugacuuucgggagggaau

SEQ ID NO: 211388 - RNA, 19 nt, Artificial Sequence
  Description of Artificial Sequence: Synthetic oligonucleotide
uccccaauaauagguaugu

SEQ ID NO: 211389 - RNA, 19 nt, Artificial Sequence
  Description of Artificial Sequence: Synthetic oligonucleotide
uuccgaagauacauugcga

SEQ ID NO: 211390 - RNA, 19 nt, Artificial Sequence
  Description of Artificial Sequence: Synthetic oligonucleotide
gaugucuaguucugguuca

SEQ ID NO: 211391 - RNA, 19 nt, Artificial Sequence
  Description of Artificial Sequence: Synthetic oligonucleotide
gauuaguggaaccucggcu

SEQ ID NO: 211392 - RNA, 19 nt, Artificial Sequence
  Description of Artificial Sequence: Synthetic oligonucleotide
ucucccguuccucucauau

SEQ ID NO: 211393 - RNA, 19 nt, Artificial Sequence
  Description of Artificial Sequence: Synthetic oligonucleotide
cuuaagcucgucuuccuca

SEQ ID NO: 211394 - RNA, 19 nt, Artificial Sequence
  Description of Artificial Sequence: Synthetic oligonucleotide
accgucaaagggaagugac

SEQ ID NO: 211395 - RNA, 19 nt, Artificial Sequence
  Description of Artificial Sequence: Synthetic oligonucleotide
ggcaauugcaauguuuuag

SEQ ID NO: 211396 - RNA, 19 nt, Artificial Sequence
  Description of Artificial Sequence: Synthetic oligonucleotide
uuauacguugcgguucgcc

SEQ ID NO: 211397 - RNA, 19 nt, Artificial Sequence
  Description of Artificial Sequence: Synthetic oligonucleotide
ugcuaaaguuccccuugcc

SEQ ID NO: 211398 - RNA, 19 nt, Artificial Sequence
  Description of Artificial Sequence: Synthetic oligonucleotide
uccguuuaaaccggacucc

SEQ ID NO: 211399 - RNA, 19 nt, Artificial Sequence
  Description of Artificial Sequence: Synthetic oligonucleotide
auccgcaucuaauaacaga

SEQ ID NO: 211400 - RNA, 19 nt, Artificial Sequence
  Description of Artificial Sequence: Synthetic oligonucleotide
auggaggacuaccacaaaa

SEQ ID NO: 211401 - RNA, 19 nt, Artificial Sequence
  Description of Artificial Sequence: Synthetic oligonucleotide
acguuuaacuggguucagc

SEQ ID NO: 211402 - RNA, 19 nt, Artificial Sequence
  Description of Artificial Sequence: Synthetic oligonucleotide
cuucgugggacaagcuggg

SEQ ID NO: 211403 - RNA, 19 nt, Artificial Sequence
  Description of Artificial Sequence: Synthetic oligonucleotide
ucuuagcaguuauucagua

SEQ ID NO: 211404 - RNA, 19 nt, Artificial Sequence
  Description of Artificial Sequence: Synthetic oligonucleotide
gucacuagcguccagcucu

SEQ ID NO: 211405 - RNA, 19 nt, Artificial Sequence
  Description of Artificial Sequence: Synthetic oligonucleotide
auguagugcauucguagaa

SEQ ID NO: 211406 - RNA, 19 nt, Artificial Sequence
  Description of Artificial Sequence: Synthetic oligonucleotide
aaaacgugucuaguuuacu

SEQ ID NO: 211407 - RNA, 19 nt, Artificial Sequence
  Description of Artificial Sequence: Synthetic oligonucleotide
guuuaacuggguucagcac

SEQ ID NO: 211408 - RNA, 19 nt, Artificial Sequence
  Description of Artificial Sequence: Synthetic oligonucleotide
agguucugaccgucaaagg

SEQ ID NO: 211409 - RNA, 19 nt, Artificial Sequence
  Description of Artificial Sequence: Synthetic oligonucleotide
aaguguuccgccgugucau

SEQ ID NO: 211410 - RNA, 19 nt, Artificial Sequence
  Description of Artificial Sequence: Synthetic oligonucleotide
uuugcucgagagugccacg

SEQ ID NO: 211411 - RNA, 19 nt, Artificial Sequence
  Description of Artificial Sequence: Synthetic oligonucleotide
uguagugcauucguagaaa

SEQ ID NO: 211412 - RNA, 19 nt, Artificial Sequence
  Description of Artificial Sequence: Synthetic oligonucleotide
uuaguggaaccucggcuuc

SEQ ID NO: 211413 - RNA, 19 nt, Artificial Sequence
  Description of Artificial Sequence: Synthetic oligonucleotide
uguuccgccgugucauucc

SEQ ID NO: 211414 - RNA, 19 nt, Artificial Sequence
  Description of Artificial Sequence: Synthetic oligonucleotide
uccgccgugucauuccacc

SEQ ID NO: 211415 - RNA, 19 nt, Artificial Sequence
  Description of Artificial Sequence: Synthetic oligonucleotide
uaaaguuccccuugccgua

SEQ ID NO: 211416 - RNA, 19 nt, Artificial Sequence
  Description of Artificial Sequence: Synthetic oligonucleotide
cuaaaguuccccuugccgu

SEQ ID NO: 211417 - RNA, 19 nt, Artificial Sequence
  Description of Artificial Sequence: Synthetic oligonucleotide
ucccucuguucauagucgc

SEQ ID NO: 211418 - RNA, 19 nt, Artificial Sequence
  Description of Artificial Sequence: Synthetic oligonucleotide
cuccccaauaauagguaug

SEQ ID NO: 211419 - RNA, 19 nt, Artificial Sequence
  Description of Artificial Sequence: Synthetic oligonucleotide
auauggaggacuaccacaa

SEQ ID NO: 211420 - RNA, 19 nt, Artificial Sequence
  Description of Artificial Sequence: Synthetic oligonucleotide
uucucugcgugcccgucgc

SEQ ID NO: 211421 - RNA, 19 nt, Artificial Sequence
  Description of Artificial Sequence: Synthetic oligonucleotide
ucuccccaauaauagguau

SEQ ID NO: 211422 - RNA, 19 nt, Artificial Sequence
  Description of Artificial Sequence: Synthetic oligonucleotide
uuaagcucgucuuccucau

SEQ ID NO: 211423 - RNA, 19 nt, Artificial Sequence
  Description of Artificial Sequence: Synthetic oligonucleotide
agauacauugcgacuugag

SEQ ID NO: 211424 - RNA, 19 nt, Artificial Sequence
  Description of Artificial Sequence: Synthetic oligonucleotide
agucgcaguuauuggcguc

SEQ ID NO: 211425 - RNA, 19 nt, Artificial Sequence
  Description of Artificial Sequence: Synthetic oligonucleotide
auaucucccguuccucuca

SEQ ID NO: 211426 - RNA, 19 nt, Artificial Sequence
  Description of Artificial Sequence: Synthetic oligonucleotide
agucacuagcguccagcuc

SEQ ID NO: 211427 - RNA, 19 nt, Artificial Sequence
  Description of Artificial Sequence: Synthetic oligonucleotide
acgagguuuugccucuuug

SEQ ID NO: 211428 - RNA, 19 nt, Artificial Sequence
  Description of Artificial Sequence: Synthetic oligonucleotide
gucuaguuuacugccaaca

SEQ ID NO: 211429 - RNA, 19 nt, Artificial Sequence
  Description of Artificial Sequence: Synthetic oligonucleotide
aagauacauugcgacuuga

SEQ ID NO: 211430 - RNA, 19 nt, Artificial Sequence
  Description of Artificial Sequence: Synthetic oligonucleotide
uuucccucguaguacucuc

SEQ ID NO: 211431 - RNA, 19 nt, Artificial Sequence
  Description of Artificial Sequence: Synthetic oligonucleotide
uuauugggauugcuugcau

SEQ ID NO: 211432 - RNA, 19 nt, Artificial Sequence
  Description of Artificial Sequence: Synthetic oligonucleotide
ugccacaacugaaggaaua

SEQ ID NO: 211433 - RNA, 19 nt, Artificial Sequence
  Description of Artificial Sequence: Synthetic oligonucleotide
gcuucugacuugaagaaac

SEQ ID NO: 211434 - RNA, 19 nt, Artificial Sequence
  Description of Artificial Sequence: Synthetic oligonucleotide
aauaucccauucccaccau

SEQ ID NO: 211435 - RNA, 19 nt, Artificial Sequence
  Description of Artificial Sequence: Synthetic oligonucleotide
uugggauugcuugcauucc

SEQ ID NO: 211436 - RNA, 19 nt, Artificial Sequence
  Description of Artificial Sequence: Synthetic oligonucleotide
aauuacuggguuacagcuu

SEQ ID NO: 211437 - RNA, 19 nt, Artificial Sequence
  Description of Artificial Sequence: Synthetic oligonucleotide
aagagcuuuuguagacuug

SEQ ID NO: 211438 - RNA, 19 nt, Artificial Sequence
  Description of Artificial Sequence: Synthetic oligonucleotide
ugcgacuugagcccucaua

SEQ ID NO: 211439 - RNA, 19 nt, Artificial Sequence
  Description of Artificial Sequence: Synthetic oligonucleotide
uuucgggagggaauuccau

SEQ ID NO: 211440 - RNA, 19 nt, Artificial Sequence
  Description of Artificial Sequence: Synthetic oligonucleotide
uacguugcgguucgccgcu

SEQ ID NO: 211441 - RNA, 19 nt, Artificial Sequence
  Description of Artificial Sequence: Synthetic oligonucleotide
ugaccgucaaagggaagug

SEQ ID NO: 211442 - RNA, 19 nt, Artificial Sequence
  Description of Artificial Sequence: Synthetic oligonucleotide
guagugcauucguagaaaa

SEQ ID NO: 211443 - RNA, 19 nt, Artificial Sequence
  Description of Artificial Sequence: Synthetic oligonucleotide
uucgccgcucucgagguug

SEQ ID NO: 211444 - RNA, 19 nt, Artificial Sequence
  Description of Artificial Sequence: Synthetic oligonucleotide
ugcuuggccgcaccuuagc

SEQ ID NO: 211445 - RNA, 19 nt, Artificial Sequence
  Description of Artificial Sequence: Synthetic oligonucleotide
uaguggaaccucggcuucg

SEQ ID NO: 211446 - RNA, 19 nt, Artificial Sequence
  Description of Artificial Sequence: Synthetic oligonucleotide
gucgcaguuauuggcgucc

SEQ ID NO: 211447 - RNA, 19 nt, Artificial Sequence
  Description of Artificial Sequence: Synthetic oligonucleotide
uugcgguucgccgcucucg

SEQ ID NO: 211448 - RNA, 19 nt, Artificial Sequence
  Description of Artificial Sequence: Synthetic oligonucleotide
uuagcucauuggcaauuuu

SEQ ID NO: 211449 - RNA, 19 nt, Artificial Sequence
  Description of Artificial Sequence: Synthetic oligonucleotide
gcaggugggccauuauacg

SEQ ID NO: 211450 - RNA, 19 nt, Artificial Sequence
  Description of Artificial Sequence: Synthetic oligonucleotide
aauccgaucugggguggug

SEQ ID NO: 211451 - RNA, 19 nt, Artificial Sequence
  Description of Artificial Sequence: Synthetic oligonucleotide
ucccucguaguacucucuc

SEQ ID NO: 211452 - RNA, 19 nt, Artificial Sequence
  Description of Artificial Sequence: Synthetic oligonucleotide
uaauugucuugugaaucua

SEQ ID NO: 211453 - RNA, 19 nt, Artificial Sequence
  Description of Artificial Sequence: Synthetic oligonucleotide
agguuggccguggaaagug

SEQ ID NO: 211454 - RNA, 19 nt, Artificial Sequence
  Description of Artificial Sequence: Synthetic oligonucleotide
ugcgguucgccgcucucga

SEQ ID NO: 211455 - RNA, 19 nt, Artificial Sequence
  Description of Artificial Sequence: Synthetic oligonucleotide
cuacuuaauuuacaccaua

SEQ ID NO: 211456 - RNA, 19 nt, Artificial Sequence
  Description of Artificial Sequence: Synthetic oligonucleotide
cuguaaaccuguauuaauu

SEQ ID NO: 211457 - RNA, 19 nt, Artificial Sequence
  Description of Artificial Sequence: Synthetic oligonucleotide
ugacuuucgggagggaauu

SEQ ID NO: 211458 - RNA, 19 nt, Artificial Sequence
  Description of Artificial Sequence: Synthetic oligonucleotide
uucccucguaguacucucu

SEQ ID NO: 211459 - RNA, 19 nt, Artificial Sequence
  Description of Artificial Sequence: Synthetic oligonucleotide
acguaaguguuccgccgug

SEQ ID NO: 211460 - RNA, 19 nt, Artificial Sequence
  Description of Artificial Sequence: Synthetic oligonucleotide
gaagcguuugagaagguuu

SEQ ID NO: 211461 - RNA, 19 nt, Artificial Sequence
  Description of Artificial Sequence: Synthetic oligonucleotide
aguuccccuugccguauug

SEQ ID NO: 211462 - RNA, 19 nt, Artificial Sequence
  Description of Artificial Sequence: Synthetic oligonucleotide
ugcuucugacuugaagaaa

SEQ ID NO: 211463 - RNA, 19 nt, Artificial Sequence
  Description of Artificial Sequence: Synthetic oligonucleotide
gucacgugcagauggguua

SEQ ID NO: 211464 - RNA, 19 nt, Artificial Sequence
  Description of Artificial Sequence: Synthetic oligonucleotide
uaacgccgagacuccacac

SEQ ID NO: 211465 - RNA, 19 nt, Artificial Sequence
  Description of Artificial Sequence: Synthetic oligonucleotide
aggucgcuaucugcagugc

SEQ ID NO: 211466 - RNA, 19 nt, Artificial Sequence
  Description of Artificial Sequence: Synthetic oligonucleotide
gacuaccacaaaacguguc

SEQ ID NO: 211467 - RNA, 19 nt, Artificial Sequence
  Description of Artificial Sequence: Synthetic oligonucleotide
uucgggcccgucauacuuc

SEQ ID NO: 211468 - RNA, 19 nt, Artificial Sequence
  Description of Artificial Sequence: Synthetic oligonucleotide
uugcucgagagugccacgu

SEQ ID NO: 211469 - RNA, 19 nt, Artificial Sequence
  Description of Artificial Sequence: Synthetic oligonucleotide
ggcaggugggccauuauac

SEQ ID NO: 211470 - RNA, 19 nt, Artificial Sequence
  Description of Artificial Sequence: Synthetic oligonucleotide
gcagauggguuacacucug

SEQ ID NO: 211471 - RNA, 19 nt, Artificial Sequence
  Description of Artificial Sequence: Synthetic oligonucleotide
ucccugauauccguuuaaa

SEQ ID NO: 211472 - RNA, 19 nt, Artificial Sequence
  Description of Artificial Sequence: Synthetic oligonucleotide
uggcaauugcaauguuuua

SEQ ID NO: 211473 - RNA, 19 nt, Artificial Sequence
  Description of Artificial Sequence: Synthetic oligonucleotide
guacagaauaacgccgaga

SEQ ID NO: 211474 - RNA, 19 nt, Artificial Sequence
  Description of Artificial Sequence: Synthetic oligonucleotide
ggugggccauuauacguug

SEQ ID NO: 211475 - RNA, 19 nt, Artificial Sequence
  Description of Artificial Sequence: Synthetic oligonucleotide
aacgagguuuugccucuuu

SEQ ID NO: 211476 - RNA, 19 nt, Artificial Sequence
  Description of Artificial Sequence: Synthetic oligonucleotide
gcgaauccgaucuggggug

SEQ ID NO: 211477 - RNA, 19 nt, Artificial Sequence
  Description of Artificial Sequence: Synthetic oligonucleotide
agguuaauucuuagcaguu

SEQ ID NO: 211478 - RNA, 19 nt, Artificial Sequence
  Description of Artificial Sequence: Synthetic oligonucleotide
ucgggcccgucauacuucu

SEQ ID NO: 211479 - RNA, 19 nt, Artificial Sequence
  Description of Artificial Sequence: Synthetic oligonucleotide
gacguaaguguuccgccgu

SEQ ID NO: 211480 - RNA, 19 nt, Artificial Sequence
  Description of Artificial Sequence: Synthetic oligonucleotide
cuuggccgcaccuuagcaa

SEQ ID NO: 211481 - RNA, 19 nt, Artificial Sequence
  Description of Artificial Sequence: Synthetic oligonucleotide
gccgcuugacuuucgggag

SEQ ID NO: 211482 - RNA, 19 nt, Artificial Sequence
  Description of Artificial Sequence: Synthetic oligonucleotide
auaucccauucccaccaua

SEQ ID NO: 211483 - RNA, 19 nt, Artificial Sequence
  Description of Artificial Sequence: Synthetic oligonucleotide
gggccauuauacguugcgg

SEQ ID NO: 211484 - RNA, 19 nt, Artificial Sequence
  Description of Artificial Sequence: Synthetic oligonucleotide
caccauaauuacuggguua

SEQ ID NO: 211485 - RNA, 19 nt, Artificial Sequence
  Description of Artificial Sequence: Synthetic oligonucleotide
gagucacuagcguccagcu

SEQ ID NO: 211486 - RNA, 19 nt, Artificial Sequence
  Description of Artificial Sequence: Synthetic oligonucleotide
guucauauccgcaucuaau

SEQ ID NO: 211487 - RNA, 19 nt, Artificial Sequence
  Description of Artificial Sequence: Synthetic oligonucleotide
cuugacuuucgggagggaa

SEQ ID NO: 211488 - RNA, 19 nt, Artificial Sequence
  Description of Artificial Sequence: Synthetic oligonucleotide
gggcgauccccuuuccucc

SEQ ID NO: 211489 - RNA, 19 nt, Artificial Sequence
  Description of Artificial Sequence: Synthetic oligonucleotide
cguuuaacuggguucagca

SEQ ID NO: 211490 - RNA, 19 nt, Artificial Sequence
  Description of Artificial Sequence: Synthetic oligonucleotide
ccgcucucgagguuggccg

SEQ ID NO: 211491 - RNA, 19 nt, Artificial Sequence
  Description of Artificial Sequence: Synthetic oligonucleotide
ucugucggcugcagaucuc

SEQ ID NO: 211492 - RNA, 19 nt, Artificial Sequence
  Description of Artificial Sequence: Synthetic oligonucleotide
auugcgacuugagcccuca

SEQ ID NO: 211493 - RNA, 19 nt, Artificial Sequence
  Description of Artificial Sequence: Synthetic oligonucleotide
cauuacuacuggggauggc

SEQ ID NO: 211494 - RNA, 19 nt, Artificial Sequence
  Description of Artificial Sequence: Synthetic oligonucleotide
cguuauugccuaaauauua

SEQ ID NO: 211495 - RNA, 19 nt, Artificial Sequence
  Description of Artificial Sequence: Synthetic oligonucleotide
cacugacgaggguguacag

SEQ ID NO: 211496 - RNA, 19 nt, Artificial Sequence
  Description of Artificial Sequence: Synthetic oligonucleotide
ucugcgugcccgucgccau

SEQ ID NO: 211497 - RNA, 19 nt, Artificial Sequence
  Description of Artificial Sequence: Synthetic oligonucleotide
ggagucacgugcagauggg

SEQ ID NO: 211498 - RNA, 19 nt, Artificial Sequence
  Description of Artificial Sequence: Synthetic oligonucleotide
cuuagcaguuauucaguau

SEQ ID NO: 211499 - RNA, 19 nt, Artificial Sequence
  Description of Artificial Sequence: Synthetic oligonucleotide
cucgagagugccacguuua

SEQ ID NO: 211500 - RNA, 19 nt, Artificial Sequence
  Description of Artificial Sequence: Synthetic oligonucleotide
uuacuggguuacagcuuua

SEQ ID NO: 211501 - RNA, 19 nt, Artificial Sequence
  Description of Artificial Sequence: Synthetic oligonucleotide
ggggcgauccccuuuccuc

SEQ ID NO: 211502 - RNA, 19 nt, Artificial Sequence
  Description of Artificial Sequence: Synthetic oligonucleotide
cugaccgucaaagggaagu

SEQ ID NO: 211503 - RNA, 19 nt, Artificial Sequence
  Description of Artificial Sequence: Synthetic oligonucleotide
aggggcgauccccuuuccu

SEQ ID NO: 211504 - RNA, 19 nt, Artificial Sequence
  Description of Artificial Sequence: Synthetic oligonucleotide
ggccauuauacguugcggu

SEQ ID NO: 211505 - RNA, 19 nt, Artificial Sequence
  Description of Artificial Sequence: Synthetic oligonucleotide
ucacuauguuuggaugauu

SEQ ID NO: 211506 - RNA, 19 nt, Artificial Sequence
  Description of Artificial Sequence: Synthetic oligonucleotide
aguggaaccucggcuucga

SEQ ID NO: 211507 - RNA, 19 nt, Artificial Sequence
  Description of Artificial Sequence: Synthetic oligonucleotide
caggugggccauuauacgu

SEQ ID NO: 211508 - RNA, 19 nt, Artificial Sequence
  Description of Artificial Sequence: Synthetic oligonucleotide
acgaggguguacagaauaa

SEQ ID NO: 211509 - RNA, 19 nt, Artificial Sequence
  Description of Artificial Sequence: Synthetic oligonucleotide
uggcuucgugggacaagcu

SEQ ID NO: 211510 - RNA, 19 nt, Artificial Sequence
  Description of Artificial Sequence: Synthetic oligonucleotide
agucacgugcagauggguu

SEQ ID NO: 211511 - RNA, 19 nt, Artificial Sequence
  Description of Artificial Sequence: Synthetic oligonucleotide
gcgacuugagcccucauau

SEQ ID NO: 211512 - RNA, 19 nt, Artificial Sequence
  Description of Artificial Sequence: Synthetic oligonucleotide
ugcucgagagugccacguu

SEQ ID NO: 211513 - RNA, 19 nt, Artificial Sequence
  Description of Artificial Sequence: Synthetic oligonucleotide
uuccgccgugucauuccac

SEQ ID NO: 211514 - RNA, 19 nt, Artificial Sequence
  Description of Artificial Sequence: Synthetic oligonucleotide
ugcagacguuauugccuaa

SEQ ID NO: 211515 - RNA, 19 nt, Artificial Sequence
  Description of Artificial Sequence: Synthetic oligonucleotide
aggugggccauuauacguu

SEQ ID NO: 211516 - RNA, 19 nt, Artificial Sequence
  Description of Artificial Sequence: Synthetic oligonucleotide
guuccgccgugucauucca

SEQ ID NO: 211517 - RNA, 19 nt, Artificial Sequence
  Description of Artificial Sequence: Synthetic oligonucleotide
agcguccagcucugaagau

SEQ ID NO: 211518 - RNA, 19 nt, Artificial Sequence
  Description of Artificial Sequence: Synthetic oligonucleotide
cacguuuaacuggguucag

SEQ ID NO: 211519 - RNA, 19 nt, Artificial Sequence
  Description of Artificial Sequence: Synthetic oligonucleotide
agguucucugcgugcccgu

SEQ ID NO: 211520 - RNA, 19 nt, Artificial Sequence
  Description of Artificial Sequence: Synthetic oligonucleotide
gguuaauucuuagcaguua

SEQ ID NO: 211521 - RNA, 19 nt, Artificial Sequence
  Description of Artificial Sequence: Synthetic oligonucleotide
gacuuucgggagggaauuc

SEQ ID NO: 211522 - RNA, 19 nt, Artificial Sequence
  Description of Artificial Sequence: Synthetic oligonucleotide
cauugcgacuugagcccuc

SEQ ID NO: 211523 - RNA, 19 nt, Artificial Sequence
  Description of Artificial Sequence: Synthetic oligonucleotide
ccguuccucucauauucag

SEQ ID NO: 211524 - RNA, 19 nt, Artificial Sequence
  Description of Artificial Sequence: Synthetic oligonucleotide
ggauugcuugcauucccaa

SEQ ID NO: 211525 - RNA, 19 nt, Artificial Sequence
  Description of Artificial Sequence: Synthetic oligonucleotide
gacuccccgggcaauggaa

SEQ ID NO: 211526 - RNA, 19 nt, Artificial Sequence
  Description of Artificial Sequence: Synthetic oligonucleotide
guugcgguucgccgcucuc

SEQ ID NO: 211527 - RNA, 19 nt, Artificial Sequence
  Description of Artificial Sequence: Synthetic oligonucleotide
gagcccucauaucucccgu

SEQ ID NO: 211528 - RNA, 19 nt, Artificial Sequence
  Description of Artificial Sequence: Synthetic oligonucleotide
ccgcuugacuuucgggagg

SEQ ID NO: 211529 - RNA, 19 nt, Artificial Sequence
  Description of Artificial Sequence: Synthetic oligonucleotide
gugggccauuauacguugc

SEQ ID NO: 211530 - RNA, 19 nt, Artificial Sequence
  Description of Artificial Sequence: Synthetic oligonucleotide
gcccgucauacuucuugcc

SEQ ID NO: 211531 - RNA, 19 nt, Artificial Sequence
  Description of Artificial Sequence: Synthetic oligonucleotide
gcuuggccgcaccuuagca

SEQ ID NO: 211532 - RNA, 19 nt, Artificial Sequence
  Description of Artificial Sequence: Synthetic oligonucleotide
gggauugcuugcauuccca

SEQ ID NO: 211533 - RNA, 19 nt, Artificial Sequence
  Description of Artificial Sequence: Synthetic oligonucleotide
aguguuccgccgugucauu

SEQ ID NO: 211534 - RNA, 19 nt, Artificial Sequence
  Description of Artificial Sequence: Synthetic oligonucleotide
uggggauggcaggacuuuu

SEQ ID NO: 211535 - RNA, 19 nt, Artificial Sequence
  Description of Artificial Sequence: Synthetic oligonucleotide
gguuggccguggaaagugc

SEQ ID NO: 211536 - RNA, 19 nt, Artificial Sequence
  Description of Artificial Sequence: Synthetic oligonucleotide
cccgucgccauggacacac

SEQ ID NO: 211537 - RNA, 19 nt, Artificial Sequence
  Description of Artificial Sequence: Synthetic oligonucleotide
gccgugucauuccaccaga

SEQ ID NO: 211538 - RNA, 19 nt, Artificial Sequence
  Description of Artificial Sequence: Synthetic oligonucleotide
cacuguaccgucucugcuu

SEQ ID NO: 211539 - RNA, 19 nt, Artificial Sequence
  Description of Artificial Sequence: Synthetic oligonucleotide
guguuccgccgugucauuc

SEQ ID NO: 211540 - RNA, 19 nt, Artificial Sequence
  Description of Artificial Sequence: Synthetic oligonucleotide
uccuacagcugugccgcuu

SEQ ID NO: 211541 - RNA, 19 nt, Artificial Sequence
  Description of Artificial Sequence: Synthetic oligonucleotide
cagacguuauugccuaaau

SEQ ID NO: 211542 - RNA, 19 nt, Artificial Sequence
  Description of Artificial Sequence: Synthetic oligonucleotide
gcuaauacuguggguggaa

SEQ ID NO: 211543 - RNA, 19 nt, Artificial Sequence
  Description of Artificial Sequence: Synthetic oligonucleotide
agugcucgucugacuccuc

SEQ ID NO: 211544 - RNA, 19 nt, Artificial Sequence
  Description of Artificial Sequence: Synthetic oligonucleotide
caggggcgauccccuuucc

SEQ ID NO: 211545 - RNA, 19 nt, Artificial Sequence
  Description of Artificial Sequence: Synthetic oligonucleotide
uugcgacuugagcccucau

SEQ ID NO: 211546 - RNA, 19 nt, Artificial Sequence
  Description of Artificial Sequence: Synthetic oligonucleotide
cugguucaacaaauggcuu

SEQ ID NO: 211547 - RNA, 19 nt, Artificial Sequence
  Description of Artificial Sequence: Synthetic oligonucleotide
cucugcgugcccgucgcca

SEQ ID NO: 211548 - RNA, 19 nt, Artificial Sequence
  Description of Artificial Sequence: Synthetic oligonucleotide
gaaccucggcuucgagucu

SEQ ID NO: 211549 - RNA, 19 nt, Artificial Sequence
  Description of Artificial Sequence: Synthetic oligonucleotide
ccgggcaauggaaacgaga

SEQ ID NO: 211550 - RNA, 19 nt, Artificial Sequence
  Description of Artificial Sequence: Synthetic oligonucleotide
ccucucauauucaguugga

SEQ ID NO: 211551 - RNA, 19 nt, Artificial Sequence
  Description of Artificial Sequence: Synthetic oligonucleotide
cacugcuaauacugugggu

SEQ ID NO: 211552 - RNA, 19 nt, Artificial Sequence
  Description of Artificial Sequence: Synthetic oligonucleotide
cgaggguguacagaauaac

SEQ ID NO: 211553 - RNA, 19 nt, Artificial Sequence
  Description of Artificial Sequence: Synthetic oligonucleotide
cugcgugcccgucgccaug

SEQ ID NO: 211554 - RNA, 19 nt, Artificial Sequence
  Description of Artificial Sequence: Synthetic oligonucleotide
gcagacguuauugccuaaa

SEQ ID NO: 211555 - RNA, 19 nt, Artificial Sequence
  Description of Artificial Sequence: Synthetic oligonucleotide
gccgcucucgagguuggcc

SEQ ID NO: 211556 - RNA, 19 nt, Artificial Sequence
  Description of Artificial Sequence: Synthetic oligonucleotide
ggccgcaccuuagcaagug

SEQ ID NO: 211557 - RNA, 19 nt, Artificial Sequence
  Description of Artificial Sequence: Synthetic oligonucleotide
cgccgugucauuccaccag

SEQ ID NO: 211558 - RNA, 19 nt, Artificial Sequence
  Description of Artificial Sequence: Synthetic oligonucleotide
ggucgcuaucugcagugcu

SEQ ID NO: 211559 - RNA, 19 nt, Artificial Sequence
  Description of Artificial Sequence: Synthetic oligonucleotide
ccacugacgaggguguaca

SEQ ID NO: 211560 - RNA, 19 nt, Artificial Sequence
  Description of Artificial Sequence: Synthetic oligonucleotide
cgugucuaguuuacugcca

SEQ ID NO: 211561 - RNA, 19 nt, Artificial Sequence
  Description of Artificial Sequence: Synthetic oligonucleotide
guuccccuugccguauugu

SEQ ID NO: 211562 - RNA, 19 nt, Artificial Sequence
  Description of Artificial Sequence: Synthetic oligonucleotide
acguugcgguucgccgcuc

SEQ ID NO: 211563 - RNA, 19 nt, Artificial Sequence
  Description of Artificial Sequence: Synthetic oligonucleotide
ccgcaccuuagcaagugaa

SEQ ID NO: 211564 - RNA, 19 nt, Artificial Sequence
  Description of Artificial Sequence: Synthetic oligonucleotide
cgacuugagcccucauauc

SEQ ID NO: 211565 - RNA, 19 nt, Artificial Sequence
  Description of Artificial Sequence: Synthetic oligonucleotide
cgaauccgaucuggggugg

SEQ ID NO: 211566 - RNA, 19 nt, Artificial Sequence
  Description of Artificial Sequence: Synthetic oligonucleotide
gaauccgaucugggguggu

SEQ ID NO: 211567 - RNA, 19 nt, Artificial Sequence
  Description of Artificial Sequence: Synthetic oligonucleotide
gccgcaccuuagcaaguga

SEQ ID NO: 211568 - RNA, 19 nt, Artificial Sequence
  Description of Artificial Sequence: Synthetic oligonucleotide
gcgcucaggaauaucugcu

SEQ ID NO: 211569 - RNA, 19 nt, Artificial Sequence
  Description of Artificial Sequence: Synthetic oligonucleotide
cccguuccucucauauuca

SEQ ID NO: 211570 - RNA, 19 nt, Artificial Sequence
  Description of Artificial Sequence: Synthetic oligonucleotide
gcgguucgccgcucucgag

SEQ ID NO: 211571 - RNA, 19 nt, Artificial Sequence
  Description of Artificial Sequence: Synthetic oligonucleotide
cgaagauacauugcgacuu

SEQ ID NO: 211572 - RNA, 19 nt, Artificial Sequence
  Description of Artificial Sequence: Synthetic oligonucleotide
gguucucugcgugcccguc

SEQ ID NO: 211573 - RNA, 19 nt, Artificial Sequence
  Description of Artificial Sequence: Synthetic oligonucleotide
cccgggcaauggaaacgag

SEQ ID NO: 211574 - RNA, 19 nt, Artificial Sequence
  Description of Artificial Sequence: Synthetic oligonucleotide
cgcaucaugucacugggau

SEQ ID NO: 211575 - RNA, 19 nt, Artificial Sequence
  Description of Artificial Sequence: Synthetic oligonucleotide
cgcaccuuagcaagugaaa

SEQ ID NO: 211576 - RNA, 19 nt, Artificial Sequence
  Description of Artificial Sequence: Synthetic oligonucleotide
gcucgagagugccacguuu

SEQ ID NO: 211577 - RNA, 19 nt, Artificial Sequence
  Description of Artificial Sequence: Synthetic oligonucleotide
cgauccccuuuccuccuac

SEQ ID NO: 211578 - RNA, 19 nt, Artificial Sequence
  Description of Artificial Sequence: Synthetic oligonucleotide
cucccguuccucucauauu

SEQ ID NO: 211579 - RNA, 19 nt, Artificial Sequence
  Description of Artificial Sequence: Synthetic oligonucleotide
ccccgggcaauggaaacga

SEQ ID NO: 211580 - RNA, 19 nt, Artificial Sequence
  Description of Artificial Sequence: Synthetic oligonucleotide
cccuugccguauuguuuuc

SEQ ID NO: 211581 - RNA, 19 nt, Artificial Sequence
  Description of Artificial Sequence: Synthetic oligonucleotide
ccgugccucuugggaagcg

SEQ ID NO: 211582 - RNA, 19 nt, Artificial Sequence
  Description of Artificial Sequence: Synthetic oligonucleotide
cgugcccgucgccauggac

SEQ ID NO: 211583 - RNA, 19 nt, Artificial Sequence
  Description of Artificial Sequence: Synthetic oligonucleotide
ccgccgugucauuccacca

SEQ ID NO: 211584 - RNA, 19 nt, Artificial Sequence
  Description of Artificial Sequence: Synthetic oligonucleotide
gaacgagguuuugccucuu

SEQ ID NO: 211585 - RNA, 19 nt, Artificial Sequence
  Description of Artificial Sequence: Synthetic oligonucleotide
gcuugacuuucgggaggga

SEQ ID NO: 211586 - RNA, 19 nt, Artificial Sequence
  Description of Artificial Sequence: Synthetic oligonucleotide
cgucgccauggacacacaa

SEQ ID NO: 211587 - RNA, 19 nt, Artificial Sequence
  Description of Artificial Sequence: Synthetic oligonucleotide
ccgcaucuaauaacagauu

SEQ ID NO: 211588 - RNA, 19 nt, Artificial Sequence
  Description of Artificial Sequence: Synthetic oligonucleotide
ggcaggggcgauccccuuu

SEQ ID NO: 211589 - RNA, 19 nt, Artificial Sequence
  Description of Artificial Sequence: Synthetic oligonucleotide
cguuuaaaccggacuccau

SEQ ID NO: 211590 - RNA, 19 nt, Artificial Sequence
  Description of Artificial Sequence: Synthetic oligonucleotide
guucgccgcucucgagguu

SEQ ID NO: 211591 - RNA, 19 nt, Artificial Sequence
  Description of Artificial Sequence: Synthetic oligonucleotide
gugccacguuuaacugggu

SEQ ID NO: 211592 - RNA, 19 nt, Artificial Sequence
  Description of Artificial Sequence: Synthetic oligonucleotide
ccgucgccauggacacaca

SEQ ID NO: 211593 - RNA, 19 nt, Artificial Sequence
  Description of Artificial Sequence: Synthetic oligonucleotide
cguugcgguucgccgcucu

SEQ ID NO: 211594 - RNA, 19 nt, Artificial Sequence
  Description of Artificial Sequence: Synthetic oligonucleotide
cgggcccgucauacuucuu

SEQ ID NO: 211595 - RNA, 19 nt, Artificial Sequence
  Description of Artificial Sequence: Synthetic oligonucleotide
aauuucacuaaguuucacc

SEQ ID NO: 211596 - RNA, 19 nt, Artificial Sequence
  Description of Artificial Sequence: Synthetic oligonucleotide
aaagaauuaggcuuuagca

SEQ ID NO: 211597 - RNA, 19 nt, Artificial Sequence
  Description of Artificial Sequence: Synthetic oligonucleotide
uaaauuauggaccugcucu

SEQ ID NO: 211598 - RNA, 19 nt, Artificial Sequence
  Description of Artificial Sequence: Synthetic oligonucleotide
aacuacuuaagcuucguuc

SEQ ID NO: 211599 - RNA, 19 nt, Artificial Sequence
  Description of Artificial Sequence: Synthetic oligonucleotide
ucuauuaacaccaucugga

SEQ ID NO: 211600 - RNA, 19 nt, Artificial Sequence
  Description of Artificial Sequence: Synthetic oligonucleotide
aaagcagugcaucugggac

SEQ ID NO: 211601 - RNA, 19 nt, Artificial Sequence
  Description of Artificial Sequence: Synthetic oligonucleotide
uauuuuaaggucaacgucu

SEQ ID NO: 211602 - RNA, 19 nt, Artificial Sequence
  Description of Artificial Sequence: Synthetic oligonucleotide
agugguuauaacuuuugcc

SEQ ID NO: 211603 - RNA, 19 nt, Artificial Sequence
  Description of Artificial Sequence: Synthetic oligonucleotide
auagcuuaaagaauuaggc

SEQ ID NO: 211604 - RNA, 19 nt, Artificial Sequence
  Description of Artificial Sequence: Synthetic oligonucleotide
aauagggcuauguauugac

SEQ ID NO: 211605 - RNA, 19 nt, Artificial Sequence
  Description of Artificial Sequence: Synthetic oligonucleotide
agauguucgcacuaaagac

SEQ ID NO: 211606 - RNA, 19 nt, Artificial Sequence
  Description of Artificial Sequence: Synthetic oligonucleotide
acucaauauaccuuguaac

SEQ ID NO: 211607 - RNA, 19 nt, Artificial Sequence
  Description of Artificial Sequence: Synthetic oligonucleotide
auuaaacucccucaucagc

SEQ ID NO: 211608 - RNA, 19 nt, Artificial Sequence
  Description of Artificial Sequence: Synthetic oligonucleotide
acgaagaucuuucuggagc

SEQ ID NO: 211609 - RNA, 19 nt, Artificial Sequence
  Description of Artificial Sequence: Synthetic oligonucleotide
auugccaccuuugagaggc

SEQ ID NO: 211610 - RNA, 19 nt, Artificial Sequence
  Description of Artificial Sequence: Synthetic oligonucleotide
ugucacgucaucaagcugc

SEQ ID NO: 211611 - RNA, 19 nt, Artificial Sequence
  Description of Artificial Sequence: Synthetic oligonucleotide
aagauguucgcacuaaaga

SEQ ID NO: 211612 - RNA, 19 nt, Artificial Sequence
  Description of Artificial Sequence: Synthetic oligonucleotide
uuagaagaccagaacagag

SEQ ID NO: 211613 - RNA, 19 nt, Artificial Sequence
  Description of Artificial Sequence: Synthetic oligonucleotide
uucgcaaauauucaaacuc

SEQ ID NO: 211614 - RNA, 19 nt, Artificial Sequence
  Description of Artificial Sequence: Synthetic oligonucleotide
uuaacuccaggucauuacg

SEQ ID NO: 211615 - RNA, 19 nt, Artificial Sequence
  Description of Artificial Sequence: Synthetic oligonucleotide
uguuauuccccaauuucgg

SEQ ID NO: 211616 - RNA, 19 nt, Artificial Sequence
  Description of Artificial Sequence: Synthetic oligonucleotide
aaauuauggaccugcucuc

SEQ ID NO: 211617 - RNA, 19 nt, Artificial Sequence
  Description of Artificial Sequence: Synthetic oligonucleotide
aauccucuaauuuaucaga

SEQ ID NO: 211618 - RNA, 19 nt, Artificial Sequence
  Description of Artificial Sequence: Synthetic oligonucleotide
aagaauuaggcuuuagcaa

SEQ ID NO: 211619 - RNA, 19 nt, Artificial Sequence
  Description of Artificial Sequence: Synthetic oligonucleotide
uaacuuuaacuccagguca

SEQ ID NO: 211620 - RNA, 19 nt, Artificial Sequence
  Description of Artificial Sequence: Synthetic oligonucleotide
uguugauacauucucucug

SEQ ID NO: 211621 - RNA, 19 nt, Artificial Sequence
  Description of Artificial Sequence: Synthetic oligonucleotide
ucuaacucgagcuuguccu

SEQ ID NO: 211622 - RNA, 19 nt, Artificial Sequence
  Description of Artificial Sequence: Synthetic oligonucleotide
ucguauuuuaaggucaacg

SEQ ID NO: 211623 - RNA, 19 nt, Artificial Sequence
  Description of Artificial Sequence: Synthetic oligonucleotide
cacacgaagaucuuucugg

SEQ ID NO: 211624 - RNA, 19 nt, Artificial Sequence
  Description of Artificial Sequence: Synthetic oligonucleotide
aaagcuuuuaacuccccgu

SEQ ID NO: 211625 - RNA, 19 nt, Artificial Sequence
  Description of Artificial Sequence: Synthetic oligonucleotide
ugaauauuucccucgauaa

SEQ ID NO: 211626 - RNA, 19 nt, Artificial Sequence
  Description of Artificial Sequence: Synthetic oligonucleotide
uccgcagugacuuaucuug

SEQ ID NO: 211627 - RNA, 19 nt, Artificial Sequence
  Description of Artificial Sequence: Synthetic oligonucleotide
uaaaagcuagguaaauaug

SEQ ID NO: 211628 - RNA, 19 nt, Artificial Sequence
  Description of Artificial Sequence: Synthetic oligonucleotide
aacaaaagaaagggacgcc

SEQ ID NO: 211629 - RNA, 19 nt, Artificial Sequence
  Description of Artificial Sequence: Synthetic oligonucleotide
aagagugagacaucagugu

SEQ ID NO: 211630 - RNA, 19 nt, Artificial Sequence
  Description of Artificial Sequence: Synthetic oligonucleotide
cuuuaugggacuccgaaac

SEQ ID NO: 211631 - RNA, 19 nt, Artificial Sequence
  Description of Artificial Sequence: Synthetic oligonucleotide
uuugccaagcagcaguugc

SEQ ID NO: 211632 - RNA, 19 nt, Artificial Sequence
  Description of Artificial Sequence: Synthetic oligonucleotide
uuuucgcaaauauucaaac

SEQ ID NO: 211633 - RNA, 19 nt, Artificial Sequence
  Description of Artificial Sequence: Synthetic oligonucleotide
uauaacuuuugccaugguc

SEQ ID NO: 211634 - RNA, 19 nt, Artificial Sequence
  Description of Artificial Sequence: Synthetic oligonucleotide
caauucaagucuaugugag

SEQ ID NO: 211635 - RNA, 19 nt, Artificial Sequence
  Description of Artificial Sequence: Synthetic oligonucleotide
cuaacuuuaacuccagguc

SEQ ID NO: 211636 - RNA, 19 nt, Artificial Sequence
  Description of Artificial Sequence: Synthetic oligonucleotide
uuucgguuggaucaccugc

SEQ ID NO: 211637 - RNA, 19 nt, Artificial Sequence
  Description of Artificial Sequence: Synthetic oligonucleotide
uuuugaggcacuuucuaac

SEQ ID NO: 211638 - RNA, 19 nt, Artificial Sequence
  Description of Artificial Sequence: Synthetic oligonucleotide
gaacaaaagaaagggacgc

SEQ ID NO: 211639 - RNA, 19 nt, Artificial Sequence
  Description of Artificial Sequence: Synthetic oligonucleotide
uacaauagggcuauguauu

SEQ ID NO: 211640 - RNA, 19 nt, Artificial Sequence
  Description of Artificial Sequence: Synthetic oligonucleotide
caagaugacguucggagcc

SEQ ID NO: 211641 - RNA, 19 nt, Artificial Sequence
  Description of Artificial Sequence: Synthetic oligonucleotide
ucgcaaauauucaaacuca

SEQ ID NO: 211642 - RNA, 19 nt, Artificial Sequence
  Description of Artificial Sequence: Synthetic oligonucleotide
acuucuauuaacaccaucu

SEQ ID NO: 211643 - RNA, 19 nt, Artificial Sequence
  Description of Artificial Sequence: Synthetic oligonucleotide
uccgcaaucuuucugugca

SEQ ID NO: 211644 - RNA, 19 nt, Artificial Sequence
  Description of Artificial Sequence: Synthetic oligonucleotide
ucgauaacuacuuaagcuu

SEQ ID NO: 211645 - RNA, 19 nt, Artificial Sequence
  Description of Artificial Sequence: Synthetic oligonucleotide
ugggaaauaguccauuaaa

SEQ ID NO: 211646 - RNA, 19 nt, Artificial Sequence
  Description of Artificial Sequence: Synthetic oligonucleotide
acaaaagaaagggacgccg

SEQ ID NO: 211647 - RNA, 19 nt, Artificial Sequence
  Description of Artificial Sequence: Synthetic oligonucleotide
uauuaaacucccucaucag

SEQ ID NO: 211648 - RNA, 19 nt, Artificial Sequence
  Description of Artificial Sequence: Synthetic oligonucleotide
ugauaugccgugacgagcu

SEQ ID NO: 211649 - RNA, 19 nt, Artificial Sequence
  Description of Artificial Sequence: Synthetic oligonucleotide
acccaucauauauucaaac

SEQ ID NO: 211650 - RNA, 19 nt, Artificial Sequence
  Description of Artificial Sequence: Synthetic oligonucleotide
ucauauauucaaacagcac

SEQ ID NO: 211651 - RNA, 19 nt, Artificial Sequence
  Description of Artificial Sequence: Synthetic oligonucleotide
uuuaacuccaggucauuac

SEQ ID NO: 211652 - RNA, 19 nt, Artificial Sequence
  Description of Artificial Sequence: Synthetic oligonucleotide
caaauugccaccuuugaga

SEQ ID NO: 211653 - RNA, 19 nt, Artificial Sequence
  Description of Artificial Sequence: Synthetic oligonucleotide
uagcuuaaagaauuaggcu

SEQ ID NO: 211654 - RNA, 19 nt, Artificial Sequence
  Description of Artificial Sequence: Synthetic oligonucleotide
uguguugauacauucucuc

SEQ ID NO: 211655 - RNA, 19 nt, Artificial Sequence
  Description of Artificial Sequence: Synthetic oligonucleotide
auguuauuccccaauuucg

SEQ ID NO: 211656 - RNA, 19 nt, Artificial Sequence
  Description of Artificial Sequence: Synthetic oligonucleotide
aauaguccauuaaauccuc

SEQ ID NO: 211657 - RNA, 19 nt, Artificial Sequence
  Description of Artificial Sequence: Synthetic oligonucleotide
uauuccccaauuucgguug

SEQ ID NO: 211658 - RNA, 19 nt, Artificial Sequence
  Description of Artificial Sequence: Synthetic oligonucleotide
aucuuucuggagccuagcc

SEQ ID NO: 211659 - RNA, 19 nt, Artificial Sequence
  Description of Artificial Sequence: Synthetic oligonucleotide
uggguauuaaacucccuca

SEQ ID NO: 211660 - RNA, 19 nt, Artificial Sequence
  Description of Artificial Sequence: Synthetic oligonucleotide
uucuaauccuuguuggugu

SEQ ID NO: 211661 - RNA, 19 nt, Artificial Sequence
  Description of Artificial Sequence: Synthetic oligonucleotide
aggucaacgucuccaauuc

SEQ ID NO: 211662 - RNA, 19 nt, Artificial Sequence
  Description of Artificial Sequence: Synthetic oligonucleotide
agcuagguaaauaugaggu

SEQ ID NO: 211663 - RNA, 19 nt, Artificial Sequence
  Description of Artificial Sequence: Synthetic oligonucleotide
cuauuaacaccaucuggag

SEQ ID NO: 211664 - RNA, 19 nt, Artificial Sequence
  Description of Artificial Sequence: Synthetic oligonucleotide
ucuuacuaagucugacucc

SEQ ID NO: 211665 - RNA, 19 nt, Artificial Sequence
  Description of Artificial Sequence: Synthetic oligonucleotide
ucaacgucuccaauucaag

SEQ ID NO: 211666 - RNA, 19 nt, Artificial Sequence
  Description of Artificial Sequence: Synthetic oligonucleotide
aagucuaugugagucccuc

SEQ ID NO: 211667 - RNA, 19 nt, Artificial Sequence
  Description of Artificial Sequence: Synthetic oligonucleotide
ucugauaugccgugacgag

SEQ ID NO: 211668 - RNA, 19 nt, Artificial Sequence
  Description of Artificial Sequence: Synthetic oligonucleotide
uuaugggacuccgaaacag

SEQ ID NO: 211669 - RNA, 19 nt, Artificial Sequence
  Description of Artificial Sequence: Synthetic oligonucleotide
uucuaacucgagcuugucc

SEQ ID NO: 211670 - RNA, 19 nt, Artificial Sequence
  Description of Artificial Sequence: Synthetic oligonucleotide
aauucaagucuaugugagu

SEQ ID NO: 211671 - RNA, 19 nt, Artificial Sequence
  Description of Artificial Sequence: Synthetic oligonucleotide
gaaucacugaucagagugg

SEQ ID NO: 211672 - RNA, 19 nt, Artificial Sequence
  Description of Artificial Sequence: Synthetic oligonucleotide
guauuuuaaggucaacguc

SEQ ID NO: 211673 - RNA, 19 nt, Artificial Sequence
  Description of Artificial Sequence: Synthetic oligonucleotide
ugugucgcccgacugagga

SEQ ID NO: 211674 - RNA, 19 nt, Artificial Sequence
  Description of Artificial Sequence: Synthetic oligonucleotide
uuuagaagaccagaacaga

SEQ ID NO: 211675 - RNA, 19 nt, Artificial Sequence
  Description of Artificial Sequence: Synthetic oligonucleotide
uuugaggcacuuucuaacu

SEQ ID NO: 211676 - RNA, 19 nt, Artificial Sequence
  Description of Artificial Sequence: Synthetic oligonucleotide
gaagauguucgcacuaaag

SEQ ID NO: 211677 - RNA, 19 nt, Artificial Sequence
  Description of Artificial Sequence: Synthetic oligonucleotide
uaucuuuucaaacggucuu

SEQ ID NO: 211678 - RNA, 19 nt, Artificial Sequence
  Description of Artificial Sequence: Synthetic oligonucleotide
uccuuuaugggacuccgaa

SEQ ID NO: 211679 - RNA, 19 nt, Artificial Sequence
  Description of Artificial Sequence: Synthetic oligonucleotide
uuuaugggacuccgaaaca

SEQ ID NO: 211680 - RNA, 19 nt, Artificial Sequence
  Description of Artificial Sequence: Synthetic oligonucleotide
ggaaauaguccauuaaauc

SEQ ID NO: 211681 - RNA, 19 nt, Artificial Sequence
  Description of Artificial Sequence: Synthetic oligonucleotide
ucaguagguucuccgaaga

SEQ ID NO: 211682 - RNA, 19 nt, Artificial Sequence
  Description of Artificial Sequence: Synthetic oligonucleotide
uucuccgcaaucuuucugu

SEQ ID NO: 211683 - RNA, 19 nt, Artificial Sequence
  Description of Artificial Sequence: Synthetic oligonucleotide
cucguauuucuucuguagc

SEQ ID NO: 211684 - RNA, 19 nt, Artificial Sequence
  Description of Artificial Sequence: Synthetic oligonucleotide
acggucuucuaaauuaugg

SEQ ID NO: 211685 - RNA, 19 nt, Artificial Sequence
  Description of Artificial Sequence: Synthetic oligonucleotide
acaauagggcuauguauug

SEQ ID NO: 211686 - RNA, 19 nt, Artificial Sequence
  Description of Artificial Sequence: Synthetic oligonucleotide
agccuagccaccucccugc

SEQ ID NO: 211687 - RNA, 19 nt, Artificial Sequence
  Description of Artificial Sequence: Synthetic oligonucleotide
ucaagucuaugugaguccc

SEQ ID NO: 211688 - RNA, 19 nt, Artificial Sequence
  Description of Artificial Sequence: Synthetic oligonucleotide
gacucaauauaccuuguaa

SEQ ID NO: 211689 - RNA, 19 nt, Artificial Sequence
  Description of Artificial Sequence: Synthetic oligonucleotide
gacuccgaaacagagacuc

SEQ ID NO: 211690 - RNA, 19 nt, Artificial Sequence
  Description of Artificial Sequence: Synthetic oligonucleotide
auggucuuggucucacgac

SEQ ID NO: 211691 - RNA, 19 nt, Artificial Sequence
  Description of Artificial Sequence: Synthetic oligonucleotide
acaucagccgggcaucuuc

SEQ ID NO: 211692 - RNA, 19 nt, Artificial Sequence
  Description of Artificial Sequence: Synthetic oligonucleotide
auuauggaccugcucucuc

SEQ ID NO: 211693 - RNA, 19 nt, Artificial Sequence
  Description of Artificial Sequence: Synthetic oligonucleotide
caggucugcauacaauagg

SEQ ID NO: 211694 - RNA, 19 nt, Artificial Sequence
  Description of Artificial Sequence: Synthetic oligonucleotide
ugacuuaucuugacucuga

SEQ ID NO: 211695 - RNA, 19 nt, Artificial Sequence
  Description of Artificial Sequence: Synthetic oligonucleotide
agcgggacaguccagguca

SEQ ID NO: 211696 - RNA, 19 nt, Artificial Sequence
  Description of Artificial Sequence: Synthetic oligonucleotide
aacaucaguauaaaagcua

SEQ ID NO: 211697 - RNA, 19 nt, Artificial Sequence
  Description of Artificial Sequence: Synthetic oligonucleotide
ucuucgcaaccgcugaagc

SEQ ID NO: 211698 - RNA, 19 nt, Artificial Sequence
  Description of Artificial Sequence: Synthetic oligonucleotide
caucugggauucaucauag

SEQ ID NO: 211699 - RNA, 19 nt, Artificial Sequence
  Description of Artificial Sequence: Synthetic oligonucleotide
caaacggucuucuaaauua

SEQ ID NO: 211700 - RNA, 19 nt, Artificial Sequence
  Description of Artificial Sequence: Synthetic oligonucleotide
agucugauaugccgugacg

SEQ ID NO: 211701 - RNA, 19 nt, Artificial Sequence
  Description of Artificial Sequence: Synthetic oligonucleotide
ugcgauuucucguauuuua

SEQ ID NO: 211702 - RNA, 19 nt, Artificial Sequence
  Description of Artificial Sequence: Synthetic oligonucleotide
uuaaauccucuaauuuauc

SEQ ID NO: 211703 - RNA, 19 nt, Artificial Sequence
  Description of Artificial Sequence: Synthetic oligonucleotide
gucauuuacuuuugaaguc

SEQ ID NO: 211704 - RNA, 19 nt, Artificial Sequence
  Description of Artificial Sequence: Synthetic oligonucleotide
ucaauauaccuuguaacuu

SEQ ID NO: 211705 - RNA, 19 nt, Artificial Sequence
  Description of Artificial Sequence: Synthetic oligonucleotide
auguucgcacuaaagacuc

SEQ ID NO: 211706 - RNA, 19 nt, Artificial Sequence
  Description of Artificial Sequence: Synthetic oligonucleotide
caggucauuacgcugggug

SEQ ID NO: 211707 - RNA, 19 nt, Artificial Sequence
  Description of Artificial Sequence: Synthetic oligonucleotide
gaugcuucacuucuauuaa

SEQ ID NO: 211708 - RNA, 19 nt, Artificial Sequence
  Description of Artificial Sequence: Synthetic oligonucleotide
aaucacugaucagaguggu

SEQ ID NO: 211709 - RNA, 19 nt, Artificial Sequence
  Description of Artificial Sequence: Synthetic oligonucleotide
augcuucacuucuauuaac

SEQ ID NO: 211710 - RNA, 19 nt, Artificial Sequence
  Description of Artificial Sequence: Synthetic oligonucleotide
cuugcccuaguuuugcuuc

SEQ ID NO: 211711 - RNA, 19 nt, Artificial Sequence
  Description of Artificial Sequence: Synthetic oligonucleotide
uaugggacuccgaaacaga

SEQ ID NO: 211712 - RNA, 19 nt, Artificial Sequence
  Description of Artificial Sequence: Synthetic oligonucleotide
uacuaagucugacuccagu

SEQ ID NO: 211713 - RNA, 19 nt, Artificial Sequence
  Description of Artificial Sequence: Synthetic oligonucleotide
uucgguuggaucaccugca

SEQ ID NO: 211714 - RNA, 19 nt, Artificial Sequence
  Description of Artificial Sequence: Synthetic oligonucleotide
gagaugacauggccaacag

SEQ ID NO: 211715 - RNA, 19 nt, Artificial Sequence
  Description of Artificial Sequence: Synthetic oligonucleotide
uauugacuauuuacaauuu

SEQ ID NO: 211716 - RNA, 19 nt, Artificial Sequence
  Description of Artificial Sequence: Synthetic oligonucleotide
cauaucagaagguggguca

SEQ ID NO: 211717 - RNA, 19 nt, Artificial Sequence
  Description of Artificial Sequence: Synthetic oligonucleotide
cuggguauuaaacucccuc

SEQ ID NO: 211718 - RNA, 19 nt, Artificial Sequence
  Description of Artificial Sequence: Synthetic oligonucleotide
uagggcuauguauugacua

SEQ ID NO: 211719 - RNA, 19 nt, Artificial Sequence
  Description of Artificial Sequence: Synthetic oligonucleotide
uuauggaccugcucucuca

SEQ ID NO: 211720 - RNA, 19 nt, Artificial Sequence
  Description of Artificial Sequence: Synthetic oligonucleotide
cuaaauuauggaccugcuc

SEQ ID NO: 211721 - RNA, 19 nt, Artificial Sequence
  Description of Artificial Sequence: Synthetic oligonucleotide
uaugccgugacgagcucug

SEQ ID NO: 211722 - RNA, 19 nt, Artificial Sequence
  Description of Artificial Sequence: Synthetic oligonucleotide
guuucauuguccuccgcac

SEQ ID NO: 211723 - RNA, 19 nt, Artificial Sequence
  Description of Artificial Sequence: Synthetic oligonucleotide
uccgaagagugagacauca

SEQ ID NO: 211724 - RNA, 19 nt, Artificial Sequence
  Description of Artificial Sequence: Synthetic oligonucleotide
uuaaggucaacgucuccaa

SEQ ID NO: 211725 - RNA, 19 nt, Artificial Sequence
  Description of Artificial Sequence: Synthetic oligonucleotide
ugucgcccgacugaggagg

SEQ ID NO: 211726 - RNA, 19 nt, Artificial Sequence
  Description of Artificial Sequence: Synthetic oligonucleotide
auauauucaaacagcacuu

SEQ ID NO: 211727 - RNA, 19 nt, Artificial Sequence
  Description of Artificial Sequence: Synthetic oligonucleotide
acugucaaccacacuugcc

SEQ ID NO: 211728 - RNA, 19 nt, Artificial Sequence
  Description of Artificial Sequence: Synthetic oligonucleotide
ugggccuuauggauggucu

SEQ ID NO: 211729 - RNA, 19 nt, Artificial Sequence
  Description of Artificial Sequence: Synthetic oligonucleotide
uuucaccucaaaauauauu

SEQ ID NO: 211730 - RNA, 19 nt, Artificial Sequence
  Description of Artificial Sequence: Synthetic oligonucleotide
cucgauaacuacuuaagcu

SEQ ID NO: 211731 - RNA, 19 nt, Artificial Sequence
  Description of Artificial Sequence: Synthetic oligonucleotide
aauuauggaccugcucucu

SEQ ID NO: 211732 - RNA, 19 nt, Artificial Sequence
  Description of Artificial Sequence: Synthetic oligonucleotide
cucaauauaccuuguaacu

SEQ ID NO: 211733 - RNA, 19 nt, Artificial Sequence
  Description of Artificial Sequence: Synthetic oligonucleotide
cucaguagguucuccgaag

SEQ ID NO: 211734 - RNA, 19 nt, Artificial Sequence
  Description of Artificial Sequence: Synthetic oligonucleotide
uucgcaaccgcugaagcaa

SEQ ID NO: 211735 - RNA, 19 nt, Artificial Sequence
  Description of Artificial Sequence: Synthetic oligonucleotide
aucgucuuucuccgcaauc

SEQ ID NO: 211736 - RNA, 19 nt, Artificial Sequence
  Description of Artificial Sequence: Synthetic oligonucleotide
ucaagauccucuugcuccu

SEQ ID NO: 211737 - RNA, 19 nt, Artificial Sequence
  Description of Artificial Sequence: Synthetic oligonucleotide
uucggagccaugacaucag

SEQ ID NO: 211738 - RNA, 19 nt, Artificial Sequence
  Description of Artificial Sequence: Synthetic oligonucleotide
acacuugcccuaguuuugc

SEQ ID NO: 211739 - RNA, 19 nt, Artificial Sequence
  Description of Artificial Sequence: Synthetic oligonucleotide
aguagguucuccgaagagu

SEQ ID NO: 211740 - RNA, 19 nt, Artificial Sequence
  Description of Artificial Sequence: Synthetic oligonucleotide
ugagaggcguccccacagg

SEQ ID NO: 211741 - RNA, 19 nt, Artificial Sequence
  Description of Artificial Sequence: Synthetic oligonucleotide
ggaauuucaagacaguggu

SEQ ID NO: 211742 - RNA, 19 nt, Artificial Sequence
  Description of Artificial Sequence: Synthetic oligonucleotide
caacuguugcgucucuucc

SEQ ID NO: 211743 - RNA, 19 nt, Artificial Sequence
  Description of Artificial Sequence: Synthetic oligonucleotide
uuggucucacgacccauca

SEQ ID NO: 211744 - RNA, 19 nt, Artificial Sequence
  Description of Artificial Sequence: Synthetic oligonucleotide
ggcacuuucuaacucgagc

SEQ ID NO: 211745 - RNA, 19 nt, Artificial Sequence
  Description of Artificial Sequence: Synthetic oligonucleotide
ucuccaauucaagucuaug

SEQ ID NO: 211746 - RNA, 19 nt, Artificial Sequence
  Description of Artificial Sequence: Synthetic oligonucleotide
ugugugucgcccgacugag

SEQ ID NO: 211747 - RNA, 19 nt, Artificial Sequence
  Description of Artificial Sequence: Synthetic oligonucleotide
uccauguuauuccccaauu

SEQ ID NO: 211748 - RNA, 19 nt, Artificial Sequence
  Description of Artificial Sequence: Synthetic oligonucleotide
gauuccuuuaugggacucc

SEQ ID NO: 211749 - RNA, 19 nt, Artificial Sequence
  Description of Artificial Sequence: Synthetic oligonucleotide
ucccucgauaacuacuuaa

SEQ ID NO: 211750 - RNA, 19 nt, Artificial Sequence
  Description of Artificial Sequence: Synthetic oligonucleotide
auuucgguuggaucaccug

SEQ ID NO: 211751 - RNA, 19 nt, Artificial Sequence
  Description of Artificial Sequence: Synthetic oligonucleotide
ucacgggcaucaaggaucu

SEQ ID NO: 211752 - RNA, 19 nt, Artificial Sequence
  Description of Artificial Sequence: Synthetic oligonucleotide
aacuuuaacuccaggucau

SEQ ID NO: 211753 - RNA, 19 nt, Artificial Sequence
  Description of Artificial Sequence: Synthetic oligonucleotide
ucucucuuacuaagucuga

SEQ ID NO: 211754 - RNA, 19 nt, Artificial Sequence
  Description of Artificial Sequence: Synthetic oligonucleotide
aggucauuacgcugggugu

SEQ ID NO: 211755 - RNA, 19 nt, Artificial Sequence
  Description of Artificial Sequence: Synthetic oligonucleotide
aauuucgguuggaucaccu

SEQ ID NO: 211756 - RNA, 19 nt, Artificial Sequence
  Description of Artificial Sequence: Synthetic oligonucleotide
cacgacccaucauauauuc

SEQ ID NO: 211757 - RNA, 19 nt, Artificial Sequence
  Description of Artificial Sequence: Synthetic oligonucleotide
gacuuaucuugacucugac

SEQ ID NO: 211758 - RNA, 19 nt, Artificial Sequence
  Description of Artificial Sequence: Synthetic oligonucleotide
uucuucgcaaccgcugaag

SEQ ID NO: 211759 - RNA, 19 nt, Artificial Sequence
  Description of Artificial Sequence: Synthetic oligonucleotide
ggucaaagguggcagcggg

SEQ ID NO: 211760 - RNA, 19 nt, Artificial Sequence
  Description of Artificial Sequence: Synthetic oligonucleotide
uucaaacggucuucuaaau

SEQ ID NO: 211761 - RNA, 19 nt, Artificial Sequence
  Description of Artificial Sequence: Synthetic oligonucleotide
ugacucaauauaccuugua

SEQ ID NO: 211762 - RNA, 19 nt, Artificial Sequence
  Description of Artificial Sequence: Synthetic oligonucleotide
gacguucggagccaugaca

SEQ ID NO: 211763 - RNA, 19 nt, Artificial Sequence
  Description of Artificial Sequence: Synthetic oligonucleotide
ucgcacuaaagacucuuua

SEQ ID NO: 211764 - RNA, 19 nt, Artificial Sequence
  Description of Artificial Sequence: Synthetic oligonucleotide
ucagccucgcucuccauau

SEQ ID NO: 211765 - RNA, 19 nt, Artificial Sequence
  Description of Artificial Sequence: Synthetic oligonucleotide
caucauagcuuaaagaauu

SEQ ID NO: 211766 - RNA, 19 nt, Artificial Sequence
  Description of Artificial Sequence: Synthetic oligonucleotide
cugauaugccgugacgagc

SEQ ID NO: 211767 - RNA, 19 nt, Artificial Sequence
  Description of Artificial Sequence: Synthetic oligonucleotide
caauucugagauccuccgc

SEQ ID NO: 211768 - RNA, 19 nt, Artificial Sequence
  Description of Artificial Sequence: Synthetic oligonucleotide
gacuccaguucuuuuaccu

SEQ ID NO: 211769 - RNA, 19 nt, Artificial Sequence
  Description of Artificial Sequence: Synthetic oligonucleotide
auuccccaauuucgguugg

SEQ ID NO: 211770 - RNA, 19 nt, Artificial Sequence
  Description of Artificial Sequence: Synthetic oligonucleotide
gcucguauuucuucuguag

SEQ ID NO: 211771 - RNA, 19 nt, Artificial Sequence
  Description of Artificial Sequence: Synthetic oligonucleotide
ugcuucauuccuguauugu

SEQ ID NO: 211772 - RNA, 19 nt, Artificial Sequence
  Description of Artificial Sequence: Synthetic oligonucleotide
ugacgagcucugaauauuu

SEQ ID NO: 211773 - RNA, 19 nt, Artificial Sequence
  Description of Artificial Sequence: Synthetic oligonucleotide
agggcuauguauugacuau

SEQ ID NO: 211774 - RNA, 19 nt, Artificial Sequence
  Description of Artificial Sequence: Synthetic oligonucleotide
auuucccucgauaacuacu

SEQ ID NO: 211775 - RNA, 19 nt, Artificial Sequence
  Description of Artificial Sequence: Synthetic oligonucleotide
uauggaccugcucucucaa

SEQ ID NO: 211776 - RNA, 19 nt, Artificial Sequence
  Description of Artificial Sequence: Synthetic oligonucleotide
gcuagguaaauaugaggug

SEQ ID NO: 211777 - RNA, 19 nt, Artificial Sequence
  Description of Artificial Sequence: Synthetic oligonucleotide
cacuuuucgcaaauauuca

SEQ ID NO: 211778 - RNA, 19 nt, Artificial Sequence
  Description of Artificial Sequence: Synthetic oligonucleotide
cacgaagaucuuucuggag

SEQ ID NO: 211779 - RNA, 19 nt, Artificial Sequence
  Description of Artificial Sequence: Synthetic oligonucleotide
augaaggacaguucaucuu

SEQ ID NO: 211780 - RNA, 19 nt, Artificial Sequence
  Description of Artificial Sequence: Synthetic oligonucleotide
gccucuaaaccacagaaaa

SEQ ID NO: 211781 - RNA, 19 nt, Artificial Sequence
  Description of Artificial Sequence: Synthetic oligonucleotide
auaacuacuuaagcuucgu

SEQ ID NO: 211782 - RNA, 19 nt, Artificial Sequence
  Description of Artificial Sequence: Synthetic oligonucleotide
gucugauaugccgugacga

SEQ ID NO: 211783 - RNA, 19 nt, Artificial Sequence
  Description of Artificial Sequence: Synthetic oligonucleotide
uuauaacuuuugccauggu

SEQ ID NO: 211784 - RNA, 19 nt, Artificial Sequence
  Description of Artificial Sequence: Synthetic oligonucleotide
uaacuacuuaagcuucguu

SEQ ID NO: 211785 - RNA, 19 nt, Artificial Sequence
  Description of Artificial Sequence: Synthetic oligonucleotide
gugacuuaucuugacucug

SEQ ID NO: 211786 - RNA, 19 nt, Artificial Sequence
  Description of Artificial Sequence: Synthetic oligonucleotide
auauaccuuguaacuuuuc

SEQ ID NO: 211787 - RNA, 19 nt, Artificial Sequence
  Description of Artificial Sequence: Synthetic oligonucleotide
aagaugacguucggagcca

SEQ ID NO: 211788 - RNA, 19 nt, Artificial Sequence
  Description of Artificial Sequence: Synthetic oligonucleotide
guucggagccaugacauca

SEQ ID NO: 211789 - RNA, 19 nt, Artificial Sequence
  Description of Artificial Sequence: Synthetic oligonucleotide
auuacgcuggguguccaug

SEQ ID NO: 211790 - RNA, 19 nt, Artificial Sequence
  Description of Artificial Sequence: Synthetic oligonucleotide
cuuugagaggcguccccac

SEQ ID NO: 211791 - RNA, 19 nt, Artificial Sequence
  Description of Artificial Sequence: Synthetic oligonucleotide
cucucuguuuggugucacg

SEQ ID NO: 211792 - RNA, 19 nt, Artificial Sequence
  Description of Artificial Sequence: Synthetic oligonucleotide
uagguucuccgaagaguga

SEQ ID NO: 211793 - RNA, 19 nt, Artificial Sequence
  Description of Artificial Sequence: Synthetic oligonucleotide
cagaaggugggucaaaggu

SEQ ID NO: 211794 - RNA, 19 nt, Artificial Sequence
  Description of Artificial Sequence: Synthetic oligonucleotide
cccucgauaacuacuuaag

SEQ ID NO: 211795 - RNA, 19 nt, Artificial Sequence
  Description of Artificial Sequence: Synthetic oligonucleotide
ucacuaaguuucaccucaa

SEQ ID NO: 211796 - RNA, 19 nt, Artificial Sequence
  Description of Artificial Sequence: Synthetic oligonucleotide
aacuccccgucucugcuuu

SEQ ID NO: 211797 - RNA, 19 nt, Artificial Sequence
  Description of Artificial Sequence: Synthetic oligonucleotide
gaagagucugauaugccgu

SEQ ID NO: 211798 - RNA, 19 nt, Artificial Sequence
  Description of Artificial Sequence: Synthetic oligonucleotide
caguagguucuccgaagag

SEQ ID NO: 211799 - RNA, 19 nt, Artificial Sequence
  Description of Artificial Sequence: Synthetic oligonucleotide
ucuaauccuuguugguguu

SEQ ID NO: 211800 - RNA, 19 nt, Artificial Sequence
  Description of Artificial Sequence: Synthetic oligonucleotide
acuccgaaacagagacucc

SEQ ID NO: 211801 - RNA, 19 nt, Artificial Sequence
  Description of Artificial Sequence: Synthetic oligonucleotide
ugacguucggagccaugac

SEQ ID NO: 211802 - RNA, 19 nt, Artificial Sequence
  Description of Artificial Sequence: Synthetic oligonucleotide
ccucgauaacuacuuaagc

SEQ ID NO: 211803 - RNA, 19 nt, Artificial Sequence
  Description of Artificial Sequence: Synthetic oligonucleotide
uuccuuuaugggacuccga

SEQ ID NO: 211804 - RNA, 19 nt, Artificial Sequence
  Description of Artificial Sequence: Synthetic oligonucleotide
cucacgacccaucauauau

SEQ ID NO: 211805 - RNA, 19 nt, Artificial Sequence
  Description of Artificial Sequence: Synthetic oligonucleotide
agucuaugugagucccucu

SEQ ID NO: 211806 - RNA, 19 nt, Artificial Sequence
  Description of Artificial Sequence: Synthetic oligonucleotide
gaggcuugcgauuucucgu

SEQ ID NO: 211807 - RNA, 19 nt, Artificial Sequence
  Description of Artificial Sequence: Synthetic oligonucleotide
uucgcacuaaagacucuuu

SEQ ID NO: 211808 - RNA, 19 nt, Artificial Sequence
  Description of Artificial Sequence: Synthetic oligonucleotide
ucggagccaugacaucagc

SEQ ID NO: 211809 - RNA, 19 nt, Artificial Sequence
  Description of Artificial Sequence: Synthetic oligonucleotide
acuuaagcuucguuccauu

SEQ ID NO: 211810 - RNA, 19 nt, Artificial Sequence
  Description of Artificial Sequence: Synthetic oligonucleotide
agaccagaacagagauucc

SEQ ID NO: 211811 - RNA, 19 nt, Artificial Sequence
  Description of Artificial Sequence: Synthetic oligonucleotide
aggauggaaguguguuuca

SEQ ID NO: 211812 - RNA, 19 nt, Artificial Sequence
  Description of Artificial Sequence: Synthetic oligonucleotide
uacuuaagcuucguuccau

SEQ ID NO: 211813 - RNA, 19 nt, Artificial Sequence
  Description of Artificial Sequence: Synthetic oligonucleotide
guggcagcgggacagucca

SEQ ID NO: 211814 - RNA, 19 nt, Artificial Sequence
  Description of Artificial Sequence: Synthetic oligonucleotide
gugagucccucucucuuac

SEQ ID NO: 211815 - RNA, 19 nt, Artificial Sequence
  Description of Artificial Sequence: Synthetic oligonucleotide
caauauaccuuguaacuuu

SEQ ID NO: 211816 - RNA, 19 nt, Artificial Sequence
  Description of Artificial Sequence: Synthetic oligonucleotide
uugcccuaguuuugcuuca

SEQ ID NO: 211817 - RNA, 19 nt, Artificial Sequence
  Description of Artificial Sequence: Synthetic oligonucleotide
uguucgcacuaaagacucu

SEQ ID NO: 211818 - RNA, 19 nt, Artificial Sequence
  Description of Artificial Sequence: Synthetic oligonucleotide
uaacucgagcuuguccucu

SEQ ID NO: 211819 - RNA, 19 nt, Artificial Sequence
  Description of Artificial Sequence: Synthetic oligonucleotide
gcuuuuaacuccccgucuc

SEQ ID NO: 211820 - RNA, 19 nt, Artificial Sequence
  Description of Artificial Sequence: Synthetic oligonucleotide
ugcucguauuucuucugua

SEQ ID NO: 211821 - RNA, 19 nt, Artificial Sequence
  Description of Artificial Sequence: Synthetic oligonucleotide
aagggacgccgagugacca

SEQ ID NO: 211822 - RNA, 19 nt, Artificial Sequence
  Description of Artificial Sequence: Synthetic oligonucleotide
accgcugaagcaacugcuc

SEQ ID NO: 211823 - RNA, 19 nt, Artificial Sequence
  Description of Artificial Sequence: Synthetic oligonucleotide
cccugcuaacuuuaacucc

SEQ ID NO: 211824 - RNA, 19 nt, Artificial Sequence
  Description of Artificial Sequence: Synthetic oligonucleotide
gaaguguguuucaacucaa

SEQ ID NO: 211825 - RNA, 19 nt, Artificial Sequence
  Description of Artificial Sequence: Synthetic oligonucleotide
gcuucguuccauucuucgc

SEQ ID NO: 211826 - RNA, 19 nt, Artificial Sequence
  Description of Artificial Sequence: Synthetic oligonucleotide
acguucggagccaugacau

SEQ ID NO: 211827 - RNA, 19 nt, Artificial Sequence
  Description of Artificial Sequence: Synthetic oligonucleotide
ucgguuggaucaccugcaa

SEQ ID NO: 211828 - RNA, 19 nt, Artificial Sequence
  Description of Artificial Sequence: Synthetic oligonucleotide
ugcugugaggcuugcgauu

SEQ ID NO: 211829 - RNA, 19 nt, Artificial Sequence
  Description of Artificial Sequence: Synthetic oligonucleotide
caauuucgguuggaucacc

SEQ ID NO: 211830 - RNA, 19 nt, Artificial Sequence
  Description of Artificial Sequence: Synthetic oligonucleotide
cugggaaauaguccauuaa

SEQ ID NO: 211831 - RNA, 19 nt, Artificial Sequence
  Description of Artificial Sequence: Synthetic oligonucleotide
gacgccgagugaccaggcc

SEQ ID NO: 211832 - RNA, 19 nt, Artificial Sequence
  Description of Artificial Sequence: Synthetic oligonucleotide
aacucgagcuuguccucua

SEQ ID NO: 211833 - RNA, 19 nt, Artificial Sequence
  Description of Artificial Sequence: Synthetic oligonucleotide
cuucuaaauuauggaccug

SEQ ID NO: 211834 - RNA, 19 nt, Artificial Sequence
  Description of Artificial Sequence: Synthetic oligonucleotide
auaugccgugacgagcucu

SEQ ID NO: 211835 - RNA, 19 nt, Artificial Sequence
  Description of Artificial Sequence: Synthetic oligonucleotide
aggcuugcgauuucucgua

SEQ ID NO: 211836 - RNA, 19 nt, Artificial Sequence
  Description of Artificial Sequence: Synthetic oligonucleotide
auucuucgcaaccgcugaa

SEQ ID NO: 211837 - RNA, 19 nt, Artificial Sequence
  Description of Artificial Sequence: Synthetic oligonucleotide
uuucuaacucgagcuuguc

SEQ ID NO: 211838 - RNA, 19 nt, Artificial Sequence
  Description of Artificial Sequence: Synthetic oligonucleotide
gaggcacuuucuaacucga

SEQ ID NO: 211839 - RNA, 19 nt, Artificial Sequence
  Description of Artificial Sequence: Synthetic oligonucleotide
gguuggaucaccugcaauu

SEQ ID NO: 211840 - RNA, 19 nt, Artificial Sequence
  Description of Artificial Sequence: Synthetic oligonucleotide
cacucaacuggcuuucugu

SEQ ID NO: 211841 - RNA, 19 nt, Artificial Sequence
  Description of Artificial Sequence: Synthetic oligonucleotide
cuuucuaacucgagcuugu

SEQ ID NO: 211842 - RNA, 19 nt, Artificial Sequence
  Description of Artificial Sequence: Synthetic oligonucleotide
ucucacgacccaucauaua

SEQ ID NO: 211843 - RNA, 19 nt, Artificial Sequence
  Description of Artificial Sequence: Synthetic oligonucleotide
uugccaccuuugagaggcg

SEQ ID NO: 211844 - RNA, 19 nt, Artificial Sequence
  Description of Artificial Sequence: Synthetic oligonucleotide
uuguccucuaaagcuuuua

SEQ ID NO: 211845 - RNA, 19 nt, Artificial Sequence
  Description of Artificial Sequence: Synthetic oligonucleotide
ucauuacgcugggugucca

SEQ ID NO: 211846 - RNA, 19 nt, Artificial Sequence
  Description of Artificial Sequence: Synthetic oligonucleotide
gauaugccgugacgagcuc

SEQ ID NO: 211847 - RNA, 19 nt, Artificial Sequence
  Description of Artificial Sequence: Synthetic oligonucleotide
agggacgccgagugaccag

SEQ ID NO: 211848 - RNA, 19 nt, Artificial Sequence
  Description of Artificial Sequence: Synthetic oligonucleotide
ggcuagcugugucuguagc

SEQ ID NO: 211849 - RNA, 19 nt, Artificial Sequence
  Description of Artificial Sequence: Synthetic oligonucleotide
cguuccauucuucgcaacc

SEQ ID NO: 211850 - RNA, 19 nt, Artificial Sequence
  Description of Artificial Sequence: Synthetic oligonucleotide
ugggcuagcugugucugua

SEQ ID NO: 211851 - RNA, 19 nt, Artificial Sequence
  Description of Artificial Sequence: Synthetic oligonucleotide
uccacuuuugaggcacuuu

SEQ ID NO: 211852 - RNA, 19 nt, Artificial Sequence
  Description of Artificial Sequence: Synthetic oligonucleotide
caacgucuccaauucaagu

SEQ ID NO: 211853 - RNA, 19 nt, Artificial Sequence
  Description of Artificial Sequence: Synthetic oligonucleotide
uccccaauuucgguuggau

SEQ ID NO: 211854 - RNA, 19 nt, Artificial Sequence
  Description of Artificial Sequence: Synthetic oligonucleotide
ccccugcuaacuuuaacuc

SEQ ID NO: 211855 - RNA, 19 nt, Artificial Sequence
  Description of Artificial Sequence: Synthetic oligonucleotide
ucucucuguuuggugucac

SEQ ID NO: 211856 - RNA, 19 nt, Artificial Sequence
  Description of Artificial Sequence: Synthetic oligonucleotide
caauagggcuauguauuga

SEQ ID NO: 211857 - RNA, 19 nt, Artificial Sequence
  Description of Artificial Sequence: Synthetic oligonucleotide
ggucugcauacaauagggc

SEQ ID NO: 211858 - RNA, 19 nt, Artificial Sequence
  Description of Artificial Sequence: Synthetic oligonucleotide
ugagucccucucucuuacu

SEQ ID NO: 211859 - RNA, 19 nt, Artificial Sequence
  Description of Artificial Sequence: Synthetic oligonucleotide
uggucucacgacccaucau

SEQ ID NO: 211860 - RNA, 19 nt, Artificial Sequence
  Description of Artificial Sequence: Synthetic oligonucleotide
cugugugucgcccgacuga

SEQ ID NO: 211861 - RNA, 19 nt, Artificial Sequence
  Description of Artificial Sequence: Synthetic oligonucleotide
cuugcgauuucucguauuu

SEQ ID NO: 211862 - RNA, 19 nt, Artificial Sequence
  Description of Artificial Sequence: Synthetic oligonucleotide
agaggcguccccacaggug

SEQ ID NO: 211863 - RNA, 19 nt, Artificial Sequence
  Description of Artificial Sequence: Synthetic oligonucleotide
uuaacaccaucuggagauu

SEQ ID NO: 211864 - RNA, 19 nt, Artificial Sequence
  Description of Artificial Sequence: Synthetic oligonucleotide
guuugccaagcagcaguug

SEQ ID NO: 211865 - RNA, 19 nt, Artificial Sequence
  Description of Artificial Sequence: Synthetic oligonucleotide
ggcagcgggacaguccagg

SEQ ID NO: 211866 - RNA, 19 nt, Artificial Sequence
  Description of Artificial Sequence: Synthetic oligonucleotide
aggugggucaaagguggca

SEQ ID NO: 211867 - RNA, 19 nt, Artificial Sequence
  Description of Artificial Sequence: Synthetic oligonucleotide
cguauuuuaaggucaacgu

SEQ ID NO: 211868 - RNA, 19 nt, Artificial Sequence
  Description of Artificial Sequence: Synthetic oligonucleotide
uugcgauuucucguauuuu

SEQ ID NO: 211869 - RNA, 19 nt, Artificial Sequence
  Description of Artificial Sequence: Synthetic oligonucleotide
uggcgaacacacagucuuu

SEQ ID NO: 211870 - RNA, 19 nt, Artificial Sequence
  Description of Artificial Sequence: Synthetic oligonucleotide
gugucgcccgacugaggag

SEQ ID NO: 211871 - RNA, 19 nt, Artificial Sequence
  Description of Artificial Sequence: Synthetic oligonucleotide
aucuuucugugcaacuguu

SEQ ID NO: 211872 - RNA, 19 nt, Artificial Sequence
  Description of Artificial Sequence: Synthetic oligonucleotide
agccucuaaaccacagaaa

SEQ ID NO: 211873 - RNA, 19 nt, Artificial Sequence
  Description of Artificial Sequence: Synthetic oligonucleotide
ccaccuuugagaggcgucc

SEQ ID NO: 211874 - RNA, 19 nt, Artificial Sequence
  Description of Artificial Sequence: Synthetic oligonucleotide
gggaaauaguccauuaaau

SEQ ID NO: 211875 - RNA, 19 nt, Artificial Sequence
  Description of Artificial Sequence: Synthetic oligonucleotide
aguuugccaagcagcaguu

SEQ ID NO: 211876 - RNA, 19 nt, Artificial Sequence
  Description of Artificial Sequence: Synthetic oligonucleotide
gggacgccgagugaccagg

SEQ ID NO: 211877 - RNA, 19 nt, Artificial Sequence
  Description of Artificial Sequence: Synthetic oligonucleotide
ggucauuacgcuggguguc

SEQ ID NO: 211878 - RNA, 19 nt, Artificial Sequence
  Description of Artificial Sequence: Synthetic oligonucleotide
gccccugcuaacuuuaacu

SEQ ID NO: 211879 - RNA, 19 nt, Artificial Sequence
  Description of Artificial Sequence: Synthetic oligonucleotide
uaacuccccgucucugcuu

SEQ ID NO: 211880 - RNA, 19 nt, Artificial Sequence
  Description of Artificial Sequence: Synthetic oligonucleotide
cuccgaagagugagacauc

SEQ ID NO: 211881 - RNA, 19 nt, Artificial Sequence
  Description of Artificial Sequence: Synthetic oligonucleotide
acucgagcuuguccucuaa

SEQ ID NO: 211882 - RNA, 19 nt, Artificial Sequence
  Description of Artificial Sequence: Synthetic oligonucleotide
aggcacuuucuaacucgag

SEQ ID NO: 211883 - RNA, 19 nt, Artificial Sequence
  Description of Artificial Sequence: Synthetic oligonucleotide
uuccccaauuucgguugga

SEQ ID NO: 211884 - RNA, 19 nt, Artificial Sequence
  Description of Artificial Sequence: Synthetic oligonucleotide
cugagaugacauggccaac

SEQ ID NO: 211885 - RNA, 19 nt, Artificial Sequence
  Description of Artificial Sequence: Synthetic oligonucleotide
cacucggagcuggagcuuc

SEQ ID NO: 211886 - RNA, 19 nt, Artificial Sequence
  Description of Artificial Sequence: Synthetic oligonucleotide
acgacccaucauauauuca

SEQ ID NO: 211887 - RNA, 19 nt, Artificial Sequence
  Description of Artificial Sequence: Synthetic oligonucleotide
ccgacugaggaggggaugc

SEQ ID NO: 211888 - RNA, 19 nt, Artificial Sequence
  Description of Artificial Sequence: Synthetic oligonucleotide
cacuaaguuucaccucaaa

SEQ ID NO: 211889 - RNA, 19 nt, Artificial Sequence
  Description of Artificial Sequence: Synthetic oligonucleotide
ccaauuucgguuggaucac

SEQ ID NO: 211890 - RNA, 19 nt, Artificial Sequence
  Description of Artificial Sequence: Synthetic oligonucleotide
ugcauacaauagggcuaug

SEQ ID NO: 211891 - RNA, 19 nt, Artificial Sequence
  Description of Artificial Sequence: Synthetic oligonucleotide
gguggcagcgggacagucc

SEQ ID NO: 211892 - RNA, 19 nt, Artificial Sequence
  Description of Artificial Sequence: Synthetic oligonucleotide
uggcagcgggacaguccag

SEQ ID NO: 211893 - RNA, 19 nt, Artificial Sequence
  Description of Artificial Sequence: Synthetic oligonucleotide
cuggugcgucuucagccuc

SEQ ID NO: 211894 - RNA, 19 nt, Artificial Sequence
  Description of Artificial Sequence: Synthetic oligonucleotide
ucguaucuccuggcuguuc

SEQ ID NO: 211895 - RNA, 19 nt, Artificial Sequence
  Description of Artificial Sequence: Synthetic oligonucleotide
ccccaauuucgguuggauc

SEQ ID NO: 211896 - RNA, 19 nt, Artificial Sequence
  Description of Artificial Sequence: Synthetic oligonucleotide
ccauuaaauccucuaauuu

SEQ ID NO: 211897 - RNA, 19 nt, Artificial Sequence
  Description of Artificial Sequence: Synthetic oligonucleotide
cucgagcuuguccucuaaa

SEQ ID NO: 211898 - RNA, 19 nt, Artificial Sequence
  Description of Artificial Sequence: Synthetic oligonucleotide
ccgaagagugagacaucag

SEQ ID NO: 211899 - RNA, 19 nt, Artificial Sequence
  Description of Artificial Sequence: Synthetic oligonucleotide
gcaggucauuuacuuuuga

SEQ ID NO: 211900 - RNA, 19 nt, Artificial Sequence
  Description of Artificial Sequence: Synthetic oligonucleotide
gcauacaauagggcuaugu

SEQ ID NO: 211901 - RNA, 19 nt, Artificial Sequence
  Description of Artificial Sequence: Synthetic oligonucleotide
ugcccuaguuuugcuucau

SEQ ID NO: 211902 - RNA, 19 nt, Artificial Sequence
  Description of Artificial Sequence: Synthetic oligonucleotide
cugcauacaauagggcuau

SEQ ID NO: 211903 - RNA, 19 nt, Artificial Sequence
  Description of Artificial Sequence: Synthetic oligonucleotide
guucgcacuaaagacucuu

SEQ ID NO: 211904 - RNA, 19 nt, Artificial Sequence
  Description of Artificial Sequence: Synthetic oligonucleotide
gcgugcacucucucuucag

SEQ ID NO: 211905 - RNA, 19 nt, Artificial Sequence
  Description of Artificial Sequence: Synthetic oligonucleotide
ccuuuaugggacuccgaaa

SEQ ID NO: 211906 - RNA, 19 nt, Artificial Sequence
  Description of Artificial Sequence: Synthetic oligonucleotide
agaugacguucggagccau

SEQ ID NO: 211907 - RNA, 19 nt, Artificial Sequence
  Description of Artificial Sequence: Synthetic oligonucleotide
gugugucgcccgacugagg

SEQ ID NO: 211908 - RNA, 19 nt, Artificial Sequence
  Description of Artificial Sequence: Synthetic oligonucleotide
ggauggaaguguguuucaa

SEQ ID NO: 211909 - RNA, 19 nt, Artificial Sequence
  Description of Artificial Sequence: Synthetic oligonucleotide
caagucuaugugagucccu

SEQ ID NO: 211910 - RNA, 19 nt, Artificial Sequence
  Description of Artificial Sequence: Synthetic oligonucleotide
agggucuggcagguucgcu

SEQ ID NO: 211911 - RNA, 19 nt, Artificial Sequence
  Description of Artificial Sequence: Synthetic oligonucleotide
gugacgagcucugaauauu

SEQ ID NO: 211912 - RNA, 19 nt, Artificial Sequence
  Description of Artificial Sequence: Synthetic oligonucleotide
gucucacgacccaucauau

SEQ ID NO: 211913 - RNA, 19 nt, Artificial Sequence
  Description of Artificial Sequence: Synthetic oligonucleotide
ggcguccccacagguggcg

SEQ ID NO: 211914 - RNA, 19 nt, Artificial Sequence
  Description of Artificial Sequence: Synthetic oligonucleotide
ggcuauguauugacuauuu

SEQ ID NO: 211915 - RNA, 19 nt, Artificial Sequence
  Description of Artificial Sequence: Synthetic oligonucleotide
gccgugacgagcucugaau

SEQ ID NO: 211916 - RNA, 19 nt, Artificial Sequence
  Description of Artificial Sequence: Synthetic oligonucleotide
augccgugacgagcucuga

SEQ ID NO: 211917 - RNA, 19 nt, Artificial Sequence
  Description of Artificial Sequence: Synthetic oligonucleotide
cuccgcagugacuuaucuu

SEQ ID NO: 211918 - RNA, 19 nt, Artificial Sequence
  Description of Artificial Sequence: Synthetic oligonucleotide
ccgcagugacuuaucuuga

SEQ ID NO: 211919 - RNA, 19 nt, Artificial Sequence
  Description of Artificial Sequence: Synthetic oligonucleotide
ccgugacgagcucugaaua

SEQ ID NO: 211920 - RNA, 19 nt, Artificial Sequence
  Description of Artificial Sequence: Synthetic oligonucleotide
gcuccauaauuguuucauu

SEQ ID NO: 211921 - RNA, 19 nt, Artificial Sequence
  Description of Artificial Sequence: Synthetic oligonucleotide
cauuacgcuggguguccau

SEQ ID NO: 211922 - RNA, 19 nt, Artificial Sequence
  Description of Artificial Sequence: Synthetic oligonucleotide
cugccccugcuaacuuuaa

SEQ ID NO: 211923 - RNA, 19 nt, Artificial Sequence
  Description of Artificial Sequence: Synthetic oligonucleotide
ggagccuagccaccucccu

SEQ ID NO: 211924 - RNA, 19 nt, Artificial Sequence
  Description of Artificial Sequence: Synthetic oligonucleotide
ggacgccgagugaccaggc

SEQ ID NO: 211925 - RNA, 19 nt, Artificial Sequence
  Description of Artificial Sequence: Synthetic oligonucleotide
ggucugugugucgcccgac

SEQ ID NO: 211926 - RNA, 19 nt, Artificial Sequence
  Description of Artificial Sequence: Synthetic oligonucleotide
ccauguuauuccccaauuu

SEQ ID NO: 211927 - RNA, 19 nt, Artificial Sequence
  Description of Artificial Sequence: Synthetic oligonucleotide
ccgaaacagagacuccacu

SEQ ID NO: 211928 - RNA, 19 nt, Artificial Sequence
  Description of Artificial Sequence: Synthetic oligonucleotide
ccuccuggucuagucugug

SEQ ID NO: 211929 - RNA, 19 nt, Artificial Sequence
  Description of Artificial Sequence: Synthetic oligonucleotide
cguucggagccaugacauc

SEQ ID NO: 211930 - RNA, 19 nt, Artificial Sequence
  Description of Artificial Sequence: Synthetic oligonucleotide
ggcgaacacacagucuuuu

SEQ ID NO: 211931 - RNA, 19 nt, Artificial Sequence
  Description of Artificial Sequence: Synthetic oligonucleotide
gggcuauguauugacuauu

SEQ ID NO: 211932 - RNA, 19 nt, Artificial Sequence
  Description of Artificial Sequence: Synthetic oligonucleotide
gccgggcaucuucucuuuc

SEQ ID NO: 211933 - RNA, 19 nt, Artificial Sequence
  Description of Artificial Sequence: Synthetic oligonucleotide
ccugcgugcacucucucuu

SEQ ID NO: 211934 - RNA, 19 nt, Artificial Sequence
  Description of Artificial Sequence: Synthetic oligonucleotide
gcuugcgauuucucguauu

SEQ ID NO: 211935 - RNA, 19 nt, Artificial Sequence
  Description of Artificial Sequence: Synthetic oligonucleotide
ggcuugcgauuucucguau

SEQ ID NO: 211936 - RNA, 19 nt, Artificial Sequence
  Description of Artificial Sequence: Synthetic oligonucleotide
gacaucagccgggcaucuu

SEQ ID NO: 211937 - RNA, 19 nt, Artificial Sequence
  Description of Artificial Sequence: Synthetic oligonucleotide
ccgcucugccccugcuaac

SEQ ID NO: 211938 - RNA, 19 nt, Artificial Sequence
  Description of Artificial Sequence: Synthetic oligonucleotide
cgugacgagcucugaauau

SEQ ID NO: 211939 - RNA, 19 nt, Artificial Sequence
  Description of Artificial Sequence: Synthetic oligonucleotide
ccgcaaucuuucugugcaa

SEQ ID NO: 211940 - RNA, 19 nt, Artificial Sequence
  Description of Artificial Sequence: Synthetic oligonucleotide
cgcuggguguccauguuau

SEQ ID NO: 211941 - RNA, 19 nt, Artificial Sequence
  Description of Artificial Sequence: Synthetic oligonucleotide
cacgggcaucaaggaucuc

SEQ ID NO: 211942 - RNA, 19 nt, Artificial Sequence
  Description of Artificial Sequence: Synthetic oligonucleotide
gcccuaguuuugcuucauu

SEQ ID NO: 211943 - RNA, 19 nt, Artificial Sequence
  Description of Artificial Sequence: Synthetic oligonucleotide
gccuagccaccucccugcu

SEQ ID NO: 211944 - RNA, 19 nt, Artificial Sequence
  Description of Artificial Sequence: Synthetic oligonucleotide
ggucuccugaaugguccuu

SEQ ID NO: 211945 - RNA, 19 nt, Artificial Sequence
  Description of Artificial Sequence: Synthetic oligonucleotide
caccugcaauuuggaauuu

SEQ ID NO: 211946 - RNA, 19 nt, Artificial Sequence
  Description of Artificial Sequence: Synthetic oligonucleotide
gcccgacugaggaggggau

SEQ ID NO: 211947 - RNA, 19 nt, Artificial Sequence
  Description of Artificial Sequence: Synthetic oligonucleotide
uuuaauaagagguaaauug

SEQ ID NO: 211948 - RNA, 19 nt, Artificial Sequence
  Description of Artificial Sequence: Synthetic oligonucleotide
aaagacuugucuuagcucg

SEQ ID NO: 211949 - RNA, 19 nt, Artificial Sequence
  Description of Artificial Sequence: Synthetic oligonucleotide
cuuagaacaauuuaguugc

SEQ ID NO: 211950 - RNA, 19 nt, Artificial Sequence
  Description of Artificial Sequence: Synthetic oligonucleotide
cuuaaaacgagcaacauac

SEQ ID NO: 211951 - RNA, 19 nt, Artificial Sequence
  Description of Artificial Sequence: Synthetic oligonucleotide
aauagguaaucuuugcucg

SEQ ID NO: 211952 - RNA, 19 nt, Artificial Sequence
  Description of Artificial Sequence: Synthetic oligonucleotide
agguaaauugucuugaagc

SEQ ID NO: 211953 - RNA, 19 nt, Artificial Sequence
  Description of Artificial Sequence: Synthetic oligonucleotide
aauguuauauuauuauuga

SEQ ID NO: 211954 - RNA, 19 nt, Artificial Sequence
  Description of Artificial Sequence: Synthetic oligonucleotide
uguacuuguacucgaaacg

SEQ ID NO: 211955 - RNA, 19 nt, Artificial Sequence
  Description of Artificial Sequence: Synthetic oligonucleotide
acauauaggaaaaugaagg

SEQ ID NO: 211956 - RNA, 19 nt, Artificial Sequence
  Description of Artificial Sequence: Synthetic oligonucleotide
uugccuauaauuacuauag

SEQ ID NO: 211957 - RNA, 19 nt, Artificial Sequence
  Description of Artificial Sequence: Synthetic oligonucleotide
aauaauuauaacgcaaaug

SEQ ID NO: 211958 - RNA, 19 nt, Artificial Sequence
  Description of Artificial Sequence: Synthetic oligonucleotide
aauuauaacgcaaauggca

SEQ ID NO: 211959 - RNA, 19 nt, Artificial Sequence
  Description of Artificial Sequence: Synthetic oligonucleotide
uguaaaauggcgaggcggg

SEQ ID NO: 211960 - RNA, 19 nt, Artificial Sequence
  Description of Artificial Sequence: Synthetic oligonucleotide
uauuacacaagccuaucag

SEQ ID NO: 211961 - RNA, 19 nt, Artificial Sequence
  Description of Artificial Sequence: Synthetic oligonucleotide
cuuacgaaggcuuagaaca

SEQ ID NO: 211962 - RNA, 19 nt, Artificial Sequence
  Description of Artificial Sequence: Synthetic oligonucleotide
cuucguaaagucuucauag

SEQ ID NO: 211963 - RNA, 19 nt, Artificial Sequence
  Description of Artificial Sequence: Synthetic oligonucleotide
uauaauuacuauagcagga

SEQ ID NO: 211964 - RNA, 19 nt, Artificial Sequence
  Description of Artificial Sequence: Synthetic oligonucleotide
augaauacgauucuguccu

SEQ ID NO: 211965 - RNA, 19 nt, Artificial Sequence
  Description of Artificial Sequence: Synthetic oligonucleotide
aaacgagcaacauacagau

SEQ ID NO: 211966 - RNA, 19 nt, Artificial Sequence
  Description of Artificial Sequence: Synthetic oligonucleotide
uugaucaugacugucagug

SEQ ID NO: 211967 - RNA, 19 nt, Artificial Sequence
  Description of Artificial Sequence: Synthetic oligonucleotide
gaugaauacgauucugucc

SEQ ID NO: 211968 - RNA, 19 nt, Artificial Sequence
  Description of Artificial Sequence: Synthetic oligonucleotide
gagaccauuacuuuaauaa

SEQ ID NO: 211969 - RNA, 19 nt, Artificial Sequence
  Description of Artificial Sequence: Synthetic oligonucleotide
uaauuauaacgcaaauggc

SEQ ID NO: 211970 - RNA, 19 nt, Artificial Sequence
  Description of Artificial Sequence: Synthetic oligonucleotide
auagcaacgagaccauuac

SEQ ID NO: 211971 - RNA, 19 nt, Artificial Sequence
  Description of Artificial Sequence: Synthetic oligonucleotide
auucacuugucgcaaaauc

SEQ ID NO: 211972 - RNA, 19 nt, Artificial Sequence
  Description of Artificial Sequence: Synthetic oligonucleotide
gaaagucuagcccaguaug

SEQ ID NO: 211973 - RNA, 19 nt, Artificial Sequence
  Description of Artificial Sequence: Synthetic oligonucleotide
uaauagguaaucuuugcuc

SEQ ID NO: 211974 - RNA, 19 nt, Artificial Sequence
  Description of Artificial Sequence: Synthetic oligonucleotide
guguuugagaucuaggaug

SEQ ID NO: 211975 - RNA, 19 nt, Artificial Sequence
  Description of Artificial Sequence: Synthetic oligonucleotide
uucacuugucgcaaaaucu

SEQ ID NO: 211976 - RNA, 19 nt, Artificial Sequence
  Description of Artificial Sequence: Synthetic oligonucleotide
uguuugagaucuaggauga

SEQ ID NO: 211977 - RNA, 19 nt, Artificial Sequence
  Description of Artificial Sequence: Synthetic oligonucleotide
gauuuuagguuguuagccc

SEQ ID NO: 211978 - RNA, 19 nt, Artificial Sequence
  Description of Artificial Sequence: Synthetic oligonucleotide
acuuacgaaggcuuagaac

SEQ ID NO: 211979 - RNA, 19 nt, Artificial Sequence
  Description of Artificial Sequence: Synthetic oligonucleotide
ucuggaucccauagcaacg

SEQ ID NO: 211980 - RNA, 19 nt, Artificial Sequence
  Description of Artificial Sequence: Synthetic oligonucleotide
aauggcauuccccgcgugg

SEQ ID NO: 211981 - RNA, 19 nt, Artificial Sequence
  Description of Artificial Sequence: Synthetic oligonucleotide
aacgcaaauggcauauuac

SEQ ID NO: 211982 - RNA, 19 nt, Artificial Sequence
  Description of Artificial Sequence: Synthetic oligonucleotide
uuuauuacgaaagucccuc

SEQ ID NO: 211983 - RNA, 19 nt, Artificial Sequence
  Description of Artificial Sequence: Synthetic oligonucleotide
gaaauaucuuaaaacgagc

SEQ ID NO: 211984 - RNA, 19 nt, Artificial Sequence
  Description of Artificial Sequence: Synthetic oligonucleotide
agaccauuacuuuaauaag

SEQ ID NO: 211985 - RNA, 19 nt, Artificial Sequence
  Description of Artificial Sequence: Synthetic oligonucleotide
uaauaagcacuccaugaac

SEQ ID NO: 211986 - RNA, 19 nt, Artificial Sequence
  Description of Artificial Sequence: Synthetic oligonucleotide
aagaaagaacaucgugguc

SEQ ID NO: 211987 - RNA, 19 nt, Artificial Sequence
  Description of Artificial Sequence: Synthetic oligonucleotide
uagguuguuagcccaaucu

SEQ ID NO: 211988 - RNA, 19 nt, Artificial Sequence
  Description of Artificial Sequence: Synthetic oligonucleotide
uggaauggcauuccccgcg

SEQ ID NO: 211989 - RNA, 19 nt, Artificial Sequence
  Description of Artificial Sequence: Synthetic oligonucleotide
ugguaauagguaaucuuug

SEQ ID NO: 211990 - RNA, 19 nt, Artificial Sequence
  Description of Artificial Sequence: Synthetic oligonucleotide
gguaaauugucuugaagcc

SEQ ID NO: 211991 - RNA, 19 nt, Artificial Sequence
  Description of Artificial Sequence: Synthetic oligonucleotide
gcuuagaacaauuuaguug

SEQ ID NO: 211992 - RNA, 19 nt, Artificial Sequence
  Description of Artificial Sequence: Synthetic oligonucleotide
uggaugguggauaaacaug

SEQ ID NO: 211993 - RNA, 19 nt, Artificial Sequence
  Description of Artificial Sequence: Synthetic oligonucleotide
ugacgugccuucaauaugu

SEQ ID NO: 211994 - RNA, 19 nt, Artificial Sequence
  Description of Artificial Sequence: Synthetic oligonucleotide
ugugagugcacuguguuug

SEQ ID NO: 211995 - RNA, 19 nt, Artificial Sequence
  Description of Artificial Sequence: Synthetic oligonucleotide
auuagauggcauguugcgc

SEQ ID NO: 211996 - RNA, 19 nt, Artificial Sequence
  Description of Artificial Sequence: Synthetic oligonucleotide
uugucuuagcucgcgaucg

SEQ ID NO: 211997 - RNA, 19 nt, Artificial Sequence
  Description of Artificial Sequence: Synthetic oligonucleotide
auucgaauuugaucugaac

SEQ ID NO: 211998 - RNA, 19 nt, Artificial Sequence
  Description of Artificial Sequence: Synthetic oligonucleotide
cucgcgaucgccuacacuc

SEQ ID NO: 211999 - RNA, 19 nt, Artificial Sequence
  Description of Artificial Sequence: Synthetic oligonucleotide
uccgggcucaguuaauugg

SEQ ID NO: 212000 - RNA, 19 nt, Artificial Sequence
  Description of Artificial Sequence: Synthetic oligonucleotide
guacuuguacucgaaacgg

SEQ ID NO: 212001 - RNA, 19 nt, Artificial Sequence
  Description of Artificial Sequence: Synthetic oligonucleotide
aauuacuauagcaggauua

SEQ ID NO: 212002 - RNA, 19 nt, Artificial Sequence
  Description of Artificial Sequence: Synthetic oligonucleotide
gaaagggugguaguucugg

SEQ ID NO: 212003 - RNA, 19 nt, Artificial Sequence
  Description of Artificial Sequence: Synthetic oligonucleotide
ugcaaaugauagucaagag

SEQ ID NO: 212004 - RNA, 19 nt, Artificial Sequence
  Description of Artificial Sequence: Synthetic oligonucleotide
aagggcacggucccaucgc

SEQ ID NO: 212005 - RNA, 19 nt, Artificial Sequence
  Description of Artificial Sequence: Synthetic oligonucleotide
aguugcaagagaugaucuc

SEQ ID NO: 212006 - RNA, 19 nt, Artificial Sequence
  Description of Artificial Sequence: Synthetic oligonucleotide
aaaauggcgaggcggggcu

SEQ ID NO: 212007 - RNA, 19 nt, Artificial Sequence
  Description of Artificial Sequence: Synthetic oligonucleotide
cuuguacucgaaacggcgg

SEQ ID NO: 212008 - RNA, 19 nt, Artificial Sequence
  Description of Artificial Sequence: Synthetic oligonucleotide
aagagguaaauugucuuga

SEQ ID NO: 212009 - RNA, 19 nt, Artificial Sequence
  Description of Artificial Sequence: Synthetic oligonucleotide
uagaaacccuuuuaaacuc

SEQ ID NO: 212010 - RNA, 19 nt, Artificial Sequence
  Description of Artificial Sequence: Synthetic oligonucleotide
guguaaaauggcgaggcgg

SEQ ID NO: 212011 - RNA, 19 nt, Artificial Sequence
  Description of Artificial Sequence: Synthetic oligonucleotide
gacgaaucggcugaaagac

SEQ ID NO: 212012 - RNA, 19 nt, Artificial Sequence
  Description of Artificial Sequence: Synthetic oligonucleotide
auuacgaaagucccucuga

SEQ ID NO: 212013 - RNA, 19 nt, Artificial Sequence
  Description of Artificial Sequence: Synthetic oligonucleotide
uaaugauggugcuauucga

SEQ ID NO: 212014 - RNA, 19 nt, Artificial Sequence
  Description of Artificial Sequence: Synthetic oligonucleotide
ucuucguaaagucuucaua

SEQ ID NO: 212015 - RNA, 19 nt, Artificial Sequence
  Description of Artificial Sequence: Synthetic oligonucleotide
aaucggcugaaagacagca

SEQ ID NO: 212016 - RNA, 19 nt, Artificial Sequence
  Description of Artificial Sequence: Synthetic oligonucleotide
caugccgucacucccgacg

SEQ ID NO: 212017 - RNA, 19 nt, Artificial Sequence
  Description of Artificial Sequence: Synthetic oligonucleotide
uuaagaguggcaucauaaa

SEQ ID NO: 212018 - RNA, 19 nt, Artificial Sequence
  Description of Artificial Sequence: Synthetic oligonucleotide
uuacgaaagucccucugac

SEQ ID NO: 212019 - RNA, 19 nt, Artificial Sequence
  Description of Artificial Sequence: Synthetic oligonucleotide
uguuagcccaaucugcaaa

SEQ ID NO: 212020 - RNA, 19 nt, Artificial Sequence
  Description of Artificial Sequence: Synthetic oligonucleotide
uauaacgcaaauggcauau

SEQ ID NO: 212021 - RNA, 19 nt, Artificial Sequence
  Description of Artificial Sequence: Synthetic oligonucleotide
ucgaauacgucauccgcug

SEQ ID NO: 212022 - RNA, 19 nt, Artificial Sequence
  Description of Artificial Sequence: Synthetic oligonucleotide
gauaggguuuauuacgaaa

SEQ ID NO: 212023 - RNA, 19 nt, Artificial Sequence
  Description of Artificial Sequence: Synthetic oligonucleotide
gacaggauaggguuuauua

SEQ ID NO: 212024 - RNA, 19 nt, Artificial Sequence
  Description of Artificial Sequence: Synthetic oligonucleotide
uguuaaguugcuugauuuc

SEQ ID NO: 212025 - RNA, 19 nt, Artificial Sequence
  Description of Artificial Sequence: Synthetic oligonucleotide
auuauaacgcaaauggcau

SEQ ID NO: 212026 - RNA, 19 nt, Artificial Sequence
  Description of Artificial Sequence: Synthetic oligonucleotide
ucgccuuucuccaaccagc

SEQ ID NO: 212027 - RNA, 19 nt, Artificial Sequence
  Description of Artificial Sequence: Synthetic oligonucleotide
ggcucaguuaauuggaaag

SEQ ID NO: 212028 - RNA, 19 nt, Artificial Sequence
  Description of Artificial Sequence: Synthetic oligonucleotide
uacuuguacucgaaacggc

SEQ ID NO: 212029 - RNA, 19 nt, Artificial Sequence
  Description of Artificial Sequence: Synthetic oligonucleotide
agguuguuagcccaaucug

SEQ ID NO: 212030 - RNA, 19 nt, Artificial Sequence
  Description of Artificial Sequence: Synthetic oligonucleotide
ucuaguuccuguugagaga

SEQ ID NO: 212031 - RNA, 19 nt, Artificial Sequence
  Description of Artificial Sequence: Synthetic oligonucleotide
gugcuaguuagguagugcc

SEQ ID NO: 212032 - RNA, 19 nt, Artificial Sequence
  Description of Artificial Sequence: Synthetic oligonucleotide
aacuuacgaaggcuuagaa

SEQ ID NO: 212033 - RNA, 19 nt, Artificial Sequence
  Description of Artificial Sequence: Synthetic oligonucleotide
uaacgcaaauggcauauua

SEQ ID NO: 212034 - RNA, 19 nt, Artificial Sequence
  Description of Artificial Sequence: Synthetic oligonucleotide
cacacguggugcuaguuag

SEQ ID NO: 212035 - RNA, 19 nt, Artificial Sequence
  Description of Artificial Sequence: Synthetic oligonucleotide
ucacccuaaaucuuacaaa

SEQ ID NO: 212036 - RNA, 19 nt, Artificial Sequence
  Description of Artificial Sequence: Synthetic oligonucleotide
guacccuuccuucuggacc

SEQ ID NO: 212037 - RNA, 19 nt, Artificial Sequence
  Description of Artificial Sequence: Synthetic oligonucleotide
ccagcuagcaucaaguaac

SEQ ID NO: 212038 - RNA, 19 nt, Artificial Sequence
  Description of Artificial Sequence: Synthetic oligonucleotide
aaugaacaacacugucugu

SEQ ID NO: 212039 - RNA, 19 nt, Artificial Sequence
  Description of Artificial Sequence: Synthetic oligonucleotide
cuaguuccuguugagagac

SEQ ID NO: 212040 - RNA, 19 nt, Artificial Sequence
  Description of Artificial Sequence: Synthetic oligonucleotide
uuacugcaguuacacagga

SEQ ID NO: 212041 - RNA, 19 nt, Artificial Sequence
  Description of Artificial Sequence: Synthetic oligonucleotide
cugccuguuaaguugcuug

SEQ ID NO: 212042 - RNA, 19 nt, Artificial Sequence
  Description of Artificial Sequence: Synthetic oligonucleotide
aagacuugucuuagcucgc

SEQ ID NO: 212043 - RNA, 19 nt, Artificial Sequence
  Description of Artificial Sequence: Synthetic oligonucleotide
ccuaucagcaauuacauaa

SEQ ID NO: 212044 - RNA, 19 nt, Artificial Sequence
  Description of Artificial Sequence: Synthetic oligonucleotide
auaauuacuauagcaggau

SEQ ID NO: 212045 - RNA, 19 nt, Artificial Sequence
  Description of Artificial Sequence: Synthetic oligonucleotide
aucauaucuagcugccugu

SEQ ID NO: 212046 - RNA, 19 nt, Artificial Sequence
  Description of Artificial Sequence: Synthetic oligonucleotide
ugccuauaauuacuauagc

SEQ ID NO: 212047 - RNA, 19 nt, Artificial Sequence
  Description of Artificial Sequence: Synthetic oligonucleotide
uuugagaucuaggaugaau

SEQ ID NO: 212048 - RNA, 19 nt, Artificial Sequence
  Description of Artificial Sequence: Synthetic oligonucleotide
aaugauggugcuauucgaa

SEQ ID NO: 212049 - RNA, 19 nt, Artificial Sequence
  Description of Artificial Sequence: Synthetic oligonucleotide
cuacagaauagagggacgc

SEQ ID NO: 212050 - RNA, 19 nt, Artificial Sequence
  Description of Artificial Sequence: Synthetic oligonucleotide
auuacuauagcaggauuau

SEQ ID NO: 212051 - RNA, 19 nt, Artificial Sequence
  Description of Artificial Sequence: Synthetic oligonucleotide
uggggauaaucauauuuuc

SEQ ID NO: 212052 - RNA, 19 nt, Artificial Sequence
  Description of Artificial Sequence: Synthetic oligonucleotide
acugacgugccuucaauau

SEQ ID NO: 212053 - RNA, 19 nt, Artificial Sequence
  Description of Artificial Sequence: Synthetic oligonucleotide
ucgaaauguuacuucuacu

SEQ ID NO: 212054 - RNA, 19 nt, Artificial Sequence
  Description of Artificial Sequence: Synthetic oligonucleotide
ucuuugcucggacaggaua

SEQ ID NO: 212055 - RNA, 19 nt, Artificial Sequence
  Description of Artificial Sequence: Synthetic oligonucleotide
uaaaauggcgaggcggggc

SEQ ID NO: 212056 - RNA, 19 nt, Artificial Sequence
  Description of Artificial Sequence: Synthetic oligonucleotide
ugcuaguuagguagugcca

SEQ ID NO: 212057 - RNA, 19 nt, Artificial Sequence
  Description of Artificial Sequence: Synthetic oligonucleotide
cagcauagagugcucuucg

SEQ ID NO: 212058 - RNA, 19 nt, Artificial Sequence
  Description of Artificial Sequence: Synthetic oligonucleotide
ugcguacccuuccuucugg

SEQ ID NO: 212059 - RNA, 19 nt, Artificial Sequence
  Description of Artificial Sequence: Synthetic oligonucleotide
ugaacggccgcgcuccagc

SEQ ID NO: 212060 - RNA, 19 nt, Artificial Sequence
  Description of Artificial Sequence: Synthetic oligonucleotide
gaugcggccccuuaaagcu

SEQ ID NO: 212061 - RNA, 19 nt, Artificial Sequence
  Description of Artificial Sequence: Synthetic oligonucleotide
agaacuuacgaaggcuuag

SEQ ID NO: 212062 - RNA, 19 nt, Artificial Sequence
  Description of Artificial Sequence: Synthetic oligonucleotide
uuacgaaggcuuagaacaa

SEQ ID NO: 212063 - RNA, 19 nt, Artificial Sequence
  Description of Artificial Sequence: Synthetic oligonucleotide
aauacgucauccgcuggcu

SEQ ID NO: 212064 - RNA, 19 nt, Artificial Sequence
  Description of Artificial Sequence: Synthetic oligonucleotide
aucgccuuucuccaaccag

SEQ ID NO: 212065 - RNA, 19 nt, Artificial Sequence
  Description of Artificial Sequence: Synthetic oligonucleotide
agauaucccaaaaugcccu

SEQ ID NO: 212066 - RNA, 19 nt, Artificial Sequence
  Description of Artificial Sequence: Synthetic oligonucleotide
cugcaaaugauagucaaga

SEQ ID NO: 212067 - RNA, 19 nt, Artificial Sequence
  Description of Artificial Sequence: Synthetic oligonucleotide
ucacucgaaauguuacuuc

SEQ ID NO: 212068 - RNA, 19 nt, Artificial Sequence
  Description of Artificial Sequence: Synthetic oligonucleotide
uacucgaaacggcggugcg

SEQ ID NO: 212069 - RNA, 19 nt, Artificial Sequence
  Description of Artificial Sequence: Synthetic oligonucleotide
guuccgugaagccacugug

SEQ ID NO: 212070 - RNA, 19 nt, Artificial Sequence
  Description of Artificial Sequence: Synthetic oligonucleotide
uuauuacgaaagucccucu

SEQ ID NO: 212071 - RNA, 19 nt, Artificial Sequence
  Description of Artificial Sequence: Synthetic oligonucleotide
uucuuuuaagaguggcauc

SEQ ID NO: 212072 - RNA, 19 nt, Artificial Sequence
  Description of Artificial Sequence: Synthetic oligonucleotide
cccaaucugcaaaugauag

SEQ ID NO: 212073 - RNA, 19 nt, Artificial Sequence
  Description of Artificial Sequence: Synthetic oligonucleotide
cauagagugcucuucguaa

SEQ ID NO: 212074 - RNA, 19 nt, Artificial Sequence
  Description of Artificial Sequence: Synthetic oligonucleotide
uaucagcaauuacauaauu

SEQ ID NO: 212075 - RNA, 19 nt, Artificial Sequence
  Description of Artificial Sequence: Synthetic oligonucleotide
agucacucgaaauguuacu

SEQ ID NO: 212076 - RNA, 19 nt, Artificial Sequence
  Description of Artificial Sequence: Synthetic oligonucleotide
ucgcucugcaccagaugcg

SEQ ID NO: 212077 - RNA, 19 nt, Artificial Sequence
  Description of Artificial Sequence: Synthetic oligonucleotide
cguggugcuaguuagguag

SEQ ID NO: 212078 - RNA, 19 nt, Artificial Sequence
  Description of Artificial Sequence: Synthetic oligonucleotide
ucacucccgacgaaucggc

SEQ ID NO: 212079 - RNA, 19 nt, Artificial Sequence
  Description of Artificial Sequence: Synthetic oligonucleotide
ugauggugcuauucgaauu

SEQ ID NO: 212080 - RNA, 19 nt, Artificial Sequence
  Description of Artificial Sequence: Synthetic oligonucleotide
uuuucuaguguagguggcu

SEQ ID NO: 212081 - RNA, 19 nt, Artificial Sequence
  Description of Artificial Sequence: Synthetic oligonucleotide
aacacugacgugccuucaa

SEQ ID NO: 212082 - RNA, 19 nt, Artificial Sequence
  Description of Artificial Sequence: Synthetic oligonucleotide
auagagugcucuucguaaa

SEQ ID NO: 212083 - RNA, 19 nt, Artificial Sequence
  Description of Artificial Sequence: Synthetic oligonucleotide
cuugucuuagcucgcgauc

SEQ ID NO: 212084 - RNA, 19 nt, Artificial Sequence
  Description of Artificial Sequence: Synthetic oligonucleotide
uucugguaauagguaaucu

SEQ ID NO: 212085 - RNA, 19 nt, Artificial Sequence
  Description of Artificial Sequence: Synthetic oligonucleotide
gaugaaugccaguguaaaa

SEQ ID NO: 212086 - RNA, 19 nt, Artificial Sequence
  Description of Artificial Sequence: Synthetic oligonucleotide
agaacaucguggucaucug

SEQ ID NO: 212087 - RNA, 19 nt, Artificial Sequence
  Description of Artificial Sequence: Synthetic oligonucleotide
ggugcggcaacucggcugg

SEQ ID NO: 212088 - RNA, 19 nt, Artificial Sequence
  Description of Artificial Sequence: Synthetic oligonucleotide
acuguaucuaguuccuguu

SEQ ID NO: 212089 - RNA, 19 nt, Artificial Sequence
  Description of Artificial Sequence: Synthetic oligonucleotide
uuggaauggcauuccccgc

SEQ ID NO: 212090 - RNA, 19 nt, Artificial Sequence
  Description of Artificial Sequence: Synthetic oligonucleotide
agcaacgagaccauuacuu

SEQ ID NO: 212091 - RNA, 19 nt, Artificial Sequence
  Description of Artificial Sequence: Synthetic oligonucleotide
cucacccuaaaucuuacaa

SEQ ID NO: 212092 - RNA, 19 nt, Artificial Sequence
  Description of Artificial Sequence: Synthetic oligonucleotide
gguuguuagcccaaucugc

SEQ ID NO: 212093 - RNA, 19 nt, Artificial Sequence
  Description of Artificial Sequence: Synthetic oligonucleotide
cucgaaacggcggugcggc

SEQ ID NO: 212094 - RNA, 19 nt, Artificial Sequence
  Description of Artificial Sequence: Synthetic oligonucleotide
acuugucuuagcucgcgau

SEQ ID NO: 212095 - RNA, 19 nt, Artificial Sequence
  Description of Artificial Sequence: Synthetic oligonucleotide
ugucuuagcucgcgaucgc

SEQ ID NO: 212096 - RNA, 19 nt, Artificial Sequence
  Description of Artificial Sequence: Synthetic oligonucleotide
ggugugagaagugaauuac

SEQ ID NO: 212097 - RNA, 19 nt, Artificial Sequence
  Description of Artificial Sequence: Synthetic oligonucleotide
aggcuuagaacaauuuagu

SEQ ID NO: 212098 - RNA, 19 nt, Artificial Sequence
  Description of Artificial Sequence: Synthetic oligonucleotide
acucccgacgaaucggcug

SEQ ID NO: 212099 - RNA, 19 nt, Artificial Sequence
  Description of Artificial Sequence: Synthetic oligonucleotide
cugacgugccuucaauaug

SEQ ID NO: 212100 - RNA, 19 nt, Artificial Sequence
  Description of Artificial Sequence: Synthetic oligonucleotide
gucacucccgacgaaucgg

SEQ ID NO: 212101 - RNA, 19 nt, Artificial Sequence
  Description of Artificial Sequence: Synthetic oligonucleotide
caucguggucaucugcaag

SEQ ID NO: 212102 - RNA, 19 nt, Artificial Sequence
  Description of Artificial Sequence: Synthetic oligonucleotide
uuagcucgcgaucgccuac

SEQ ID NO: 212103 - RNA, 19 nt, Artificial Sequence
  Description of Artificial Sequence: Synthetic oligonucleotide
agagaacuuacgaaggcuu

SEQ ID NO: 212104 - RNA, 19 nt, Artificial Sequence
  Description of Artificial Sequence: Synthetic oligonucleotide
acggcggugcggcaacucg

SEQ ID NO: 212105 - RNA, 19 nt, Artificial Sequence
  Description of Artificial Sequence: Synthetic oligonucleotide
uacagaauagagggacgcu

SEQ ID NO: 212106 - RNA, 19 nt, Artificial Sequence
  Description of Artificial Sequence: Synthetic oligonucleotide
auaucucucuucacgacau

SEQ ID NO: 212107 - RNA, 19 nt, Artificial Sequence
  Description of Artificial Sequence: Synthetic oligonucleotide
uuagcccaaucugcaaaug

SEQ ID NO: 212108 - RNA, 19 nt, Artificial Sequence
  Description of Artificial Sequence: Synthetic oligonucleotide
ucucacccuaaaucuuaca

SEQ ID NO: 212109 - RNA, 19 nt, Artificial Sequence
  Description of Artificial Sequence: Synthetic oligonucleotide
gaacuuacgaaggcuuaga

SEQ ID NO: 212110 - RNA, 19 nt, Artificial Sequence
  Description of Artificial Sequence: Synthetic oligonucleotide
cgaaucggcugaaagacag

SEQ ID NO: 212111 - RNA, 19 nt, Artificial Sequence
  Description of Artificial Sequence: Synthetic oligonucleotide
uuguuagcccaaucugcaa

SEQ ID NO: 212112 - RNA, 19 nt, Artificial Sequence
  Description of Artificial Sequence: Synthetic oligonucleotide
agcauagagugcucuucgu

SEQ ID NO: 212113 - RNA, 19 nt, Artificial Sequence
  Description of Artificial Sequence: Synthetic oligonucleotide
gguggauaaacaugaugga

SEQ ID NO: 212114 - RNA, 19 nt, Artificial Sequence
  Description of Artificial Sequence: Synthetic oligonucleotide
aacgagcaacauacagauc

SEQ ID NO: 212115 - RNA, 19 nt, Artificial Sequence
  Description of Artificial Sequence: Synthetic oligonucleotide
gacguaccuccucuguuca

SEQ ID NO: 212116 - RNA, 19 nt, Artificial Sequence
  Description of Artificial Sequence: Synthetic oligonucleotide
cacuugucgcaaaaucuca

SEQ ID NO: 212117 - RNA, 19 nt, Artificial Sequence
  Description of Artificial Sequence: Synthetic oligonucleotide
ugcggccccuuaaagcugu

SEQ ID NO: 212118 - RNA, 19 nt, Artificial Sequence
  Description of Artificial Sequence: Synthetic oligonucleotide
aaaugcccuugugugggga

SEQ ID NO: 212119 - RNA, 19 nt, Artificial Sequence
  Description of Artificial Sequence: Synthetic oligonucleotide
acucgaaacggcggugcgg

SEQ ID NO: 212120 - RNA, 19 nt, Artificial Sequence
  Description of Artificial Sequence: Synthetic oligonucleotide
cagaugcggccccuuaaag

SEQ ID NO: 212121 - RNA, 19 nt, Artificial Sequence
  Description of Artificial Sequence: Synthetic oligonucleotide
gccagcgaaagucuagccc

SEQ ID NO: 212122 - RNA, 19 nt, Artificial Sequence
  Description of Artificial Sequence: Synthetic oligonucleotide
uaguguagguggcucuuuu

SEQ ID NO: 212123 - RNA, 19 nt, Artificial Sequence
  Description of Artificial Sequence: Synthetic oligonucleotide
cagugaugcggcuggcuug

SEQ ID NO: 212124 - RNA, 19 nt, Artificial Sequence
  Description of Artificial Sequence: Synthetic oligonucleotide
cagcgcuaaguucccacag

SEQ ID NO: 212125 - RNA, 19 nt, Artificial Sequence
  Description of Artificial Sequence: Synthetic oligonucleotide
cuuuuccgggcucaguuaa

SEQ ID NO: 212126 - RNA, 19 nt, Artificial Sequence
  Description of Artificial Sequence: Synthetic oligonucleotide
aaacacugacgugccuuca

SEQ ID NO: 212127 - RNA, 19 nt, Artificial Sequence
  Description of Artificial Sequence: Synthetic oligonucleotide
gcuaaguucccacagcgua

SEQ ID NO: 212128 - RNA, 19 nt, Artificial Sequence
  Description of Artificial Sequence: Synthetic oligonucleotide
gaaucggcugaaagacagc

SEQ ID NO: 212129 - RNA, 19 nt, Artificial Sequence
  Description of Artificial Sequence: Synthetic oligonucleotide
cccaguaugauguacauau

SEQ ID NO: 212130 - RNA, 19 nt, Artificial Sequence
  Description of Artificial Sequence: Synthetic oligonucleotide
guaccuccucuguucauca

SEQ ID NO: 212131 - RNA, 19 nt, Artificial Sequence
  Description of Artificial Sequence: Synthetic oligonucleotide
gagcaagguugucaauauc

SEQ ID NO: 212132 - RNA, 19 nt, Artificial Sequence
  Description of Artificial Sequence: Synthetic oligonucleotide
acacugacgugccuucaau

SEQ ID NO: 212133 - RNA, 19 nt, Artificial Sequence
  Description of Artificial Sequence: Synthetic oligonucleotide
gcuagcaucaaguaacaau

SEQ ID NO: 212134 - RNA, 19 nt, Artificial Sequence
  Description of Artificial Sequence: Synthetic oligonucleotide
cgcaaaaucucaugcuggg

SEQ ID NO: 212135 - RNA, 19 nt, Artificial Sequence
  Description of Artificial Sequence: Synthetic oligonucleotide
cucgaauacgucauccgcu

SEQ ID NO: 212136 - RNA, 19 nt, Artificial Sequence
  Description of Artificial Sequence: Synthetic oligonucleotide
aaugaacggccgcgcucca

SEQ ID NO: 212137 - RNA, 19 nt, Artificial Sequence
  Description of Artificial Sequence: Synthetic oligonucleotide
agagggacgcuggcagcgc

SEQ ID NO: 212138 - RNA, 19 nt, Artificial Sequence
  Description of Artificial Sequence: Synthetic oligonucleotide
cuaguuagguagugccaca

SEQ ID NO: 212139 - RNA, 19 nt, Artificial Sequence
  Description of Artificial Sequence: Synthetic oligonucleotide
caguuacacaggacacuac

SEQ ID NO: 212140 - RNA, 19 nt, Artificial Sequence
  Description of Artificial Sequence: Synthetic oligonucleotide
uuacuauagcaggauuauu

SEQ ID NO: 212141 - RNA, 19 nt, Artificial Sequence
  Description of Artificial Sequence: Synthetic oligonucleotide
uuccacauaucagcugauc

SEQ ID NO: 212142 - RNA, 19 nt, Artificial Sequence
  Description of Artificial Sequence: Synthetic oligonucleotide
ucuaguguagguggcucuu

SEQ ID NO: 212143 - RNA, 19 nt, Artificial Sequence
  Description of Artificial Sequence: Synthetic oligonucleotide
gaauggcauuccccgcgug

SEQ ID NO: 212144 - RNA, 19 nt, Artificial Sequence
  Description of Artificial Sequence: Synthetic oligonucleotide
aacggcggugcggcaacuc

SEQ ID NO: 212145 - RNA, 19 nt, Artificial Sequence
  Description of Artificial Sequence: Synthetic oligonucleotide
uacgaaggcuuagaacaau

SEQ ID NO: 212146 - RNA, 19 nt, Artificial Sequence
  Description of Artificial Sequence: Synthetic oligonucleotide
ucgcgaucgccuacacucu

SEQ ID NO: 212147 - RNA, 19 nt, Artificial Sequence
  Description of Artificial Sequence: Synthetic oligonucleotide
ggugcuaguuagguagugc

SEQ ID NO: 212148 - RNA, 19 nt, Artificial Sequence
  Description of Artificial Sequence: Synthetic oligonucleotide
uggugcuaguuagguagug

SEQ ID NO: 212149 - RNA, 19 nt, Artificial Sequence
  Description of Artificial Sequence: Synthetic oligonucleotide
uuuccgggcucaguuaauu

SEQ ID NO: 212150 - RNA, 19 nt, Artificial Sequence
  Description of Artificial Sequence: Synthetic oligonucleotide
ucggacaggauaggguuua

SEQ ID NO: 212151 - RNA, 19 nt, Artificial Sequence
  Description of Artificial Sequence: Synthetic oligonucleotide
cuaucagcaauuacauaau

SEQ ID NO: 212152 - RNA, 19 nt, Artificial Sequence
  Description of Artificial Sequence: Synthetic oligonucleotide
acacucucgaauacgucau

SEQ ID NO: 212153 - RNA, 19 nt, Artificial Sequence
  Description of Artificial Sequence: Synthetic oligonucleotide
gucuuagcucgcgaucgcc

SEQ ID NO: 212154 - RNA, 19 nt, Artificial Sequence
  Description of Artificial Sequence: Synthetic oligonucleotide
agcucgcgaucgccuacac

SEQ ID NO: 212155 - RNA, 19 nt, Artificial Sequence
  Description of Artificial Sequence: Synthetic oligonucleotide
ccgacgaaucggcugaaag

SEQ ID NO: 212156 - RNA, 19 nt, Artificial Sequence
  Description of Artificial Sequence: Synthetic oligonucleotide
acuugucgcaaaaucucau

SEQ ID NO: 212157 - RNA, 19 nt, Artificial Sequence
  Description of Artificial Sequence: Synthetic oligonucleotide
aucggcugaaagacagcag

SEQ ID NO: 212158 - RNA, 19 nt, Artificial Sequence
  Description of Artificial Sequence: Synthetic oligonucleotide
acgucauccgcuggcuguc

SEQ ID NO: 212159 - RNA, 19 nt, Artificial Sequence
  Description of Artificial Sequence: Synthetic oligonucleotide
gagaacuuacgaaggcuua

SEQ ID NO: 212160 - RNA, 19 nt, Artificial Sequence
  Description of Artificial Sequence: Synthetic oligonucleotide
agccggggugcuguaugcc

SEQ ID NO: 212161 - RNA, 19 nt, Artificial Sequence
  Description of Artificial Sequence: Synthetic oligonucleotide
guuagcccaaucugcaaau

SEQ ID NO: 212162 - RNA, 19 nt, Artificial Sequence
  Description of Artificial Sequence: Synthetic oligonucleotide
aaauggcgaggcggggcug

SEQ ID NO: 212163 - RNA, 19 nt, Artificial Sequence
  Description of Artificial Sequence: Synthetic oligonucleotide
cugcguacccuuccuucug

SEQ ID NO: 212164 - RNA, 19 nt, Artificial Sequence
  Description of Artificial Sequence: Synthetic oligonucleotide
ugaauacgauucuguccuu

SEQ ID NO: 212165 - RNA, 19 nt, Artificial Sequence
  Description of Artificial Sequence: Synthetic oligonucleotide
cagcuagcaucaaguaaca

SEQ ID NO: 212166 - RNA, 19 nt, Artificial Sequence
  Description of Artificial Sequence: Synthetic oligonucleotide
gcgcaaaugaacggccgcg

SEQ ID NO: 212167 - RNA, 19 nt, Artificial Sequence
  Description of Artificial Sequence: Synthetic oligonucleotide
guccaugaagugcugaguu

SEQ ID NO: 212168 - RNA, 19 nt, Artificial Sequence
  Description of Artificial Sequence: Synthetic oligonucleotide
acgagaccauuacuuuaau

SEQ ID NO: 212169 - RNA, 19 nt, Artificial Sequence
  Description of Artificial Sequence: Synthetic oligonucleotide
acacuacagaauagaggga

SEQ ID NO: 212170 - RNA, 19 nt, Artificial Sequence
  Description of Artificial Sequence: Synthetic oligonucleotide
agggcacggucccaucgcu

SEQ ID NO: 212171 - RNA, 19 nt, Artificial Sequence
  Description of Artificial Sequence: Synthetic oligonucleotide
acgacaugcaggugcucuu

SEQ ID NO: 212172 - RNA, 19 nt, Artificial Sequence
  Description of Artificial Sequence: Synthetic oligonucleotide
gacgugccuucaauaugug

SEQ ID NO: 212173 - RNA, 19 nt, Artificial Sequence
  Description of Artificial Sequence: Synthetic oligonucleotide
ugcccuuguguggggauaa

SEQ ID NO: 212174 - RNA, 19 nt, Artificial Sequence
  Description of Artificial Sequence: Synthetic oligonucleotide
acgaaggcuuagaacaauu

SEQ ID NO: 212175 - RNA, 19 nt, Artificial Sequence
  Description of Artificial Sequence: Synthetic oligonucleotide
acgcuggcagcgcuaaguu

SEQ ID NO: 212176 - RNA, 19 nt, Artificial Sequence
  Description of Artificial Sequence: Synthetic oligonucleotide
uagcucgcgaucgccuaca

SEQ ID NO: 212177 - RNA, 19 nt, Artificial Sequence
  Description of Artificial Sequence: Synthetic oligonucleotide
caauucgaccucuuccagu

SEQ ID NO: 212178 - RNA, 19 nt, Artificial Sequence
  Description of Artificial Sequence: Synthetic oligonucleotide
acgaaucggcugaaagaca

SEQ ID NO: 212179 - RNA, 19 nt, Artificial Sequence
  Description of Artificial Sequence: Synthetic oligonucleotide
acucgaaauguuacuucua

SEQ ID NO: 212180 - RNA, 19 nt, Artificial Sequence
  Description of Artificial Sequence: Synthetic oligonucleotide
acguggugcuaguuaggua

SEQ ID NO: 212181 - RNA, 19 nt, Artificial Sequence
  Description of Artificial Sequence: Synthetic oligonucleotide
cacugacgugccuucaaua

SEQ ID NO: 212182 - RNA, 19 nt, Artificial Sequence
  Description of Artificial Sequence: Synthetic oligonucleotide
gucacucgaaauguuacuu

SEQ ID NO: 212183 - RNA, 19 nt, Artificial Sequence
  Description of Artificial Sequence: Synthetic oligonucleotide
gcauagagugcucuucgua

SEQ ID NO: 212184 - RNA, 19 nt, Artificial Sequence
  Description of Artificial Sequence: Synthetic oligonucleotide
cacagcguaggguuuugcu

SEQ ID NO: 212185 - RNA, 19 nt, Artificial Sequence
  Description of Artificial Sequence: Synthetic oligonucleotide
ucgaaacggcggugcggca

SEQ ID NO: 212186 - RNA, 19 nt, Artificial Sequence
  Description of Artificial Sequence: Synthetic oligonucleotide
ggauaggguuuauuacgaa

SEQ ID NO: 212187 - RNA, 19 nt, Artificial Sequence
  Description of Artificial Sequence: Synthetic oligonucleotide
acauaucagcugauccaaa

SEQ ID NO: 212188 - RNA, 19 nt, Artificial Sequence
  Description of Artificial Sequence: Synthetic oligonucleotide
gaucgccuacacucucgaa

SEQ ID NO: 212189 - RNA, 19 nt, Artificial Sequence
  Description of Artificial Sequence: Synthetic oligonucleotide
ggcauuccccgcgugggcc

SEQ ID NO: 212190 - RNA, 19 nt, Artificial Sequence
  Description of Artificial Sequence: Synthetic oligonucleotide
augaacggccgcgcuccag

SEQ ID NO: 212191 - RNA, 19 nt, Artificial Sequence
  Description of Artificial Sequence: Synthetic oligonucleotide
agcuagcaucaaguaacaa

SEQ ID NO: 212192 - RNA, 19 nt, Artificial Sequence
  Description of Artificial Sequence: Synthetic oligonucleotide
gcgaucgccuacacucucg

SEQ ID NO: 212193 - RNA, 19 nt, Artificial Sequence
  Description of Artificial Sequence: Synthetic oligonucleotide
agcgaaagucuagcccagu

SEQ ID NO: 212194 - RNA, 19 nt, Artificial Sequence
  Description of Artificial Sequence: Synthetic oligonucleotide
gggcucaguuaauuggaaa

SEQ ID NO: 212195 - RNA, 19 nt, Artificial Sequence
  Description of Artificial Sequence: Synthetic oligonucleotide
gaggcggggcugcacacgu

SEQ ID NO: 212196 - RNA, 19 nt, Artificial Sequence
  Description of Artificial Sequence: Synthetic oligonucleotide
guucaucgccuuucuccaa

SEQ ID NO: 212197 - RNA, 19 nt, Artificial Sequence
  Description of Artificial Sequence: Synthetic oligonucleotide
aaacggcggugcggcaacu

SEQ ID NO: 212198 - RNA, 19 nt, Artificial Sequence
  Description of Artificial Sequence: Synthetic oligonucleotide
cucuucguaaagucuucau

SEQ ID NO: 212199 - RNA, 19 nt, Artificial Sequence
  Description of Artificial Sequence: Synthetic oligonucleotide
ggugcuauucgaauuugau

SEQ ID NO: 212200 - RNA, 19 nt, Artificial Sequence
  Description of Artificial Sequence: Synthetic oligonucleotide
cacgacaugcaggugcucu

SEQ ID NO: 212201 - RNA, 19 nt, Artificial Sequence
  Description of Artificial Sequence: Synthetic oligonucleotide
gcauuccccgcgugggccc

SEQ ID NO: 212202 - RNA, 19 nt, Artificial Sequence
  Description of Artificial Sequence: Synthetic oligonucleotide
gcgaaagucuagcccagua

SEQ ID NO: 212203 - RNA, 19 nt, Artificial Sequence
  Description of Artificial Sequence: Synthetic oligonucleotide
augcggccccuuaaagcug

SEQ ID NO: 212204 - RNA, 19 nt, Artificial Sequence
  Description of Artificial Sequence: Synthetic oligonucleotide
ccgggcucaguuaauugga

SEQ ID NO: 212205 - RNA, 19 nt, Artificial Sequence
  Description of Artificial Sequence: Synthetic oligonucleotide
cacguggugcuaguuaggu

SEQ ID NO: 212206 - RNA, 19 nt, Artificial Sequence
  Description of Artificial Sequence: Synthetic oligonucleotide
ggcacggucccaucgcucu

SEQ ID NO: 212207 - RNA, 19 nt, Artificial Sequence
  Description of Artificial Sequence: Synthetic oligonucleotide
gcacacguggugcuaguua

SEQ ID NO: 212208 - RNA, 19 nt, Artificial Sequence
  Description of Artificial Sequence: Synthetic oligonucleotide
ggugcucgcggcgccgggg

SEQ ID NO: 212209 - RNA, 19 nt, Artificial Sequence
  Description of Artificial Sequence: Synthetic oligonucleotide
ccggggugcuguaugccac

SEQ ID NO: 212210 - RNA, 19 nt, Artificial Sequence
  Description of Artificial Sequence: Synthetic oligonucleotide
gcaaaugaacggccgcgcu

SEQ ID NO: 212211 - RNA, 19 nt, Artificial Sequence
  Description of Artificial Sequence: Synthetic oligonucleotide
uggcagcgcuaaguuccca

SEQ ID NO: 212212 - RNA, 19 nt, Artificial Sequence
  Description of Artificial Sequence: Synthetic oligonucleotide
gccguccaagccuugauuu

SEQ ID NO: 212213 - RNA, 19 nt, Artificial Sequence
  Description of Artificial Sequence: Synthetic oligonucleotide
cgcaaaugaacggccgcgc

SEQ ID NO: 212214 - RNA, 19 nt, Artificial Sequence
  Description of Artificial Sequence: Synthetic oligonucleotide
ccaaggcaccuguaaaaua

SEQ ID NO: 212215 - RNA, 19 nt, Artificial Sequence
  Description of Artificial Sequence: Synthetic oligonucleotide
cugugagugcacuguguuu

SEQ ID NO: 212216 - RNA, 19 nt, Artificial Sequence
  Description of Artificial Sequence: Synthetic oligonucleotide
gccuaucagcaauuacaua

SEQ ID NO: 212217 - RNA, 19 nt, Artificial Sequence
  Description of Artificial Sequence: Synthetic oligonucleotide
cggugcggcaacucggcug

SEQ ID NO: 212218 - RNA, 19 nt, Artificial Sequence
  Description of Artificial Sequence: Synthetic oligonucleotide
ccagaugcggccccuuaaa

SEQ ID NO: 212219 - RNA, 19 nt, Artificial Sequence
  Description of Artificial Sequence: Synthetic oligonucleotide
guggugcuaguuagguagu

SEQ ID NO: 212220 - RNA, 19 nt, Artificial Sequence
  Description of Artificial Sequence: Synthetic oligonucleotide
cucggacaggauaggguuu

SEQ ID NO: 212221 - RNA, 19 nt, Artificial Sequence
  Description of Artificial Sequence: Synthetic oligonucleotide
auuccccgcgugggcccag

SEQ ID NO: 212222 - RNA, 19 nt, Artificial Sequence
  Description of Artificial Sequence: Synthetic oligonucleotide
cacucccgacgaaucggcu

SEQ ID NO: 212223 - RNA, 19 nt, Artificial Sequence
  Description of Artificial Sequence: Synthetic oligonucleotide
cauuccccgcgugggccca

SEQ ID NO: 212224 - RNA, 19 nt, Artificial Sequence
  Description of Artificial Sequence: Synthetic oligonucleotide
cuaguguagguggcucuuu

SEQ ID NO: 212225 - RNA, 19 nt, Artificial Sequence
  Description of Artificial Sequence: Synthetic oligonucleotide
cgcgaucgccuacacucuc

SEQ ID NO: 212226 - RNA, 19 nt, Artificial Sequence
  Description of Artificial Sequence: Synthetic oligonucleotide
gggcacggucccaucgcuc

SEQ ID NO: 212227 - RNA, 19 nt, Artificial Sequence
  Description of Artificial Sequence: Synthetic oligonucleotide
ggccguccaagccuugauu

SEQ ID NO: 212228 - RNA, 19 nt, Artificial Sequence
  Description of Artificial Sequence: Synthetic oligonucleotide
ccaugccgucacucccgac

SEQ ID NO: 212229 - RNA, 19 nt, Artificial Sequence
  Description of Artificial Sequence: Synthetic oligonucleotide
gccuguuaaguugcuugau

SEQ ID NO: 212230 - RNA, 19 nt, Artificial Sequence
  Description of Artificial Sequence: Synthetic oligonucleotide
gcucgcgaucgccuacacu

SEQ ID NO: 212231 - RNA, 19 nt, Artificial Sequence
  Description of Artificial Sequence: Synthetic oligonucleotide
cgggcucaguuaauuggaa

SEQ ID NO: 212232 - RNA, 19 nt, Artificial Sequence
  Description of Artificial Sequence: Synthetic oligonucleotide
cgcuaaguucccacagcgu

SEQ ID NO: 212233 - RNA, 19 nt, Artificial Sequence
  Description of Artificial Sequence: Synthetic oligonucleotide
cggccccuuaaagcuguac

SEQ ID NO: 212234 - RNA, 19 nt, Artificial Sequence
  Description of Artificial Sequence: Synthetic oligonucleotide
cggucccaucgcucugcac

SEQ ID NO: 212235 - RNA, 19 nt, Artificial Sequence
  Description of Artificial Sequence: Synthetic oligonucleotide
gcaacucggcuggggugcu

SEQ ID NO: 212236 - RNA, 19 nt, Artificial Sequence
  Description of Artificial Sequence: Synthetic oligonucleotide
cuauaaagaaacuagaugg

SEQ ID NO: 212237 - RNA, 19 nt, Artificial Sequence
  Description of Artificial Sequence: Synthetic oligonucleotide
aacuagauggaauacacac

SEQ ID NO: 212238 - RNA, 19 nt, Artificial Sequence
  Description of Artificial Sequence: Synthetic oligonucleotide
uuagcuacuaauuagcucu

SEQ ID NO: 212239 - RNA, 19 nt, Artificial Sequence
  Description of Artificial Sequence: Synthetic oligonucleotide
uuaauagagguuaucuugg

SEQ ID NO: 212240 - RNA, 19 nt, Artificial Sequence
  Description of Artificial Sequence: Synthetic oligonucleotide
ugacauaccaauuacguug

SEQ ID NO: 212241 - RNA, 19 nt, Artificial Sequence
  Description of Artificial Sequence: Synthetic oligonucleotide
cuaauuagucuccauaugg

SEQ ID NO: 212242 - RNA, 19 nt, Artificial Sequence
  Description of Artificial Sequence: Synthetic oligonucleotide
uagggaaauauuuaaagcu

SEQ ID NO: 212243 - RNA, 19 nt, Artificial Sequence
  Description of Artificial Sequence: Synthetic oligonucleotide
uaacucauaaccucuaagc

SEQ ID NO: 212244 - RNA, 19 nt, Artificial Sequence
  Description of Artificial Sequence: Synthetic oligonucleotide
aaauuauuaauagagguua

SEQ ID NO: 212245 - RNA, 19 nt, Artificial Sequence
  Description of Artificial Sequence: Synthetic oligonucleotide
uuagguucaaaugaggcag

SEQ ID NO: 212246 - RNA, 19 nt, Artificial Sequence
  Description of Artificial Sequence: Synthetic oligonucleotide
acuauacuacaucugcugc

SEQ ID NO: 212247 - RNA, 19 nt, Artificial Sequence
  Description of Artificial Sequence: Synthetic oligonucleotide
aauggauagagcaccgucc

SEQ ID NO: 212248 - RNA, 19 nt, Artificial Sequence
  Description of Artificial Sequence: Synthetic oligonucleotide
uuugcguaggaacugguag

SEQ ID NO: 212249 - RNA, 19 nt, Artificial Sequence
  Description of Artificial Sequence: Synthetic oligonucleotide
guuauugugucaaaguagg

SEQ ID NO: 212250 - RNA, 19 nt, Artificial Sequence
  Description of Artificial Sequence: Synthetic oligonucleotide
aguacuaucaucucacacu

SEQ ID NO: 212251 - RNA, 19 nt, Artificial Sequence
  Description of Artificial Sequence: Synthetic oligonucleotide
uauaaagaaacuagaugga

SEQ ID NO: 212252 - RNA, 19 nt, Artificial Sequence
  Description of Artificial Sequence: Synthetic oligonucleotide
guugcauuaguauguaccg

SEQ ID NO: 212253 - RNA, 19 nt, Artificial Sequence
  Description of Artificial Sequence: Synthetic oligonucleotide
uaugcuaugucuccuaccu

SEQ ID NO: 212254 - RNA, 19 nt, Artificial Sequence
  Description of Artificial Sequence: Synthetic oligonucleotide
aacucauaaccucuaagca

SEQ ID NO: 212255 - RNA, 19 nt, Artificial Sequence
  Description of Artificial Sequence: Synthetic oligonucleotide
ugucuuugcaaaacgagca

SEQ ID NO: 212256 - RNA, 19 nt, Artificial Sequence
  Description of Artificial Sequence: Synthetic oligonucleotide
acuaauuagcucuauacau

SEQ ID NO: 212257 - RNA, 19 nt, Artificial Sequence
  Description of Artificial Sequence: Synthetic oligonucleotide
cuacuaauuagcucuauac

SEQ ID NO: 212258 - RNA, 19 nt, Artificial Sequence
  Description of Artificial Sequence: Synthetic oligonucleotide
uaauuagucuccauauggc

SEQ ID NO: 212259 - RNA, 19 nt, Artificial Sequence
  Description of Artificial Sequence: Synthetic oligonucleotide
uacuaauuagcucuauaca

SEQ ID NO: 212260 - RNA, 19 nt, Artificial Sequence
  Description of Artificial Sequence: Synthetic oligonucleotide
ucgguuaucaccugauuag

SEQ ID NO: 212261 - RNA, 19 nt, Artificial Sequence
  Description of Artificial Sequence: Synthetic oligonucleotide
aaauugcuaauuagucucc

SEQ ID NO: 212262 - RNA, 19 nt, Artificial Sequence
  Description of Artificial Sequence: Synthetic oligonucleotide
aaguuauugugucaaagua

SEQ ID NO: 212263 - RNA, 19 nt, Artificial Sequence
  Description of Artificial Sequence: Synthetic oligonucleotide
auggauagagcaccguccc

SEQ ID NO: 212264 - RNA, 19 nt, Artificial Sequence
  Description of Artificial Sequence: Synthetic oligonucleotide
ugaaguuagcuacuaauua

SEQ ID NO: 212265 - RNA, 19 nt, Artificial Sequence
  Description of Artificial Sequence: Synthetic oligonucleotide
acgaacaccacgaagacag

SEQ ID NO: 212266 - RNA, 19 nt, Artificial Sequence
  Description of Artificial Sequence: Synthetic oligonucleotide
gaacugaauucuugcaacg

SEQ ID NO: 212267 - RNA, 19 nt, Artificial Sequence
  Description of Artificial Sequence: Synthetic oligonucleotide
uuucuacucuuacagugag

SEQ ID NO: 212268 - RNA, 19 nt, Artificial Sequence
  Description of Artificial Sequence: Synthetic oligonucleotide
agucuagcggaguggaacc

SEQ ID NO: 212269 - RNA, 19 nt, Artificial Sequence
  Description of Artificial Sequence: Synthetic oligonucleotide
agagcuguaaaguuugcgu

SEQ ID NO: 212270 - RNA, 19 nt, Artificial Sequence
  Description of Artificial Sequence: Synthetic oligonucleotide
uuuaagggaagggagucag

SEQ ID NO: 212271 - RNA, 19 nt, Artificial Sequence
  Description of Artificial Sequence: Synthetic oligonucleotide
uguuugacuuuucagguua

SEQ ID NO: 212272 - RNA, 19 nt, Artificial Sequence
  Description of Artificial Sequence: Synthetic oligonucleotide
auuaguauguaccguuucu

SEQ ID NO: 212273 - RNA, 19 nt, Artificial Sequence
  Description of Artificial Sequence: Synthetic oligonucleotide
aguuauugugucaaaguag

SEQ ID NO: 212274 - RNA, 19 nt, Artificial Sequence
  Description of Artificial Sequence: Synthetic oligonucleotide
uugaacauccaugagguuc

SEQ ID NO: 212275 - RNA, 19 nt, Artificial Sequence
  Description of Artificial Sequence: Synthetic oligonucleotide
auagagguuaucuuggguu

SEQ ID NO: 212276 - RNA, 19 nt, Artificial Sequence
  Description of Artificial Sequence: Synthetic oligonucleotide
auauguuaacacacugucc

SEQ ID NO: 212277 - RNA, 19 nt, Artificial Sequence
  Description of Artificial Sequence: Synthetic oligonucleotide
ugaugaucacuacuuagaa

SEQ ID NO: 212278 - RNA, 19 nt, Artificial Sequence
  Description of Artificial Sequence: Synthetic oligonucleotide
ugcuaauuagucuccauau

SEQ ID NO: 212279 - RNA, 19 nt, Artificial Sequence
  Description of Artificial Sequence: Synthetic oligonucleotide
agcaucgcuccccucaggc

SEQ ID NO: 212280 - RNA, 19 nt, Artificial Sequence
  Description of Artificial Sequence: Synthetic oligonucleotide
augccuaugcuaugucucc

SEQ ID NO: 212281 - RNA, 19 nt, Artificial Sequence
  Description of Artificial Sequence: Synthetic oligonucleotide
uccuuuuauaauccaacau

SEQ ID NO: 212282 - RNA, 19 nt, Artificial Sequence
  Description of Artificial Sequence: Synthetic oligonucleotide
ugguuggccguccugcugg

SEQ ID NO: 212283 - RNA, 19 nt, Artificial Sequence
  Description of Artificial Sequence: Synthetic oligonucleotide
gauuagcuaguugaagugc

SEQ ID NO: 212284 - RNA, 19 nt, Artificial Sequence
  Description of Artificial Sequence: Synthetic oligonucleotide
uccaaagggauuccguugu

SEQ ID NO: 212285 - RNA, 19 nt, Artificial Sequence
  Description of Artificial Sequence: Synthetic oligonucleotide
uuacccuauucaaggaccc

SEQ ID NO: 212286 - RNA, 19 nt, Artificial Sequence
  Description of Artificial Sequence: Synthetic oligonucleotide
uacuacaucugcugcguag

SEQ ID NO: 212287 - RNA, 19 nt, Artificial Sequence
  Description of Artificial Sequence: Synthetic oligonucleotide
uaguauguaccguuucuca

SEQ ID NO: 212288 - RNA, 19 nt, Artificial Sequence
  Description of Artificial Sequence: Synthetic oligonucleotide
cacuauacuacaucugcug

SEQ ID NO: 212289 - RNA, 19 nt, Artificial Sequence
  Description of Artificial Sequence: Synthetic oligonucleotide
aaacaucaggcuagagagc

SEQ ID NO: 212290 - RNA, 19 nt, Artificial Sequence
  Description of Artificial Sequence: Synthetic oligonucleotide
aacuaaacuuuugcaauga

SEQ ID NO: 212291 - RNA, 19 nt, Artificial Sequence
  Description of Artificial Sequence: Synthetic oligonucleotide
agugacauaccaauuacgu

SEQ ID NO: 212292 - RNA, 19 nt, Artificial Sequence
  Description of Artificial Sequence: Synthetic oligonucleotide
ucagauuacccagugacau

SEQ ID NO: 212293 - RNA, 19 nt, Artificial Sequence
  Description of Artificial Sequence: Synthetic oligonucleotide
guagaguuuccauuccaag

SEQ ID NO: 212294 - RNA, 19 nt, Artificial Sequence
  Description of Artificial Sequence: Synthetic oligonucleotide
cucuagauccaguagcuuc

SEQ ID NO: 212295 - RNA, 19 nt, Artificial Sequence
  Description of Artificial Sequence: Synthetic oligonucleotide
aaguuugcguaggaacugg

SEQ ID NO: 212296 - RNA, 19 nt, Artificial Sequence
  Description of Artificial Sequence: Synthetic oligonucleotide
aacaucgguuaucaccuga

SEQ ID NO: 212297 - RNA, 19 nt, Artificial Sequence
  Description of Artificial Sequence: Synthetic oligonucleotide
gaauggauagagcaccguc

SEQ ID NO: 212298 - RNA, 19 nt, Artificial Sequence
  Description of Artificial Sequence: Synthetic oligonucleotide
ucuccauauggccaggaau

SEQ ID NO: 212299 - RNA, 19 nt, Artificial Sequence
  Description of Artificial Sequence: Synthetic oligonucleotide
aacgagcagcucucucugc

SEQ ID NO: 212300 - RNA, 19 nt, Artificial Sequence
  Description of Artificial Sequence: Synthetic oligonucleotide
ugcauuaguauguaccguu

SEQ ID NO: 212301 - RNA, 19 nt, Artificial Sequence
  Description of Artificial Sequence: Synthetic oligonucleotide
uauacuacaucugcugcgu

SEQ ID NO: 212302 - RNA, 19 nt, Artificial Sequence
  Description of Artificial Sequence: Synthetic oligonucleotide
guuacccuauucaaggacc

SEQ ID NO: 212303 - RNA, 19 nt, Artificial Sequence
  Description of Artificial Sequence: Synthetic oligonucleotide
aaccucuaagcagaaauaa

SEQ ID NO: 212304 - RNA, 19 nt, Artificial Sequence
  Description of Artificial Sequence: Synthetic oligonucleotide
acguuguguggcuuaaaag

SEQ ID NO: 212305 - RNA, 19 nt, Artificial Sequence
  Description of Artificial Sequence: Synthetic oligonucleotide
uacguuguguggcuuaaaa

SEQ ID NO: 212306 - RNA, 19 nt, Artificial Sequence
  Description of Artificial Sequence: Synthetic oligonucleotide
guauguaccguuucucaac

SEQ ID NO: 212307 - RNA, 19 nt, Artificial Sequence
  Description of Artificial Sequence: Synthetic oligonucleotide
ugcaaaacgagcagcucuc

SEQ ID NO: 212308 - RNA, 19 nt, Artificial Sequence
  Description of Artificial Sequence: Synthetic oligonucleotide
accguuucucaacagaaau

SEQ ID NO: 212309 - RNA, 19 nt, Artificial Sequence
  Description of Artificial Sequence: Synthetic oligonucleotide
acaauggaugugguuggcc

SEQ ID NO: 212310 - RNA, 19 nt, Artificial Sequence
  Description of Artificial Sequence: Synthetic oligonucleotide
aauuacguuguguggcuua

SEQ ID NO: 212311 - RNA, 19 nt, Artificial Sequence
  Description of Artificial Sequence: Synthetic oligonucleotide
ucauccuaugccuaugcua

SEQ ID NO: 212312 - RNA, 19 nt, Artificial Sequence
  Description of Artificial Sequence: Synthetic oligonucleotide
guuagcuacuaauuagcuc

SEQ ID NO: 212313 - RNA, 19 nt, Artificial Sequence
  Description of Artificial Sequence: Synthetic oligonucleotide
aucgguuaucaccugauua

SEQ ID NO: 212314 - RNA, 19 nt, Artificial Sequence
  Description of Artificial Sequence: Synthetic oligonucleotide
ucggaaggaaacugauuug

SEQ ID NO: 212315 - RNA, 19 nt, Artificial Sequence
  Description of Artificial Sequence: Synthetic oligonucleotide
augaugaucacuacuuaga

SEQ ID NO: 212316 - RNA, 19 nt, Artificial Sequence
  Description of Artificial Sequence: Synthetic oligonucleotide
cuaauuagcucuauacaua

SEQ ID NO: 212317 - RNA, 19 nt, Artificial Sequence
  Description of Artificial Sequence: Synthetic oligonucleotide
cagguuaaacaacuuuaac

SEQ ID NO: 212318 - RNA, 19 nt, Artificial Sequence
  Description of Artificial Sequence: Synthetic oligonucleotide
auuccguugucuccuauaa

SEQ ID NO: 212319 - RNA, 19 nt, Artificial Sequence
  Description of Artificial Sequence: Synthetic oligonucleotide
ugcguagaguuuccauucc

SEQ ID NO: 212320 - RNA, 19 nt, Artificial Sequence
  Description of Artificial Sequence: Synthetic oligonucleotide
aauggcgcccuggaaccac

SEQ ID NO: 212321 - RNA, 19 nt, Artificial Sequence
  Description of Artificial Sequence: Synthetic oligonucleotide
aggaggauuacuaaauaaa

SEQ ID NO: 212322 - RNA, 19 nt, Artificial Sequence
  Description of Artificial Sequence: Synthetic oligonucleotide
ugcuugaugcgcucucgag

SEQ ID NO: 212323 - RNA, 19 nt, Artificial Sequence
  Description of Artificial Sequence: Synthetic oligonucleotide
gguguuuaguuguuuucag

SEQ ID NO: 212324 - RNA, 19 nt, Artificial Sequence
  Description of Artificial Sequence: Synthetic oligonucleotide
caguacuaucaucucacac

SEQ ID NO: 212325 - RNA, 19 nt, Artificial Sequence
  Description of Artificial Sequence: Synthetic oligonucleotide
ucugcugcguagaguuucc

SEQ ID NO: 212326 - RNA, 19 nt, Artificial Sequence
  Description of Artificial Sequence: Synthetic oligonucleotide
aaguagggaaauauuuaaa

SEQ ID NO: 212327 - RNA, 19 nt, Artificial Sequence
  Description of Artificial Sequence: Synthetic oligonucleotide
uaucaccugauuagcuagu

SEQ ID NO: 212328 - RNA, 19 nt, Artificial Sequence
  Description of Artificial Sequence: Synthetic oligonucleotide
uuagcuaguugaagugcuc

SEQ ID NO: 212329 - RNA, 19 nt, Artificial Sequence
  Description of Artificial Sequence: Synthetic oligonucleotide
uccgacuuugugucagcag

SEQ ID NO: 212330 - RNA, 19 nt, Artificial Sequence
  Description of Artificial Sequence: Synthetic oligonucleotide
ucaucucacacuagauuuu

SEQ ID NO: 212331 - RNA, 19 nt, Artificial Sequence
  Description of Artificial Sequence: Synthetic oligonucleotide
aaacaucgguuaucaccug

SEQ ID NO: 212332 - RNA, 19 nt, Artificial Sequence
  Description of Artificial Sequence: Synthetic oligonucleotide
uuaaaguccuccccucguu

SEQ ID NO: 212333 - RNA, 19 nt, Artificial Sequence
  Description of Artificial Sequence: Synthetic oligonucleotide
auggccgccggaauggcgc

SEQ ID NO: 212334 - RNA, 19 nt, Artificial Sequence
  Description of Artificial Sequence: Synthetic oligonucleotide
cucuagggucagauuaccc

SEQ ID NO: 212335 - RNA, 19 nt, Artificial Sequence
  Description of Artificial Sequence: Synthetic oligonucleotide
aguuagcuacuaauuagcu

SEQ ID NO: 212336 - RNA, 19 nt, Artificial Sequence
  Description of Artificial Sequence: Synthetic oligonucleotide
ugauacagcccuguacaac

SEQ ID NO: 212337 - RNA, 19 nt, Artificial Sequence
  Description of Artificial Sequence: Synthetic oligonucleotide
gagcuguaaaguuugcgua

SEQ ID NO: 212338 - RNA, 19 nt, Artificial Sequence
  Description of Artificial Sequence: Synthetic oligonucleotide
gaaacacucccugcuauga

SEQ ID NO: 212339 - RNA, 19 nt, Artificial Sequence
  Description of Artificial Sequence: Synthetic oligonucleotide
agcucuauacauaacuaaa

SEQ ID NO: 212340 - RNA, 19 nt, Artificial Sequence
  Description of Artificial Sequence: Synthetic oligonucleotide
acuaaacuuuugcaaugau

SEQ ID NO: 212341 - RNA, 19 nt, Artificial Sequence
  Description of Artificial Sequence: Synthetic oligonucleotide
cuucuaacagagcaucgga

SEQ ID NO: 212342 - RNA, 19 nt, Artificial Sequence
  Description of Artificial Sequence: Synthetic oligonucleotide
ucucgagcagaagacuccc

SEQ ID NO: 212343 - RNA, 19 nt, Artificial Sequence
  Description of Artificial Sequence: Synthetic oligonucleotide
acuacaggauaaauuugug

SEQ ID NO: 212344 - RNA, 19 nt, Artificial Sequence
  Description of Artificial Sequence: Synthetic oligonucleotide
augcuaaacaucgguuauc

SEQ ID NO: 212345 - RNA, 19 nt, Artificial Sequence
  Description of Artificial Sequence: Synthetic oligonucleotide
uccuaugccuaugcuaugu

SEQ ID NO: 212346 - RNA, 19 nt, Artificial Sequence
  Description of Artificial Sequence: Synthetic oligonucleotide
acccuauucaaggacccag

SEQ ID NO: 212347 - RNA, 19 nt, Artificial Sequence
  Description of Artificial Sequence: Synthetic oligonucleotide
uaccguuucucaacagaaa

SEQ ID NO: 212348 - RNA, 19 nt, Artificial Sequence
  Description of Artificial Sequence: Synthetic oligonucleotide
gcuaauuagucuccauaug

SEQ ID NO: 212349 - RNA, 19 nt, Artificial Sequence
  Description of Artificial Sequence: Synthetic oligonucleotide
agcugguuacccuauucaa

SEQ ID NO: 212350 - RNA, 19 nt, Artificial Sequence
  Description of Artificial Sequence: Synthetic oligonucleotide
ucgagcagaagacucccuu

SEQ ID NO: 212351 - RNA, 19 nt, Artificial Sequence
  Description of Artificial Sequence: Synthetic oligonucleotide
uggauagagcaccgucccc

SEQ ID NO: 212352 - RNA, 19 nt, Artificial Sequence
  Description of Artificial Sequence: Synthetic oligonucleotide
gaguggaacccuaagggaa

SEQ ID NO: 212353 - RNA, 19 nt, Artificial Sequence
  Description of Artificial Sequence: Synthetic oligonucleotide
ucugcacgauccaaugcua

SEQ ID NO: 212354 - RNA, 19 nt, Artificial Sequence
  Description of Artificial Sequence: Synthetic oligonucleotide
uugauacagcccuguacaa

SEQ ID NO: 212355 - RNA, 19 nt, Artificial Sequence
  Description of Artificial Sequence: Synthetic oligonucleotide
aguaaacaugccaaguguu

SEQ ID NO: 212356 - RNA, 19 nt, Artificial Sequence
  Description of Artificial Sequence: Synthetic oligonucleotide
uugaugcgcucucgagccg

SEQ ID NO: 212357 - RNA, 19 nt, Artificial Sequence
  Description of Artificial Sequence: Synthetic oligonucleotide
ccgacuuugugucagcagc

SEQ ID NO: 212358 - RNA, 19 nt, Artificial Sequence
  Description of Artificial Sequence: Synthetic oligonucleotide
uguugcaguauccgacuuu

SEQ ID NO: 212359 - RNA, 19 nt, Artificial Sequence
  Description of Artificial Sequence: Synthetic oligonucleotide
aacagagcaucggaaggaa

SEQ ID NO: 212360 - RNA, 19 nt, Artificial Sequence
  Description of Artificial Sequence: Synthetic oligonucleotide
ugcacgauccaaugcuauc

SEQ ID NO: 212361 - RNA, 19 nt, Artificial Sequence
  Description of Artificial Sequence: Synthetic oligonucleotide
gguuacccuauucaaggac

SEQ ID NO: 212362 - RNA, 19 nt, Artificial Sequence
  Description of Artificial Sequence: Synthetic oligonucleotide
agcggaguggaacccuaag

SEQ ID NO: 212363 - RNA, 19 nt, Artificial Sequence
  Description of Artificial Sequence: Synthetic oligonucleotide
gagcaucggaaggaaacug

SEQ ID NO: 212364 - RNA, 19 nt, Artificial Sequence
  Description of Artificial Sequence: Synthetic oligonucleotide
agagcaucggaaggaaacu

SEQ ID NO: 212365 - RNA, 19 nt, Artificial Sequence
  Description of Artificial Sequence: Synthetic oligonucleotide
cauccuaugccuaugcuau

SEQ ID NO: 212366 - RNA, 19 nt, Artificial Sequence
  Description of Artificial Sequence: Synthetic oligonucleotide
gcuugaugcgcucucgagc

SEQ ID NO: 212367 - RNA, 19 nt, Artificial Sequence
  Description of Artificial Sequence: Synthetic oligonucleotide
uugcauuaguauguaccgu

SEQ ID NO: 212368 - RNA, 19 nt, Artificial Sequence
  Description of Artificial Sequence: Synthetic oligonucleotide
acauacaauaugaucccau

SEQ ID NO: 212369 - RNA, 19 nt, Artificial Sequence
  Description of Artificial Sequence: Synthetic oligonucleotide
acacuacaggauaaauuug

SEQ ID NO: 212370 - RNA, 19 nt, Artificial Sequence
  Description of Artificial Sequence: Synthetic oligonucleotide
ggaggauuacuaaauaaaa

SEQ ID NO: 212371 - RNA, 19 nt, Artificial Sequence
  Description of Artificial Sequence: Synthetic oligonucleotide
cggaguggaacccuaaggg

SEQ ID NO: 212372 - RNA, 19 nt, Artificial Sequence
  Description of Artificial Sequence: Synthetic oligonucleotide
gcggaguggaacccuaagg

SEQ ID NO: 212373 - RNA, 19 nt, Artificial Sequence
  Description of Artificial Sequence: Synthetic oligonucleotide
cacgauccaaugcuaucug

SEQ ID NO: 212374 - RNA, 19 nt, Artificial Sequence
  Description of Artificial Sequence: Synthetic oligonucleotide
ugaugcgcucucgagccgc

SEQ ID NO: 212375 - RNA, 19 nt, Artificial Sequence
  Description of Artificial Sequence: Synthetic oligonucleotide
ucaggcuagagagcuguaa

SEQ ID NO: 212376 - RNA, 19 nt, Artificial Sequence
  Description of Artificial Sequence: Synthetic oligonucleotide
gccggaacugaauucuugc

SEQ ID NO: 212377 - RNA, 19 nt, Artificial Sequence
  Description of Artificial Sequence: Synthetic oligonucleotide
gauuccguugucuccuaua

SEQ ID NO: 212378 - RNA, 19 nt, Artificial Sequence
  Description of Artificial Sequence: Synthetic oligonucleotide
ccagugacauaccaauuac

SEQ ID NO: 212379 - RNA, 19 nt, Artificial Sequence
  Description of Artificial Sequence: Synthetic oligonucleotide
uagcagacgcgauggccgc

SEQ ID NO: 212380 - RNA, 19 nt, Artificial Sequence
  Description of Artificial Sequence: Synthetic oligonucleotide
gcugguuacccuauucaag

SEQ ID NO: 212381 - RNA, 19 nt, Artificial Sequence
  Description of Artificial Sequence: Synthetic oligonucleotide
gucucgagcagaagacucc

SEQ ID NO: 212382 - RNA, 19 nt, Artificial Sequence
  Description of Artificial Sequence: Synthetic oligonucleotide
uuuucggacugguucccuu

SEQ ID NO: 212383 - RNA, 19 nt, Artificial Sequence
  Description of Artificial Sequence: Synthetic oligonucleotide
uuucggacugguucccuuu

SEQ ID NO: 212384 - RNA, 19 nt, Artificial Sequence
  Description of Artificial Sequence: Synthetic oligonucleotide
ggaguggaacccuaaggga

SEQ ID NO: 212385 - RNA, 19 nt, Artificial Sequence
  Description of Artificial Sequence: Synthetic oligonucleotide
caguaaacaugccaagugu

SEQ ID NO: 212386 - RNA, 19 nt, Artificial Sequence
  Description of Artificial Sequence: Synthetic oligonucleotide
uagcuacuaauuagcucua

SEQ ID NO: 212387 - RNA, 19 nt, Artificial Sequence
  Description of Artificial Sequence: Synthetic oligonucleotide
cugugcucacuauacuaca

SEQ ID NO: 212388 - RNA, 19 nt, Artificial Sequence
  Description of Artificial Sequence: Synthetic oligonucleotide
cuacucuuacagugagguc

SEQ ID NO: 212389 - RNA, 19 nt, Artificial Sequence
  Description of Artificial Sequence: Synthetic oligonucleotide
agcaccguccccaguaaug

SEQ ID NO: 212390 - RNA, 19 nt, Artificial Sequence
  Description of Artificial Sequence: Synthetic oligonucleotide
auuacguuguguggcuuaa

SEQ ID NO: 212391 - RNA, 19 nt, Artificial Sequence
  Description of Artificial Sequence: Synthetic oligonucleotide
cuagagagcuguaaaguuu

SEQ ID NO: 212392 - RNA, 19 nt, Artificial Sequence
  Description of Artificial Sequence: Synthetic oligonucleotide
cuugcaacggugcuucugu

SEQ ID NO: 212393 - RNA, 19 nt, Artificial Sequence
  Description of Artificial Sequence: Synthetic oligonucleotide
auccuaugccuaugcuaug

SEQ ID NO: 212394 - RNA, 19 nt, Artificial Sequence
  Description of Artificial Sequence: Synthetic oligonucleotide
gucagauuacccagugaca

SEQ ID NO: 212395 - RNA, 19 nt, Artificial Sequence
  Description of Artificial Sequence: Synthetic oligonucleotide
ucggugugucgucgccgcg

SEQ ID NO: 212396 - RNA, 19 nt, Artificial Sequence
  Description of Artificial Sequence: Synthetic oligonucleotide
aguggaacccuaagggaaa

SEQ ID NO: 212397 - RNA, 19 nt, Artificial Sequence
  Description of Artificial Sequence: Synthetic oligonucleotide
caggcuagagagcuguaaa

SEQ ID NO: 212398 - RNA, 19 nt, Artificial Sequence
  Description of Artificial Sequence: Synthetic oligonucleotide
cuaugccuaugcuaugucu

SEQ ID NO: 212399 - RNA, 19 nt, Artificial Sequence
  Description of Artificial Sequence: Synthetic oligonucleotide
ggguguuuaguuguuuuca

SEQ ID NO: 212400 - RNA, 19 nt, Artificial Sequence
  Description of Artificial Sequence: Synthetic oligonucleotide
guuuugaaguuagcuacua

SEQ ID NO: 212401 - RNA, 19 nt, Artificial Sequence
  Description of Artificial Sequence: Synthetic oligonucleotide
ucggacugguucccuuuuc

SEQ ID NO: 212402 - RNA, 19 nt, Artificial Sequence
  Description of Artificial Sequence: Synthetic oligonucleotide
cauacaauaugaucccauu

SEQ ID NO: 212403 - RNA, 19 nt, Artificial Sequence
  Description of Artificial Sequence: Synthetic oligonucleotide
uacccuauucaaggaccca

SEQ ID NO: 212404 - RNA, 19 nt, Artificial Sequence
  Description of Artificial Sequence: Synthetic oligonucleotide
ugccuaugcuaugucuccu

SEQ ID NO: 212405 - RNA, 19 nt, Artificial Sequence
  Description of Artificial Sequence: Synthetic oligonucleotide
ccuuuuauaauccaacauu

SEQ ID NO: 212406 - RNA, 19 nt, Artificial Sequence
  Description of Artificial Sequence: Synthetic oligonucleotide
acaucgguuaucaccugau

SEQ ID NO: 212407 - RNA, 19 nt, Artificial Sequence
  Description of Artificial Sequence: Synthetic oligonucleotide
agcagacgcgauggccgcc

SEQ ID NO: 212408 - RNA, 19 nt, Artificial Sequence
  Description of Artificial Sequence: Synthetic oligonucleotide
agccggaacugaauucuug

SEQ ID NO: 212409 - RNA, 19 nt, Artificial Sequence
  Description of Artificial Sequence: Synthetic oligonucleotide
agagcaccguccccaguaa

SEQ ID NO: 212410 - RNA, 19 nt, Artificial Sequence
  Description of Artificial Sequence: Synthetic oligonucleotide
aguuugcguaggaacuggu

SEQ ID NO: 212411 - RNA, 19 nt, Artificial Sequence
  Description of Artificial Sequence: Synthetic oligonucleotide
uugcaacggugcuucuguc

SEQ ID NO: 212412 - RNA, 19 nt, Artificial Sequence
  Description of Artificial Sequence: Synthetic oligonucleotide
uagcggaguggaacccuaa

SEQ ID NO: 212413 - RNA, 19 nt, Artificial Sequence
  Description of Artificial Sequence: Synthetic oligonucleotide
gucuagcggaguggaaccc

SEQ ID NO: 212414 - RNA, 19 nt, Artificial Sequence
  Description of Artificial Sequence: Synthetic oligonucleotide
ccuaugcuaugucuccuac

SEQ ID NO: 212415 - RNA, 19 nt, Artificial Sequence
  Description of Artificial Sequence: Synthetic oligonucleotide
gcuacuaauuagcucuaua

SEQ ID NO: 212416 - RNA, 19 nt, Artificial Sequence
  Description of Artificial Sequence: Synthetic oligonucleotide
gacagcgccgcuccucuua

SEQ ID NO: 212417 - RNA, 19 nt, Artificial Sequence
  Description of Artificial Sequence: Synthetic oligonucleotide
gcgcccuggaaccacagca

SEQ ID NO: 212418 - RNA, 19 nt, Artificial Sequence
  Description of Artificial Sequence: Synthetic oligonucleotide
gacgcgauggccgccggaa

SEQ ID NO: 212419 - RNA, 19 nt, Artificial Sequence
  Description of Artificial Sequence: Synthetic oligonucleotide
guggaacccuaagggaaac

SEQ ID NO: 212420 - RNA, 19 nt, Artificial Sequence
  Description of Artificial Sequence: Synthetic oligonucleotide
ucgcucggugugucgucgc

SEQ ID NO: 212421 - RNA, 19 nt, Artificial Sequence
  Description of Artificial Sequence: Synthetic oligonucleotide
gucuccauauggccaggaa

SEQ ID NO: 212422 - RNA, 19 nt, Artificial Sequence
  Description of Artificial Sequence: Synthetic oligonucleotide
uuacguuguguggcuuaaa

SEQ ID NO: 212423 - RNA, 19 nt, Artificial Sequence
  Description of Artificial Sequence: Synthetic oligonucleotide
guuugcguaggaacuggua

SEQ ID NO: 212424 - RNA, 19 nt, Artificial Sequence
  Description of Artificial Sequence: Synthetic oligonucleotide
agcuacuaauuagcucuau

SEQ ID NO: 212425 - RNA, 19 nt, Artificial Sequence
  Description of Artificial Sequence: Synthetic oligonucleotide
gcguagaguuuccauucca

SEQ ID NO: 212426 - RNA, 19 nt, Artificial Sequence
  Description of Artificial Sequence: Synthetic oligonucleotide
cuagcggaguggaacccua

SEQ ID NO: 212427 - RNA, 19 nt, Artificial Sequence
  Description of Artificial Sequence: Synthetic oligonucleotide
gcaucgcuccccucaggcc

SEQ ID NO: 212428 - RNA, 19 nt, Artificial Sequence
  Description of Artificial Sequence: Synthetic oligonucleotide
acagagcaucggaaggaaa

SEQ ID NO: 212429 - RNA, 19 nt, Artificial Sequence
  Description of Artificial Sequence: Synthetic oligonucleotide
gcgagcucuagauccagua

SEQ ID NO: 212430 - RNA, 19 nt, Artificial Sequence
  Description of Artificial Sequence: Synthetic oligonucleotide
ggaugaugcaggguuugaa

SEQ ID NO: 212431 - RNA, 19 nt, Artificial Sequence
  Description of Artificial Sequence: Synthetic oligonucleotide
cgguuaucaccugauuagc

SEQ ID NO: 212432 - RNA, 19 nt, Artificial Sequence
  Description of Artificial Sequence: Synthetic oligonucleotide
gggucagauuacccaguga

SEQ ID NO: 212433 - RNA, 19 nt, Artificial Sequence
  Description of Artificial Sequence: Synthetic oligonucleotide
cagacgcgauggccgccgg

SEQ ID NO: 212434 - RNA, 19 nt, Artificial Sequence
  Description of Artificial Sequence: Synthetic oligonucleotide
ggagggguugucaugacuu

SEQ ID NO: 212435 - RNA, 19 nt, Artificial Sequence
  Description of Artificial Sequence: Synthetic oligonucleotide
cugcacgauccaaugcuau

SEQ ID NO: 212436 - RNA, 19 nt, Artificial Sequence
  Description of Artificial Sequence: Synthetic oligonucleotide
ccaauuacguuguguggcu

SEQ ID NO: 212437 - RNA, 19 nt, Artificial Sequence
  Description of Artificial Sequence: Synthetic oligonucleotide
acgcgauggccgccggaau

SEQ ID NO: 212438 - RNA, 19 nt, Artificial Sequence
  Description of Artificial Sequence: Synthetic oligonucleotide
cgacuuugugucagcagca

SEQ ID NO: 212439 - RNA, 19 nt, Artificial Sequence
  Description of Artificial Sequence: Synthetic oligonucleotide
gccuaugcuaugucuccua

SEQ ID NO: 212440 - RNA, 19 nt, Artificial Sequence
  Description of Artificial Sequence: Synthetic oligonucleotide
auggcgcccuggaaccaca

SEQ ID NO: 212441 - RNA, 19 nt, Artificial Sequence
  Description of Artificial Sequence: Synthetic oligonucleotide
cuagauccaguagcuuccu

SEQ ID NO: 212442 - RNA, 19 nt, Artificial Sequence
  Description of Artificial Sequence: Synthetic oligonucleotide
cucgagcagaagacucccu

SEQ ID NO: 212443 - RNA, 19 nt, Artificial Sequence
  Description of Artificial Sequence: Synthetic oligonucleotide
gagcaccguccccaguaau

SEQ ID NO: 212444 - RNA, 19 nt, Artificial Sequence
  Description of Artificial Sequence: Synthetic oligonucleotide
ggaauggauagagcaccgu

SEQ ID NO: 212445 - RNA, 19 nt, Artificial Sequence
  Description of Artificial Sequence: Synthetic oligonucleotide
aucaggcuagagagcugua

SEQ ID NO: 212446 - RNA, 19 nt, Artificial Sequence
  Description of Artificial Sequence: Synthetic oligonucleotide
cugcugcguagaguuucca

SEQ ID NO: 212447 - RNA, 19 nt, Artificial Sequence
  Description of Artificial Sequence: Synthetic oligonucleotide
ccguuucucaacagaaauu

SEQ ID NO: 212448 - RNA, 19 nt, Artificial Sequence
  Description of Artificial Sequence: Synthetic oligonucleotide
caauuacguuguguggcuu

SEQ ID NO: 212449 - RNA, 19 nt, Artificial Sequence
  Description of Artificial Sequence: Synthetic oligonucleotide
gcaaaacgagcagcucucu

SEQ ID NO: 212450 - RNA, 19 nt, Artificial Sequence
  Description of Artificial Sequence: Synthetic oligonucleotide
ggauuccguugucuccuau

SEQ ID NO: 212451 - RNA, 19 nt, Artificial Sequence
  Description of Artificial Sequence: Synthetic oligonucleotide
ccgcuccucuuagcagacg

SEQ ID NO: 212452 - RNA, 19 nt, Artificial Sequence
  Description of Artificial Sequence: Synthetic oligonucleotide
ggcgagcucuagauccagu

SEQ ID NO: 212453 - RNA, 19 nt, Artificial Sequence
  Description of Artificial Sequence: Synthetic oligonucleotide
gggcagcugguuacccuau

SEQ ID NO: 212454 - RNA, 19 nt, Artificial Sequence
  Description of Artificial Sequence: Synthetic oligonucleotide
gccgccggaauggcgcccu

SEQ ID NO: 212455 - RNA, 19 nt, Artificial Sequence
  Description of Artificial Sequence: Synthetic oligonucleotide
aauaauuauauauauauau

SEQ ID NO: 212456 - RNA, 19 nt, Artificial Sequence
  Description of Artificial Sequence: Synthetic oligonucleotide
aaaggcaugguacugaauc

SEQ ID NO: 212457 - RNA, 19 nt, Artificial Sequence
  Description of Artificial Sequence: Synthetic oligonucleotide
uauauauauauauauauaa

SEQ ID NO: 212458 - RNA, 19 nt, Artificial Sequence
  Description of Artificial Sequence: Synthetic oligonucleotide
uauauauauauauauauau

SEQ ID NO: 212459 - RNA, 19 nt, Artificial Sequence
  Description of Artificial Sequence: Synthetic oligonucleotide
uauauauauauauauaauc

SEQ ID NO: 212460 - RNA, 19 nt, Artificial Sequence
  Description of Artificial Sequence: Synthetic oligonucleotide
auuauauauauauauauau

SEQ ID NO: 212461 - RNA, 19 nt, Artificial Sequence
  Description of Artificial Sequence: Synthetic oligonucleotide
uauaguagcaccauuggug

SEQ ID NO: 212462 - RNA, 19 nt, Artificial Sequence
  Description of Artificial Sequence: Synthetic oligonucleotide
uaaagaaggguuuauacca

SEQ ID NO: 212463 - RNA, 19 nt, Artificial Sequence
  Description of Artificial Sequence: Synthetic oligonucleotide
aaaagucccaauuaauuug

SEQ ID NO: 212464 - RNA, 19 nt, Artificial Sequence
  Description of Artificial Sequence: Synthetic oligonucleotide
aauaagguauccuaugacu

SEQ ID NO: 212465 - RNA, 19 nt, Artificial Sequence
  Description of Artificial Sequence: Synthetic oligonucleotide
aagauuaacaccuuucuau

SEQ ID NO: 212466 - RNA, 19 nt, Artificial Sequence
  Description of Artificial Sequence: Synthetic oligonucleotide
uaauuauauauauauauau

SEQ ID NO: 212467 - RNA, 19 nt, Artificial Sequence
  Description of Artificial Sequence: Synthetic oligonucleotide
uuuuggauaaauuuguuuc

SEQ ID NO: 212468 - RNA, 19 nt, Artificial Sequence
  Description of Artificial Sequence: Synthetic oligonucleotide
uauauauauauaaucacau

SEQ ID NO: 212469 - RNA, 19 nt, Artificial Sequence
  Description of Artificial Sequence: Synthetic oligonucleotide
aagaauuaaggccuugcuc

SEQ ID NO: 212470 - RNA, 19 nt, Artificial Sequence
  Description of Artificial Sequence: Synthetic oligonucleotide
aaucuugcugucuauagug

SEQ ID NO: 212471 - RNA, 19 nt, Artificial Sequence
  Description of Artificial Sequence: Synthetic oligonucleotide
aaugacucaacguuuugag

SEQ ID NO: 212472 - RNA, 19 nt, Artificial Sequence
  Description of Artificial Sequence: Synthetic oligonucleotide
uauauauauauauaaucac

SEQ ID NO: 212473 - RNA, 19 nt, Artificial Sequence
  Description of Artificial Sequence: Synthetic oligonucleotide
aucuuauaaaccuugaaga

SEQ ID NO: 212474 - RNA, 19 nt, Artificial Sequence
  Description of Artificial Sequence: Synthetic oligonucleotide
aauaagauuaacaccuuuc

SEQ ID NO: 212475 - RNA, 19 nt, Artificial Sequence
  Description of Artificial Sequence: Synthetic oligonucleotide
agaauuaaggccuugcucu

SEQ ID NO: 212476 - RNA, 19 nt, Artificial Sequence
  Description of Artificial Sequence: Synthetic oligonucleotide
uuaucaaccuaaaaggaga

SEQ ID NO: 212477 - RNA, 19 nt, Artificial Sequence
  Description of Artificial Sequence: Synthetic oligonucleotide
ugacauucgaugaagggag

SEQ ID NO: 212478 - RNA, 19 nt, Artificial Sequence
  Description of Artificial Sequence: Synthetic oligonucleotide
ucaaccuaaaaggagaucc

SEQ ID NO: 212479 - RNA, 19 nt, Artificial Sequence
  Description of Artificial Sequence: Synthetic oligonucleotide
gaauuacuaguccaggagg

SEQ ID NO: 212480 - RNA, 19 nt, Artificial Sequence
  Description of Artificial Sequence: Synthetic oligonucleotide
ugaaaguccaggaauaccu

SEQ ID NO: 212481 - RNA, 19 nt, Artificial Sequence
  Description of Artificial Sequence: Synthetic oligonucleotide
aacacaaggaauucuucag

SEQ ID NO: 212482 - RNA, 19 nt, Artificial Sequence
  Description of Artificial Sequence: Synthetic oligonucleotide
uguuguuuacagaauauac

SEQ ID NO: 212483 - RNA, 19 nt, Artificial Sequence
  Description of Artificial Sequence: Synthetic oligonucleotide
ugaacugcgaucaccacag

SEQ ID NO: 212484 - RNA, 19 nt, Artificial Sequence
  Description of Artificial Sequence: Synthetic oligonucleotide
ucaugcauacuugacaucg

SEQ ID NO: 212485 - RNA, 19 nt, Artificial Sequence
  Description of Artificial Sequence: Synthetic oligonucleotide
auauauauauauauaauca

SEQ ID NO: 212486 - RNA, 19 nt, Artificial Sequence
  Description of Artificial Sequence: Synthetic oligonucleotide
uuacuagucaguaugcucu

SEQ ID NO: 212487 - RNA, 19 nt, Artificial Sequence
  Description of Artificial Sequence: Synthetic oligonucleotide
acgaaauucuuccaaacag

SEQ ID NO: 212488 - RNA, 19 nt, Artificial Sequence
  Description of Artificial Sequence: Synthetic oligonucleotide
uggucauagaguauaguag

SEQ ID NO: 212489 - RNA, 19 nt, Artificial Sequence
  Description of Artificial Sequence: Synthetic oligonucleotide
uuaauuuguuuucaguagu

SEQ ID NO: 212490 - RNA, 19 nt, Artificial Sequence
  Description of Artificial Sequence: Synthetic oligonucleotide
uuauauauauauauauaua

SEQ ID NO: 212491 - RNA, 19 nt, Artificial Sequence
  Description of Artificial Sequence: Synthetic oligonucleotide
aaucgacgaaggcagcugc

SEQ ID NO: 212492 - RNA, 19 nt, Artificial Sequence
  Description of Artificial Sequence: Synthetic oligonucleotide
uuuaagaccaggagcacca

SEQ ID NO: 212493 - RNA, 19 nt, Artificial Sequence
  Description of Artificial Sequence: Synthetic oligonucleotide
ucugcaauugaagagacac

SEQ ID NO: 212494 - RNA, 19 nt, Artificial Sequence
  Description of Artificial Sequence: Synthetic oligonucleotide
ugccguuuuaguaauuggg

SEQ ID NO: 212495 - RNA, 19 nt, Artificial Sequence
  Description of Artificial Sequence: Synthetic oligonucleotide
auaaccaauccacagugag

SEQ ID NO: 212496 - RNA, 19 nt, Artificial Sequence
  Description of Artificial Sequence: Synthetic oligonucleotide
aguauaguagcaccauugg

SEQ ID NO: 212497 - RNA, 19 nt, Artificial Sequence
  Description of Artificial Sequence: Synthetic oligonucleotide
ugagguuuacugaacaugu

SEQ ID NO: 212498 - RNA, 19 nt, Artificial Sequence
  Description of Artificial Sequence: Synthetic oligonucleotide
guuccaauacaguugaagc

SEQ ID NO: 212499 - RNA, 19 nt, Artificial Sequence
  Description of Artificial Sequence: Synthetic oligonucleotide
uacacaucgacuaaugaau

SEQ ID NO: 212500 - RNA, 19 nt, Artificial Sequence
  Description of Artificial Sequence: Synthetic oligonucleotide
ucuucuuacacaagugagc

SEQ ID NO: 212501 - RNA, 19 nt, Artificial Sequence
  Description of Artificial Sequence: Synthetic oligonucleotide
uugggguacaguaagauua

SEQ ID NO: 212502 - RNA, 19 nt, Artificial Sequence
  Description of Artificial Sequence: Synthetic oligonucleotide
gguacaguaagauuaguag

SEQ ID NO: 212503 - RNA, 19 nt, Artificial Sequence
  Description of Artificial Sequence: Synthetic oligonucleotide
aaggcaugguacugaaucg

SEQ ID NO: 212504 - RNA, 19 nt, Artificial Sequence
  Description of Artificial Sequence: Synthetic oligonucleotide
auaagauuaacaccuuucu

SEQ ID NO: 212505 - RNA, 19 nt, Artificial Sequence
  Description of Artificial Sequence: Synthetic oligonucleotide
aacgaaauucuuccaaaca

SEQ ID NO: 212506 - RNA, 19 nt, Artificial Sequence
  Description of Artificial Sequence: Synthetic oligonucleotide
uugcagaacauaaaaggca

SEQ ID NO: 212507 - RNA, 19 nt, Artificial Sequence
  Description of Artificial Sequence: Synthetic oligonucleotide
cauagaguauaguagcacc

SEQ ID NO: 212508 - RNA, 19 nt, Artificial Sequence
  Description of Artificial Sequence: Synthetic oligonucleotide
ucaguaguaagucaaugaa

SEQ ID NO: 212509 - RNA, 19 nt, Artificial Sequence
  Description of Artificial Sequence: Synthetic oligonucleotide
gagaagauggcaguuaaag

SEQ ID NO: 212510 - RNA, 19 nt, Artificial Sequence
  Description of Artificial Sequence: Synthetic oligonucleotide
auaagaauuaaggccuugc

SEQ ID NO: 212511 - RNA, 19 nt, Artificial Sequence
  Description of Artificial Sequence: Synthetic oligonucleotide
cuagccaaaagcuauagga

SEQ ID NO: 212512 - RNA, 19 nt, Artificial Sequence
  Description of Artificial Sequence: Synthetic oligonucleotide
uauaguguaagauuucaua

SEQ ID NO: 212513 - RNA, 19 nt, Artificial Sequence
  Description of Artificial Sequence: Synthetic oligonucleotide
ucgacuaaugaauggcugg

SEQ ID NO: 212514 - RNA, 19 nt, Artificial Sequence
  Description of Artificial Sequence: Synthetic oligonucleotide
ugagcuaagauguuguuua

SEQ ID NO: 212515 - RNA, 19 nt, Artificial Sequence
  Description of Artificial Sequence: Synthetic oligonucleotide
acaucgacuaaugaauggc

SEQ ID NO: 212516 - RNA, 19 nt, Artificial Sequence
  Description of Artificial Sequence: Synthetic oligonucleotide
uucaguaguaagucaauga

SEQ ID NO: 212517 - RNA, 19 nt, Artificial Sequence
  Description of Artificial Sequence: Synthetic oligonucleotide
ucuuauaaaccuugaagaa

SEQ ID NO: 212518 - RNA, 19 nt, Artificial Sequence
  Description of Artificial Sequence: Synthetic oligonucleotide
cuuuacuacccuuuucucc

SEQ ID NO: 212519 - RNA, 19 nt, Artificial Sequence
  Description of Artificial Sequence: Synthetic oligonucleotide
uguaaaaucuugcugucua

SEQ ID NO: 212520 - RNA, 19 nt, Artificial Sequence
  Description of Artificial Sequence: Synthetic oligonucleotide
auauauauauauaaucaca

SEQ ID NO: 212521 - RNA, 19 nt, Artificial Sequence
  Description of Artificial Sequence: Synthetic oligonucleotide
aauuaaguugguauuugug

SEQ ID NO: 212522 - RNA, 19 nt, Artificial Sequence
  Description of Artificial Sequence: Synthetic oligonucleotide
uaauaauuauauauauaua

SEQ ID NO: 212523 - RNA, 19 nt, Artificial Sequence
  Description of Artificial Sequence: Synthetic oligonucleotide
cacgaugaaucaaauauug

SEQ ID NO: 212524 - RNA, 19 nt, Artificial Sequence
  Description of Artificial Sequence: Synthetic oligonucleotide
ugcaauugaagagacacga

SEQ ID NO: 212525 - RNA, 19 nt, Artificial Sequence
  Description of Artificial Sequence: Synthetic oligonucleotide
aauuauauauauauauaua

SEQ ID NO: 212526 - RNA, 19 nt, Artificial Sequence
  Description of Artificial Sequence: Synthetic oligonucleotide
gaaauaagguauccuauga

SEQ ID NO: 212527 - RNA, 19 nt, Artificial Sequence
  Description of Artificial Sequence: Synthetic oligonucleotide
gacacgaugaaucaaauau

SEQ ID NO: 212528 - RNA, 19 nt, Artificial Sequence
  Description of Artificial Sequence: Synthetic oligonucleotide
auuaaggccuugcucuggc

SEQ ID NO: 212529 - RNA, 19 nt, Artificial Sequence
  Description of Artificial Sequence: Synthetic oligonucleotide
uauaccagaucacaucuaa

SEQ ID NO: 212530 - RNA, 19 nt, Artificial Sequence
  Description of Artificial Sequence: Synthetic oligonucleotide
gugguuacuagucaguaug

SEQ ID NO: 212531 - RNA, 19 nt, Artificial Sequence
  Description of Artificial Sequence: Synthetic oligonucleotide
aaaucuugcugucuauagu

SEQ ID NO: 212532 - RNA, 19 nt, Artificial Sequence
  Description of Artificial Sequence: Synthetic oligonucleotide
acauauaacuuuaauuaag

SEQ ID NO: 212533 - RNA, 19 nt, Artificial Sequence
  Description of Artificial Sequence: Synthetic oligonucleotide
caauugaagagacacgaug

SEQ ID NO: 212534 - RNA, 19 nt, Artificial Sequence
  Description of Artificial Sequence: Synthetic oligonucleotide
aauucuuacaugagcacca

SEQ ID NO: 212535 - RNA, 19 nt, Artificial Sequence
  Description of Artificial Sequence: Synthetic oligonucleotide
uuccaauacaguugaagca

SEQ ID NO: 212536 - RNA, 19 nt, Artificial Sequence
  Description of Artificial Sequence: Synthetic oligonucleotide
cuugacaucggcugauacg

SEQ ID NO: 212537 - RNA, 19 nt, Artificial Sequence
  Description of Artificial Sequence: Synthetic oligonucleotide
acugaaucgacgaaggcag

SEQ ID NO: 212538 - RNA, 19 nt, Artificial Sequence
  Description of Artificial Sequence: Synthetic oligonucleotide
gaucacaucuaaaugacuc

SEQ ID NO: 212539 - RNA, 19 nt, Artificial Sequence
  Description of Artificial Sequence: Synthetic oligonucleotide
uaagaauuaaggccuugcu

SEQ ID NO: 212540 - RNA, 19 nt, Artificial Sequence
  Description of Artificial Sequence: Synthetic oligonucleotide
caugacauucgaugaaggg

SEQ ID NO: 212541 - RNA, 19 nt, Artificial Sequence
  Description of Artificial Sequence: Synthetic oligonucleotide
uaaugugccguuuuaguaa

SEQ ID NO: 212542 - RNA, 19 nt, Artificial Sequence
  Description of Artificial Sequence: Synthetic oligonucleotide
uuacuaacauauaacuuua

SEQ ID NO: 212543 - RNA, 19 nt, Artificial Sequence
  Description of Artificial Sequence: Synthetic oligonucleotide
uauaggagagaaaagccuu

SEQ ID NO: 212544 - RNA, 19 nt, Artificial Sequence
  Description of Artificial Sequence: Synthetic oligonucleotide
uuuacuuacagagcaaaau

SEQ ID NO: 212545 - RNA, 19 nt, Artificial Sequence
  Description of Artificial Sequence: Synthetic oligonucleotide
agucaguaugcucucuugg

SEQ ID NO: 212546 - RNA, 19 nt, Artificial Sequence
  Description of Artificial Sequence: Synthetic oligonucleotide
agaauagucauuucuugaa

SEQ ID NO: 212547 - RNA, 19 nt, Artificial Sequence
  Description of Artificial Sequence: Synthetic oligonucleotide
aaauaagauuaacaccuuu

SEQ ID NO: 212548 - RNA, 19 nt, Artificial Sequence
  Description of Artificial Sequence: Synthetic oligonucleotide
auaggaauuggcauaguag

SEQ ID NO: 212549 - RNA, 19 nt, Artificial Sequence
  Description of Artificial Sequence: Synthetic oligonucleotide
aagcuauaggaauuggcau

SEQ ID NO: 212550 - RNA, 19 nt, Artificial Sequence
  Description of Artificial Sequence: Synthetic oligonucleotide
ugcacuuguaugcaucaug

SEQ ID NO: 212551 - RNA, 19 nt, Artificial Sequence
  Description of Artificial Sequence: Synthetic oligonucleotide
uuuaauuaaguugguauuu

SEQ ID NO: 212552 - RNA, 19 nt, Artificial Sequence
  Description of Artificial Sequence: Synthetic oligonucleotide
uauaggaauuggcauagua

SEQ ID NO: 212553 - RNA, 19 nt, Artificial Sequence
  Description of Artificial Sequence: Synthetic oligonucleotide
aaugaauggcuggaugcuc

SEQ ID NO: 212554 - RNA, 19 nt, Artificial Sequence
  Description of Artificial Sequence: Synthetic oligonucleotide
gaguauaguagcaccauug

SEQ ID NO: 212555 - RNA, 19 nt, Artificial Sequence
  Description of Artificial Sequence: Synthetic oligonucleotide
cugggaaucacauauaaua

SEQ ID NO: 212556 - RNA, 19 nt, Artificial Sequence
  Description of Artificial Sequence: Synthetic oligonucleotide
gcuaagauguuguuuacag

SEQ ID NO: 212557 - RNA, 19 nt, Artificial Sequence
  Description of Artificial Sequence: Synthetic oligonucleotide
ugguuuaccucuuuugccu

SEQ ID NO: 212558 - RNA, 19 nt, Artificial Sequence
  Description of Artificial Sequence: Synthetic oligonucleotide
gaccugguaagccuugagg

SEQ ID NO: 212559 - RNA, 19 nt, Artificial Sequence
  Description of Artificial Sequence: Synthetic oligonucleotide
aauuacuaguccaggaggu

SEQ ID NO: 212560 - RNA, 19 nt, Artificial Sequence
  Description of Artificial Sequence: Synthetic oligonucleotide
acuaacauauaacuuuaau

SEQ ID NO: 212561 - RNA, 19 nt, Artificial Sequence
  Description of Artificial Sequence: Synthetic oligonucleotide
uaccagaucacaucuaaau

SEQ ID NO: 212562 - RNA, 19 nt, Artificial Sequence
  Description of Artificial Sequence: Synthetic oligonucleotide
uaauuaaguugguauuugu

SEQ ID NO: 212563 - RNA, 19 nt, Artificial Sequence
  Description of Artificial Sequence: Synthetic oligonucleotide
gaugaaucaaauauugucu

SEQ ID NO: 212564 - RNA, 19 nt, Artificial Sequence
  Description of Artificial Sequence: Synthetic oligonucleotide
uacugaaucgacgaaggca

SEQ ID NO: 212565 - RNA, 19 nt, Artificial Sequence
  Description of Artificial Sequence: Synthetic oligonucleotide
accagaucacaucuaaaug

SEQ ID NO: 212566 - RNA, 19 nt, Artificial Sequence
  Description of Artificial Sequence: Synthetic oligonucleotide
cugguggaccuuuuaaucc

SEQ ID NO: 212567 - RNA, 19 nt, Artificial Sequence
  Description of Artificial Sequence: Synthetic oligonucleotide
gcauguaucaccuuuguca

SEQ ID NO: 212568 - RNA, 19 nt, Artificial Sequence
  Description of Artificial Sequence: Synthetic oligonucleotide
agacauugcauccugggaa

SEQ ID NO: 212569 - RNA, 19 nt, Artificial Sequence
  Description of Artificial Sequence: Synthetic oligonucleotide
auuguggugcaucuguugu

SEQ ID NO: 212570 - RNA, 19 nt, Artificial Sequence
  Description of Artificial Sequence: Synthetic oligonucleotide
aacaguggcuagccaaaag

SEQ ID NO: 212571 - RNA, 19 nt, Artificial Sequence
  Description of Artificial Sequence: Synthetic oligonucleotide
cauucagugagaagauggc

SEQ ID NO: 212572 - RNA, 19 nt, Artificial Sequence
  Description of Artificial Sequence: Synthetic oligonucleotide
aaagaaggguuuauaccag

SEQ ID NO: 212573 - RNA, 19 nt, Artificial Sequence
  Description of Artificial Sequence: Synthetic oligonucleotide
ggaauuacuaguccaggag

SEQ ID NO: 212574 - RNA, 19 nt, Artificial Sequence
  Description of Artificial Sequence: Synthetic oligonucleotide
aauuaaggccuugcucugg

SEQ ID NO: 212575 - RNA, 19 nt, Artificial Sequence
  Description of Artificial Sequence: Synthetic oligonucleotide
aagaaauaagguauccuau

SEQ ID NO: 212576 - RNA, 19 nt, Artificial Sequence
  Description of Artificial Sequence: Synthetic oligonucleotide
auauauauauauauauaau

SEQ ID NO: 212577 - RNA, 19 nt, Artificial Sequence
  Description of Artificial Sequence: Synthetic oligonucleotide
uguggaauuugaauaguuu

SEQ ID NO: 212578 - RNA, 19 nt, Artificial Sequence
  Description of Artificial Sequence: Synthetic oligonucleotide
cuuuuaauccagguuggcc

SEQ ID NO: 212579 - RNA, 19 nt, Artificial Sequence
  Description of Artificial Sequence: Synthetic oligonucleotide
acuugacaucggcugauac

SEQ ID NO: 212580 - RNA, 19 nt, Artificial Sequence
  Description of Artificial Sequence: Synthetic oligonucleotide
ucuuggucauagaguauag

SEQ ID NO: 212581 - RNA, 19 nt, Artificial Sequence
  Description of Artificial Sequence: Synthetic oligonucleotide
uuacuaguccaggaggucc

SEQ ID NO: 212582 - RNA, 19 nt, Artificial Sequence
  Description of Artificial Sequence: Synthetic oligonucleotide
uggcaaaccagguuggccu

SEQ ID NO: 212583 - RNA, 19 nt, Artificial Sequence
  Description of Artificial Sequence: Synthetic oligonucleotide
cugguuuaccucuuuugcc

SEQ ID NO: 212584 - RNA, 19 nt, Artificial Sequence
  Description of Artificial Sequence: Synthetic oligonucleotide
acuuacagagcaaaauaag

SEQ ID NO: 212585 - RNA, 19 nt, Artificial Sequence
  Description of Artificial Sequence: Synthetic oligonucleotide
cacaucgacuaaugaaugg

SEQ ID NO: 212586 - RNA, 19 nt, Artificial Sequence
  Description of Artificial Sequence: Synthetic oligonucleotide
uuuaauccagguuggccac

SEQ ID NO: 212587 - RNA, 19 nt, Artificial Sequence
  Description of Artificial Sequence: Synthetic oligonucleotide
auaauuauauauauauaua

SEQ ID NO: 212588 - RNA, 19 nt, Artificial Sequence
  Description of Artificial Sequence: Synthetic oligonucleotide
acucaguaugauccuuccc

SEQ ID NO: 212589 - RNA, 19 nt, Artificial Sequence
  Description of Artificial Sequence: Synthetic oligonucleotide
uucuggaccccaaaacuac

SEQ ID NO: 212590 - RNA, 19 nt, Artificial Sequence
  Description of Artificial Sequence: Synthetic oligonucleotide
agaggcuaaggcuuggccu

SEQ ID NO: 212591 - RNA, 19 nt, Artificial Sequence
  Description of Artificial Sequence: Synthetic oligonucleotide
agggagcugaacgaaauuc

SEQ ID NO: 212592 - RNA, 19 nt, Artificial Sequence
  Description of Artificial Sequence: Synthetic oligonucleotide
gaggcuaaggcuuggccug

SEQ ID NO: 212593 - RNA, 19 nt, Artificial Sequence
  Description of Artificial Sequence: Synthetic oligonucleotide
uaccucuuuugccugauuc

SEQ ID NO: 212594 - RNA, 19 nt, Artificial Sequence
  Description of Artificial Sequence: Synthetic oligonucleotide
aucacaucuaaaugacuca

SEQ ID NO: 212595 - RNA, 19 nt, Artificial Sequence
  Description of Artificial Sequence: Synthetic oligonucleotide
uguacauauaggagagaaa

SEQ ID NO: 212596 - RNA, 19 nt, Artificial Sequence
  Description of Artificial Sequence: Synthetic oligonucleotide
ucaguaugcucucuugguc

SEQ ID NO: 212597 - RNA, 19 nt, Artificial Sequence
  Description of Artificial Sequence: Synthetic oligonucleotide
guuacuagucaguaugcuc

SEQ ID NO: 212598 - RNA, 19 nt, Artificial Sequence
  Description of Artificial Sequence: Synthetic oligonucleotide
ugguacugaaucgacgaag

SEQ ID NO: 212599 - RNA, 19 nt, Artificial Sequence
  Description of Artificial Sequence: Synthetic oligonucleotide
ugauacguguucucaaguc

SEQ ID NO: 212600 - RNA, 19 nt, Artificial Sequence
  Description of Artificial Sequence: Synthetic oligonucleotide
aggaucgccaggcaaaccu

SEQ ID NO: 212601 - RNA, 19 nt, Artificial Sequence
  Description of Artificial Sequence: Synthetic oligonucleotide
uuuuacucaguaugauccu

SEQ ID NO: 212602 - RNA, 19 nt, Artificial Sequence
  Description of Artificial Sequence: Synthetic oligonucleotide
agaauaauucuuacaugag

SEQ ID NO: 212603 - RNA, 19 nt, Artificial Sequence
  Description of Artificial Sequence: Synthetic oligonucleotide
caaaacuacagucccuuuc

SEQ ID NO: 212604 - RNA, 19 nt, Artificial Sequence
  Description of Artificial Sequence: Synthetic oligonucleotide
uaucaaccuaaaaggagau

SEQ ID NO: 212605 - RNA, 19 nt, Artificial Sequence
  Description of Artificial Sequence: Synthetic oligonucleotide
auauauauauauauauaua

SEQ ID NO: 212606 - RNA, 19 nt, Artificial Sequence
  Description of Artificial Sequence: Synthetic oligonucleotide
ucuuuacuuacagagcaaa

SEQ ID NO: 212607 - RNA, 19 nt, Artificial Sequence
  Description of Artificial Sequence: Synthetic oligonucleotide
aggaauuacuaguccagga

SEQ ID NO: 212608 - RNA, 19 nt, Artificial Sequence
  Description of Artificial Sequence: Synthetic oligonucleotide
uaaccaauccacagugagu

SEQ ID NO: 212609 - RNA, 19 nt, Artificial Sequence
  Description of Artificial Sequence: Synthetic oligonucleotide
acacacuacacaucgacua

SEQ ID NO: 212610 - RNA, 19 nt, Artificial Sequence
  Description of Artificial Sequence: Synthetic oligonucleotide
aaacuguugggaacaagca

SEQ ID NO: 212611 - RNA, 19 nt, Artificial Sequence
  Description of Artificial Sequence: Synthetic oligonucleotide
ucccaauuaauuuguuuuc

SEQ ID NO: 212612 - RNA, 19 nt, Artificial Sequence
  Description of Artificial Sequence: Synthetic oligonucleotide
gucuucuuacacaagugag

SEQ ID NO: 212613 - RNA, 19 nt, Artificial Sequence
  Description of Artificial Sequence: Synthetic oligonucleotide
agcauguuauguccucuuc

SEQ ID NO: 212614 - RNA, 19 nt, Artificial Sequence
  Description of Artificial Sequence: Synthetic oligonucleotide
ucucugcaauugaagagac

SEQ ID NO: 212615 - RNA, 19 nt, Artificial Sequence
  Description of Artificial Sequence: Synthetic oligonucleotide
auguaucaccuuugucacc

SEQ ID NO: 212616 - RNA, 19 nt, Artificial Sequence
  Description of Artificial Sequence: Synthetic oligonucleotide
accuaaaaggagauccugg

SEQ ID NO: 212617 - RNA, 19 nt, Artificial Sequence
  Description of Artificial Sequence: Synthetic oligonucleotide
uuaacaccuuucuauuaaa

SEQ ID NO: 212618 - RNA, 19 nt, Artificial Sequence
  Description of Artificial Sequence: Synthetic oligonucleotide
acuacacaucgacuaauga

SEQ ID NO: 212619 - RNA, 19 nt, Artificial Sequence
  Description of Artificial Sequence: Synthetic oligonucleotide
cuauugguccaggaggucc

SEQ ID NO: 212620 - RNA, 19 nt, Artificial Sequence
  Description of Artificial Sequence: Synthetic oligonucleotide
aauccucucccauguaaaa

SEQ ID NO: 212621 - RNA, 19 nt, Artificial Sequence
  Description of Artificial Sequence: Synthetic oligonucleotide
cugcaauugaagagacacg

SEQ ID NO: 212622 - RNA, 19 nt, Artificial Sequence
  Description of Artificial Sequence: Synthetic oligonucleotide
uacguguucucaagucucc

SEQ ID NO: 212623 - RNA, 19 nt, Artificial Sequence
  Description of Artificial Sequence: Synthetic oligonucleotide
cuacacaucgacuaaugaa

SEQ ID NO: 212624 - RNA, 19 nt, Artificial Sequence
  Description of Artificial Sequence: Synthetic oligonucleotide
auacguguucucaagucuc

SEQ ID NO: 212625 - RNA, 19 nt, Artificial Sequence
  Description of Artificial Sequence: Synthetic oligonucleotide
aauuggcucucugcaauug

SEQ ID NO: 212626 - RNA, 19 nt, Artificial Sequence
  Description of Artificial Sequence: Synthetic oligonucleotide
gguacugaaucgacgaagg

SEQ ID NO: 212627 - RNA, 19 nt, Artificial Sequence
  Description of Artificial Sequence: Synthetic oligonucleotide
cugguaagccuugagggcc

SEQ ID NO: 212628 - RNA, 19 nt, Artificial Sequence
  Description of Artificial Sequence: Synthetic oligonucleotide
uaaugaauggcuggaugcu

SEQ ID NO: 212629 - RNA, 19 nt, Artificial Sequence
  Description of Artificial Sequence: Synthetic oligonucleotide
agcuauaggaauuggcaua

SEQ ID NO: 212630 - RNA, 19 nt, Artificial Sequence
  Description of Artificial Sequence: Synthetic oligonucleotide
ugagguacaucugaaucuc

SEQ ID NO: 212631 - RNA, 19 nt, Artificial Sequence
  Description of Artificial Sequence: Synthetic oligonucleotide
cauaaaaggcaugguacug

SEQ ID NO: 212632 - RNA, 19 nt, Artificial Sequence
  Description of Artificial Sequence: Synthetic oligonucleotide
cugcgaucaccacagcugg

SEQ ID NO: 212633 - RNA, 19 nt, Artificial Sequence
  Description of Artificial Sequence: Synthetic oligonucleotide
cacaagugagcccaaagga

SEQ ID NO: 212634 - RNA, 19 nt, Artificial Sequence
  Description of Artificial Sequence: Synthetic oligonucleotide
uaauuuuacucaguaugau

SEQ ID NO: 212635 - RNA, 19 nt, Artificial Sequence
  Description of Artificial Sequence: Synthetic oligonucleotide
caugcauacuugacaucgg

SEQ ID NO: 212636 - RNA, 19 nt, Artificial Sequence
  Description of Artificial Sequence: Synthetic oligonucleotide
uacuaguccaggaggucca

SEQ ID NO: 212637 - RNA, 19 nt, Artificial Sequence
  Description of Artificial Sequence: Synthetic oligonucleotide
auagaguauaguagcacca

SEQ ID NO: 212638 - RNA, 19 nt, Artificial Sequence
  Description of Artificial Sequence: Synthetic oligonucleotide
caauccacggguaccuggc

SEQ ID NO: 212639 - RNA, 19 nt, Artificial Sequence
  Description of Artificial Sequence: Synthetic oligonucleotide
uggacuguccccugugggc

SEQ ID NO: 212640 - RNA, 19 nt, Artificial Sequence
  Description of Artificial Sequence: Synthetic oligonucleotide
uuugccugauucuccuggc

SEQ ID NO: 212641 - RNA, 19 nt, Artificial Sequence
  Description of Artificial Sequence: Synthetic oligonucleotide
uguggugcaucuguugucu

SEQ ID NO: 212642 - RNA, 19 nt, Artificial Sequence
  Description of Artificial Sequence: Synthetic oligonucleotide
uguuauucuggaccccaaa

SEQ ID NO: 212643 - RNA, 19 nt, Artificial Sequence
  Description of Artificial Sequence: Synthetic oligonucleotide
gauacguguucucaagucu

SEQ ID NO: 212644 - RNA, 19 nt, Artificial Sequence
  Description of Artificial Sequence: Synthetic oligonucleotide
uagucaguaugcucucuug

SEQ ID NO: 212645 - RNA, 19 nt, Artificial Sequence
  Description of Artificial Sequence: Synthetic oligonucleotide
ucuccgugguuacuaguca

SEQ ID NO: 212646 - RNA, 19 nt, Artificial Sequence
  Description of Artificial Sequence: Synthetic oligonucleotide
auuacuaguccaggagguc

SEQ ID NO: 212647 - RNA, 19 nt, Artificial Sequence
  Description of Artificial Sequence: Synthetic oligonucleotide
caaaggagaauaauucuua

SEQ ID NO: 212648 - RNA, 19 nt, Artificial Sequence
  Description of Artificial Sequence: Synthetic oligonucleotide
aaucuccgugguuacuagu

SEQ ID NO: 212649 - RNA, 19 nt, Artificial Sequence
  Description of Artificial Sequence: Synthetic oligonucleotide
uucauagauauggacuguc

SEQ ID NO: 212650 - RNA, 19 nt, Artificial Sequence
  Description of Artificial Sequence: Synthetic oligonucleotide
augagcaccaggauaauaa

SEQ ID NO: 212651 - RNA, 19 nt, Artificial Sequence
  Description of Artificial Sequence: Synthetic oligonucleotide
ugaagggagcugaacgaaa

SEQ ID NO: 212652 - RNA, 19 nt, Artificial Sequence
  Description of Artificial Sequence: Synthetic oligonucleotide
ugaccaugggcccuuuuau

SEQ ID NO: 212653 - RNA, 19 nt, Artificial Sequence
  Description of Artificial Sequence: Synthetic oligonucleotide
cgaugaaucaaauauuguc

SEQ ID NO: 212654 - RNA, 19 nt, Artificial Sequence
  Description of Artificial Sequence: Synthetic oligonucleotide
auaagguauccuaugacua

SEQ ID NO: 212655 - RNA, 19 nt, Artificial Sequence
  Description of Artificial Sequence: Synthetic oligonucleotide
guuauucuggaccccaaaa

SEQ ID NO: 212656 - RNA, 19 nt, Artificial Sequence
  Description of Artificial Sequence: Synthetic oligonucleotide
cauuguggugcaucuguug

SEQ ID NO: 212657 - RNA, 19 nt, Artificial Sequence
  Description of Artificial Sequence: Synthetic oligonucleotide
cuuugcgcccuccugcacc

SEQ ID NO: 212658 - RNA, 19 nt, Artificial Sequence
  Description of Artificial Sequence: Synthetic oligonucleotide
gaaaguccaggaauaccug

SEQ ID NO: 212659 - RNA, 19 nt, Artificial Sequence
  Description of Artificial Sequence: Synthetic oligonucleotide
cacuacacaucgacuaaug

SEQ ID NO: 212660 - RNA, 19 nt, Artificial Sequence
  Description of Artificial Sequence: Synthetic oligonucleotide
aggguuuauaccagaucac

SEQ ID NO: 212661 - RNA, 19 nt, Artificial Sequence
  Description of Artificial Sequence: Synthetic oligonucleotide
gguuuacugaacaugucug

SEQ ID NO: 212662 - RNA, 19 nt, Artificial Sequence
  Description of Artificial Sequence: Synthetic oligonucleotide
ugaaucuccgugguuacua

SEQ ID NO: 212663 - RNA, 19 nt, Artificial Sequence
  Description of Artificial Sequence: Synthetic oligonucleotide
cuggaccccaaaacuacag

SEQ ID NO: 212664 - RNA, 19 nt, Artificial Sequence
  Description of Artificial Sequence: Synthetic oligonucleotide
ugaaucgacgaaggcagcu

SEQ ID NO: 212665 - RNA, 19 nt, Artificial Sequence
  Description of Artificial Sequence: Synthetic oligonucleotide
cucaguaugauccuucccu

SEQ ID NO: 212666 - RNA, 19 nt, Artificial Sequence
  Description of Artificial Sequence: Synthetic oligonucleotide
aagugagacauugcauccu

SEQ ID NO: 212667 - RNA, 19 nt, Artificial Sequence
  Description of Artificial Sequence: Synthetic oligonucleotide
gcuauaggaauuggcauag

SEQ ID NO: 212668 - RNA, 19 nt, Artificial Sequence
  Description of Artificial Sequence: Synthetic oligonucleotide
ucaguaugauccuucccuu

SEQ ID NO: 212669 - RNA, 19 nt, Artificial Sequence
  Description of Artificial Sequence: Synthetic oligonucleotide
uggaccccaaaacuacagu

SEQ ID NO: 212670 - RNA, 19 nt, Artificial Sequence
  Description of Artificial Sequence: Synthetic oligonucleotide
gugaacugcgaucaccaca

SEQ ID NO: 212671 - RNA, 19 nt, Artificial Sequence
  Description of Artificial Sequence: Synthetic oligonucleotide
cuaagauguuguuuacaga

SEQ ID NO: 212672 - RNA, 19 nt, Artificial Sequence
  Description of Artificial Sequence: Synthetic oligonucleotide
auucagugagaagauggca

SEQ ID NO: 212673 - RNA, 19 nt, Artificial Sequence
  Description of Artificial Sequence: Synthetic oligonucleotide
agaacauaaaaggcauggu

SEQ ID NO: 212674 - RNA, 19 nt, Artificial Sequence
  Description of Artificial Sequence: Synthetic oligonucleotide
agcagucuuuaauuuuacu

SEQ ID NO: 212675 - RNA, 19 nt, Artificial Sequence
  Description of Artificial Sequence: Synthetic oligonucleotide
aguaagugagacauugcau

SEQ ID NO: 212676 - RNA, 19 nt, Artificial Sequence
  Description of Artificial Sequence: Synthetic oligonucleotide
uccgugguuacuagucagu

SEQ ID NO: 212677 - RNA, 19 nt, Artificial Sequence
  Description of Artificial Sequence: Synthetic oligonucleotide
ggaccauccaauccacggg

SEQ ID NO: 212678 - RNA, 19 nt, Artificial Sequence
  Description of Artificial Sequence: Synthetic oligonucleotide
ugagaagauggcaguuaaa

SEQ ID NO: 212679 - RNA, 19 nt, Artificial Sequence
  Description of Artificial Sequence: Synthetic oligonucleotide
aucaaccuaaaaggagauc

SEQ ID NO: 212680 - RNA, 19 nt, Artificial Sequence
  Description of Artificial Sequence: Synthetic oligonucleotide
cauuguuaauguugcagaa

SEQ ID NO: 212681 - RNA, 19 nt, Artificial Sequence
  Description of Artificial Sequence: Synthetic oligonucleotide
aggcaaauccucucccaug

SEQ ID NO: 212682 - RNA, 19 nt, Artificial Sequence
  Description of Artificial Sequence: Synthetic oligonucleotide
cuccgugguuacuagucag

SEQ ID NO: 212683 - RNA, 19 nt, Artificial Sequence
  Description of Artificial Sequence: Synthetic oligonucleotide
uggaucuauugguccagga

SEQ ID NO: 212684 - RNA, 19 nt, Artificial Sequence
  Description of Artificial Sequence: Synthetic oligonucleotide
gcugauacguguucucaag

SEQ ID NO: 212685 - RNA, 19 nt, Artificial Sequence
  Description of Artificial Sequence: Synthetic oligonucleotide
cauuccgucugguccuggg

SEQ ID NO: 212686 - RNA, 19 nt, Artificial Sequence
  Description of Artificial Sequence: Synthetic oligonucleotide
caguaguaagucaaugaaa

SEQ ID NO: 212687 - RNA, 19 nt, Artificial Sequence
  Description of Artificial Sequence: Synthetic oligonucleotide
guacugaaucgacgaaggc

SEQ ID NO: 212688 - RNA, 19 nt, Artificial Sequence
  Description of Artificial Sequence: Synthetic oligonucleotide
agaguauaguagcaccauu

SEQ ID NO: 212689 - RNA, 19 nt, Artificial Sequence
  Description of Artificial Sequence: Synthetic oligonucleotide
uagaguauaguagcaccau

SEQ ID NO: 212690 - RNA, 19 nt, Artificial Sequence
  Description of Artificial Sequence: Synthetic oligonucleotide
uuugcgcccuccugcacca

SEQ ID NO: 212691 - RNA, 19 nt, Artificial Sequence
  Description of Artificial Sequence: Synthetic oligonucleotide
agguccuugcauuccgucu

SEQ ID NO: 212692 - RNA, 19 nt, Artificial Sequence
  Description of Artificial Sequence: Synthetic oligonucleotide
cauacuugacaucggcuga

SEQ ID NO: 212693 - RNA, 19 nt, Artificial Sequence
  Description of Artificial Sequence: Synthetic oligonucleotide
uuuacucaguaugauccuu

SEQ ID NO: 212694 - RNA, 19 nt, Artificial Sequence
  Description of Artificial Sequence: Synthetic oligonucleotide
aagggagcugaacgaaauu

SEQ ID NO: 212695 - RNA, 19 nt, Artificial Sequence
  Description of Artificial Sequence: Synthetic oligonucleotide
gagcuaagauguuguuuac

SEQ ID NO: 212696 - RNA, 19 nt, Artificial Sequence
  Description of Artificial Sequence: Synthetic oligonucleotide
acacaucgacuaaugaaug

SEQ ID NO: 212697 - RNA, 19 nt, Artificial Sequence
  Description of Artificial Sequence: Synthetic oligonucleotide
acccugguagccuuuuggu

SEQ ID NO: 212698 - RNA, 19 nt, Artificial Sequence
  Description of Artificial Sequence: Synthetic oligonucleotide
ggaauaccugguaagccag

SEQ ID NO: 212699 - RNA, 19 nt, Artificial Sequence
  Description of Artificial Sequence: Synthetic oligonucleotide
gugagaagauggcaguuaa

SEQ ID NO: 212700 - RNA, 19 nt, Artificial Sequence
  Description of Artificial Sequence: Synthetic oligonucleotide
uucaugcauacuugacauc

SEQ ID NO: 212701 - RNA, 19 nt, Artificial Sequence
  Description of Artificial Sequence: Synthetic oligonucleotide
ugcugucuauaguguaaga

SEQ ID NO: 212702 - RNA, 19 nt, Artificial Sequence
  Description of Artificial Sequence: Synthetic oligonucleotide
cauaagaauuaaggccuug

SEQ ID NO: 212703 - RNA, 19 nt, Artificial Sequence
  Description of Artificial Sequence: Synthetic oligonucleotide
cccauguaaaaucuugcug

SEQ ID NO: 212704 - RNA, 19 nt, Artificial Sequence
  Description of Artificial Sequence: Synthetic oligonucleotide
uacuagucaguaugcucuc

SEQ ID NO: 212705 - RNA, 19 nt, Artificial Sequence
  Description of Artificial Sequence: Synthetic oligonucleotide
caucuaaaugacucaacgu

SEQ ID NO: 212706 - RNA, 19 nt, Artificial Sequence
  Description of Artificial Sequence: Synthetic oligonucleotide
cuggcaaaccagguuggcc

SEQ ID NO: 212707 - RNA, 19 nt, Artificial Sequence
  Description of Artificial Sequence: Synthetic oligonucleotide
gguauccuaugacuauuug

SEQ ID NO: 212708 - RNA, 19 nt, Artificial Sequence
  Description of Artificial Sequence: Synthetic oligonucleotide
agacacgaugaaucaaaua

SEQ ID NO: 212709 - RNA, 19 nt, Artificial Sequence
  Description of Artificial Sequence: Synthetic oligonucleotide
uccuuugcgcccuccugca

SEQ ID NO: 212710 - RNA, 19 nt, Artificial Sequence
  Description of Artificial Sequence: Synthetic oligonucleotide
ugguaagccuugagggccu

SEQ ID NO: 212711 - RNA, 19 nt, Artificial Sequence
  Description of Artificial Sequence: Synthetic oligonucleotide
uguccacucaguccagguu

SEQ ID NO: 212712 - RNA, 19 nt, Artificial Sequence
  Description of Artificial Sequence: Synthetic oligonucleotide
agcuaagauguuguuuaca

SEQ ID NO: 212713 - RNA, 19 nt, Artificial Sequence
  Description of Artificial Sequence: Synthetic oligonucleotide
ucuuugccugguuuaccuc

SEQ ID NO: 212714 - RNA, 19 nt, Artificial Sequence
  Description of Artificial Sequence: Synthetic oligonucleotide
ggaguaggaauuacuaguc

SEQ ID NO: 212715 - RNA, 19 nt, Artificial Sequence
  Description of Artificial Sequence: Synthetic oligonucleotide
uuaaggccuugcucuggca

SEQ ID NO: 212716 - RNA, 19 nt, Artificial Sequence
  Description of Artificial Sequence: Synthetic oligonucleotide
ucgccaggcaaaccuggga

SEQ ID NO: 212717 - RNA, 19 nt, Artificial Sequence
  Description of Artificial Sequence: Synthetic oligonucleotide
caggguaaccaggaucgcc

SEQ ID NO: 212718 - RNA, 19 nt, Artificial Sequence
  Description of Artificial Sequence: Synthetic oligonucleotide
guauaguagcaccauuggu

SEQ ID NO: 212719 - RNA, 19 nt, Artificial Sequence
  Description of Artificial Sequence: Synthetic oligonucleotide
ugacaucggcugauacgug

SEQ ID NO: 212720 - RNA, 19 nt, Artificial Sequence
  Description of Artificial Sequence: Synthetic oligonucleotide
gguuuaccucuuuugccug

SEQ ID NO: 212721 - RNA, 19 nt, Artificial Sequence
  Description of Artificial Sequence: Synthetic oligonucleotide
acuacccuuuucuccugca

SEQ ID NO: 212722 - RNA, 19 nt, Artificial Sequence
  Description of Artificial Sequence: Synthetic oligonucleotide
auccaauccacggguaccu

SEQ ID NO: 212723 - RNA, 19 nt, Artificial Sequence
  Description of Artificial Sequence: Synthetic oligonucleotide
gacucaacguuuugagcua

SEQ ID NO: 212724 - RNA, 19 nt, Artificial Sequence
  Description of Artificial Sequence: Synthetic oligonucleotide
cugucuauaguguaagauu

SEQ ID NO: 212725 - RNA, 19 nt, Artificial Sequence
  Description of Artificial Sequence: Synthetic oligonucleotide
gaccauccaauccacgggu

SEQ ID NO: 212726 - RNA, 19 nt, Artificial Sequence
  Description of Artificial Sequence: Synthetic oligonucleotide
agcccaaaggagaauaauu

SEQ ID NO: 212727 - RNA, 19 nt, Artificial Sequence
  Description of Artificial Sequence: Synthetic oligonucleotide
gcauguuauguccucuuca

SEQ ID NO: 212728 - RNA, 19 nt, Artificial Sequence
  Description of Artificial Sequence: Synthetic oligonucleotide
guugguauuuguggaauua

SEQ ID NO: 212729 - RNA, 19 nt, Artificial Sequence
  Description of Artificial Sequence: Synthetic oligonucleotide
augguacugaaucgacgaa

SEQ ID NO: 212730 - RNA, 19 nt, Artificial Sequence
  Description of Artificial Sequence: Synthetic oligonucleotide
aggcaugguacugaaucga

SEQ ID NO: 212731 - RNA, 19 nt, Artificial Sequence
  Description of Artificial Sequence: Synthetic oligonucleotide
acacgaugaaucaaauauu

SEQ ID NO: 212732 - RNA, 19 nt, Artificial Sequence
  Description of Artificial Sequence: Synthetic oligonucleotide
uuucguccuggaucuccug

SEQ ID NO: 212733 - RNA, 19 nt, Artificial Sequence
  Description of Artificial Sequence: Synthetic oligonucleotide
agaucacaucuaaaugacu

SEQ ID NO: 212734 - RNA, 19 nt, Artificial Sequence
  Description of Artificial Sequence: Synthetic oligonucleotide
cuaaaugacucaacguuuu

SEQ ID NO: 212735 - RNA, 19 nt, Artificial Sequence
  Description of Artificial Sequence: Synthetic oligonucleotide
uggcccaauaucacccuuu

SEQ ID NO: 212736 - RNA, 19 nt, Artificial Sequence
  Description of Artificial Sequence: Synthetic oligonucleotide
gucaguaugcucucuuggu

SEQ ID NO: 212737 - RNA, 19 nt, Artificial Sequence
  Description of Artificial Sequence: Synthetic oligonucleotide
cuuugccugguuuaccucu

SEQ ID NO: 212738 - RNA, 19 nt, Artificial Sequence
  Description of Artificial Sequence: Synthetic oligonucleotide
ucggcugauacguguucuc

SEQ ID NO: 212739 - RNA, 19 nt, Artificial Sequence
  Description of Artificial Sequence: Synthetic oligonucleotide
guugucuggcuguggcgug

SEQ ID NO: 212740 - RNA, 19 nt, Artificial Sequence
  Description of Artificial Sequence: Synthetic oligonucleotide
cuggaucuauugguccagg

SEQ ID NO: 212741 - RNA, 19 nt, Artificial Sequence
  Description of Artificial Sequence: Synthetic oligonucleotide
ccgcccaugacauucgaug

SEQ ID NO: 212742 - RNA, 19 nt, Artificial Sequence
  Description of Artificial Sequence: Synthetic oligonucleotide
aucggcugauacguguucu

SEQ ID NO: 212743 - RNA, 19 nt, Artificial Sequence
  Description of Artificial Sequence: Synthetic oligonucleotide
ggguuuauaccagaucaca

SEQ ID NO: 212744 - RNA, 19 nt, Artificial Sequence
  Description of Artificial Sequence: Synthetic oligonucleotide
caucgacuaaugaauggcu

SEQ ID NO: 212745 - RNA, 19 nt, Artificial Sequence
  Description of Artificial Sequence: Synthetic oligonucleotide
accuugcaugccaucauca

SEQ ID NO: 212746 - RNA, 19 nt, Artificial Sequence
  Description of Artificial Sequence: Synthetic oligonucleotide
ugcgaucaccacagcugga

SEQ ID NO: 212747 - RNA, 19 nt, Artificial Sequence
  Description of Artificial Sequence: Synthetic oligonucleotide
ggaaucacauauaauaauu

SEQ ID NO: 212748 - RNA, 19 nt, Artificial Sequence
  Description of Artificial Sequence: Synthetic oligonucleotide
ccaguuccaauacaguuga

SEQ ID NO: 212749 - RNA, 19 nt, Artificial Sequence
  Description of Artificial Sequence: Synthetic oligonucleotide
auuucguccuggaucuccu

SEQ ID NO: 212750 - RNA, 19 nt, Artificial Sequence
  Description of Artificial Sequence: Synthetic oligonucleotide
acacuacacaucgacuaau

SEQ ID NO: 212751 - RNA, 19 nt, Artificial Sequence
  Description of Artificial Sequence: Synthetic oligonucleotide
auacuugacaucggcugau

SEQ ID NO: 212752 - RNA, 19 nt, Artificial Sequence
  Description of Artificial Sequence: Synthetic oligonucleotide
cccucuaucaccaggaacu

SEQ ID NO: 212753 - RNA, 19 nt, Artificial Sequence
  Description of Artificial Sequence: Synthetic oligonucleotide
uuaagaccaggagcaccac

SEQ ID NO: 212754 - RNA, 19 nt, Artificial Sequence
  Description of Artificial Sequence: Synthetic oligonucleotide
caccccugaggacaaugug

SEQ ID NO: 212755 - RNA, 19 nt, Artificial Sequence
  Description of Artificial Sequence: Synthetic oligonucleotide
cacacuacacaucgacuaa

SEQ ID NO: 212756 - RNA, 19 nt, Artificial Sequence
  Description of Artificial Sequence: Synthetic oligonucleotide
cacccuuuuggcccuuuuc

SEQ ID NO: 212757 - RNA, 19 nt, Artificial Sequence
  Description of Artificial Sequence: Synthetic oligonucleotide
acuagucaguaugcucucu

SEQ ID NO: 212758 - RNA, 19 nt, Artificial Sequence
  Description of Artificial Sequence: Synthetic oligonucleotide
caguggcuagccaaaagcu

SEQ ID NO: 212759 - RNA, 19 nt, Artificial Sequence
  Description of Artificial Sequence: Synthetic oligonucleotide
guaaaaucuugcugucuau

SEQ ID NO: 212760 - RNA, 19 nt, Artificial Sequence
  Description of Artificial Sequence: Synthetic oligonucleotide
gcgaucaccacagcuggag

SEQ ID NO: 212761 - RNA, 19 nt, Artificial Sequence
  Description of Artificial Sequence: Synthetic oligonucleotide
caucggcugauacguguuc

SEQ ID NO: 212762 - RNA, 19 nt, Artificial Sequence
  Description of Artificial Sequence: Synthetic oligonucleotide
caacguuuugagcuaagau

SEQ ID NO: 212763 - RNA, 19 nt, Artificial Sequence
  Description of Artificial Sequence: Synthetic oligonucleotide
auuggaccugguaagccuu

SEQ ID NO: 212764 - RNA, 19 nt, Artificial Sequence
  Description of Artificial Sequence: Synthetic oligonucleotide
agucuugaccaugggcccu

SEQ ID NO: 212765 - RNA, 19 nt, Artificial Sequence
  Description of Artificial Sequence: Synthetic oligonucleotide
caaccuaaaaggagauccu

SEQ ID NO: 212766 - RNA, 19 nt, Artificial Sequence
  Description of Artificial Sequence: Synthetic oligonucleotide
gaagggagcugaacgaaau

SEQ ID NO: 212767 - RNA, 19 nt, Artificial Sequence
  Description of Artificial Sequence: Synthetic oligonucleotide
ccuuuacuacccuuuucuc

SEQ ID NO: 212768 - RNA, 19 nt, Artificial Sequence
  Description of Artificial Sequence: Synthetic oligonucleotide
ggcaaaccagguuggccug

SEQ ID NO: 212769 - RNA, 19 nt, Artificial Sequence
  Description of Artificial Sequence: Synthetic oligonucleotide
uccaauccacggguaccug

SEQ ID NO: 212770 - RNA, 19 nt, Artificial Sequence
  Description of Artificial Sequence: Synthetic oligonucleotide
ccaauuggaccugguaagc

SEQ ID NO: 212771 - RNA, 19 nt, Artificial Sequence
  Description of Artificial Sequence: Synthetic oligonucleotide
ggaauucuucagcauguua

SEQ ID NO: 212772 - RNA, 19 nt, Artificial Sequence
  Description of Artificial Sequence: Synthetic oligonucleotide
gaacugcgaucaccacagc

SEQ ID NO: 212773 - RNA, 19 nt, Artificial Sequence
  Description of Artificial Sequence: Synthetic oligonucleotide
accugguaagccaggcuca

SEQ ID NO: 212774 - RNA, 19 nt, Artificial Sequence
  Description of Artificial Sequence: Synthetic oligonucleotide
gguggaccuuuuaauccag

SEQ ID NO: 212775 - RNA, 19 nt, Artificial Sequence
  Description of Artificial Sequence: Synthetic oligonucleotide
acucaacguuuugagcuaa

SEQ ID NO: 212776 - RNA, 19 nt, Artificial Sequence
  Description of Artificial Sequence: Synthetic oligonucleotide
uuuggcccuuuuccccauc

SEQ ID NO: 212777 - RNA, 19 nt, Artificial Sequence
  Description of Artificial Sequence: Synthetic oligonucleotide
aggcaaacccugguagccu

SEQ ID NO: 212778 - RNA, 19 nt, Artificial Sequence
  Description of Artificial Sequence: Synthetic oligonucleotide
aggaauccaugggcaacug

SEQ ID NO: 212779 - RNA, 19 nt, Artificial Sequence
  Description of Artificial Sequence: Synthetic oligonucleotide
cugauacguguucucaagu

SEQ ID NO: 212780 - RNA, 19 nt, Artificial Sequence
  Description of Artificial Sequence: Synthetic oligonucleotide
gugugggcgaccuggcaaa

SEQ ID NO: 212781 - RNA, 19 nt, Artificial Sequence
  Description of Artificial Sequence: Synthetic oligonucleotide
ugucuggcuguggcgugug

SEQ ID NO: 212782 - RNA, 19 nt, Artificial Sequence
  Description of Artificial Sequence: Synthetic oligonucleotide
acguguucucaagucucca

SEQ ID NO: 212783 - RNA, 19 nt, Artificial Sequence
  Description of Artificial Sequence: Synthetic oligonucleotide
cuuguacauauaggagaga

SEQ ID NO: 212784 - RNA, 19 nt, Artificial Sequence
  Description of Artificial Sequence: Synthetic oligonucleotide
cugguaagccaggcucacc

SEQ ID NO: 212785 - RNA, 19 nt, Artificial Sequence
  Description of Artificial Sequence: Synthetic oligonucleotide
agguauccuaugacuauuu

SEQ ID NO: 212786 - RNA, 19 nt, Artificial Sequence
  Description of Artificial Sequence: Synthetic oligonucleotide
cucacacacuacacaucga

SEQ ID NO: 212787 - RNA, 19 nt, Artificial Sequence
  Description of Artificial Sequence: Synthetic oligonucleotide
ggcaugguacugaaucgac

SEQ ID NO: 212788 - RNA, 19 nt, Artificial Sequence
  Description of Artificial Sequence: Synthetic oligonucleotide
ggaauccaugggcaacuga

SEQ ID NO: 212789 - RNA, 19 nt, Artificial Sequence
  Description of Artificial Sequence: Synthetic oligonucleotide
uacuugacaucggcugaua

SEQ ID NO: 212790 - RNA, 19 nt, Artificial Sequence
  Description of Artificial Sequence: Synthetic oligonucleotide
cuuacacaagugagcccaa

SEQ ID NO: 212791 - RNA, 19 nt, Artificial Sequence
  Description of Artificial Sequence: Synthetic oligonucleotide
ccuuuuccccaucccgucc

SEQ ID NO: 212792 - RNA, 19 nt, Artificial Sequence
  Description of Artificial Sequence: Synthetic oligonucleotide
ccuuuuaauccagguuggc

SEQ ID NO: 212793 - RNA, 19 nt, Artificial Sequence
  Description of Artificial Sequence: Synthetic oligonucleotide
gcccucuaucaccaggaac

SEQ ID NO: 212794 - RNA, 19 nt, Artificial Sequence
  Description of Artificial Sequence: Synthetic oligonucleotide
uugucaccuuuuacuccuu

SEQ ID NO: 212795 - RNA, 19 nt, Artificial Sequence
  Description of Artificial Sequence: Synthetic oligonucleotide
gguuuauaccagaucacau

SEQ ID NO: 212796 - RNA, 19 nt, Artificial Sequence
  Description of Artificial Sequence: Synthetic oligonucleotide
ugugggcgaccuggcaaac

SEQ ID NO: 212797 - RNA, 19 nt, Artificial Sequence
  Description of Artificial Sequence: Synthetic oligonucleotide
ggaucgccaggcaaaccug

SEQ ID NO: 212798 - RNA, 19 nt, Artificial Sequence
  Description of Artificial Sequence: Synthetic oligonucleotide
caggaucgccaggcaaacc

SEQ ID NO: 212799 - RNA, 19 nt, Artificial Sequence
  Description of Artificial Sequence: Synthetic oligonucleotide
gacuaaugaauggcuggau

SEQ ID NO: 212800 - RNA, 19 nt, Artificial Sequence
  Description of Artificial Sequence: Synthetic oligonucleotide
acaucggcugauacguguu

SEQ ID NO: 212801 - RNA, 19 nt, Artificial Sequence
  Description of Artificial Sequence: Synthetic oligonucleotide
gcugucuauaguguaagau

SEQ ID NO: 212802 - RNA, 19 nt, Artificial Sequence
  Description of Artificial Sequence: Synthetic oligonucleotide
auguuauucuggaccccaa

SEQ ID NO: 212803 - RNA, 19 nt, Artificial Sequence
  Description of Artificial Sequence: Synthetic oligonucleotide
gcuaaggcuuggccugagc

SEQ ID NO: 212804 - RNA, 19 nt, Artificial Sequence
  Description of Artificial Sequence: Synthetic oligonucleotide
ggacuguccccugugggca

SEQ ID NO: 212805 - RNA, 19 nt, Artificial Sequence
  Description of Artificial Sequence: Synthetic oligonucleotide
cuagucaguaugcucucuu

SEQ ID NO: 212806 - RNA, 19 nt, Artificial Sequence
  Description of Artificial Sequence: Synthetic oligonucleotide
ggaccuuuuaauccagguu

SEQ ID NO: 212807 - RNA, 19 nt, Artificial Sequence
  Description of Artificial Sequence: Synthetic oligonucleotide
gugggcgaccuggcaaacc

SEQ ID NO: 212808 - RNA, 19 nt, Artificial Sequence
  Description of Artificial Sequence: Synthetic oligonucleotide
ggacaauguggaauuugaa

SEQ ID NO: 212809 - RNA, 19 nt, Artificial Sequence
  Description of Artificial Sequence: Synthetic oligonucleotide
gguuacuagucaguaugcu

SEQ ID NO: 212810 - RNA, 19 nt, Artificial Sequence
  Description of Artificial Sequence: Synthetic oligonucleotide
aggcuaaggcuuggccuga

SEQ ID NO: 212811 - RNA, 19 nt, Artificial Sequence
  Description of Artificial Sequence: Synthetic oligonucleotide
ggcaaaccugggauuccug

SEQ ID NO: 212812 - RNA, 19 nt, Artificial Sequence
  Description of Artificial Sequence: Synthetic oligonucleotide
augggcccuuuuauuuccu

SEQ ID NO: 212813 - RNA, 19 nt, Artificial Sequence
  Description of Artificial Sequence: Synthetic oligonucleotide
gcccaugacauucgaugaa

SEQ ID NO: 212814 - RNA, 19 nt, Artificial Sequence
  Description of Artificial Sequence: Synthetic oligonucleotide
caauuggcucucugcaauu

SEQ ID NO: 212815 - RNA, 19 nt, Artificial Sequence
  Description of Artificial Sequence: Synthetic oligonucleotide
agggccaauuggaccuggu

SEQ ID NO: 212816 - RNA, 19 nt, Artificial Sequence
  Description of Artificial Sequence: Synthetic oligonucleotide
ccucucccauguaaaaucu

SEQ ID NO: 212817 - RNA, 19 nt, Artificial Sequence
  Description of Artificial Sequence: Synthetic oligonucleotide
cgcccaugacauucgauga

SEQ ID NO: 212818 - RNA, 19 nt, Artificial Sequence
  Description of Artificial Sequence: Synthetic oligonucleotide
ucuugaccaugggcccuuu

SEQ ID NO: 212819 - RNA, 19 nt, Artificial Sequence
  Description of Artificial Sequence: Synthetic oligonucleotide
gcgugugaugaggaaucca

SEQ ID NO: 212820 - RNA, 19 nt, Artificial Sequence
  Description of Artificial Sequence: Synthetic oligonucleotide
gucuggcuguggcguguga

SEQ ID NO: 212821 - RNA, 19 nt, Artificial Sequence
  Description of Artificial Sequence: Synthetic oligonucleotide
cuauaggaauuggcauagu

SEQ ID NO: 212822 - RNA, 19 nt, Artificial Sequence
  Description of Artificial Sequence: Synthetic oligonucleotide
gcaauugaagagacacgau

SEQ ID NO: 212823 - RNA, 19 nt, Artificial Sequence
  Description of Artificial Sequence: Synthetic oligonucleotide
ggcccaauaucacccuuuu

SEQ ID NO: 212824 - RNA, 19 nt, Artificial Sequence
  Description of Artificial Sequence: Synthetic oligonucleotide
ccuuugcgcccuccugcac

SEQ ID NO: 212825 - RNA, 19 nt, Artificial Sequence
  Description of Artificial Sequence: Synthetic oligonucleotide
cuacaucaauuggucguuu

SEQ ID NO: 212826 - RNA, 19 nt, Artificial Sequence
  Description of Artificial Sequence: Synthetic oligonucleotide
cccaaaacuacagucccuu

SEQ ID NO: 212827 - RNA, 19 nt, Artificial Sequence
  Description of Artificial Sequence: Synthetic oligonucleotide
ccgugguuacuagucagua

SEQ ID NO: 212828 - RNA, 19 nt, Artificial Sequence
  Description of Artificial Sequence: Synthetic oligonucleotide
cgaaggcagcugccagcgg

SEQ ID NO: 212829 - RNA, 19 nt, Artificial Sequence
  Description of Artificial Sequence: Synthetic oligonucleotide
ccccaaaacuacagucccu

SEQ ID NO: 212830 - RNA, 19 nt, Artificial Sequence
  Description of Artificial Sequence: Synthetic oligonucleotide
cgugguuacuagucaguau

SEQ ID NO: 212831 - RNA, 19 nt, Artificial Sequence
  Description of Artificial Sequence: Synthetic oligonucleotide
cggcugauacguguucuca

SEQ ID NO: 212832 - RNA, 19 nt, Artificial Sequence
  Description of Artificial Sequence: Synthetic oligonucleotide
cguuuugagcuaagauguu

SEQ ID NO: 212833 - RNA, 19 nt, Artificial Sequence
  Description of Artificial Sequence: Synthetic oligonucleotide
ccccgcccaugacauucga

SEQ ID NO: 212834 - RNA, 19 nt, Artificial Sequence
  Description of Artificial Sequence: Synthetic oligonucleotide
cccgcccaugacauucgau

SEQ ID NO: 212835 - RNA, 19 nt, Artificial Sequence
  Description of Artificial Sequence: Synthetic oligonucleotide
ggccuugcucuggcacauu

SEQ ID NO: 212836 - RNA, 19 nt, Artificial Sequence
  Description of Artificial Sequence: Synthetic oligonucleotide
aaagacaacugauucacgc

SEQ ID NO: 212837 - RNA, 19 nt, Artificial Sequence
  Description of Artificial Sequence: Synthetic oligonucleotide
cuauuauaaaccuagagug

SEQ ID NO: 212838 - RNA, 19 nt, Artificial Sequence
  Description of Artificial Sequence: Synthetic oligonucleotide
aauagggucaaucaagaug

SEQ ID NO: 212839 - RNA, 19 nt, Artificial Sequence
  Description of Artificial Sequence: Synthetic oligonucleotide
aguuuugugcccuauaagg

SEQ ID NO: 212840 - RNA, 19 nt, Artificial Sequence
  Description of Artificial Sequence: Synthetic oligonucleotide
auuaugugaaucaacaugg

SEQ ID NO: 212841 - RNA, 19 nt, Artificial Sequence
  Description of Artificial Sequence: Synthetic oligonucleotide
aagguuauuggcuagcucu

SEQ ID NO: 212842 - RNA, 19 nt, Artificial Sequence
  Description of Artificial Sequence: Synthetic oligonucleotide
uaacguauaggccacaccc

SEQ ID NO: 212843 - RNA, 19 nt, Artificial Sequence
  Description of Artificial Sequence: Synthetic oligonucleotide
aauucucggagccuagccc

SEQ ID NO: 212844 - RNA, 19 nt, Artificial Sequence
  Description of Artificial Sequence: Synthetic oligonucleotide
uguaucgaaaauaagcuuc

SEQ ID NO: 212845 - RNA, 19 nt, Artificial Sequence
  Description of Artificial Sequence: Synthetic oligonucleotide
agacuuccgaauuuggugc

SEQ ID NO: 212846 - RNA, 19 nt, Artificial Sequence
  Description of Artificial Sequence: Synthetic oligonucleotide
uauaaggugaccauuuagu

SEQ ID NO: 212847 - RNA, 19 nt, Artificial Sequence
  Description of Artificial Sequence: Synthetic oligonucleotide
ucugauuacuuaaacuggc

SEQ ID NO: 212848 - RNA, 19 nt, Artificial Sequence
  Description of Artificial Sequence: Synthetic oligonucleotide
ucgaauagggucaaucaag

SEQ ID NO: 212849 - RNA, 19 nt, Artificial Sequence
  Description of Artificial Sequence: Synthetic oligonucleotide
uuauaaggugaccauuuag

SEQ ID NO: 212850 - RNA, 19 nt, Artificial Sequence
  Description of Artificial Sequence: Synthetic oligonucleotide
cauuaugugaaucaacaug

SEQ ID NO: 212851 - RNA, 19 nt, Artificial Sequence
  Description of Artificial Sequence: Synthetic oligonucleotide
uccucuaacugucccaucg

SEQ ID NO: 212852 - RNA, 19 nt, Artificial Sequence
  Description of Artificial Sequence: Synthetic oligonucleotide
auuauaaaccuagagugag

SEQ ID NO: 212853 - RNA, 19 nt, Artificial Sequence
  Description of Artificial Sequence: Synthetic oligonucleotide
agcgaaacuacuuccuggc

SEQ ID NO: 212854 - RNA, 19 nt, Artificial Sequence
  Description of Artificial Sequence: Synthetic oligonucleotide
cucuuugaagauuaguagc

SEQ ID NO: 212855 - RNA, 19 nt, Artificial Sequence
  Description of Artificial Sequence: Synthetic oligonucleotide
aauaagagagucugucugu

SEQ ID NO: 212856 - RNA, 19 nt, Artificial Sequence
  Description of Artificial Sequence: Synthetic oligonucleotide
acucuuugaagauuaguag

SEQ ID NO: 212857 - RNA, 19 nt, Artificial Sequence
  Description of Artificial Sequence: Synthetic oligonucleotide
uauggguaucaauaucucg

SEQ ID NO: 212858 - RNA, 19 nt, Artificial Sequence
  Description of Artificial Sequence: Synthetic oligonucleotide
ugugaaucaacaugggcca

SEQ ID NO: 212859 - RNA, 19 nt, Artificial Sequence
  Description of Artificial Sequence: Synthetic oligonucleotide
uauagauguuuauaaggug

SEQ ID NO: 212860 - RNA, 19 nt, Artificial Sequence
  Description of Artificial Sequence: Synthetic oligonucleotide
agcuauuauaaaccuagag

SEQ ID NO: 212861 - RNA, 19 nt, Artificial Sequence
  Description of Artificial Sequence: Synthetic oligonucleotide
auagggucaaucaagaugu

SEQ ID NO: 212862 - RNA, 19 nt, Artificial Sequence
  Description of Artificial Sequence: Synthetic oligonucleotide
ucccaaaccgcuuacauuc

SEQ ID NO: 212863 - RNA, 19 nt, Artificial Sequence
  Description of Artificial Sequence: Synthetic oligonucleotide
uuaugugaaucaacauggg

SEQ ID NO: 212864 - RNA, 19 nt, Artificial Sequence
  Description of Artificial Sequence: Synthetic oligonucleotide
uguucggccaauccuauga

SEQ ID NO: 212865 - RNA, 19 nt, Artificial Sequence
  Description of Artificial Sequence: Synthetic oligonucleotide
acuaugacggccaccaccc

SEQ ID NO: 212866 - RNA, 19 nt, Artificial Sequence
  Description of Artificial Sequence: Synthetic oligonucleotide
uauggaccgaaccugguac

SEQ ID NO: 212867 - RNA, 19 nt, Artificial Sequence
  Description of Artificial Sequence: Synthetic oligonucleotide
uuccguaaaaguugcacug

SEQ ID NO: 212868 - RNA, 19 nt, Artificial Sequence
  Description of Artificial Sequence: Synthetic oligonucleotide
aagacaacugauucacgcu

SEQ ID NO: 212869 - RNA, 19 nt, Artificial Sequence
  Description of Artificial Sequence: Synthetic oligonucleotide
caaugcuacaggcacaccc

SEQ ID NO: 212870 - RNA, 19 nt, Artificial Sequence
  Description of Artificial Sequence: Synthetic oligonucleotide
uuugugcccuauaaggccc

SEQ ID NO: 212871 - RNA, 19 nt, Artificial Sequence
  Description of Artificial Sequence: Synthetic oligonucleotide
aaugguggauagucaaucu

SEQ ID NO: 212872 - RNA, 19 nt, Artificial Sequence
  Description of Artificial Sequence: Synthetic oligonucleotide
ucucgaauacccuuuacau

SEQ ID NO: 212873 - RNA, 19 nt, Artificial Sequence
  Description of Artificial Sequence: Synthetic oligonucleotide
uugggguucaguaacguau

SEQ ID NO: 212874 - RNA, 19 nt, Artificial Sequence
  Description of Artificial Sequence: Synthetic oligonucleotide
aguauggguaucaauaucu

SEQ ID NO: 212875 - RNA, 19 nt, Artificial Sequence
  Description of Artificial Sequence: Synthetic oligonucleotide
ugcaaucggauuuccauca

SEQ ID NO: 212876 - RNA, 19 nt, Artificial Sequence
  Description of Artificial Sequence: Synthetic oligonucleotide
aaaguugcacugaauaaga

SEQ ID NO: 212877 - RNA, 19 nt, Artificial Sequence
  Description of Artificial Sequence: Synthetic oligonucleotide
uauacggccaccgagcgga

SEQ ID NO: 212878 - RNA, 19 nt, Artificial Sequence
  Description of Artificial Sequence: Synthetic oligonucleotide
uaaagacaacugauucacg

SEQ ID NO: 212879 - RNA, 19 nt, Artificial Sequence
  Description of Artificial Sequence: Synthetic oligonucleotide
uagauguuuauaaggugac

SEQ ID NO: 212880 - RNA, 19 nt, Artificial Sequence
  Description of Artificial Sequence: Synthetic oligonucleotide
ugggguacacacaacaauc

SEQ ID NO: 212881 - RNA, 19 nt, Artificial Sequence
  Description of Artificial Sequence: Synthetic oligonucleotide
aaaccgcuuacauucggca

SEQ ID NO: 212882 - RNA, 19 nt, Artificial Sequence
  Description of Artificial Sequence: Synthetic oligonucleotide
aguugcacugaauaagaga

SEQ ID NO: 212883 - RNA, 19 nt, Artificial Sequence
  Description of Artificial Sequence: Synthetic oligonucleotide
guugaauuagcuggaacag

SEQ ID NO: 212884 - RNA, 19 nt, Artificial Sequence
  Description of Artificial Sequence: Synthetic oligonucleotide
cacuaguccauccacuugc

SEQ ID NO: 212885 - RNA, 19 nt, Artificial Sequence
  Description of Artificial Sequence: Synthetic oligonucleotide
agcagaccaagauuaugac

SEQ ID NO: 212886 - RNA, 19 nt, Artificial Sequence
  Description of Artificial Sequence: Synthetic oligonucleotide
ugcuauggaccgaaccugg

SEQ ID NO: 212887 - RNA, 19 nt, Artificial Sequence
  Description of Artificial Sequence: Synthetic oligonucleotide
ucgauuaacugcuguggag

SEQ ID NO: 212888 - RNA, 19 nt, Artificial Sequence
  Description of Artificial Sequence: Synthetic oligonucleotide
uaucugggcuauuauggcc

SEQ ID NO: 212889 - RNA, 19 nt, Artificial Sequence
  Description of Artificial Sequence: Synthetic oligonucleotide
cacucaaugcuacaggcac

SEQ ID NO: 212890 - RNA, 19 nt, Artificial Sequence
  Description of Artificial Sequence: Synthetic oligonucleotide
accaagauuaugacccucc

SEQ ID NO: 212891 - RNA, 19 nt, Artificial Sequence
  Description of Artificial Sequence: Synthetic oligonucleotide
gauuaacugcuguggagug

SEQ ID NO: 212892 - RNA, 19 nt, Artificial Sequence
  Description of Artificial Sequence: Synthetic oligonucleotide
ugauucacgcugauuuuca

SEQ ID NO: 212893 - RNA, 19 nt, Artificial Sequence
  Description of Artificial Sequence: Synthetic oligonucleotide
auagucaaucucugaauga

SEQ ID NO: 212894 - RNA, 19 nt, Artificial Sequence
  Description of Artificial Sequence: Synthetic oligonucleotide
uuacccuccuuauaacuca

SEQ ID NO: 212895 - RNA, 19 nt, Artificial Sequence
  Description of Artificial Sequence: Synthetic oligonucleotide
gaauucucggagccuagcc

SEQ ID NO: 212896 - RNA, 19 nt, Artificial Sequence
  Description of Artificial Sequence: Synthetic oligonucleotide
ugauagggcuaucugggcu

SEQ ID NO: 212897 - RNA, 19 nt, Artificial Sequence
  Description of Artificial Sequence: Synthetic oligonucleotide
aucucgaauacccuuuaca

SEQ ID NO: 212898 - RNA, 19 nt, Artificial Sequence
  Description of Artificial Sequence: Synthetic oligonucleotide
uuauaaaccuagagugagu

SEQ ID NO: 212899 - RNA, 19 nt, Artificial Sequence
  Description of Artificial Sequence: Synthetic oligonucleotide
agauguuuauaaggugacc

SEQ ID NO: 212900 - RNA, 19 nt, Artificial Sequence
  Description of Artificial Sequence: Synthetic oligonucleotide
cauguaucgaaaauaagcu

SEQ ID NO: 212901 - RNA, 19 nt, Artificial Sequence
  Description of Artificial Sequence: Synthetic oligonucleotide
uauaaaccuagagugaguu

SEQ ID NO: 212902 - RNA, 19 nt, Artificial Sequence
  Description of Artificial Sequence: Synthetic oligonucleotide
auuccuaccaucauuugca

SEQ ID NO: 212903 - RNA, 19 nt, Artificial Sequence
  Description of Artificial Sequence: Synthetic oligonucleotide
cugaaugaucaaugggagg

SEQ ID NO: 212904 - RNA, 19 nt, Artificial Sequence
  Description of Artificial Sequence: Synthetic oligonucleotide
ugucaaacauccgaucggc

SEQ ID NO: 212905 - RNA, 19 nt, Artificial Sequence
  Description of Artificial Sequence: Synthetic oligonucleotide
uugaguuugugccgcaggu

SEQ ID NO: 212906 - RNA, 19 nt, Artificial Sequence
  Description of Artificial Sequence: Synthetic oligonucleotide
cuuacccuccuuauaacuc

SEQ ID NO: 212907 - RNA, 19 nt, Artificial Sequence
  Description of Artificial Sequence: Synthetic oligonucleotide
ccuaguaggacacacaauc

SEQ ID NO: 212908 - RNA, 19 nt, Artificial Sequence
  Description of Artificial Sequence: Synthetic oligonucleotide
aucaauaucucgugcuaca

SEQ ID NO: 212909 - RNA, 19 nt, Artificial Sequence
  Description of Artificial Sequence: Synthetic oligonucleotide
uuuauaaggugaccauuua

SEQ ID NO: 212910 - RNA, 19 nt, Artificial Sequence
  Description of Artificial Sequence: Synthetic oligonucleotide
augacuaugacggccacca

SEQ ID NO: 212911 - RNA, 19 nt, Artificial Sequence
  Description of Artificial Sequence: Synthetic oligonucleotide
cauauacggccaccgagcg

SEQ ID NO: 212912 - RNA, 19 nt, Artificial Sequence
  Description of Artificial Sequence: Synthetic oligonucleotide
auaaggugaccauuuagua

SEQ ID NO: 212913 - RNA, 19 nt, Artificial Sequence
  Description of Artificial Sequence: Synthetic oligonucleotide
acuuacccuccuuauaacu

SEQ ID NO: 212914 - RNA, 19 nt, Artificial Sequence
  Description of Artificial Sequence: Synthetic oligonucleotide
acggacaugacuugcuaug

SEQ ID NO: 212915 - RNA, 19 nt, Artificial Sequence
  Description of Artificial Sequence: Synthetic oligonucleotide
auaagagagucugucuguc

SEQ ID NO: 212916 - RNA, 19 nt, Artificial Sequence
  Description of Artificial Sequence: Synthetic oligonucleotide
uuagcuggaacagaauuua

SEQ ID NO: 212917 - RNA, 19 nt, Artificial Sequence
  Description of Artificial Sequence: Synthetic oligonucleotide
ugccgauucgccaccaucu

SEQ ID NO: 212918 - RNA, 19 nt, Artificial Sequence
  Description of Artificial Sequence: Synthetic oligonucleotide
aaugcuacaggcacacccu

SEQ ID NO: 212919 - RNA, 19 nt, Artificial Sequence
  Description of Artificial Sequence: Synthetic oligonucleotide
aguaacguauaggccacac

SEQ ID NO: 212920 - RNA, 19 nt, Artificial Sequence
  Description of Artificial Sequence: Synthetic oligonucleotide
agcgguauccaucuccaug

SEQ ID NO: 212921 - RNA, 19 nt, Artificial Sequence
  Description of Artificial Sequence: Synthetic oligonucleotide
uuguuauuauuuccucggu

SEQ ID NO: 212922 - RNA, 19 nt, Artificial Sequence
  Description of Artificial Sequence: Synthetic oligonucleotide
gcuauuauaaaccuagagu

SEQ ID NO: 212923 - RNA, 19 nt, Artificial Sequence
  Description of Artificial Sequence: Synthetic oligonucleotide
ccuuauaacucaaccagag

SEQ ID NO: 212924 - RNA, 19 nt, Artificial Sequence
  Description of Artificial Sequence: Synthetic oligonucleotide
accgcuuacauucggcaug

SEQ ID NO: 212925 - RNA, 19 nt, Artificial Sequence
  Description of Artificial Sequence: Synthetic oligonucleotide
cuuaagguuauuggcuagc

SEQ ID NO: 212926 - RNA, 19 nt, Artificial Sequence
  Description of Artificial Sequence: Synthetic oligonucleotide
auaguuaaugacugucuua

SEQ ID NO: 212927 - RNA, 19 nt, Artificial Sequence
  Description of Artificial Sequence: Synthetic oligonucleotide
caaaccgcuuacauucggc

SEQ ID NO: 212928 - RNA, 19 nt, Artificial Sequence
  Description of Artificial Sequence: Synthetic oligonucleotide
uuucuuacguuuggguggc

SEQ ID NO: 212929 - RNA, 19 nt, Artificial Sequence
  Description of Artificial Sequence: Synthetic oligonucleotide
ccuauaaggcccuuucucc

SEQ ID NO: 212930 - RNA, 19 nt, Artificial Sequence
  Description of Artificial Sequence: Synthetic oligonucleotide
auagccccagcaaaauuac

SEQ ID NO: 212931 - RNA, 19 nt, Artificial Sequence
  Description of Artificial Sequence: Synthetic oligonucleotide
ugucccaucgacuuuucuu

SEQ ID NO: 212932 - RNA, 19 nt, Artificial Sequence
  Description of Artificial Sequence: Synthetic oligonucleotide
uuaagguuauuggcuagcu

SEQ ID NO: 212933 - RNA, 19 nt, Artificial Sequence
  Description of Artificial Sequence: Synthetic oligonucleotide
guuuucacgauuaaagccu

SEQ ID NO: 212934 - RNA, 19 nt, Artificial Sequence
  Description of Artificial Sequence: Synthetic oligonucleotide
aucaguaugacggcugcug

SEQ ID NO: 212935 - RNA, 19 nt, Artificial Sequence
  Description of Artificial Sequence: Synthetic oligonucleotide
uucacggcuauuacucccu

SEQ ID NO: 212936 - RNA, 19 nt, Artificial Sequence
  Description of Artificial Sequence: Synthetic oligonucleotide
uugaauuagcuggaacaga

SEQ ID NO: 212937 - RNA, 19 nt, Artificial Sequence
  Description of Artificial Sequence: Synthetic oligonucleotide
aaucccuucacggcuauua

SEQ ID NO: 212938 - RNA, 19 nt, Artificial Sequence
  Description of Artificial Sequence: Synthetic oligonucleotide
ucuaccagacgccggguaa

SEQ ID NO: 212939 - RNA, 19 nt, Artificial Sequence
  Description of Artificial Sequence: Synthetic oligonucleotide
caggccgcucucuauagcc

SEQ ID NO: 212940 - RNA, 19 nt, Artificial Sequence
  Description of Artificial Sequence: Synthetic oligonucleotide
ugagacaccuaguuaccaa

SEQ ID NO: 212941 - RNA, 19 nt, Artificial Sequence
  Description of Artificial Sequence: Synthetic oligonucleotide
auguaucgaaaauaagcuu

SEQ ID NO: 212942 - RNA, 19 nt, Artificial Sequence
  Description of Artificial Sequence: Synthetic oligonucleotide
aguucccaagaaaacaucu

SEQ ID NO: 212943 - RNA, 19 nt, Artificial Sequence
  Description of Artificial Sequence: Synthetic oligonucleotide
uaagguuauuggcuagcuc

SEQ ID NO: 212944 - RNA, 19 nt, Artificial Sequence
  Description of Artificial Sequence: Synthetic oligonucleotide
ucgguccgaauucucggag

SEQ ID NO: 212945 - RNA, 19 nt, Artificial Sequence
  Description of Artificial Sequence: Synthetic oligonucleotide
gaaacuacuuccuggccua

SEQ ID NO: 212946 - RNA, 19 nt, Artificial Sequence
  Description of Artificial Sequence: Synthetic oligonucleotide
uguuuauaaggugaccauu

SEQ ID NO: 212947 - RNA, 19 nt, Artificial Sequence
  Description of Artificial Sequence: Synthetic oligonucleotide
caggaccaaugcaaguucc

SEQ ID NO: 212948 - RNA, 19 nt, Artificial Sequence
  Description of Artificial Sequence: Synthetic oligonucleotide
uugcuauggaccgaaccug

SEQ ID NO: 212949 - RNA, 19 nt, Artificial Sequence
  Description of Artificial Sequence: Synthetic oligonucleotide
guaacguauaggccacacc

SEQ ID NO: 212950 - RNA, 19 nt, Artificial Sequence
  Description of Artificial Sequence: Synthetic oligonucleotide
caagauuaugacccuccug

SEQ ID NO: 212951 - RNA, 19 nt, Artificial Sequence
  Description of Artificial Sequence: Synthetic oligonucleotide
uguucucuccaugucggug

SEQ ID NO: 212952 - RNA, 19 nt, Artificial Sequence
  Description of Artificial Sequence: Synthetic oligonucleotide
augccgauucgccaccauc

SEQ ID NO: 212953 - RNA, 19 nt, Artificial Sequence
  Description of Artificial Sequence: Synthetic oligonucleotide
aaccgcuuacauucggcau

SEQ ID NO: 212954 - RNA, 19 nt, Artificial Sequence
  Description of Artificial Sequence: Synthetic oligonucleotide
auauacggccaccgagcgg

SEQ ID NO: 212955 - RNA, 19 nt, Artificial Sequence
  Description of Artificial Sequence: Synthetic oligonucleotide
cuaguaggacacacaauca

SEQ ID NO: 212956 - RNA, 19 nt, Artificial Sequence
  Description of Artificial Sequence: Synthetic oligonucleotide
aaucagccgaccuggggua

SEQ ID NO: 212957 - RNA, 19 nt, Artificial Sequence
  Description of Artificial Sequence: Synthetic oligonucleotide
cccugagacaccuaguuac

SEQ ID NO: 212958 - RNA, 19 nt, Artificial Sequence
  Description of Artificial Sequence: Synthetic oligonucleotide
auggagcagaccaagauua

SEQ ID NO: 212959 - RNA, 19 nt, Artificial Sequence
  Description of Artificial Sequence: Synthetic oligonucleotide
cucccuaaguaucuuccac

SEQ ID NO: 212960 - RNA, 19 nt, Artificial Sequence
  Description of Artificial Sequence: Synthetic oligonucleotide
uccguaaaaguugcacuga

SEQ ID NO: 212961 - RNA, 19 nt, Artificial Sequence
  Description of Artificial Sequence: Synthetic oligonucleotide
uccgaauuuggugcauaag

SEQ ID NO: 212962 - RNA, 19 nt, Artificial Sequence
  Description of Artificial Sequence: Synthetic oligonucleotide
aacguauaggccacacccu

SEQ ID NO: 212963 - RNA, 19 nt, Artificial Sequence
  Description of Artificial Sequence: Synthetic oligonucleotide
cuccguauaucucucucuc

SEQ ID NO: 212964 - RNA, 19 nt, Artificial Sequence
  Description of Artificial Sequence: Synthetic oligonucleotide
cucuaccacucaaugcuac

SEQ ID NO: 212965 - RNA, 19 nt, Artificial Sequence
  Description of Artificial Sequence: Synthetic oligonucleotide
ccgagcggagauuauaugc

SEQ ID NO: 212966 - RNA, 19 nt, Artificial Sequence
  Description of Artificial Sequence: Synthetic oligonucleotide
cuugcuauggaccgaaccu

SEQ ID NO: 212967 - RNA, 19 nt, Artificial Sequence
  Description of Artificial Sequence: Synthetic oligonucleotide
guguugaauuagcuggaac

SEQ ID NO: 212968 - RNA, 19 nt, Artificial Sequence
  Description of Artificial Sequence: Synthetic oligonucleotide
uacucagacuuccgaauuu

SEQ ID NO: 212969 - RNA, 19 nt, Artificial Sequence
  Description of Artificial Sequence: Synthetic oligonucleotide
acggcuauuacucccugua

SEQ ID NO: 212970 - RNA, 19 nt, Artificial Sequence
  Description of Artificial Sequence: Synthetic oligonucleotide
acucagacuuccgaauuug

SEQ ID NO: 212971 - RNA, 19 nt, Artificial Sequence
  Description of Artificial Sequence: Synthetic oligonucleotide
cuauuauggcccugcugug

SEQ ID NO: 212972 - RNA, 19 nt, Artificial Sequence
  Description of Artificial Sequence: Synthetic oligonucleotide
ugcauaaguuguucaucaa

SEQ ID NO: 212973 - RNA, 19 nt, Artificial Sequence
  Description of Artificial Sequence: Synthetic oligonucleotide
uuugggguucaguaacgua

SEQ ID NO: 212974 - RNA, 19 nt, Artificial Sequence
  Description of Artificial Sequence: Synthetic oligonucleotide
uccacuuacccuccuuaua

SEQ ID NO: 212975 - RNA, 19 nt, Artificial Sequence
  Description of Artificial Sequence: Synthetic oligonucleotide
ugccgcaggucgauuaacu

SEQ ID NO: 212976 - RNA, 19 nt, Artificial Sequence
  Description of Artificial Sequence: Synthetic oligonucleotide
uuccgaauuuggugcauaa

SEQ ID NO: 212977 - RNA, 19 nt, Artificial Sequence
  Description of Artificial Sequence: Synthetic oligonucleotide
aggacacucccugaagaag

SEQ ID NO: 212978 - RNA, 19 nt, Artificial Sequence
  Description of Artificial Sequence: Synthetic oligonucleotide
uccguauaucucucucucu

SEQ ID NO: 212979 - RNA, 19 nt, Artificial Sequence
  Description of Artificial Sequence: Synthetic oligonucleotide
auuauggcccugcuguguu

SEQ ID NO: 212980 - RNA, 19 nt, Artificial Sequence
  Description of Artificial Sequence: Synthetic oligonucleotide
gccuguucucuccaugucg

SEQ ID NO: 212981 - RNA, 19 nt, Artificial Sequence
  Description of Artificial Sequence: Synthetic oligonucleotide
uucggccaauccuaugagu

SEQ ID NO: 212982 - RNA, 19 nt, Artificial Sequence
  Description of Artificial Sequence: Synthetic oligonucleotide
ucacgauuaaagccuucuu

SEQ ID NO: 212983 - RNA, 19 nt, Artificial Sequence
  Description of Artificial Sequence: Synthetic oligonucleotide
cugauucacgcugauuuuc

SEQ ID NO: 212984 - RNA, 19 nt, Artificial Sequence
  Description of Artificial Sequence: Synthetic oligonucleotide
gugcaaucggauuuccauc

SEQ ID NO: 212985 - RNA, 19 nt, Artificial Sequence
  Description of Artificial Sequence: Synthetic oligonucleotide
gguccgaauucucggagcc

SEQ ID NO: 212986 - RNA, 19 nt, Artificial Sequence
  Description of Artificial Sequence: Synthetic oligonucleotide
aaucaacaugggccaaaua

SEQ ID NO: 212987 - RNA, 19 nt, Artificial Sequence
  Description of Artificial Sequence: Synthetic oligonucleotide
cauccuguuuucacgauua

SEQ ID NO: 212988 - RNA, 19 nt, Artificial Sequence
  Description of Artificial Sequence: Synthetic oligonucleotide
acuaggcccagaauggagu

SEQ ID NO: 212989 - RNA, 19 nt, Artificial Sequence
  Description of Artificial Sequence: Synthetic oligonucleotide
auaaaccuagagugaguuu

SEQ ID NO: 212990 - RNA, 19 nt, Artificial Sequence
  Description of Artificial Sequence: Synthetic oligonucleotide
uuccuaccaucauuugcac

SEQ ID NO: 212991 - RNA, 19 nt, Artificial Sequence
  Description of Artificial Sequence: Synthetic oligonucleotide
uuacguuuggguggcucug

SEQ ID NO: 212992 - RNA, 19 nt, Artificial Sequence
  Description of Artificial Sequence: Synthetic oligonucleotide
gucccaucgacuuuucuua

SEQ ID NO: 212993 - RNA, 19 nt, Artificial Sequence
  Description of Artificial Sequence: Synthetic oligonucleotide
aagcuauuauaaaccuaga

SEQ ID NO: 212994 - RNA, 19 nt, Artificial Sequence
  Description of Artificial Sequence: Synthetic oligonucleotide
ugacuugcuauggaccgaa

SEQ ID NO: 212995 - RNA, 19 nt, Artificial Sequence
  Description of Artificial Sequence: Synthetic oligonucleotide
cacuuacccuccuuauaac

SEQ ID NO: 212996 - RNA, 19 nt, Artificial Sequence
  Description of Artificial Sequence: Synthetic oligonucleotide
agccuaucucccauggcuc

SEQ ID NO: 212997 - RNA, 19 nt, Artificial Sequence
  Description of Artificial Sequence: Synthetic oligonucleotide
uguguugaauuagcuggaa

SEQ ID NO: 212998 - RNA, 19 nt, Artificial Sequence
  Description of Artificial Sequence: Synthetic oligonucleotide
uccgaauucucggagccua

SEQ ID NO: 212999 - RNA, 19 nt, Artificial Sequence
  Description of Artificial Sequence: Synthetic oligonucleotide
acguauaggccacacccuu

SEQ ID NO: 213000 - RNA, 19 nt, Artificial Sequence
  Description of Artificial Sequence: Synthetic oligonucleotide
accgagcggagauuauaug

SEQ ID NO: 213001 - RNA, 19 nt, Artificial Sequence
  Description of Artificial Sequence: Synthetic oligonucleotide
gacuuccgaauuuggugca

SEQ ID NO: 213002 - RNA, 19 nt, Artificial Sequence
  Description of Artificial Sequence: Synthetic oligonucleotide
gacaacugauucacgcuga

SEQ ID NO: 213003 - RNA, 19 nt, Artificial Sequence
  Description of Artificial Sequence: Synthetic oligonucleotide
accaucauuugcaccccgg

SEQ ID NO: 213004 - RNA, 19 nt, Artificial Sequence
  Description of Artificial Sequence: Synthetic oligonucleotide
uuauggcccugcuguguug

SEQ ID NO: 213005 - RNA, 19 nt, Artificial Sequence
  Description of Artificial Sequence: Synthetic oligonucleotide
ucacggcuauuacucccug

SEQ ID NO: 213006 - RNA, 19 nt, Artificial Sequence
  Description of Artificial Sequence: Synthetic oligonucleotide
guugacaaagcucccuagu

SEQ ID NO: 213007 - RNA, 19 nt, Artificial Sequence
  Description of Artificial Sequence: Synthetic oligonucleotide
uuaugacccuccugcuuaa

SEQ ID NO: 213008 - RNA, 19 nt, Artificial Sequence
  Description of Artificial Sequence: Synthetic oligonucleotide
guauggguaucaauaucuc

SEQ ID NO: 213009 - RNA, 19 nt, Artificial Sequence
  Description of Artificial Sequence: Synthetic oligonucleotide
ccgaagguugaguuugugc

SEQ ID NO: 213010 - RNA, 19 nt, Artificial Sequence
  Description of Artificial Sequence: Synthetic oligonucleotide
accggagacccgaagguug

SEQ ID NO: 213011 - RNA, 19 nt, Artificial Sequence
  Description of Artificial Sequence: Synthetic oligonucleotide
uugugcccuauaaggcccu

SEQ ID NO: 213012 - RNA, 19 nt, Artificial Sequence
  Description of Artificial Sequence: Synthetic oligonucleotide
gccaauccuaugaguaugg

SEQ ID NO: 213013 - RNA, 19 nt, Artificial Sequence
  Description of Artificial Sequence: Synthetic oligonucleotide
caucuuggaccccaaccca

SEQ ID NO: 213014 - RNA, 19 nt, Artificial Sequence
  Description of Artificial Sequence: Synthetic oligonucleotide
cucggagccuagcccaggc

SEQ ID NO: 213015 - RNA, 19 nt, Artificial Sequence
  Description of Artificial Sequence: Synthetic oligonucleotide
gaccgaaccugguacucaa

SEQ ID NO: 213016 - RNA, 19 nt, Artificial Sequence
  Description of Artificial Sequence: Synthetic oligonucleotide
uuugcaccccggcucucuc

SEQ ID NO: 213017 - RNA, 19 nt, Artificial Sequence
  Description of Artificial Sequence: Synthetic oligonucleotide
ccugagacaccuaguuacc

SEQ ID NO: 213018 - RNA, 19 nt, Artificial Sequence
  Description of Artificial Sequence: Synthetic oligonucleotide
acggccaccgagcggagau

SEQ ID NO: 213019 - RNA, 19 nt, Artificial Sequence
  Description of Artificial Sequence: Synthetic oligonucleotide
ggugcauaaguuguucauc

SEQ ID NO: 213020 - RNA, 19 nt, Artificial Sequence
  Description of Artificial Sequence: Synthetic oligonucleotide
cuuacguuuggguggcucu

SEQ ID NO: 213021 - RNA, 19 nt, Artificial Sequence
  Description of Artificial Sequence: Synthetic oligonucleotide
gaauagggucaaucaagau

SEQ ID NO: 213022 - RNA, 19 nt, Artificial Sequence
  Description of Artificial Sequence: Synthetic oligonucleotide
uaugacccuccugcuuaag

SEQ ID NO: 213023 - RNA, 19 nt, Artificial Sequence
  Description of Artificial Sequence: Synthetic oligonucleotide
ggguacacacaacaaucuc

SEQ ID NO: 213024 - RNA, 19 nt, Artificial Sequence
  Description of Artificial Sequence: Synthetic oligonucleotide
ccucgguccgaauucucgg

SEQ ID NO: 213025 - RNA, 19 nt, Artificial Sequence
  Description of Artificial Sequence: Synthetic oligonucleotide
cacgauuaaagccuucuuu

SEQ ID NO: 213026 - RNA, 19 nt, Artificial Sequence
  Description of Artificial Sequence: Synthetic oligonucleotide
gcggagauuauaugcuuuc

SEQ ID NO: 213027 - RNA, 19 nt, Artificial Sequence
  Description of Artificial Sequence: Synthetic oligonucleotide
ucaaugcuacaggcacacc

SEQ ID NO: 213028 - RNA, 19 nt, Artificial Sequence
  Description of Artificial Sequence: Synthetic oligonucleotide
accuaguuaccaaaaccuu

SEQ ID NO: 213029 - RNA, 19 nt, Artificial Sequence
  Description of Artificial Sequence: Synthetic oligonucleotide
cccaucgacuuuucuuacg

SEQ ID NO: 213030 - RNA, 19 nt, Artificial Sequence
  Description of Artificial Sequence: Synthetic oligonucleotide
aguuggcuguguguacuca

SEQ ID NO: 213031 - RNA, 19 nt, Artificial Sequence
  Description of Artificial Sequence: Synthetic oligonucleotide
agggcuaucugggcuauua

SEQ ID NO: 213032 - RNA, 19 nt, Artificial Sequence
  Description of Artificial Sequence: Synthetic oligonucleotide
ccaaaccgcuuacauucgg

SEQ ID NO: 213033 - RNA, 19 nt, Artificial Sequence
  Description of Artificial Sequence: Synthetic oligonucleotide
uggaccgaaccugguacuc

SEQ ID NO: 213034 - RNA, 19 nt, Artificial Sequence
  Description of Artificial Sequence: Synthetic oligonucleotide
ggcauggaucuguugacaa

SEQ ID NO: 213035 - RNA, 19 nt, Artificial Sequence
  Description of Artificial Sequence: Synthetic oligonucleotide
acguuuggguggcucugga

SEQ ID NO: 213036 - RNA, 19 nt, Artificial Sequence
  Description of Artificial Sequence: Synthetic oligonucleotide
gacggacaugacuugcuau

SEQ ID NO: 213037 - RNA, 19 nt, Artificial Sequence
  Description of Artificial Sequence: Synthetic oligonucleotide
cucgguccgaauucucgga

SEQ ID NO: 213038 - RNA, 19 nt, Artificial Sequence
  Description of Artificial Sequence: Synthetic oligonucleotide
augacuugcuauggaccga

SEQ ID NO: 213039 - RNA, 19 nt, Artificial Sequence
  Description of Artificial Sequence: Synthetic oligonucleotide
cuaugacggccaccacccc

SEQ ID NO: 213040 - RNA, 19 nt, Artificial Sequence
  Description of Artificial Sequence: Synthetic oligonucleotide
ccgaauuuggugcauaagu

SEQ ID NO: 213041 - RNA, 19 nt, Artificial Sequence
  Description of Artificial Sequence: Synthetic oligonucleotide
gcgaaacuacuuccuggcc

SEQ ID NO: 213042 - RNA, 19 nt, Artificial Sequence
  Description of Artificial Sequence: Synthetic oligonucleotide
cugagacaccuaguuacca

SEQ ID NO: 213043 - RNA, 19 nt, Artificial Sequence
  Description of Artificial Sequence: Synthetic oligonucleotide
cuaggcccagaauggagua

SEQ ID NO: 213044 - RNA, 19 nt, Artificial Sequence
  Description of Artificial Sequence: Synthetic oligonucleotide
gccgcaggucgauuaacug

SEQ ID NO: 213045 - RNA, 19 nt, Artificial Sequence
  Description of Artificial Sequence: Synthetic oligonucleotide
cccaaaccgcuuacauucg

SEQ ID NO: 213046 - RNA, 19 nt, Artificial Sequence
  Description of Artificial Sequence: Synthetic oligonucleotide
uacauucggcauggaucug

SEQ ID NO: 213047 - RNA, 19 nt, Artificial Sequence
  Description of Artificial Sequence: Synthetic oligonucleotide
cucgaauacccuuuacauu

SEQ ID NO: 213048 - RNA, 19 nt, Artificial Sequence
  Description of Artificial Sequence: Synthetic oligonucleotide
ggguaggucacuggggcac

SEQ ID NO: 213049 - RNA, 19 nt, Artificial Sequence
  Description of Artificial Sequence: Synthetic oligonucleotide
gccgaccugggguacacac

SEQ ID NO: 213050 - RNA, 19 nt, Artificial Sequence
  Description of Artificial Sequence: Synthetic oligonucleotide
agcuguguuguuggcuccu

SEQ ID NO: 213051 - RNA, 19 nt, Artificial Sequence
  Description of Artificial Sequence: Synthetic oligonucleotide
caaucggauuuccaucacu

SEQ ID NO: 213052 - RNA, 19 nt, Artificial Sequence
  Description of Artificial Sequence: Synthetic oligonucleotide
gggacugaaaagcugcuuu

SEQ ID NO: 213053 - RNA, 19 nt, Artificial Sequence
  Description of Artificial Sequence: Synthetic oligonucleotide
ccaauccuaugaguauggg

SEQ ID NO: 213054 - RNA, 19 nt, Artificial Sequence
  Description of Artificial Sequence: Synthetic oligonucleotide
gagcggagauuauaugcuu

SEQ ID NO: 213055 - RNA, 19 nt, Artificial Sequence
  Description of Artificial Sequence: Synthetic oligonucleotide
auaucucgugcuacaucau

SEQ ID NO: 213056 - RNA, 19 nt, Artificial Sequence
  Description of Artificial Sequence: Synthetic oligonucleotide
caggugucuuaucugacuu

SEQ ID NO: 213057 - RNA, 19 nt, Artificial Sequence
  Description of Artificial Sequence: Synthetic oligonucleotide
gacuugcuauggaccgaac

SEQ ID NO: 213058 - RNA, 19 nt, Artificial Sequence
  Description of Artificial Sequence: Synthetic oligonucleotide
gguuucugccauguaucga

SEQ ID NO: 213059 - RNA, 19 nt, Artificial Sequence
  Description of Artificial Sequence: Synthetic oligonucleotide
gcauggaucuguugacaaa

SEQ ID NO: 213060 - RNA, 19 nt, Artificial Sequence
  Description of Artificial Sequence: Synthetic oligonucleotide
caccgagcggagauuauau

SEQ ID NO: 213061 - RNA, 19 nt, Artificial Sequence
  Description of Artificial Sequence: Synthetic oligonucleotide
ccagacgccggguaagcca

SEQ ID NO: 213062 - RNA, 19 nt, Artificial Sequence
  Description of Artificial Sequence: Synthetic oligonucleotide
guucuccguauaucucucu

SEQ ID NO: 213063 - RNA, 19 nt, Artificial Sequence
  Description of Artificial Sequence: Synthetic oligonucleotide
caggucgauuaacugcugu

SEQ ID NO: 213064 - RNA, 19 nt, Artificial Sequence
  Description of Artificial Sequence: Synthetic oligonucleotide
ccuaguuaccaaaaccuuu

SEQ ID NO: 213065 - RNA, 19 nt, Artificial Sequence
  Description of Artificial Sequence: Synthetic oligonucleotide
gggguacacacaacaaucu

SEQ ID NO: 213066 - RNA, 19 nt, Artificial Sequence
  Description of Artificial Sequence: Synthetic oligonucleotide
cuauagccccagcaaaauu

SEQ ID NO: 213067 - RNA, 19 nt, Artificial Sequence
  Description of Artificial Sequence: Synthetic oligonucleotide
uacggccaccgagcggaga

SEQ ID NO: 213068 - RNA, 19 nt, Artificial Sequence
  Description of Artificial Sequence: Synthetic oligonucleotide
gggguccauacaucuugga

SEQ ID NO: 213069 - RNA, 19 nt, Artificial Sequence
  Description of Artificial Sequence: Synthetic oligonucleotide
cgaaacuacuuccuggccu

SEQ ID NO: 213070 - RNA, 19 nt, Artificial Sequence
  Description of Artificial Sequence: Synthetic oligonucleotide
gccgauucgccaccaucuc

SEQ ID NO: 213071 - RNA, 19 nt, Artificial Sequence
  Description of Artificial Sequence: Synthetic oligonucleotide
ggaccgaaccugguacuca

SEQ ID NO: 213072 - RNA, 19 nt, Artificial Sequence
  Description of Artificial Sequence: Synthetic oligonucleotide
uucuuacguuuggguggcu

SEQ ID NO: 213073 - RNA, 19 nt, Artificial Sequence
  Description of Artificial Sequence: Synthetic oligonucleotide
cugucagccuaucucccau

SEQ ID NO: 213074 - RNA, 19 nt, Artificial Sequence
  Description of Artificial Sequence: Synthetic oligonucleotide
gcaccggagacccgaaggu

SEQ ID NO: 213075 - RNA, 19 nt, Artificial Sequence
  Description of Artificial Sequence: Synthetic oligonucleotide
guauuggaguuggcugugu

SEQ ID NO: 213076 - RNA, 19 nt, Artificial Sequence
  Description of Artificial Sequence: Synthetic oligonucleotide
cgagcggagauuauaugcu

SEQ ID NO: 213077 - RNA, 19 nt, Artificial Sequence
  Description of Artificial Sequence: Synthetic oligonucleotide
cacggcuauuacucccugu

SEQ ID NO: 213078 - RNA, 19 nt, Artificial Sequence
  Description of Artificial Sequence: Synthetic oligonucleotide
cauucggcauggaucuguu

SEQ ID NO: 213079 - RNA, 19 nt, Artificial Sequence
  Description of Artificial Sequence: Synthetic oligonucleotide
caucgacuuuucuuacguu

SEQ ID NO: 213080 - RNA, 19 nt, Artificial Sequence
  Description of Artificial Sequence: Synthetic oligonucleotide
caguaacguauaggccaca

SEQ ID NO: 213081 - RNA, 19 nt, Artificial Sequence
  Description of Artificial Sequence: Synthetic oligonucleotide
auacggccaccgagcggag

SEQ ID NO: 213082 - RNA, 19 nt, Artificial Sequence
  Description of Artificial Sequence: Synthetic oligonucleotide
gcaggucgauuaacugcug

SEQ ID NO: 213083 - RNA, 19 nt, Artificial Sequence
  Description of Artificial Sequence: Synthetic oligonucleotide
gcacugaauaagagagucu

SEQ ID NO: 213084 - RNA, 19 nt, Artificial Sequence
  Description of Artificial Sequence: Synthetic oligonucleotide
ccggagacccgaagguuga

SEQ ID NO: 213085 - RNA, 19 nt, Artificial Sequence
  Description of Artificial Sequence: Synthetic oligonucleotide
ccaagauuaugacccuccu

SEQ ID NO: 213086 - RNA, 19 nt, Artificial Sequence
  Description of Artificial Sequence: Synthetic oligonucleotide
guccgaauucucggagccu

SEQ ID NO: 213087 - RNA, 19 nt, Artificial Sequence
  Description of Artificial Sequence: Synthetic oligonucleotide
agccgaccugggguacaca

SEQ ID NO: 213088 - RNA, 19 nt, Artificial Sequence
  Description of Artificial Sequence: Synthetic oligonucleotide
uagggcuaucugggcuauu

SEQ ID NO: 213089 - RNA, 19 nt, Artificial Sequence
  Description of Artificial Sequence: Synthetic oligonucleotide
caacugauucacgcugauu

SEQ ID NO: 213090 - RNA, 19 nt, Artificial Sequence
  Description of Artificial Sequence: Synthetic oligonucleotide
ggguagcgguauccaucuc

SEQ ID NO: 213091 - RNA, 19 nt, Artificial Sequence
  Description of Artificial Sequence: Synthetic oligonucleotide
ccgcucucuauagccccag

SEQ ID NO: 213092 - RNA, 19 nt, Artificial Sequence
  Description of Artificial Sequence: Synthetic oligonucleotide
caugccgauucgccaccau

SEQ ID NO: 213093 - RNA, 19 nt, Artificial Sequence
  Description of Artificial Sequence: Synthetic oligonucleotide
gccgcucucuauagcccca

SEQ ID NO: 213094 - RNA, 19 nt, Artificial Sequence
  Description of Artificial Sequence: Synthetic oligonucleotide
ggcccagaauggaguaucu

SEQ ID NO: 213095 - RNA, 19 nt, Artificial Sequence
  Description of Artificial Sequence: Synthetic oligonucleotide
ccauccuguuuucacgauu

SEQ ID NO: 213096 - RNA, 19 nt, Artificial Sequence
  Description of Artificial Sequence: Synthetic oligonucleotide
ccaccgagcggagauuaua

SEQ ID NO: 213097 - RNA, 19 nt, Artificial Sequence
  Description of Artificial Sequence: Synthetic oligonucleotide
cccuaguaggacacacaau

SEQ ID NO: 213098 - RNA, 19 nt, Artificial Sequence
  Description of Artificial Sequence: Synthetic oligonucleotide
ccaugccgauucgccacca

SEQ ID NO: 213099 - RNA, 19 nt, Artificial Sequence
  Description of Artificial Sequence: Synthetic oligonucleotide
cggccaauccuaugaguau

SEQ ID NO: 213100 - RNA, 19 nt, Artificial Sequence
  Description of Artificial Sequence: Synthetic oligonucleotide
gccaccgagcggagauuau

SEQ ID NO: 213101 - RNA, 19 nt, Artificial Sequence
  Description of Artificial Sequence: Synthetic oligonucleotide
cgcuuacauucggcaugga

SEQ ID NO: 213102 - RNA, 19 nt, Artificial Sequence
  Description of Artificial Sequence: Synthetic oligonucleotide
aaaagcaauacccguauuc

SEQ ID NO: 213103 - RNA, 19 nt, Artificial Sequence
  Description of Artificial Sequence: Synthetic oligonucleotide
uguuucuagauuuuauuag

SEQ ID NO: 213104 - RNA, 19 nt, Artificial Sequence
  Description of Artificial Sequence: Synthetic oligonucleotide
agauaggccagguaguagc

SEQ ID NO: 213105 - RNA, 19 nt, Artificial Sequence
  Description of Artificial Sequence: Synthetic oligonucleotide
agacauuccaaguuugugg

SEQ ID NO: 213106 - RNA, 19 nt, Artificial Sequence
  Description of Artificial Sequence: Synthetic oligonucleotide
acgaugaucacuuugcuca

SEQ ID NO: 213107 - RNA, 19 nt, Artificial Sequence
  Description of Artificial Sequence: Synthetic oligonucleotide
acuaacaucaccagggucg

SEQ ID NO: 213108 - RNA, 19 nt, Artificial Sequence
  Description of Artificial Sequence: Synthetic oligonucleotide
ugcuaaugggcuuaaauga

SEQ ID NO: 213109 - RNA, 19 nt, Artificial Sequence
  Description of Artificial Sequence: Synthetic oligonucleotide
uaaguuuucaagcccacac

SEQ ID NO: 213110 - RNA, 19 nt, Artificial Sequence
  Description of Artificial Sequence: Synthetic oligonucleotide
uuugagucuuguuagugcc

SEQ ID NO: 213111 - RNA, 19 nt, Artificial Sequence
  Description of Artificial Sequence: Synthetic oligonucleotide
ucaaccggaacgaugaagu

SEQ ID NO: 213112 - RNA, 19 nt, Artificial Sequence
  Description of Artificial Sequence: Synthetic oligonucleotide
ucgucuagaucaaugacca

SEQ ID NO: 213113 - RNA, 19 nt, Artificial Sequence
  Description of Artificial Sequence: Synthetic oligonucleotide
agacacuuaaggcagcggg

SEQ ID NO: 213114 - RNA, 19 nt, Artificial Sequence
  Description of Artificial Sequence: Synthetic oligonucleotide
agaaauccggcugaggccc

SEQ ID NO: 213115 - RNA, 19 nt, Artificial Sequence
  Description of Artificial Sequence: Synthetic oligonucleotide
auguacauaaagcagacuu

SEQ ID NO: 213116 - RNA, 19 nt, Artificial Sequence
  Description of Artificial Sequence: Synthetic oligonucleotide
caugcuguauacaucgucc

SEQ ID NO: 213117 - RNA, 19 nt, Artificial Sequence
  Description of Artificial Sequence: Synthetic oligonucleotide
ucuagaucaaugaccacac

SEQ ID NO: 213118 - RNA, 19 nt, Artificial Sequence
  Description of Artificial Sequence: Synthetic oligonucleotide
gguuccaucgauuucaacc

SEQ ID NO: 213119 - RNA, 19 nt, Artificial Sequence
  Description of Artificial Sequence: Synthetic oligonucleotide
agcacuaacaucaccaggg

SEQ ID NO: 213120 - RNA, 19 nt, Artificial Sequence
  Description of Artificial Sequence: Synthetic oligonucleotide
cuuaggacgaaacacagca

SEQ ID NO: 213121 - RNA, 19 nt, Artificial Sequence
  Description of Artificial Sequence: Synthetic oligonucleotide
uuuugagucuuguuagugc

SEQ ID NO: 213122 - RNA, 19 nt, Artificial Sequence
  Description of Artificial Sequence: Synthetic oligonucleotide
aacgucacgaguguuugac

SEQ ID NO: 213123 - RNA, 19 nt, Artificial Sequence
  Description of Artificial Sequence: Synthetic oligonucleotide
guugacugcggugagaagg

SEQ ID NO: 213124 - RNA, 19 nt, Artificial Sequence
  Description of Artificial Sequence: Synthetic oligonucleotide
uaaggugggaagaaauaug

SEQ ID NO: 213125 - RNA, 19 nt, Artificial Sequence
  Description of Artificial Sequence: Synthetic oligonucleotide
agacaggcuucucuaaccc

SEQ ID NO: 213126 - RNA, 19 nt, Artificial Sequence
  Description of Artificial Sequence: Synthetic oligonucleotide
aaagggaucccugucaacu

SEQ ID NO: 213127 - RNA, 19 nt, Artificial Sequence
  Description of Artificial Sequence: Synthetic oligonucleotide
ucucaagcgagacuggaga

SEQ ID NO: 213128 - RNA, 19 nt, Artificial Sequence
  Description of Artificial Sequence: Synthetic oligonucleotide
aauaaggcccgagacacug

SEQ ID NO: 213129 - RNA, 19 nt, Artificial Sequence
  Description of Artificial Sequence: Synthetic oligonucleotide
aacgggaugagguccagca

SEQ ID NO: 213130 - RNA, 19 nt, Artificial Sequence
  Description of Artificial Sequence: Synthetic oligonucleotide
uguuagugccaacaacucc

SEQ ID NO: 213131 - RNA, 19 nt, Artificial Sequence
  Description of Artificial Sequence: Synthetic oligonucleotide
uauaccugguguaugguuc

SEQ ID NO: 213132 - RNA, 19 nt, Artificial Sequence
  Description of Artificial Sequence: Synthetic oligonucleotide
uuggcuaaggagauggagu

SEQ ID NO: 213133 - RNA, 19 nt, Artificial Sequence
  Description of Artificial Sequence: Synthetic oligonucleotide
auaaaccucacacacucgu

SEQ ID NO: 213134 - RNA, 19 nt, Artificial Sequence
  Description of Artificial Sequence: Synthetic oligonucleotide
guguuauuaggacacaaac

SEQ ID NO: 213135 - RNA, 19 nt, Artificial Sequence
  Description of Artificial Sequence: Synthetic oligonucleotide
agaauuguccacgaugauc

SEQ ID NO: 213136 - RNA, 19 nt, Artificial Sequence
  Description of Artificial Sequence: Synthetic oligonucleotide
gagggauuuagcugguggg

SEQ ID NO: 213137 - RNA, 19 nt, Artificial Sequence
  Description of Artificial Sequence: Synthetic oligonucleotide
cacauuguagucucggaag

SEQ ID NO: 213138 - RNA, 19 nt, Artificial Sequence
  Description of Artificial Sequence: Synthetic oligonucleotide
uauacaucguccucccugc

SEQ ID NO: 213139 - RNA, 19 nt, Artificial Sequence
  Description of Artificial Sequence: Synthetic oligonucleotide
ucauucuuaggacgaaaca

SEQ ID NO: 213140 - RNA, 19 nt, Artificial Sequence
  Description of Artificial Sequence: Synthetic oligonucleotide
cagaccaaagcacuguggg

SEQ ID NO: 213141 - RNA, 19 nt, Artificial Sequence
  Description of Artificial Sequence: Synthetic oligonucleotide
agcgggauuggcuaaugac

SEQ ID NO: 213142 - RNA, 19 nt, Artificial Sequence
  Description of Artificial Sequence: Synthetic oligonucleotide
cucgaggucaugcaaacag

SEQ ID NO: 213143 - RNA, 19 nt, Artificial Sequence
  Description of Artificial Sequence: Synthetic oligonucleotide
uuacaaguaacugauuaaa

SEQ ID NO: 213144 - RNA, 19 nt, Artificial Sequence
  Description of Artificial Sequence: Synthetic oligonucleotide
auaaaagcaauacccguau

SEQ ID NO: 213145 - RNA, 19 nt, Artificial Sequence
  Description of Artificial Sequence: Synthetic oligonucleotide
gauggaguguuuugguaag

SEQ ID NO: 213146 - RNA, 19 nt, Artificial Sequence
  Description of Artificial Sequence: Synthetic oligonucleotide
uuuggucaaauaaggugug

SEQ ID NO: 213147 - RNA, 19 nt, Artificial Sequence
  Description of Artificial Sequence: Synthetic oligonucleotide
aagcccgcuguucuccucc

SEQ ID NO: 213148 - RNA, 19 nt, Artificial Sequence
  Description of Artificial Sequence: Synthetic oligonucleotide
aguuucuacugugauuggc

SEQ ID NO: 213149 - RNA, 19 nt, Artificial Sequence
  Description of Artificial Sequence: Synthetic oligonucleotide
aaaaccuuugugcccuuca

SEQ ID NO: 213150 - RNA, 19 nt, Artificial Sequence
  Description of Artificial Sequence: Synthetic oligonucleotide
acguauaccugguguaugg

SEQ ID NO: 213151 - RNA, 19 nt, Artificial Sequence
  Description of Artificial Sequence: Synthetic oligonucleotide
cuggucacccuucugaagc

SEQ ID NO: 213152 - RNA, 19 nt, Artificial Sequence
  Description of Artificial Sequence: Synthetic oligonucleotide
cucgaacacaucugaagcg

SEQ ID NO: 213153 - RNA, 19 nt, Artificial Sequence
  Description of Artificial Sequence: Synthetic oligonucleotide
ggguuuauggcguaugcgg

SEQ ID NO: 213154 - RNA, 19 nt, Artificial Sequence
  Description of Artificial Sequence: Synthetic oligonucleotide
aauaagguguggauuucag

SEQ ID NO: 213155 - RNA, 19 nt, Artificial Sequence
  Description of Artificial Sequence: Synthetic oligonucleotide
auuucaaccggaacgauga

SEQ ID NO: 213156 - RNA, 19 nt, Artificial Sequence
  Description of Artificial Sequence: Synthetic oligonucleotide
uuucgucuagaucaaugac

SEQ ID NO: 213157 - RNA, 19 nt, Artificial Sequence
  Description of Artificial Sequence: Synthetic oligonucleotide
ggaaucaacacacagcaga

SEQ ID NO: 213158 - RNA, 19 nt, Artificial Sequence
  Description of Artificial Sequence: Synthetic oligonucleotide
guuuugguaaggugggaag

SEQ ID NO: 213159 - RNA, 19 nt, Artificial Sequence
  Description of Artificial Sequence: Synthetic oligonucleotide
uuuggcuaaggagauggag

SEQ ID NO: 213160 - RNA, 19 nt, Artificial Sequence
  Description of Artificial Sequence: Synthetic oligonucleotide
uggcuaaggagauggagug

SEQ ID NO: 213161 - RNA, 19 nt, Artificial Sequence
  Description of Artificial Sequence: Synthetic oligonucleotide
aaccucacacacucgucuc

SEQ ID NO: 213162 - RNA, 19 nt, Artificial Sequence
  Description of Artificial Sequence: Synthetic oligonucleotide
ugacuguugcuaucugugg

SEQ ID NO: 213163 - RNA, 19 nt, Artificial Sequence
  Description of Artificial Sequence: Synthetic oligonucleotide
gagcaaauggaagacggag

SEQ ID NO: 213164 - RNA, 19 nt, Artificial Sequence
  Description of Artificial Sequence: Synthetic oligonucleotide
agaagggaaugccacaccu

SEQ ID NO: 213165 - RNA, 19 nt, Artificial Sequence
  Description of Artificial Sequence: Synthetic oligonucleotide
ggaguuuggucaaauaagg

SEQ ID NO: 213166 - RNA, 19 nt, Artificial Sequence
  Description of Artificial Sequence: Synthetic oligonucleotide
aauacccguauucaccuua

SEQ ID NO: 213167 - RNA, 19 nt, Artificial Sequence
  Description of Artificial Sequence: Synthetic oligonucleotide
gacuguugcuaucuguggc

SEQ ID NO: 213168 - RNA, 19 nt, Artificial Sequence
  Description of Artificial Sequence: Synthetic oligonucleotide
uguaugguuccaucgauuu

SEQ ID NO: 213169 - RNA, 19 nt, Artificial Sequence
  Description of Artificial Sequence: Synthetic oligonucleotide
cuaaugggcuuaaaugaac

SEQ ID NO: 213170 - RNA, 19 nt, Artificial Sequence
  Description of Artificial Sequence: Synthetic oligonucleotide
ugcguacuuggccaaacug

SEQ ID NO: 213171 - RNA, 19 nt, Artificial Sequence
  Description of Artificial Sequence: Synthetic oligonucleotide
agacggagcacuaacauca

SEQ ID NO: 213172 - RNA, 19 nt, Artificial Sequence
  Description of Artificial Sequence: Synthetic oligonucleotide
aggacggugguccugacgu

SEQ ID NO: 213173 - RNA, 19 nt, Artificial Sequence
  Description of Artificial Sequence: Synthetic oligonucleotide
ugaagcgaagcacuauuuc

SEQ ID NO: 213174 - RNA, 19 nt, Artificial Sequence
  Description of Artificial Sequence: Synthetic oligonucleotide
caggaagucgcacucgagg

SEQ ID NO: 213175 - RNA, 19 nt, Artificial Sequence
  Description of Artificial Sequence: Synthetic oligonucleotide
aaggguuccagagcaaaug

SEQ ID NO: 213176 - RNA, 19 nt, Artificial Sequence
  Description of Artificial Sequence: Synthetic oligonucleotide
auuacuggguuuggaacac

SEQ ID NO: 213177 - RNA, 19 nt, Artificial Sequence
  Description of Artificial Sequence: Synthetic oligonucleotide
cuuguuagugccaacaacu

SEQ ID NO: 213178 - RNA, 19 nt, Artificial Sequence
  Description of Artificial Sequence: Synthetic oligonucleotide
ggucagauguuucuuuugg

SEQ ID NO: 213179 - RNA, 19 nt, Artificial Sequence
  Description of Artificial Sequence: Synthetic oligonucleotide
ucuuaggacgaaacacagc

SEQ ID NO: 213180 - RNA, 19 nt, Artificial Sequence
  Description of Artificial Sequence: Synthetic oligonucleotide
uggaagacggagcacuaac

SEQ ID NO: 213181 - RNA, 19 nt, Artificial Sequence
  Description of Artificial Sequence: Synthetic oligonucleotide
guuucgucuagaucaauga

SEQ ID NO: 213182 - RNA, 19 nt, Artificial Sequence
  Description of Artificial Sequence: Synthetic oligonucleotide
cuucucuaacccuuggcug

SEQ ID NO: 213183 - RNA, 19 nt, Artificial Sequence
  Description of Artificial Sequence: Synthetic oligonucleotide
caugaaggguuccagagca

SEQ ID NO: 213184 - RNA, 19 nt, Artificial Sequence
  Description of Artificial Sequence: Synthetic oligonucleotide
uuucuacugugauuggcac

SEQ ID NO: 213185 - RNA, 19 nt, Artificial Sequence
  Description of Artificial Sequence: Synthetic oligonucleotide
ucugaagcgaagcacuauu

SEQ ID NO: 213186 - RNA, 19 nt, Artificial Sequence
  Description of Artificial Sequence: Synthetic oligonucleotide
agcgaagcacuauuucuag

SEQ ID NO: 213187 - RNA, 19 nt, Artificial Sequence
  Description of Artificial Sequence: Synthetic oligonucleotide
ugcuccgagagcacaaaca

SEQ ID NO: 213188 - RNA, 19 nt, Artificial Sequence
  Description of Artificial Sequence: Synthetic oligonucleotide
agaggcacaaacgucacga

SEQ ID NO: 213189 - RNA, 19 nt, Artificial Sequence
  Description of Artificial Sequence: Synthetic oligonucleotide
cuugguacgggaaugaccu

SEQ ID NO: 213190 - RNA, 19 nt, Artificial Sequence
  Description of Artificial Sequence: Synthetic oligonucleotide
gcuuaaaugaacugugcac

SEQ ID NO: 213191 - RNA, 19 nt, Artificial Sequence
  Description of Artificial Sequence: Synthetic oligonucleotide
aaccggaacgaugaaguca

SEQ ID NO: 213192 - RNA, 19 nt, Artificial Sequence
  Description of Artificial Sequence: Synthetic oligonucleotide
aguguuugaccaacagggc

SEQ ID NO: 213193 - RNA, 19 nt, Artificial Sequence
  Description of Artificial Sequence: Synthetic oligonucleotide
ucaacugccauuggugaca

SEQ ID NO: 213194 - RNA, 19 nt, Artificial Sequence
  Description of Artificial Sequence: Synthetic oligonucleotide
ugcggaucugccaugugac

SEQ ID NO: 213195 - RNA, 19 nt, Artificial Sequence
  Description of Artificial Sequence: Synthetic oligonucleotide
aagagucgggcccggaaca

SEQ ID NO: 213196 - RNA, 19 nt, Artificial Sequence
  Description of Artificial Sequence: Synthetic oligonucleotide
ucaaccccuggcaugccag

SEQ ID NO: 213197 - RNA, 19 nt, Artificial Sequence
  Description of Artificial Sequence: Synthetic oligonucleotide
uaaggcccgagacacuggc

SEQ ID NO: 213198 - RNA, 19 nt, Artificial Sequence
  Description of Artificial Sequence: Synthetic oligonucleotide
uucaaccggaacgaugaag

SEQ ID NO: 213199 - RNA, 19 nt, Artificial Sequence
  Description of Artificial Sequence: Synthetic oligonucleotide
auagucgagcaccgucacc

SEQ ID NO: 213200 - RNA, 19 nt, Artificial Sequence
  Description of Artificial Sequence: Synthetic oligonucleotide
ucgaacacaucugaagcga

SEQ ID NO: 213201 - RNA, 19 nt, Artificial Sequence
  Description of Artificial Sequence: Synthetic oligonucleotide
caucaaaccaggacugcac

SEQ ID NO: 213202 - RNA, 19 nt, Artificial Sequence
  Description of Artificial Sequence: Synthetic oligonucleotide
guugcagaccuucacguca

SEQ ID NO: 213203 - RNA, 19 nt, Artificial Sequence
  Description of Artificial Sequence: Synthetic oligonucleotide
aggaagucgcacucgaggu

SEQ ID NO: 213204 - RNA, 19 nt, Artificial Sequence
  Description of Artificial Sequence: Synthetic oligonucleotide
ccaugcuuagcaaaggggc

SEQ ID NO: 213205 - RNA, 19 nt, Artificial Sequence
  Description of Artificial Sequence: Synthetic oligonucleotide
aaggcagcgggauuggcua

SEQ ID NO: 213206 - RNA, 19 nt, Artificial Sequence
  Description of Artificial Sequence: Synthetic oligonucleotide
agaggcacaggcgaugauc

SEQ ID NO: 213207 - RNA, 19 nt, Artificial Sequence
  Description of Artificial Sequence: Synthetic oligonucleotide
gaggguuuauggcguaugc

SEQ ID NO: 213208 - RNA, 19 nt, Artificial Sequence
  Description of Artificial Sequence: Synthetic oligonucleotide
acgggaaugaccugccucu

SEQ ID NO: 213209 - RNA, 19 nt, Artificial Sequence
  Description of Artificial Sequence: Synthetic oligonucleotide
acccguauucaccuuaaga

SEQ ID NO: 213210 - RNA, 19 nt, Artificial Sequence
  Description of Artificial Sequence: Synthetic oligonucleotide
aagauaggccagguaguag

SEQ ID NO: 213211 - RNA, 19 nt, Artificial Sequence
  Description of Artificial Sequence: Synthetic oligonucleotide
uucucaaccccuggcaugc

SEQ ID NO: 213212 - RNA, 19 nt, Artificial Sequence
  Description of Artificial Sequence: Synthetic oligonucleotide
uguggauuucagaacccuc

SEQ ID NO: 213213 - RNA, 19 nt, Artificial Sequence
  Description of Artificial Sequence: Synthetic oligonucleotide
accggaacgaugaagucag

SEQ ID NO: 213214 - RNA, 19 nt, Artificial Sequence
  Description of Artificial Sequence: Synthetic oligonucleotide
uccaucgauuucaaccgga

SEQ ID NO: 213215 - RNA, 19 nt, Artificial Sequence
  Description of Artificial Sequence: Synthetic oligonucleotide
agaaagucaggagaucuga

SEQ ID NO: 213216 - RNA, 19 nt, Artificial Sequence
  Description of Artificial Sequence: Synthetic oligonucleotide
agcuagugcaggaagccac

SEQ ID NO: 213217 - RNA, 19 nt, Artificial Sequence
  Description of Artificial Sequence: Synthetic oligonucleotide
uguuuugguaaggugggaa

SEQ ID NO: 213218 - RNA, 19 nt, Artificial Sequence
  Description of Artificial Sequence: Synthetic oligonucleotide
acgaguguuugaccaacag

SEQ ID NO: 213219 - RNA, 19 nt, Artificial Sequence
  Description of Artificial Sequence: Synthetic oligonucleotide
gaagagucgggcccggaac

SEQ ID NO: 213220 - RNA, 19 nt, Artificial Sequence
  Description of Artificial Sequence: Synthetic oligonucleotide
ugaccacacauuucuuccc

SEQ ID NO: 213221 - RNA, 19 nt, Artificial Sequence
  Description of Artificial Sequence: Synthetic oligonucleotide
acggagcacuaacaucacc

SEQ ID NO: 213222 - RNA, 19 nt, Artificial Sequence
  Description of Artificial Sequence: Synthetic oligonucleotide
cuacgucuguucugaaugc

SEQ ID NO: 213223 - RNA, 19 nt, Artificial Sequence
  Description of Artificial Sequence: Synthetic oligonucleotide
ggugcugacacaaaaggac

SEQ ID NO: 213224 - RNA, 19 nt, Artificial Sequence
  Description of Artificial Sequence: Synthetic oligonucleotide
aggggcgaagcacacuggg

SEQ ID NO: 213225 - RNA, 19 nt, Artificial Sequence
  Description of Artificial Sequence: Synthetic oligonucleotide
caugcuguaccacgacgcg

SEQ ID NO: 213226 - RNA, 19 nt, Artificial Sequence
  Description of Artificial Sequence: Synthetic oligonucleotide
uacgggaaugaccugccuc

SEQ ID NO: 213227 - RNA, 19 nt, Artificial Sequence
  Description of Artificial Sequence: Synthetic oligonucleotide
gacaggcgguguuauuagg

SEQ ID NO: 213228 - RNA, 19 nt, Artificial Sequence
  Description of Artificial Sequence: Synthetic oligonucleotide
ugguacgggaaugaccugc

SEQ ID NO: 213229 - RNA, 19 nt, Artificial Sequence
  Description of Artificial Sequence: Synthetic oligonucleotide
aaucaacacacagcagaca

SEQ ID NO: 213230 - RNA, 19 nt, Artificial Sequence
  Description of Artificial Sequence: Synthetic oligonucleotide
uucuacugugauuggcaca

SEQ ID NO: 213231 - RNA, 19 nt, Artificial Sequence
  Description of Artificial Sequence: Synthetic oligonucleotide
uuauggcguaugcggaucu

SEQ ID NO: 213232 - RNA, 19 nt, Artificial Sequence
  Description of Artificial Sequence: Synthetic oligonucleotide
ucgaggucaugcaaacagu

SEQ ID NO: 213233 - RNA, 19 nt, Artificial Sequence
  Description of Artificial Sequence: Synthetic oligonucleotide
cuaacaucaccagggucgg

SEQ ID NO: 213234 - RNA, 19 nt, Artificial Sequence
  Description of Artificial Sequence: Synthetic oligonucleotide
cacaccagagugguguugg

SEQ ID NO: 213235 - RNA, 19 nt, Artificial Sequence
  Description of Artificial Sequence: Synthetic oligonucleotide
caagacacuuaaggcagcg

SEQ ID NO: 213236 - RNA, 19 nt, Artificial Sequence
  Description of Artificial Sequence: Synthetic oligonucleotide
ucaagcgagacuggagagc

SEQ ID NO: 213237 - RNA, 19 nt, Artificial Sequence
  Description of Artificial Sequence: Synthetic oligonucleotide
acgcgcuagugucaugugg

SEQ ID NO: 213238 - RNA, 19 nt, Artificial Sequence
  Description of Artificial Sequence: Synthetic oligonucleotide
ucugaugaucccugccuac

SEQ ID NO: 213239 - RNA, 19 nt, Artificial Sequence
  Description of Artificial Sequence: Synthetic oligonucleotide
aggguuuauggcguaugcg

SEQ ID NO: 213240 - RNA, 19 nt, Artificial Sequence
  Description of Artificial Sequence: Synthetic oligonucleotide
guuucuacugugauuggca

SEQ ID NO: 213241 - RNA, 19 nt, Artificial Sequence
  Description of Artificial Sequence: Synthetic oligonucleotide
augcggaucugccauguga

SEQ ID NO: 213242 - RNA, 19 nt, Artificial Sequence
  Description of Artificial Sequence: Synthetic oligonucleotide
uccguguccgucaugucau

SEQ ID NO: 213243 - RNA, 19 nt, Artificial Sequence
  Description of Artificial Sequence: Synthetic oligonucleotide
uggcguaugcggaucugcc

SEQ ID NO: 213244 - RNA, 19 nt, Artificial Sequence
  Description of Artificial Sequence: Synthetic oligonucleotide
ccuacgucuguucugaaug

SEQ ID NO: 213245 - RNA, 19 nt, Artificial Sequence
  Description of Artificial Sequence: Synthetic oligonucleotide
gaagucgcacucgagguca

SEQ ID NO: 213246 - RNA, 19 nt, Artificial Sequence
  Description of Artificial Sequence: Synthetic oligonucleotide
ucuaggacggugguccuga

SEQ ID NO: 213247 - RNA, 19 nt, Artificial Sequence
  Description of Artificial Sequence: Synthetic oligonucleotide
ucccugucaacugccauug

SEQ ID NO: 213248 - RNA, 19 nt, Artificial Sequence
  Description of Artificial Sequence: Synthetic oligonucleotide
augcuguauacaucguccu

SEQ ID NO: 213249 - RNA, 19 nt, Artificial Sequence
  Description of Artificial Sequence: Synthetic oligonucleotide
gaucugaugaucccugccu

SEQ ID NO: 213250 - RNA, 19 nt, Artificial Sequence
  Description of Artificial Sequence: Synthetic oligonucleotide
cacaucugaagcgaagcac

SEQ ID NO: 213251 - RNA, 19 nt, Artificial Sequence
  Description of Artificial Sequence: Synthetic oligonucleotide
gacggugguccugacgugg

SEQ ID NO: 213252 - RNA, 19 nt, Artificial Sequence
  Description of Artificial Sequence: Synthetic oligonucleotide
aaguuugugguggcaagaa

SEQ ID NO: 213253 - RNA, 19 nt, Artificial Sequence
  Description of Artificial Sequence: Synthetic oligonucleotide
agaccaacaugaaggguuc

SEQ ID NO: 213254 - RNA, 19 nt, Artificial Sequence
  Description of Artificial Sequence: Synthetic oligonucleotide
cugaugaucccugccuacg

SEQ ID NO: 213255 - RNA, 19 nt, Artificial Sequence
  Description of Artificial Sequence: Synthetic oligonucleotide
augcuguaccacgacgcgc

SEQ ID NO: 213256 - RNA, 19 nt, Artificial Sequence
  Description of Artificial Sequence: Synthetic oligonucleotide
ugagucuuguuagugccaa

SEQ ID NO: 213257 - RNA, 19 nt, Artificial Sequence
  Description of Artificial Sequence: Synthetic oligonucleotide
caaacgucacgaguguuug

SEQ ID NO: 213258 - RNA, 19 nt, Artificial Sequence
  Description of Artificial Sequence: Synthetic oligonucleotide
cucccagcagaaauccggc

SEQ ID NO: 213259 - RNA, 19 nt, Artificial Sequence
  Description of Artificial Sequence: Synthetic oligonucleotide
ugaggguuuauggcguaug

SEQ ID NO: 213260 - RNA, 19 nt, Artificial Sequence
  Description of Artificial Sequence: Synthetic oligonucleotide
uuuauggcguaugcggauc

SEQ ID NO: 213261 - RNA, 19 nt, Artificial Sequence
  Description of Artificial Sequence: Synthetic oligonucleotide
uaccacgacgcgcuagugu

SEQ ID NO: 213262 - RNA, 19 nt, Artificial Sequence
  Description of Artificial Sequence: Synthetic oligonucleotide
caugcuuagcaaaggggca

SEQ ID NO: 213263 - RNA, 19 nt, Artificial Sequence
  Description of Artificial Sequence: Synthetic oligonucleotide
aaacgucacgaguguuuga

SEQ ID NO: 213264 - RNA, 19 nt, Artificial Sequence
  Description of Artificial Sequence: Synthetic oligonucleotide
uauguacauaaagcagacu

SEQ ID NO: 213265 - RNA, 19 nt, Artificial Sequence
  Description of Artificial Sequence: Synthetic oligonucleotide
gcagaggcgccucacauug

SEQ ID NO: 213266 - RNA, 19 nt, Artificial Sequence
  Description of Artificial Sequence: Synthetic oligonucleotide
cugugugggaaucaacaca

SEQ ID NO: 213267 - RNA, 19 nt, Artificial Sequence
  Description of Artificial Sequence: Synthetic oligonucleotide
acgugugggcgcuucagca

SEQ ID NO: 213268 - RNA, 19 nt, Artificial Sequence
  Description of Artificial Sequence: Synthetic oligonucleotide
  modified_base (14)..(14): a, c, u, g, unknown or other
ugcuacgaccccunugcuu

SEQ ID NO: 213269 - RNA, 19 nt, Artificial Sequence
  Description of Artificial Sequence: Synthetic oligonucleotide
ggcuuaaaugaacugugca

SEQ ID NO: 213270 - RNA, 19 nt, Artificial Sequence
  Description of Artificial Sequence: Synthetic oligonucleotide
cuuaaggcagcgggauugg

SEQ ID NO: 213271 - RNA, 19 nt, Artificial Sequence
  Description of Artificial Sequence: Synthetic oligonucleotide
ggaguguuuugguaaggug

SEQ ID NO: 213272 - RNA, 19 nt, Artificial Sequence
  Description of Artificial Sequence: Synthetic oligonucleotide
uaaaagcaauacccguauu

SEQ ID NO: 213273 - RNA, 19 nt, Artificial Sequence
  Description of Artificial Sequence: Synthetic oligonucleotide
agcacguauaccuggugua

SEQ ID NO: 213274 - RNA, 19 nt, Artificial Sequence
  Description of Artificial Sequence: Synthetic oligonucleotide
caccgucucaaagggaucc

SEQ ID NO: 213275 - RNA, 19 nt, Artificial Sequence
  Description of Artificial Sequence: Synthetic oligonucleotide
cuucacguaguucccacga

SEQ ID NO: 213276 - RNA, 19 nt, Artificial Sequence
  Description of Artificial Sequence: Synthetic oligonucleotide
agugguuucccagaccaaa

SEQ ID NO: 213277 - RNA, 19 nt, Artificial Sequence
  Description of Artificial Sequence: Synthetic oligonucleotide
cacucgaggucaugcaaac

SEQ ID NO: 213278 - RNA, 19 nt, Artificial Sequence
  Description of Artificial Sequence: Synthetic oligonucleotide
cucgaagaacgggaugagg

SEQ ID NO: 213279 - RNA, 19 nt, Artificial Sequence
  Description of Artificial Sequence: Synthetic oligonucleotide
ugguggcaagaacaggcuc

SEQ ID NO: 213280 - RNA, 19 nt, Artificial Sequence
  Description of Artificial Sequence: Synthetic oligonucleotide
cccguauucaccuuaagaa

SEQ ID NO: 213281 - RNA, 19 nt, Artificial Sequence
  Description of Artificial Sequence: Synthetic oligonucleotide
gcuccgagagcacaaacac

SEQ ID NO: 213282 - RNA, 19 nt, Artificial Sequence
  Description of Artificial Sequence: Synthetic oligonucleotide
gucaacugccauuggugac

SEQ ID NO: 213283 - RNA, 19 nt, Artificial Sequence
  Description of Artificial Sequence: Synthetic oligonucleotide
cauagucgagcaccgucac

SEQ ID NO: 213284 - RNA, 19 nt, Artificial Sequence
  Description of Artificial Sequence: Synthetic oligonucleotide
gguuucgucuagaucaaug

SEQ ID NO: 213285 - RNA, 19 nt, Artificial Sequence
  Description of Artificial Sequence: Synthetic oligonucleotide
aggcgccucacauuguagu

SEQ ID NO: 213286 - RNA, 19 nt, Artificial Sequence
  Description of Artificial Sequence: Synthetic oligonucleotide
aggagaucugaugaucccu

SEQ ID NO: 213287 - RNA, 19 nt, Artificial Sequence
  Description of Artificial Sequence: Synthetic oligonucleotide
caugcaaacaguguaggcu

SEQ ID NO: 213288 - RNA, 19 nt, Artificial Sequence
  Description of Artificial Sequence: Synthetic oligonucleotide
auuguccacgaugaucacu

SEQ ID NO: 213289 - RNA, 19 nt, Artificial Sequence
  Description of Artificial Sequence: Synthetic oligonucleotide
gacacuuaaggcagcggga

SEQ ID NO: 213290 - RNA, 19 nt, Artificial Sequence
  Description of Artificial Sequence: Synthetic oligonucleotide
cacauucaaagagcugccc

SEQ ID NO: 213291 - RNA, 19 nt, Artificial Sequence
  Description of Artificial Sequence: Synthetic oligonucleotide
cauuuuggaguuuggucaa

SEQ ID NO: 213292 - RNA, 19 nt, Artificial Sequence
  Description of Artificial Sequence: Synthetic oligonucleotide
uacgucuguucugaaugca

SEQ ID NO: 213293 - RNA, 19 nt, Artificial Sequence
  Description of Artificial Sequence: Synthetic oligonucleotide
caaacaguguaggcuggag

SEQ ID NO: 213294 - RNA, 19 nt, Artificial Sequence
  Description of Artificial Sequence: Synthetic oligonucleotide
uacccguauucaccuuaag

SEQ ID NO: 213295 - RNA, 19 nt, Artificial Sequence
  Description of Artificial Sequence: Synthetic oligonucleotide
agcuccguguccgucaugu

SEQ ID NO: 213296 - RNA, 19 nt, Artificial Sequence
  Description of Artificial Sequence: Synthetic oligonucleotide
aucugaugaucccugccua

SEQ ID NO: 213297 - RNA, 19 nt, Artificial Sequence
  Description of Artificial Sequence: Synthetic oligonucleotide
accgucucaaagggauccc

SEQ ID NO: 213298 - RNA, 19 nt, Artificial Sequence
  Description of Artificial Sequence: Synthetic oligonucleotide
gggauuggcuaaugacugg

SEQ ID NO: 213299 - RNA, 19 nt, Artificial Sequence
  Description of Artificial Sequence: Synthetic oligonucleotide
acacuuaaggcagcgggau

SEQ ID NO: 213300 - RNA, 19 nt, Artificial Sequence
  Description of Artificial Sequence: Synthetic oligonucleotide
ucuucauucuuaggacgaa

SEQ ID NO: 213301 - RNA, 19 nt, Artificial Sequence
  Description of Artificial Sequence: Synthetic oligonucleotide
guaugguuccaucgauuuc

SEQ ID NO: 213302 - RNA, 19 nt, Artificial Sequence
  Description of Artificial Sequence: Synthetic oligonucleotide
agcccacgguuccaagccg

SEQ ID NO: 213303 - RNA, 19 nt, Artificial Sequence
  Description of Artificial Sequence: Synthetic oligonucleotide
cagaccaacaugaaggguu

SEQ ID NO: 213304 - RNA, 19 nt, Artificial Sequence
  Description of Artificial Sequence: Synthetic oligonucleotide
gaagauaggccagguagua

SEQ ID NO: 213305 - RNA, 19 nt, Artificial Sequence
  Description of Artificial Sequence: Synthetic oligonucleotide
ggcgguguuauuaggacac

SEQ ID NO: 213306 - RNA, 19 nt, Artificial Sequence
  Description of Artificial Sequence: Synthetic oligonucleotide
agcagaaauccggcugagg

SEQ ID NO: 213307 - RNA, 19 nt, Artificial Sequence
  Description of Artificial Sequence: Synthetic oligonucleotide
gccaugcuuagcaaagggg

SEQ ID NO: 213308 - RNA, 19 nt, Artificial Sequence
  Description of Artificial Sequence: Synthetic oligonucleotide
  modified_base (13)..(13): a, c, u, g, unknown or other
gcuacgaccccunugcuuc

SEQ ID NO: 213309 - RNA, 19 nt, Artificial Sequence
  Description of Artificial Sequence: Synthetic oligonucleotide
gaacacgccccagcggucc

SEQ ID NO: 213310 - RNA, 19 nt, Artificial Sequence
  Description of Artificial Sequence: Synthetic oligonucleotide
ggcgcuucagcacguauac

SEQ ID NO: 213311 - RNA, 19 nt, Artificial Sequence
  Description of Artificial Sequence: Synthetic oligonucleotide
caauggugcugacacaaaa

SEQ ID NO: 213312 - RNA, 19 nt, Artificial Sequence
  Description of Artificial Sequence: Synthetic oligonucleotide
uuucaaccggaacgaugaa

SEQ ID NO: 213313 - RNA, 19 nt, Artificial Sequence
  Description of Artificial Sequence: Synthetic oligonucleotide
acccgagacauuccaaguu

SEQ ID NO: 213314 - RNA, 19 nt, Artificial Sequence
  Description of Artificial Sequence: Synthetic oligonucleotide
agaaagccgcacaugcugu

SEQ ID NO: 213315 - RNA, 19 nt, Artificial Sequence
  Description of Artificial Sequence: Synthetic oligonucleotide
ucugcguacuuggccaaac

SEQ ID NO: 213316 - RNA, 19 nt, Artificial Sequence
  Description of Artificial Sequence: Synthetic oligonucleotide
cagaggcacaaacgucacg

SEQ ID NO: 213317 - RNA, 19 nt, Artificial Sequence
  Description of Artificial Sequence: Synthetic oligonucleotide
ucgggcccggaacacgccc

SEQ ID NO: 213318 - RNA, 19 nt, Artificial Sequence
  Description of Artificial Sequence: Synthetic oligonucleotide
aauggaagacggagcacua

SEQ ID NO: 213319 - RNA, 19 nt, Artificial Sequence
  Description of Artificial Sequence: Synthetic oligonucleotide
acaaacgucacgaguguuu

SEQ ID NO: 213320 - RNA, 19 nt, Artificial Sequence
  Description of Artificial Sequence: Synthetic oligonucleotide
cuccguguccgucauguca

SEQ ID NO: 213321 - RNA, 19 nt, Artificial Sequence
  Description of Artificial Sequence: Synthetic oligonucleotide
caaauggaagacggagcac

SEQ ID NO: 213322 - RNA, 19 nt, Artificial Sequence
  Description of Artificial Sequence: Synthetic oligonucleotide
cgaguguuugaccaacagg

SEQ ID NO: 213323 - RNA, 19 nt, Artificial Sequence
  Description of Artificial Sequence: Synthetic oligonucleotide
cucacauuguagucucgga

SEQ ID NO: 213324 - RNA, 19 nt, Artificial Sequence
  Description of Artificial Sequence: Synthetic oligonucleotide
agagucgggcccggaacac

SEQ ID NO: 213325 - RNA, 19 nt, Artificial Sequence
  Description of Artificial Sequence: Synthetic oligonucleotide
gugucauguggacauccuc

SEQ ID NO: 213326 - RNA, 19 nt, Artificial Sequence
  Description of Artificial Sequence: Synthetic oligonucleotide
ggagaucugaugaucccug

SEQ ID NO: 213327 - RNA, 19 nt, Artificial Sequence
  Description of Artificial Sequence: Synthetic oligonucleotide
ucgcacucgaggucaugca

SEQ ID NO: 213328 - RNA, 19 nt, Artificial Sequence
  Description of Artificial Sequence: Synthetic oligonucleotide
guaaggugggaagaaauau

SEQ ID NO: 213329 - RNA, 19 nt, Artificial Sequence
  Description of Artificial Sequence: Synthetic oligonucleotide
ucucuaacccuuggcugga

SEQ ID NO: 213330 - RNA, 19 nt, Artificial Sequence
  Description of Artificial Sequence: Synthetic oligonucleotide
gcgaagcacuauuucuagg

SEQ ID NO: 213331 - RNA, 19 nt, Artificial Sequence
  Description of Artificial Sequence: Synthetic oligonucleotide
cacguauaccugguguaug

SEQ ID NO: 213332 - RNA, 19 nt, Artificial Sequence
  Description of Artificial Sequence: Synthetic oligonucleotide
agagcaaauggaagacgga

SEQ ID NO: 213333 - RNA, 19 nt, Artificial Sequence
  Description of Artificial Sequence: Synthetic oligonucleotide
caaccggaacgaugaaguc

SEQ ID NO: 213334 - RNA, 19 nt, Artificial Sequence
  Description of Artificial Sequence: Synthetic oligonucleotide
caccaaacugggaacccca

SEQ ID NO: 213335 - RNA, 19 nt, Artificial Sequence
  Description of Artificial Sequence: Synthetic oligonucleotide
acagaccaacaugaagggu

SEQ ID NO: 213336 - RNA, 19 nt, Artificial Sequence
  Description of Artificial Sequence: Synthetic oligonucleotide
uugguacgggaaugaccug

SEQ ID NO: 213337 - RNA, 19 nt, Artificial Sequence
  Description of Artificial Sequence: Synthetic oligonucleotide
uauggcguaugcggaucug

SEQ ID NO: 213338 - RNA, 19 nt, Artificial Sequence
  Description of Artificial Sequence: Synthetic oligonucleotide
gaguuuggucaaauaaggu

SEQ ID NO: 213339 - RNA, 19 nt, Artificial Sequence
  Description of Artificial Sequence: Synthetic oligonucleotide
ccacccgagacauuccaag

SEQ ID NO: 213340 - RNA, 19 nt, Artificial Sequence
  Description of Artificial Sequence: Synthetic oligonucleotide
ccaaauaaggcccgagaca

SEQ ID NO: 213341 - RNA, 19 nt, Artificial Sequence
  Description of Artificial Sequence: Synthetic oligonucleotide
gacgcgcuagugucaugug

SEQ ID NO: 213342 - RNA, 19 nt, Artificial Sequence
  Description of Artificial Sequence: Synthetic oligonucleotide
gagucgggcccggaacacg

SEQ ID NO: 213343 - RNA, 19 nt, Artificial Sequence
  Description of Artificial Sequence: Synthetic oligonucleotide
  modified_base (17)..(17): a, c, u, g, unknown or other
ggaugcuacgaccccunug

SEQ ID NO: 213344 - RNA, 19 nt, Artificial Sequence
  Description of Artificial Sequence: Synthetic oligonucleotide
gcuugguacgggaaugacc

SEQ ID NO: 213345 - RNA, 19 nt, Artificial Sequence
  Description of Artificial Sequence: Synthetic oligonucleotide
caacugccauuggugacag

SEQ ID NO: 213346 - RNA, 19 nt, Artificial Sequence
  Description of Artificial Sequence: Synthetic oligonucleotide
gguuuauggcguaugcgga

SEQ ID NO: 213347 - RNA, 19 nt, Artificial Sequence
  Description of Artificial Sequence: Synthetic oligonucleotide
cgggauuggcuaaugacug

SEQ ID NO: 213348 - RNA, 19 nt, Artificial Sequence
  Description of Artificial Sequence: Synthetic oligonucleotide
gaggcgccucacauuguag

SEQ ID NO: 213349 - RNA, 19 nt, Artificial Sequence
  Description of Artificial Sequence: Synthetic oligonucleotide
ggccacggguucucaagcg

SEQ ID NO: 213350 - RNA, 19 nt, Artificial Sequence
  Description of Artificial Sequence: Synthetic oligonucleotide
agggauuacuggguuugga

SEQ ID NO: 213351 - RNA, 19 nt, Artificial Sequence
  Description of Artificial Sequence: Synthetic oligonucleotide
aacacgccccagcggucca

SEQ ID NO: 213352 - RNA, 19 nt, Artificial Sequence
  Description of Artificial Sequence: Synthetic oligonucleotide
acgguuccaagccguccug

SEQ ID NO: 213353 - RNA, 19 nt, Artificial Sequence
  Description of Artificial Sequence: Synthetic oligonucleotide
ugcccacccgagacauucc

SEQ ID NO: 213354 - RNA, 19 nt, Artificial Sequence
  Description of Artificial Sequence: Synthetic oligonucleotide
cuucacgucaaaagcacuu

SEQ ID NO: 213355 - RNA, 19 nt, Artificial Sequence
  Description of Artificial Sequence: Synthetic oligonucleotide
gaaagccgcacaugcugua

SEQ ID NO: 213356 - RNA, 19 nt, Artificial Sequence
  Description of Artificial Sequence: Synthetic oligonucleotide
gucucccaucuagacaggc

SEQ ID NO: 213357 - RNA, 19 nt, Artificial Sequence
  Description of Artificial Sequence: Synthetic oligonucleotide
ggaacgaugaagucagcau

SEQ ID NO: 213358 - RNA, 19 nt, Artificial Sequence
  Description of Artificial Sequence: Synthetic oligonucleotide
gguguuauuaggacacaaa

SEQ ID NO: 213359 - RNA, 19 nt, Artificial Sequence
  Description of Artificial Sequence: Synthetic oligonucleotide
ugugcuccgagagcacaaa

SEQ ID NO: 213360 - RNA, 19 nt, Artificial Sequence
  Description of Artificial Sequence: Synthetic oligonucleotide
guuuauggcguaugcggau

SEQ ID NO: 213361 - RNA, 19 nt, Artificial Sequence
  Description of Artificial Sequence: Synthetic oligonucleotide
gguguggauuucagaaccc

SEQ ID NO: 213362 - RNA, 19 nt, Artificial Sequence
  Description of Artificial Sequence: Synthetic oligonucleotide
  modified_base (15)..(15): a, c, u, g, unknown or other
augcuacgaccccunugcu

SEQ ID NO: 213363 - RNA, 19 nt, Artificial Sequence
  Description of Artificial Sequence: Synthetic oligonucleotide
cagggauuacuggguuugg

SEQ ID NO: 213364 - RNA, 19 nt, Artificial Sequence
  Description of Artificial Sequence: Synthetic oligonucleotide
gaacgggaugagguccagc

SEQ ID NO: 213365 - RNA, 19 nt, Artificial Sequence
  Description of Artificial Sequence: Synthetic oligonucleotide
caucaccagggucggggug

SEQ ID NO: 213366 - RNA, 19 nt, Artificial Sequence
  Description of Artificial Sequence: Synthetic oligonucleotide
gcuaaugggcuuaaaugaa

SEQ ID NO: 213367 - RNA, 19 nt, Artificial Sequence
  Description of Artificial Sequence: Synthetic oligonucleotide
ccuucacguaguucccacg

SEQ ID NO: 213368 - RNA, 19 nt, Artificial Sequence
  Description of Artificial Sequence: Synthetic oligonucleotide
gguacgggaaugaccugcc

SEQ ID NO: 213369 - RNA, 19 nt, Artificial Sequence
  Description of Artificial Sequence: Synthetic oligonucleotide
aucugaagcgaagcacuau

SEQ ID NO: 213370 - RNA, 19 nt, Artificial Sequence
  Description of Artificial Sequence: Synthetic oligonucleotide
uuggagcagugagucuccc

SEQ ID NO: 213371 - RNA, 19 nt, Artificial Sequence
  Description of Artificial Sequence: Synthetic oligonucleotide
aagcgagacuggagagcuc

SEQ ID NO: 213372 - RNA, 19 nt, Artificial Sequence
  Description of Artificial Sequence: Synthetic oligonucleotide
cuagaucaaugaccacaca

SEQ ID NO: 213373 - RNA, 19 nt, Artificial Sequence
  Description of Artificial Sequence: Synthetic oligonucleotide
gucacgaguguuugaccaa

SEQ ID NO: 213374 - RNA, 19 nt, Artificial Sequence
  Description of Artificial Sequence: Synthetic oligonucleotide
uuuagcuggugggcuuggu

SEQ ID NO: 213375 - RNA, 19 nt, Artificial Sequence
  Description of Artificial Sequence: Synthetic oligonucleotide
aguguaggcuggagcccac

SEQ ID NO: 213376 - RNA, 19 nt, Artificial Sequence
  Description of Artificial Sequence: Synthetic oligonucleotide
ccgagacauuccaaguuug

SEQ ID NO: 213377 - RNA, 19 nt, Artificial Sequence
  Description of Artificial Sequence: Synthetic oligonucleotide
caagcgagacuggagagcu

SEQ ID NO: 213378 - RNA, 19 nt, Artificial Sequence
  Description of Artificial Sequence: Synthetic oligonucleotide
gugcuccgagagcacaaac

SEQ ID NO: 213379 - RNA, 19 nt, Artificial Sequence
  Description of Artificial Sequence: Synthetic oligonucleotide
ccacggguucucaagcgag

SEQ ID NO: 213380 - RNA, 19 nt, Artificial Sequence
  Description of Artificial Sequence: Synthetic oligonucleotide
ugggcgcuucagcacguau

SEQ ID NO: 213381 - RNA, 19 nt, Artificial Sequence
  Description of Artificial Sequence: Synthetic oligonucleotide
cuguaccacgacgcgcuag

SEQ ID NO: 213382 - RNA, 19 nt, Artificial Sequence
  Description of Artificial Sequence: Synthetic oligonucleotide
ucuccggauggaagaugua

SEQ ID NO: 213383 - RNA, 19 nt, Artificial Sequence
  Description of Artificial Sequence: Synthetic oligonucleotide
gacugcggugagaagggaa

SEQ ID NO: 213384 - RNA, 19 nt, Artificial Sequence
  Description of Artificial Sequence: Synthetic oligonucleotide
gacggagcacuaacaucac

SEQ ID NO: 213385 - RNA, 19 nt, Artificial Sequence
  Description of Artificial Sequence: Synthetic oligonucleotide
ccguauucaccuuaagaaa

SEQ ID NO: 213386 - RNA, 19 nt, Artificial Sequence
  Description of Artificial Sequence: Synthetic oligonucleotide
gguaaggugggaagaaaua

SEQ ID NO: 213387 - RNA, 19 nt, Artificial Sequence
  Description of Artificial Sequence: Synthetic oligonucleotide
gugcugacacaaaaggacu

SEQ ID NO: 213388 - RNA, 19 nt, Artificial Sequence
  Description of Artificial Sequence: Synthetic oligonucleotide
aggaggucagauguuucuu

SEQ ID NO: 213389 - RNA, 19 nt, Artificial Sequence
  Description of Artificial Sequence: Synthetic oligonucleotide
cauugucuacaaacagcua

SEQ ID NO: 213390 - RNA, 19 nt, Artificial Sequence
  Description of Artificial Sequence: Synthetic oligonucleotide
auacccguauucaccuuaa

SEQ ID NO: 213391 - RNA, 19 nt, Artificial Sequence
  Description of Artificial Sequence: Synthetic oligonucleotide
cacggguucucaagcgaga

SEQ ID NO: 213392 - RNA, 19 nt, Artificial Sequence
  Description of Artificial Sequence: Synthetic oligonucleotide
cuagugucauguggacauc

SEQ ID NO: 213393 - RNA, 19 nt, Artificial Sequence
  Description of Artificial Sequence: Synthetic oligonucleotide
ggggcgaagcacacugggg

SEQ ID NO: 213394 - RNA, 19 nt, Artificial Sequence
  Description of Artificial Sequence: Synthetic oligonucleotide
ugacugcggugagaaggga

SEQ ID NO: 213395 - RNA, 19 nt, Artificial Sequence
  Description of Artificial Sequence: Synthetic oligonucleotide
gcggugagaagggaaugcc

SEQ ID NO: 213396 - RNA, 19 nt, Artificial Sequence
  Description of Artificial Sequence: Synthetic oligonucleotide
cagcacguauaccuggugu

SEQ ID NO: 213397 - RNA, 19 nt, Artificial Sequence
  Description of Artificial Sequence: Synthetic oligonucleotide
cgucacgaguguuugacca

SEQ ID NO: 213398 - RNA, 19 nt, Artificial Sequence
  Description of Artificial Sequence: Synthetic oligonucleotide
gagaauuguccacgaugau

SEQ ID NO: 213399 - RNA, 19 nt, Artificial Sequence
  Description of Artificial Sequence: Synthetic oligonucleotide
acgaaacacagcacugcua

SEQ ID NO: 213400 - RNA, 19 nt, Artificial Sequence
  Description of Artificial Sequence: Synthetic oligonucleotide
ggcguaugcggaucugcca

SEQ ID NO: 213401 - RNA, 19 nt, Artificial Sequence
  Description of Artificial Sequence: Synthetic oligonucleotide
aaauccggcugaggcccaa

SEQ ID NO: 213402 - RNA, 19 nt, Artificial Sequence
  Description of Artificial Sequence: Synthetic oligonucleotide
ccgucaugucaucaaacca

SEQ ID NO: 213403 - RNA, 19 nt, Artificial Sequence
  Description of Artificial Sequence: Synthetic oligonucleotide
cuaggacggugguccugac

SEQ ID NO: 213404 - RNA, 19 nt, Artificial Sequence
  Description of Artificial Sequence: Synthetic oligonucleotide
gaaggguuccagagcaaau

SEQ ID NO: 213405 - RNA, 19 nt, Artificial Sequence
  Description of Artificial Sequence: Synthetic oligonucleotide
ggaagauaggccagguagu

SEQ ID NO: 213406 - RNA, 19 nt, Artificial Sequence
  Description of Artificial Sequence: Synthetic oligonucleotide
cugaagcgaagcacuauuu

SEQ ID NO: 213407 - RNA, 19 nt, Artificial Sequence
  Description of Artificial Sequence: Synthetic oligonucleotide
guaggcuggagcccacggu

SEQ ID NO: 213408 - RNA, 19 nt, Artificial Sequence
  Description of Artificial Sequence: Synthetic oligonucleotide
cacgguuccaagccguccu

SEQ ID NO: 213409 - RNA, 19 nt, Artificial Sequence
  Description of Artificial Sequence: Synthetic oligonucleotide
ggauuggcuaaugacuggu

SEQ ID NO: 213410 - RNA, 19 nt, Artificial Sequence
  Description of Artificial Sequence: Synthetic oligonucleotide
gcuaaugacugguuuccau

SEQ ID NO: 213411 - RNA, 19 nt, Artificial Sequence
  Description of Artificial Sequence: Synthetic oligonucleotide
cccucgaagaacgggauga

SEQ ID NO: 213412 - RNA, 19 nt, Artificial Sequence
  Description of Artificial Sequence: Synthetic oligonucleotide
caugaggguuuauggcgua

SEQ ID NO: 213413 - RNA, 19 nt, Artificial Sequence
  Description of Artificial Sequence: Synthetic oligonucleotide
ucccauagucgagcaccgu

SEQ ID NO: 213414 - RNA, 19 nt, Artificial Sequence
  Description of Artificial Sequence: Synthetic oligonucleotide
gcgggauuggcuaaugacu

SEQ ID NO: 213415 - RNA, 19 nt, Artificial Sequence
  Description of Artificial Sequence: Synthetic oligonucleotide
cauuuacaaguaacugauu

SEQ ID NO: 213416 - RNA, 19 nt, Artificial Sequence
  Description of Artificial Sequence: Synthetic oligonucleotide
gaaauccggcugaggccca

SEQ ID NO: 213417 - RNA, 19 nt, Artificial Sequence
  Description of Artificial Sequence: Synthetic oligonucleotide
guaugcggaucugccaugu

SEQ ID NO: 213418 - RNA, 19 nt, Artificial Sequence
  Description of Artificial Sequence: Synthetic oligonucleotide
cagcgggauuggcuaauga

SEQ ID NO: 213419 - RNA, 19 nt, Artificial Sequence
  Description of Artificial Sequence: Synthetic oligonucleotide
aggcagcgggauuggcuaa

SEQ ID NO: 213420 - RNA, 19 nt, Artificial Sequence
  Description of Artificial Sequence: Synthetic oligonucleotide
gaucccugccuacgucugu

SEQ ID NO: 213421 - RNA, 19 nt, Artificial Sequence
  Description of Artificial Sequence: Synthetic oligonucleotide
ugccuacgucuguucugaa

SEQ ID NO: 213422 - RNA, 19 nt, Artificial Sequence
  Description of Artificial Sequence: Synthetic oligonucleotide
aucccugccuacgucuguu

SEQ ID NO: 213423 - RNA, 19 nt, Artificial Sequence
  Description of Artificial Sequence: Synthetic oligonucleotide
gcuaaacaccaaacuggga

SEQ ID NO: 213424 - RNA, 19 nt, Artificial Sequence
  Description of Artificial Sequence: Synthetic oligonucleotide
cgcgcuagugucaugugga

SEQ ID NO: 213425 - RNA, 19 nt, Artificial Sequence
  Description of Artificial Sequence: Synthetic oligonucleotide
gcgcuagugucauguggac

SEQ ID NO: 213426 - RNA, 19 nt, Artificial Sequence
  Description of Artificial Sequence: Synthetic oligonucleotide
gcuagugcaggaagccaca

SEQ ID NO: 213427 - RNA, 19 nt, Artificial Sequence
  Description of Artificial Sequence: Synthetic oligonucleotide
cugcaccgucucaaaggga

SEQ ID NO: 213428 - RNA, 19 nt, Artificial Sequence
  Description of Artificial Sequence: Synthetic oligonucleotide
agccucgaacacaucugaa

SEQ ID NO: 213429 - RNA, 19 nt, Artificial Sequence
  Description of Artificial Sequence: Synthetic oligonucleotide
cccugaagagucgggcccg

SEQ ID NO: 213430 - RNA, 19 nt, Artificial Sequence
  Description of Artificial Sequence: Synthetic oligonucleotide
ccaucgauuucaaccggaa

SEQ ID NO: 213431 - RNA, 19 nt, Artificial Sequence
  Description of Artificial Sequence: Synthetic oligonucleotide
ccaccaggggcgaagcaca

SEQ ID NO: 213432 - RNA, 19 nt, Artificial Sequence
  Description of Artificial Sequence: Synthetic oligonucleotide
gggauuuagcuggugggcu

SEQ ID NO: 213433 - RNA, 19 nt, Artificial Sequence
  Description of Artificial Sequence: Synthetic oligonucleotide
ggccaaacuggcaguaaaa

SEQ ID NO: 213434 - RNA, 19 nt, Artificial Sequence
  Description of Artificial Sequence: Synthetic oligonucleotide
gcccucgaagaacgggaug

SEQ ID NO: 213435 - RNA, 19 nt, Artificial Sequence
  Description of Artificial Sequence: Synthetic oligonucleotide
ccgagagcacaaacacaug

SEQ ID NO: 213436 - RNA, 19 nt, Artificial Sequence
  Description of Artificial Sequence: Synthetic oligonucleotide
gagcaccgucaccucugga

SEQ ID NO: 213437 - RNA, 19 nt, Artificial Sequence
  Description of Artificial Sequence: Synthetic oligonucleotide
aagucgcacucgaggucau

SEQ ID NO: 213438 - RNA, 19 nt, Artificial Sequence
  Description of Artificial Sequence: Synthetic oligonucleotide
ggacggugguccugacgug

SEQ ID NO: 213439 - RNA, 19 nt, Artificial Sequence
  Description of Artificial Sequence: Synthetic oligonucleotide
gcuaucuguggccaugcuu

SEQ ID NO: 213440 - RNA, 19 nt, Artificial Sequence
  Description of Artificial Sequence: Synthetic oligonucleotide
gccuuguuagaauucuauu

SEQ ID NO: 213441 - RNA, 19 nt, Artificial Sequence
  Description of Artificial Sequence: Synthetic oligonucleotide
gcacucgaggucaugcaaa

SEQ ID NO: 213442 - RNA, 19 nt, Artificial Sequence
  Description of Artificial Sequence: Synthetic oligonucleotide
guccugacguggagcccag

SEQ ID NO: 213443 - RNA, 19 nt, Artificial Sequence
  Description of Artificial Sequence: Synthetic oligonucleotide
ccggcugaggcccaaccca

SEQ ID NO: 213444 - RNA, 19 nt, Artificial Sequence
  Description of Artificial Sequence: Synthetic oligonucleotide
cagggucggggugcccagg

SEQ ID NO: 213445 - RNA, 19 nt, Artificial Sequence
  Description of Artificial Sequence: Synthetic oligonucleotide
cguaugcggaucugccaug

SEQ ID NO: 213446 - RNA, 19 nt, Artificial Sequence
  Description of Artificial Sequence: Synthetic oligonucleotide
guguaugguuccaucgauu

SEQ ID NO: 213447 - RNA, 19 nt, Artificial Sequence
  Description of Artificial Sequence: Synthetic oligonucleotide
cugcguacuuggccaaacu

SEQ ID NO: 213448 - RNA, 19 nt, Artificial Sequence
  Description of Artificial Sequence: Synthetic oligonucleotide
cauucuccggauggaagau

SEQ ID NO: 213449 - RNA, 19 nt, Artificial Sequence
  Description of Artificial Sequence: Synthetic oligonucleotide
guacgggaaugaccugccu

SEQ ID NO: 213450 - RNA, 19 nt, Artificial Sequence
  Description of Artificial Sequence: Synthetic oligonucleotide
ggucugcguacuuggccaa

SEQ ID NO: 213451 - RNA, 19 nt, Artificial Sequence
  Description of Artificial Sequence: Synthetic oligonucleotide
ccacgguuccaagccgucc

SEQ ID NO: 213452 - RNA, 19 nt, Artificial Sequence
  Description of Artificial Sequence: Synthetic oligonucleotide
cacuauuucuaggcucccu

SEQ ID NO: 213453 - RNA, 19 nt, Artificial Sequence
  Description of Artificial Sequence: Synthetic oligonucleotide
caacaacucccagcagaaa

SEQ ID NO: 213454 - RNA, 19 nt, Artificial Sequence
  Description of Artificial Sequence: Synthetic oligonucleotide
gucgggcccggaacacgcc

SEQ ID NO: 213455 - RNA, 19 nt, Artificial Sequence
  Description of Artificial Sequence: Synthetic oligonucleotide
gcagcgggauuggcuaaug

SEQ ID NO: 213456 - RNA, 19 nt, Artificial Sequence
  Description of Artificial Sequence: Synthetic oligonucleotide
cggggugcccaggaagucg

SEQ ID NO: 213457 - RNA, 19 nt, Artificial Sequence
  Description of Artificial Sequence: Synthetic oligonucleotide
cccugucaacugccauugg

SEQ ID NO: 213458 - RNA, 19 nt, Artificial Sequence
  Description of Artificial Sequence: Synthetic oligonucleotide
cggaacgaugaagucagca

SEQ ID NO: 213459 - RNA, 19 nt, Artificial Sequence
  Description of Artificial Sequence: Synthetic oligonucleotide
caggagaauuguccacgau

SEQ ID NO: 213460 - RNA, 19 nt, Artificial Sequence
  Description of Artificial Sequence: Synthetic oligonucleotide
gggcgcuucagcacguaua

SEQ ID NO: 213461 - RNA, 19 nt, Artificial Sequence
  Description of Artificial Sequence: Synthetic oligonucleotide
gucugcguacuuggccaaa

SEQ ID NO: 213462 - RNA, 19 nt, Artificial Sequence
  Description of Artificial Sequence: Synthetic oligonucleotide
gccgcacaugcuguaccac

SEQ ID NO: 213463 - RNA, 19 nt, Artificial Sequence
  Description of Artificial Sequence: Synthetic oligonucleotide
cacuuaaggcagcgggauu

SEQ ID NO: 213464 - RNA, 19 nt, Artificial Sequence
  Description of Artificial Sequence: Synthetic oligonucleotide
caauacccguauucaccuu

SEQ ID NO: 213465 - RNA, 19 nt, Artificial Sequence
  Description of Artificial Sequence: Synthetic oligonucleotide
ccggaacgaugaagucagc

SEQ ID NO: 213466 - RNA, 19 nt, Artificial Sequence
  Description of Artificial Sequence: Synthetic oligonucleotide
gccuacgucuguucugaau

SEQ ID NO: 213467 - RNA, 19 nt, Artificial Sequence
  Description of Artificial Sequence: Synthetic oligonucleotide
cagcuccguguccgucaug

SEQ ID NO: 213468 - RNA, 19 nt, Artificial Sequence
  Description of Artificial Sequence: Synthetic oligonucleotide
gcgccucacauuguagucu

SEQ ID NO: 213469 - RNA, 19 nt, Artificial Sequence
  Description of Artificial Sequence: Synthetic oligonucleotide
gcacguauaccugguguau

SEQ ID NO: 213470 - RNA, 19 nt, Artificial Sequence
  Description of Artificial Sequence: Synthetic oligonucleotide
ccgguuuggagcagugagu

SEQ ID NO: 213471 - RNA, 19 nt, Artificial Sequence
  Description of Artificial Sequence: Synthetic oligonucleotide
cgaugaucugagguucuca

SEQ ID NO: 213472 - RNA, 19 nt, Artificial Sequence
  Description of Artificial Sequence: Synthetic oligonucleotide
cgagacauuccaaguuugu

SEQ ID NO: 213473 - RNA, 19 nt, Artificial Sequence
  Description of Artificial Sequence: Synthetic oligonucleotide
gcgguguuauuaggacaca

SEQ ID NO: 213474 - RNA, 19 nt, Artificial Sequence
  Description of Artificial Sequence: Synthetic oligonucleotide
gcuccguguccgucauguc

SEQ ID NO: 213475 - RNA, 19 nt, Artificial Sequence
  Description of Artificial Sequence: Synthetic oligonucleotide
cacgacgcgcuagugucau

SEQ ID NO: 213476 - RNA, 19 nt, Artificial Sequence
  Description of Artificial Sequence: Synthetic oligonucleotide
ggcgaugaucugagguucu

SEQ ID NO: 213477 - RNA, 19 nt, Artificial Sequence
  Description of Artificial Sequence: Synthetic oligonucleotide
cgcacucgaggucaugcaa

SEQ ID NO: 213478 - RNA, 19 nt, Artificial Sequence
  Description of Artificial Sequence: Synthetic oligonucleotide
gcggugcucuggcccuuug

SEQ ID NO: 213479 - RNA, 19 nt, Artificial Sequence
  Description of Artificial Sequence: Synthetic oligonucleotide
agcggugcucuggcccuuu

SEQ ID NO: 213480 - RNA, 19 nt, Artificial Sequence
  Description of Artificial Sequence: Synthetic oligonucleotide
ccgucaccucuggaaggag

SEQ ID NO: 213481 - RNA, 19 nt, Artificial Sequence
  Description of Artificial Sequence: Synthetic oligonucleotide
ccguguccgucaugucauc

SEQ ID NO: 213482 - RNA, 19 nt, Artificial Sequence
  Description of Artificial Sequence: Synthetic oligonucleotide
cggugguccugacguggag

SEQ ID NO: 213483 - RNA, 19 nt, Artificial Sequence
  Description of Artificial Sequence: Synthetic oligonucleotide
gggucggggugcccaggaa

SEQ ID NO: 213484 - RNA, 19 nt, Artificial Sequence
  Description of Artificial Sequence: Synthetic oligonucleotide
gcagcuccguguccgucau

SEQ ID NO: 213485 - RNA, 19 nt, Artificial Sequence
  Description of Artificial Sequence: Synthetic oligonucleotide
cgggaaugaccugccucug

SEQ ID NO: 213486 - RNA, 19 nt, Artificial Sequence
  Description of Artificial Sequence: Synthetic oligonucleotide
ggcccucgaagaacgggau

SEQ ID NO: 213487 - RNA, 19 nt, Artificial Sequence
  Description of Artificial Sequence: Synthetic oligonucleotide
ggcagcgggauuggcuaau

SEQ ID NO: 213488 - RNA, 19 nt, Artificial Sequence
  Description of Artificial Sequence: Synthetic oligonucleotide
cguauaccugguguauggu

SEQ ID NO: 213489 - RNA, 19 nt, Artificial Sequence
  Description of Artificial Sequence: Synthetic oligonucleotide
ccgucucaaagggaucccu

SEQ ID NO: 213490 - RNA, 19 nt, Artificial Sequence
  Description of Artificial Sequence: Synthetic oligonucleotide
gagcggugcucuggcccuu

SEQ ID NO: 213491 - RNA, 19 nt, Artificial Sequence
  Description of Artificial Sequence: Synthetic oligonucleotide
cgcaggaggucagauguuu

SEQ ID NO: 213492 - RNA, 19 nt, Artificial Sequence
  Description of Artificial Sequence: Synthetic oligonucleotide
ccguccuguugcagaccuu

SEQ ID NO: 213493 - RNA, 19 nt, Artificial Sequence
  Description of Artificial Sequence: Synthetic oligonucleotide
uauaaugccaaauaaaucc

SEQ ID NO: 213494 - RNA, 19 nt, Artificial Sequence
  Description of Artificial Sequence: Synthetic oligonucleotide
acaaguuggcuuuaaaucc

SEQ ID NO: 213495 - RNA, 19 nt, Artificial Sequence
  Description of Artificial Sequence: Synthetic oligonucleotide
aaggaucauagauagggcc

SEQ ID NO: 213496 - RNA, 19 nt, Artificial Sequence
  Description of Artificial Sequence: Synthetic oligonucleotide
gaaaggaucauagauaggg

SEQ ID NO: 213497 - RNA, 19 nt, Artificial Sequence
  Description of Artificial Sequence: Synthetic oligonucleotide
aauaccuagccuaaugugc

SEQ ID NO: 213498 - RNA, 19 nt, Artificial Sequence
  Description of Artificial Sequence: Synthetic oligonucleotide
cuagauaucuaaaaucggg

SEQ ID NO: 213499 - RNA, 19 nt, Artificial Sequence
  Description of Artificial Sequence: Synthetic oligonucleotide
uucaguaacaagccgauug

SEQ ID NO: 213500 - RNA, 19 nt, Artificial Sequence
  Description of Artificial Sequence: Synthetic oligonucleotide
guucguuagaaacauaggg

SEQ ID NO: 213501 - RNA, 19 nt, Artificial Sequence
  Description of Artificial Sequence: Synthetic oligonucleotide
aauaggaccaaauuggcua

SEQ ID NO: 213502 - RNA, 19 nt, Artificial Sequence
  Description of Artificial Sequence: Synthetic oligonucleotide
aaagauuugcuugaugcuc

SEQ ID NO: 213503 - RNA, 19 nt, Artificial Sequence
  Description of Artificial Sequence: Synthetic oligonucleotide
cacuuuucuaacauaaccg

SEQ ID NO: 213504 - RNA, 19 nt, Artificial Sequence
  Description of Artificial Sequence: Synthetic oligonucleotide
gaccaaauuggcuaaaggc

SEQ ID NO: 213505 - RNA, 19 nt, Artificial Sequence
  Description of Artificial Sequence: Synthetic oligonucleotide
auaaaggauccgcuuaacc

SEQ ID NO: 213506 - RNA, 19 nt, Artificial Sequence
  Description of Artificial Sequence: Synthetic oligonucleotide
aaugcaauacuuagccucc

SEQ ID NO: 213507 - RNA, 19 nt, Artificial Sequence
  Description of Artificial Sequence: Synthetic oligonucleotide
accaaauuggcuaaaggcc

SEQ ID NO: 213508 - RNA, 19 nt, Artificial Sequence
  Description of Artificial Sequence: Synthetic oligonucleotide
acugccauuaacuugagaa

SEQ ID NO: 213509 - RNA, 19 nt, Artificial Sequence
  Description of Artificial Sequence: Synthetic oligonucleotide
agaucugccacgaucaucc

SEQ ID NO: 213510 - RNA, 19 nt, Artificial Sequence
  Description of Artificial Sequence: Synthetic oligonucleotide
ugucaauaggaaaacaccu

SEQ ID NO: 213511 - RNA, 19 nt, Artificial Sequence
  Description of Artificial Sequence: Synthetic oligonucleotide
aaguuuaaugaacccgaac

SEQ ID NO: 213512 - RNA, 19 nt, Artificial Sequence
  Description of Artificial Sequence: Synthetic oligonucleotide
ucguuagaaacauagggug

SEQ ID NO: 213513 - RNA, 19 nt, Artificial Sequence
  Description of Artificial Sequence: Synthetic oligonucleotide
ugcauagaagcaugaaugg

SEQ ID NO: 213514 - RNA, 19 nt, Artificial Sequence
  Description of Artificial Sequence: Synthetic oligonucleotide
gaaugcaauacuuagccuc

SEQ ID NO: 213515 - RNA, 19 nt, Artificial Sequence
  Description of Artificial Sequence: Synthetic oligonucleotide
gacaaguuggcuuuaaauc

SEQ ID NO: 213516 - RNA, 19 nt, Artificial Sequence
  Description of Artificial Sequence: Synthetic oligonucleotide
uucaaaugcaaagaguuca

SEQ ID NO: 213517 - RNA, 19 nt, Artificial Sequence
  Description of Artificial Sequence: Synthetic oligonucleotide
gaucccgagacauagcugc

SEQ ID NO: 213518 - RNA, 19 nt, Artificial Sequence
  Description of Artificial Sequence: Synthetic oligonucleotide
aaaugcaaagaguucagua

SEQ ID NO: 213519 - RNA, 19 nt, Artificial Sequence
  Description of Artificial Sequence: Synthetic oligonucleotide
uacaguuccacuuuucuaa

SEQ ID NO: 213520 - RNA, 19 nt, Artificial Sequence
  Description of Artificial Sequence: Synthetic oligonucleotide
auucauacucaaaugugcc

SEQ ID NO: 213521 - RNA, 19 nt, Artificial Sequence
  Description of Artificial Sequence: Synthetic oligonucleotide
uguaacuuucuucucgcug

SEQ ID NO: 213522 - RNA, 19 nt, Artificial Sequence
  Description of Artificial Sequence: Synthetic oligonucleotide
uucauacucaaaugugccg

SEQ ID NO: 213523 - RNA, 19 nt, Artificial Sequence
  Description of Artificial Sequence: Synthetic oligonucleotide
ucaauaggaccaaauuggc

SEQ ID NO: 213524 - RNA, 19 nt, Artificial Sequence
  Description of Artificial Sequence: Synthetic oligonucleotide
ucggcuuucgcuauuucag

SEQ ID NO: 213525 - RNA, 19 nt, Artificial Sequence
  Description of Artificial Sequence: Synthetic oligonucleotide
uuauucgaagcacaguaaa

SEQ ID NO: 213526 - RNA, 19 nt, Artificial Sequence
  Description of Artificial Sequence: Synthetic oligonucleotide
aaguggaauaccuagccua

SEQ ID NO: 213527 - RNA, 19 nt, Artificial Sequence
  Description of Artificial Sequence: Synthetic oligonucleotide
aacacugcguuacauaauu

SEQ ID NO: 213528 - RNA, 19 nt, Artificial Sequence
  Description of Artificial Sequence: Synthetic oligonucleotide
uccguauuuagcaaacagu

SEQ ID NO: 213529 - RNA, 19 nt, Artificial Sequence
  Description of Artificial Sequence: Synthetic oligonucleotide
ugcguuacauaauuuuacc

SEQ ID NO: 213530 - RNA, 19 nt, Artificial Sequence
  Description of Artificial Sequence: Synthetic oligonucleotide
gaauaccuagccuaaugug

SEQ ID NO: 213531 - RNA, 19 nt, Artificial Sequence
  Description of Artificial Sequence: Synthetic oligonucleotide
agauaucuaaaaucggggu

SEQ ID NO: 213532 - RNA, 19 nt, Artificial Sequence
  Description of Artificial Sequence: Synthetic oligonucleotide
ucuuucgcauccuucaugu

SEQ ID NO: 213533 - RNA, 19 nt, Artificial Sequence
  Description of Artificial Sequence: Synthetic oligonucleotide
acaaacaaccgacagcgcu

SEQ ID NO: 213534 - RNA, 19 nt, Artificial Sequence
  Description of Artificial Sequence: Synthetic oligonucleotide
uaggggaaaugcaacaaga

SEQ ID NO: 213535 - RNA, 19 nt, Artificial Sequence
  Description of Artificial Sequence: Synthetic oligonucleotide
uggaauaccuagccuaaug

SEQ ID NO: 213536 - RNA, 19 nt, Artificial Sequence
  Description of Artificial Sequence: Synthetic oligonucleotide
cauaguuuauacccacucc

SEQ ID NO: 213537 - RNA, 19 nt, Artificial Sequence
  Description of Artificial Sequence: Synthetic oligonucleotide
ucaguaacaagccgauugu

SEQ ID NO: 213538 - RNA, 19 nt, Artificial Sequence
  Description of Artificial Sequence: Synthetic oligonucleotide
acugcaucguucaaaugcc

SEQ ID NO: 213539 - RNA, 19 nt, Artificial Sequence
  Description of Artificial Sequence: Synthetic oligonucleotide
uucgcuauuucagccaagg

SEQ ID NO: 213540 - RNA, 19 nt, Artificial Sequence
  Description of Artificial Sequence: Synthetic oligonucleotide
ugucgaaucaucaucucuu

SEQ ID NO: 213541 - RNA, 19 nt, Artificial Sequence
  Description of Artificial Sequence: Synthetic oligonucleotide
uuuauucgaagcacaguaa

SEQ ID NO: 213542 - RNA, 19 nt, Artificial Sequence
  Description of Artificial Sequence: Synthetic oligonucleotide
ugacagauuccgaacagaa

SEQ ID NO: 213543 - RNA, 19 nt, Artificial Sequence
  Description of Artificial Sequence: Synthetic oligonucleotide
cuuaccgccuuucggaccg

SEQ ID NO: 213544 - RNA, 19 nt, Artificial Sequence
  Description of Artificial Sequence: Synthetic oligonucleotide
uuccccacaaacaaccgac

SEQ ID NO: 213545 - RNA, 19 nt, Artificial Sequence
  Description of Artificial Sequence: Synthetic oligonucleotide
auccgcuuaaccaaacccc

SEQ ID NO: 213546 - RNA, 19 nt, Artificial Sequence
  Description of Artificial Sequence: Synthetic oligonucleotide
acaauaggggaaaugcaac

SEQ ID NO: 213547 - RNA, 19 nt, Artificial Sequence
  Description of Artificial Sequence: Synthetic oligonucleotide
uuucggaccgcccgggccg

SEQ ID NO: 213548 - RNA, 19 nt, Artificial Sequence
  Description of Artificial Sequence: Synthetic oligonucleotide
ucucugucgaaucaucauc

SEQ ID NO: 213549 - RNA, 19 nt, Artificial Sequence
  Description of Artificial Sequence: Synthetic oligonucleotide
auacccacuccauaaucuc

SEQ ID NO: 213550 - RNA, 19 nt, Artificial Sequence
  Description of Artificial Sequence: Synthetic oligonucleotide
agggccauaaaggauccgc

SEQ ID NO: 213551 - RNA, 19 nt, Artificial Sequence
  Description of Artificial Sequence: Synthetic oligonucleotide
uucucucggguccauguag

SEQ ID NO: 213552 - RNA, 19 nt, Artificial Sequence
  Description of Artificial Sequence: Synthetic oligonucleotide
cauuuguagaaugcaauac

SEQ ID NO: 213553 - RNA, 19 nt, Artificial Sequence
  Description of Artificial Sequence: Synthetic oligonucleotide
gcuauuucagccaaggccc

SEQ ID NO: 213554 - RNA, 19 nt, Artificial Sequence
  Description of Artificial Sequence: Synthetic oligonucleotide
ucuaggacccuguccaccc

SEQ ID NO: 213555 - RNA, 19 nt, Artificial Sequence
  Description of Artificial Sequence: Synthetic oligonucleotide
agggugacagauuccgaac

SEQ ID NO: 213556 - RNA, 19 nt, Artificial Sequence
  Description of Artificial Sequence: Synthetic oligonucleotide
uucauaaccuaugccacca

SEQ ID NO: 213557 - RNA, 19 nt, Artificial Sequence
  Description of Artificial Sequence: Synthetic oligonucleotide
aagcggagaaguugcucgg

SEQ ID NO: 213558 - RNA, 19 nt, Artificial Sequence
  Description of Artificial Sequence: Synthetic oligonucleotide
cugcguuacauaauuuuac

SEQ ID NO: 213559 - RNA, 19 nt, Artificial Sequence
  Description of Artificial Sequence: Synthetic oligonucleotide
uuaaugaacccgaacccuu

SEQ ID NO: 213560 - RNA, 19 nt, Artificial Sequence
  Description of Artificial Sequence: Synthetic oligonucleotide
cauaugccacucaaaggcc

SEQ ID NO: 213561 - RNA, 19 nt, Artificial Sequence
  Description of Artificial Sequence: Synthetic oligonucleotide
aaccgaucccgagacauag

SEQ ID NO: 213562 - RNA, 19 nt, Artificial Sequence
  Description of Artificial Sequence: Synthetic oligonucleotide
aaccauagggaucucccau

SEQ ID NO: 213563 - RNA, 19 nt, Artificial Sequence
  Description of Artificial Sequence: Synthetic oligonucleotide
cuccguauuuagcaaacag

SEQ ID NO: 213564 - RNA, 19 nt, Artificial Sequence
  Description of Artificial Sequence: Synthetic oligonucleotide
gccuaaugugcauagaagc

SEQ ID NO: 213565 - RNA, 19 nt, Artificial Sequence
  Description of Artificial Sequence: Synthetic oligonucleotide
aacuacuucaauauccauu

SEQ ID NO: 213566 - RNA, 19 nt, Artificial Sequence
  Description of Artificial Sequence: Synthetic oligonucleotide
aucuuaccgccuuucggac

SEQ ID NO: 213567 - RNA, 19 nt, Artificial Sequence
  Description of Artificial Sequence: Synthetic oligonucleotide
uuccaugcgccucaauucu

SEQ ID NO: 213568 - RNA, 19 nt, Artificial Sequence
  Description of Artificial Sequence: Synthetic oligonucleotide
aaaucccuccgagucagag

SEQ ID NO: 213569 - RNA, 19 nt, Artificial Sequence
  Description of Artificial Sequence: Synthetic oligonucleotide
aaauucaguggcacaaggu

SEQ ID NO: 213570 - RNA, 19 nt, Artificial Sequence
  Description of Artificial Sequence: Synthetic oligonucleotide
uggaaauucaguggcacaa

SEQ ID NO: 213571 - RNA, 19 nt, Artificial Sequence
  Description of Artificial Sequence: Synthetic oligonucleotide
augguaggcgucuuccauc

SEQ ID NO: 213572 - RNA, 19 nt, Artificial Sequence
  Description of Artificial Sequence: Synthetic oligonucleotide
cauaaccuaugccaccacc

SEQ ID NO: 213573 - RNA, 19 nt, Artificial Sequence
  Description of Artificial Sequence: Synthetic oligonucleotide
auuagcuucauaaccuaug

SEQ ID NO: 213574 - RNA, 19 nt, Artificial Sequence
  Description of Artificial Sequence: Synthetic oligonucleotide
gaggagucguugucaauag

SEQ ID NO: 213575 - RNA, 19 nt, Artificial Sequence
  Description of Artificial Sequence: Synthetic oligonucleotide
ugcaauacuuagccuccag

SEQ ID NO: 213576 - RNA, 19 nt, Artificial Sequence
  Description of Artificial Sequence: Synthetic oligonucleotide
aggauuagcuucauaaccu

SEQ ID NO: 213577 - RNA, 19 nt, Artificial Sequence
  Description of Artificial Sequence: Synthetic oligonucleotide
ccacuuuucuaacauaacc

SEQ ID NO: 213578 - RNA, 19 nt, Artificial Sequence
  Description of Artificial Sequence: Synthetic oligonucleotide
aacguggaugccaccuugc

SEQ ID NO: 213579 - RNA, 19 nt, Artificial Sequence
  Description of Artificial Sequence: Synthetic oligonucleotide
uucgcauccuucauguuuu

SEQ ID NO: 213580 - RNA, 19 nt, Artificial Sequence
  Description of Artificial Sequence: Synthetic oligonucleotide
uacccauaguuuauaccca

SEQ ID NO: 213581 - RNA, 19 nt, Artificial Sequence
  Description of Artificial Sequence: Synthetic oligonucleotide
aucccuccgagucagagau

SEQ ID NO: 213582 - RNA, 19 nt, Artificial Sequence
  Description of Artificial Sequence: Synthetic oligonucleotide
caucuuaccgccuuucgga

SEQ ID NO: 213583 - RNA, 19 nt, Artificial Sequence
  Description of Artificial Sequence: Synthetic oligonucleotide
ccguauuuagcaaacaguc

SEQ ID NO: 213584 - RNA, 19 nt, Artificial Sequence
  Description of Artificial Sequence: Synthetic oligonucleotide
cugugauaucagcagguag

SEQ ID NO: 213585 - RNA, 19 nt, Artificial Sequence
  Description of Artificial Sequence: Synthetic oligonucleotide
gacuccggaaccgaucccg

SEQ ID NO: 213586 - RNA, 19 nt, Artificial Sequence
  Description of Artificial Sequence: Synthetic oligonucleotide
guauuuagcaaacagucuu

SEQ ID NO: 213587 - RNA, 19 nt, Artificial Sequence
  Description of Artificial Sequence: Synthetic oligonucleotide
ucccuguagaucugccacg

SEQ ID NO: 213588 - RNA, 19 nt, Artificial Sequence
  Description of Artificial Sequence: Synthetic oligonucleotide
aaucccuccgagucagaga

SEQ ID NO: 213589 - RNA, 19 nt, Artificial Sequence
  Description of Artificial Sequence: Synthetic oligonucleotide
cuguagaucugccacgauc

SEQ ID NO: 213590 - RNA, 19 nt, Artificial Sequence
  Description of Artificial Sequence: Synthetic oligonucleotide
agucguugucaauaggaaa

SEQ ID NO: 213591 - RNA, 19 nt, Artificial Sequence
  Description of Artificial Sequence: Synthetic oligonucleotide
aguugcucggggaacgugg

SEQ ID NO: 213592 - RNA, 19 nt, Artificial Sequence
  Description of Artificial Sequence: Synthetic oligonucleotide
uaaccuaugccaccaccuc

SEQ ID NO: 213593 - RNA, 19 nt, Artificial Sequence
  Description of Artificial Sequence: Synthetic oligonucleotide
acgcaugucgcuucccauc

SEQ ID NO: 213594 - RNA, 19 nt, Artificial Sequence
  Description of Artificial Sequence: Synthetic oligonucleotide
auaaccuaugccaccaccu

SEQ ID NO: 213595 - RNA, 19 nt, Artificial Sequence
  Description of Artificial Sequence: Synthetic oligonucleotide
ugguaggcgucuuccaucu

SEQ ID NO: 213596 - RNA, 19 nt, Artificial Sequence
  Description of Artificial Sequence: Synthetic oligonucleotide
auaggaccaaauuggcuaa

SEQ ID NO: 213597 - RNA, 19 nt, Artificial Sequence
  Description of Artificial Sequence: Synthetic oligonucleotide
augaucuuuccauuuucaa

SEQ ID NO: 213598 - RNA, 19 nt, Artificial Sequence
  Description of Artificial Sequence: Synthetic oligonucleotide
uuagaaacauagggugaca

SEQ ID NO: 213599 - RNA, 19 nt, Artificial Sequence
  Description of Artificial Sequence: Synthetic oligonucleotide
cucuccguauuuagcaaac

SEQ ID NO: 213600 - RNA, 19 nt, Artificial Sequence
  Description of Artificial Sequence: Synthetic oligonucleotide
ucuuaccgccuuucggacc

SEQ ID NO: 213601 - RNA, 19 nt, Artificial Sequence
  Description of Artificial Sequence: Synthetic oligonucleotide
ccaaguggaauaccuagcc

SEQ ID NO: 213602 - RNA, 19 nt, Artificial Sequence
  Description of Artificial Sequence: Synthetic oligonucleotide
aggaucauagauagggcca

SEQ ID NO: 213603 - RNA, 19 nt, Artificial Sequence
  Description of Artificial Sequence: Synthetic oligonucleotide
auaccuagccuaaugugca

SEQ ID NO: 213604 - RNA, 19 nt, Artificial Sequence
  Description of Artificial Sequence: Synthetic oligonucleotide
ucgcuauuucagccaaggc

SEQ ID NO: 213605 - RNA, 19 nt, Artificial Sequence
  Description of Artificial Sequence: Synthetic oligonucleotide
agccuaaugugcauagaag

SEQ ID NO: 213606 - RNA, 19 nt, Artificial Sequence
  Description of Artificial Sequence: Synthetic oligonucleotide
ucggugagguggcuucggg

SEQ ID NO: 213607 - RNA, 19 nt, Artificial Sequence
  Description of Artificial Sequence: Synthetic oligonucleotide
uuucgcuauuucagccaag

SEQ ID NO: 213608 - RNA, 19 nt, Artificial Sequence
  Description of Artificial Sequence: Synthetic oligonucleotide
uaaugaacccgaacccuuu

SEQ ID NO: 213609 - RNA, 19 nt, Artificial Sequence
  Description of Artificial Sequence: Synthetic oligonucleotide
uuggcgcaaaagauuugcu

SEQ ID NO: 213610 - RNA, 19 nt, Artificial Sequence
  Description of Artificial Sequence: Synthetic oligonucleotide
ggccuagacacgcucaugc

SEQ ID NO: 213611 - RNA, 19 nt, Artificial Sequence
  Description of Artificial Sequence: Synthetic oligonucleotide
aaggccuagacacgcucau

SEQ ID NO: 213612 - RNA, 19 nt, Artificial Sequence
  Description of Artificial Sequence: Synthetic oligonucleotide
ugcccaaacagaccauuua

SEQ ID NO: 213613 - RNA, 19 nt, Artificial Sequence
  Description of Artificial Sequence: Synthetic oligonucleotide
aaaggccuagacacgcuca

SEQ ID NO: 213614 - RNA, 19 nt, Artificial Sequence
  Description of Artificial Sequence: Synthetic oligonucleotide
gcaucuuaccgccuuucgg

SEQ ID NO: 213615 - RNA, 19 nt, Artificial Sequence
  Description of Artificial Sequence: Synthetic oligonucleotide
ucaaaggccuagacacgcu

SEQ ID NO: 213616 - RNA, 19 nt, Artificial Sequence
  Description of Artificial Sequence: Synthetic oligonucleotide
augucgcuucccaucaugg

SEQ ID NO: 213617 - RNA, 19 nt, Artificial Sequence
  Description of Artificial Sequence: Synthetic oligonucleotide
acaagccgauuguagggcu

SEQ ID NO: 213618 - RNA, 19 nt, Artificial Sequence
  Description of Artificial Sequence: Synthetic oligonucleotide
cacgcucaugcuuuccaag

SEQ ID NO: 213619 - RNA, 19 nt, Artificial Sequence
  Description of Artificial Sequence: Synthetic oligonucleotide
uggcgcaaaagauuugcuu

SEQ ID NO: 213620 - RNA, 19 nt, Artificial Sequence
  Description of Artificial Sequence: Synthetic oligonucleotide
cuuucggaccgcccgggcc

SEQ ID NO: 213621 - RNA, 19 nt, Artificial Sequence
  Description of Artificial Sequence: Synthetic oligonucleotide
agucaaggggcgguugagg

SEQ ID NO: 213622 - RNA, 19 nt, Artificial Sequence
  Description of Artificial Sequence: Synthetic oligonucleotide
aagccgauuguagggcuug

SEQ ID NO: 213623 - RNA, 19 nt, Artificial Sequence
  Description of Artificial Sequence: Synthetic oligonucleotide
cuugccucaacugcauuuc

SEQ ID NO: 213624 - RNA, 19 nt, Artificial Sequence
  Description of Artificial Sequence: Synthetic oligonucleotide
caugcgccucaauucuucc

SEQ ID NO: 213625 - RNA, 19 nt, Artificial Sequence
  Description of Artificial Sequence: Synthetic oligonucleotide
ucucgcuggcgucucauuu

SEQ ID NO: 213626 - RNA, 19 nt, Artificial Sequence
  Description of Artificial Sequence: Synthetic oligonucleotide
caaaggccuagacacgcuc

SEQ ID NO: 213627 - RNA, 19 nt, Artificial Sequence
  Description of Artificial Sequence: Synthetic oligonucleotide
acugcguuacauaauuuua

SEQ ID NO: 213628 - RNA, 19 nt, Artificial Sequence
  Description of Artificial Sequence: Synthetic oligonucleotide
cucgcuggcgucucauuug

SEQ ID NO: 213629 - RNA, 19 nt, Artificial Sequence
  Description of Artificial Sequence: Synthetic oligonucleotide
acaaccgacagcgcugugu

SEQ ID NO: 213630 - RNA, 19 nt, Artificial Sequence
  Description of Artificial Sequence: Synthetic oligonucleotide
ucugugauaucagcaggua

SEQ ID NO: 213631 - RNA, 19 nt, Artificial Sequence
  Description of Artificial Sequence: Synthetic oligonucleotide
ccuauaaugccaaauaaau

SEQ ID NO: 213632 - RNA, 19 nt, Artificial Sequence
  Description of Artificial Sequence: Synthetic oligonucleotide
uuucucucggguccaugua

SEQ ID NO: 213633 - RNA, 19 nt, Artificial Sequence
  Description of Artificial Sequence: Synthetic oligonucleotide
gcgcucaguacgcaugucg

SEQ ID NO: 213634 - RNA, 19 nt, Artificial Sequence
  Description of Artificial Sequence: Synthetic oligonucleotide
gcccaaacagaccauuuac

SEQ ID NO: 213635 - RNA, 19 nt, Artificial Sequence
  Description of Artificial Sequence: Synthetic oligonucleotide
agacacgcucaugcuuucc

SEQ ID NO: 213636 - RNA, 19 nt, Artificial Sequence
  Description of Artificial Sequence: Synthetic oligonucleotide
cauaaaggauccgcuuaac

SEQ ID NO: 213637 - RNA, 19 nt, Artificial Sequence
  Description of Artificial Sequence: Synthetic oligonucleotide
ggcaucuuaccgccuuucg

SEQ ID NO: 213638 - RNA, 19 nt, Artificial Sequence
  Description of Artificial Sequence: Synthetic oligonucleotide
ccuagccuaaugugcauag

SEQ ID NO: 213639 - RNA, 19 nt, Artificial Sequence
  Description of Artificial Sequence: Synthetic oligonucleotide
ucuccguauuuagcaaaca

SEQ ID NO: 213640 - RNA, 19 nt, Artificial Sequence
  Description of Artificial Sequence: Synthetic oligonucleotide
aaacacugcguuacauaau

SEQ ID NO: 213641 - RNA, 19 nt, Artificial Sequence
  Description of Artificial Sequence: Synthetic oligonucleotide
ggaauaccuagccuaaugu

SEQ ID NO: 213642 - RNA, 19 nt, Artificial Sequence
  Description of Artificial Sequence: Synthetic oligonucleotide
gcauagaagcaugaauggc

SEQ ID NO: 213643 - RNA, 19 nt, Artificial Sequence
  Description of Artificial Sequence: Synthetic oligonucleotide
aaguugcucggggaacgug

SEQ ID NO: 213644 - RNA, 19 nt, Artificial Sequence
  Description of Artificial Sequence: Synthetic oligonucleotide
agguagcuuucuuacuaaa

SEQ ID NO: 213645 - RNA, 19 nt, Artificial Sequence
  Description of Artificial Sequence: Synthetic oligonucleotide
aguggaauaccuagccuaa

SEQ ID NO: 213646 - RNA, 19 nt, Artificial Sequence
  Description of Artificial Sequence: Synthetic oligonucleotide
ccaggauuagcuucauaac

SEQ ID NO: 213647 - RNA, 19 nt, Artificial Sequence
  Description of Artificial Sequence: Synthetic oligonucleotide
gagucguugucaauaggaa

SEQ ID NO: 213648 - RNA, 19 nt, Artificial Sequence
  Description of Artificial Sequence: Synthetic oligonucleotide
ucuuuacguuucugcauuu

SEQ ID NO: 213649 - RNA, 19 nt, Artificial Sequence
  Description of Artificial Sequence: Synthetic oligonucleotide
gagacaaguuggcuuuaaa

SEQ ID NO: 213650 - RNA, 19 nt, Artificial Sequence
  Description of Artificial Sequence: Synthetic oligonucleotide
caaguuuaaugaacccgaa

SEQ ID NO: 213651 - RNA, 19 nt, Artificial Sequence
  Description of Artificial Sequence: Synthetic oligonucleotide
gcgacuccggaaccgaucc

SEQ ID NO: 213652 - RNA, 19 nt, Artificial Sequence
  Description of Artificial Sequence: Synthetic oligonucleotide
uacgcaugucgcuucccau

SEQ ID NO: 213653 - RNA, 19 nt, Artificial Sequence
  Description of Artificial Sequence: Synthetic oligonucleotide
guacgcaugucgcuuccca

SEQ ID NO: 213654 - RNA, 19 nt, Artificial Sequence
  Description of Artificial Sequence: Synthetic oligonucleotide
gcaauacuuagccuccaga

SEQ ID NO: 213655 - RNA, 19 nt, Artificial Sequence
  Description of Artificial Sequence: Synthetic oligonucleotide
augcgccucaauucuuccu

SEQ ID NO: 213656 - RNA, 19 nt, Artificial Sequence
  Description of Artificial Sequence: Synthetic oligonucleotide
aggauccgcuuaaccaaac

SEQ ID NO: 213657 - RNA, 19 nt, Artificial Sequence
  Description of Artificial Sequence: Synthetic oligonucleotide
gcgguugaggcagaagcgg

SEQ ID NO: 213658 - RNA, 19 nt, Artificial Sequence
  Description of Artificial Sequence: Synthetic oligonucleotide
gcggagaaguugcucgggg

SEQ ID NO: 213659 - RNA, 19 nt, Artificial Sequence
  Description of Artificial Sequence: Synthetic oligonucleotide
uaaaucccuccgagucaga

SEQ ID NO: 213660 - RNA, 19 nt, Artificial Sequence
  Description of Artificial Sequence: Synthetic oligonucleotide
acacgcucaugcuuuccaa

SEQ ID NO: 213661 - RNA, 19 nt, Artificial Sequence
  Description of Artificial Sequence: Synthetic oligonucleotide
aacaaccgacagcgcugug

SEQ ID NO: 213662 - RNA, 19 nt, Artificial Sequence
  Description of Artificial Sequence: Synthetic oligonucleotide
gggugacagauuccgaaca

SEQ ID NO: 213663 - RNA, 19 nt, Artificial Sequence
  Description of Artificial Sequence: Synthetic oligonucleotide
ugcagucaaggggcgguug

SEQ ID NO: 213664 - RNA, 19 nt, Artificial Sequence
  Description of Artificial Sequence: Synthetic oligonucleotide
ggagaaguugcucggggaa

SEQ ID NO: 213665 - RNA, 19 nt, Artificial Sequence
  Description of Artificial Sequence: Synthetic oligonucleotide
accgaucccgagacauagc

SEQ ID NO: 213666 - RNA, 19 nt, Artificial Sequence
  Description of Artificial Sequence: Synthetic oligonucleotide
gggguaugucauuuguaga

SEQ ID NO: 213667 - RNA, 19 nt, Artificial Sequence
  Description of Artificial Sequence: Synthetic oligonucleotide
uagacacgcucaugcuuuc

SEQ ID NO: 213668 - RNA, 19 nt, Artificial Sequence
  Description of Artificial Sequence: Synthetic oligonucleotide
uaccuagccuaaugugcau

SEQ ID NO: 213669 - RNA, 19 nt, Artificial Sequence
  Description of Artificial Sequence: Synthetic oligonucleotide
aauuggcuaaaggccucuu

SEQ ID NO: 213670 - RNA, 19 nt, Artificial Sequence
  Description of Artificial Sequence: Synthetic oligonucleotide
uccaugcgccucaauucuu

SEQ ID NO: 213671 - RNA, 19 nt, Artificial Sequence
  Description of Artificial Sequence: Synthetic oligonucleotide
gauuagcuucauaaccuau

SEQ ID NO: 213672 - RNA, 19 nt, Artificial Sequence
  Description of Artificial Sequence: Synthetic oligonucleotide
ggauuagcuucauaaccua

SEQ ID NO: 213673 - RNA, 19 nt, Artificial Sequence
  Description of Artificial Sequence: Synthetic oligonucleotide
cugucgaaucaucaucucu

SEQ ID NO: 213674 - RNA, 19 nt, Artificial Sequence
  Description of Artificial Sequence: Synthetic oligonucleotide
uggucgagacgccgcugcu

SEQ ID NO: 213675 - RNA, 19 nt, Artificial Sequence
  Description of Artificial Sequence: Synthetic oligonucleotide
ugauaucagcagguagguu

SEQ ID NO: 213676 - RNA, 19 nt, Artificial Sequence
  Description of Artificial Sequence: Synthetic oligonucleotide
gcguuacauaauuuuaccu

SEQ ID NO: 213677 - RNA, 19 nt, Artificial Sequence
  Description of Artificial Sequence: Synthetic oligonucleotide
accgccuuucggaccgccc

SEQ ID NO: 213678 - RNA, 19 nt, Artificial Sequence
  Description of Artificial Sequence: Synthetic oligonucleotide
cuccgcaacagagacaagu

SEQ ID NO: 213679 - RNA, 19 nt, Artificial Sequence
  Description of Artificial Sequence: Synthetic oligonucleotide
caaguggaauaccuagccu

SEQ ID NO: 213680 - RNA, 19 nt, Artificial Sequence
  Description of Artificial Sequence: Synthetic oligonucleotide
cuuagggcccgggccggcg

SEQ ID NO: 213681 - RNA, 19 nt, Artificial Sequence
  Description of Artificial Sequence: Synthetic oligonucleotide
agccgauuguagggcuugg

SEQ ID NO: 213682 - RNA, 19 nt, Artificial Sequence
  Description of Artificial Sequence: Synthetic oligonucleotide
gacgacgggccgcgacucc

SEQ ID NO: 213683 - RNA, 19 nt, Artificial Sequence
  Description of Artificial Sequence: Synthetic oligonucleotide
augcaauacuuagccucca

SEQ ID NO: 213684 - RNA, 19 nt, Artificial Sequence
  Description of Artificial Sequence: Synthetic oligonucleotide
ccggaaccgaucccgagac

SEQ ID NO: 213685 - RNA, 19 nt, Artificial Sequence
  Description of Artificial Sequence: Synthetic oligonucleotide
gcggggcucacuccaggcg

SEQ ID NO: 213686 - RNA, 19 nt, Artificial Sequence
  Description of Artificial Sequence: Synthetic oligonucleotide
uucggaccgcccgggccgg

SEQ ID NO: 213687 - RNA, 19 nt, Artificial Sequence
  Description of Artificial Sequence: Synthetic oligonucleotide
accuagccuaaugugcaua

SEQ ID NO: 213688 - RNA, 19 nt, Artificial Sequence
  Description of Artificial Sequence: Synthetic oligonucleotide
ccaugcgccucaauucuuc

SEQ ID NO: 213689 - RNA, 19 nt, Artificial Sequence
  Description of Artificial Sequence: Synthetic oligonucleotide
ccgccuuucggaccgcccg

SEQ ID NO: 213690 - RNA, 19 nt, Artificial Sequence
  Description of Artificial Sequence: Synthetic oligonucleotide
uuguagggcuugggaauua

SEQ ID NO: 213691 - RNA, 19 nt, Artificial Sequence
  Description of Artificial Sequence: Synthetic oligonucleotide
cuagccuaaugugcauaga

SEQ ID NO: 213692 - RNA, 19 nt, Artificial Sequence
  Description of Artificial Sequence: Synthetic oligonucleotide
caugguaggcgucuuccau

SEQ ID NO: 213693 - RNA, 19 nt, Artificial Sequence
  Description of Artificial Sequence: Synthetic oligonucleotide
uucucgcuggcgucucauu

SEQ ID NO: 213694 - RNA, 19 nt, Artificial Sequence
  Description of Artificial Sequence: Synthetic oligonucleotide
cgauuguagggcuugggaa

SEQ ID NO: 213695 - RNA, 19 nt, Artificial Sequence
  Description of Artificial Sequence: Synthetic oligonucleotide
cuuaggcccgccgggcauc

SEQ ID NO: 213696 - RNA, 19 nt, Artificial Sequence
  Description of Artificial Sequence: Synthetic oligonucleotide
ggaaccgaucccgagacau

SEQ ID NO: 213697 - RNA, 19 nt, Artificial Sequence
  Description of Artificial Sequence: Synthetic oligonucleotide
gccaccuugcuucguacaa

SEQ ID NO: 213698 - RNA, 19 nt, Artificial Sequence
  Description of Artificial Sequence: Synthetic oligonucleotide
cucucacuacccauaguuu

SEQ ID NO: 213699 - RNA, 19 nt, Artificial Sequence
  Description of Artificial Sequence: Synthetic oligonucleotide
caaagcgcucaguacgcau

SEQ ID NO: 213700 - RNA, 19 nt, Artificial Sequence
  Description of Artificial Sequence: Synthetic oligonucleotide
acacugcguuacauaauuu

SEQ ID NO: 213701 - RNA, 19 nt, Artificial Sequence
  Description of Artificial Sequence: Synthetic oligonucleotide
gaaccgaucccgagacaua

SEQ ID NO: 213702 - RNA, 19 nt, Artificial Sequence
  Description of Artificial Sequence: Synthetic oligonucleotide
ucccuccgagucagagauc

SEQ ID NO: 213703 - RNA, 19 nt, Artificial Sequence
  Description of Artificial Sequence: Synthetic oligonucleotide
gaaguugcucggggaacgu

SEQ ID NO: 213704 - RNA, 19 nt, Artificial Sequence
  Description of Artificial Sequence: Synthetic oligonucleotide
ggacccgcaccucccugcc

SEQ ID NO: 213705 - RNA, 19 nt, Artificial Sequence
  Description of Artificial Sequence: Synthetic oligonucleotide
cuaggacccuguccaccca

SEQ ID NO: 213706 - RNA, 19 nt, Artificial Sequence
  Description of Artificial Sequence: Synthetic oligonucleotide
cugcaucguucaaaugccu

SEQ ID NO: 213707 - RNA, 19 nt, Artificial Sequence
  Description of Artificial Sequence: Synthetic oligonucleotide
guagaucugccacgaucau

SEQ ID NO: 213708 - RNA, 19 nt, Artificial Sequence
  Description of Artificial Sequence: Synthetic oligonucleotide
cucaguacgcaugucgcuu

SEQ ID NO: 213709 - RNA, 19 nt, Artificial Sequence
  Description of Artificial Sequence: Synthetic oligonucleotide
cggggcucacuccaggcgc

SEQ ID NO: 213710 - RNA, 19 nt, Artificial Sequence
  Description of Artificial Sequence: Synthetic oligonucleotide
gugccgugcugagcaaaac

SEQ ID NO: 213711 - RNA, 19 nt, Artificial Sequence
  Description of Artificial Sequence: Synthetic oligonucleotide
gggaacguggaugccaccu

SEQ ID NO: 213712 - RNA, 19 nt, Artificial Sequence
  Description of Artificial Sequence: Synthetic oligonucleotide
gacgggccgcgacuccgga

SEQ ID NO: 213713 - RNA, 19 nt, Artificial Sequence
  Description of Artificial Sequence: Synthetic oligonucleotide
cgaucccgagacauagcug

SEQ ID NO: 213714 - RNA, 19 nt, Artificial Sequence
  Description of Artificial Sequence: Synthetic oligonucleotide
cccgaagcugucuaccucu

SEQ ID NO: 213715 - RNA, 19 nt, Artificial Sequence
  Description of Artificial Sequence: Synthetic oligonucleotide
ggcuuaggcccgccgggca

SEQ ID NO: 213716 - RNA, 19 nt, Artificial Sequence
  Description of Artificial Sequence: Synthetic oligonucleotide
ggggacgacgggccgcgac

SEQ ID NO: 213717 - RNA, 19 nt, Artificial Sequence
  Description of Artificial Sequence: Synthetic oligonucleotide
gcucaguacgcaugucgcu

SEQ ID NO: 213718 - RNA, 19 nt, Artificial Sequence
  Description of Artificial Sequence: Synthetic oligonucleotide
ccgaucccgagacauagcu

SEQ ID NO: 213719 - RNA, 19 nt, Artificial Sequence
  Description of Artificial Sequence: Synthetic oligonucleotide
gacuuccaucuuugagaau

SEQ ID NO: 213720 - RNA, 19 nt, Artificial Sequence
  Description of Artificial Sequence: Synthetic oligonucleotide
ggccauaaaggauccgcuu

SEQ ID NO: 213721 - RNA, 19 nt, Artificial Sequence
  Description of Artificial Sequence: Synthetic oligonucleotide
gcgcggggcucacuccagg

SEQ ID NO: 213722 - RNA, 19 nt, Artificial Sequence
  Description of Artificial Sequence: Synthetic oligonucleotide
gggccggggccuugcuuag

SEQ ID NO: 213723 - RNA, 19 nt, Artificial Sequence
  Description of Artificial Sequence: Synthetic oligonucleotide
ggggcgguugaggcagaag

SEQ ID NO: 213724 - RNA, 19 nt, Artificial Sequence
  Description of Artificial Sequence: Synthetic oligonucleotide
caagccgauuguagggcuu

SEQ ID NO: 213725 - RNA, 19 nt, Artificial Sequence
  Description of Artificial Sequence: Synthetic oligonucleotide
cguugucaauaggaaaaca

SEQ ID NO: 213726 - RNA, 19 nt, Artificial Sequence
  Description of Artificial Sequence: Synthetic oligonucleotide
gggacgacgggccgcgacu

SEQ ID NO: 213727 - RNA, 19 nt, Artificial Sequence
  Description of Artificial Sequence: Synthetic oligonucleotide
guggaauaccuagccuaau

SEQ ID NO: 213728 - RNA, 19 nt, Artificial Sequence
  Description of Artificial Sequence: Synthetic oligonucleotide
ggacgacgggccgcgacuc

SEQ ID NO: 213729 - RNA, 19 nt, Artificial Sequence
  Description of Artificial Sequence: Synthetic oligonucleotide
ccuagacacgcucaugcuu

SEQ ID NO: 213730 - RNA, 19 nt, Artificial Sequence
  Description of Artificial Sequence: Synthetic oligonucleotide
cgcgacuccggaaccgauc

SEQ ID NO: 213731 - RNA, 19 nt, Artificial Sequence
  Description of Artificial Sequence: Synthetic oligonucleotide
guucaguaacaagccgauu

SEQ ID NO: 213732 - RNA, 19 nt, Artificial Sequence
  Description of Artificial Sequence: Synthetic oligonucleotide
cgacgggccgcgacuccgg

SEQ ID NO: 213733 - RNA, 19 nt, Artificial Sequence
  Description of Artificial Sequence: Synthetic oligonucleotide
ggcccgccgggcaucuuac

SEQ ID NO: 213734 - RNA, 19 nt, Artificial Sequence
  Description of Artificial Sequence: Synthetic oligonucleotide
cgacuccggaaccgauccc

SEQ ID NO: 213735 - RNA, 19 nt, Artificial Sequence
  Description of Artificial Sequence: Synthetic oligonucleotide
gccgcgacuccggaaccga

SEQ ID NO: 213736 - RNA, 19 nt, Artificial Sequence
  Description of Artificial Sequence: Synthetic oligonucleotide
gcccgccgggcaucuuacc

SEQ ID NO: 213737 - RNA, 19 nt, Artificial Sequence
  Description of Artificial Sequence: Synthetic oligonucleotide
gcuuaggcccgccgggcau

SEQ ID NO: 213738 - RNA, 19 nt, Artificial Sequence
  Description of Artificial Sequence: Synthetic oligonucleotide
gcuuagggcccgggccggc

SEQ ID NO: 213739 - RNA, 19 nt, Artificial Sequence
  Description of Artificial Sequence: Synthetic oligonucleotide
ggccuccgcaacagagaca

SEQ ID NO: 213740 - RNA, 19 nt, Artificial Sequence
  Description of Artificial Sequence: Synthetic oligonucleotide
ccccgggagcacccaugcc

SEQ ID NO: 213741 - RNA, 19 nt, Artificial Sequence
  Description of Artificial Sequence: Synthetic oligonucleotide
ccucuugccucaacugcau

SEQ ID NO: 213742 - RNA, 19 nt, Artificial Sequence
  Description of Artificial Sequence: Synthetic oligonucleotide
gcccuagauucaaguuuaa

SEQ ID NO: 213743 - RNA, 19 nt, Artificial Sequence
  Description of Artificial Sequence: Synthetic oligonucleotide
cggcuuaggcccgccgggc

SEQ ID NO: 213744 - RNA, 19 nt, Artificial Sequence
  Description of Artificial Sequence: Synthetic oligonucleotide
ccaccuagagguggaaauu

SEQ ID NO: 213745 - RNA, 19 nt, Artificial Sequence
  Description of Artificial Sequence: Synthetic oligonucleotide
cugcagucaaggggcgguu

SEQ ID NO: 213746 - RNA, 19 nt, Artificial Sequence
  Description of Artificial Sequence: Synthetic oligonucleotide
ccgggcaucuuaccgccuu

SEQ ID NO: 213747 - RNA, 19 nt, Artificial Sequence
  Description of Artificial Sequence: Synthetic oligonucleotide
cggaaccgaucccgagaca

SEQ ID NO: 213748 - RNA, 19 nt, Artificial Sequence
  Description of Artificial Sequence: Synthetic oligonucleotide
cggaccgcccgggccgggg

SEQ ID NO: 213749 - RNA, 19 nt, Artificial Sequence
  Description of Artificial Sequence: Synthetic oligonucleotide
ccgcgacuccggaaccgau

SEQ ID NO: 213750 - RNA, 19 nt, Artificial Sequence
  Description of Artificial Sequence: Synthetic oligonucleotide
auaguaaucaaucugguag

SEQ ID NO: 213751 - RNA, 19 nt, Artificial Sequence
  Description of Artificial Sequence: Synthetic oligonucleotide
aauaacgucaggcuuguuc

SEQ ID NO: 213752 - RNA, 19 nt, Artificial Sequence
  Description of Artificial Sequence: Synthetic oligonucleotide
aaacaacacacacacacac

SEQ ID NO: 213753 - RNA, 19 nt, Artificial Sequence
  Description of Artificial Sequence: Synthetic oligonucleotide
aacacacacacacacacac

SEQ ID NO: 213754 - RNA, 19 nt, Artificial Sequence
  Description of Artificial Sequence: Synthetic oligonucleotide
uguucaauuauguaaagca

SEQ ID NO: 213755 - RNA, 19 nt, Artificial Sequence
  Description of Artificial Sequence: Synthetic oligonucleotide
aaguuucauaucuauacuc

SEQ ID NO: 213756 - RNA, 19 nt, Artificial Sequence
  Description of Artificial Sequence: Synthetic oligonucleotide
cauaucuauacucugaccc

SEQ ID NO: 213757 - RNA, 19 nt, Artificial Sequence
  Description of Artificial Sequence: Synthetic oligonucleotide
uuuuauagagguuaauggc

SEQ ID NO: 213758 - RNA, 19 nt, Artificial Sequence
  Description of Artificial Sequence: Synthetic oligonucleotide
uaugcauacuggaauaacg

SEQ ID NO: 213759 - RNA, 19 nt, Artificial Sequence
  Description of Artificial Sequence: Synthetic oligonucleotide
auuacgaagggucuuaauc

SEQ ID NO: 213760 - RNA, 19 nt, Artificial Sequence
  Description of Artificial Sequence: Synthetic oligonucleotide
uccgcuuauauucugagag

SEQ ID NO: 213761 - RNA, 19 nt, Artificial Sequence
  Description of Artificial Sequence: Synthetic oligonucleotide
auacuauugauucauccac

SEQ ID NO: 213762 - RNA, 19 nt, Artificial Sequence
  Description of Artificial Sequence: Synthetic oligonucleotide
ucaauaguaaaguuuggag

SEQ ID NO: 213763 - RNA, 19 nt, Artificial Sequence
  Description of Artificial Sequence: Synthetic oligonucleotide
aauuauggcaaccuuauuu

SEQ ID NO: 213764 - RNA, 19 nt, Artificial Sequence
  Description of Artificial Sequence: Synthetic oligonucleotide
acauacuauugauucaucc

SEQ ID NO: 213765 - RNA, 19 nt, Artificial Sequence
  Description of Artificial Sequence: Synthetic oligonucleotide
uauuguaucgaauaccaca

SEQ ID NO: 213766 - RNA, 19 nt, Artificial Sequence
  Description of Artificial Sequence: Synthetic oligonucleotide
aacaaucaauucaucaucc

SEQ ID NO: 213767 - RNA, 19 nt, Artificial Sequence
  Description of Artificial Sequence: Synthetic oligonucleotide
aaaccuguggccuaguaug

SEQ ID NO: 213768 - RNA, 19 nt, Artificial Sequence
  Description of Artificial Sequence: Synthetic oligonucleotide
acaacacacacacacacac

SEQ ID NO: 213769 - RNA, 19 nt, Artificial Sequence
  Description of Artificial Sequence: Synthetic oligonucleotide
aaucuuugagucaucaugg

SEQ ID NO: 213770 - RNA, 19 nt, Artificial Sequence
  Description of Artificial Sequence: Synthetic oligonucleotide
aggugauucacauagacca

SEQ ID NO: 213771 - RNA, 19 nt, Artificial Sequence
  Description of Artificial Sequence: Synthetic oligonucleotide
aagaauuccucccacauau

SEQ ID NO: 213772 - RNA, 19 nt, Artificial Sequence
  Description of Artificial Sequence: Synthetic oligonucleotide
uuuaguaucgucccauagc

SEQ ID NO: 213773 - RNA, 19 nt, Artificial Sequence
  Description of Artificial Sequence: Synthetic oligonucleotide
uuaguaucgucccauagcu

SEQ ID NO: 213774 - RNA, 19 nt, Artificial Sequence
  Description of Artificial Sequence: Synthetic oligonucleotide
ugaaugauuucacagcugu

SEQ ID NO: 213775 - RNA, 19 nt, Artificial Sequence
  Description of Artificial Sequence: Synthetic oligonucleotide
uuuaccauaagaggaacag

SEQ ID NO: 213776 - RNA, 19 nt, Artificial Sequence
  Description of Artificial Sequence: Synthetic oligonucleotide
uggagcuugaaacauauuc

SEQ ID NO: 213777 - RNA, 19 nt, Artificial Sequence
  Description of Artificial Sequence: Synthetic oligonucleotide
aaaguuucauaucuauacu

SEQ ID NO: 213778 - RNA, 19 nt, Artificial Sequence
  Description of Artificial Sequence: Synthetic oligonucleotide
uucccauucuccaagcggg

SEQ ID NO: 213779 - RNA, 19 nt, Artificial Sequence
  Description of Artificial Sequence: Synthetic oligonucleotide
uggacuauucccaaugaug

SEQ ID NO: 213780 - RNA, 19 nt, Artificial Sequence
  Description of Artificial Sequence: Synthetic oligonucleotide
uccccuacuaauaugcucc

SEQ ID NO: 213781 - RNA, 19 nt, Artificial Sequence
  Description of Artificial Sequence: Synthetic oligonucleotide
uuauaagccucaaagccga

SEQ ID NO: 213782 - RNA, 19 nt, Artificial Sequence
  Description of Artificial Sequence: Synthetic oligonucleotide
aauuagccuauuacgaagg

SEQ ID NO: 213783 - RNA, 19 nt, Artificial Sequence
  Description of Artificial Sequence: Synthetic oligonucleotide
uuacgaagggucuuaaucu

SEQ ID NO: 213784 - RNA, 19 nt, Artificial Sequence
  Description of Artificial Sequence: Synthetic oligonucleotide
uggaguauaccaccugugg

SEQ ID NO: 213785 - RNA, 19 nt, Artificial Sequence
  Description of Artificial Sequence: Synthetic oligonucleotide
aaagccgaacacugcuucc

SEQ ID NO: 213786 - RNA, 19 nt, Artificial Sequence
  Description of Artificial Sequence: Synthetic oligonucleotide
gaugacgagagccuggggc

SEQ ID NO: 213787 - RNA, 19 nt, Artificial Sequence
  Description of Artificial Sequence: Synthetic oligonucleotide
aaggugauucacauagacc

SEQ ID NO: 213788 - RNA, 19 nt, Artificial Sequence
  Description of Artificial Sequence: Synthetic oligonucleotide
gaauuccucccacauaucc

SEQ ID NO: 213789 - RNA, 19 nt, Artificial Sequence
  Description of Artificial Sequence: Synthetic oligonucleotide
auaacgucaggcuuguucu

SEQ ID NO: 213790 - RNA, 19 nt, Artificial Sequence
  Description of Artificial Sequence: Synthetic oligonucleotide
uggaaguuuacacugccac

SEQ ID NO: 213791 - RNA, 19 nt, Artificial Sequence
  Description of Artificial Sequence: Synthetic oligonucleotide
uuauguaaagcauucugau

SEQ ID NO: 213792 - RNA, 19 nt, Artificial Sequence
  Description of Artificial Sequence: Synthetic oligonucleotide
uaagccucaaagccgaaca

SEQ ID NO: 213793 - RNA, 19 nt, Artificial Sequence
  Description of Artificial Sequence: Synthetic oligonucleotide
uagccuauuacgaaggguc

SEQ ID NO: 213794 - RNA, 19 nt, Artificial Sequence
  Description of Artificial Sequence: Synthetic oligonucleotide
uuggaauucugucuugggc

SEQ ID NO: 213795 - RNA, 19 nt, Artificial Sequence
  Description of Artificial Sequence: Synthetic oligonucleotide
aguaacagcauuuaccaua

SEQ ID NO: 213796 - RNA, 19 nt, Artificial Sequence
  Description of Artificial Sequence: Synthetic oligonucleotide
agaauaggaaguaacagca

SEQ ID NO: 213797 - RNA, 19 nt, Artificial Sequence
  Description of Artificial Sequence: Synthetic oligonucleotide
uacaguauauuguugcagu

SEQ ID NO: 213798 - RNA, 19 nt, Artificial Sequence
  Description of Artificial Sequence: Synthetic oligonucleotide
acgaguuuaaauuuacuaa

SEQ ID NO: 213799 - RNA, 19 nt, Artificial Sequence
  Description of Artificial Sequence: Synthetic oligonucleotide
ugaugaaaccuaaugcuuc

SEQ ID NO: 213800 - RNA, 19 nt, Artificial Sequence
  Description of Artificial Sequence: Synthetic oligonucleotide
ugugcauuuauaagccuca

SEQ ID NO: 213801 - RNA, 19 nt, Artificial Sequence
  Description of Artificial Sequence: Synthetic oligonucleotide
augacaauccgggauauuc

SEQ ID NO: 213802 - RNA, 19 nt, Artificial Sequence
  Description of Artificial Sequence: Synthetic oligonucleotide
ugcaguaacuccauaguaa

SEQ ID NO: 213803 - RNA, 19 nt, Artificial Sequence
  Description of Artificial Sequence: Synthetic oligonucleotide
ugguaagccauaauuuucu

SEQ ID NO: 213804 - RNA, 19 nt, Artificial Sequence
  Description of Artificial Sequence: Synthetic oligonucleotide
cauaccuagaaucugucuc

SEQ ID NO: 213805 - RNA, 19 nt, Artificial Sequence
  Description of Artificial Sequence: Synthetic oligonucleotide
uguaaagacgcugaaaauu

SEQ ID NO: 213806 - RNA, 19 nt, Artificial Sequence
  Description of Artificial Sequence: Synthetic oligonucleotide
aagcaauaauggaugaauc

SEQ ID NO: 213807 - RNA, 19 nt, Artificial Sequence
  Description of Artificial Sequence: Synthetic oligonucleotide
uuucgcaaaguuuaagcaa

SEQ ID NO: 213808 - RNA, 19 nt, Artificial Sequence
  Description of Artificial Sequence: Synthetic oligonucleotide
auuuaguaucgucccauag

SEQ ID NO: 213809 - RNA, 19 nt, Artificial Sequence
  Description of Artificial Sequence: Synthetic oligonucleotide
ucucaauaguaaaguuugg

SEQ ID NO: 213810 - RNA, 19 nt, Artificial Sequence
  Description of Artificial Sequence: Synthetic oligonucleotide
uuuacauaccuagaaucug

SEQ ID NO: 213811 - RNA, 19 nt, Artificial Sequence
  Description of Artificial Sequence: Synthetic oligonucleotide
aagguccaaauccauauuu

SEQ ID NO: 213812 - RNA, 19 nt, Artificial Sequence
  Description of Artificial Sequence: Synthetic oligonucleotide
uguagacgaaagcugggca

SEQ ID NO: 213813 - RNA, 19 nt, Artificial Sequence
  Description of Artificial Sequence: Synthetic oligonucleotide
gguagcuuugcauaugugc

SEQ ID NO: 213814 - RNA, 19 nt, Artificial Sequence
  Description of Artificial Sequence: Synthetic oligonucleotide
caaucauuguuaucauccg

SEQ ID NO: 213815 - RNA, 19 nt, Artificial Sequence
  Description of Artificial Sequence: Synthetic oligonucleotide
acaugaguauacugugugg

SEQ ID NO: 213816 - RNA, 19 nt, Artificial Sequence
  Description of Artificial Sequence: Synthetic oligonucleotide
guugacggaaauuugcuga

SEQ ID NO: 213817 - RNA, 19 nt, Artificial Sequence
  Description of Artificial Sequence: Synthetic oligonucleotide
acaugcgaaaggcauuuuc

SEQ ID NO: 213818 - RNA, 19 nt, Artificial Sequence
  Description of Artificial Sequence: Synthetic oligonucleotide
agcuccccuacuaauaugc

SEQ ID NO: 213819 - RNA, 19 nt, Artificial Sequence
  Description of Artificial Sequence: Synthetic oligonucleotide
uaagaguugcucuucgaaa

SEQ ID NO: 213820 - RNA, 19 nt, Artificial Sequence
  Description of Artificial Sequence: Synthetic oligonucleotide
cauccgaaaugucaggaag

SEQ ID NO: 213821 - RNA, 19 nt, Artificial Sequence
  Description of Artificial Sequence: Synthetic oligonucleotide
auuagccuauuacgaaggg

SEQ ID NO: 213822 - RNA, 19 nt, Artificial Sequence
  Description of Artificial Sequence: Synthetic oligonucleotide
uaucauccgaaaugucagg

SEQ ID NO: 213823 - RNA, 19 nt, Artificial Sequence
  Description of Artificial Sequence: Synthetic oligonucleotide
cacaauuagccuauuacga

SEQ ID NO: 213824 - RNA, 19 nt, Artificial Sequence
  Description of Artificial Sequence: Synthetic oligonucleotide
gauaguguaaagacgcuga

SEQ ID NO: 213825 - RNA, 19 nt, Artificial Sequence
  Description of Artificial Sequence: Synthetic oligonucleotide
cacacacacacacacacac

SEQ ID NO: 213826 - RNA, 19 nt, Artificial Sequence
  Description of Artificial Sequence: Synthetic oligonucleotide
cauacuauugauucaucca

SEQ ID NO: 213827 - RNA, 19 nt, Artificial Sequence
  Description of Artificial Sequence: Synthetic oligonucleotide
auaucuauacucugaccca

SEQ ID NO: 213828 - RNA, 19 nt, Artificial Sequence
  Description of Artificial Sequence: Synthetic oligonucleotide
cucgccaucagcugugucc

SEQ ID NO: 213829 - RNA, 19 nt, Artificial Sequence
  Description of Artificial Sequence: Synthetic oligonucleotide
guagacgaaagcugggcag

SEQ ID NO: 213830 - RNA, 19 nt, Artificial Sequence
  Description of Artificial Sequence: Synthetic oligonucleotide
gaucuuaugaucuccccaa

SEQ ID NO: 213831 - RNA, 19 nt, Artificial Sequence
  Description of Artificial Sequence: Synthetic oligonucleotide
acgcugaaaauuugucucg

SEQ ID NO: 213832 - RNA, 19 nt, Artificial Sequence
  Description of Artificial Sequence: Synthetic oligonucleotide
gacgagaggaagcgcacgg

SEQ ID NO: 213833 - RNA, 19 nt, Artificial Sequence
  Description of Artificial Sequence: Synthetic oligonucleotide
uguugacggaaauuugcug

SEQ ID NO: 213834 - RNA, 19 nt, Artificial Sequence
  Description of Artificial Sequence: Synthetic oligonucleotide
ugaaagaauuccucccaca

SEQ ID NO: 213835 - RNA, 19 nt, Artificial Sequence
  Description of Artificial Sequence: Synthetic oligonucleotide
ugacaauccgggauauuca

SEQ ID NO: 213836 - RNA, 19 nt, Artificial Sequence
  Description of Artificial Sequence: Synthetic oligonucleotide
acaauuagccuauuacgaa

SEQ ID NO: 213837 - RNA, 19 nt, Artificial Sequence
  Description of Artificial Sequence: Synthetic oligonucleotide
ugugucccaauguagaauu

SEQ ID NO: 213838 - RNA, 19 nt, Artificial Sequence
  Description of Artificial Sequence: Synthetic oligonucleotide
aaaacaacacacacacaca

SEQ ID NO: 213839 - RNA, 19 nt, Artificial Sequence
  Description of Artificial Sequence: Synthetic oligonucleotide
agacgcugaaaauuugucu

SEQ ID NO: 213840 - RNA, 19 nt, Artificial Sequence
  Description of Artificial Sequence: Synthetic oligonucleotide
aguuucauaucuauacucu

SEQ ID NO: 213841 - RNA, 19 nt, Artificial Sequence
  Description of Artificial Sequence: Synthetic oligonucleotide
uauguaaagcauucugaua

SEQ ID NO: 213842 - RNA, 19 nt, Artificial Sequence
  Description of Artificial Sequence: Synthetic oligonucleotide
agagcauacaguauauugu

SEQ ID NO: 213843 - RNA, 19 nt, Artificial Sequence
  Description of Artificial Sequence: Synthetic oligonucleotide
ccuaguaugaaguuaucug

SEQ ID NO: 213844 - RNA, 19 nt, Artificial Sequence
  Description of Artificial Sequence: Synthetic oligonucleotide
uuauuguaucgaauaccac

SEQ ID NO: 213845 - RNA, 19 nt, Artificial Sequence
  Description of Artificial Sequence: Synthetic oligonucleotide
cacguaucccguucuaugc

SEQ ID NO: 213846 - RNA, 19 nt, Artificial Sequence
  Description of Artificial Sequence: Synthetic oligonucleotide
gaugguguugcuuggacua

SEQ ID NO: 213847 - RNA, 19 nt, Artificial Sequence
  Description of Artificial Sequence: Synthetic oligonucleotide
uucccaagugaacuagucu

SEQ ID NO: 213848 - RNA, 19 nt, Artificial Sequence
  Description of Artificial Sequence: Synthetic oligonucleotide
uggccuaguaugaaguuau

SEQ ID NO: 213849 - RNA, 19 nt, Artificial Sequence
  Description of Artificial Sequence: Synthetic oligonucleotide
aaccuaaugcuuccuuggu

SEQ ID NO: 213850 - RNA, 19 nt, Artificial Sequence
  Description of Artificial Sequence: Synthetic oligonucleotide
ugucccaauguagaauucc

SEQ ID NO: 213851 - RNA, 19 nt, Artificial Sequence
  Description of Artificial Sequence: Synthetic oligonucleotide
auuguaucgaauaccacau

SEQ ID NO: 213852 - RNA, 19 nt, Artificial Sequence
  Description of Artificial Sequence: Synthetic oligonucleotide
gaguauacuguguggcuac

SEQ ID NO: 213853 - RNA, 19 nt, Artificial Sequence
  Description of Artificial Sequence: Synthetic oligonucleotide
uuaggcugugguaagccau

SEQ ID NO: 213854 - RNA, 19 nt, Artificial Sequence
  Description of Artificial Sequence: Synthetic oligonucleotide
uguggacuuguucaauuau

SEQ ID NO: 213855 - RNA, 19 nt, Artificial Sequence
  Description of Artificial Sequence: Synthetic oligonucleotide
uuauggcaaccuuauuugu

SEQ ID NO: 213856 - RNA, 19 nt, Artificial Sequence
  Description of Artificial Sequence: Synthetic oligonucleotide
ugcugauugauggagggaa

SEQ ID NO: 213857 - RNA, 19 nt, Artificial Sequence
  Description of Artificial Sequence: Synthetic oligonucleotide
uugaucuagagaagagcaa

SEQ ID NO: 213858 - RNA, 19 nt, Artificial Sequence
  Description of Artificial Sequence: Synthetic oligonucleotide
uguagagcuccccuacuaa

SEQ ID NO: 213859 - RNA, 19 nt, Artificial Sequence
  Description of Artificial Sequence: Synthetic oligonucleotide
ucccauggguucucaauag

SEQ ID NO: 213860 - RNA, 19 nt, Artificial Sequence
  Description of Artificial Sequence: Synthetic oligonucleotide
uugacggaaauuugcugac

SEQ ID NO: 213861 - RNA, 19 nt, Artificial Sequence
  Description of Artificial Sequence: Synthetic oligonucleotide
aauccgggauauucaacau

SEQ ID NO: 213862 - RNA, 19 nt, Artificial Sequence
  Description of Artificial Sequence: Synthetic oligonucleotide
gggagcuaggguuuuauug

SEQ ID NO: 213863 - RNA, 19 nt, Artificial Sequence
  Description of Artificial Sequence: Synthetic oligonucleotide
uacauaccuagaaucuguc

SEQ ID NO: 213864 - RNA, 19 nt, Artificial Sequence
  Description of Artificial Sequence: Synthetic oligonucleotide
ugcauuuauaagccucaaa

SEQ ID NO: 213865 - RNA, 19 nt, Artificial Sequence
  Description of Artificial Sequence: Synthetic oligonucleotide
augaguauacuguguggcu

SEQ ID NO: 213866 - RNA, 19 nt, Artificial Sequence
  Description of Artificial Sequence: Synthetic oligonucleotide
cuuuacauaccuagaaucu

SEQ ID NO: 213867 - RNA, 19 nt, Artificial Sequence
  Description of Artificial Sequence: Synthetic oligonucleotide
cacgaguuuaaauuuacua

SEQ ID NO: 213868 - RNA, 19 nt, Artificial Sequence
  Description of Artificial Sequence: Synthetic oligonucleotide
uuaagcaauaauggaugaa

SEQ ID NO: 213869 - RNA, 19 nt, Artificial Sequence
  Description of Artificial Sequence: Synthetic oligonucleotide
cacacacacacacacacga

SEQ ID NO: 213870 - RNA, 19 nt, Artificial Sequence
  Description of Artificial Sequence: Synthetic oligonucleotide
ggaguauaccaccuguggc

SEQ ID NO: 213871 - RNA, 19 nt, Artificial Sequence
  Description of Artificial Sequence: Synthetic oligonucleotide
accacauacuauugauuca

SEQ ID NO: 213872 - RNA, 19 nt, Artificial Sequence
  Description of Artificial Sequence: Synthetic oligonucleotide
acauaccuagaaucugucu

SEQ ID NO: 213873 - RNA, 19 nt, Artificial Sequence
  Description of Artificial Sequence: Synthetic oligonucleotide
agacaacucuaccacuuga

SEQ ID NO: 213874 - RNA, 19 nt, Artificial Sequence
  Description of Artificial Sequence: Synthetic oligonucleotide
uuggacuauucccaaugau

SEQ ID NO: 213875 - RNA, 19 nt, Artificial Sequence
  Description of Artificial Sequence: Synthetic oligonucleotide
uuagccuauuacgaagggu

SEQ ID NO: 213876 - RNA, 19 nt, Artificial Sequence
  Description of Artificial Sequence: Synthetic oligonucleotide
uagacgaaagcugggcagc

SEQ ID NO: 213877 - RNA, 19 nt, Artificial Sequence
  Description of Artificial Sequence: Synthetic oligonucleotide
uugucaggaaaauucucuu

SEQ ID NO: 213878 - RNA, 19 nt, Artificial Sequence
  Description of Artificial Sequence: Synthetic oligonucleotide
aguauacuguguggcuacc

SEQ ID NO: 213879 - RNA, 19 nt, Artificial Sequence
  Description of Artificial Sequence: Synthetic oligonucleotide
aacaacacacacacacaca

SEQ ID NO: 213880 - RNA, 19 nt, Artificial Sequence
  Description of Artificial Sequence: Synthetic oligonucleotide
ucauccgaaaugucaggaa

SEQ ID NO: 213881 - RNA, 19 nt, Artificial Sequence
  Description of Artificial Sequence: Synthetic oligonucleotide
augcauacuggaauaacgu

SEQ ID NO: 213882 - RNA, 19 nt, Artificial Sequence
  Description of Artificial Sequence: Synthetic oligonucleotide
ugaguauacuguguggcua

SEQ ID NO: 213883 - RNA, 19 nt, Artificial Sequence
  Description of Artificial Sequence: Synthetic oligonucleotide
ucuaccacuugaugcaauu

SEQ ID NO: 213884 - RNA, 19 nt, Artificial Sequence
  Description of Artificial Sequence: Synthetic oligonucleotide
caaagccgaacacugcuuc

SEQ ID NO: 213885 - RNA, 19 nt, Artificial Sequence
  Description of Artificial Sequence: Synthetic oligonucleotide
ucuaugcauacuggaauaa

SEQ ID NO: 213886 - RNA, 19 nt, Artificial Sequence
  Description of Artificial Sequence: Synthetic oligonucleotide
gacaauccgggauauucaa

SEQ ID NO: 213887 - RNA, 19 nt, Artificial Sequence
  Description of Artificial Sequence: Synthetic oligonucleotide
uguuggagcuugaaacaua

SEQ ID NO: 213888 - RNA, 19 nt, Artificial Sequence
  Description of Artificial Sequence: Synthetic oligonucleotide
uaguaucgucccauagcug

SEQ ID NO: 213889 - RNA, 19 nt, Artificial Sequence
  Description of Artificial Sequence: Synthetic oligonucleotide
gaucuagagaagagcaauc

SEQ ID NO: 213890 - RNA, 19 nt, Artificial Sequence
  Description of Artificial Sequence: Synthetic oligonucleotide
acgaaagcugggcagcaga

SEQ ID NO: 213891 - RNA, 19 nt, Artificial Sequence
  Description of Artificial Sequence: Synthetic oligonucleotide
auaguguaaagacgcugaa

SEQ ID NO: 213892 - RNA, 19 nt, Artificial Sequence
  Description of Artificial Sequence: Synthetic oligonucleotide
gcuuggacuauucccaaug

SEQ ID NO: 213893 - RNA, 19 nt, Artificial Sequence
  Description of Artificial Sequence: Synthetic oligonucleotide
ugacgagaggaagcgcacg

SEQ ID NO: 213894 - RNA, 19 nt, Artificial Sequence
  Description of Artificial Sequence: Synthetic oligonucleotide
uacgaagggucuuaaucuu

SEQ ID NO: 213895 - RNA, 19 nt, Artificial Sequence
  Description of Artificial Sequence: Synthetic oligonucleotide
cuaugcauacuggaauaac

SEQ ID NO: 213896 - RNA, 19 nt, Artificial Sequence
  Description of Artificial Sequence: Synthetic oligonucleotide
acaauccgggauauucaac

SEQ ID NO: 213897 - RNA, 19 nt, Artificial Sequence
  Description of Artificial Sequence: Synthetic oligonucleotide
gccacuuacaagaauagga

SEQ ID NO: 213898 - RNA, 19 nt, Artificial Sequence
  Description of Artificial Sequence: Synthetic oligonucleotide
auaggaacucacugguuua

SEQ ID NO: 213899 - RNA, 19 nt, Artificial Sequence
  Description of Artificial Sequence: Synthetic oligonucleotide
acaguauauuguugcagua

SEQ ID NO: 213900 - RNA, 19 nt, Artificial Sequence
  Description of Artificial Sequence: Synthetic oligonucleotide
uaagguccaaauccauauu

SEQ ID NO: 213901 - RNA, 19 nt, Artificial Sequence
  Description of Artificial Sequence: Synthetic oligonucleotide
auuuaccauaagaggaaca

SEQ ID NO: 213902 - RNA, 19 nt, Artificial Sequence
  Description of Artificial Sequence: Synthetic oligonucleotide
uauuacgaagggucuuaau

SEQ ID NO: 213903 - RNA, 19 nt, Artificial Sequence
  Description of Artificial Sequence: Synthetic oligonucleotide
gccacaugaguauacugug

SEQ ID NO: 213904 - RNA, 19 nt, Artificial Sequence
  Description of Artificial Sequence: Synthetic oligonucleotide
gugguaagccauaauuuuc

SEQ ID NO: 213905 - RNA, 19 nt, Artificial Sequence
  Description of Artificial Sequence: Synthetic oligonucleotide
agcuugaaacauauucaug

SEQ ID NO: 213906 - RNA, 19 nt, Artificial Sequence
  Description of Artificial Sequence: Synthetic oligonucleotide
acguaucccguucuaugca

SEQ ID NO: 213907 - RNA, 19 nt, Artificial Sequence
  Description of Artificial Sequence: Synthetic oligonucleotide
guguagacgaaagcugggc

SEQ ID NO: 213908 - RNA, 19 nt, Artificial Sequence
  Description of Artificial Sequence: Synthetic oligonucleotide
cuccccuacuaauaugcuc

SEQ ID NO: 213909 - RNA, 19 nt, Artificial Sequence
  Description of Artificial Sequence: Synthetic oligonucleotide
acggaaauuugcugacaga

SEQ ID NO: 213910 - RNA, 19 nt, Artificial Sequence
  Description of Artificial Sequence: Synthetic oligonucleotide
uaacgucaggcuuguucug

SEQ ID NO: 213911 - RNA, 19 nt, Artificial Sequence
  Description of Artificial Sequence: Synthetic oligonucleotide
gagggaagguuuggaaccc

SEQ ID NO: 213912 - RNA, 19 nt, Artificial Sequence
  Description of Artificial Sequence: Synthetic oligonucleotide
ggaaauuugcugacagagc

SEQ ID NO: 213913 - RNA, 19 nt, Artificial Sequence
  Description of Artificial Sequence: Synthetic oligonucleotide
augacgagaggaagcgcac

SEQ ID NO: 213914 - RNA, 19 nt, Artificial Sequence
  Description of Artificial Sequence: Synthetic oligonucleotide
ggauaguguaaagacgcug

SEQ ID NO: 213915 - RNA, 19 nt, Artificial Sequence
  Description of Artificial Sequence: Synthetic oligonucleotide
ugucucgaauuggaccaag

SEQ ID NO: 213916 - RNA, 19 nt, Artificial Sequence
  Description of Artificial Sequence: Synthetic oligonucleotide
cuuggacuauucccaauga

SEQ ID NO: 213917 - RNA, 19 nt, Artificial Sequence
  Description of Artificial Sequence: Synthetic oligonucleotide
uaccuagaaucugucucug

SEQ ID NO: 213918 - RNA, 19 nt, Artificial Sequence
  Description of Artificial Sequence: Synthetic oligonucleotide
acacacacacacacacacg

SEQ ID NO: 213919 - RNA, 19 nt, Artificial Sequence
  Description of Artificial Sequence: Synthetic oligonucleotide
auccgaaaugucaggaagu

SEQ ID NO: 213920 - RNA, 19 nt, Artificial Sequence
  Description of Artificial Sequence: Synthetic oligonucleotide
uuguaucgaauaccacaua

SEQ ID NO: 213921 - RNA, 19 nt, Artificial Sequence
  Description of Artificial Sequence: Synthetic oligonucleotide
uaacagcauuuaccauaag

SEQ ID NO: 213922 - RNA, 19 nt, Artificial Sequence
  Description of Artificial Sequence: Synthetic oligonucleotide
aucgaauaccacauacuau

SEQ ID NO: 213923 - RNA, 19 nt, Artificial Sequence
  Description of Artificial Sequence: Synthetic oligonucleotide
uguggccuaguaugaaguu

SEQ ID NO: 213924 - RNA, 19 nt, Artificial Sequence
  Description of Artificial Sequence: Synthetic oligonucleotide
ggaaaaguuucauaucuau

SEQ ID NO: 213925 - RNA, 19 nt, Artificial Sequence
  Description of Artificial Sequence: Synthetic oligonucleotide
ucccauagcuguagagcuc

SEQ ID NO: 213926 - RNA, 19 nt, Artificial Sequence
  Description of Artificial Sequence: Synthetic oligonucleotide
uugcuuggacuauucccaa

SEQ ID NO: 213927 - RNA, 19 nt, Artificial Sequence
  Description of Artificial Sequence: Synthetic oligonucleotide
gagcuccccuacuaauaug

SEQ ID NO: 213928 - RNA, 19 nt, Artificial Sequence
  Description of Artificial Sequence: Synthetic oligonucleotide
ugacggaaauuugcugaca

SEQ ID NO: 213929 - RNA, 19 nt, Artificial Sequence
  Description of Artificial Sequence: Synthetic oligonucleotide
acacacacacacgaguuua

SEQ ID NO: 213930 - RNA, 19 nt, Artificial Sequence
  Description of Artificial Sequence: Synthetic oligonucleotide
ugaugacaauccgggauau

SEQ ID NO: 213931 - RNA, 19 nt, Artificial Sequence
  Description of Artificial Sequence: Synthetic oligonucleotide
gcacguaucccguucuaug

SEQ ID NO: 213932 - RNA, 19 nt, Artificial Sequence
  Description of Artificial Sequence: Synthetic oligonucleotide
ggacuauucccaaugaugu

SEQ ID NO: 213933 - RNA, 19 nt, Artificial Sequence
  Description of Artificial Sequence: Synthetic oligonucleotide
uauaagccucaaagccgaa

SEQ ID NO: 213934 - RNA, 19 nt, Artificial Sequence
  Description of Artificial Sequence: Synthetic oligonucleotide
accuagaaucugucucuga

SEQ ID NO: 213935 - RNA, 19 nt, Artificial Sequence
  Description of Artificial Sequence: Synthetic oligonucleotide
cuggaaguuuacacugcca

SEQ ID NO: 213936 - RNA, 19 nt, Artificial Sequence
  Description of Artificial Sequence: Synthetic oligonucleotide
agcagcacaauuagccuau

SEQ ID NO: 213937 - RNA, 19 nt, Artificial Sequence
  Description of Artificial Sequence: Synthetic oligonucleotide
acacacacacacacacgag

SEQ ID NO: 213938 - RNA, 19 nt, Artificial Sequence
  Description of Artificial Sequence: Synthetic oligonucleotide
acacacacacacacgaguu

SEQ ID NO: 213939 - RNA, 19 nt, Artificial Sequence
  Description of Artificial Sequence: Synthetic oligonucleotide
caacacacacacacacaca

SEQ ID NO: 213940 - RNA, 19 nt, Artificial Sequence
  Description of Artificial Sequence: Synthetic oligonucleotide
gucucgaauuggaccaagc

SEQ ID NO: 213941 - RNA, 19 nt, Artificial Sequence
  Description of Artificial Sequence: Synthetic oligonucleotide
guaucgaauaccacauacu

SEQ ID NO: 213942 - RNA, 19 nt, Artificial Sequence
  Description of Artificial Sequence: Synthetic oligonucleotide
ugcuuggacuauucccaau

SEQ ID NO: 213943 - RNA, 19 nt, Artificial Sequence
  Description of Artificial Sequence: Synthetic oligonucleotide
ggcgaaacacggaacucag

SEQ ID NO: 213944 - RNA, 19 nt, Artificial Sequence
  Description of Artificial Sequence: Synthetic oligonucleotide
cacacacacacacacgagu

SEQ ID NO: 213945 - RNA, 19 nt, Artificial Sequence
  Description of Artificial Sequence: Synthetic oligonucleotide
agccuauuacgaagggucu

SEQ ID NO: 213946 - RNA, 19 nt, Artificial Sequence
  Description of Artificial Sequence: Synthetic oligonucleotide
gagagguccaccauauuuu

SEQ ID NO: 213947 - RNA, 19 nt, Artificial Sequence
  Description of Artificial Sequence: Synthetic oligonucleotide
aggauaguguaaagacgcu

SEQ ID NO: 213948 - RNA, 19 nt, Artificial Sequence
  Description of Artificial Sequence: Synthetic oligonucleotide
ccgcuuauauucugagagc

SEQ ID NO: 213949 - RNA, 19 nt, Artificial Sequence
  Description of Artificial Sequence: Synthetic oligonucleotide
cuguggccuaguaugaagu

SEQ ID NO: 213950 - RNA, 19 nt, Artificial Sequence
  Description of Artificial Sequence: Synthetic oligonucleotide
cgaauaccacauacuauug

SEQ ID NO: 213951 - RNA, 19 nt, Artificial Sequence
  Description of Artificial Sequence: Synthetic oligonucleotide
gacaacucuaccacuugau

SEQ ID NO: 213952 - RNA, 19 nt, Artificial Sequence
  Description of Artificial Sequence: Synthetic oligonucleotide
cugguagcuuugcauaugu

SEQ ID NO: 213953 - RNA, 19 nt, Artificial Sequence
  Description of Artificial Sequence: Synthetic oligonucleotide
acacacacacacacacaca

SEQ ID NO: 213954 - RNA, 19 nt, Artificial Sequence
  Description of Artificial Sequence: Synthetic oligonucleotide
agcacguaucccguucuau

SEQ ID NO: 213955 - RNA, 19 nt, Artificial Sequence
  Description of Artificial Sequence: Synthetic oligonucleotide
guagagcuccccuacuaau

SEQ ID NO: 213956 - RNA, 19 nt, Artificial Sequence
  Description of Artificial Sequence: Synthetic oligonucleotide
guguugacggaaauuugcu

SEQ ID NO: 213957 - RNA, 19 nt, Artificial Sequence
  Description of Artificial Sequence: Synthetic oligonucleotide
cuggaauaacgucaggcuu

SEQ ID NO: 213958 - RNA, 19 nt, Artificial Sequence
  Description of Artificial Sequence: Synthetic oligonucleotide
guaguuccauggcuuguua

SEQ ID NO: 213959 - RNA, 19 nt, Artificial Sequence
  Description of Artificial Sequence: Synthetic oligonucleotide
agcuaggguuuuauuguau

SEQ ID NO: 213960 - RNA, 19 nt, Artificial Sequence
  Description of Artificial Sequence: Synthetic oligonucleotide
gugcuucaaacaugcgaaa

SEQ ID NO: 213961 - RNA, 19 nt, Artificial Sequence
  Description of Artificial Sequence: Synthetic oligonucleotide
aacaugcgaaaggcauuuu

SEQ ID NO: 213962 - RNA, 19 nt, Artificial Sequence
  Description of Artificial Sequence: Synthetic oligonucleotide
ucgaaagcauuugcuucuu

SEQ ID NO: 213963 - RNA, 19 nt, Artificial Sequence
  Description of Artificial Sequence: Synthetic oligonucleotide
cagugcuugugcauuuaua

SEQ ID NO: 213964 - RNA, 19 nt, Artificial Sequence
  Description of Artificial Sequence: Synthetic oligonucleotide
guggccuaguaugaaguua

SEQ ID NO: 213965 - RNA, 19 nt, Artificial Sequence
  Description of Artificial Sequence: Synthetic oligonucleotide
gggagcacguaucccguuc

SEQ ID NO: 213966 - RNA, 19 nt, Artificial Sequence
  Description of Artificial Sequence: Synthetic oligonucleotide
cuauuacgaagggucuuaa

SEQ ID NO: 213967 - RNA, 19 nt, Artificial Sequence
  Description of Artificial Sequence: Synthetic oligonucleotide
gaacuagucugcauccauu

SEQ ID NO: 213968 - RNA, 19 nt, Artificial Sequence
  Description of Artificial Sequence: Synthetic oligonucleotide
ccccuacuaauaugcuccc

SEQ ID NO: 213969 - RNA, 19 nt, Artificial Sequence
  Description of Artificial Sequence: Synthetic oligonucleotide
gugcauuuauaagccucaa

SEQ ID NO: 213970 - RNA, 19 nt, Artificial Sequence
  Description of Artificial Sequence: Synthetic oligonucleotide
cagcacaauuagccuauua

SEQ ID NO: 213971 - RNA, 19 nt, Artificial Sequence
  Description of Artificial Sequence: Synthetic oligonucleotide
cugcugauugauggaggga

SEQ ID NO: 213972 - RNA, 19 nt, Artificial Sequence
  Description of Artificial Sequence: Synthetic oligonucleotide
gagcacguaucccguucua

SEQ ID NO: 213973 - RNA, 19 nt, Artificial Sequence
  Description of Artificial Sequence: Synthetic oligonucleotide
agggagcacguaucccguu

SEQ ID NO: 213974 - RNA, 19 nt, Artificial Sequence
  Description of Artificial Sequence: Synthetic oligonucleotide
ggucauuacccugguagcu

SEQ ID NO: 213975 - RNA, 19 nt, Artificial Sequence
  Description of Artificial Sequence: Synthetic oligonucleotide
gucauuacccugguagcuu

SEQ ID NO: 213976 - RNA, 19 nt, Artificial Sequence
  Description of Artificial Sequence: Synthetic oligonucleotide
ccugguagcuuugcauaug

SEQ ID NO: 213977 - RNA, 19 nt, Artificial Sequence
  Description of Artificial Sequence: Synthetic oligonucleotide
guaucgucccauagcugua

SEQ ID NO: 213978 - RNA, 19 nt, Artificial Sequence
  Description of Artificial Sequence: Synthetic oligonucleotide
gggaagguuuggaacccuc

SEQ ID NO: 213979 - RNA, 19 nt, Artificial Sequence
  Description of Artificial Sequence: Synthetic oligonucleotide
ggagcacguaucccguucu

SEQ ID NO: 213980 - RNA, 19 nt, Artificial Sequence
  Description of Artificial Sequence: Synthetic oligonucleotide
gcgaaacacggaacucagc

SEQ ID NO: 213981 - RNA, 19 nt, Artificial Sequence
  Description of Artificial Sequence: Synthetic oligonucleotide
auaccaccuguggcaggcu

SEQ ID NO: 213982 - RNA, 19 nt, Artificial Sequence
  Description of Artificial Sequence: Synthetic oligonucleotide
ccuauuacgaagggucuua

SEQ ID NO: 213983 - RNA, 19 nt, Artificial Sequence
  Description of Artificial Sequence: Synthetic oligonucleotide
cacacacacacacgaguuu

SEQ ID NO: 213984 - RNA, 19 nt, Artificial Sequence
  Description of Artificial Sequence: Synthetic oligonucleotide
gaugacaauccgggauauu

SEQ ID NO: 213985 - RNA, 19 nt, Artificial Sequence
  Description of Artificial Sequence: Synthetic oligonucleotide
gguaguuccauggcuuguu

SEQ ID NO: 213986 - RNA, 19 nt, Artificial Sequence
  Description of Artificial Sequence: Synthetic oligonucleotide
gcggcgaaacacggaacuc

SEQ ID NO: 213987 - RNA, 19 nt, Artificial Sequence
  Description of Artificial Sequence: Synthetic oligonucleotide
cggcgaaacacggaacuca

SEQ ID NO: 213988 - RNA, 19 nt, Artificial Sequence
  Description of Artificial Sequence: Synthetic oligonucleotide
ccaagcgggucauuacccu

SEQ ID NO: 213989 - RNA, 19 nt, Artificial Sequence
  Description of Artificial Sequence: Synthetic oligonucleotide
cccuacuaauaugcuccca

SEQ ID NO: 213990 - RNA, 19 nt, Artificial Sequence
  Description of Artificial Sequence: Synthetic oligonucleotide
cguaucccguucuaugcau

SEQ ID NO: 213991 - RNA, 19 nt, Artificial Sequence
  Description of Artificial Sequence: Synthetic oligonucleotide
gccuauuacgaagggucuu

SEQ ID NO: 213992 - RNA, 19 nt, Artificial Sequence
  Description of Artificial Sequence: Synthetic oligonucleotide
cccugguagcuuugcauau

SEQ ID NO: 213993 - RNA, 19 nt, Artificial Sequence
  Description of Artificial Sequence: Synthetic oligonucleotide
ccgaaaugucaggaagugu

SEQ ID NO: 213994 - RNA, 19 nt, Artificial Sequence
  Description of Artificial Sequence: Synthetic oligonucleotide
gcuccccuacuaauaugcu

SEQ ID NO: 213995 - RNA, 19 nt, Artificial Sequence
  Description of Artificial Sequence: Synthetic oligonucleotide
gaauaacgucaggcuuguu

SEQ ID NO: 213996 - RNA, 19 nt, Artificial Sequence
  Description of Artificial Sequence: Synthetic oligonucleotide
gcagcacaauuagccuauu

SEQ ID NO: 213997 - RNA, 19 nt, Artificial Sequence
  Description of Artificial Sequence: Synthetic oligonucleotide
uuuacuaucuuucaguucu

SEQ ID NO: 213998 - RNA, 19 nt, Artificial Sequence
  Description of Artificial Sequence: Synthetic oligonucleotide
aaaguuuaaaacauucagc

SEQ ID NO: 213999 - RNA, 19 nt, Artificial Sequence
  Description of Artificial Sequence: Synthetic oligonucleotide
ucuaguaauuuaaugaacc

SEQ ID NO: 214000 - RNA, 19 nt, Artificial Sequence
  Description of Artificial Sequence: Synthetic oligonucleotide
uuaaguaucauguccauug

SEQ ID NO: 214001 - RNA, 19 nt, Artificial Sequence
  Description of Artificial Sequence: Synthetic oligonucleotide
ugaacugauauacuaagag

SEQ ID NO: 214002 - RNA, 19 nt, Artificial Sequence
  Description of Artificial Sequence: Synthetic oligonucleotide
aauaacuauagaagcaugc

SEQ ID NO: 214003 - RNA, 19 nt, Artificial Sequence
  Description of Artificial Sequence: Synthetic oligonucleotide
agaaagaacguucaccgcc

SEQ ID NO: 214004 - RNA, 19 nt, Artificial Sequence
  Description of Artificial Sequence: Synthetic oligonucleotide
acaauaagcccguugagac

SEQ ID NO: 214005 - RNA, 19 nt, Artificial Sequence
  Description of Artificial Sequence: Synthetic oligonucleotide
uauucuuagacuagaaaug

SEQ ID NO: 214006 - RNA, 19 nt, Artificial Sequence
  Description of Artificial Sequence: Synthetic oligonucleotide
auaagcaucaucuauugcu

SEQ ID NO: 214007 - RNA, 19 nt, Artificial Sequence
  Description of Artificial Sequence: Synthetic oligonucleotide
uaaucgauuaauuucuuug

SEQ ID NO: 214008 - RNA, 19 nt, Artificial Sequence
  Description of Artificial Sequence: Synthetic oligonucleotide
auucuaaucaguuuacuug

SEQ ID NO: 214009 - RNA, 19 nt, Artificial Sequence
  Description of Artificial Sequence: Synthetic oligonucleotide
ucagaaacgauuaucugug

SEQ ID NO: 214010 - RNA, 19 nt, Artificial Sequence
  Description of Artificial Sequence: Synthetic oligonucleotide
aguaauuuaaugaaccuuc

SEQ ID NO: 214011 - RNA, 19 nt, Artificial Sequence
  Description of Artificial Sequence: Synthetic oligonucleotide
uuucucaauaacuauagaa

SEQ ID NO: 214012 - RNA, 19 nt, Artificial Sequence
  Description of Artificial Sequence: Synthetic oligonucleotide
auucgaagaauucuaauca

SEQ ID NO: 214013 - RNA, 19 nt, Artificial Sequence
  Description of Artificial Sequence: Synthetic oligonucleotide
aaucgauuaauuucuuugu

SEQ ID NO: 214014 - RNA, 19 nt, Artificial Sequence
  Description of Artificial Sequence: Synthetic oligonucleotide
aauugucucugauuauagg

SEQ ID NO: 214015 - RNA, 19 nt, Artificial Sequence
  Description of Artificial Sequence: Synthetic oligonucleotide
agaaacgauuaucuguggc

SEQ ID NO: 214016 - RNA, 19 nt, Artificial Sequence
  Description of Artificial Sequence: Synthetic oligonucleotide
uuuaugaguaaauugucuc

SEQ ID NO: 214017 - RNA, 19 nt, Artificial Sequence
  Description of Artificial Sequence: Synthetic oligonucleotide
cagaugaauaguaacgucc

SEQ ID NO: 214018 - RNA, 19 nt, Artificial Sequence
  Description of Artificial Sequence: Synthetic oligonucleotide
augaauaguaacguccugc

SEQ ID NO: 214019 - RNA, 19 nt, Artificial Sequence
  Description of Artificial Sequence: Synthetic oligonucleotide
aaacgauuaucuguggccg

SEQ ID NO: 214020 - RNA, 19 nt, Artificial Sequence
  Description of Artificial Sequence: Synthetic oligonucleotide
uuaucuguggccgagaggu

SEQ ID NO: 214021 - RNA, 19 nt, Artificial Sequence
  Description of Artificial Sequence: Synthetic oligonucleotide
uauggcaacaauaggcuug

SEQ ID NO: 214022 - RNA, 19 nt, Artificial Sequence
  Description of Artificial Sequence: Synthetic oligonucleotide
aaugcuagucuuaaucagg

SEQ ID NO: 214023 - RNA, 19 nt, Artificial Sequence
  Description of Artificial Sequence: Synthetic oligonucleotide
uccacaauaagcccguuga

SEQ ID NO: 214024 - RNA, 19 nt, Artificial Sequence
  Description of Artificial Sequence: Synthetic oligonucleotide
uucuaaucaguuuacuuga

SEQ ID NO: 214025 - RNA, 19 nt, Artificial Sequence
  Description of Artificial Sequence: Synthetic oligonucleotide
ugucuuguaccuaugaguc

SEQ ID NO: 214026 - RNA, 19 nt, Artificial Sequence
  Description of Artificial Sequence: Synthetic oligonucleotide
aaaguauaauuugcagcgc

SEQ ID NO: 214027 - RNA, 19 nt, Artificial Sequence
  Description of Artificial Sequence: Synthetic oligonucleotide
uuauaauguaucuggcacc

SEQ ID NO: 214028 - RNA, 19 nt, Artificial Sequence
  Description of Artificial Sequence: Synthetic oligonucleotide
aaguauaauuugcagcgca

SEQ ID NO: 214029 - RNA, 19 nt, Artificial Sequence
  Description of Artificial Sequence: Synthetic oligonucleotide
uuuugggacugcaugacug

SEQ ID NO: 214030 - RNA, 19 nt, Artificial Sequence
  Description of Artificial Sequence: Synthetic oligonucleotide
ucaacuuguguugucaucc

SEQ ID NO: 214031 - RNA, 19 nt, Artificial Sequence
  Description of Artificial Sequence: Synthetic oligonucleotide
auugaaggaagcuuuauuu

SEQ ID NO: 214032 - RNA, 19 nt, Artificial Sequence
  Description of Artificial Sequence: Synthetic oligonucleotide
ucuauaagcaucaucuauu

SEQ ID NO: 214033 - RNA, 19 nt, Artificial Sequence
  Description of Artificial Sequence: Synthetic oligonucleotide
ucuuagacuagaaauguuu

SEQ ID NO: 214034 - RNA, 19 nt, Artificial Sequence
  Description of Artificial Sequence: Synthetic oligonucleotide
ucgauuaauuucuuugucu

SEQ ID NO: 214035 - RNA, 19 nt, Artificial Sequence
  Description of Artificial Sequence: Synthetic oligonucleotide
uuauacugcuuaugguugg

SEQ ID NO: 214036 - RNA, 19 nt, Artificial Sequence
  Description of Artificial Sequence: Synthetic oligonucleotide
aucgauuaauuucuuuguc

SEQ ID NO: 214037 - RNA, 19 nt, Artificial Sequence
  Description of Artificial Sequence: Synthetic oligonucleotide
uucgaagaauucuaaucag

SEQ ID NO: 214038 - RNA, 19 nt, Artificial Sequence
  Description of Artificial Sequence: Synthetic oligonucleotide
uuauaggucaguguaugcc

SEQ ID NO: 214039 - RNA, 19 nt, Artificial Sequence
  Description of Artificial Sequence: Synthetic oligonucleotide
uguugguaugucuuguacc

SEQ ID NO: 214040 - RNA, 19 nt, Artificial Sequence
  Description of Artificial Sequence: Synthetic oligonucleotide
gagucauuauuucuucuag

SEQ ID NO: 214041 - RNA, 19 nt, Artificial Sequence
  Description of Artificial Sequence: Synthetic oligonucleotide
ugaaauugguuuucacaag

SEQ ID NO: 214042 - RNA, 19 nt, Artificial Sequence
  Description of Artificial Sequence: Synthetic oligonucleotide
uucaccgccggacaaagca

SEQ ID NO: 214043 - RNA, 19 nt, Artificial Sequence
  Description of Artificial Sequence: Synthetic oligonucleotide
aauaagcccguugagacaa

SEQ ID NO: 214044 - RNA, 19 nt, Artificial Sequence
  Description of Artificial Sequence: Synthetic oligonucleotide
auuaugcauguuaaaauag

SEQ ID NO: 214045 - RNA, 19 nt, Artificial Sequence
  Description of Artificial Sequence: Synthetic oligonucleotide
ucagauuaaaggagccugc

SEQ ID NO: 214046 - RNA, 19 nt, Artificial Sequence
  Description of Artificial Sequence: Synthetic oligonucleotide
aacugucuaaaacgcuggg

SEQ ID NO: 214047 - RNA, 19 nt, Artificial Sequence
  Description of Artificial Sequence: Synthetic oligonucleotide
uacguugucaacuuguguu

SEQ ID NO: 214048 - RNA, 19 nt, Artificial Sequence
  Description of Artificial Sequence: Synthetic oligonucleotide
gauuauaggucaguguaug

SEQ ID NO: 214049 - RNA, 19 nt, Artificial Sequence
  Description of Artificial Sequence: Synthetic oligonucleotide
uaugccucacaucuaaauc

SEQ ID NO: 214050 - RNA, 19 nt, Artificial Sequence
  Description of Artificial Sequence: Synthetic oligonucleotide
ggcuuuacacaaucgaugg

SEQ ID NO: 214051 - RNA, 19 nt, Artificial Sequence
  Description of Artificial Sequence: Synthetic oligonucleotide
gauucaauggccaaagcaa

SEQ ID NO: 214052 - RNA, 19 nt, Artificial Sequence
  Description of Artificial Sequence: Synthetic oligonucleotide
ucugauuauaggucagugu

SEQ ID NO: 214053 - RNA, 19 nt, Artificial Sequence
  Description of Artificial Sequence: Synthetic oligonucleotide
acaauaaguugucaaagua

SEQ ID NO: 214054 - RNA, 19 nt, Artificial Sequence
  Description of Artificial Sequence: Synthetic oligonucleotide
ucuagucucguucuauuuc

SEQ ID NO: 214055 - RNA, 19 nt, Artificial Sequence
  Description of Artificial Sequence: Synthetic oligonucleotide
cucuacaauucuugggugg

SEQ ID NO: 214056 - RNA, 19 nt, Artificial Sequence
  Description of Artificial Sequence: Synthetic oligonucleotide
uggaugauaagcagcucug

SEQ ID NO: 214057 - RNA, 19 nt, Artificial Sequence
  Description of Artificial Sequence: Synthetic oligonucleotide
gacugcacgagcuacagaa

SEQ ID NO: 214058 - RNA, 19 nt, Artificial Sequence
  Description of Artificial Sequence: Synthetic oligonucleotide
ugaaaggugauucggcaau

SEQ ID NO: 214059 - RNA, 19 nt, Artificial Sequence
  Description of Artificial Sequence: Synthetic oligonucleotide
agaacguucaccgccggac

SEQ ID NO: 214060 - RNA, 19 nt, Artificial Sequence
  Description of Artificial Sequence: Synthetic oligonucleotide
agauuuguuaugugggccu

SEQ ID NO: 214061 - RNA, 19 nt, Artificial Sequence
  Description of Artificial Sequence: Synthetic oligonucleotide
caaucgaugggucagauua

SEQ ID NO: 214062 - RNA, 19 nt, Artificial Sequence
  Description of Artificial Sequence: Synthetic oligonucleotide
uucccgaucuccaugacua

SEQ ID NO: 214063 - RNA, 19 nt, Artificial Sequence
  Description of Artificial Sequence: Synthetic oligonucleotide
agggccaauagguuuauga

SEQ ID NO: 214064 - RNA, 19 nt, Artificial Sequence
  Description of Artificial Sequence: Synthetic oligonucleotide
uuuucucaauaacuauaga

SEQ ID NO: 214065 - RNA, 19 nt, Artificial Sequence
  Description of Artificial Sequence: Synthetic oligonucleotide
uuuuagucgaucaguuuua

SEQ ID NO: 214066 - RNA, 19 nt, Artificial Sequence
  Description of Artificial Sequence: Synthetic oligonucleotide
aaaacccgguauuaugaaa

SEQ ID NO: 214067 - RNA, 19 nt, Artificial Sequence
  Description of Artificial Sequence: Synthetic oligonucleotide
caagguuuaaaugcuaguc

SEQ ID NO: 214068 - RNA, 19 nt, Artificial Sequence
  Description of Artificial Sequence: Synthetic oligonucleotide
aaagaacguucaccgccgg

SEQ ID NO: 214069 - RNA, 19 nt, Artificial Sequence
  Description of Artificial Sequence: Synthetic oligonucleotide
auaguaacguccugcaaaa

SEQ ID NO: 214070 - RNA, 19 nt, Artificial Sequence
  Description of Artificial Sequence: Synthetic oligonucleotide
auuaucuguggccgagagg

SEQ ID NO: 214071 - RNA, 19 nt, Artificial Sequence
  Description of Artificial Sequence: Synthetic oligonucleotide
gcuauuugcaacaacagca

SEQ ID NO: 214072 - RNA, 19 nt, Artificial Sequence
  Description of Artificial Sequence: Synthetic oligonucleotide
gucagauuaaaggagccug

SEQ ID NO: 214073 - RNA, 19 nt, Artificial Sequence
  Description of Artificial Sequence: Synthetic oligonucleotide
caccuaaagggccaauagg

SEQ ID NO: 214074 - RNA, 19 nt, Artificial Sequence
  Description of Artificial Sequence: Synthetic oligonucleotide
cugauuauaggucagugua

SEQ ID NO: 214075 - RNA, 19 nt, Artificial Sequence
  Description of Artificial Sequence: Synthetic oligonucleotide
uaccuaugagucauuauuu

SEQ ID NO: 214076 - RNA, 19 nt, Artificial Sequence
  Description of Artificial Sequence: Synthetic oligonucleotide
agcauugucuauuucuaaa

SEQ ID NO: 214077 - RNA, 19 nt, Artificial Sequence
  Description of Artificial Sequence: Synthetic oligonucleotide
uuacacaaucgauggguca

SEQ ID NO: 214078 - RNA, 19 nt, Artificial Sequence
  Description of Artificial Sequence: Synthetic oligonucleotide
ugacucuuauugcugguaa

SEQ ID NO: 214079 - RNA, 19 nt, Artificial Sequence
  Description of Artificial Sequence: Synthetic oligonucleotide
agcgcaaugucaaacaccu

SEQ ID NO: 214080 - RNA, 19 nt, Artificial Sequence
  Description of Artificial Sequence: Synthetic oligonucleotide
ucccugguggauaaaauuu

SEQ ID NO: 214081 - RNA, 19 nt, Artificial Sequence
  Description of Artificial Sequence: Synthetic oligonucleotide
uucuaaacuguugguaugu

SEQ ID NO: 214082 - RNA, 19 nt, Artificial Sequence
  Description of Artificial Sequence: Synthetic oligonucleotide
cucguuucuggcuaucaac

SEQ ID NO: 214083 - RNA, 19 nt, Artificial Sequence
  Description of Artificial Sequence: Synthetic oligonucleotide
augcaagcaccuaaagggc

SEQ ID NO: 214084 - RNA, 19 nt, Artificial Sequence
  Description of Artificial Sequence: Synthetic oligonucleotide
ucuaaaacgcugggaaucu

SEQ ID NO: 214085 - RNA, 19 nt, Artificial Sequence
  Description of Artificial Sequence: Synthetic oligonucleotide
ggugauucggcaauggacc

SEQ ID NO: 214086 - RNA, 19 nt, Artificial Sequence
  Description of Artificial Sequence: Synthetic oligonucleotide
gaacugauauacuaagagu

SEQ ID NO: 214087 - RNA, 19 nt, Artificial Sequence
  Description of Artificial Sequence: Synthetic oligonucleotide
aaggcacuacguugucaac

SEQ ID NO: 214088 - RNA, 19 nt, Artificial Sequence
  Description of Artificial Sequence: Synthetic oligonucleotide
acguugucaacuuguguug

SEQ ID NO: 214089 - RNA, 19 nt, Artificial Sequence
  Description of Artificial Sequence: Synthetic oligonucleotide
guaauauagggagugcuuc

SEQ ID NO: 214090 - RNA, 19 nt, Artificial Sequence
  Description of Artificial Sequence: Synthetic oligonucleotide
cccgguauuaugaaauugg

SEQ ID NO: 214091 - RNA, 19 nt, Artificial Sequence
  Description of Artificial Sequence: Synthetic oligonucleotide
cuguggagaaagaacguuc

SEQ ID NO: 214092 - RNA, 19 nt, Artificial Sequence
  Description of Artificial Sequence: Synthetic oligonucleotide
auaccucauuccgaaauuc

SEQ ID NO: 214093 - RNA, 19 nt, Artificial Sequence
  Description of Artificial Sequence: Synthetic oligonucleotide
agaacaguuggaaacucug

SEQ ID NO: 214094 - RNA, 19 nt, Artificial Sequence
  Description of Artificial Sequence: Synthetic oligonucleotide
uccgaaauucagaaacgau

SEQ ID NO: 214095 - RNA, 19 nt, Artificial Sequence
  Description of Artificial Sequence: Synthetic oligonucleotide
uauaccucauuccgaaauu

SEQ ID NO: 214096 - RNA, 19 nt, Artificial Sequence
  Description of Artificial Sequence: Synthetic oligonucleotide
cucugcuuagaaacuuggg

SEQ ID NO: 214097 - RNA, 19 nt, Artificial Sequence
  Description of Artificial Sequence: Synthetic oligonucleotide
agucgaucaguuuuacuau

SEQ ID NO: 214098 - RNA, 19 nt, Artificial Sequence
  Description of Artificial Sequence: Synthetic oligonucleotide
gaagugagcucaugcuuug

SEQ ID NO: 214099 - RNA, 19 nt, Artificial Sequence
  Description of Artificial Sequence: Synthetic oligonucleotide
gagucucacaucauauacc

SEQ ID NO: 214100 - RNA, 19 nt, Artificial Sequence
  Description of Artificial Sequence: Synthetic oligonucleotide
uuuuggcaacuacucugag

SEQ ID NO: 214101 - RNA, 19 nt, Artificial Sequence
  Description of Artificial Sequence: Synthetic oligonucleotide
uuccgaaauucagaaacga

SEQ ID NO: 214102 - RNA, 19 nt, Artificial Sequence
  Description of Artificial Sequence: Synthetic oligonucleotide
cucauuccgaaauucagaa

SEQ ID NO: 214103 - RNA, 19 nt, Artificial Sequence
  Description of Artificial Sequence: Synthetic oligonucleotide
uucggcaauggaccacagg

SEQ ID NO: 214104 - RNA, 19 nt, Artificial Sequence
  Description of Artificial Sequence: Synthetic oligonucleotide
ugguaugucuuguaccuau

SEQ ID NO: 214105 - RNA, 19 nt, Artificial Sequence
  Description of Artificial Sequence: Synthetic oligonucleotide
augauuuauacugcuuaug

SEQ ID NO: 214106 - RNA, 19 nt, Artificial Sequence
  Description of Artificial Sequence: Synthetic oligonucleotide
agaugaauaguaacguccu

SEQ ID NO: 214107 - RNA, 19 nt, Artificial Sequence
  Description of Artificial Sequence: Synthetic oligonucleotide
cuagucucguucuauuuca

SEQ ID NO: 214108 - RNA, 19 nt, Artificial Sequence
  Description of Artificial Sequence: Synthetic oligonucleotide
aacgauuaucuguggccga

SEQ ID NO: 214109 - RNA, 19 nt, Artificial Sequence
  Description of Artificial Sequence: Synthetic oligonucleotide
uaauauccuucucgagggc

SEQ ID NO: 214110 - RNA, 19 nt, Artificial Sequence
  Description of Artificial Sequence: Synthetic oligonucleotide
auauacuaagaguuucauu

SEQ ID NO: 214111 - RNA, 19 nt, Artificial Sequence
  Description of Artificial Sequence: Synthetic oligonucleotide
uugucaacuuguguuguca

SEQ ID NO: 214112 - RNA, 19 nt, Artificial Sequence
  Description of Artificial Sequence: Synthetic oligonucleotide
uccuauugaccauauccau

SEQ ID NO: 214113 - RNA, 19 nt, Artificial Sequence
  Description of Artificial Sequence: Synthetic oligonucleotide
aauuugcagcgcaauguca

SEQ ID NO: 214114 - RNA, 19 nt, Artificial Sequence
  Description of Artificial Sequence: Synthetic oligonucleotide
acuagcaugcucugccugu

SEQ ID NO: 214115 - RNA, 19 nt, Artificial Sequence
  Description of Artificial Sequence: Synthetic oligonucleotide
acauucgaagaauucuaau

SEQ ID NO: 214116 - RNA, 19 nt, Artificial Sequence
  Description of Artificial Sequence: Synthetic oligonucleotide
aucagcgugauuauggcaa

SEQ ID NO: 214117 - RNA, 19 nt, Artificial Sequence
  Description of Artificial Sequence: Synthetic oligonucleotide
ggcaacaauaggcuugcag

SEQ ID NO: 214118 - RNA, 19 nt, Artificial Sequence
  Description of Artificial Sequence: Synthetic oligonucleotide
uuagucgaucaguuuuacu

SEQ ID NO: 214119 - RNA, 19 nt, Artificial Sequence
  Description of Artificial Sequence: Synthetic oligonucleotide
uucucgagggcagacagau

SEQ ID NO: 214120 - RNA, 19 nt, Artificial Sequence
  Description of Artificial Sequence: Synthetic oligonucleotide
cagcgcaaugucaaacacc

SEQ ID NO: 214121 - RNA, 19 nt, Artificial Sequence
  Description of Artificial Sequence: Synthetic oligonucleotide
ccucuugagucacaggucg

SEQ ID NO: 214122 - RNA, 19 nt, Artificial Sequence
  Description of Artificial Sequence: Synthetic oligonucleotide
ucccgcagaugaaugcaag

SEQ ID NO: 214123 - RNA, 19 nt, Artificial Sequence
  Description of Artificial Sequence: Synthetic oligonucleotide
cuguugguaugucuuguac

SEQ ID NO: 214124 - RNA, 19 nt, Artificial Sequence
  Description of Artificial Sequence: Synthetic oligonucleotide
ugcacgagcuacagaauua

SEQ ID NO: 214125 - RNA, 19 nt, Artificial Sequence
  Description of Artificial Sequence: Synthetic oligonucleotide
cagaaacgauuaucugugg

SEQ ID NO: 214126 - RNA, 19 nt, Artificial Sequence
  Description of Artificial Sequence: Synthetic oligonucleotide
uucuuagacuagaaauguu

SEQ ID NO: 214127 - RNA, 19 nt, Artificial Sequence
  Description of Artificial Sequence: Synthetic oligonucleotide
aggaagugagcucaugcuu

SEQ ID NO: 214128 - RNA, 19 nt, Artificial Sequence
  Description of Artificial Sequence: Synthetic oligonucleotide
uuuagucgaucaguuuuac

SEQ ID NO: 214129 - RNA, 19 nt, Artificial Sequence
  Description of Artificial Sequence: Synthetic oligonucleotide
gacuagcaugcucugccug

SEQ ID NO: 214130 - RNA, 19 nt, Artificial Sequence
  Description of Artificial Sequence: Synthetic oligonucleotide
uuauggcaacaauaggcuu

SEQ ID NO: 214131 - RNA, 19 nt, Artificial Sequence
  Description of Artificial Sequence: Synthetic oligonucleotide
guaccuaugagucauuauu

SEQ ID NO: 214132 - RNA, 19 nt, Artificial Sequence
  Description of Artificial Sequence: Synthetic oligonucleotide
cucugauuauaggucagug

SEQ ID NO: 214133 - RNA, 19 nt, Artificial Sequence
  Description of Artificial Sequence: Synthetic oligonucleotide
aagcacgcaugucauugaa

SEQ ID NO: 214134 - RNA, 19 nt, Artificial Sequence
  Description of Artificial Sequence: Synthetic oligonucleotide
auaggucaguguaugccuc

SEQ ID NO: 214135 - RNA, 19 nt, Artificial Sequence
  Description of Artificial Sequence: Synthetic oligonucleotide
ugcuagucuuaaucaggug

SEQ ID NO: 214136 - RNA, 19 nt, Artificial Sequence
  Description of Artificial Sequence: Synthetic oligonucleotide
aacguucaccgccggacaa

SEQ ID NO: 214137 - RNA, 19 nt, Artificial Sequence
  Description of Artificial Sequence: Synthetic oligonucleotide
aucauauaccucauuccga

SEQ ID NO: 214138 - RNA, 19 nt, Artificial Sequence
  Description of Artificial Sequence: Synthetic oligonucleotide
acgcaugucauugaaggaa

SEQ ID NO: 214139 - RNA, 19 nt, Artificial Sequence
  Description of Artificial Sequence: Synthetic oligonucleotide
caaggcacuacguugucaa

SEQ ID NO: 214140 - RNA, 19 nt, Artificial Sequence
  Description of Artificial Sequence: Synthetic oligonucleotide
aacccgguauuaugaaauu

SEQ ID NO: 214141 - RNA, 19 nt, Artificial Sequence
  Description of Artificial Sequence: Synthetic oligonucleotide
acugucuaaaacgcuggga

SEQ ID NO: 214142 - RNA, 19 nt, Artificial Sequence
  Description of Artificial Sequence: Synthetic oligonucleotide
augcuagucuuaaucaggu

SEQ ID NO: 214143 - RNA, 19 nt, Artificial Sequence
  Description of Artificial Sequence: Synthetic oligonucleotide
gcaccuaaagggccaauag

SEQ ID NO: 214144 - RNA, 19 nt, Artificial Sequence
  Description of Artificial Sequence: Synthetic oligonucleotide
uaauguugcuuuccucguu

SEQ ID NO: 214145 - RNA, 19 nt, Artificial Sequence
  Description of Artificial Sequence: Synthetic oligonucleotide
ucagcgugauuauggcaac

SEQ ID NO: 214146 - RNA, 19 nt, Artificial Sequence
  Description of Artificial Sequence: Synthetic oligonucleotide
acgauuaucuguggccgag

SEQ ID NO: 214147 - RNA, 19 nt, Artificial Sequence
  Description of Artificial Sequence: Synthetic oligonucleotide
agucucgaugcuccgcaug

SEQ ID NO: 214148 - RNA, 19 nt, Artificial Sequence
  Description of Artificial Sequence: Synthetic oligonucleotide
ucucugauuauaggucagu

SEQ ID NO: 214149 - RNA, 19 nt, Artificial Sequence
  Description of Artificial Sequence: Synthetic oligonucleotide
ucucuagucucguucuauu

SEQ ID NO: 214150 - RNA, 19 nt, Artificial Sequence
  Description of Artificial Sequence: Synthetic oligonucleotide
uuugcagcgcaaugucaaa

SEQ ID NO: 214151 - RNA, 19 nt, Artificial Sequence
  Description of Artificial Sequence: Synthetic oligonucleotide
cacaauaagcccguugaga

SEQ ID NO: 214152 - RNA, 19 nt, Artificial Sequence
  Description of Artificial Sequence: Synthetic oligonucleotide
cuuaugguuggcagggaaa

SEQ ID NO: 214153 - RNA, 19 nt, Artificial Sequence
  Description of Artificial Sequence: Synthetic oligonucleotide
auguauucugacucuuauu

SEQ ID NO: 214154 - RNA, 19 nt, Artificial Sequence
  Description of Artificial Sequence: Synthetic oligonucleotide
aguauaauuugcagcgcaa

SEQ ID NO: 214155 - RNA, 19 nt, Artificial Sequence
  Description of Artificial Sequence: Synthetic oligonucleotide
aggcacuacguugucaacu

SEQ ID NO: 214156 - RNA, 19 nt, Artificial Sequence
  Description of Artificial Sequence: Synthetic oligonucleotide
uuggcagggaaaguuuaaa

SEQ ID NO: 214157 - RNA, 19 nt, Artificial Sequence
  Description of Artificial Sequence: Synthetic oligonucleotide
uuuguuaugugggccuuuu

SEQ ID NO: 214158 - RNA, 19 nt, Artificial Sequence
  Description of Artificial Sequence: Synthetic oligonucleotide
ccgucuauaagcaucaucu

SEQ ID NO: 214159 - RNA, 19 nt, Artificial Sequence
  Description of Artificial Sequence: Synthetic oligonucleotide
gucaacuuguguugucauc

SEQ ID NO: 214160 - RNA, 19 nt, Artificial Sequence
  Description of Artificial Sequence: Synthetic oligonucleotide
acccgguauuaugaaauug

SEQ ID NO: 214161 - RNA, 19 nt, Artificial Sequence
  Description of Artificial Sequence: Synthetic oligonucleotide
gaacguucaccgccggaca

SEQ ID NO: 214162 - RNA, 19 nt, Artificial Sequence
  Description of Artificial Sequence: Synthetic oligonucleotide
caauaagcccguugagaca

SEQ ID NO: 214163 - RNA, 19 nt, Artificial Sequence
  Description of Artificial Sequence: Synthetic oligonucleotide
uuugagggguaagcaagau

SEQ ID NO: 214164 - RNA, 19 nt, Artificial Sequence
  Description of Artificial Sequence: Synthetic oligonucleotide
cuauuugcaacaacagcau

SEQ ID NO: 214165 - RNA, 19 nt, Artificial Sequence
  Description of Artificial Sequence: Synthetic oligonucleotide
gucucugauuauaggucag

SEQ ID NO: 214166 - RNA, 19 nt, Artificial Sequence
  Description of Artificial Sequence: Synthetic oligonucleotide
gccaucuuaaguaucaugu

SEQ ID NO: 214167 - RNA, 19 nt, Artificial Sequence
  Description of Artificial Sequence: Synthetic oligonucleotide
ugacugcacgagcuacaga

SEQ ID NO: 214168 - RNA, 19 nt, Artificial Sequence
  Description of Artificial Sequence: Synthetic oligonucleotide
caauagguuuaugaguaaa

SEQ ID NO: 214169 - RNA, 19 nt, Artificial Sequence
  Description of Artificial Sequence: Synthetic oligonucleotide
gccaauagguuuaugagua

SEQ ID NO: 214170 - RNA, 19 nt, Artificial Sequence
  Description of Artificial Sequence: Synthetic oligonucleotide
ugauucggcaauggaccac

SEQ ID NO: 214171 - RNA, 19 nt, Artificial Sequence
  Description of Artificial Sequence: Synthetic oligonucleotide
agcgugauuauggcaacaa

SEQ ID NO: 214172 - RNA, 19 nt, Artificial Sequence
  Description of Artificial Sequence: Synthetic oligonucleotide
ucccgaucuccaugacuag

SEQ ID NO: 214173 - RNA, 19 nt, Artificial Sequence
  Description of Artificial Sequence: Synthetic oligonucleotide
uagucucguucuauuucau

SEQ ID NO: 214174 - RNA, 19 nt, Artificial Sequence
  Description of Artificial Sequence: Synthetic oligonucleotide
gucuuguaccuaugaguca

SEQ ID NO: 214175 - RNA, 19 nt, Artificial Sequence
  Description of Artificial Sequence: Synthetic oligonucleotide
uugcaacaacagcauuguc

SEQ ID NO: 214176 - RNA, 19 nt, Artificial Sequence
  Description of Artificial Sequence: Synthetic oligonucleotide
caucagcgugauuauggca

SEQ ID NO: 214177 - RNA, 19 nt, Artificial Sequence
  Description of Artificial Sequence: Synthetic oligonucleotide
uucuccuauugaccauauc

SEQ ID NO: 214178 - RNA, 19 nt, Artificial Sequence
  Description of Artificial Sequence: Synthetic oligonucleotide
ugcugcuauucaagguuua

SEQ ID NO: 214179 - RNA, 19 nt, Artificial Sequence
  Description of Artificial Sequence: Synthetic oligonucleotide
guaugccucacaucuaaau

SEQ ID NO: 214180 - RNA, 19 nt, Artificial Sequence
  Description of Artificial Sequence: Synthetic oligonucleotide
cacuacguugucaacuugu

SEQ ID NO: 214181 - RNA, 19 nt, Artificial Sequence
  Description of Artificial Sequence: Synthetic oligonucleotide
ucggaaaggcaaugugguu

SEQ ID NO: 214182 - RNA, 19 nt, Artificial Sequence
  Description of Artificial Sequence: Synthetic oligonucleotide
aucagacauucgaagaauu

SEQ ID NO: 214183 - RNA, 19 nt, Artificial Sequence
  Description of Artificial Sequence: Synthetic oligonucleotide
agguugcaauaucuacaga

SEQ ID NO: 214184 - RNA, 19 nt, Artificial Sequence
  Description of Artificial Sequence: Synthetic oligonucleotide
aagugagcucaugcuuuga

SEQ ID NO: 214185 - RNA, 19 nt, Artificial Sequence
  Description of Artificial Sequence: Synthetic oligonucleotide
cuaaaacgcugggaaucug

SEQ ID NO: 214186 - RNA, 19 nt, Artificial Sequence
  Description of Artificial Sequence: Synthetic oligonucleotide
aucgaugggucagauuaaa

SEQ ID NO: 214187 - RNA, 19 nt, Artificial Sequence
  Description of Artificial Sequence: Synthetic oligonucleotide
acaaucgaugggucagauu

SEQ ID NO: 214188 - RNA, 19 nt, Artificial Sequence
  Description of Artificial Sequence: Synthetic oligonucleotide
accgccggacaaagcacgc

SEQ ID NO: 214189 - RNA, 19 nt, Artificial Sequence
  Description of Artificial Sequence: Synthetic oligonucleotide
uaucuguggccgagagguc

SEQ ID NO: 214190 - RNA, 19 nt, Artificial Sequence
  Description of Artificial Sequence: Synthetic oligonucleotide
auccccucacaaccuuuca

SEQ ID NO: 214191 - RNA, 19 nt, Artificial Sequence
  Description of Artificial Sequence: Synthetic oligonucleotide
gcaccuuuuaagaaguucu

SEQ ID NO: 214192 - RNA, 19 nt, Artificial Sequence
  Description of Artificial Sequence: Synthetic oligonucleotide
agggaaaguuuaaaacauu

SEQ ID NO: 214193 - RNA, 19 nt, Artificial Sequence
  Description of Artificial Sequence: Synthetic oligonucleotide
ggcaccuuuuaagaaguuc

SEQ ID NO: 214194 - RNA, 19 nt, Artificial Sequence
  Description of Artificial Sequence: Synthetic oligonucleotide
acacaaucgaugggucaga

SEQ ID NO: 214195 - RNA, 19 nt, Artificial Sequence
  Description of Artificial Sequence: Synthetic oligonucleotide
uugguaugucuuguaccua

SEQ ID NO: 214196 - RNA, 19 nt, Artificial Sequence
  Description of Artificial Sequence: Synthetic oligonucleotide
cccgcagaugaaugcaagc

SEQ ID NO: 214197 - RNA, 19 nt, Artificial Sequence
  Description of Artificial Sequence: Synthetic oligonucleotide
cauugaaggaagcuuuauu

SEQ ID NO: 214198 - RNA, 19 nt, Artificial Sequence
  Description of Artificial Sequence: Synthetic oligonucleotide
gacucuuauugcugguaau

SEQ ID NO: 214199 - RNA, 19 nt, Artificial Sequence
  Description of Artificial Sequence: Synthetic oligonucleotide
cagcauugucuauuucuaa

SEQ ID NO: 214200 - RNA, 19 nt, Artificial Sequence
  Description of Artificial Sequence: Synthetic oligonucleotide
gguaugucuuguaccuaug

SEQ ID NO: 214201 - RNA, 19 nt, Artificial Sequence
  Description of Artificial Sequence: Synthetic oligonucleotide
cgauuaauuucuuugucua

SEQ ID NO: 214202 - RNA, 19 nt, Artificial Sequence
  Description of Artificial Sequence: Synthetic oligonucleotide
ucuauccguucugggcaga

SEQ ID NO: 214203 - RNA, 19 nt, Artificial Sequence
  Description of Artificial Sequence: Synthetic oligonucleotide
uggcaacuacucugagaau

SEQ ID NO: 214204 - RNA, 19 nt, Artificial Sequence
  Description of Artificial Sequence: Synthetic oligonucleotide
cagucuccaaaucacuuau

SEQ ID NO: 214205 - RNA, 19 nt, Artificial Sequence
  Description of Artificial Sequence: Synthetic oligonucleotide
auuuguuaugugggccuuu

SEQ ID NO: 214206 - RNA, 19 nt, Artificial Sequence
  Description of Artificial Sequence: Synthetic oligonucleotide
ccgcaugucaaucaggcua

SEQ ID NO: 214207 - RNA, 19 nt, Artificial Sequence
  Description of Artificial Sequence: Synthetic oligonucleotide
cuucucgagggcagacaga

SEQ ID NO: 214208 - RNA, 19 nt, Artificial Sequence
  Description of Artificial Sequence: Synthetic oligonucleotide
ccgaaauucagaaacgauu

SEQ ID NO: 214209 - RNA, 19 nt, Artificial Sequence
  Description of Artificial Sequence: Synthetic oligonucleotide
cuuuugggacugcaugacu

SEQ ID NO: 214210 - RNA, 19 nt, Artificial Sequence
  Description of Artificial Sequence: Synthetic oligonucleotide
cacaaccuuucagcaugag

SEQ ID NO: 214211 - RNA, 19 nt, Artificial Sequence
  Description of Artificial Sequence: Synthetic oligonucleotide
cuacguugucaacuugugu

SEQ ID NO: 214212 - RNA, 19 nt, Artificial Sequence
  Description of Artificial Sequence: Synthetic oligonucleotide
uggcaccuuuuaagaaguu

SEQ ID NO: 214213 - RNA, 19 nt, Artificial Sequence
  Description of Artificial Sequence: Synthetic oligonucleotide
auucggcaauggaccacag

SEQ ID NO: 214214 - RNA, 19 nt, Artificial Sequence
  Description of Artificial Sequence: Synthetic oligonucleotide
gauuuguuaugugggccuu

SEQ ID NO: 214215 - RNA, 19 nt, Artificial Sequence
  Description of Artificial Sequence: Synthetic oligonucleotide
gcacuacguugucaacuug

SEQ ID NO: 214216 - RNA, 19 nt, Artificial Sequence
  Description of Artificial Sequence: Synthetic oligonucleotide
ggucccgcagaugaaugca

SEQ ID NO: 214217 - RNA, 19 nt, Artificial Sequence
  Description of Artificial Sequence: Synthetic oligonucleotide
caacuuguguugucauccu

SEQ ID NO: 214218 - RNA, 19 nt, Artificial Sequence
  Description of Artificial Sequence: Synthetic oligonucleotide
cugcacgagcuacagaauu

SEQ ID NO: 214219 - RNA, 19 nt, Artificial Sequence
  Description of Artificial Sequence: Synthetic oligonucleotide
cccgaucuccaugacuagc

SEQ ID NO: 214220 - RNA, 19 nt, Artificial Sequence
  Description of Artificial Sequence: Synthetic oligonucleotide
guucaccgccggacaaagc

SEQ ID NO: 214221 - RNA, 19 nt, Artificial Sequence
  Description of Artificial Sequence: Synthetic oligonucleotide
cccguugagacaauaaguu

SEQ ID NO: 214222 - RNA, 19 nt, Artificial Sequence
  Description of Artificial Sequence: Synthetic oligonucleotide
ggacugcaugacugcacga

SEQ ID NO: 214223 - RNA, 19 nt, Artificial Sequence
  Description of Artificial Sequence: Synthetic oligonucleotide
gucucuagucucguucuau

SEQ ID NO: 214224 - RNA, 19 nt, Artificial Sequence
  Description of Artificial Sequence: Synthetic oligonucleotide
gcccguugagacaauaagu

SEQ ID NO: 214225 - RNA, 19 nt, Artificial Sequence
  Description of Artificial Sequence: Synthetic oligonucleotide
caacuacucugagaauaua

SEQ ID NO: 214226 - RNA, 19 nt, Artificial Sequence
  Description of Artificial Sequence: Synthetic oligonucleotide
ccgguauuaugaaauuggu

SEQ ID NO: 214227 - RNA, 19 nt, Artificial Sequence
  Description of Artificial Sequence: Synthetic oligonucleotide
ccaauagguuuaugaguaa

SEQ ID NO: 214228 - RNA, 19 nt, Artificial Sequence
  Description of Artificial Sequence: Synthetic oligonucleotide
gcaaggcacuacguuguca

SEQ ID NO: 214229 - RNA, 19 nt, Artificial Sequence
  Description of Artificial Sequence: Synthetic oligonucleotide
cagcgugauuauggcaaca

SEQ ID NO: 214230 - RNA, 19 nt, Artificial Sequence
  Description of Artificial Sequence: Synthetic oligonucleotide
gccggacaaagcacgcaug

SEQ ID NO: 214231 - RNA, 19 nt, Artificial Sequence
  Description of Artificial Sequence: Synthetic oligonucleotide
ccuuucaagcaagauucaa

SEQ ID NO: 214232 - RNA, 19 nt, Artificial Sequence
  Description of Artificial Sequence: Synthetic oligonucleotide
cuacaauucuuggguggcu

SEQ ID NO: 214233 - RNA, 19 nt, Artificial Sequence
  Description of Artificial Sequence: Synthetic oligonucleotide
cgagcuacagaauuauuuu

SEQ ID NO: 214234 - RNA, 19 nt, Artificial Sequence
  Description of Artificial Sequence: Synthetic oligonucleotide
cguucaccgccggacaaag

SEQ ID NO: 214235 - RNA, 19 nt, Artificial Sequence
  Description of Artificial Sequence: Synthetic oligonucleotide
caggucggaaaggcaaugu

SEQ ID NO: 214236 - RNA, 19 nt, Artificial Sequence
  Description of Artificial Sequence: Synthetic oligonucleotide
auaagcccguugagacaau

SEQ ID NO: 214237 - RNA, 19 nt, Artificial Sequence
  Description of Artificial Sequence: Synthetic oligonucleotide
ccggacaaagcacgcaugu

SEQ ID NO: 214238 - RNA, 19 nt, Artificial Sequence
  Description of Artificial Sequence: Synthetic oligonucleotide
gcacgagcuacagaauuau

SEQ ID NO: 214239 - RNA, 19 nt, Artificial Sequence
  Description of Artificial Sequence: Synthetic oligonucleotide
gcgugauuauggcaacaau

SEQ ID NO: 214240 - RNA, 19 nt, Artificial Sequence
  Description of Artificial Sequence: Synthetic oligonucleotide
cacaaucgaugggucagau

SEQ ID NO: 214241 - RNA, 19 nt, Artificial Sequence
  Description of Artificial Sequence: Synthetic oligonucleotide
cugggucccgcagaugaau

SEQ ID NO: 214242 - RNA, 19 nt, Artificial Sequence
  Description of Artificial Sequence: Synthetic oligonucleotide
cgguauuaugaaauugguu

SEQ ID NO: 214243 - RNA, 19 nt, Artificial Sequence
  Description of Artificial Sequence: Synthetic oligonucleotide
ccgccggacaaagcacgca

SEQ ID NO: 214244 - RNA, 19 nt, Artificial Sequence
  Description of Artificial Sequence: Synthetic oligonucleotide
gcgcaaugucaaacaccuu

SEQ ID NO: 214245 - RNA, 19 nt, Artificial Sequence
  Description of Artificial Sequence: Synthetic oligonucleotide
aauugaaaugaucagacug

SEQ ID NO: 214246 - RNA, 19 nt, Artificial Sequence
  Description of Artificial Sequence: Synthetic oligonucleotide
uauauuagcaaacauuaca

SEQ ID NO: 214247 - RNA, 19 nt, Artificial Sequence
  Description of Artificial Sequence: Synthetic oligonucleotide
aaaccuaaagucuaauguc

SEQ ID NO: 214248 - RNA, 19 nt, Artificial Sequence
  Description of Artificial Sequence: Synthetic oligonucleotide
uucuaauacacaacgaucc

SEQ ID NO: 214249 - RNA, 19 nt, Artificial Sequence
  Description of Artificial Sequence: Synthetic oligonucleotide
auauauauauauuuguugu

SEQ ID NO: 214250 - RNA, 19 nt, Artificial Sequence
  Description of Artificial Sequence: Synthetic oligonucleotide
ucaacauagacaguggugg

SEQ ID NO: 214251 - RNA, 19 nt, Artificial Sequence
  Description of Artificial Sequence: Synthetic oligonucleotide
uuucauauauauauauuug

SEQ ID NO: 214252 - RNA, 19 nt, Artificial Sequence
  Description of Artificial Sequence: Synthetic oligonucleotide
auuaguaacagauccaugu

SEQ ID NO: 214253 - RNA, 19 nt, Artificial Sequence
  Description of Artificial Sequence: Synthetic oligonucleotide
aauauuugaaaagugugug

SEQ ID NO: 214254 - RNA, 19 nt, Artificial Sequence
  Description of Artificial Sequence: Synthetic oligonucleotide
gauggcuuaaauuaguaac

SEQ ID NO: 214255 - RNA, 19 nt, Artificial Sequence
  Description of Artificial Sequence: Synthetic oligonucleotide
uguguuuugagugacaucu

SEQ ID NO: 214256 - RNA, 19 nt, Artificial Sequence
  Description of Artificial Sequence: Synthetic oligonucleotide
accgaauaggaacagaagg

SEQ ID NO: 214257 - RNA, 19 nt, Artificial Sequence
  Description of Artificial Sequence: Synthetic oligonucleotide
cauauauauauauuuguug

SEQ ID NO: 214258 - RNA, 19 nt, Artificial Sequence
  Description of Artificial Sequence: Synthetic oligonucleotide
uuuguugugauacuaucca

SEQ ID NO: 214259 - RNA, 19 nt, Artificial Sequence
  Description of Artificial Sequence: Synthetic oligonucleotide
auuucauauauauauauuu

SEQ ID NO: 214260 - RNA, 19 nt, Artificial Sequence
  Description of Artificial Sequence: Synthetic oligonucleotide
uucauauauauauauuugu

SEQ ID NO: 214261 - RNA, 19 nt, Artificial Sequence
  Description of Artificial Sequence: Synthetic oligonucleotide
auagagagcaucauggcgc

SEQ ID NO: 214262 - RNA, 19 nt, Artificial Sequence
  Description of Artificial Sequence: Synthetic oligonucleotide
ugugauacuauccacgcaa

SEQ ID NO: 214263 - RNA, 19 nt, Artificial Sequence
  Description of Artificial Sequence: Synthetic oligonucleotide
ugugugaauacaguggagg

SEQ ID NO: 214264 - RNA, 19 nt, Artificial Sequence
  Description of Artificial Sequence: Synthetic oligonucleotide
cuuaguaaccugcagacug

SEQ ID NO: 214265 - RNA, 19 nt, Artificial Sequence
  Description of Artificial Sequence: Synthetic oligonucleotide
aaagaagugcuaacggccc

SEQ ID NO: 214266 - RNA, 19 nt, Artificial Sequence
  Description of Artificial Sequence: Synthetic oligonucleotide
cucgauaucuauugggugg

SEQ ID NO: 214267 - RNA, 19 nt, Artificial Sequence
  Description of Artificial Sequence: Synthetic oligonucleotide
uuggcuuaacaaaauacca

SEQ ID NO: 214268 - RNA, 19 nt, Artificial Sequence
  Description of Artificial Sequence: Synthetic oligonucleotide
auauuucauauauauauau

SEQ ID NO: 214269 - RNA, 19 nt, Artificial Sequence
  Description of Artificial Sequence: Synthetic oligonucleotide
aaccacacagguucuuacc

SEQ ID NO: 214270 - RNA, 19 nt, Artificial Sequence
  Description of Artificial Sequence: Synthetic oligonucleotide
ugucauuaagauuccauga

SEQ ID NO: 214271 - RNA, 19 nt, Artificial Sequence
  Description of Artificial Sequence: Synthetic oligonucleotide
uuagcuagauggaagauuu

SEQ ID NO: 214272 - RNA, 19 nt, Artificial Sequence
  Description of Artificial Sequence: Synthetic oligonucleotide
ucaguauccuaucugaaau

SEQ ID NO: 214273 - RNA, 19 nt, Artificial Sequence
  Description of Artificial Sequence: Synthetic oligonucleotide
gaagcugauauggugaaag

SEQ ID NO: 214274 - RNA, 19 nt, Artificial Sequence
  Description of Artificial Sequence: Synthetic oligonucleotide
uccaucaccgaauaggaac

SEQ ID NO: 214275 - RNA, 19 nt, Artificial Sequence
  Description of Artificial Sequence: Synthetic oligonucleotide
gacuacauauuauaggcca

SEQ ID NO: 214276 - RNA, 19 nt, Artificial Sequence
  Description of Artificial Sequence: Synthetic oligonucleotide
ucauauauauauauuuguu

SEQ ID NO: 214277 - RNA, 19 nt, Artificial Sequence
  Description of Artificial Sequence: Synthetic oligonucleotide
uuuauaaucgcuucuuguu

SEQ ID NO: 214278 - RNA, 19 nt, Artificial Sequence
  Description of Artificial Sequence: Synthetic oligonucleotide
agucucgauaucuauuggg

SEQ ID NO: 214279 - RNA, 19 nt, Artificial Sequence
  Description of Artificial Sequence: Synthetic oligonucleotide
auacaagaaguugcuaucc

SEQ ID NO: 214280 - RNA, 19 nt, Artificial Sequence
  Description of Artificial Sequence: Synthetic oligonucleotide
aaauuaguaacagauccau

SEQ ID NO: 214281 - RNA, 19 nt, Artificial Sequence
  Description of Artificial Sequence: Synthetic oligonucleotide
agaaaagucuguggaagcc

SEQ ID NO: 214282 - RNA, 19 nt, Artificial Sequence
  Description of Artificial Sequence: Synthetic oligonucleotide
guugauuacacgguuuugg

SEQ ID NO: 214283 - RNA, 19 nt, Artificial Sequence
  Description of Artificial Sequence: Synthetic oligonucleotide
uuauaaucgcuucuuguuc

SEQ ID NO: 214284 - RNA, 19 nt, Artificial Sequence
  Description of Artificial Sequence: Synthetic oligonucleotide
gugaauacaguggagggcg

SEQ ID NO: 214285 - RNA, 19 nt, Artificial Sequence
  Description of Artificial Sequence: Synthetic oligonucleotide
agugcuaacggcccguggg

SEQ ID NO: 214286 - RNA, 19 nt, Artificial Sequence
  Description of Artificial Sequence: Synthetic oligonucleotide
ucuugcacaaugaagccuc

SEQ ID NO: 214287 - RNA, 19 nt, Artificial Sequence
  Description of Artificial Sequence: Synthetic oligonucleotide
ucuaauuggaaggugcuac

SEQ ID NO: 214288 - RNA, 19 nt, Artificial Sequence
  Description of Artificial Sequence: Synthetic oligonucleotide
acauacaagaaguugcuau

SEQ ID NO: 214289 - RNA, 19 nt, Artificial Sequence
  Description of Artificial Sequence: Synthetic oligonucleotide
aagggugagaucuaucgau

SEQ ID NO: 214290 - RNA, 19 nt, Artificial Sequence
  Description of Artificial Sequence: Synthetic oligonucleotide
cuguguaagggcaauucgg

SEQ ID NO: 214291 - RNA, 19 nt, Artificial Sequence
  Description of Artificial Sequence: Synthetic oligonucleotide
uggugguugaacauacaag

SEQ ID NO: 214292 - RNA, 19 nt, Artificial Sequence
  Description of Artificial Sequence: Synthetic oligonucleotide
agggaaccaaguccaaugc

SEQ ID NO: 214293 - RNA, 19 nt, Artificial Sequence
  Description of Artificial Sequence: Synthetic oligonucleotide
aagcacauggucacaagac

SEQ ID NO: 214294 - RNA, 19 nt, Artificial Sequence
  Description of Artificial Sequence: Synthetic oligonucleotide
uccuagaagggugagaucu

SEQ ID NO: 214295 - RNA, 19 nt, Artificial Sequence
  Description of Artificial Sequence: Synthetic oligonucleotide
ucugaugacugaagucucg

SEQ ID NO: 214296 - RNA, 19 nt, Artificial Sequence
  Description of Artificial Sequence: Synthetic oligonucleotide
aagaaguugcuauccuuug

SEQ ID NO: 214297 - RNA, 19 nt, Artificial Sequence
  Description of Artificial Sequence: Synthetic oligonucleotide
aaagugacgagacuacaua

SEQ ID NO: 214298 - RNA, 19 nt, Artificial Sequence
  Description of Artificial Sequence: Synthetic oligonucleotide
uauuucauauauauauauu

SEQ ID NO: 214299 - RNA, 19 nt, Artificial Sequence
  Description of Artificial Sequence: Synthetic oligonucleotide
guugugauacuauccacgc

SEQ ID NO: 214300 - RNA, 19 nt, Artificial Sequence
  Description of Artificial Sequence: Synthetic oligonucleotide
uggcuuaacaaaauaccac

SEQ ID NO: 214301 - RNA, 19 nt, Artificial Sequence
  Description of Artificial Sequence: Synthetic oligonucleotide
uugauuacacgguuuuggc

SEQ ID NO: 214302 - RNA, 19 nt, Artificial Sequence
  Description of Artificial Sequence: Synthetic oligonucleotide
uuuugugcaaguugauuac

SEQ ID NO: 214303 - RNA, 19 nt, Artificial Sequence
  Description of Artificial Sequence: Synthetic oligonucleotide
uccuguauguggcagagau

SEQ ID NO: 214304 - RNA, 19 nt, Artificial Sequence
  Description of Artificial Sequence: Synthetic oligonucleotide
aagucucgauaucuauugg

SEQ ID NO: 214305 - RNA, 19 nt, Artificial Sequence
  Description of Artificial Sequence: Synthetic oligonucleotide
uacuauccacgcaagauaa

SEQ ID NO: 214306 - RNA, 19 nt, Artificial Sequence
  Description of Artificial Sequence: Synthetic oligonucleotide
agauccucuuucuaccaac

SEQ ID NO: 214307 - RNA, 19 nt, Artificial Sequence
  Description of Artificial Sequence: Synthetic oligonucleotide
cacauuagcuagauggaag

SEQ ID NO: 214308 - RNA, 19 nt, Artificial Sequence
  Description of Artificial Sequence: Synthetic oligonucleotide
augacugaagucucgauau

SEQ ID NO: 214309 - RNA, 19 nt, Artificial Sequence
  Description of Artificial Sequence: Synthetic oligonucleotide
ucaccgaauaggaacagaa

SEQ ID NO: 214310 - RNA, 19 nt, Artificial Sequence
  Description of Artificial Sequence: Synthetic oligonucleotide
auguucauuguguacccuc

SEQ ID NO: 214311 - RNA, 19 nt, Artificial Sequence
  Description of Artificial Sequence: Synthetic oligonucleotide
uccguuguuucucuccccg

SEQ ID NO: 214312 - RNA, 19 nt, Artificial Sequence
  Description of Artificial Sequence: Synthetic oligonucleotide
aaugauccggaccccagga

SEQ ID NO: 214313 - RNA, 19 nt, Artificial Sequence
  Description of Artificial Sequence: Synthetic oligonucleotide
aacugauaaagggaccguc

SEQ ID NO: 214314 - RNA, 19 nt, Artificial Sequence
  Description of Artificial Sequence: Synthetic oligonucleotide
acuggugguacuuaagcgu

SEQ ID NO: 214315 - RNA, 19 nt, Artificial Sequence
  Description of Artificial Sequence: Synthetic oligonucleotide
ucuaauacacaacgauccu

SEQ ID NO: 214316 - RNA, 19 nt, Artificial Sequence
  Description of Artificial Sequence: Synthetic oligonucleotide
agauaguugccgaaauacc

SEQ ID NO: 214317 - RNA, 19 nt, Artificial Sequence
  Description of Artificial Sequence: Synthetic oligonucleotide
aaccuaaagucuaauguca

SEQ ID NO: 214318 - RNA, 19 nt, Artificial Sequence
  Description of Artificial Sequence: Synthetic oligonucleotide
uuucuugcacaaugaagcc

SEQ ID NO: 214319 - RNA, 19 nt, Artificial Sequence
  Description of Artificial Sequence: Synthetic oligonucleotide
uauuuguugugauacuauc

SEQ ID NO: 214320 - RNA, 19 nt, Artificial Sequence
  Description of Artificial Sequence: Synthetic oligonucleotide
uuaguaacagauccauguc

SEQ ID NO: 214321 - RNA, 19 nt, Artificial Sequence
  Description of Artificial Sequence: Synthetic oligonucleotide
aauacaguggagggcgcac

SEQ ID NO: 214322 - RNA, 19 nt, Artificial Sequence
  Description of Artificial Sequence: Synthetic oligonucleotide
ugauccggaccccaggaag

SEQ ID NO: 214323 - RNA, 19 nt, Artificial Sequence
  Description of Artificial Sequence: Synthetic oligonucleotide
uauccacgcaagauaauac

SEQ ID NO: 214324 - RNA, 19 nt, Artificial Sequence
  Description of Artificial Sequence: Synthetic oligonucleotide
uucacucuacagccgaaag

SEQ ID NO: 214325 - RNA, 19 nt, Artificial Sequence
  Description of Artificial Sequence: Synthetic oligonucleotide
uuugaaacugugauugguu

SEQ ID NO: 214326 - RNA, 19 nt, Artificial Sequence
  Description of Artificial Sequence: Synthetic oligonucleotide
uuacgaagagagcacuucu

SEQ ID NO: 214327 - RNA, 19 nt, Artificial Sequence
  Description of Artificial Sequence: Synthetic oligonucleotide
aguuugugagcccaguccu

SEQ ID NO: 214328 - RNA, 19 nt, Artificial Sequence
  Description of Artificial Sequence: Synthetic oligonucleotide
gaggagauccucuuucuac

SEQ ID NO: 214329 - RNA, 19 nt, Artificial Sequence
  Description of Artificial Sequence: Synthetic oligonucleotide
cauacaagaaguugcuauc

SEQ ID NO: 214330 - RNA, 19 nt, Artificial Sequence
  Description of Artificial Sequence: Synthetic oligonucleotide
ucuuacccgggacaagucc

SEQ ID NO: 214331 - RNA, 19 nt, Artificial Sequence
  Description of Artificial Sequence: Synthetic oligonucleotide
ugucaacauagacaguggu

SEQ ID NO: 214332 - RNA, 19 nt, Artificial Sequence
  Description of Artificial Sequence: Synthetic oligonucleotide
aauuucuaauacacaacga

SEQ ID NO: 214333 - RNA, 19 nt, Artificial Sequence
  Description of Artificial Sequence: Synthetic oligonucleotide
ucucgauaucuauugggug

SEQ ID NO: 214334 - RNA, 19 nt, Artificial Sequence
  Description of Artificial Sequence: Synthetic oligonucleotide
ugugagcccaguccuuugg

SEQ ID NO: 214335 - RNA, 19 nt, Artificial Sequence
  Description of Artificial Sequence: Synthetic oligonucleotide
uagcaaugagcaaacaaua

SEQ ID NO: 214336 - RNA, 19 nt, Artificial Sequence
  Description of Artificial Sequence: Synthetic oligonucleotide
ucguaccucaguaaacucu

SEQ ID NO: 214337 - RNA, 19 nt, Artificial Sequence
  Description of Artificial Sequence: Synthetic oligonucleotide
cuaauuggaaggugcuacc

SEQ ID NO: 214338 - RNA, 19 nt, Artificial Sequence
  Description of Artificial Sequence: Synthetic oligonucleotide
aauaaugauccggacccca

SEQ ID NO: 214339 - RNA, 19 nt, Artificial Sequence
  Description of Artificial Sequence: Synthetic oligonucleotide
guaagcugugaggagaucc

SEQ ID NO: 214340 - RNA, 19 nt, Artificial Sequence
  Description of Artificial Sequence: Synthetic oligonucleotide
uuaaaccaaguucccuuca

SEQ ID NO: 214341 - RNA, 19 nt, Artificial Sequence
  Description of Artificial Sequence: Synthetic oligonucleotide
acauuuacgaagagagcac

SEQ ID NO: 214342 - RNA, 19 nt, Artificial Sequence
  Description of Artificial Sequence: Synthetic oligonucleotide
cuacauauuauaggccacg

SEQ ID NO: 214343 - RNA, 19 nt, Artificial Sequence
  Description of Artificial Sequence: Synthetic oligonucleotide
ugauuacacgguuuuggcu

SEQ ID NO: 214344 - RNA, 19 nt, Artificial Sequence
  Description of Artificial Sequence: Synthetic oligonucleotide
guaaacucuccuagaaggg

SEQ ID NO: 214345 - RNA, 19 nt, Artificial Sequence
  Description of Artificial Sequence: Synthetic oligonucleotide
uccacgcaagauaauacaa

SEQ ID NO: 214346 - RNA, 19 nt, Artificial Sequence
  Description of Artificial Sequence: Synthetic oligonucleotide
uucucaugaaugauuuauc

SEQ ID NO: 214347 - RNA, 19 nt, Artificial Sequence
  Description of Artificial Sequence: Synthetic oligonucleotide
uugcuauuuuggcuuaaca

SEQ ID NO: 214348 - RNA, 19 nt, Artificial Sequence
  Description of Artificial Sequence: Synthetic oligonucleotide
caauguucauuguguaccc

SEQ ID NO: 214349 - RNA, 19 nt, Artificial Sequence
  Description of Artificial Sequence: Synthetic oligonucleotide
ucuccuagaagggugagau

SEQ ID NO: 214350 - RNA, 19 nt, Artificial Sequence
  Description of Artificial Sequence: Synthetic oligonucleotide
aauuaguaacagauccaug

SEQ ID NO: 214351 - RNA, 19 nt, Artificial Sequence
  Description of Artificial Sequence: Synthetic oligonucleotide
ugcacaaugaagccuccaa

SEQ ID NO: 214352 - RNA, 19 nt, Artificial Sequence
  Description of Artificial Sequence: Synthetic oligonucleotide
ucucguaccucaguaaacu

SEQ ID NO: 214353 - RNA, 19 nt, Artificial Sequence
  Description of Artificial Sequence: Synthetic oligonucleotide
gugcaaagcuccaucaccg

SEQ ID NO: 214354 - RNA, 19 nt, Artificial Sequence
  Description of Artificial Sequence: Synthetic oligonucleotide
agcugauauggugaaagag

SEQ ID NO: 214355 - RNA, 19 nt, Artificial Sequence
  Description of Artificial Sequence: Synthetic oligonucleotide
ucuuucuaccaaccggacu

SEQ ID NO: 214356 - RNA, 19 nt, Artificial Sequence
  Description of Artificial Sequence: Synthetic oligonucleotide
uucccuucaagaaaauguu

SEQ ID NO: 214357 - RNA, 19 nt, Artificial Sequence
  Description of Artificial Sequence: Synthetic oligonucleotide
uacuggugguugaacauac

SEQ ID NO: 214358 - RNA, 19 nt, Artificial Sequence
  Description of Artificial Sequence: Synthetic oligonucleotide
gaaagacuguguaagggca

SEQ ID NO: 214359 - RNA, 19 nt, Artificial Sequence
  Description of Artificial Sequence: Synthetic oligonucleotide
cacgcaagauaauacaaca

SEQ ID NO: 214360 - RNA, 19 nt, Artificial Sequence
  Description of Artificial Sequence: Synthetic oligonucleotide
auacuauccacgcaagaua

SEQ ID NO: 214361 - RNA, 19 nt, Artificial Sequence
  Description of Artificial Sequence: Synthetic oligonucleotide
acacgguuuuggcugacuc

SEQ ID NO: 214362 - RNA, 19 nt, Artificial Sequence
  Description of Artificial Sequence: Synthetic oligonucleotide
uuuacgaagagagcacuuc

SEQ ID NO: 214363 - RNA, 19 nt, Artificial Sequence
  Description of Artificial Sequence: Synthetic oligonucleotide
aagcugauauggugaaaga

SEQ ID NO: 214364 - RNA, 19 nt, Artificial Sequence
  Description of Artificial Sequence: Synthetic oligonucleotide
uccaaaacucaaccgggaa

SEQ ID NO: 214365 - RNA, 19 nt, Artificial Sequence
  Description of Artificial Sequence: Synthetic oligonucleotide
auccacgcaagauaauaca

SEQ ID NO: 214366 - RNA, 19 nt, Artificial Sequence
  Description of Artificial Sequence: Synthetic oligonucleotide
ugucaagcaggguuaaaua

SEQ ID NO: 214367 - RNA, 19 nt, Artificial Sequence
  Description of Artificial Sequence: Synthetic oligonucleotide
ugccgaaauaccuuauuua

SEQ ID NO: 214368 - RNA, 19 nt, Artificial Sequence
  Description of Artificial Sequence: Synthetic oligonucleotide
uacagccgaaagaagugcu

SEQ ID NO: 214369 - RNA, 19 nt, Artificial Sequence
  Description of Artificial Sequence: Synthetic oligonucleotide
acaaccacuaacagguuug

SEQ ID NO: 214370 - RNA, 19 nt, Artificial Sequence
  Description of Artificial Sequence: Synthetic oligonucleotide
uaucaguauccuaucugaa

SEQ ID NO: 214371 - RNA, 19 nt, Artificial Sequence
  Description of Artificial Sequence: Synthetic oligonucleotide
caagaacccgucucgcagg

SEQ ID NO: 214372 - RNA, 19 nt, Artificial Sequence
  Description of Artificial Sequence: Synthetic oligonucleotide
uugccgaaauaccuuauuu

SEQ ID NO: 214373 - RNA, 19 nt, Artificial Sequence
  Description of Artificial Sequence: Synthetic oligonucleotide
uuguugugauacuauccac

SEQ ID NO: 214374 - RNA, 19 nt, Artificial Sequence
  Description of Artificial Sequence: Synthetic oligonucleotide
uuaagcgucuccuuuccuu

SEQ ID NO: 214375 - RNA, 19 nt, Artificial Sequence
  Description of Artificial Sequence: Synthetic oligonucleotide
uccuacaaucagguaaugc

SEQ ID NO: 214376 - RNA, 19 nt, Artificial Sequence
  Description of Artificial Sequence: Synthetic oligonucleotide
accuaaagucuaaugucac

SEQ ID NO: 214377 - RNA, 19 nt, Artificial Sequence
  Description of Artificial Sequence: Synthetic oligonucleotide
gauaguugccgaaauaccu

SEQ ID NO: 214378 - RNA, 19 nt, Artificial Sequence
  Description of Artificial Sequence: Synthetic oligonucleotide
cacuccuacaaucagguaa

SEQ ID NO: 214379 - RNA, 19 nt, Artificial Sequence
  Description of Artificial Sequence: Synthetic oligonucleotide
caguccucgugccuuaagg

SEQ ID NO: 214380 - RNA, 19 nt, Artificial Sequence
  Description of Artificial Sequence: Synthetic oligonucleotide
uucucguaccucaguaaac

SEQ ID NO: 214381 - RNA, 19 nt, Artificial Sequence
  Description of Artificial Sequence: Synthetic oligonucleotide
ugugagcucaguucuccga

SEQ ID NO: 214382 - RNA, 19 nt, Artificial Sequence
  Description of Artificial Sequence: Synthetic oligonucleotide
aagugcuaacggcccgugg

SEQ ID NO: 214383 - RNA, 19 nt, Artificial Sequence
  Description of Artificial Sequence: Synthetic oligonucleotide
ugagaucuaucgauggcuu

SEQ ID NO: 214384 - RNA, 19 nt, Artificial Sequence
  Description of Artificial Sequence: Synthetic oligonucleotide
acgcugcuaacauucaacu

SEQ ID NO: 214385 - RNA, 19 nt, Artificial Sequence
  Description of Artificial Sequence: Synthetic oligonucleotide
caccacuccuacaaucagg

SEQ ID NO: 214386 - RNA, 19 nt, Artificial Sequence
  Description of Artificial Sequence: Synthetic oligonucleotide
cuaauacacaacgauccuc

SEQ ID NO: 214387 - RNA, 19 nt, Artificial Sequence
  Description of Artificial Sequence: Synthetic oligonucleotide
cuggugguacuuaagcguc

SEQ ID NO: 214388 - RNA, 19 nt, Artificial Sequence
  Description of Artificial Sequence: Synthetic oligonucleotide
ucgauggcuuaaauuagua

SEQ ID NO: 214389 - RNA, 19 nt, Artificial Sequence
  Description of Artificial Sequence: Synthetic oligonucleotide
aguaacagauccaugucau

SEQ ID NO: 214390 - RNA, 19 nt, Artificial Sequence
  Description of Artificial Sequence: Synthetic oligonucleotide
aaacucaaccgggaauuga

SEQ ID NO: 214391 - RNA, 19 nt, Artificial Sequence
  Description of Artificial Sequence: Synthetic oligonucleotide
aacucaaccgggaauugaa

SEQ ID NO: 214392 - RNA, 19 nt, Artificial Sequence
  Description of Artificial Sequence: Synthetic oligonucleotide
caccgaauaggaacagaag

SEQ ID NO: 214393 - RNA, 19 nt, Artificial Sequence
  Description of Artificial Sequence: Synthetic oligonucleotide
ugacgagacuacauauuau

SEQ ID NO: 214394 - RNA, 19 nt, Artificial Sequence
  Description of Artificial Sequence: Synthetic oligonucleotide
augacaccgauguccacca

SEQ ID NO: 214395 - RNA, 19 nt, Artificial Sequence
  Description of Artificial Sequence: Synthetic oligonucleotide
ucacauuagcuagauggaa

SEQ ID NO: 214396 - RNA, 19 nt, Artificial Sequence
  Description of Artificial Sequence: Synthetic oligonucleotide
auuacacgguuuuggcuga

SEQ ID NO: 214397 - RNA, 19 nt, Artificial Sequence
  Description of Artificial Sequence: Synthetic oligonucleotide
auacaguggagggcgcacc

SEQ ID NO: 214398 - RNA, 19 nt, Artificial Sequence
  Description of Artificial Sequence: Synthetic oligonucleotide
aguguguuuugagugacau

SEQ ID NO: 214399 - RNA, 19 nt, Artificial Sequence
  Description of Artificial Sequence: Synthetic oligonucleotide
gauuagaucugugucucaa

SEQ ID NO: 214400 - RNA, 19 nt, Artificial Sequence
  Description of Artificial Sequence: Synthetic oligonucleotide
agaagagaccugcugugaa

SEQ ID NO: 214401 - RNA, 19 nt, Artificial Sequence
  Description of Artificial Sequence: Synthetic oligonucleotide
gggugagaucuaucgaugg

SEQ ID NO: 214402 - RNA, 19 nt, Artificial Sequence
  Description of Artificial Sequence: Synthetic oligonucleotide
cuacagccgaaagaagugc

SEQ ID NO: 214403 - RNA, 19 nt, Artificial Sequence
  Description of Artificial Sequence: Synthetic oligonucleotide
aauguucauuguguacccu

SEQ ID NO: 214404 - RNA, 19 nt, Artificial Sequence
  Description of Artificial Sequence: Synthetic oligonucleotide
augucaacauagacagugg

SEQ ID NO: 214405 - RNA, 19 nt, Artificial Sequence
  Description of Artificial Sequence: Synthetic oligonucleotide
uagagagcaucauggcgcu

SEQ ID NO: 214406 - RNA, 19 nt, Artificial Sequence
  Description of Artificial Sequence: Synthetic oligonucleotide
uaguugccgaaauaccuua

SEQ ID NO: 214407 - RNA, 19 nt, Artificial Sequence
  Description of Artificial Sequence: Synthetic oligonucleotide
ccuuauuuauaaucgcuuc

SEQ ID NO: 214408 - RNA, 19 nt, Artificial Sequence
  Description of Artificial Sequence: Synthetic oligonucleotide
auauuuguugugauacuau

SEQ ID NO: 214409 - RNA, 19 nt, Artificial Sequence
  Description of Artificial Sequence: Synthetic oligonucleotide
uacgaagagagcacuucuu

SEQ ID NO: 214410 - RNA, 19 nt, Artificial Sequence
  Description of Artificial Sequence: Synthetic oligonucleotide
uccagcguaaauucacauu

SEQ ID NO: 214411 - RNA, 19 nt, Artificial Sequence
  Description of Artificial Sequence: Synthetic oligonucleotide
cacucuacagccgaaagaa

SEQ ID NO: 214412 - RNA, 19 nt, Artificial Sequence
  Description of Artificial Sequence: Synthetic oligonucleotide
ggacccauaucucuccaag

SEQ ID NO: 214413 - RNA, 19 nt, Artificial Sequence
  Description of Artificial Sequence: Synthetic oligonucleotide
aucuauugggugguaccuc

SEQ ID NO: 214414 - RNA, 19 nt, Artificial Sequence
  Description of Artificial Sequence: Synthetic oligonucleotide
gaacccauuuggaggguag

SEQ ID NO: 214415 - RNA, 19 nt, Artificial Sequence
  Description of Artificial Sequence: Synthetic oligonucleotide
guucucguaccucaguaaa

SEQ ID NO: 214416 - RNA, 19 nt, Artificial Sequence
  Description of Artificial Sequence: Synthetic oligonucleotide
cuuacccgggacaagucca

SEQ ID NO: 214417 - RNA, 19 nt, Artificial Sequence
  Description of Artificial Sequence: Synthetic oligonucleotide
aagggaccguccccuuggg

SEQ ID NO: 214418 - RNA, 19 nt, Artificial Sequence
  Description of Artificial Sequence: Synthetic oligonucleotide
cagacuguaggaaugugua

SEQ ID NO: 214419 - RNA, 19 nt, Artificial Sequence
  Description of Artificial Sequence: Synthetic oligonucleotide
auaaugauccggaccccag

SEQ ID NO: 214420 - RNA, 19 nt, Artificial Sequence
  Description of Artificial Sequence: Synthetic oligonucleotide
gguugaacauacaagaagu

SEQ ID NO: 214421 - RNA, 19 nt, Artificial Sequence
  Description of Artificial Sequence: Synthetic oligonucleotide
ccgggaauugaaaugauca

SEQ ID NO: 214422 - RNA, 19 nt, Artificial Sequence
  Description of Artificial Sequence: Synthetic oligonucleotide
cagguucacucuacagccg

SEQ ID NO: 214423 - RNA, 19 nt, Artificial Sequence
  Description of Artificial Sequence: Synthetic oligonucleotide
ucccagugggccuuuaguu

SEQ ID NO: 214424 - RNA, 19 nt, Artificial Sequence
  Description of Artificial Sequence: Synthetic oligonucleotide
aaagacuguguaagggcaa

SEQ ID NO: 214425 - RNA, 19 nt, Artificial Sequence
  Description of Artificial Sequence: Synthetic oligonucleotide
cucucuaaccagucaccac

SEQ ID NO: 214426 - RNA, 19 nt, Artificial Sequence
  Description of Artificial Sequence: Synthetic oligonucleotide
aguugauuacacgguuuug

SEQ ID NO: 214427 - RNA, 19 nt, Artificial Sequence
  Description of Artificial Sequence: Synthetic oligonucleotide
cccuuaguaaccugcagac

SEQ ID NO: 214428 - RNA, 19 nt, Artificial Sequence
  Description of Artificial Sequence: Synthetic oligonucleotide
gguaucccggacuuuguac

SEQ ID NO: 214429 - RNA, 19 nt, Artificial Sequence
  Description of Artificial Sequence: Synthetic oligonucleotide
gacucaguuugugagccca

SEQ ID NO: 214430 - RNA, 19 nt, Artificial Sequence
  Description of Artificial Sequence: Synthetic oligonucleotide
ugaugacugaagucucgau

SEQ ID NO: 214431 - RNA, 19 nt, Artificial Sequence
  Description of Artificial Sequence: Synthetic oligonucleotide
accgggaauugaaaugauc

SEQ ID NO: 214432 - RNA, 19 nt, Artificial Sequence
  Description of Artificial Sequence: Synthetic oligonucleotide
agguucucguaccucagua

SEQ ID NO: 214433 - RNA, 19 nt, Artificial Sequence
  Description of Artificial Sequence: Synthetic oligonucleotide
cuguggacccauaucucuc

SEQ ID NO: 214434 - RNA, 19 nt, Artificial Sequence
  Description of Artificial Sequence: Synthetic oligonucleotide
cuggugguugaacauacaa

SEQ ID NO: 214435 - RNA, 19 nt, Artificial Sequence
  Description of Artificial Sequence: Synthetic oligonucleotide
gugauacuauccacgcaag

SEQ ID NO: 214436 - RNA, 19 nt, Artificial Sequence
  Description of Artificial Sequence: Synthetic oligonucleotide
agcguacuggugguugaac

SEQ ID NO: 214437 - RNA, 19 nt, Artificial Sequence
  Description of Artificial Sequence: Synthetic oligonucleotide
cucguaccucaguaaacuc

SEQ ID NO: 214438 - RNA, 19 nt, Artificial Sequence
  Description of Artificial Sequence: Synthetic oligonucleotide
guccucgugccuuaaggga

SEQ ID NO: 214439 - RNA, 19 nt, Artificial Sequence
  Description of Artificial Sequence: Synthetic oligonucleotide
auaguugccgaaauaccuu

SEQ ID NO: 214440 - RNA, 19 nt, Artificial Sequence
  Description of Artificial Sequence: Synthetic oligonucleotide
caauaaugauccggacccc

SEQ ID NO: 214441 - RNA, 19 nt, Artificial Sequence
  Description of Artificial Sequence: Synthetic oligonucleotide
ccaagaacccgucucgcag

SEQ ID NO: 214442 - RNA, 19 nt, Artificial Sequence
  Description of Artificial Sequence: Synthetic oligonucleotide
uugugagcccaguccuuug

SEQ ID NO: 214443 - RNA, 19 nt, Artificial Sequence
  Description of Artificial Sequence: Synthetic oligonucleotide
caagcaggguuaaauauau

SEQ ID NO: 214444 - RNA, 19 nt, Artificial Sequence
  Description of Artificial Sequence: Synthetic oligonucleotide
cagcguaaauucacauuuc

SEQ ID NO: 214445 - RNA, 19 nt, Artificial Sequence
  Description of Artificial Sequence: Synthetic oligonucleotide
caguucuccgaaggaagcc

SEQ ID NO: 214446 - RNA, 19 nt, Artificial Sequence
  Description of Artificial Sequence: Synthetic oligonucleotide
agggugagaucuaucgaug

SEQ ID NO: 214447 - RNA, 19 nt, Artificial Sequence
  Description of Artificial Sequence: Synthetic oligonucleotide
cuauccacgcaagauaaua

SEQ ID NO: 214448 - RNA, 19 nt, Artificial Sequence
  Description of Artificial Sequence: Synthetic oligonucleotide
ccacgcaagauaauacaac

SEQ ID NO: 214449 - RNA, 19 nt, Artificial Sequence
  Description of Artificial Sequence: Synthetic oligonucleotide
gcuaacggcccgugggugg

SEQ ID NO: 214450 - RNA, 19 nt, Artificial Sequence
  Description of Artificial Sequence: Synthetic oligonucleotide
ccuggaagguucucguacc

SEQ ID NO: 214451 - RNA, 19 nt, Artificial Sequence
  Description of Artificial Sequence: Synthetic oligonucleotide
ccacacagguucuuacccg

SEQ ID NO: 214452 - RNA, 19 nt, Artificial Sequence
  Description of Artificial Sequence: Synthetic oligonucleotide
uguucgggcccagaugguc

SEQ ID NO: 214453 - RNA, 19 nt, Artificial Sequence
  Description of Artificial Sequence: Synthetic oligonucleotide
agaagugcuaacggcccgu

SEQ ID NO: 214454 - RNA, 19 nt, Artificial Sequence
  Description of Artificial Sequence: Synthetic oligonucleotide
ugccaagaacccgucucgc

SEQ ID NO: 214455 - RNA, 19 nt, Artificial Sequence
  Description of Artificial Sequence: Synthetic oligonucleotide
ccggacuuuguacugacuc

SEQ ID NO: 214456 - RNA, 19 nt, Artificial Sequence
  Description of Artificial Sequence: Synthetic oligonucleotide
agugacgagacuacauauu

SEQ ID NO: 214457 - RNA, 19 nt, Artificial Sequence
  Description of Artificial Sequence: Synthetic oligonucleotide
aagguaucccggacuuugu

SEQ ID NO: 214458 - RNA, 19 nt, Artificial Sequence
  Description of Artificial Sequence: Synthetic oligonucleotide
ugcuaacggcccgugggug

SEQ ID NO: 214459 - RNA, 19 nt, Artificial Sequence
  Description of Artificial Sequence: Synthetic oligonucleotide
aacggcccguggguggagg

SEQ ID NO: 214460 - RNA, 19 nt, Artificial Sequence
  Description of Artificial Sequence: Synthetic oligonucleotide
ucucgcaggugcauccguu

SEQ ID NO: 214461 - RNA, 19 nt, Artificial Sequence
  Description of Artificial Sequence: Synthetic oligonucleotide
caagauaguugccgaaaua

SEQ ID NO: 214462 - RNA, 19 nt, Artificial Sequence
  Description of Artificial Sequence: Synthetic oligonucleotide
gucucgauaucuauugggu

SEQ ID NO: 214463 - RNA, 19 nt, Artificial Sequence
  Description of Artificial Sequence: Synthetic oligonucleotide
caucaccgaauaggaacag

SEQ ID NO: 214464 - RNA, 19 nt, Artificial Sequence
  Description of Artificial Sequence: Synthetic oligonucleotide
gagaucuaucgauggcuua

SEQ ID NO: 214465 - RNA, 19 nt, Artificial Sequence
  Description of Artificial Sequence: Synthetic oligonucleotide
aucaccgaauaggaacaga

SEQ ID NO: 214466 - RNA, 19 nt, Artificial Sequence
  Description of Artificial Sequence: Synthetic oligonucleotide
gccgaaauaccuuauuuau

SEQ ID NO: 214467 - RNA, 19 nt, Artificial Sequence
  Description of Artificial Sequence: Synthetic oligonucleotide
ggcucugaugacugaaguc

SEQ ID NO: 214468 - RNA, 19 nt, Artificial Sequence
  Description of Artificial Sequence: Synthetic oligonucleotide
gcucugaugacugaagucu

SEQ ID NO: 214469 - RNA, 19 nt, Artificial Sequence
  Description of Artificial Sequence: Synthetic oligonucleotide
guucuuacccgggacaagu

SEQ ID NO: 214470 - RNA, 19 nt, Artificial Sequence
  Description of Artificial Sequence: Synthetic oligonucleotide
augauccggaccccaggaa

SEQ ID NO: 214471 - RNA, 19 nt, Artificial Sequence
  Description of Artificial Sequence: Synthetic oligonucleotide
aggccauaaacuggccucu

SEQ ID NO: 214472 - RNA, 19 nt, Artificial Sequence
  Description of Artificial Sequence: Synthetic oligonucleotide
cguaccucaguaaacucuc

SEQ ID NO: 214473 - RNA, 19 nt, Artificial Sequence
  Description of Artificial Sequence: Synthetic oligonucleotide
aucuaauuggaaggugcua

SEQ ID NO: 214474 - RNA, 19 nt, Artificial Sequence
  Description of Artificial Sequence: Synthetic oligonucleotide
agguaucccggacuuugua

SEQ ID NO: 214475 - RNA, 19 nt, Artificial Sequence
  Description of Artificial Sequence: Synthetic oligonucleotide
auaaagggaccguccccuu

SEQ ID NO: 214476 - RNA, 19 nt, Artificial Sequence
  Description of Artificial Sequence: Synthetic oligonucleotide
guaccucaguaaacucucc

SEQ ID NO: 214477 - RNA, 19 nt, Artificial Sequence
  Description of Artificial Sequence: Synthetic oligonucleotide
guacuuaagcgucuccuuu

SEQ ID NO: 214478 - RNA, 19 nt, Artificial Sequence
  Description of Artificial Sequence: Synthetic oligonucleotide
gcaaugagcaaacaauauu

SEQ ID NO: 214479 - RNA, 19 nt, Artificial Sequence
  Description of Artificial Sequence: Synthetic oligonucleotide
guuucuggauuggcaauaa

SEQ ID NO: 214480 - RNA, 19 nt, Artificial Sequence
  Description of Artificial Sequence: Synthetic oligonucleotide
ccuaaagucuaaugucaca

SEQ ID NO: 214481 - RNA, 19 nt, Artificial Sequence
  Description of Artificial Sequence: Synthetic oligonucleotide
gcguacuggugguugaaca

SEQ ID NO: 214482 - RNA, 19 nt, Artificial Sequence
  Description of Artificial Sequence: Synthetic oligonucleotide
cauuuacgaagagagcacu

SEQ ID NO: 214483 - RNA, 19 nt, Artificial Sequence
  Description of Artificial Sequence: Synthetic oligonucleotide
gggcgcaccaugcaaguga

SEQ ID NO: 214484 - RNA, 19 nt, Artificial Sequence
  Description of Artificial Sequence: Synthetic oligonucleotide
cuccuagaagggugagauc

SEQ ID NO: 214485 - RNA, 19 nt, Artificial Sequence
  Description of Artificial Sequence: Synthetic oligonucleotide
gguucucguaccucaguaa

SEQ ID NO: 214486 - RNA, 19 nt, Artificial Sequence
  Description of Artificial Sequence: Synthetic oligonucleotide
gugucaagcaggguuaaau

SEQ ID NO: 214487 - RNA, 19 nt, Artificial Sequence
  Description of Artificial Sequence: Synthetic oligonucleotide
ccgaauaggaacagaaggu

SEQ ID NO: 214488 - RNA, 19 nt, Artificial Sequence
  Description of Artificial Sequence: Synthetic oligonucleotide
acucaaccgggaauugaaa

SEQ ID NO: 214489 - RNA, 19 nt, Artificial Sequence
  Description of Artificial Sequence: Synthetic oligonucleotide
gcuagauggaagauuuucu

SEQ ID NO: 214490 - RNA, 19 nt, Artificial Sequence
  Description of Artificial Sequence: Synthetic oligonucleotide
gauccggaccccaggaagu

SEQ ID NO: 214491 - RNA, 19 nt, Artificial Sequence
  Description of Artificial Sequence: Synthetic oligonucleotide
ccagcguaaauucacauuu

SEQ ID NO: 214492 - RNA, 19 nt, Artificial Sequence
  Description of Artificial Sequence: Synthetic oligonucleotide
aguugccgaaauaccuuau

SEQ ID NO: 214493 - RNA, 19 nt, Artificial Sequence
  Description of Artificial Sequence: Synthetic oligonucleotide
caauucggggacgcucuuc

SEQ ID NO: 214494 - RNA, 19 nt, Artificial Sequence
  Description of Artificial Sequence: Synthetic oligonucleotide
cagccgaaagaagugcuaa

SEQ ID NO: 214495 - RNA, 19 nt, Artificial Sequence
  Description of Artificial Sequence: Synthetic oligonucleotide
agagagcaucauggcgcuc

SEQ ID NO: 214496 - RNA, 19 nt, Artificial Sequence
  Description of Artificial Sequence: Synthetic oligonucleotide
acacaacgauccuccuuua

SEQ ID NO: 214497 - RNA, 19 nt, Artificial Sequence
  Description of Artificial Sequence: Synthetic oligonucleotide
aacccgucucgcaggugca

SEQ ID NO: 214498 - RNA, 19 nt, Artificial Sequence
  Description of Artificial Sequence: Synthetic oligonucleotide
acagccgaaagaagugcua

SEQ ID NO: 214499 - RNA, 19 nt, Artificial Sequence
  Description of Artificial Sequence: Synthetic oligonucleotide
uuacacgguuuuggcugac

SEQ ID NO: 214500 - RNA, 19 nt, Artificial Sequence
  Description of Artificial Sequence: Synthetic oligonucleotide
ccccuuaguaaccugcaga

SEQ ID NO: 214501 - RNA, 19 nt, Artificial Sequence
  Description of Artificial Sequence: Synthetic oligonucleotide
acuauccacgcaagauaau

SEQ ID NO: 214502 - RNA, 19 nt, Artificial Sequence
  Description of Artificial Sequence: Synthetic oligonucleotide
agggaccguccccuugggu

SEQ ID NO: 214503 - RNA, 19 nt, Artificial Sequence
  Description of Artificial Sequence: Synthetic oligonucleotide
cuccuacaaucagguaaug

SEQ ID NO: 214504 - RNA, 19 nt, Artificial Sequence
  Description of Artificial Sequence: Synthetic oligonucleotide
guggagggcgcaccaugca

SEQ ID NO: 214505 - RNA, 19 nt, Artificial Sequence
  Description of Artificial Sequence: Synthetic oligonucleotide
ccaccacuccuacaaucag

SEQ ID NO: 214506 - RNA, 19 nt, Artificial Sequence
  Description of Artificial Sequence: Synthetic oligonucleotide
caaccggacucugucaugu

SEQ ID NO: 214507 - RNA, 19 nt, Artificial Sequence
  Description of Artificial Sequence: Synthetic oligonucleotide
ccgaaauaccuuauuuaua

SEQ ID NO: 214508 - RNA, 19 nt, Artificial Sequence
  Description of Artificial Sequence: Synthetic oligonucleotide
gccaagaacccgucucgca

SEQ ID NO: 214509 - RNA, 19 nt, Artificial Sequence
  Description of Artificial Sequence: Synthetic oligonucleotide
gguacuuaagcgucuccuu

SEQ ID NO: 214510 - RNA, 19 nt, Artificial Sequence
  Description of Artificial Sequence: Synthetic oligonucleotide
ucgugccuuaagggacuca

SEQ ID NO: 214511 - RNA, 19 nt, Artificial Sequence
  Description of Artificial Sequence: Synthetic oligonucleotide
cuaacggcccgugggugga

SEQ ID NO: 214512 - RNA, 19 nt, Artificial Sequence
  Description of Artificial Sequence: Synthetic oligonucleotide
gugcuaacggcccgugggu

SEQ ID NO: 214513 - RNA, 19 nt, Artificial Sequence
  Description of Artificial Sequence: Synthetic oligonucleotide
ggcgcaccaugcaagugac

SEQ ID NO: 214514 - RNA, 19 nt, Artificial Sequence
  Description of Artificial Sequence: Synthetic oligonucleotide
cuuaagcgucuccuuuccu

SEQ ID NO: 214515 - RNA, 19 nt, Artificial Sequence
  Description of Artificial Sequence: Synthetic oligonucleotide
gggcaauucggggacgcuc

SEQ ID NO: 214516 - RNA, 19 nt, Artificial Sequence
  Description of Artificial Sequence: Synthetic oligonucleotide
aggugcuaccuggaagguu

SEQ ID NO: 214517 - RNA, 19 nt, Artificial Sequence
  Description of Artificial Sequence: Synthetic oligonucleotide
guaaagugucaagcagggu

SEQ ID NO: 214518 - RNA, 19 nt, Artificial Sequence
  Description of Artificial Sequence: Synthetic oligonucleotide
agggcaauucggggacgcu

SEQ ID NO: 214519 - RNA, 19 nt, Artificial Sequence
  Description of Artificial Sequence: Synthetic oligonucleotide
ccuucgcccuccucgggug

SEQ ID NO: 214520 - RNA, 19 nt, Artificial Sequence
  Description of Artificial Sequence: Synthetic oligonucleotide
guagccuguucgggcccag

SEQ ID NO: 214521 - RNA, 19 nt, Artificial Sequence
  Description of Artificial Sequence: Synthetic oligonucleotide
cucgugccuuaagggacuc

SEQ ID NO: 214522 - RNA, 19 nt, Artificial Sequence
  Description of Artificial Sequence: Synthetic oligonucleotide
uagccuguucgggcccaga

SEQ ID NO: 214523 - RNA, 19 nt, Artificial Sequence
  Description of Artificial Sequence: Synthetic oligonucleotide
auccggaccccaggaagua

SEQ ID NO: 214524 - RNA, 19 nt, Artificial Sequence
  Description of Artificial Sequence: Synthetic oligonucleotide
cgcaccaugcaagugacaa

SEQ ID NO: 214525 - RNA, 19 nt, Artificial Sequence
  Description of Artificial Sequence: Synthetic oligonucleotide
cuauugggugguaccucau

SEQ ID NO: 214526 - RNA, 19 nt, Artificial Sequence
  Description of Artificial Sequence: Synthetic oligonucleotide
caaccacuaacagguuugu

SEQ ID NO: 214527 - RNA, 19 nt, Artificial Sequence
  Description of Artificial Sequence: Synthetic oligonucleotide
gucugccaagaacccgucu

SEQ ID NO: 214528 - RNA, 19 nt, Artificial Sequence
  Description of Artificial Sequence: Synthetic oligonucleotide
cacaacgauccuccuuuau

SEQ ID NO: 214529 - RNA, 19 nt, Artificial Sequence
  Description of Artificial Sequence: Synthetic oligonucleotide
gcguaaauucacauuucau

SEQ ID NO: 214530 - RNA, 19 nt, Artificial Sequence
  Description of Artificial Sequence: Synthetic oligonucleotide
ggucugccaagaacccguc

SEQ ID NO: 214531 - RNA, 19 nt, Artificial Sequence
  Description of Artificial Sequence: Synthetic oligonucleotide
acccgucucgcaggugcau

SEQ ID NO: 214532 - RNA, 19 nt, Artificial Sequence
  Description of Artificial Sequence: Synthetic oligonucleotide
gaccguccccuuggguaaa

SEQ ID NO: 214533 - RNA, 19 nt, Artificial Sequence
  Description of Artificial Sequence: Synthetic oligonucleotide
ggacgcucuucugccacaa

SEQ ID NO: 214534 - RNA, 19 nt, Artificial Sequence
  Description of Artificial Sequence: Synthetic oligonucleotide
cuucgcccuccucgggugu

SEQ ID NO: 214535 - RNA, 19 nt, Artificial Sequence
  Description of Artificial Sequence: Synthetic oligonucleotide
ccuuaguaaccugcagacu

SEQ ID NO: 214536 - RNA, 19 nt, Artificial Sequence
  Description of Artificial Sequence: Synthetic oligonucleotide
cggcuugugcaacaguacu

SEQ ID NO: 214537 - RNA, 19 nt, Artificial Sequence
  Description of Artificial Sequence: Synthetic oligonucleotide
ccgggacaaguccaguccu

SEQ ID NO: 214538 - RNA, 19 nt, Artificial Sequence
  Description of Artificial Sequence: Synthetic oligonucleotide
gcaauucggggacgcucuu

SEQ ID NO: 214539 - RNA, 19 nt, Artificial Sequence
  Description of Artificial Sequence: Synthetic oligonucleotide
gcgcaccaugcaagugaca

SEQ ID NO: 214540 - RNA, 19 nt, Artificial Sequence
  Description of Artificial Sequence: Synthetic oligonucleotide
ccacaaccacuaacagguu

SEQ ID NO: 214541 - RNA, 19 nt, Artificial Sequence
  Description of Artificial Sequence: Synthetic oligonucleotide
aaucacuccaacuucaucg

SEQ ID NO: 214542 - RNA, 19 nt, Artificial Sequence
  Description of Artificial Sequence: Synthetic oligonucleotide
uuuaaauauauauauaugu

SEQ ID NO: 214543 - RNA, 19 nt, Artificial Sequence
  Description of Artificial Sequence: Synthetic oligonucleotide
auacaguaaaauuucaggc

SEQ ID NO: 214544 - RNA, 19 nt, Artificial Sequence
  Description of Artificial Sequence: Synthetic oligonucleotide
uuuauauauauuuauauau

SEQ ID NO: 214545 - RNA, 19 nt, Artificial Sequence
  Description of Artificial Sequence: Synthetic oligonucleotide
uuaaauauauauauaugug

SEQ ID NO: 214546 - RNA, 19 nt, Artificial Sequence
  Description of Artificial Sequence: Synthetic oligonucleotide
uaugaguuaacucagacau

SEQ ID NO: 214547 - RNA, 19 nt, Artificial Sequence
  Description of Artificial Sequence: Synthetic oligonucleotide
uauauauuuauauauauuu

SEQ ID NO: 214548 - RNA, 19 nt, Artificial Sequence
  Description of Artificial Sequence: Synthetic oligonucleotide
aauaaugggcuagagaaac

SEQ ID NO: 214549 - RNA, 19 nt, Artificial Sequence
  Description of Artificial Sequence: Synthetic oligonucleotide
aauuguauaggaaagagga

SEQ ID NO: 214550 - RNA, 19 nt, Artificial Sequence
  Description of Artificial Sequence: Synthetic oligonucleotide
auuuuaaauauauauauau

SEQ ID NO: 214551 - RNA, 19 nt, Artificial Sequence
  Description of Artificial Sequence: Synthetic oligonucleotide
uuuagcuucaaaacgacug

SEQ ID NO: 214552 - RNA, 19 nt, Artificial Sequence
  Description of Artificial Sequence: Synthetic oligonucleotide
uaaauauauauauaugugu

SEQ ID NO: 214553 - RNA, 19 nt, Artificial Sequence
  Description of Artificial Sequence: Synthetic oligonucleotide
uuuuaaauauauauauaug

SEQ ID NO: 214554 - RNA, 19 nt, Artificial Sequence
  Description of Artificial Sequence: Synthetic oligonucleotide
cauacgauaaaacauauuc

SEQ ID NO: 214555 - RNA, 19 nt, Artificial Sequence
  Description of Artificial Sequence: Synthetic oligonucleotide
uguagaagggaaauuuucg

SEQ ID NO: 214556 - RNA, 19 nt, Artificial Sequence
  Description of Artificial Sequence: Synthetic oligonucleotide
ucgaguauaauuaacuucu

SEQ ID NO: 214557 - RNA, 19 nt, Artificial Sequence
  Description of Artificial Sequence: Synthetic oligonucleotide
aaauauauauauaugugug

SEQ ID NO: 214558 - RNA, 19 nt, Artificial Sequence
  Description of Artificial Sequence: Synthetic oligonucleotide
aauauauauauaugugugu

SEQ ID NO: 214559 - RNA, 19 nt, Artificial Sequence
  Description of Artificial Sequence: Synthetic oligonucleotide
agaacuugagagcuaauac

SEQ ID NO: 214560 - RNA, 19 nt, Artificial Sequence
  Description of Artificial Sequence: Synthetic oligonucleotide
ugagucacugauuaaaacc

SEQ ID NO: 214561 - RNA, 19 nt, Artificial Sequence
  Description of Artificial Sequence: Synthetic oligonucleotide
augauuaccacaucgccac

SEQ ID NO: 214562 - RNA, 19 nt, Artificial Sequence
  Description of Artificial Sequence: Synthetic oligonucleotide
aauauaaugacuggucgag

SEQ ID NO: 214563 - RNA, 19 nt, Artificial Sequence
  Description of Artificial Sequence: Synthetic oligonucleotide
aauugcaguacagugcagc

SEQ ID NO: 214564 - RNA, 19 nt, Artificial Sequence
  Description of Artificial Sequence: Synthetic oligonucleotide
uauauauauuuauauauau

SEQ ID NO: 214565 - RNA, 19 nt, Artificial Sequence
  Description of Artificial Sequence: Synthetic oligonucleotide
uuaguaauugaacuuguac

SEQ ID NO: 214566 - RNA, 19 nt, Artificial Sequence
  Description of Artificial Sequence: Synthetic oligonucleotide
gaacuuaugcuccugaaug

SEQ ID NO: 214567 - RNA, 19 nt, Artificial Sequence
  Description of Artificial Sequence: Synthetic oligonucleotide
aaauuugaaguucaacccu

SEQ ID NO: 214568 - RNA, 19 nt, Artificial Sequence
  Description of Artificial Sequence: Synthetic oligonucleotide
uauugugcaacaauaguga

SEQ ID NO: 214569 - RNA, 19 nt, Artificial Sequence
  Description of Artificial Sequence: Synthetic oligonucleotide
uauauuaauaaugggcuag

SEQ ID NO: 214570 - RNA, 19 nt, Artificial Sequence
  Description of Artificial Sequence: Synthetic oligonucleotide
auauugaguaaacaauuuc

SEQ ID NO: 214571 - RNA, 19 nt, Artificial Sequence
  Description of Artificial Sequence: Synthetic oligonucleotide
aauaauacagaugaugcaa

SEQ ID NO: 214572 - RNA, 19 nt, Artificial Sequence
  Description of Artificial Sequence: Synthetic oligonucleotide
uaguaauugaacuuguacu

SEQ ID NO: 214573 - RNA, 19 nt, Artificial Sequence
  Description of Artificial Sequence: Synthetic oligonucleotide
uggaaauuguauaggaaag

SEQ ID NO: 214574 - RNA, 19 nt, Artificial Sequence
  Description of Artificial Sequence: Synthetic oligonucleotide
gaaauuguauaggaaagag

SEQ ID NO: 214575 - RNA, 19 nt, Artificial Sequence
  Description of Artificial Sequence: Synthetic oligonucleotide
uuauauauauuuauauaua

SEQ ID NO: 214576 - RNA, 19 nt, Artificial Sequence
  Description of Artificial Sequence: Synthetic oligonucleotide
aguguuuacccuucucugc

SEQ ID NO: 214577 - RNA, 19 nt, Artificial Sequence
  Description of Artificial Sequence: Synthetic oligonucleotide
ucacuaagacugaagaagc

SEQ ID NO: 214578 - RNA, 19 nt, Artificial Sequence
  Description of Artificial Sequence: Synthetic oligonucleotide
ugcuauuagaguuaagcgu

SEQ ID NO: 214579 - RNA, 19 nt, Artificial Sequence
  Description of Artificial Sequence: Synthetic oligonucleotide
uucgaagagaaccggaccc

SEQ ID NO: 214580 - RNA, 19 nt, Artificial Sequence
  Description of Artificial Sequence: Synthetic oligonucleotide
auauauauauaugugugug

SEQ ID NO: 214581 - RNA, 19 nt, Artificial Sequence
  Description of Artificial Sequence: Synthetic oligonucleotide
auugauaacauggagaaua

SEQ ID NO: 214582 - RNA, 19 nt, Artificial Sequence
  Description of Artificial Sequence: Synthetic oligonucleotide
aggaccuaaaucaaacucc

SEQ ID NO: 214583 - RNA, 19 nt, Artificial Sequence
  Description of Artificial Sequence: Synthetic oligonucleotide
guaacuacuuucacuaucg

SEQ ID NO: 214584 - RNA, 19 nt, Artificial Sequence
  Description of Artificial Sequence: Synthetic oligonucleotide
uuguauaggaaagaggaga

SEQ ID NO: 214585 - RNA, 19 nt, Artificial Sequence
  Description of Artificial Sequence: Synthetic oligonucleotide
gaaauguucggugaauucc

SEQ ID NO: 214586 - RNA, 19 nt, Artificial Sequence
  Description of Artificial Sequence: Synthetic oligonucleotide
acgaagaccucucaugaac

SEQ ID NO: 214587 - RNA, 19 nt, Artificial Sequence
  Description of Artificial Sequence: Synthetic oligonucleotide
uacgauaaaacauauucuu

SEQ ID NO: 214588 - RNA, 19 nt, Artificial Sequence
  Description of Artificial Sequence: Synthetic oligonucleotide
auuaauaaugggcuagaga

SEQ ID NO: 214589 - RNA, 19 nt, Artificial Sequence
  Description of Artificial Sequence: Synthetic oligonucleotide
accuaaaucaaacuccaug

SEQ ID NO: 214590 - RNA, 19 nt, Artificial Sequence
  Description of Artificial Sequence: Synthetic oligonucleotide
aacaugcucacacgucuac

SEQ ID NO: 214591 - RNA, 19 nt, Artificial Sequence
  Description of Artificial Sequence: Synthetic oligonucleotide
cacuagaugucaaaauggg

SEQ ID NO: 214592 - RNA, 19 nt, Artificial Sequence
  Description of Artificial Sequence: Synthetic oligonucleotide
auaauucccauaguuacag

SEQ ID NO: 214593 - RNA, 19 nt, Artificial Sequence
  Description of Artificial Sequence: Synthetic oligonucleotide
uuaugaguuaacucagaca

SEQ ID NO: 214594 - RNA, 19 nt, Artificial Sequence
  Description of Artificial Sequence: Synthetic oligonucleotide
uuuaauaccagaagucauu

SEQ ID NO: 214595 - RNA, 19 nt, Artificial Sequence
  Description of Artificial Sequence: Synthetic oligonucleotide
uacgcuuguucauugaaug

SEQ ID NO: 214596 - RNA, 19 nt, Artificial Sequence
  Description of Artificial Sequence: Synthetic oligonucleotide
aaccaguacucauuuaaga

SEQ ID NO: 214597 - RNA, 19 nt, Artificial Sequence
  Description of Artificial Sequence: Synthetic oligonucleotide
aaauuugucgggaaauucu

SEQ ID NO: 214598 - RNA, 19 nt, Artificial Sequence
  Description of Artificial Sequence: Synthetic oligonucleotide
uggucgaguauaauuaacu

SEQ ID NO: 214599 - RNA, 19 nt, Artificial Sequence
  Description of Artificial Sequence: Synthetic oligonucleotide
auaagggccagacuguucu

SEQ ID NO: 214600 - RNA, 19 nt, Artificial Sequence
  Description of Artificial Sequence: Synthetic oligonucleotide
aacaauagugacagcuugg

SEQ ID NO: 214601 - RNA, 19 nt, Artificial Sequence
  Description of Artificial Sequence: Synthetic oligonucleotide
caggauccaaauuugucgg

SEQ ID NO: 214602 - RNA, 19 nt, Artificial Sequence
  Description of Artificial Sequence: Synthetic oligonucleotide
guaaaguugggcaaucugc

SEQ ID NO: 214603 - RNA, 19 nt, Artificial Sequence
  Description of Artificial Sequence: Synthetic oligonucleotide
aacuuaugcuccugaaugu

SEQ ID NO: 214604 - RNA, 19 nt, Artificial Sequence
  Description of Artificial Sequence: Synthetic oligonucleotide
ucuggcguaaccugccugg

SEQ ID NO: 214605 - RNA, 19 nt, Artificial Sequence
  Description of Artificial Sequence: Synthetic oligonucleotide
auaauacagaugaugcaac

SEQ ID NO: 214606 - RNA, 19 nt, Artificial Sequence
  Description of Artificial Sequence: Synthetic oligonucleotide
caacugccgaccaugaggg

SEQ ID NO: 214607 - RNA, 19 nt, Artificial Sequence
  Description of Artificial Sequence: Synthetic oligonucleotide
ugaguuaacucagacauua

SEQ ID NO: 214608 - RNA, 19 nt, Artificial Sequence
  Description of Artificial Sequence: Synthetic oligonucleotide
acaacgaagaccucucaug

SEQ ID NO: 214609 - RNA, 19 nt, Artificial Sequence
  Description of Artificial Sequence: Synthetic oligonucleotide
gaacuaaugcuacugcuca

SEQ ID NO: 214610 - RNA, 19 nt, Artificial Sequence
  Description of Artificial Sequence: Synthetic oligonucleotide
uuaaccguugucucguucu

SEQ ID NO: 214611 - RNA, 19 nt, Artificial Sequence
  Description of Artificial Sequence: Synthetic oligonucleotide
uagaguuaagcgugcauug

SEQ ID NO: 214612 - RNA, 19 nt, Artificial Sequence
  Description of Artificial Sequence: Synthetic oligonucleotide
ugaacaacaaacagcccuc

SEQ ID NO: 214613 - RNA, 19 nt, Artificial Sequence
  Description of Artificial Sequence: Synthetic oligonucleotide
ugucgggaaauucugagua

SEQ ID NO: 214614 - RNA, 19 nt, Artificial Sequence
  Description of Artificial Sequence: Synthetic oligonucleotide
aaugggcacaacugccgac

SEQ ID NO: 214615 - RNA, 19 nt, Artificial Sequence
  Description of Artificial Sequence: Synthetic oligonucleotide
accgacugaacacuuguuc

SEQ ID NO: 214616 - RNA, 19 nt, Artificial Sequence
  Description of Artificial Sequence: Synthetic oligonucleotide
gaggaccuaaaucaaacuc

SEQ ID NO: 214617 - RNA, 19 nt, Artificial Sequence
  Description of Artificial Sequence: Synthetic oligonucleotide
ucccuaagcauacaguaaa

SEQ ID NO: 214618 - RNA, 19 nt, Artificial Sequence
  Description of Artificial Sequence: Synthetic oligonucleotide
cuuuauggcauuucccgac

SEQ ID NO: 214619 - RNA, 19 nt, Artificial Sequence
  Description of Artificial Sequence: Synthetic oligonucleotide
uggccagaaaccaauagua

SEQ ID NO: 214620 - RNA, 19 nt, Artificial Sequence
  Description of Artificial Sequence: Synthetic oligonucleotide
auguucggugaauuccugc

SEQ ID NO: 214621 - RNA, 19 nt, Artificial Sequence
  Description of Artificial Sequence: Synthetic oligonucleotide
uuauauuaauaaugggcua

SEQ ID NO: 214622 - RNA, 19 nt, Artificial Sequence
  Description of Artificial Sequence: Synthetic oligonucleotide
aguucaacccuugacucgg

SEQ ID NO: 214623 - RNA, 19 nt, Artificial Sequence
  Description of Artificial Sequence: Synthetic oligonucleotide
aagaccucucaugaacaac

SEQ ID NO: 214624 - RNA, 19 nt, Artificial Sequence
  Description of Artificial Sequence: Synthetic oligonucleotide
aguuauuguggguaaaaua

SEQ ID NO: 214625 - RNA, 19 nt, Artificial Sequence
  Description of Artificial Sequence: Synthetic oligonucleotide
uauuaauaaugggcuagag

SEQ ID NO: 214626 - RNA, 19 nt, Artificial Sequence
  Description of Artificial Sequence: Synthetic oligonucleotide
uuuacgcuuguucauugaa

SEQ ID NO: 214627 - RNA, 19 nt, Artificial Sequence
  Description of Artificial Sequence: Synthetic oligonucleotide
aaaccaguacucauuuaag

SEQ ID NO: 214628 - RNA, 19 nt, Artificial Sequence
  Description of Artificial Sequence: Synthetic oligonucleotide
uguucggugaauuccugcu

SEQ ID NO: 214629 - RNA, 19 nt, Artificial Sequence
  Description of Artificial Sequence: Synthetic oligonucleotide
uuuauggcauuucccgaca

SEQ ID NO: 214630 - RNA, 19 nt, Artificial Sequence
  Description of Artificial Sequence: Synthetic oligonucleotide
ugaacuuaugcuccugaau

SEQ ID NO: 214631 - RNA, 19 nt, Artificial Sequence
  Description of Artificial Sequence: Synthetic oligonucleotide
acgauaaaacauauucuuc

SEQ ID NO: 214632 - RNA, 19 nt, Artificial Sequence
  Description of Artificial Sequence: Synthetic oligonucleotide
agauaagucucaucaauua

SEQ ID NO: 214633 - RNA, 19 nt, Artificial Sequence
  Description of Artificial Sequence: Synthetic oligonucleotide
uuauucguccucuuguuuu

SEQ ID NO: 214634 - RNA, 19 nt, Artificial Sequence
  Description of Artificial Sequence: Synthetic oligonucleotide
uaauaaugggcuagagaaa

SEQ ID NO: 214635 - RNA, 19 nt, Artificial Sequence
  Description of Artificial Sequence: Synthetic oligonucleotide
aacccuugauagcugguca

SEQ ID NO: 214636 - RNA, 19 nt, Artificial Sequence
  Description of Artificial Sequence: Synthetic oligonucleotide
aguucgaagagaaccggac

SEQ ID NO: 214637 - RNA, 19 nt, Artificial Sequence
  Description of Artificial Sequence: Synthetic oligonucleotide
acuaaugcuacugcucauc

SEQ ID NO: 214638 - RNA, 19 nt, Artificial Sequence
  Description of Artificial Sequence: Synthetic oligonucleotide
ucaacccuugacucggaag

SEQ ID NO: 214639 - RNA, 19 nt, Artificial Sequence
  Description of Artificial Sequence: Synthetic oligonucleotide
uuuaguaauugaacuugua

SEQ ID NO: 214640 - RNA, 19 nt, Artificial Sequence
  Description of Artificial Sequence: Synthetic oligonucleotide
uuguaugagggacgcagga

SEQ ID NO: 214641 - RNA, 19 nt, Artificial Sequence
  Description of Artificial Sequence: Synthetic oligonucleotide
uugauaacauggagaauau

SEQ ID NO: 214642 - RNA, 19 nt, Artificial Sequence
  Description of Artificial Sequence: Synthetic oligonucleotide
uaggaaucacuccaacuuc

SEQ ID NO: 214643 - RNA, 19 nt, Artificial Sequence
  Description of Artificial Sequence: Synthetic oligonucleotide
cuauuagaguuaagcgugc

SEQ ID NO: 214644 - RNA, 19 nt, Artificial Sequence
  Description of Artificial Sequence: Synthetic oligonucleotide
cuaucgcuggcauuagaag

SEQ ID NO: 214645 - RNA, 19 nt, Artificial Sequence
  Description of Artificial Sequence: Synthetic oligonucleotide
guaaagaccugugcaauug

SEQ ID NO: 214646 - RNA, 19 nt, Artificial Sequence
  Description of Artificial Sequence: Synthetic oligonucleotide
caugauuaccacaucgcca

SEQ ID NO: 214647 - RNA, 19 nt, Artificial Sequence
  Description of Artificial Sequence: Synthetic oligonucleotide
gaagauaagucucaucaau

SEQ ID NO: 214648 - RNA, 19 nt, Artificial Sequence
  Description of Artificial Sequence: Synthetic oligonucleotide
gauuaccacaucgccacag

SEQ ID NO: 214649 - RNA, 19 nt, Artificial Sequence
  Description of Artificial Sequence: Synthetic oligonucleotide
auaagucucaucaauuaau

SEQ ID NO: 214650 - RNA, 19 nt, Artificial Sequence
  Description of Artificial Sequence: Synthetic oligonucleotide
aagcgugcauuguugcuca

SEQ ID NO: 214651 - RNA, 19 nt, Artificial Sequence
  Description of Artificial Sequence: Synthetic oligonucleotide
aauuugaaguucaacccuu

SEQ ID NO: 214652 - RNA, 19 nt, Artificial Sequence
  Description of Artificial Sequence: Synthetic oligonucleotide
ggucccaauauaaugacug

SEQ ID NO: 214653 - RNA, 19 nt, Artificial Sequence
  Description of Artificial Sequence: Synthetic oligonucleotide
aagauaagucucaucaauu

SEQ ID NO: 214654 - RNA, 19 nt, Artificial Sequence
  Description of Artificial Sequence: Synthetic oligonucleotide
ugacuggucgaguauaauu

SEQ ID NO: 214655 - RNA, 19 nt, Artificial Sequence
  Description of Artificial Sequence: Synthetic oligonucleotide
aauuaugaguuaacucaga

SEQ ID NO: 214656 - RNA, 19 nt, Artificial Sequence
  Description of Artificial Sequence: Synthetic oligonucleotide
cugagucacugauuaaaac

SEQ ID NO: 214657 - RNA, 19 nt, Artificial Sequence
  Description of Artificial Sequence: Synthetic oligonucleotide
ucaaggauacaguguuuac

SEQ ID NO: 214658 - RNA, 19 nt, Artificial Sequence
  Description of Artificial Sequence: Synthetic oligonucleotide
uggauaccuucucacugcc

SEQ ID NO: 214659 - RNA, 19 nt, Artificial Sequence
  Description of Artificial Sequence: Synthetic oligonucleotide
auauauauuuauauauauu

SEQ ID NO: 214660 - RNA, 19 nt, Artificial Sequence
  Description of Artificial Sequence: Synthetic oligonucleotide
uuacgcuuguucauugaau

SEQ ID NO: 214661 - RNA, 19 nt, Artificial Sequence
  Description of Artificial Sequence: Synthetic oligonucleotide
auuguauaggaaagaggag

SEQ ID NO: 214662 - RNA, 19 nt, Artificial Sequence
  Description of Artificial Sequence: Synthetic oligonucleotide
uuuuacgcuuguucauuga

SEQ ID NO: 214663 - RNA, 19 nt, Artificial Sequence
  Description of Artificial Sequence: Synthetic oligonucleotide
aagagaaccggacccugaa

SEQ ID NO: 214664 - RNA, 19 nt, Artificial Sequence
  Description of Artificial Sequence: Synthetic oligonucleotide
uaguucgaagagaaccgga

SEQ ID NO: 214665 - RNA, 19 nt, Artificial Sequence
  Description of Artificial Sequence: Synthetic oligonucleotide
gaagggaaauuuucgggaa

SEQ ID NO: 214666 - RNA, 19 nt, Artificial Sequence
  Description of Artificial Sequence: Synthetic oligonucleotide
auauuaauaaugggcuaga

SEQ ID NO: 214667 - RNA, 19 nt, Artificial Sequence
  Description of Artificial Sequence: Synthetic oligonucleotide
cuaguucgaagagaaccgg

SEQ ID NO: 214668 - RNA, 19 nt, Artificial Sequence
  Description of Artificial Sequence: Synthetic oligonucleotide
uucuugaccacgguaacua

SEQ ID NO: 214669 - RNA, 19 nt, Artificial Sequence
  Description of Artificial Sequence: Synthetic oligonucleotide
ucacacgucuacuugcaau

SEQ ID NO: 214670 - RNA, 19 nt, Artificial Sequence
  Description of Artificial Sequence: Synthetic oligonucleotide
gcuaguucgaagagaaccg

SEQ ID NO: 214671 - RNA, 19 nt, Artificial Sequence
  Description of Artificial Sequence: Synthetic oligonucleotide
agaccucucaugaacaaca

SEQ ID NO: 214672 - RNA, 19 nt, Artificial Sequence
  Description of Artificial Sequence: Synthetic oligonucleotide
gguaaaguugggcaaucug

SEQ ID NO: 214673 - RNA, 19 nt, Artificial Sequence
  Description of Artificial Sequence: Synthetic oligonucleotide
aguuaagcgugcauuguug

SEQ ID NO: 214674 - RNA, 19 nt, Artificial Sequence
  Description of Artificial Sequence: Synthetic oligonucleotide
caaauuugucgggaaauuc

SEQ ID NO: 214675 - RNA, 19 nt, Artificial Sequence
  Description of Artificial Sequence: Synthetic oligonucleotide
cuaauacacuggccaaacc

SEQ ID NO: 214676 - RNA, 19 nt, Artificial Sequence
  Description of Artificial Sequence: Synthetic oligonucleotide
uuuaaccguugucucguuc

SEQ ID NO: 214677 - RNA, 19 nt, Artificial Sequence
  Description of Artificial Sequence: Synthetic oligonucleotide
uguaaagaccugugcaauu

SEQ ID NO: 214678 - RNA, 19 nt, Artificial Sequence
  Description of Artificial Sequence: Synthetic oligonucleotide
gucuaguuguaugagggac

SEQ ID NO: 214679 - RNA, 19 nt, Artificial Sequence
  Description of Artificial Sequence: Synthetic oligonucleotide
aacgaagaccucucaugaa

SEQ ID NO: 214680 - RNA, 19 nt, Artificial Sequence
  Description of Artificial Sequence: Synthetic oligonucleotide
aucgggcuaguguggaggg

SEQ ID NO: 214681 - RNA, 19 nt, Artificial Sequence
  Description of Artificial Sequence: Synthetic oligonucleotide
uugucgggaaauucugagu

SEQ ID NO: 214682 - RNA, 19 nt, Artificial Sequence
  Description of Artificial Sequence: Synthetic oligonucleotide
acagaaaacuuaggaaccu

SEQ ID NO: 214683 - RNA, 19 nt, Artificial Sequence
  Description of Artificial Sequence: Synthetic oligonucleotide
uuauggcauuucccgacac

SEQ ID NO: 214684 - RNA, 19 nt, Artificial Sequence
  Description of Artificial Sequence: Synthetic oligonucleotide
aacuaaugcuacugcucau

SEQ ID NO: 214685 - RNA, 19 nt, Artificial Sequence
  Description of Artificial Sequence: Synthetic oligonucleotide
uauuagaguuaagcgugca

SEQ ID NO: 214686 - RNA, 19 nt, Artificial Sequence
  Description of Artificial Sequence: Synthetic oligonucleotide
gacgcaggauccaaauuug

SEQ ID NO: 214687 - RNA, 19 nt, Artificial Sequence
  Description of Artificial Sequence: Synthetic oligonucleotide
ggacccaaauauaagggcc

SEQ ID NO: 214688 - RNA, 19 nt, Artificial Sequence
  Description of Artificial Sequence: Synthetic oligonucleotide
cacgcuuuggucuaguugu

SEQ ID NO: 214689 - RNA, 19 nt, Artificial Sequence
  Description of Artificial Sequence: Synthetic oligonucleotide
acgucuacuugcaaucuag

SEQ ID NO: 214690 - RNA, 19 nt, Artificial Sequence
  Description of Artificial Sequence: Synthetic oligonucleotide
aggucgauauugugcaaca

SEQ ID NO: 214691 - RNA, 19 nt, Artificial Sequence
  Description of Artificial Sequence: Synthetic oligonucleotide
ucccgacacaucaaggaua

SEQ ID NO: 214692 - RNA, 19 nt, Artificial Sequence
  Description of Artificial Sequence: Synthetic oligonucleotide
uguugauucacuggcucau

SEQ ID NO: 214693 - RNA, 19 nt, Artificial Sequence
  Description of Artificial Sequence: Synthetic oligonucleotide
ccgacugaacacuuguucc

SEQ ID NO: 214694 - RNA, 19 nt, Artificial Sequence
  Description of Artificial Sequence: Synthetic oligonucleotide
acgcuuguucauugaauga

SEQ ID NO: 214695 - RNA, 19 nt, Artificial Sequence
  Description of Artificial Sequence: Synthetic oligonucleotide
gagagcuaauacacuggcc

SEQ ID NO: 214696 - RNA, 19 nt, Artificial Sequence
  Description of Artificial Sequence: Synthetic oligonucleotide
cccaauauaaugacugguc

SEQ ID NO: 214697 - RNA, 19 nt, Artificial Sequence
  Description of Artificial Sequence: Synthetic oligonucleotide
ucuugaccacgguaacuac

SEQ ID NO: 214698 - RNA, 19 nt, Artificial Sequence
  Description of Artificial Sequence: Synthetic oligonucleotide
acuaucgcuggcauuagaa

SEQ ID NO: 214699 - RNA, 19 nt, Artificial Sequence
  Description of Artificial Sequence: Synthetic oligonucleotide
caaaauaggcaguuauugu

SEQ ID NO: 214700 - RNA, 19 nt, Artificial Sequence
  Description of Artificial Sequence: Synthetic oligonucleotide
gacccaaauauaagggcca

SEQ ID NO: 214701 - RNA, 19 nt, Artificial Sequence
  Description of Artificial Sequence: Synthetic oligonucleotide
cuaggaaucacuccaacuu

SEQ ID NO: 214702 - RNA, 19 nt, Artificial Sequence
  Description of Artificial Sequence: Synthetic oligonucleotide
auagucacgcuuuggucua

SEQ ID NO: 214703 - RNA, 19 nt, Artificial Sequence
  Description of Artificial Sequence: Synthetic oligonucleotide
accaauaguaacacagaau

SEQ ID NO: 214704 - RNA, 19 nt, Artificial Sequence
  Description of Artificial Sequence: Synthetic oligonucleotide
gacugcccuuuauucgucc

SEQ ID NO: 214705 - RNA, 19 nt, Artificial Sequence
  Description of Artificial Sequence: Synthetic oligonucleotide
augaugcaacaugaaggag

SEQ ID NO: 214706 - RNA, 19 nt, Artificial Sequence
  Description of Artificial Sequence: Synthetic oligonucleotide
agaguuaagcgugcauugu

SEQ ID NO: 214707 - RNA, 19 nt, Artificial Sequence
  Description of Artificial Sequence: Synthetic oligonucleotide
ugcccuuuauucguccucu

SEQ ID NO: 214708 - RNA, 19 nt, Artificial Sequence
  Description of Artificial Sequence: Synthetic oligonucleotide
cuuuaauaccagaagucau

SEQ ID NO: 214709 - RNA, 19 nt, Artificial Sequence
  Description of Artificial Sequence: Synthetic oligonucleotide
agggaucgcuuuuggcuag

SEQ ID NO: 214710 - RNA, 19 nt, Artificial Sequence
  Description of Artificial Sequence: Synthetic oligonucleotide
gagaacaugcucacacguc

SEQ ID NO: 214711 - RNA, 19 nt, Artificial Sequence
  Description of Artificial Sequence: Synthetic oligonucleotide
ccaaacccuugauagcugg

SEQ ID NO: 214712 - RNA, 19 nt, Artificial Sequence
  Description of Artificial Sequence: Synthetic oligonucleotide
gcuuuuggcuaguucgaag

SEQ ID NO: 214713 - RNA, 19 nt, Artificial Sequence
  Description of Artificial Sequence: Synthetic oligonucleotide
ucauugaaugacugcccuu

SEQ ID NO: 214714 - RNA, 19 nt, Artificial Sequence
  Description of Artificial Sequence: Synthetic oligonucleotide
ugauaacauggagaauauc

SEQ ID NO: 214715 - RNA, 19 nt, Artificial Sequence
  Description of Artificial Sequence: Synthetic oligonucleotide
ugauuaccacaucgccaca

SEQ ID NO: 214716 - RNA, 19 nt, Artificial Sequence
  Description of Artificial Sequence: Synthetic oligonucleotide
caggucgauauugugcaac

SEQ ID NO: 214717 - RNA, 19 nt, Artificial Sequence
  Description of Artificial Sequence: Synthetic oligonucleotide
ccacucugcguuuacuagg

SEQ ID NO: 214718 - RNA, 19 nt, Artificial Sequence
  Description of Artificial Sequence: Synthetic oligonucleotide
cauuguugcucaaggucca

SEQ ID NO: 214719 - RNA, 19 nt, Artificial Sequence
  Description of Artificial Sequence: Synthetic oligonucleotide
ucgggaaauucugaguauu

SEQ ID NO: 214720 - RNA, 19 nt, Artificial Sequence
  Description of Artificial Sequence: Synthetic oligonucleotide
cacucugcguuuacuagga

SEQ ID NO: 214721 - RNA, 19 nt, Artificial Sequence
  Description of Artificial Sequence: Synthetic oligonucleotide
cauauugaguaaacaauuu

SEQ ID NO: 214722 - RNA, 19 nt, Artificial Sequence
  Description of Artificial Sequence: Synthetic oligonucleotide
uucaacccuugacucggaa

SEQ ID NO: 214723 - RNA, 19 nt, Artificial Sequence
  Description of Artificial Sequence: Synthetic oligonucleotide
acccaaauauaagggccag

SEQ ID NO: 214724 - RNA, 19 nt, Artificial Sequence
  Description of Artificial Sequence: Synthetic oligonucleotide
acugcccuuuauucguccu

SEQ ID NO: 214725 - RNA, 19 nt, Artificial Sequence
  Description of Artificial Sequence: Synthetic oligonucleotide
uccauacagaugguuguua

SEQ ID NO: 214726 - RNA, 19 nt, Artificial Sequence
  Description of Artificial Sequence: Synthetic oligonucleotide
auuagcuguucuccucuuu

SEQ ID NO: 214727 - RNA, 19 nt, Artificial Sequence
  Description of Artificial Sequence: Synthetic oligonucleotide
guucggugaauuccugcuc

SEQ ID NO: 214728 - RNA, 19 nt, Artificial Sequence
  Description of Artificial Sequence: Synthetic oligonucleotide
gucgauauugugcaacaau

SEQ ID NO: 214729 - RNA, 19 nt, Artificial Sequence
  Description of Artificial Sequence: Synthetic oligonucleotide
gguuguuauacuggccagc

SEQ ID NO: 214730 - RNA, 19 nt, Artificial Sequence
  Description of Artificial Sequence: Synthetic oligonucleotide
gcuaauacacuggccaaac

SEQ ID NO: 214731 - RNA, 19 nt, Artificial Sequence
  Description of Artificial Sequence: Synthetic oligonucleotide
ggcacaacugccgaccaug

SEQ ID NO: 214732 - RNA, 19 nt, Artificial Sequence
  Description of Artificial Sequence: Synthetic oligonucleotide
ucccugcacaauagcugug

SEQ ID NO: 214733 - RNA, 19 nt, Artificial Sequence
  Description of Artificial Sequence: Synthetic oligonucleotide
uaaccguugucucguucuu

SEQ ID NO: 214734 - RNA, 19 nt, Artificial Sequence
  Description of Artificial Sequence: Synthetic oligonucleotide
gugcagcuacaugagauga

SEQ ID NO: 214735 - RNA, 19 nt, Artificial Sequence
  Description of Artificial Sequence: Synthetic oligonucleotide
auauaagggccagacuguu

SEQ ID NO: 214736 - RNA, 19 nt, Artificial Sequence
  Description of Artificial Sequence: Synthetic oligonucleotide
uggcguaaccugccuggcu

SEQ ID NO: 214737 - RNA, 19 nt, Artificial Sequence
  Description of Artificial Sequence: Synthetic oligonucleotide
gaggggaucgggcuagugu

SEQ ID NO: 214738 - RNA, 19 nt, Artificial Sequence
  Description of Artificial Sequence: Synthetic oligonucleotide
cacaacugccgaccaugag

SEQ ID NO: 214739 - RNA, 19 nt, Artificial Sequence
  Description of Artificial Sequence: Synthetic oligonucleotide
gacauagagggaucgcuuu

SEQ ID NO: 214740 - RNA, 19 nt, Artificial Sequence
  Description of Artificial Sequence: Synthetic oligonucleotide
gcucauacgauaaaacaua

SEQ ID NO: 214741 - RNA, 19 nt, Artificial Sequence
  Description of Artificial Sequence: Synthetic oligonucleotide
cucauacgauaaaacauau

SEQ ID NO: 214742 - RNA, 19 nt, Artificial Sequence
  Description of Artificial Sequence: Synthetic oligonucleotide
uggcuaguucgaagagaac

SEQ ID NO: 214743 - RNA, 19 nt, Artificial Sequence
  Description of Artificial Sequence: Synthetic oligonucleotide
cucccuaagcauacaguaa

SEQ ID NO: 214744 - RNA, 19 nt, Artificial Sequence
  Description of Artificial Sequence: Synthetic oligonucleotide
uggguaaaguugggcaauc

SEQ ID NO: 214745 - RNA, 19 nt, Artificial Sequence
  Description of Artificial Sequence: Synthetic oligonucleotide
acaucgccacagaacuuuc

SEQ ID NO: 214746 - RNA, 19 nt, Artificial Sequence
  Description of Artificial Sequence: Synthetic oligonucleotide
acacgucuacuugcaaucu

SEQ ID NO: 214747 - RNA, 19 nt, Artificial Sequence
  Description of Artificial Sequence: Synthetic oligonucleotide
uuuuaaccguugucucguu

SEQ ID NO: 214748 - RNA, 19 nt, Artificial Sequence
  Description of Artificial Sequence: Synthetic oligonucleotide
cguuuacuaggaaucacuc

SEQ ID NO: 214749 - RNA, 19 nt, Artificial Sequence
  Description of Artificial Sequence: Synthetic oligonucleotide
ggcauuuggccucucacua

SEQ ID NO: 214750 - RNA, 19 nt, Artificial Sequence
  Description of Artificial Sequence: Synthetic oligonucleotide
cuugaccacgguaacuacu

SEQ ID NO: 214751 - RNA, 19 nt, Artificial Sequence
  Description of Artificial Sequence: Synthetic oligonucleotide
gaguuaagcgugcauuguu

SEQ ID NO: 214752 - RNA, 19 nt, Artificial Sequence
  Description of Artificial Sequence: Synthetic oligonucleotide
ccaccauacacuugcuuuc

SEQ ID NO: 214753 - RNA, 19 nt, Artificial Sequence
  Description of Artificial Sequence: Synthetic oligonucleotide
ggauccaaauuugucggga

SEQ ID NO: 214754 - RNA, 19 nt, Artificial Sequence
  Description of Artificial Sequence: Synthetic oligonucleotide
gcucgcaccgacugaacac

SEQ ID NO: 214755 - RNA, 19 nt, Artificial Sequence
  Description of Artificial Sequence: Synthetic oligonucleotide
cugcccuuuauucguccuc

SEQ ID NO: 214756 - RNA, 19 nt, Artificial Sequence
  Description of Artificial Sequence: Synthetic oligonucleotide
ugaccacgguaacuacuuu

SEQ ID NO: 214757 - RNA, 19 nt, Artificial Sequence
  Description of Artificial Sequence: Synthetic oligonucleotide
ggaaggccacuaucuuuag

SEQ ID NO: 214758 - RNA, 19 nt, Artificial Sequence
  Description of Artificial Sequence: Synthetic oligonucleotide
cuccacucugcguuuacua

SEQ ID NO: 214759 - RNA, 19 nt, Artificial Sequence
  Description of Artificial Sequence: Synthetic oligonucleotide
ggcucauacgauaaaacau

SEQ ID NO: 214760 - RNA, 19 nt, Artificial Sequence
  Description of Artificial Sequence: Synthetic oligonucleotide
cucugcguuuacuaggaau

SEQ ID NO: 214761 - RNA, 19 nt, Artificial Sequence
  Description of Artificial Sequence: Synthetic oligonucleotide
guaaccugccuggcuugcc

SEQ ID NO: 214762 - RNA, 19 nt, Artificial Sequence
  Description of Artificial Sequence: Synthetic oligonucleotide
aggcgcuuauucauuucca

SEQ ID NO: 214763 - RNA, 19 nt, Artificial Sequence
  Description of Artificial Sequence: Synthetic oligonucleotide
uagucacgcuuuggucuag

SEQ ID NO: 214764 - RNA, 19 nt, Artificial Sequence
  Description of Artificial Sequence: Synthetic oligonucleotide
ggucgaguauaauuaacuu

SEQ ID NO: 214765 - RNA, 19 nt, Artificial Sequence
  Description of Artificial Sequence: Synthetic oligonucleotide
cuggcguaaccugccuggc

SEQ ID NO: 214766 - RNA, 19 nt, Artificial Sequence
  Description of Artificial Sequence: Synthetic oligonucleotide
gcucccguaagucauguau

SEQ ID NO: 214767 - RNA, 19 nt, Artificial Sequence
  Description of Artificial Sequence: Synthetic oligonucleotide
caugcucacacgucuacuu

SEQ ID NO: 214768 - RNA, 19 nt, Artificial Sequence
  Description of Artificial Sequence: Synthetic oligonucleotide
ggaggaccuaaaucaaacu

SEQ ID NO: 214769 - RNA, 19 nt, Artificial Sequence
  Description of Artificial Sequence: Synthetic oligonucleotide
acgcaggauccaaauuugu

SEQ ID NO: 214770 - RNA, 19 nt, Artificial Sequence
  Description of Artificial Sequence: Synthetic oligonucleotide
ccggacccugaacuaaugc

SEQ ID NO: 214771 - RNA, 19 nt, Artificial Sequence
  Description of Artificial Sequence: Synthetic oligonucleotide
cuuucacuaucgcuggcau

SEQ ID NO: 214772 - RNA, 19 nt, Artificial Sequence
  Description of Artificial Sequence: Synthetic oligonucleotide
augaguuaacucagacauu

SEQ ID NO: 214773 - RNA, 19 nt, Artificial Sequence
  Description of Artificial Sequence: Synthetic oligonucleotide
ggaucgggcuaguguggag

SEQ ID NO: 214774 - RNA, 19 nt, Artificial Sequence
  Description of Artificial Sequence: Synthetic oligonucleotide
gcaguuauuguggguaaaa

SEQ ID NO: 214775 - RNA, 19 nt, Artificial Sequence
  Description of Artificial Sequence: Synthetic oligonucleotide
acucugcguuuacuaggaa

SEQ ID NO: 214776 - RNA, 19 nt, Artificial Sequence
  Description of Artificial Sequence: Synthetic oligonucleotide
gggcucacacaacgaagac

SEQ ID NO: 214777 - RNA, 19 nt, Artificial Sequence
  Description of Artificial Sequence: Synthetic oligonucleotide
caucauuuacccuguucuu

SEQ ID NO: 214778 - RNA, 19 nt, Artificial Sequence
  Description of Artificial Sequence: Synthetic oligonucleotide
cacuaucgcuggcauuaga

SEQ ID NO: 214779 - RNA, 19 nt, Artificial Sequence
  Description of Artificial Sequence: Synthetic oligonucleotide
agucacgcuuuggucuagu

SEQ ID NO: 214780 - RNA, 19 nt, Artificial Sequence
  Description of Artificial Sequence: Synthetic oligonucleotide
uaggaaccuucuggaaauu

SEQ ID NO: 214781 - RNA, 19 nt, Artificial Sequence
  Description of Artificial Sequence: Synthetic oligonucleotide
cacgucuacuugcaaucua

SEQ ID NO: 214782 - RNA, 19 nt, Artificial Sequence
  Description of Artificial Sequence: Synthetic oligonucleotide
gcguaaccugccuggcuug

SEQ ID NO: 214783 - RNA, 19 nt, Artificial Sequence
  Description of Artificial Sequence: Synthetic oligonucleotide
cauaaguggaauggauaau

SEQ ID NO: 214784 - RNA, 19 nt, Artificial Sequence
  Description of Artificial Sequence: Synthetic oligonucleotide
cccuccugaaauuaugagu

SEQ ID NO: 214785 - RNA, 19 nt, Artificial Sequence
  Description of Artificial Sequence: Synthetic oligonucleotide
ggcuaugaacuggauaccu

SEQ ID NO: 214786 - RNA, 19 nt, Artificial Sequence
  Description of Artificial Sequence: Synthetic oligonucleotide
gcguuuacuaggaaucacu

SEQ ID NO: 214787 - RNA, 19 nt, Artificial Sequence
  Description of Artificial Sequence: Synthetic oligonucleotide
cacaucgccacagaacuuu

SEQ ID NO: 214788 - RNA, 19 nt, Artificial Sequence
  Description of Artificial Sequence: Synthetic oligonucleotide
uccauggauuuggguuuaa

SEQ ID NO: 214789 - RNA, 19 nt, Artificial Sequence
  Description of Artificial Sequence: Synthetic oligonucleotide
caguuauuguggguaaaau

SEQ ID NO: 214790 - RNA, 19 nt, Artificial Sequence
  Description of Artificial Sequence: Synthetic oligonucleotide
gugaggcgcuuauucauuu

SEQ ID NO: 214791 - RNA, 19 nt, Artificial Sequence
  Description of Artificial Sequence: Synthetic oligonucleotide
ccacgguaacuacuuucac

SEQ ID NO: 214792 - RNA, 19 nt, Artificial Sequence
  Description of Artificial Sequence: Synthetic oligonucleotide
cucgcaccgacugaacacu

SEQ ID NO: 214793 - RNA, 19 nt, Artificial Sequence
  Description of Artificial Sequence: Synthetic oligonucleotide
caucgccacagaacuuucu

SEQ ID NO: 214794 - RNA, 19 nt, Artificial Sequence
  Description of Artificial Sequence: Synthetic oligonucleotide
ggcguaaccugccuggcuu

SEQ ID NO: 214795 - RNA, 19 nt, Artificial Sequence
  Description of Artificial Sequence: Synthetic oligonucleotide
cgggcuaguguggagggag

SEQ ID NO: 214796 - RNA, 19 nt, Artificial Sequence
  Description of Artificial Sequence: Synthetic oligonucleotide
ggucgauauugugcaacaa

SEQ ID NO: 214797 - RNA, 19 nt, Artificial Sequence
  Description of Artificial Sequence: Synthetic oligonucleotide
guucaacccuugacucgga

SEQ ID NO: 214798 - RNA, 19 nt, Artificial Sequence
  Description of Artificial Sequence: Synthetic oligonucleotide
cagaaaacuuaggaaccuu

SEQ ID NO: 214799 - RNA, 19 nt, Artificial Sequence
  Description of Artificial Sequence: Synthetic oligonucleotide
gggaucgggcuagugugga

SEQ ID NO: 214800 - RNA, 19 nt, Artificial Sequence
  Description of Artificial Sequence: Synthetic oligonucleotide
ggauaccuucucacugcca

SEQ ID NO: 214801 - RNA, 19 nt, Artificial Sequence
  Description of Artificial Sequence: Synthetic oligonucleotide
acgcuuuggucuaguugua

SEQ ID NO: 214802 - RNA, 19 nt, Artificial Sequence
  Description of Artificial Sequence: Synthetic oligonucleotide
ggguaaaguugggcaaucu

SEQ ID NO: 214803 - RNA, 19 nt, Artificial Sequence
  Description of Artificial Sequence: Synthetic oligonucleotide
cguaaccugccuggcuugc

SEQ ID NO: 214804 - RNA, 19 nt, Artificial Sequence
  Description of Artificial Sequence: Synthetic oligonucleotide
caccgacugaacacuuguu

SEQ ID NO: 214805 - RNA, 19 nt, Artificial Sequence
  Description of Artificial Sequence: Synthetic oligonucleotide
cgucuacuugcaaucuagu

SEQ ID NO: 214806 - RNA, 19 nt, Artificial Sequence
  Description of Artificial Sequence: Synthetic oligonucleotide
cgcuuuuggcuaguucgaa

SEQ ID NO: 214807 - RNA, 19 nt, Artificial Sequence
  Description of Artificial Sequence: Synthetic oligonucleotide
gggaucgcuuuuggcuagu

SEQ ID NO: 214808 - RNA, 19 nt, Artificial Sequence
  Description of Artificial Sequence: Synthetic oligonucleotide
ccauggauuuggguuuaau

SEQ ID NO: 214809 - RNA, 19 nt, Artificial Sequence
  Description of Artificial Sequence: Synthetic oligonucleotide
ggaucgcuuuuggcuaguu

SEQ ID NO: 214810 - RNA, 19 nt, Artificial Sequence
  Description of Artificial Sequence: Synthetic oligonucleotide
cgguaacuacuuucacuau

SEQ ID NO: 214811 - RNA, 19 nt, Artificial Sequence
  Description of Artificial Sequence: Synthetic oligonucleotide
uuccguuucauucucaucg

SEQ ID NO: 214812 - RNA, 19 nt, Artificial Sequence
  Description of Artificial Sequence: Synthetic oligonucleotide
cuguaaacgaucaugaagg

SEQ ID NO: 214813 - RNA, 19 nt, Artificial Sequence
  Description of Artificial Sequence: Synthetic oligonucleotide
aaaccugaaguacagcuac

SEQ ID NO: 214814 - RNA, 19 nt, Artificial Sequence
  Description of Artificial Sequence: Synthetic oligonucleotide
uaucaugagaaccugaaga

SEQ ID NO: 214815 - RNA, 19 nt, Artificial Sequence
  Description of Artificial Sequence: Synthetic oligonucleotide
agauugauaaaguacgaag

SEQ ID NO: 214816 - RNA, 19 nt, Artificial Sequence
  Description of Artificial Sequence: Synthetic oligonucleotide
uguaggauaugccugagcu

SEQ ID NO: 214817 - RNA, 19 nt, Artificial Sequence
  Description of Artificial Sequence: Synthetic oligonucleotide
uauacuguacgugugagag

SEQ ID NO: 214818 - RNA, 19 nt, Artificial Sequence
  Description of Artificial Sequence: Synthetic oligonucleotide
aaauucgugauaaacaacu

SEQ ID NO: 214819 - RNA, 19 nt, Artificial Sequence
  Description of Artificial Sequence: Synthetic oligonucleotide
uuuugaguaagugacaaug

SEQ ID NO: 214820 - RNA, 19 nt, Artificial Sequence
  Description of Artificial Sequence: Synthetic oligonucleotide
uggucaaacacccuauagg

SEQ ID NO: 214821 - RNA, 19 nt, Artificial Sequence
  Description of Artificial Sequence: Synthetic oligonucleotide
ugauaaaguacgaagguuc

SEQ ID NO: 214822 - RNA, 19 nt, Artificial Sequence
  Description of Artificial Sequence: Synthetic oligonucleotide
uaugcuuuaagugaggacu

SEQ ID NO: 214823 - RNA, 19 nt, Artificial Sequence
  Description of Artificial Sequence: Synthetic oligonucleotide
aaaguaccgcccuuuggcc

SEQ ID NO: 214824 - RNA, 19 nt, Artificial Sequence
  Description of Artificial Sequence: Synthetic oligonucleotide
aaccugaagagaugagacc

SEQ ID NO: 214825 - RNA, 19 nt, Artificial Sequence
  Description of Artificial Sequence: Synthetic oligonucleotide
guaaccuugaaagugcucg

SEQ ID NO: 214826 - RNA, 19 nt, Artificial Sequence
  Description of Artificial Sequence: Synthetic oligonucleotide
ugauagaagcaucaucgag

SEQ ID NO: 214827 - RNA, 19 nt, Artificial Sequence
  Description of Artificial Sequence: Synthetic oligonucleotide
agucuuauuugguuggagg

SEQ ID NO: 214828 - RNA, 19 nt, Artificial Sequence
  Description of Artificial Sequence: Synthetic oligonucleotide
acuaaugugugugucaagg

SEQ ID NO: 214829 - RNA, 19 nt, Artificial Sequence
  Description of Artificial Sequence: Synthetic oligonucleotide
cuaguuaagacuauuaucu

SEQ ID NO: 214830 - RNA, 19 nt, Artificial Sequence
  Description of Artificial Sequence: Synthetic oligonucleotide
ugacuguaaacgaucauga

SEQ ID NO: 214831 - RNA, 19 nt, Artificial Sequence
  Description of Artificial Sequence: Synthetic oligonucleotide
auugauaaaguacgaaggu

SEQ ID NO: 214832 - RNA, 19 nt, Artificial Sequence
  Description of Artificial Sequence: Synthetic oligonucleotide
ucuuggacauaguacuugg

SEQ ID NO: 214833 - RNA, 19 nt, Artificial Sequence
  Description of Artificial Sequence: Synthetic oligonucleotide
cuguaucucauacagguag

SEQ ID NO: 214834 - RNA, 19 nt, Artificial Sequence
  Description of Artificial Sequence: Synthetic oligonucleotide
acccuauagggucuaaagc

SEQ ID NO: 214835 - RNA, 19 nt, Artificial Sequence
  Description of Artificial Sequence: Synthetic oligonucleotide
uucgugauaaacaacuuuu

SEQ ID NO: 214836 - RNA, 19 nt, Artificial Sequence
  Description of Artificial Sequence: Synthetic oligonucleotide
aguuagauguguaagaggu

SEQ ID NO: 214837 - RNA, 19 nt, Artificial Sequence
  Description of Artificial Sequence: Synthetic oligonucleotide
acuuaugcuguccaggucu

SEQ ID NO: 214838 - RNA, 19 nt, Artificial Sequence
  Description of Artificial Sequence: Synthetic oligonucleotide
uaaaguaauuuuccccgag

SEQ ID NO: 214839 - RNA, 19 nt, Artificial Sequence
  Description of Artificial Sequence: Synthetic oligonucleotide
uggggugagaugcacgugg

SEQ ID NO: 214840 - RNA, 19 nt, Artificial Sequence
  Description of Artificial Sequence: Synthetic oligonucleotide
caaaguaccgcccuuuggc

SEQ ID NO: 214841 - RNA, 19 nt, Artificial Sequence
  Description of Artificial Sequence: Synthetic oligonucleotide
agccuuuugaguaagugac

SEQ ID NO: 214842 - RNA, 19 nt, Artificial Sequence
  Description of Artificial Sequence: Synthetic oligonucleotide
aaaguaguagguacaacug

SEQ ID NO: 214843 - RNA, 19 nt, Artificial Sequence
  Description of Artificial Sequence: Synthetic oligonucleotide
aaaggugguaucaugagaa

SEQ ID NO: 214844 - RNA, 19 nt, Artificial Sequence
  Description of Artificial Sequence: Synthetic oligonucleotide
gaguuagauguguaagagg

SEQ ID NO: 214845 - RNA, 19 nt, Artificial Sequence
  Description of Artificial Sequence: Synthetic oligonucleotide
uuuuccccgaggcugaagc

SEQ ID NO: 214846 - RNA, 19 nt, Artificial Sequence
  Description of Artificial Sequence: Synthetic oligonucleotide
augucuguaagucacccug

SEQ ID NO: 214847 - RNA, 19 nt, Artificial Sequence
  Description of Artificial Sequence: Synthetic oligonucleotide
uccaugacgccucaacucc

SEQ ID NO: 214848 - RNA, 19 nt, Artificial Sequence
  Description of Artificial Sequence: Synthetic oligonucleotide
guaauuuuccccgaggcug

SEQ ID NO: 214849 - RNA, 19 nt, Artificial Sequence
  Description of Artificial Sequence: Synthetic oligonucleotide
ucgaguugaagucuuauuu

SEQ ID NO: 214850 - RNA, 19 nt, Artificial Sequence
  Description of Artificial Sequence: Synthetic oligonucleotide
acuauuaucuacacacaac

SEQ ID NO: 214851 - RNA, 19 nt, Artificial Sequence
  Description of Artificial Sequence: Synthetic oligonucleotide
uacuuguaggauaugccug

SEQ ID NO: 214852 - RNA, 19 nt, Artificial Sequence
  Description of Artificial Sequence: Synthetic oligonucleotide
uauaggucaaauucgugau

SEQ ID NO: 214853 - RNA, 19 nt, Artificial Sequence
  Description of Artificial Sequence: Synthetic oligonucleotide
uaugcccuuacaaaaugga

SEQ ID NO: 214854 - RNA, 19 nt, Artificial Sequence
  Description of Artificial Sequence: Synthetic oligonucleotide
guaagugacaaugaccuug

SEQ ID NO: 214855 - RNA, 19 nt, Artificial Sequence
  Description of Artificial Sequence: Synthetic oligonucleotide
augcacguggccuuggcac

SEQ ID NO: 214856 - RNA, 19 nt, Artificial Sequence
  Description of Artificial Sequence: Synthetic oligonucleotide
uuaggaucgccccaacggc

SEQ ID NO: 214857 - RNA, 19 nt, Artificial Sequence
  Description of Artificial Sequence: Synthetic oligonucleotide
caaaccuaggcacucgggg

SEQ ID NO: 214858 - RNA, 19 nt, Artificial Sequence
  Description of Artificial Sequence: Synthetic oligonucleotide
ugcccuuacaaaauggaaa

SEQ ID NO: 214859 - RNA, 19 nt, Artificial Sequence
  Description of Artificial Sequence: Synthetic oligonucleotide
guuccacugacuguaaacg

SEQ ID NO: 214860 - RNA, 19 nt, Artificial Sequence
  Description of Artificial Sequence: Synthetic oligonucleotide
uugaguacuuguaggauau

SEQ ID NO: 214861 - RNA, 19 nt, Artificial Sequence
  Description of Artificial Sequence: Synthetic oligonucleotide
aauguaggccugcccacag

SEQ ID NO: 214862 - RNA, 19 nt, Artificial Sequence
  Description of Artificial Sequence: Synthetic oligonucleotide
uccuaguuaagacuauuau

SEQ ID NO: 214863 - RNA, 19 nt, Artificial Sequence
  Description of Artificial Sequence: Synthetic oligonucleotide
guaaaggugguaucaugag

SEQ ID NO: 214864 - RNA, 19 nt, Artificial Sequence
  Description of Artificial Sequence: Synthetic oligonucleotide
cuucgcacaggacaacucg

SEQ ID NO: 214865 - RNA, 19 nt, Artificial Sequence
  Description of Artificial Sequence: Synthetic oligonucleotide
ucuuucccgcacuuggagg

SEQ ID NO: 214866 - RNA, 19 nt, Artificial Sequence
  Description of Artificial Sequence: Synthetic oligonucleotide
ggacaacucgauuacagag

SEQ ID NO: 214867 - RNA, 19 nt, Artificial Sequence
  Description of Artificial Sequence: Synthetic oligonucleotide
guaauugucaaagucaaua

SEQ ID NO: 214868 - RNA, 19 nt, Artificial Sequence
  Description of Artificial Sequence: Synthetic oligonucleotide
ugacacagauugauaaagu

SEQ ID NO: 214869 - RNA, 19 nt, Artificial Sequence
  Description of Artificial Sequence: Synthetic oligonucleotide
gagcguuccauucaccaug

SEQ ID NO: 214870 - RNA, 19 nt, Artificial Sequence
  Description of Artificial Sequence: Synthetic oligonucleotide
uaauuuuccccgaggcuga

SEQ ID NO: 214871 - RNA, 19 nt, Artificial Sequence
  Description of Artificial Sequence: Synthetic oligonucleotide
uguaucucauacagguagu

SEQ ID NO: 214872 - RNA, 19 nt, Artificial Sequence
  Description of Artificial Sequence: Synthetic oligonucleotide
acucgauuacagaggaugc

SEQ ID NO: 214873 - RNA, 19 nt, Artificial Sequence
  Description of Artificial Sequence: Synthetic oligonucleotide
gacuauuaucuacacacaa

SEQ ID NO: 214874 - RNA, 19 nt, Artificial Sequence
  Description of Artificial Sequence: Synthetic oligonucleotide
uaggucaaauucgugauaa

SEQ ID NO: 214875 - RNA, 19 nt, Artificial Sequence
  Description of Artificial Sequence: Synthetic oligonucleotide
uucacacgaugucuguaag

SEQ ID NO: 214876 - RNA, 19 nt, Artificial Sequence
  Description of Artificial Sequence: Synthetic oligonucleotide
uccguuucauucucaucgg

SEQ ID NO: 214877 - RNA, 19 nt, Artificial Sequence
  Description of Artificial Sequence: Synthetic oligonucleotide
gcagcaauuggucagcuug

SEQ ID NO: 214878 - RNA, 19 nt, Artificial Sequence
  Description of Artificial Sequence: Synthetic oligonucleotide
ucuccaugacgccucaacu

SEQ ID NO: 214879 - RNA, 19 nt, Artificial Sequence
  Description of Artificial Sequence: Synthetic oligonucleotide
agacuuaugcuguccaggu

SEQ ID NO: 214880 - RNA, 19 nt, Artificial Sequence
  Description of Artificial Sequence: Synthetic oligonucleotide
ucuggggugagaugcacgu

SEQ ID NO: 214881 - RNA, 19 nt, Artificial Sequence
  Description of Artificial Sequence: Synthetic oligonucleotide
ucguggacaaagucccagg

SEQ ID NO: 214882 - RNA, 19 nt, Artificial Sequence
  Description of Artificial Sequence: Synthetic oligonucleotide
gacacagauugauaaagua

SEQ ID NO: 214883 - RNA, 19 nt, Artificial Sequence
  Description of Artificial Sequence: Synthetic oligonucleotide
ucaucgggacagacgauug

SEQ ID NO: 214884 - RNA, 19 nt, Artificial Sequence
  Description of Artificial Sequence: Synthetic oligonucleotide
guaaacgaucaugaaggag

SEQ ID NO: 214885 - RNA, 19 nt, Artificial Sequence
  Description of Artificial Sequence: Synthetic oligonucleotide
aucuuucccgcacuuggag

SEQ ID NO: 214886 - RNA, 19 nt, Artificial Sequence
  Description of Artificial Sequence: Synthetic oligonucleotide
gaccuguagguguaugccc

SEQ ID NO: 214887 - RNA, 19 nt, Artificial Sequence
  Description of Artificial Sequence: Synthetic oligonucleotide
ucccagcgaaaguaguagg

SEQ ID NO: 214888 - RNA, 19 nt, Artificial Sequence
  Description of Artificial Sequence: Synthetic oligonucleotide
accccuauacuguacgugu

SEQ ID NO: 214889 - RNA, 19 nt, Artificial Sequence
  Description of Artificial Sequence: Synthetic oligonucleotide
cagcgaaaguaguagguac

SEQ ID NO: 214890 - RNA, 19 nt, Artificial Sequence
  Description of Artificial Sequence: Synthetic oligonucleotide
uguguaagagguccucguc

SEQ ID NO: 214891 - RNA, 19 nt, Artificial Sequence
  Description of Artificial Sequence: Synthetic oligonucleotide
gucuuauuaccaccgcaag

SEQ ID NO: 214892 - RNA, 19 nt, Artificial Sequence
  Description of Artificial Sequence: Synthetic oligonucleotide
guaugcccuuacaaaaugg

SEQ ID NO: 214893 - RNA, 19 nt, Artificial Sequence
  Description of Artificial Sequence: Synthetic oligonucleotide
auagccuuuugaguaagug

SEQ ID NO: 214894 - RNA, 19 nt, Artificial Sequence
  Description of Artificial Sequence: Synthetic oligonucleotide
agaaggcuuaggaucgccc

SEQ ID NO: 214895 - RNA, 19 nt, Artificial Sequence
  Description of Artificial Sequence: Synthetic oligonucleotide
uugauaaaguacgaagguu

SEQ ID NO: 214896 - RNA, 19 nt, Artificial Sequence
  Description of Artificial Sequence: Synthetic oligonucleotide
cacaccccuauacuguacg

SEQ ID NO: 214897 - RNA, 19 nt, Artificial Sequence
  Description of Artificial Sequence: Synthetic oligonucleotide
uaggaucgccccaacggcc

SEQ ID NO: 214898 - RNA, 19 nt, Artificial Sequence
  Description of Artificial Sequence: Synthetic oligonucleotide
ggaguuagauguguaagag

SEQ ID NO: 214899 - RNA, 19 nt, Artificial Sequence
  Description of Artificial Sequence: Synthetic oligonucleotide
ucgggacagacgauuggag

SEQ ID NO: 214900 - RNA, 19 nt, Artificial Sequence
  Description of Artificial Sequence: Synthetic oligonucleotide
guaggcaccgcggaguuag

SEQ ID NO: 214901 - RNA, 19 nt, Artificial Sequence
  Description of Artificial Sequence: Synthetic oligonucleotide
gaauacugcagcucacuaa

SEQ ID NO: 214902 - RNA, 19 nt, Artificial Sequence
  Description of Artificial Sequence: Synthetic oligonucleotide
guucgcauguccccagagg

SEQ ID NO: 214903 - RNA, 19 nt, Artificial Sequence
  Description of Artificial Sequence: Synthetic oligonucleotide
agguguaugcccuuacaaa

SEQ ID NO: 214904 - RNA, 19 nt, Artificial Sequence
  Description of Artificial Sequence: Synthetic oligonucleotide
guacgugugagagucccgg

SEQ ID NO: 214905 - RNA, 19 nt, Artificial Sequence
  Description of Artificial Sequence: Synthetic oligonucleotide
ccuaguuaagacuauuauc

SEQ ID NO: 214906 - RNA, 19 nt, Artificial Sequence
  Description of Artificial Sequence: Synthetic oligonucleotide
gaagguuccuucguggaca

SEQ ID NO: 214907 - RNA, 19 nt, Artificial Sequence
  Description of Artificial Sequence: Synthetic oligonucleotide
agcuguaaaguagcuguuc

SEQ ID NO: 214908 - RNA, 19 nt, Artificial Sequence
  Description of Artificial Sequence: Synthetic oligonucleotide
ucucguggcugaacucugg

SEQ ID NO: 214909 - RNA, 19 nt, Artificial Sequence
  Description of Artificial Sequence: Synthetic oligonucleotide
ugguaucaugagaaccuga

SEQ ID NO: 214910 - RNA, 19 nt, Artificial Sequence
  Description of Artificial Sequence: Synthetic oligonucleotide
guuggugagcguuccauuc

SEQ ID NO: 214911 - RNA, 19 nt, Artificial Sequence
  Description of Artificial Sequence: Synthetic oligonucleotide
ugucuguaagucacccugu

SEQ ID NO: 214912 - RNA, 19 nt, Artificial Sequence
  Description of Artificial Sequence: Synthetic oligonucleotide
uagauguguaagagguccu

SEQ ID NO: 214913 - RNA, 19 nt, Artificial Sequence
  Description of Artificial Sequence: Synthetic oligonucleotide
gacgccucaacuccaguca

SEQ ID NO: 214914 - RNA, 19 nt, Artificial Sequence
  Description of Artificial Sequence: Synthetic oligonucleotide
uaguuaagacuauuaucua

SEQ ID NO: 214915 - RNA, 19 nt, Artificial Sequence
  Description of Artificial Sequence: Synthetic oligonucleotide
agacagauuuggucuuauc

SEQ ID NO: 214916 - RNA, 19 nt, Artificial Sequence
  Description of Artificial Sequence: Synthetic oligonucleotide
gguguaugcccuuacaaaa

SEQ ID NO: 214917 - RNA, 19 nt, Artificial Sequence
  Description of Artificial Sequence: Synthetic oligonucleotide
uaaccuugaaagugcucgu

SEQ ID NO: 214918 - RNA, 19 nt, Artificial Sequence
  Description of Artificial Sequence: Synthetic oligonucleotide
cacccauuggggaugcuug

SEQ ID NO: 214919 - RNA, 19 nt, Artificial Sequence
  Description of Artificial Sequence: Synthetic oligonucleotide
cucgucgcugucgucaugg

SEQ ID NO: 214920 - RNA, 19 nt, Artificial Sequence
  Description of Artificial Sequence: Synthetic oligonucleotide
agcguuccauucaccaugc

SEQ ID NO: 214921 - RNA, 19 nt, Artificial Sequence
  Description of Artificial Sequence: Synthetic oligonucleotide
agucuuauuaccaccgcaa

SEQ ID NO: 214922 - RNA, 19 nt, Artificial Sequence
  Description of Artificial Sequence: Synthetic oligonucleotide
uacgugugagagucccggg

SEQ ID NO: 214923 - RNA, 19 nt, Artificial Sequence
  Description of Artificial Sequence: Synthetic oligonucleotide
gugagcguuccauucacca

SEQ ID NO: 214924 - RNA, 19 nt, Artificial Sequence
  Description of Artificial Sequence: Synthetic oligonucleotide
uuaucaccguuucccuucu

SEQ ID NO: 214925 - RNA, 19 nt, Artificial Sequence
  Description of Artificial Sequence: Synthetic oligonucleotide
gggucuaaagcagcaaggg

SEQ ID NO: 214926 - RNA, 19 nt, Artificial Sequence
  Description of Artificial Sequence: Synthetic oligonucleotide
uuccuucguggacaaaguc

SEQ ID NO: 214927 - RNA, 19 nt, Artificial Sequence
  Description of Artificial Sequence: Synthetic oligonucleotide
ucuucgcacaggacaacuc

SEQ ID NO: 214928 - RNA, 19 nt, Artificial Sequence
  Description of Artificial Sequence: Synthetic oligonucleotide
guacgaagguuccuucgug

SEQ ID NO: 214929 - RNA, 19 nt, Artificial Sequence
  Description of Artificial Sequence: Synthetic oligonucleotide
ugacgccucaacuccaguc

SEQ ID NO: 214930 - RNA, 19 nt, Artificial Sequence
  Description of Artificial Sequence: Synthetic oligonucleotide
gucuuauuugguuggaggu

SEQ ID NO: 214931 - RNA, 19 nt, Artificial Sequence
  Description of Artificial Sequence: Synthetic oligonucleotide
aauucgugauaaacaacuu

SEQ ID NO: 214932 - RNA, 19 nt, Artificial Sequence
  Description of Artificial Sequence: Synthetic oligonucleotide
cccuauagggucuaaagca

SEQ ID NO: 214933 - RNA, 19 nt, Artificial Sequence
  Description of Artificial Sequence: Synthetic oligonucleotide
caucgggacagacgauugg

SEQ ID NO: 214934 - RNA, 19 nt, Artificial Sequence
  Description of Artificial Sequence: Synthetic oligonucleotide
ggagagcuguaucucauac

SEQ ID NO: 214935 - RNA, 19 nt, Artificial Sequence
  Description of Artificial Sequence: Synthetic oligonucleotide
caugacgccucaacuccag

SEQ ID NO: 214936 - RNA, 19 nt, Artificial Sequence
  Description of Artificial Sequence: Synthetic oligonucleotide
guguuucacacgaugucug

SEQ ID NO: 214937 - RNA, 19 nt, Artificial Sequence
  Description of Artificial Sequence: Synthetic oligonucleotide
acagauugauaaaguacga

SEQ ID NO: 214938 - RNA, 19 nt, Artificial Sequence
  Description of Artificial Sequence: Synthetic oligonucleotide
uguuggcaccagagcaugc

SEQ ID NO: 214939 - RNA, 19 nt, Artificial Sequence
  Description of Artificial Sequence: Synthetic oligonucleotide
aucgaguugaagucuuauu

SEQ ID NO: 214940 - RNA, 19 nt, Artificial Sequence
  Description of Artificial Sequence: Synthetic oligonucleotide
guaguagguacaacuguca

SEQ ID NO: 214941 - RNA, 19 nt, Artificial Sequence
  Description of Artificial Sequence: Synthetic oligonucleotide
auaggucaaauucgugaua

SEQ ID NO: 214942 - RNA, 19 nt, Artificial Sequence
  Description of Artificial Sequence: Synthetic oligonucleotide
agcgaaaguaguagguaca

SEQ ID NO: 214943 - RNA, 19 nt, Artificial Sequence
  Description of Artificial Sequence: Synthetic oligonucleotide
auacuguacgugugagagu

SEQ ID NO: 214944 - RNA, 19 nt, Artificial Sequence
  Description of Artificial Sequence: Synthetic oligonucleotide
acgugugagagucccgggu

SEQ ID NO: 214945 - RNA, 19 nt, Artificial Sequence
  Description of Artificial Sequence: Synthetic oligonucleotide
acagcccaaaccugaagua

SEQ ID NO: 214946 - RNA, 19 nt, Artificial Sequence
  Description of Artificial Sequence: Synthetic oligonucleotide
caccguguuucacacgaug

SEQ ID NO: 214947 - RNA, 19 nt, Artificial Sequence
  Description of Artificial Sequence: Synthetic oligonucleotide
ucguggcugaacucuggga

SEQ ID NO: 214948 - RNA, 19 nt, Artificial Sequence
  Description of Artificial Sequence: Synthetic oligonucleotide
agacuauuaucuacacaca

SEQ ID NO: 214949 - RNA, 19 nt, Artificial Sequence
  Description of Artificial Sequence: Synthetic oligonucleotide
uggucuaagccagcugcug

SEQ ID NO: 214950 - RNA, 19 nt, Artificial Sequence
  Description of Artificial Sequence: Synthetic oligonucleotide
gacuuaugcuguccagguc

SEQ ID NO: 214951 - RNA, 19 nt, Artificial Sequence
  Description of Artificial Sequence: Synthetic oligonucleotide
aguaccgcccuuuggccaa

SEQ ID NO: 214952 - RNA, 19 nt, Artificial Sequence
  Description of Artificial Sequence: Synthetic oligonucleotide
uugccuaguuuugggguug

SEQ ID NO: 214953 - RNA, 19 nt, Artificial Sequence
  Description of Artificial Sequence: Synthetic oligonucleotide
acugacuguaaacgaucau

SEQ ID NO: 214954 - RNA, 19 nt, Artificial Sequence
  Description of Artificial Sequence: Synthetic oligonucleotide
acaguaaaggugguaucau

SEQ ID NO: 214955 - RNA, 19 nt, Artificial Sequence
  Description of Artificial Sequence: Synthetic oligonucleotide
guagguguaugcccuuaca

SEQ ID NO: 214956 - RNA, 19 nt, Artificial Sequence
  Description of Artificial Sequence: Synthetic oligonucleotide
accguguuucacacgaugu

SEQ ID NO: 214957 - RNA, 19 nt, Artificial Sequence
  Description of Artificial Sequence: Synthetic oligonucleotide
cacuaaugugugugucaag

SEQ ID NO: 214958 - RNA, 19 nt, Artificial Sequence
  Description of Artificial Sequence: Synthetic oligonucleotide
gcccgagugaacuuucacc

SEQ ID NO: 214959 - RNA, 19 nt, Artificial Sequence
  Description of Artificial Sequence: Synthetic oligonucleotide
ucgcaaaccugaguaguaa

SEQ ID NO: 214960 - RNA, 19 nt, Artificial Sequence
  Description of Artificial Sequence: Synthetic oligonucleotide
gggaccuguagguguaugc

SEQ ID NO: 214961 - RNA, 19 nt, Artificial Sequence
  Description of Artificial Sequence: Synthetic oligonucleotide
aguaagugacaaugaccuu

SEQ ID NO: 214962 - RNA, 19 nt, Artificial Sequence
  Description of Artificial Sequence: Synthetic oligonucleotide
gugguaucaugagaaccug

SEQ ID NO: 214963 - RNA, 19 nt, Artificial Sequence
  Description of Artificial Sequence: Synthetic oligonucleotide
cugaacagcuuaaaguaau

SEQ ID NO: 214964 - RNA, 19 nt, Artificial Sequence
  Description of Artificial Sequence: Synthetic oligonucleotide
agcccaaaccugaaguaca

SEQ ID NO: 214965 - RNA, 19 nt, Artificial Sequence
  Description of Artificial Sequence: Synthetic oligonucleotide
ccauugguucgcauguccc

SEQ ID NO: 214966 - RNA, 19 nt, Artificial Sequence
  Description of Artificial Sequence: Synthetic oligonucleotide
guuagauguguaagagguc

SEQ ID NO: 214967 - RNA, 19 nt, Artificial Sequence
  Description of Artificial Sequence: Synthetic oligonucleotide
gcggaguuagauguguaag

SEQ ID NO: 214968 - RNA, 19 nt, Artificial Sequence
  Description of Artificial Sequence: Synthetic oligonucleotide
gguaucaugagaaccugaa

SEQ ID NO: 214969 - RNA, 19 nt, Artificial Sequence
  Description of Artificial Sequence: Synthetic oligonucleotide
ucaucgaguugaagucuua

SEQ ID NO: 214970 - RNA, 19 nt, Artificial Sequence
  Description of Artificial Sequence: Synthetic oligonucleotide
cagucuucgcacaggacaa

SEQ ID NO: 214971 - RNA, 19 nt, Artificial Sequence
  Description of Artificial Sequence: Synthetic oligonucleotide
ucacuucaucgggacagac

SEQ ID NO: 214972 - RNA, 19 nt, Artificial Sequence
  Description of Artificial Sequence: Synthetic oligonucleotide
accaccgcaaggauagccu

SEQ ID NO: 214973 - RNA, 19 nt, Artificial Sequence
  Description of Artificial Sequence: Synthetic oligonucleotide
ggugguaucaugagaaccu

SEQ ID NO: 214974 - RNA, 19 nt, Artificial Sequence
  Description of Artificial Sequence: Synthetic oligonucleotide
caccccuauacuguacgug

SEQ ID NO: 214975 - RNA, 19 nt, Artificial Sequence
  Description of Artificial Sequence: Synthetic oligonucleotide
agccgcaguguaccaggag

SEQ ID NO: 214976 - RNA, 19 nt, Artificial Sequence
  Description of Artificial Sequence: Synthetic oligonucleotide
cggguaaccuugaaagugc

SEQ ID NO: 214977 - RNA, 19 nt, Artificial Sequence
  Description of Artificial Sequence: Synthetic oligonucleotide
aguaauugucaaagucaau

SEQ ID NO: 214978 - RNA, 19 nt, Artificial Sequence
  Description of Artificial Sequence: Synthetic oligonucleotide
ggcaccgcggaguuagaug

SEQ ID NO: 214979 - RNA, 19 nt, Artificial Sequence
  Description of Artificial Sequence: Synthetic oligonucleotide
ccuauacuguacgugugag

SEQ ID NO: 214980 - RNA, 19 nt, Artificial Sequence
  Description of Artificial Sequence: Synthetic oligonucleotide
ccggguaaccuugaaagug

SEQ ID NO: 214981 - RNA, 19 nt, Artificial Sequence
  Description of Artificial Sequence: Synthetic oligonucleotide
caccaugcucacuuccuga

SEQ ID NO: 214982 - RNA, 19 nt, Artificial Sequence
  Description of Artificial Sequence: Synthetic oligonucleotide
cugcagcuacgagaugagg

SEQ ID NO: 214983 - RNA, 19 nt, Artificial Sequence
  Description of Artificial Sequence: Synthetic oligonucleotide
aucaucgaguugaagucuu

SEQ ID NO: 214984 - RNA, 19 nt, Artificial Sequence
  Description of Artificial Sequence: Synthetic oligonucleotide
guuguccccauugguucgc

SEQ ID NO: 214985 - RNA, 19 nt, Artificial Sequence
  Description of Artificial Sequence: Synthetic oligonucleotide
augcuuuaagugaggacuu

SEQ ID NO: 214986 - RNA, 19 nt, Artificial Sequence
  Description of Artificial Sequence: Synthetic oligonucleotide
gguggaugagacagauuug

SEQ ID NO: 214987 - RNA, 19 nt, Artificial Sequence
  Description of Artificial Sequence: Synthetic oligonucleotide
augacgccucaacuccagu

SEQ ID NO: 214988 - RNA, 19 nt, Artificial Sequence
  Description of Artificial Sequence: Synthetic oligonucleotide
ggaauacugcagcucacua

SEQ ID NO: 214989 - RNA, 19 nt, Artificial Sequence
  Description of Artificial Sequence: Synthetic oligonucleotide
caggcgggccuucccaaac

SEQ ID NO: 214990 - RNA, 19 nt, Artificial Sequence
  Description of Artificial Sequence: Synthetic oligonucleotide
gugugagagucccggguaa

SEQ ID NO: 214991 - RNA, 19 nt, Artificial Sequence
  Description of Artificial Sequence: Synthetic oligonucleotide
acacccuagguggcagaag

SEQ ID NO: 214992 - RNA, 19 nt, Artificial Sequence
  Description of Artificial Sequence: Synthetic oligonucleotide
gucucguggcugaacucug

SEQ ID NO: 214993 - RNA, 19 nt, Artificial Sequence
  Description of Artificial Sequence: Synthetic oligonucleotide
ccuugaaagugcucguaga

SEQ ID NO: 214994 - RNA, 19 nt, Artificial Sequence
  Description of Artificial Sequence: Synthetic oligonucleotide
cagaggacacacagccgca

SEQ ID NO: 214995 - RNA, 19 nt, Artificial Sequence
  Description of Artificial Sequence: Synthetic oligonucleotide
gccccaacggccugacucc

SEQ ID NO: 214996 - RNA, 19 nt, Artificial Sequence
  Description of Artificial Sequence: Synthetic oligonucleotide
ucgccaucuuggacauagu

SEQ ID NO: 214997 - RNA, 19 nt, Artificial Sequence
  Description of Artificial Sequence: Synthetic oligonucleotide
cuuuugaguaagugacaau

SEQ ID NO: 214998 - RNA, 19 nt, Artificial Sequence
  Description of Artificial Sequence: Synthetic oligonucleotide
acacccuauagggucuaaa

SEQ ID NO: 214999 - RNA, 19 nt, Artificial Sequence
  Description of Artificial Sequence: Synthetic oligonucleotide
cccgagugaacuuucaccu

SEQ ID NO: 215000 - RNA, 19 nt, Artificial Sequence
  Description of Artificial Sequence: Synthetic oligonucleotide
ucgucgcugucgucaugga

SEQ ID NO: 215001 - RNA, 19 nt, Artificial Sequence
  Description of Artificial Sequence: Synthetic oligonucleotide
cuuugaguacuuguaggau

SEQ ID NO: 215002 - RNA, 19 nt, Artificial Sequence
  Description of Artificial Sequence: Synthetic oligonucleotide
ccguguuucacacgauguc

SEQ ID NO: 215003 - RNA, 19 nt, Artificial Sequence
  Description of Artificial Sequence: Synthetic oligonucleotide
caucaucgaguugaagucu

SEQ ID NO: 215004 - RNA, 19 nt, Artificial Sequence
  Description of Artificial Sequence: Synthetic oligonucleotide
cuccuguaggcaccgcgga

SEQ ID NO: 215005 - RNA, 19 nt, Artificial Sequence
  Description of Artificial Sequence: Synthetic oligonucleotide
aacacccuauagggucuaa

SEQ ID NO: 215006 - RNA, 19 nt, Artificial Sequence
  Description of Artificial Sequence: Synthetic oligonucleotide
ccagaucgccaucuuggac

SEQ ID NO: 215007 - RNA, 19 nt, Artificial Sequence
  Description of Artificial Sequence: Synthetic oligonucleotide
guaggauaugccugagcuu

SEQ ID NO: 215008 - RNA, 19 nt, Artificial Sequence
  Description of Artificial Sequence: Synthetic oligonucleotide
cagcaauuggucagcuugu

SEQ ID NO: 215009 - RNA, 19 nt, Artificial Sequence
  Description of Artificial Sequence: Synthetic oligonucleotide
cggaguuagauguguaaga

SEQ ID NO: 215010 - RNA, 19 nt, Artificial Sequence
  Description of Artificial Sequence: Synthetic oligonucleotide
uaggcaccgcggaguuaga

SEQ ID NO: 215011 - RNA, 19 nt, Artificial Sequence
  Description of Artificial Sequence: Synthetic oligonucleotide
ccccuauacuguacgugug

SEQ ID NO: 215012 - RNA, 19 nt, Artificial Sequence
  Description of Artificial Sequence: Synthetic oligonucleotide
gcgaaaguaguagguacaa

SEQ ID NO: 215013 - RNA, 19 nt, Artificial Sequence
  Description of Artificial Sequence: Synthetic oligonucleotide
guaagagguccucgucgcu

SEQ ID NO: 215014 - RNA, 19 nt, Artificial Sequence
  Description of Artificial Sequence: Synthetic oligonucleotide
acccugucguccucccuuu

SEQ ID NO: 215015 - RNA, 19 nt, Artificial Sequence
  Description of Artificial Sequence: Synthetic oligonucleotide
acgagaugaggggcaugga

SEQ ID NO: 215016 - RNA, 19 nt, Artificial Sequence
  Description of Artificial Sequence: Synthetic oligonucleotide
cccuauacuguacguguga

SEQ ID NO: 215017 - RNA, 19 nt, Artificial Sequence
  Description of Artificial Sequence: Synthetic oligonucleotide
ccgagugaacuuucaccuc

SEQ ID NO: 215018 - RNA, 19 nt, Artificial Sequence
  Description of Artificial Sequence: Synthetic oligonucleotide
uguaggcaccgcggaguua

SEQ ID NO: 215019 - RNA, 19 nt, Artificial Sequence
  Description of Artificial Sequence: Synthetic oligonucleotide
ccuuuccgagcaguccagg

SEQ ID NO: 215020 - RNA, 19 nt, Artificial Sequence
  Description of Artificial Sequence: Synthetic oligonucleotide
caucgaguugaagucuuau

SEQ ID NO: 215021 - RNA, 19 nt, Artificial Sequence
  Description of Artificial Sequence: Synthetic oligonucleotide
gagucccggguaaccuuga

SEQ ID NO: 215022 - RNA, 19 nt, Artificial Sequence
  Description of Artificial Sequence: Synthetic oligonucleotide
aggcaccgcggaguuagau

SEQ ID NO: 215023 - RNA, 19 nt, Artificial Sequence
  Description of Artificial Sequence: Synthetic oligonucleotide
ccuacagcccaaaccugaa

SEQ ID NO: 215024 - RNA, 19 nt, Artificial Sequence
  Description of Artificial Sequence: Synthetic oligonucleotide
ggggaccuguagguguaug

SEQ ID NO: 215025 - RNA, 19 nt, Artificial Sequence
  Description of Artificial Sequence: Synthetic oligonucleotide
gcccaccguguuucacacg

SEQ ID NO: 215026 - RNA, 19 nt, Artificial Sequence
  Description of Artificial Sequence: Synthetic oligonucleotide
cccagcgaaaguaguaggu

SEQ ID NO: 215027 - RNA, 19 nt, Artificial Sequence
  Description of Artificial Sequence: Synthetic oligonucleotide
gcuguaucucauacaggua

SEQ ID NO: 215028 - RNA, 19 nt, Artificial Sequence
  Description of Artificial Sequence: Synthetic oligonucleotide
cacaggguuggugagcguu

SEQ ID NO: 215029 - RNA, 19 nt, Artificial Sequence
  Description of Artificial Sequence: Synthetic oligonucleotide
ccaugacgccucaacucca

SEQ ID NO: 215030 - RNA, 19 nt, Artificial Sequence
  Description of Artificial Sequence: Synthetic oligonucleotide
ucgccccaacggccugacu

SEQ ID NO: 215031 - RNA, 19 nt, Artificial Sequence
  Description of Artificial Sequence: Synthetic oligonucleotide
ccgagcaguccaggggucc

SEQ ID NO: 215032 - RNA, 19 nt, Artificial Sequence
  Description of Artificial Sequence: Synthetic oligonucleotide
cccuggcacaaaguaccgc

SEQ ID NO: 215033 - RNA, 19 nt, Artificial Sequence
  Description of Artificial Sequence: Synthetic oligonucleotide
cguguuucacacgaugucu

SEQ ID NO: 215034 - RNA, 19 nt, Artificial Sequence
  Description of Artificial Sequence: Synthetic oligonucleotide
ggcgggccuucccaaaccu

SEQ ID NO: 215035 - RNA, 19 nt, Artificial Sequence
  Description of Artificial Sequence: Synthetic oligonucleotide
caccgcaaggauagccuuu

SEQ ID NO: 215036 - RNA, 19 nt, Artificial Sequence
  Description of Artificial Sequence: Synthetic oligonucleotide
cgcggaguuagauguguaa

SEQ ID NO: 215037 - RNA, 19 nt, Artificial Sequence
  Description of Artificial Sequence: Synthetic oligonucleotide
cgccaucuuggacauagua

SEQ ID NO: 215038 - RNA, 19 nt, Artificial Sequence
  Description of Artificial Sequence: Synthetic oligonucleotide
cccggguaaccuugaaagu

SEQ ID NO: 215039 - RNA, 19 nt, Artificial Sequence
  Description of Artificial Sequence: Synthetic oligonucleotide
cccaacggccugacuccuc

SEQ ID NO: 215040 - RNA, 19 nt, Artificial Sequence
  Description of Artificial Sequence: Synthetic oligonucleotide
aggcacucggggaccugua

SEQ ID NO: 215041 - RNA, 19 nt, Artificial Sequence
  Description of Artificial Sequence: Synthetic oligonucleotide
gaucgccaucuuggacaua

SEQ ID NO: 215042 - RNA, 19 nt, Artificial Sequence
  Description of Artificial Sequence: Synthetic oligonucleotide
ccgcggaguuagaugugua

SEQ ID NO: 215043 - RNA, 19 nt, Artificial Sequence
  Description of Artificial Sequence: Synthetic oligonucleotide
ccaccgcaaggauagccuu

SEQ ID NO: 215044 - RNA, 19 nt, Artificial Sequence
  Description of Artificial Sequence: Synthetic oligonucleotide
gcguuccauucaccaugcu

SEQ ID NO: 215045 - RNA, 19 nt, Artificial Sequence
  Description of Artificial Sequence: Synthetic oligonucleotide
guaccgcccuuuggccaau

SEQ ID NO: 215046 - RNA, 19 nt, Artificial Sequence
  Description of Artificial Sequence: Synthetic oligonucleotide
ccccaacggccugacuccu

SEQ ID NO: 215047 - RNA, 19 nt, Artificial Sequence
  Description of Artificial Sequence: Synthetic oligonucleotide
aguaaauccaacaaaaugg

SEQ ID NO: 215048 - RNA, 19 nt, Artificial Sequence
  Description of Artificial Sequence: Synthetic oligonucleotide
aauaccgugggcuaagaac

SEQ ID NO: 215049 - RNA, 19 nt, Artificial Sequence
  Description of Artificial Sequence: Synthetic oligonucleotide
uuaaaugugagucuaguca

SEQ ID NO: 215050 - RNA, 19 nt, Artificial Sequence
  Description of Artificial Sequence: Synthetic oligonucleotide
aauacuauauuucuguaau

SEQ ID NO: 215051 - RNA, 19 nt, Artificial Sequence
  Description of Artificial Sequence: Synthetic oligonucleotide
aguauaugcagguauacuc

SEQ ID NO: 215052 - RNA, 19 nt, Artificial Sequence
  Description of Artificial Sequence: Synthetic oligonucleotide
uugguuaaagcauaauugg

SEQ ID NO: 215053 - RNA, 19 nt, Artificial Sequence
  Description of Artificial Sequence: Synthetic oligonucleotide
aaaguucgaaucugcaggc

SEQ ID NO: 215054 - RNA, 19 nt, Artificial Sequence
  Description of Artificial Sequence: Synthetic oligonucleotide
agaauaggauuugagaucc

SEQ ID NO: 215055 - RNA, 19 nt, Artificial Sequence
  Description of Artificial Sequence: Synthetic oligonucleotide
auuauuaauuccauggucg

SEQ ID NO: 215056 - RNA, 19 nt, Artificial Sequence
  Description of Artificial Sequence: Synthetic oligonucleotide
gauguaaucagaaacgggc

SEQ ID NO: 215057 - RNA, 19 nt, Artificial Sequence
  Description of Artificial Sequence: Synthetic oligonucleotide
ucgaauucaggcaugauga

SEQ ID NO: 215058 - RNA, 19 nt, Artificial Sequence
  Description of Artificial Sequence: Synthetic oligonucleotide
uacaccaacuacuauaagc

SEQ ID NO: 215059 - RNA, 19 nt, Artificial Sequence
  Description of Artificial Sequence: Synthetic oligonucleotide
cuagauaucaccgccaucc

SEQ ID NO: 215060 - RNA, 19 nt, Artificial Sequence
  Description of Artificial Sequence: Synthetic oligonucleotide
cuugcuguacugaauaccg

SEQ ID NO: 215061 - RNA, 19 nt, Artificial Sequence
  Description of Artificial Sequence: Synthetic oligonucleotide
acauagcaaacccugcugc

SEQ ID NO: 215062 - RNA, 19 nt, Artificial Sequence
  Description of Artificial Sequence: Synthetic oligonucleotide
uuuacuguguucugcaggc

SEQ ID NO: 215063 - RNA, 19 nt, Artificial Sequence
  Description of Artificial Sequence: Synthetic oligonucleotide
gaaaguggcaagcugcuag

SEQ ID NO: 215064 - RNA, 19 nt, Artificial Sequence
  Description of Artificial Sequence: Synthetic oligonucleotide
aauguaacucuuuuggguu

SEQ ID NO: 215065 - RNA, 19 nt, Artificial Sequence
  Description of Artificial Sequence: Synthetic oligonucleotide
ugacacuagaguauaauaa

SEQ ID NO: 215066 - RNA, 19 nt, Artificial Sequence
  Description of Artificial Sequence: Synthetic oligonucleotide
ucgauauaaugcuggacgg

SEQ ID NO: 215067 - RNA, 19 nt, Artificial Sequence
  Description of Artificial Sequence: Synthetic oligonucleotide
aauccagaugcuuucggug

SEQ ID NO: 215068 - RNA, 19 nt, Artificial Sequence
  Description of Artificial Sequence: Synthetic oligonucleotide
ccuagugugaucaaaaggc

SEQ ID NO: 215069 - RNA, 19 nt, Artificial Sequence
  Description of Artificial Sequence: Synthetic oligonucleotide
gaggcaaauuauuaauucc

SEQ ID NO: 215070 - RNA, 19 nt, Artificial Sequence
  Description of Artificial Sequence: Synthetic oligonucleotide
uuaggaggaacacuuguga

SEQ ID NO: 215071 - RNA, 19 nt, Artificial Sequence
  Description of Artificial Sequence: Synthetic oligonucleotide
aagcauaauuggcugacug

SEQ ID NO: 215072 - RNA, 19 nt, Artificial Sequence
  Description of Artificial Sequence: Synthetic oligonucleotide
agaaaggacgacugcaggg

SEQ ID NO: 215073 - RNA, 19 nt, Artificial Sequence
  Description of Artificial Sequence: Synthetic oligonucleotide
aaugaagcgucaccuucac

SEQ ID NO: 215074 - RNA, 19 nt, Artificial Sequence
  Description of Artificial Sequence: Synthetic oligonucleotide
auggucgagguuuaggagg

SEQ ID NO: 215075 - RNA, 19 nt, Artificial Sequence
  Description of Artificial Sequence: Synthetic oligonucleotide
ugaucaaaaggcaggauau

SEQ ID NO: 215076 - RNA, 19 nt, Artificial Sequence
  Description of Artificial Sequence: Synthetic oligonucleotide
agaaagucagaucaguuaa

SEQ ID NO: 215077 - RNA, 19 nt, Artificial Sequence
  Description of Artificial Sequence: Synthetic oligonucleotide
gauauaaugcuggacggcc

SEQ ID NO: 215078 - RNA, 19 nt, Artificial Sequence
  Description of Artificial Sequence: Synthetic oligonucleotide
auacauggaguauaugcag

SEQ ID NO: 215079 - RNA, 19 nt, Artificial Sequence
  Description of Artificial Sequence: Synthetic oligonucleotide
augagaauaggauuugaga

SEQ ID NO: 215080 - RNA, 19 nt, Artificial Sequence
  Description of Artificial Sequence: Synthetic oligonucleotide
auacucaucaggccaguac

SEQ ID NO: 215081 - RNA, 19 nt, Artificial Sequence
  Description of Artificial Sequence: Synthetic oligonucleotide
uuucggugaaacaugcucu

SEQ ID NO: 215082 - RNA, 19 nt, Artificial Sequence
  Description of Artificial Sequence: Synthetic oligonucleotide
aguucgaaucugcaggccg

SEQ ID NO: 215083 - RNA, 19 nt, Artificial Sequence
  Description of Artificial Sequence: Synthetic oligonucleotide
agagacguuaacucaguag

SEQ ID NO: 215084 - RNA, 19 nt, Artificial Sequence
  Description of Artificial Sequence: Synthetic oligonucleotide
ucuacucaggagcuuaucu

SEQ ID NO: 215085 - RNA, 19 nt, Artificial Sequence
  Description of Artificial Sequence: Synthetic oligonucleotide
ugauuccccaaagagacag

SEQ ID NO: 215086 - RNA, 19 nt, Artificial Sequence
  Description of Artificial Sequence: Synthetic oligonucleotide
accaacuacuauaagcagc

SEQ ID NO: 215087 - RNA, 19 nt, Artificial Sequence
  Description of Artificial Sequence: Synthetic oligonucleotide
acguuaacucaguagauca

SEQ ID NO: 215088 - RNA, 19 nt, Artificial Sequence
  Description of Artificial Sequence: Synthetic oligonucleotide
guaaauccaacaaaauggc

SEQ ID NO: 215089 - RNA, 19 nt, Artificial Sequence
  Description of Artificial Sequence: Synthetic oligonucleotide
guagucaugacgaugacuc

SEQ ID NO: 215090 - RNA, 19 nt, Artificial Sequence
  Description of Artificial Sequence: Synthetic oligonucleotide
uauacucugagguuucccu

SEQ ID NO: 215091 - RNA, 19 nt, Artificial Sequence
  Description of Artificial Sequence: Synthetic oligonucleotide
ucugucuggaccaucccug

SEQ ID NO: 215092 - RNA, 19 nt, Artificial Sequence
  Description of Artificial Sequence: Synthetic oligonucleotide
gagucuagauaucaccgcc

SEQ ID NO: 215093 - RNA, 19 nt, Artificial Sequence
  Description of Artificial Sequence: Synthetic oligonucleotide
aggaacaagcuuccauacc

SEQ ID NO: 215094 - RNA, 19 nt, Artificial Sequence
  Description of Artificial Sequence: Synthetic oligonucleotide
agaucaguuagacagccaa

SEQ ID NO: 215095 - RNA, 19 nt, Artificial Sequence
  Description of Artificial Sequence: Synthetic oligonucleotide
accaacuaucucaagcugc

SEQ ID NO: 215096 - RNA, 19 nt, Artificial Sequence
  Description of Artificial Sequence: Synthetic oligonucleotide
uacuugacgcauuugcucu

SEQ ID NO: 215097 - RNA, 19 nt, Artificial Sequence
  Description of Artificial Sequence: Synthetic oligonucleotide
ugccugaugcuucauacac

SEQ ID NO: 215098 - RNA, 19 nt, Artificial Sequence
  Description of Artificial Sequence: Synthetic oligonucleotide
cuuucggugaaacaugcuc

SEQ ID NO: 215099 - RNA, 19 nt, Artificial Sequence
  Description of Artificial Sequence: Synthetic oligonucleotide
aaaggcgucugaaaccagg

SEQ ID NO: 215100 - RNA, 19 nt, Artificial Sequence
  Description of Artificial Sequence: Synthetic oligonucleotide
acaguuuacaccaacuacu

SEQ ID NO: 215101 - RNA, 19 nt, Artificial Sequence
  Description of Artificial Sequence: Synthetic oligonucleotide
ucugccugaugcuucauac

SEQ ID NO: 215102 - RNA, 19 nt, Artificial Sequence
  Description of Artificial Sequence: Synthetic oligonucleotide
aucgccgcuugucuggucc

SEQ ID NO: 215103 - RNA, 19 nt, Artificial Sequence
  Description of Artificial Sequence: Synthetic oligonucleotide
cuugugguggaccucuucc

SEQ ID NO: 215104 - RNA, 19 nt, Artificial Sequence
  Description of Artificial Sequence: Synthetic oligonucleotide
aacgggcucguugggaucc

SEQ ID NO: 215105 - RNA, 19 nt, Artificial Sequence
  Description of Artificial Sequence: Synthetic oligonucleotide
auucucguacacucgugcg

SEQ ID NO: 215106 - RNA, 19 nt, Artificial Sequence
  Description of Artificial Sequence: Synthetic oligonucleotide
aaugugcuaugagaauagg

SEQ ID NO: 215107 - RNA, 19 nt, Artificial Sequence
  Description of Artificial Sequence: Synthetic oligonucleotide
ucaugagugucaauccaga

SEQ ID NO: 215108 - RNA, 19 nt, Artificial Sequence
  Description of Artificial Sequence: Synthetic oligonucleotide
gacagagacguuaacucag

SEQ ID NO: 215109 - RNA, 19 nt, Artificial Sequence
  Description of Artificial Sequence: Synthetic oligonucleotide
aguagaucaguuagacagc

SEQ ID NO: 215110 - RNA, 19 nt, Artificial Sequence
  Description of Artificial Sequence: Synthetic oligonucleotide
uugaucgccgcuugucugg

SEQ ID NO: 215111 - RNA, 19 nt, Artificial Sequence
  Description of Artificial Sequence: Synthetic oligonucleotide
uuuucggcuguagaguaag

SEQ ID NO: 215112 - RNA, 19 nt, Artificial Sequence
  Description of Artificial Sequence: Synthetic oligonucleotide
augacgaugacucgagagu

SEQ ID NO: 215113 - RNA, 19 nt, Artificial Sequence
  Description of Artificial Sequence: Synthetic oligonucleotide
uaaagcauaauuggcugac

SEQ ID NO: 215114 - RNA, 19 nt, Artificial Sequence
  Description of Artificial Sequence: Synthetic oligonucleotide
uuaauuccauggucgaggu

SEQ ID NO: 215115 - RNA, 19 nt, Artificial Sequence
  Description of Artificial Sequence: Synthetic oligonucleotide
gaaaggacgacugcagggc

SEQ ID NO: 215116 - RNA, 19 nt, Artificial Sequence
  Description of Artificial Sequence: Synthetic oligonucleotide
agcgucucgauauaaugcu

SEQ ID NO: 215117 - RNA, 19 nt, Artificial Sequence
  Description of Artificial Sequence: Synthetic oligonucleotide
uucucguacacucgugcgc

SEQ ID NO: 215118 - RNA, 19 nt, Artificial Sequence
  Description of Artificial Sequence: Synthetic oligonucleotide
auggcggacuagcacagac

SEQ ID NO: 215119 - RNA, 19 nt, Artificial Sequence
  Description of Artificial Sequence: Synthetic oligonucleotide
auggaguauaugcagguau

SEQ ID NO: 215120 - RNA, 19 nt, Artificial Sequence
  Description of Artificial Sequence: Synthetic oligonucleotide
uuugaucgccgcuugucug

SEQ ID NO: 215121 - RNA, 19 nt, Artificial Sequence
  Description of Artificial Sequence: Synthetic oligonucleotide
guuaaaugugagucuaguc

SEQ ID NO: 215122 - RNA, 19 nt, Artificial Sequence
  Description of Artificial Sequence: Synthetic oligonucleotide
cagcgucucgauauaaugc

SEQ ID NO: 215123 - RNA, 19 nt, Artificial Sequence
  Description of Artificial Sequence: Synthetic oligonucleotide
cauucucguacacucgugc

SEQ ID NO: 215124 - RNA, 19 nt, Artificial Sequence
  Description of Artificial Sequence: Synthetic oligonucleotide
uguccugacacuagaguau

SEQ ID NO: 215125 - RNA, 19 nt, Artificial Sequence
  Description of Artificial Sequence: Synthetic oligonucleotide
aaaccagggcaacauuaga

SEQ ID NO: 215126 - RNA, 19 nt, Artificial Sequence
  Description of Artificial Sequence: Synthetic oligonucleotide
uuuacaugauucacaccaa

SEQ ID NO: 215127 - RNA, 19 nt, Artificial Sequence
  Description of Artificial Sequence: Synthetic oligonucleotide
caucugaaugguuuuagga

SEQ ID NO: 215128 - RNA, 19 nt, Artificial Sequence
  Description of Artificial Sequence: Synthetic oligonucleotide
agacagagacguuaacuca

SEQ ID NO: 215129 - RNA, 19 nt, Artificial Sequence
  Description of Artificial Sequence: Synthetic oligonucleotide
cuguacugaauaccguggg

SEQ ID NO: 215130 - RNA, 19 nt, Artificial Sequence
  Description of Artificial Sequence: Synthetic oligonucleotide
cucaguagaucaguuagac

SEQ ID NO: 215131 - RNA, 19 nt, Artificial Sequence
  Description of Artificial Sequence: Synthetic oligonucleotide
uugagugcauacucaucag

SEQ ID NO: 215132 - RNA, 19 nt, Artificial Sequence
  Description of Artificial Sequence: Synthetic oligonucleotide
aaacccugcugcuugguua

SEQ ID NO: 215133 - RNA, 19 nt, Artificial Sequence
  Description of Artificial Sequence: Synthetic oligonucleotide
agggaauacuuaauauugg

SEQ ID NO: 215134 - RNA, 19 nt, Artificial Sequence
  Description of Artificial Sequence: Synthetic oligonucleotide
aaaggacgacugcagggca

SEQ ID NO: 215135 - RNA, 19 nt, Artificial Sequence
  Description of Artificial Sequence: Synthetic oligonucleotide
cuauaagcagccugggcuc

SEQ ID NO: 215136 - RNA, 19 nt, Artificial Sequence
  Description of Artificial Sequence: Synthetic oligonucleotide
guagaucaguuagacagcc

SEQ ID NO: 215137 - RNA, 19 nt, Artificial Sequence
  Description of Artificial Sequence: Synthetic oligonucleotide
ugucaauccagaugcuuuc

SEQ ID NO: 215138 - RNA, 19 nt, Artificial Sequence
  Description of Artificial Sequence: Synthetic oligonucleotide
aguuaaaugugagucuagu

SEQ ID NO: 215139 - RNA, 19 nt, Artificial Sequence
  Description of Artificial Sequence: Synthetic oligonucleotide
ucuuuucggcuguagagua

SEQ ID NO: 215140 - RNA, 19 nt, Artificial Sequence
  Description of Artificial Sequence: Synthetic oligonucleotide
uggucgagguuuaggagga

SEQ ID NO: 215141 - RNA, 19 nt, Artificial Sequence
  Description of Artificial Sequence: Synthetic oligonucleotide
gaaguuaaaugugagucua

SEQ ID NO: 215142 - RNA, 19 nt, Artificial Sequence
  Description of Artificial Sequence: Synthetic oligonucleotide
uuacaaggggcccaugauu

SEQ ID NO: 215143 - RNA, 19 nt, Artificial Sequence
  Description of Artificial Sequence: Synthetic oligonucleotide
caugauccggccagguccg

SEQ ID NO: 215144 - RNA, 19 nt, Artificial Sequence
  Description of Artificial Sequence: Synthetic oligonucleotide
aaacgggcucguugggauc

SEQ ID NO: 215145 - RNA, 19 nt, Artificial Sequence
  Description of Artificial Sequence: Synthetic oligonucleotide
guacuugacgcauuugcuc

SEQ ID NO: 215146 - RNA, 19 nt, Artificial Sequence
  Description of Artificial Sequence: Synthetic oligonucleotide
acuuugaucgccgcuuguc

SEQ ID NO: 215147 - RNA, 19 nt, Artificial Sequence
  Description of Artificial Sequence: Synthetic oligonucleotide
cauggucgagguuuaggag

SEQ ID NO: 215148 - RNA, 19 nt, Artificial Sequence
  Description of Artificial Sequence: Synthetic oligonucleotide
uuacaccaacuacuauaag

SEQ ID NO: 215149 - RNA, 19 nt, Artificial Sequence
  Description of Artificial Sequence: Synthetic oligonucleotide
aaauggcggacuagcacag

SEQ ID NO: 215150 - RNA, 19 nt, Artificial Sequence
  Description of Artificial Sequence: Synthetic oligonucleotide
ucggcuguagaguaaguuu

SEQ ID NO: 215151 - RNA, 19 nt, Artificial Sequence
  Description of Artificial Sequence: Synthetic oligonucleotide
caggaacaagcuuccauac

SEQ ID NO: 215152 - RNA, 19 nt, Artificial Sequence
  Description of Artificial Sequence: Synthetic oligonucleotide
uagauaucaccgccauccc

SEQ ID NO: 215153 - RNA, 19 nt, Artificial Sequence
  Description of Artificial Sequence: Synthetic oligonucleotide
aaccagggcaacauuagaa

SEQ ID NO: 215154 - RNA, 19 nt, Artificial Sequence
  Description of Artificial Sequence: Synthetic oligonucleotide
uugaauuguugcacuuggu

SEQ ID NO: 215155 - RNA, 19 nt, Artificial Sequence
  Description of Artificial Sequence: Synthetic oligonucleotide
augaagcgucaccuucacc

SEQ ID NO: 215156 - RNA, 19 nt, Artificial Sequence
  Description of Artificial Sequence: Synthetic oligonucleotide
augucaaucugcagugaac

SEQ ID NO: 215157 - RNA, 19 nt, Artificial Sequence
  Description of Artificial Sequence: Synthetic oligonucleotide
acccuagugugaucaaaag

SEQ ID NO: 215158 - RNA, 19 nt, Artificial Sequence
  Description of Artificial Sequence: Synthetic oligonucleotide
uucacaccaaaaugaugac

SEQ ID NO: 215159 - RNA, 19 nt, Artificial Sequence
  Description of Artificial Sequence: Synthetic oligonucleotide
gaauuguugcacuugguuu

SEQ ID NO: 215160 - RNA, 19 nt, Artificial Sequence
  Description of Artificial Sequence: Synthetic oligonucleotide
ugacucgagaguucuccug

SEQ ID NO: 215161 - RNA, 19 nt, Artificial Sequence
  Description of Artificial Sequence: Synthetic oligonucleotide
uccauaccguccccaaaca

SEQ ID NO: 215162 - RNA, 19 nt, Artificial Sequence
  Description of Artificial Sequence: Synthetic oligonucleotide
agaccccauauucuuugag

SEQ ID NO: 215163 - RNA, 19 nt, Artificial Sequence
  Description of Artificial Sequence: Synthetic oligonucleotide
aggagcuuaucuuuccaaa

SEQ ID NO: 215164 - RNA, 19 nt, Artificial Sequence
  Description of Artificial Sequence: Synthetic oligonucleotide
caauguaacucuuuugggu

SEQ ID NO: 215165 - RNA, 19 nt, Artificial Sequence
  Description of Artificial Sequence: Synthetic oligonucleotide
caccaacuacuauaagcag

SEQ ID NO: 215166 - RNA, 19 nt, Artificial Sequence
  Description of Artificial Sequence: Synthetic oligonucleotide
ggcggacuagcacagaccc

SEQ ID NO: 215167 - RNA, 19 nt, Artificial Sequence
  Description of Artificial Sequence: Synthetic oligonucleotide
aaagcauaauuggcugacu

SEQ ID NO: 215168 - RNA, 19 nt, Artificial Sequence
  Description of Artificial Sequence: Synthetic oligonucleotide
ucccugaccucugggaccg

SEQ ID NO: 215169 - RNA, 19 nt, Artificial Sequence
  Description of Artificial Sequence: Synthetic oligonucleotide
uucggugaaacaugcucuc

SEQ ID NO: 215170 - RNA, 19 nt, Artificial Sequence
  Description of Artificial Sequence: Synthetic oligonucleotide
caacuguaauggcggaggg

SEQ ID NO: 215171 - RNA, 19 nt, Artificial Sequence
  Description of Artificial Sequence: Synthetic oligonucleotide
ucucguacacucgugcgcu

SEQ ID NO: 215172 - RNA, 19 nt, Artificial Sequence
  Description of Artificial Sequence: Synthetic oligonucleotide
guaggacgacccuagugug

SEQ ID NO: 215173 - RNA, 19 nt, Artificial Sequence
  Description of Artificial Sequence: Synthetic oligonucleotide
uugugguggaccucuucca

SEQ ID NO: 215174 - RNA, 19 nt, Artificial Sequence
  Description of Artificial Sequence: Synthetic oligonucleotide
ccaacuaucucaagcugcc

SEQ ID NO: 215175 - RNA, 19 nt, Artificial Sequence
  Description of Artificial Sequence: Synthetic oligonucleotide
ugacgcauuugcucuuccc

SEQ ID NO: 215176 - RNA, 19 nt, Artificial Sequence
  Description of Artificial Sequence: Synthetic oligonucleotide
guccccgaaguccagaguc

SEQ ID NO: 215177 - RNA, 19 nt, Artificial Sequence
  Description of Artificial Sequence: Synthetic oligonucleotide
uagaucaguuagacagcca

SEQ ID NO: 215178 - RNA, 19 nt, Artificial Sequence
  Description of Artificial Sequence: Synthetic oligonucleotide
gucaauccagaugcuuucg

SEQ ID NO: 215179 - RNA, 19 nt, Artificial Sequence
  Description of Artificial Sequence: Synthetic oligonucleotide
ucuagauaucaccgccauc

SEQ ID NO: 215180 - RNA, 19 nt, Artificial Sequence
  Description of Artificial Sequence: Synthetic oligonucleotide
gucaugacgaugacucgag

SEQ ID NO: 215181 - RNA, 19 nt, Artificial Sequence
  Description of Artificial Sequence: Synthetic oligonucleotide
caaugaagcgucaccuuca

SEQ ID NO: 215182 - RNA, 19 nt, Artificial Sequence
  Description of Artificial Sequence: Synthetic oligonucleotide
uacugaauaccgugggcua

SEQ ID NO: 215183 - RNA, 19 nt, Artificial Sequence
  Description of Artificial Sequence: Synthetic oligonucleotide
uacacucgugcgcuguccu

SEQ ID NO: 215184 - RNA, 19 nt, Artificial Sequence
  Description of Artificial Sequence: Synthetic oligonucleotide
gcaccaacuguaauggcgg

SEQ ID NO: 215185 - RNA, 19 nt, Artificial Sequence
  Description of Artificial Sequence: Synthetic oligonucleotide
gacuagcacagacccuaag

SEQ ID NO: 215186 - RNA, 19 nt, Artificial Sequence
  Description of Artificial Sequence: Synthetic oligonucleotide
aguuuacaccaacuacuau

SEQ ID NO: 215187 - RNA, 19 nt, Artificial Sequence
  Description of Artificial Sequence: Synthetic oligonucleotide
ugacgaugacucgagaguu

SEQ ID NO: 215188 - RNA, 19 nt, Artificial Sequence
  Description of Artificial Sequence: Synthetic oligonucleotide
gcaagggucaacacaaaug

SEQ ID NO: 215189 - RNA, 19 nt, Artificial Sequence
  Description of Artificial Sequence: Synthetic oligonucleotide
gaucaguuagacagccaac

SEQ ID NO: 215190 - RNA, 19 nt, Artificial Sequence
  Description of Artificial Sequence: Synthetic oligonucleotide
ucuugcuaacucagccgcu

SEQ ID NO: 215191 - RNA, 19 nt, Artificial Sequence
  Description of Artificial Sequence: Synthetic oligonucleotide
ucaugacgaugacucgaga

SEQ ID NO: 215192 - RNA, 19 nt, Artificial Sequence
  Description of Artificial Sequence: Synthetic oligonucleotide
gcuguacugaauaccgugg

SEQ ID NO: 215193 - RNA, 19 nt, Artificial Sequence
  Description of Artificial Sequence: Synthetic oligonucleotide
uugcuguacugaauaccgu

SEQ ID NO: 215194 - RNA, 19 nt, Artificial Sequence
  Description of Artificial Sequence: Synthetic oligonucleotide
uugacgcauuugcucuucc

SEQ ID NO: 215195 - RNA, 19 nt, Artificial Sequence
  Description of Artificial Sequence: Synthetic oligonucleotide
augugcuaugagaauagga

SEQ ID NO: 215196 - RNA, 19 nt, Artificial Sequence
  Description of Artificial Sequence: Synthetic oligonucleotide
gcagcgucucgauauaaug

SEQ ID NO: 215197 - RNA, 19 nt, Artificial Sequence
  Description of Artificial Sequence: Synthetic oligonucleotide
aagggucaacacaaaugcu

SEQ ID NO: 215198 - RNA, 19 nt, Artificial Sequence
  Description of Artificial Sequence: Synthetic oligonucleotide
caccaacuaucucaagcug

SEQ ID NO: 215199 - RNA, 19 nt, Artificial Sequence
  Description of Artificial Sequence: Synthetic oligonucleotide
gagacagggguaaaagaaa

SEQ ID NO: 215200 - RNA, 19 nt, Artificial Sequence
  Description of Artificial Sequence: Synthetic oligonucleotide
ccaacuguaauggcggagg

SEQ ID NO: 215201 - RNA, 19 nt, Artificial Sequence
  Description of Artificial Sequence: Synthetic oligonucleotide
ggcgucugaaaccagggca

SEQ ID NO: 215202 - RNA, 19 nt, Artificial Sequence
  Description of Artificial Sequence: Synthetic oligonucleotide
acgaugacucgagaguucu

SEQ ID NO: 215203 - RNA, 19 nt, Artificial Sequence
  Description of Artificial Sequence: Synthetic oligonucleotide
guauacucugagguuuccc

SEQ ID NO: 215204 - RNA, 19 nt, Artificial Sequence
  Description of Artificial Sequence: Synthetic oligonucleotide
guucgaaucugcaggccgc

SEQ ID NO: 215205 - RNA, 19 nt, Artificial Sequence
  Description of Artificial Sequence: Synthetic oligonucleotide
uaaucagaaacgggcucgu

SEQ ID NO: 215206 - RNA, 19 nt, Artificial Sequence
  Description of Artificial Sequence: Synthetic oligonucleotide
guauaugcagguauacucu

SEQ ID NO: 215207 - RNA, 19 nt, Artificial Sequence
  Description of Artificial Sequence: Synthetic oligonucleotide
cacagccaaguucuacagc

SEQ ID NO: 215208 - RNA, 19 nt, Artificial Sequence
  Description of Artificial Sequence: Synthetic oligonucleotide
uuguagucaugacgaugac

SEQ ID NO: 215209 - RNA, 19 nt, Artificial Sequence
  Description of Artificial Sequence: Synthetic oligonucleotide
ggaaauucaaugaacucua

SEQ ID NO: 215210 - RNA, 19 nt, Artificial Sequence
  Description of Artificial Sequence: Synthetic oligonucleotide
agguauacucugagguuuc

SEQ ID NO: 215211 - RNA, 19 nt, Artificial Sequence
  Description of Artificial Sequence: Synthetic oligonucleotide
gaccccauauucuuugagu

SEQ ID NO: 215212 - RNA, 19 nt, Artificial Sequence
  Description of Artificial Sequence: Synthetic oligonucleotide
cgucucgauauaaugcugg

SEQ ID NO: 215213 - RNA, 19 nt, Artificial Sequence
  Description of Artificial Sequence: Synthetic oligonucleotide
agugcauguccugacacua

SEQ ID NO: 215214 - RNA, 19 nt, Artificial Sequence
  Description of Artificial Sequence: Synthetic oligonucleotide
accaacuguaauggcggag

SEQ ID NO: 215215 - RNA, 19 nt, Artificial Sequence
  Description of Artificial Sequence: Synthetic oligonucleotide
cugacuggaccugacagga

SEQ ID NO: 215216 - RNA, 19 nt, Artificial Sequence
  Description of Artificial Sequence: Synthetic oligonucleotide
uccccgaaguccagagucu

SEQ ID NO: 215217 - RNA, 19 nt, Artificial Sequence
  Description of Artificial Sequence: Synthetic oligonucleotide
uucgaaucugcaggccgcc

SEQ ID NO: 215218 - RNA, 19 nt, Artificial Sequence
  Description of Artificial Sequence: Synthetic oligonucleotide
augcuuucggugaaacaug

SEQ ID NO: 215219 - RNA, 19 nt, Artificial Sequence
  Description of Artificial Sequence: Synthetic oligonucleotide
ugguauacucauguccuuu

SEQ ID NO: 215220 - RNA, 19 nt, Artificial Sequence
  Description of Artificial Sequence: Synthetic oligonucleotide
agucuagauaucaccgcca

SEQ ID NO: 215221 - RNA, 19 nt, Artificial Sequence
  Description of Artificial Sequence: Synthetic oligonucleotide
cagacuacacgguaugugu

SEQ ID NO: 215222 - RNA, 19 nt, Artificial Sequence
  Description of Artificial Sequence: Synthetic oligonucleotide
uucggcuguagaguaaguu

SEQ ID NO: 215223 - RNA, 19 nt, Artificial Sequence
  Description of Artificial Sequence: Synthetic oligonucleotide
ggaaguuaaaugugagucu

SEQ ID NO: 215224 - RNA, 19 nt, Artificial Sequence
  Description of Artificial Sequence: Synthetic oligonucleotide
ccaucguguaggacgaccc

SEQ ID NO: 215225 - RNA, 19 nt, Artificial Sequence
  Description of Artificial Sequence: Synthetic oligonucleotide
gucucgauauaaugcugga

SEQ ID NO: 215226 - RNA, 19 nt, Artificial Sequence
  Description of Artificial Sequence: Synthetic oligonucleotide
gacccuagugugaucaaaa

SEQ ID NO: 215227 - RNA, 19 nt, Artificial Sequence
  Description of Artificial Sequence: Synthetic oligonucleotide
agugucaauccagaugcuu

SEQ ID NO: 215228 - RNA, 19 nt, Artificial Sequence
  Description of Artificial Sequence: Synthetic oligonucleotide
cagacccuaagaaaggcgu

SEQ ID NO: 215229 - RNA, 19 nt, Artificial Sequence
  Description of Artificial Sequence: Synthetic oligonucleotide
gaauaccgugggcuaagaa

SEQ ID NO: 215230 - RNA, 19 nt, Artificial Sequence
  Description of Artificial Sequence: Synthetic oligonucleotide
ggaguauaugcagguauac

SEQ ID NO: 215231 - RNA, 19 nt, Artificial Sequence
  Description of Artificial Sequence: Synthetic oligonucleotide
ucggugaaacaugcucuca

SEQ ID NO: 215232 - RNA, 19 nt, Artificial Sequence
  Description of Artificial Sequence: Synthetic oligonucleotide
acugcagacuacacgguau

SEQ ID NO: 215233 - RNA, 19 nt, Artificial Sequence
  Description of Artificial Sequence: Synthetic oligonucleotide
guuugaugcacagccaagu

SEQ ID NO: 215234 - RNA, 19 nt, Artificial Sequence
  Description of Artificial Sequence: Synthetic oligonucleotide
cuaugagaauaggauuuga

SEQ ID NO: 215235 - RNA, 19 nt, Artificial Sequence
  Description of Artificial Sequence: Synthetic oligonucleotide
uccugacacuagaguauaa

SEQ ID NO: 215236 - RNA, 19 nt, Artificial Sequence
  Description of Artificial Sequence: Synthetic oligonucleotide
gaaaggcgucugaaaccag

SEQ ID NO: 215237 - RNA, 19 nt, Artificial Sequence
  Description of Artificial Sequence: Synthetic oligonucleotide
ggaccgcaccaucugaaug

SEQ ID NO: 215238 - RNA, 19 nt, Artificial Sequence
  Description of Artificial Sequence: Synthetic oligonucleotide
gucgagguuuaggaggaac

SEQ ID NO: 215239 - RNA, 19 nt, Artificial Sequence
  Description of Artificial Sequence: Synthetic oligonucleotide
aggacgacccuagugugau

SEQ ID NO: 215240 - RNA, 19 nt, Artificial Sequence
  Description of Artificial Sequence: Synthetic oligonucleotide
cauguccugacacuagagu

SEQ ID NO: 215241 - RNA, 19 nt, Artificial Sequence
  Description of Artificial Sequence: Synthetic oligonucleotide
gcagacuacacgguaugug

SEQ ID NO: 215242 - RNA, 19 nt, Artificial Sequence
  Description of Artificial Sequence: Synthetic oligonucleotide
gcuugguuaaagcauaauu

SEQ ID NO: 215243 - RNA, 19 nt, Artificial Sequence
  Description of Artificial Sequence: Synthetic oligonucleotide
cuugaguggcaauguaacu

SEQ ID NO: 215244 - RNA, 19 nt, Artificial Sequence
  Description of Artificial Sequence: Synthetic oligonucleotide
ggguaaaagaaagucagau

SEQ ID NO: 215245 - RNA, 19 nt, Artificial Sequence
  Description of Artificial Sequence: Synthetic oligonucleotide
ucguacacucgugcgcugu

SEQ ID NO: 215246 - RNA, 19 nt, Artificial Sequence
  Description of Artificial Sequence: Synthetic oligonucleotide
uaauuccauggucgagguu

SEQ ID NO: 215247 - RNA, 19 nt, Artificial Sequence
  Description of Artificial Sequence: Synthetic oligonucleotide
cuugacgcauuugcucuuc

SEQ ID NO: 215248 - RNA, 19 nt, Artificial Sequence
  Description of Artificial Sequence: Synthetic oligonucleotide
acuugacgcauuugcucuu

SEQ ID NO: 215249 - RNA, 19 nt, Artificial Sequence
  Description of Artificial Sequence: Synthetic oligonucleotide
gugcuaugagaauaggauu

SEQ ID NO: 215250 - RNA, 19 nt, Artificial Sequence
  Description of Artificial Sequence: Synthetic oligonucleotide
aauggcggacuagcacaga

SEQ ID NO: 215251 - RNA, 19 nt, Artificial Sequence
  Description of Artificial Sequence: Synthetic oligonucleotide
guacacucgugcgcugucc

SEQ ID NO: 215252 - RNA, 19 nt, Artificial Sequence
  Description of Artificial Sequence: Synthetic oligonucleotide
uuucgaauucaggcaugau

SEQ ID NO: 215253 - RNA, 19 nt, Artificial Sequence
  Description of Artificial Sequence: Synthetic oligonucleotide
ucgugcgcuguccucccuc

SEQ ID NO: 215254 - RNA, 19 nt, Artificial Sequence
  Description of Artificial Sequence: Synthetic oligonucleotide
caauccagaugcuuucggu

SEQ ID NO: 215255 - RNA, 19 nt, Artificial Sequence
  Description of Artificial Sequence: Synthetic oligonucleotide
auaucaccgccauccccaa

SEQ ID NO: 215256 - RNA, 19 nt, Artificial Sequence
  Description of Artificial Sequence: Synthetic oligonucleotide
gaaaggcaccaacuguaau

SEQ ID NO: 215257 - RNA, 19 nt, Artificial Sequence
  Description of Artificial Sequence: Synthetic oligonucleotide
ucguugggauccccaucgu

SEQ ID NO: 215258 - RNA, 19 nt, Artificial Sequence
  Description of Artificial Sequence: Synthetic oligonucleotide
gcugagugcauguccugac

SEQ ID NO: 215259 - RNA, 19 nt, Artificial Sequence
  Description of Artificial Sequence: Synthetic oligonucleotide
guacaagguggcaggggac

SEQ ID NO: 215260 - RNA, 19 nt, Artificial Sequence
  Description of Artificial Sequence: Synthetic oligonucleotide
cugccugaugcuucauaca

SEQ ID NO: 215261 - RNA, 19 nt, Artificial Sequence
  Description of Artificial Sequence: Synthetic oligonucleotide
cuuuucggcuguagaguaa

SEQ ID NO: 215262 - RNA, 19 nt, Artificial Sequence
  Description of Artificial Sequence: Synthetic oligonucleotide
aucguguaggacgacccua

SEQ ID NO: 215263 - RNA, 19 nt, Artificial Sequence
  Description of Artificial Sequence: Synthetic oligonucleotide
gguuucgaauucaggcaug

SEQ ID NO: 215264 - RNA, 19 nt, Artificial Sequence
  Description of Artificial Sequence: Synthetic oligonucleotide
gguauacucugagguuucc

SEQ ID NO: 215265 - RNA, 19 nt, Artificial Sequence
  Description of Artificial Sequence: Synthetic oligonucleotide
ucgaaucugcaggccgcca

SEQ ID NO: 215266 - RNA, 19 nt, Artificial Sequence
  Description of Artificial Sequence: Synthetic oligonucleotide
ugaucgccgcuugucuggu

SEQ ID NO: 215267 - RNA, 19 nt, Artificial Sequence
  Description of Artificial Sequence: Synthetic oligonucleotide
gugggccucaucugaagcu

SEQ ID NO: 215268 - RNA, 19 nt, Artificial Sequence
  Description of Artificial Sequence: Synthetic oligonucleotide
ggagcuuaucuuuccaaau

SEQ ID NO: 215269 - RNA, 19 nt, Artificial Sequence
  Description of Artificial Sequence: Synthetic oligonucleotide
cucuacucaggagcuuauc

SEQ ID NO: 215270 - RNA, 19 nt, Artificial Sequence
  Description of Artificial Sequence: Synthetic oligonucleotide
cuggacggccauguacaug

SEQ ID NO: 215271 - RNA, 19 nt, Artificial Sequence
  Description of Artificial Sequence: Synthetic oligonucleotide
cucguacacucgugcgcug

SEQ ID NO: 215272 - RNA, 19 nt, Artificial Sequence
  Description of Artificial Sequence: Synthetic oligonucleotide
ggggaaguuaaaugugagu

SEQ ID NO: 215273 - RNA, 19 nt, Artificial Sequence
  Description of Artificial Sequence: Synthetic oligonucleotide
aaggcccaaugaagcguca

SEQ ID NO: 215274 - RNA, 19 nt, Artificial Sequence
  Description of Artificial Sequence: Synthetic oligonucleotide
gugucaauccagaugcuuu

SEQ ID NO: 215275 - RNA, 19 nt, Artificial Sequence
  Description of Artificial Sequence: Synthetic oligonucleotide
caugagugucaauccagau

SEQ ID NO: 215276 - RNA, 19 nt, Artificial Sequence
  Description of Artificial Sequence: Synthetic oligonucleotide
cagaccccauauucuuuga

SEQ ID NO: 215277 - RNA, 19 nt, Artificial Sequence
  Description of Artificial Sequence: Synthetic oligonucleotide
guccugacacuagaguaua

SEQ ID NO: 215278 - RNA, 19 nt, Artificial Sequence
  Description of Artificial Sequence: Synthetic oligonucleotide
gggguaaaagaaagucaga

SEQ ID NO: 215279 - RNA, 19 nt, Artificial Sequence
  Description of Artificial Sequence: Synthetic oligonucleotide
acgacccuagugugaucaa

SEQ ID NO: 215280 - RNA, 19 nt, Artificial Sequence
  Description of Artificial Sequence: Synthetic oligonucleotide
cccaucguguaggacgacc

SEQ ID NO: 215281 - RNA, 19 nt, Artificial Sequence
  Description of Artificial Sequence: Synthetic oligonucleotide
gaggaacacuugugaaaau

SEQ ID NO: 215282 - RNA, 19 nt, Artificial Sequence
  Description of Artificial Sequence: Synthetic oligonucleotide
cagagacguuaacucagua

SEQ ID NO: 215283 - RNA, 19 nt, Artificial Sequence
  Description of Artificial Sequence: Synthetic oligonucleotide
gcgucucgauauaaugcug

SEQ ID NO: 215284 - RNA, 19 nt, Artificial Sequence
  Description of Artificial Sequence: Synthetic oligonucleotide
caacuaucucaagcugcca

SEQ ID NO: 215285 - RNA, 19 nt, Artificial Sequence
  Description of Artificial Sequence: Synthetic oligonucleotide
ggcaagggucaacacaaau

SEQ ID NO: 215286 - RNA, 19 nt, Artificial Sequence
  Description of Artificial Sequence: Synthetic oligonucleotide
gcgucugaaaccagggcaa

SEQ ID NO: 215287 - RNA, 19 nt, Artificial Sequence
  Description of Artificial Sequence: Synthetic oligonucleotide
acgguaugugugggcagaa

SEQ ID NO: 215288 - RNA, 19 nt, Artificial Sequence
  Description of Artificial Sequence: Synthetic oligonucleotide
gaauaggauuugagauccu

SEQ ID NO: 215289 - RNA, 19 nt, Artificial Sequence
  Description of Artificial Sequence: Synthetic oligonucleotide
ggcacuuaaggcagaacau

SEQ ID NO: 215290 - RNA, 19 nt, Artificial Sequence
  Description of Artificial Sequence: Synthetic oligonucleotide
caucguguaggacgacccu

SEQ ID NO: 215291 - RNA, 19 nt, Artificial Sequence
  Description of Artificial Sequence: Synthetic oligonucleotide
cuugcuaacucagccgcuu

SEQ ID NO: 215292 - RNA, 19 nt, Artificial Sequence
  Description of Artificial Sequence: Synthetic oligonucleotide
ugguugccccugugcucac

SEQ ID NO: 215293 - RNA, 19 nt, Artificial Sequence
  Description of Artificial Sequence: Synthetic oligonucleotide
cguugggauccccaucgug

SEQ ID NO: 215294 - RNA, 19 nt, Artificial Sequence
  Description of Artificial Sequence: Synthetic oligonucleotide
gaaccacgacagggccugc

SEQ ID NO: 215295 - RNA, 19 nt, Artificial Sequence
  Description of Artificial Sequence: Synthetic oligonucleotide
gagugucaauccagaugcu

SEQ ID NO: 215296 - RNA, 19 nt, Artificial Sequence
  Description of Artificial Sequence: Synthetic oligonucleotide
cuucccggagaaggggcaa

SEQ ID NO: 215297 - RNA, 19 nt, Artificial Sequence
  Description of Artificial Sequence: Synthetic oligonucleotide
ccaccggugggccucaucu

SEQ ID NO: 215298 - RNA, 19 nt, Artificial Sequence
  Description of Artificial Sequence: Synthetic oligonucleotide
cugcagcgucucgauauaa

SEQ ID NO: 215299 - RNA, 19 nt, Artificial Sequence
  Description of Artificial Sequence: Synthetic oligonucleotide
ccuucccggagaaggggca

SEQ ID NO: 215300 - RNA, 19 nt, Artificial Sequence
  Description of Artificial Sequence: Synthetic oligonucleotide
cggacuagcacagacccua

SEQ ID NO: 215301 - RNA, 19 nt, Artificial Sequence
  Description of Artificial Sequence: Synthetic oligonucleotide
augauccggccagguccga

SEQ ID NO: 215302 - RNA, 19 nt, Artificial Sequence
  Description of Artificial Sequence: Synthetic oligonucleotide
ggacgacccuagugugauc

SEQ ID NO: 215303 - RNA, 19 nt, Artificial Sequence
  Description of Artificial Sequence: Synthetic oligonucleotide
cguacacucgugcgcuguc

SEQ ID NO: 215304 - RNA, 19 nt, Artificial Sequence
  Description of Artificial Sequence: Synthetic oligonucleotide
cgaugacucgagaguucuc

SEQ ID NO: 215305 - RNA, 19 nt, Artificial Sequence
  Description of Artificial Sequence: Synthetic oligonucleotide
ggacuagcacagacccuaa

SEQ ID NO: 215306 - RNA, 19 nt, Artificial Sequence
  Description of Artificial Sequence: Synthetic oligonucleotide
gggaccgcaccaucugaau

SEQ ID NO: 215307 - RNA, 19 nt, Artificial Sequence
  Description of Artificial Sequence: Synthetic oligonucleotide
ggucgagguuuaggaggaa

SEQ ID NO: 215308 - RNA, 19 nt, Artificial Sequence
  Description of Artificial Sequence: Synthetic oligonucleotide
cucagccgcuugcuuccau

SEQ ID NO: 215309 - RNA, 19 nt, Artificial Sequence
  Description of Artificial Sequence: Synthetic oligonucleotide
cucgugcgcuguccucccu

SEQ ID NO: 215310 - RNA, 19 nt, Artificial Sequence
  Description of Artificial Sequence: Synthetic oligonucleotide
cgacccuagugugaucaaa

SEQ ID NO: 215311 - RNA, 19 nt, Artificial Sequence
  Description of Artificial Sequence: Synthetic oligonucleotide
gcggacuagcacagacccu

SEQ ID NO: 215312 - RNA, 19 nt, Artificial Sequence
  Description of Artificial Sequence: Synthetic oligonucleotide
cccugaccucugggaccgc

SEQ ID NO: 215313 - RNA, 19 nt, Artificial Sequence
  Description of Artificial Sequence: Synthetic oligonucleotide
cgccaccggugggccucau

SEQ ID NO: 215314 - RNA, 19 nt, Artificial Sequence
  Description of Artificial Sequence: Synthetic oligonucleotide
ugugcaaucauaaacagga

SEQ ID NO: 215315 - RNA, 19 nt, Artificial Sequence
  Description of Artificial Sequence: Synthetic oligonucleotide
auauaaaccauaccaaagc

SEQ ID NO: 215316 - RNA, 19 nt, Artificial Sequence
  Description of Artificial Sequence: Synthetic oligonucleotide
acuauuauaccccacaguc

SEQ ID NO: 215317 - RNA, 19 nt, Artificial Sequence
  Description of Artificial Sequence: Synthetic oligonucleotide
  modified_base (3)..(3): a, c, u, g, unknown or other
agngaaaggaaauagagcu

SEQ ID NO: 215318 - RNA, 19 nt, Artificial Sequence
  Description of Artificial Sequence: Synthetic oligonucleotide
auuauucaaguuuagaugu

SEQ ID NO: 215319 - RNA, 19 nt, Artificial Sequence
  Description of Artificial Sequence: Synthetic oligonucleotide
ucacuauuaccuuagaaag

SEQ ID NO: 215320 - RNA, 19 nt, Artificial Sequence
  Description of Artificial Sequence: Synthetic oligonucleotide
aaacuauggucuuaucagc

SEQ ID NO: 215321 - RNA, 19 nt, Artificial Sequence
  Description of Artificial Sequence: Synthetic oligonucleotide
ugauguucaaaucaggacu

SEQ ID NO: 215322 - RNA, 19 nt, Artificial Sequence
  Description of Artificial Sequence: Synthetic oligonucleotide
uucauaagacauuacaagc

SEQ ID NO: 215323 - RNA, 19 nt, Artificial Sequence
  Description of Artificial Sequence: Synthetic oligonucleotide
gaggaguacgucuacaucg

SEQ ID NO: 215324 - RNA, 19 nt, Artificial Sequence
  Description of Artificial Sequence: Synthetic oligonucleotide
ugaauucccaucaagaaaa

SEQ ID NO: 215325 - RNA, 19 nt, Artificial Sequence
  Description of Artificial Sequence: Synthetic oligonucleotide
  modified_base (4)..(4): a, c, u, g, unknown or other
aagngaaaggaaauagagc

SEQ ID NO: 215326 - RNA, 19 nt, Artificial Sequence
  Description of Artificial Sequence: Synthetic oligonucleotide
aaaccgguucaucauaaac

SEQ ID NO: 215327 - RNA, 19 nt, Artificial Sequence
  Description of Artificial Sequence: Synthetic oligonucleotide
gaacagaacuauuauaccc

SEQ ID NO: 215328 - RNA, 19 nt, Artificial Sequence
  Description of Artificial Sequence: Synthetic oligonucleotide
uauaaaccauaccaaagcc

SEQ ID NO: 215329 - RNA, 19 nt, Artificial Sequence
  Description of Artificial Sequence: Synthetic oligonucleotide
uauauguuuaucaucguaa

SEQ ID NO: 215330 - RNA, 19 nt, Artificial Sequence
  Description of Artificial Sequence: Synthetic oligonucleotide
aggaaauagagcuaggaug

SEQ ID NO: 215331 - RNA, 19 nt, Artificial Sequence
  Description of Artificial Sequence: Synthetic oligonucleotide
agaacagaacuauuauacc

SEQ ID NO: 215332 - RNA, 19 nt, Artificial Sequence
  Description of Artificial Sequence: Synthetic oligonucleotide
cucgugaagauaaucaccg

SEQ ID NO: 215333 - RNA, 19 nt, Artificial Sequence
  Description of Artificial Sequence: Synthetic oligonucleotide
guaagcauaacaaugggag

SEQ ID NO: 215334 - RNA, 19 nt, Artificial Sequence
  Description of Artificial Sequence: Synthetic oligonucleotide
uuuuaaugggucuucauaa

SEQ ID NO: 215335 - RNA, 19 nt, Artificial Sequence
  Description of Artificial Sequence: Synthetic oligonucleotide
  modified_base (7)..(7): a, c, u, g, unknown or other
agaaagngaaaggaaauag

SEQ ID NO: 215336 - RNA, 19 nt, Artificial Sequence
  Description of Artificial Sequence: Synthetic oligonucleotide
auacuugacacuccuacgg

SEQ ID NO: 215337 - RNA, 19 nt, Artificial Sequence
  Description of Artificial Sequence: Synthetic oligonucleotide
ggauauauguuuaucaucg

SEQ ID NO: 215338 - RNA, 19 nt, Artificial Sequence
  Description of Artificial Sequence: Synthetic oligonucleotide
acacacuaaagauaccuac

SEQ ID NO: 215339 - RNA, 19 nt, Artificial Sequence
  Description of Artificial Sequence: Synthetic oligonucleotide
uguguuuugaagugcgggg

SEQ ID NO: 215340 - RNA, 19 nt, Artificial Sequence
  Description of Artificial Sequence: Synthetic oligonucleotide
gauccuagcagaugguugg

SEQ ID NO: 215341 - RNA, 19 nt, Artificial Sequence
  Description of Artificial Sequence: Synthetic oligonucleotide
aacuauggucuuaucagcc

SEQ ID NO: 215342 - RNA, 19 nt, Artificial Sequence
  Description of Artificial Sequence: Synthetic oligonucleotide
uuugugaguagaaaugaac

SEQ ID NO: 215343 - RNA, 19 nt, Artificial Sequence
  Description of Artificial Sequence: Synthetic oligonucleotide
aaguggauuuaacaaaaca

SEQ ID NO: 215344 - RNA, 19 nt, Artificial Sequence
  Description of Artificial Sequence: Synthetic oligonucleotide
guuugcauaagaaauacac

SEQ ID NO: 215345 - RNA, 19 nt, Artificial Sequence
  Description of Artificial Sequence: Synthetic oligonucleotide
aggauauauguuuaucauc

SEQ ID NO: 215346 - RNA, 19 nt, Artificial Sequence
  Description of Artificial Sequence: Synthetic oligonucleotide
agagugauauuuugcaguc

SEQ ID NO: 215347 - RNA, 19 nt, Artificial Sequence
  Description of Artificial Sequence: Synthetic oligonucleotide
cauuuugugaguagaaaug

SEQ ID NO: 215348 - RNA, 19 nt, Artificial Sequence
  Description of Artificial Sequence: Synthetic oligonucleotide
uuguuauugugacacgugc

SEQ ID NO: 215349 - RNA, 19 nt, Artificial Sequence
  Description of Artificial Sequence: Synthetic oligonucleotide
auauguuuaucaucguaag

SEQ ID NO: 215350 - RNA, 19 nt, Artificial Sequence
  Description of Artificial Sequence: Synthetic oligonucleotide
augaaagacauuuucugcu

SEQ ID NO: 215351 - RNA, 19 nt, Artificial Sequence
  Description of Artificial Sequence: Synthetic oligonucleotide
aaagccgucauggauaacu

SEQ ID NO: 215352 - RNA, 19 nt, Artificial Sequence
  Description of Artificial Sequence: Synthetic oligonucleotide
auaacaaugggaguuaaga

SEQ ID NO: 215353 - RNA, 19 nt, Artificial Sequence
  Description of Artificial Sequence: Synthetic oligonucleotide
uaccuuuacuuaaagagaa

SEQ ID NO: 215354 - RNA, 19 nt, Artificial Sequence
  Description of Artificial Sequence: Synthetic oligonucleotide
uaccuuagaaagaaauccc

SEQ ID NO: 215355 - RNA, 19 nt, Artificial Sequence
  Description of Artificial Sequence: Synthetic oligonucleotide
aauaagcucgugaagauaa

SEQ ID NO: 215356 - RNA, 19 nt, Artificial Sequence
  Description of Artificial Sequence: Synthetic oligonucleotide
caucguaagcauaacaaug

SEQ ID NO: 215357 - RNA, 19 nt, Artificial Sequence
  Description of Artificial Sequence: Synthetic oligonucleotide
uguuauugugacacgugcc

SEQ ID NO: 215358 - RNA, 19 nt, Artificial Sequence
  Description of Artificial Sequence: Synthetic oligonucleotide
agaacuauuauaccccaca

SEQ ID NO: 215359 - RNA, 19 nt, Artificial Sequence
  Description of Artificial Sequence: Synthetic oligonucleotide
uggugaauauugcuguuag

SEQ ID NO: 215360 - RNA, 19 nt, Artificial Sequence
  Description of Artificial Sequence: Synthetic oligonucleotide
auaguacuacccuuguauc

SEQ ID NO: 215361 - RNA, 19 nt, Artificial Sequence
  Description of Artificial Sequence: Synthetic oligonucleotide
gucuaguuaagauauuuac

SEQ ID NO: 215362 - RNA, 19 nt, Artificial Sequence
  Description of Artificial Sequence: Synthetic oligonucleotide
ugcucguuucuuaaaauac

SEQ ID NO: 215363 - RNA, 19 nt, Artificial Sequence
  Description of Artificial Sequence: Synthetic oligonucleotide
uucgccauuagcaguagug

SEQ ID NO: 215364 - RNA, 19 nt, Artificial Sequence
  Description of Artificial Sequence: Synthetic oligonucleotide
aucguaagcauaacaaugg

SEQ ID NO: 215365 - RNA, 19 nt, Artificial Sequence
  Description of Artificial Sequence: Synthetic oligonucleotide
uuuggugcaugaauguucu

SEQ ID NO: 215366 - RNA, 19 nt, Artificial Sequence
  Description of Artificial Sequence: Synthetic oligonucleotide
caccuggguaauaaaaucg

SEQ ID NO: 215367 - RNA, 19 nt, Artificial Sequence
  Description of Artificial Sequence: Synthetic oligonucleotide
aagaggauauauguuuauc

SEQ ID NO: 215368 - RNA, 19 nt, Artificial Sequence
  Description of Artificial Sequence: Synthetic oligonucleotide
ucguaagcauaacaauggg

SEQ ID NO: 215369 - RNA, 19 nt, Artificial Sequence
  Description of Artificial Sequence: Synthetic oligonucleotide
uuacaagcuauugaauucc

SEQ ID NO: 215370 - RNA, 19 nt, Artificial Sequence
  Description of Artificial Sequence: Synthetic oligonucleotide
uugagaugguuucuggccc

SEQ ID NO: 215371 - RNA, 19 nt, Artificial Sequence
  Description of Artificial Sequence: Synthetic oligonucleotide
uaucaucguaagcauaaca

SEQ ID NO: 215372 - RNA, 19 nt, Artificial Sequence
  Description of Artificial Sequence: Synthetic oligonucleotide
gauaacuuggugguaaaac

SEQ ID NO: 215373 - RNA, 19 nt, Artificial Sequence
  Description of Artificial Sequence: Synthetic oligonucleotide
auaaaccauaccaaagccg

SEQ ID NO: 215374 - RNA, 19 nt, Artificial Sequence
  Description of Artificial Sequence: Synthetic oligonucleotide
aaauaucaaaagaggguag

SEQ ID NO: 215375 - RNA, 19 nt, Artificial Sequence
  Description of Artificial Sequence: Synthetic oligonucleotide
aacaaguacuacauuacca

SEQ ID NO: 215376 - RNA, 19 nt, Artificial Sequence
  Description of Artificial Sequence: Synthetic oligonucleotide
agcucgugaagauaaucac

SEQ ID NO: 215377 - RNA, 19 nt, Artificial Sequence
  Description of Artificial Sequence: Synthetic oligonucleotide
agauguaacagacaucuuu

SEQ ID NO: 215378 - RNA, 19 nt, Artificial Sequence
  Description of Artificial Sequence: Synthetic oligonucleotide
uacacccuaaagaauucag

SEQ ID NO: 215379 - RNA, 19 nt, Artificial Sequence
  Description of Artificial Sequence: Synthetic oligonucleotide
auucccaucaagaaaaccu

SEQ ID NO: 215380 - RNA, 19 nt, Artificial Sequence
  Description of Artificial Sequence: Synthetic oligonucleotide
accuuagaaagaaaucccc

SEQ ID NO: 215381 - RNA, 19 nt, Artificial Sequence
  Description of Artificial Sequence: Synthetic oligonucleotide
cucacuauuaccuuagaaa

SEQ ID NO: 215382 - RNA, 19 nt, Artificial Sequence
  Description of Artificial Sequence: Synthetic oligonucleotide
uacacacacgcacacacac

SEQ ID NO: 215383 - RNA, 19 nt, Artificial Sequence
  Description of Artificial Sequence: Synthetic oligonucleotide
agacaaugccaucuugacg

SEQ ID NO: 215384 - RNA, 19 nt, Artificial Sequence
  Description of Artificial Sequence: Synthetic oligonucleotide
cauguuaccguuuacaacu

SEQ ID NO: 215385 - RNA, 19 nt, Artificial Sequence
  Description of Artificial Sequence: Synthetic oligonucleotide
gaagauaaucaccguuucc

SEQ ID NO: 215386 - RNA, 19 nt, Artificial Sequence
  Description of Artificial Sequence: Synthetic oligonucleotide
ucucaaugugacauguaga

SEQ ID NO: 215387 - RNA, 19 nt, Artificial Sequence
  Description of Artificial Sequence: Synthetic oligonucleotide
uaguacuacccuuguaucc

SEQ ID NO: 215388 - RNA, 19 nt, Artificial Sequence
  Description of Artificial Sequence: Synthetic oligonucleotide
aaccgguucaucauaaaca

SEQ ID NO: 215389 - RNA, 19 nt, Artificial Sequence
  Description of Artificial Sequence: Synthetic oligonucleotide
ucguaacagauucugugca

SEQ ID NO: 215390 - RNA, 19 nt, Artificial Sequence
  Description of Artificial Sequence: Synthetic oligonucleotide
aaagaggauauauguuuau

SEQ ID NO: 215391 - RNA, 19 nt, Artificial Sequence
  Description of Artificial Sequence: Synthetic oligonucleotide
auagagcuaggaugugccc

SEQ ID NO: 215392 - RNA, 19 nt, Artificial Sequence
  Description of Artificial Sequence: Synthetic oligonucleotide
auuuggugcaugaauguuc

SEQ ID NO: 215393 - RNA, 19 nt, Artificial Sequence
  Description of Artificial Sequence: Synthetic oligonucleotide
cuucucacuauuaccuuag

SEQ ID NO: 215394 - RNA, 19 nt, Artificial Sequence
  Description of Artificial Sequence: Synthetic oligonucleotide
uagagcuaggaugugcccg

SEQ ID NO: 215395 - RNA, 19 nt, Artificial Sequence
  Description of Artificial Sequence: Synthetic oligonucleotide
accuggguaauaaaaucgc

SEQ ID NO: 215396 - RNA, 19 nt, Artificial Sequence
  Description of Artificial Sequence: Synthetic oligonucleotide
ugaauaguacuacccuugu

SEQ ID NO: 215397 - RNA, 19 nt, Artificial Sequence
  Description of Artificial Sequence: Synthetic oligonucleotide
uguuuaucaucguaagcau

SEQ ID NO: 215398 - RNA, 19 nt, Artificial Sequence
  Description of Artificial Sequence: Synthetic oligonucleotide
  modified_base (6)..(6): a, c, u, g, unknown or other
gaaagngaaaggaaauaga

SEQ ID NO: 215399 - RNA, 19 nt, Artificial Sequence
  Description of Artificial Sequence: Synthetic oligonucleotide
agaggaguacgucuacauc

SEQ ID NO: 215400 - RNA, 19 nt, Artificial Sequence
  Description of Artificial Sequence: Synthetic oligonucleotide
uggguaauaaaaucgcauu

SEQ ID NO: 215401 - RNA, 19 nt, Artificial Sequence
  Description of Artificial Sequence: Synthetic oligonucleotide
uggauauguguugugaagu

SEQ ID NO: 215402 - RNA, 19 nt, Artificial Sequence
  Description of Artificial Sequence: Synthetic oligonucleotide
aaucgcauuuggugcauga

SEQ ID NO: 215403 - RNA, 19 nt, Artificial Sequence
  Description of Artificial Sequence: Synthetic oligonucleotide
gauaccuacugcaauagaa

SEQ ID NO: 215404 - RNA, 19 nt, Artificial Sequence
  Description of Artificial Sequence: Synthetic oligonucleotide
ucaucguaagcauaacaau

SEQ ID NO: 215405 - RNA, 19 nt, Artificial Sequence
  Description of Artificial Sequence: Synthetic oligonucleotide
ugacauguagagagauucc

SEQ ID NO: 215406 - RNA, 19 nt, Artificial Sequence
  Description of Artificial Sequence: Synthetic oligonucleotide
aagcucgugaagauaauca

SEQ ID NO: 215407 - RNA, 19 nt, Artificial Sequence
  Description of Artificial Sequence: Synthetic oligonucleotide
uauggucuuaucagccuug

SEQ ID NO: 215408 - RNA, 19 nt, Artificial Sequence
  Description of Artificial Sequence: Synthetic oligonucleotide
ucucacuauuaccuuagaa

SEQ ID NO: 215409 - RNA, 19 nt, Artificial Sequence
  Description of Artificial Sequence: Synthetic oligonucleotide
ugucuaguuaagauauuua

SEQ ID NO: 215410 - RNA, 19 nt, Artificial Sequence
  Description of Artificial Sequence: Synthetic oligonucleotide
caaauuaaacccauggccu

SEQ ID NO: 215411 - RNA, 19 nt, Artificial Sequence
  Description of Artificial Sequence: Synthetic oligonucleotide
uacaagcuauugaauuccc

SEQ ID NO: 215412 - RNA, 19 nt, Artificial Sequence
  Description of Artificial Sequence: Synthetic oligonucleotide
agccauuaagaaacuaugg

SEQ ID NO: 215413 - RNA, 19 nt, Artificial Sequence
  Description of Artificial Sequence: Synthetic oligonucleotide
ucaaaccgguucaucauaa

SEQ ID NO: 215414 - RNA, 19 nt, Artificial Sequence
  Description of Artificial Sequence: Synthetic oligonucleotide
gaguacgucuacaucgggg

SEQ ID NO: 215415 - RNA, 19 nt, Artificial Sequence
  Description of Artificial Sequence: Synthetic oligonucleotide
ccguuuacaacuugaaugc

SEQ ID NO: 215416 - RNA, 19 nt, Artificial Sequence
  Description of Artificial Sequence: Synthetic oligonucleotide
cacaaauaagcucgugaag

SEQ ID NO: 215417 - RNA, 19 nt, Artificial Sequence
  Description of Artificial Sequence: Synthetic oligonucleotide
augaauaguacuacccuug

SEQ ID NO: 215418 - RNA, 19 nt, Artificial Sequence
  Description of Artificial Sequence: Synthetic oligonucleotide
aaucaggacuacaaauuga

SEQ ID NO: 215419 - RNA, 19 nt, Artificial Sequence
  Description of Artificial Sequence: Synthetic oligonucleotide
accgguucaucauaaacaa

SEQ ID NO: 215420 - RNA, 19 nt, Artificial Sequence
  Description of Artificial Sequence: Synthetic oligonucleotide
uuguauccuaaguaggcau

SEQ ID NO: 215421 - RNA, 19 nt, Artificial Sequence
  Description of Artificial Sequence: Synthetic oligonucleotide
uugacauccgaugcuuggg

SEQ ID NO: 215422 - RNA, 19 nt, Artificial Sequence
  Description of Artificial Sequence: Synthetic oligonucleotide
ugacacgugccuuauuggu

SEQ ID NO: 215423 - RNA, 19 nt, Artificial Sequence
  Description of Artificial Sequence: Synthetic oligonucleotide
cagaacaccacuaucuuaa

SEQ ID NO: 215424 - RNA, 19 nt, Artificial Sequence
  Description of Artificial Sequence: Synthetic oligonucleotide
aucaucguaagcauaacaa

SEQ ID NO: 215425 - RNA, 19 nt, Artificial Sequence
  Description of Artificial Sequence: Synthetic oligonucleotide
gaguuaagagcuuaaaauu

SEQ ID NO: 215426 - RNA, 19 nt, Artificial Sequence
  Description of Artificial Sequence: Synthetic oligonucleotide
auaaugggguaaaaccagg

SEQ ID NO: 215427 - RNA, 19 nt, Artificial Sequence
  Description of Artificial Sequence: Synthetic oligonucleotide
uguaagcuugccacacuga

SEQ ID NO: 215428 - RNA, 19 nt, Artificial Sequence
  Description of Artificial Sequence: Synthetic oligonucleotide
uaccuacugcaauagaaau

SEQ ID NO: 215429 - RNA, 19 nt, Artificial Sequence
  Description of Artificial Sequence: Synthetic oligonucleotide
cauaacaaugggaguuaag

SEQ ID NO: 215430 - RNA, 19 nt, Artificial Sequence
  Description of Artificial Sequence: Synthetic oligonucleotide
uguauccuaaguaggcaua

SEQ ID NO: 215431 - RNA, 19 nt, Artificial Sequence
  Description of Artificial Sequence: Synthetic oligonucleotide
uuacauugagaacuuccuu

SEQ ID NO: 215432 - RNA, 19 nt, Artificial Sequence
  Description of Artificial Sequence: Synthetic oligonucleotide
uuacaacuugaaugcacac

SEQ ID NO: 215433 - RNA, 19 nt, Artificial Sequence
  Description of Artificial Sequence: Synthetic oligonucleotide
auggccugacauuuauauc

SEQ ID NO: 215434 - RNA, 19 nt, Artificial Sequence
  Description of Artificial Sequence: Synthetic oligonucleotide
ugacauccgaugcuuggga

SEQ ID NO: 215435 - RNA, 19 nt, Artificial Sequence
  Description of Artificial Sequence: Synthetic oligonucleotide
  modified_base (13)..(13): a, c, u, g, unknown or other
agcgagagaaagngaaagg

SEQ ID NO: 215436 - RNA, 19 nt, Artificial Sequence
  Description of Artificial Sequence: Synthetic oligonucleotide
uucaaaccgguucaucaua

SEQ ID NO: 215437 - RNA, 19 nt, Artificial Sequence
  Description of Artificial Sequence: Synthetic oligonucleotide
ucgcauuuggugcaugaau

SEQ ID NO: 215438 - RNA, 19 nt, Artificial Sequence
  Description of Artificial Sequence: Synthetic oligonucleotide
uuauucaaguuuagaugua

SEQ ID NO: 215439 - RNA, 19 nt, Artificial Sequence
  Description of Artificial Sequence: Synthetic oligonucleotide
uguuuugaagugcggggau

SEQ ID NO: 215440 - RNA, 19 nt, Artificial Sequence
  Description of Artificial Sequence: Synthetic oligonucleotide
cuauaggcugucuaguuaa

SEQ ID NO: 215441 - RNA, 19 nt, Artificial Sequence
  Description of Artificial Sequence: Synthetic oligonucleotide
uguuaccguuuacaacuug

SEQ ID NO: 215442 - RNA, 19 nt, Artificial Sequence
  Description of Artificial Sequence: Synthetic oligonucleotide
uauugugacacgugccuua

SEQ ID NO: 215443 - RNA, 19 nt, Artificial Sequence
  Description of Artificial Sequence: Synthetic oligonucleotide
ugcgcggucucauagugaa

SEQ ID NO: 215444 - RNA, 19 nt, Artificial Sequence
  Description of Artificial Sequence: Synthetic oligonucleotide
agugcggggauuccuuaag

SEQ ID NO: 215445 - RNA, 19 nt, Artificial Sequence
  Description of Artificial Sequence: Synthetic oligonucleotide
accgaggaucucaaagugc

SEQ ID NO: 215446 - RNA, 19 nt, Artificial Sequence
  Description of Artificial Sequence: Synthetic oligonucleotide
gaaagaggaguacgucuac

SEQ ID NO: 215447 - RNA, 19 nt, Artificial Sequence
  Description of Artificial Sequence: Synthetic oligonucleotide
agugaaccguguugaagug

SEQ ID NO: 215448 - RNA, 19 nt, Artificial Sequence
  Description of Artificial Sequence: Synthetic oligonucleotide
acuauaggcugucuaguua

SEQ ID NO: 215449 - RNA, 19 nt, Artificial Sequence
  Description of Artificial Sequence: Synthetic oligonucleotide
acuugugcauuguuccugu

SEQ ID NO: 215450 - RNA, 19 nt, Artificial Sequence
  Description of Artificial Sequence: Synthetic oligonucleotide
aaguacuggaacaucuaaa

SEQ ID NO: 215451 - RNA, 19 nt, Artificial Sequence
  Description of Artificial Sequence: Synthetic oligonucleotide
aaauaagcucgugaagaua

SEQ ID NO: 215452 - RNA, 19 nt, Artificial Sequence
  Description of Artificial Sequence: Synthetic oligonucleotide
ccuuguauccuaaguaggc

SEQ ID NO: 215453 - RNA, 19 nt, Artificial Sequence
  Description of Artificial Sequence: Synthetic oligonucleotide
aaugggaguuaagagcuua

SEQ ID NO: 215454 - RNA, 19 nt, Artificial Sequence
  Description of Artificial Sequence: Synthetic oligonucleotide
uugacacuccuacggugcc

SEQ ID NO: 215455 - RNA, 19 nt, Artificial Sequence
  Description of Artificial Sequence: Synthetic oligonucleotide
gaauagugaccaacaggag

SEQ ID NO: 215456 - RNA, 19 nt, Artificial Sequence
  Description of Artificial Sequence: Synthetic oligonucleotide
gaggauauauguuuaucau

SEQ ID NO: 215457 - RNA, 19 nt, Artificial Sequence
  Description of Artificial Sequence: Synthetic oligonucleotide
auagucuugccucuucaua

SEQ ID NO: 215458 - RNA, 19 nt, Artificial Sequence
  Description of Artificial Sequence: Synthetic oligonucleotide
cauaagacauuacaagcua

SEQ ID NO: 215459 - RNA, 19 nt, Artificial Sequence
  Description of Artificial Sequence: Synthetic oligonucleotide
gauguucaaaucaggacua

SEQ ID NO: 215460 - RNA, 19 nt, Artificial Sequence
  Description of Artificial Sequence: Synthetic oligonucleotide
gccgucauggauaacuugg

SEQ ID NO: 215461 - RNA, 19 nt, Artificial Sequence
  Description of Artificial Sequence: Synthetic oligonucleotide
gacauuuguagcagcugug

SEQ ID NO: 215462 - RNA, 19 nt, Artificial Sequence
  Description of Artificial Sequence: Synthetic oligonucleotide
ugcccgucagauccuagca

SEQ ID NO: 215463 - RNA, 19 nt, Artificial Sequence
  Description of Artificial Sequence: Synthetic oligonucleotide
uaagcucgugaagauaauc

SEQ ID NO: 215464 - RNA, 19 nt, Artificial Sequence
  Description of Artificial Sequence: Synthetic oligonucleotide
cacuauuaccuuagaaaga

SEQ ID NO: 215465 - RNA, 19 nt, Artificial Sequence
  Description of Artificial Sequence: Synthetic oligonucleotide
aggaguacgucuacaucgg

SEQ ID NO: 215466 - RNA, 19 nt, Artificial Sequence
  Description of Artificial Sequence: Synthetic oligonucleotide
caccauuacauugagaacu

SEQ ID NO: 215467 - RNA, 19 nt, Artificial Sequence
  Description of Artificial Sequence: Synthetic oligonucleotide
uguuugacauccgaugcuu

SEQ ID NO: 215468 - RNA, 19 nt, Artificial Sequence
  Description of Artificial Sequence: Synthetic oligonucleotide
ggucuuaucagccuugaua

SEQ ID NO: 215469 - RNA, 19 nt, Artificial Sequence
  Description of Artificial Sequence: Synthetic oligonucleotide
ccaaccgaggaucucaaag

SEQ ID NO: 215470 - RNA, 19 nt, Artificial Sequence
  Description of Artificial Sequence: Synthetic oligonucleotide
ugaagugcggggauuccuu

SEQ ID NO: 215471 - RNA, 19 nt, Artificial Sequence
  Description of Artificial Sequence: Synthetic oligonucleotide
guaacagauucugugcaca

SEQ ID NO: 215472 - RNA, 19 nt, Artificial Sequence
  Description of Artificial Sequence: Synthetic oligonucleotide
auguucaaaucaggacuac

SEQ ID NO: 215473 - RNA, 19 nt, Artificial Sequence
  Description of Artificial Sequence: Synthetic oligonucleotide
ugcagugcgguguaagcuu

SEQ ID NO: 215474 - RNA, 19 nt, Artificial Sequence
  Description of Artificial Sequence: Synthetic oligonucleotide
cuacggugcccuccaaccg

SEQ ID NO: 215475 - RNA, 19 nt, Artificial Sequence
  Description of Artificial Sequence: Synthetic oligonucleotide
acgugccuuauugguagcc

SEQ ID NO: 215476 - RNA, 19 nt, Artificial Sequence
  Description of Artificial Sequence: Synthetic oligonucleotide
acagaacaccacuaucuua

SEQ ID NO: 215477 - RNA, 19 nt, Artificial Sequence
  Description of Artificial Sequence: Synthetic oligonucleotide
  modified_base (8)..(8): a, c, u, g, unknown or other
gagaaagngaaaggaaaua

SEQ ID NO: 215478 - RNA, 19 nt, Artificial Sequence
  Description of Artificial Sequence: Synthetic oligonucleotide
uuugaagugcggggauucc

SEQ ID NO: 215479 - RNA, 19 nt, Artificial Sequence
  Description of Artificial Sequence: Synthetic oligonucleotide
agauaccuacugcaauaga

SEQ ID NO: 215480 - RNA, 19 nt, Artificial Sequence
  Description of Artificial Sequence: Synthetic oligonucleotide
uuaucaucguaagcauaac

SEQ ID NO: 215481 - RNA, 19 nt, Artificial Sequence
  Description of Artificial Sequence: Synthetic oligonucleotide
uucucacuauuaccuuaga

SEQ ID NO: 215482 - RNA, 19 nt, Artificial Sequence
  Description of Artificial Sequence: Synthetic oligonucleotide
ugcuugggacucgugcgcg

SEQ ID NO: 215483 - RNA, 19 nt, Artificial Sequence
  Description of Artificial Sequence: Synthetic oligonucleotide
cacacacacauacacacua

SEQ ID NO: 215484 - RNA, 19 nt, Artificial Sequence
  Description of Artificial Sequence: Synthetic oligonucleotide
cucgugcgcggucucauag

SEQ ID NO: 215485 - RNA, 19 nt, Artificial Sequence
  Description of Artificial Sequence: Synthetic oligonucleotide
uuauaccccacagucugau

SEQ ID NO: 215486 - RNA, 19 nt, Artificial Sequence
  Description of Artificial Sequence: Synthetic oligonucleotide
uauaccccacagucugaug

SEQ ID NO: 215487 - RNA, 19 nt, Artificial Sequence
  Description of Artificial Sequence: Synthetic oligonucleotide
aaaaucgcauuuggugcau

SEQ ID NO: 215488 - RNA, 19 nt, Artificial Sequence
  Description of Artificial Sequence: Synthetic oligonucleotide
aagugcggggauuccuuaa

SEQ ID NO: 215489 - RNA, 19 nt, Artificial Sequence
  Description of Artificial Sequence: Synthetic oligonucleotide
cagaacuauuauaccccac

SEQ ID NO: 215490 - RNA, 19 nt, Artificial Sequence
  Description of Artificial Sequence: Synthetic oligonucleotide
ccuacggugcccuccaacc

SEQ ID NO: 215491 - RNA, 19 nt, Artificial Sequence
  Description of Artificial Sequence: Synthetic oligonucleotide
gacauguagagagauuccu

SEQ ID NO: 215492 - RNA, 19 nt, Artificial Sequence
  Description of Artificial Sequence: Synthetic oligonucleotide
ucgugaagauaaucaccgu

SEQ ID NO: 215493 - RNA, 19 nt, Artificial Sequence
  Description of Artificial Sequence: Synthetic oligonucleotide
uccuacggugcccuccaac

SEQ ID NO: 215494 - RNA, 19 nt, Artificial Sequence
  Description of Artificial Sequence: Synthetic oligonucleotide
ccauguguuguaagaacag

SEQ ID NO: 215495 - RNA, 19 nt, Artificial Sequence
  Description of Artificial Sequence: Synthetic oligonucleotide
cauggccugacauuuauau

SEQ ID NO: 215496 - RNA, 19 nt, Artificial Sequence
  Description of Artificial Sequence: Synthetic oligonucleotide
agaaaucguaacagauucu

SEQ ID NO: 215497 - RNA, 19 nt, Artificial Sequence
  Description of Artificial Sequence: Synthetic oligonucleotide
aaauccccacugcucguuu

SEQ ID NO: 215498 - RNA, 19 nt, Artificial Sequence
  Description of Artificial Sequence: Synthetic oligonucleotide
ugcggggauuccuuaaguu

SEQ ID NO: 215499 - RNA, 19 nt, Artificial Sequence
  Description of Artificial Sequence: Synthetic oligonucleotide
uggugcagugcgguguaag

SEQ ID NO: 215500 - RNA, 19 nt, Artificial Sequence
  Description of Artificial Sequence: Synthetic oligonucleotide
accuuuacuuaaagagaag

SEQ ID NO: 215501 - RNA, 19 nt, Artificial Sequence
  Description of Artificial Sequence: Synthetic oligonucleotide
gaauaguacuacccuugua

SEQ ID NO: 215502 - RNA, 19 nt, Artificial Sequence
  Description of Artificial Sequence: Synthetic oligonucleotide
uccuagcagaugguuggcc

SEQ ID NO: 215503 - RNA, 19 nt, Artificial Sequence
  Description of Artificial Sequence: Synthetic oligonucleotide
cgcacacacacauacacac

SEQ ID NO: 215504 - RNA, 19 nt, Artificial Sequence
  Description of Artificial Sequence: Synthetic oligonucleotide
ucuuaucagccuugauaua

SEQ ID NO: 215505 - RNA, 19 nt, Artificial Sequence
  Description of Artificial Sequence: Synthetic oligonucleotide
  modified_base (2)..(2): a, c, u, g, unknown or other
gngaaaggaaauagagcua

SEQ ID NO: 215506 - RNA, 19 nt, Artificial Sequence
  Description of Artificial Sequence: Synthetic oligonucleotide
guguuuugaagugcgggga

SEQ ID NO: 215507 - RNA, 19 nt, Artificial Sequence
  Description of Artificial Sequence: Synthetic oligonucleotide
cugaguguccgcagcugug

SEQ ID NO: 215508 - RNA, 19 nt, Artificial Sequence
  Description of Artificial Sequence: Synthetic oligonucleotide
cauguguuguaagaacaga

SEQ ID NO: 215509 - RNA, 19 nt, Artificial Sequence
  Description of Artificial Sequence: Synthetic oligonucleotide
gauuccucugaaacauaga

SEQ ID NO: 215510 - RNA, 19 nt, Artificial Sequence
  Description of Artificial Sequence: Synthetic oligonucleotide
ugggaguuaagagcuuaaa

SEQ ID NO: 215511 - RNA, 19 nt, Artificial Sequence
  Description of Artificial Sequence: Synthetic oligonucleotide
cuggguaauaaaaucgcau

SEQ ID NO: 215512 - RNA, 19 nt, Artificial Sequence
  Description of Artificial Sequence: Synthetic oligonucleotide
gugaaccguguugaagugc

SEQ ID NO: 215513 - RNA, 19 nt, Artificial Sequence
  Description of Artificial Sequence: Synthetic oligonucleotide
acaagcuauugaauuccca

SEQ ID NO: 215514 - RNA, 19 nt, Artificial Sequence
  Description of Artificial Sequence: Synthetic oligonucleotide
agcauaacaaugggaguua

SEQ ID NO: 215515 - RNA, 19 nt, Artificial Sequence
  Description of Artificial Sequence: Synthetic oligonucleotide
uggcgacauuuguagcagc

SEQ ID NO: 215516 - RNA, 19 nt, Artificial Sequence
  Description of Artificial Sequence: Synthetic oligonucleotide
ggaguacgucuacaucggg

SEQ ID NO: 215517 - RNA, 19 nt, Artificial Sequence
  Description of Artificial Sequence: Synthetic oligonucleotide
guauccuaaguaggcauaa

SEQ ID NO: 215518 - RNA, 19 nt, Artificial Sequence
  Description of Artificial Sequence: Synthetic oligonucleotide
ugacacuccuacggugccc

SEQ ID NO: 215519 - RNA, 19 nt, Artificial Sequence
  Description of Artificial Sequence: Synthetic oligonucleotide
cuauuaccuuagaaagaaa

SEQ ID NO: 215520 - RNA, 19 nt, Artificial Sequence
  Description of Artificial Sequence: Synthetic oligonucleotide
accauuacauugagaacuu

SEQ ID NO: 215521 - RNA, 19 nt, Artificial Sequence
  Description of Artificial Sequence: Synthetic oligonucleotide
ucgugcgcggucucauagu

SEQ ID NO: 215522 - RNA, 19 nt, Artificial Sequence
  Description of Artificial Sequence: Synthetic oligonucleotide
gacacgugccuuauuggua

SEQ ID NO: 215523 - RNA, 19 nt, Artificial Sequence
  Description of Artificial Sequence: Synthetic oligonucleotide
caacacuauaggcugucua

SEQ ID NO: 215524 - RNA, 19 nt, Artificial Sequence
  Description of Artificial Sequence: Synthetic oligonucleotide
auacacacacgcacacaca

SEQ ID NO: 215525 - RNA, 19 nt, Artificial Sequence
  Description of Artificial Sequence: Synthetic oligonucleotide
gaagugcggggauuccuua

SEQ ID NO: 215526 - RNA, 19 nt, Artificial Sequence
  Description of Artificial Sequence: Synthetic oligonucleotide
cacuccuacggugcccucc

SEQ ID NO: 215527 - RNA, 19 nt, Artificial Sequence
  Description of Artificial Sequence: Synthetic oligonucleotide
guauggcauggccauccuc

SEQ ID NO: 215528 - RNA, 19 nt, Artificial Sequence
  Description of Artificial Sequence: Synthetic oligonucleotide
uaccccacagucugauguu

SEQ ID NO: 215529 - RNA, 19 nt, Artificial Sequence
  Description of Artificial Sequence: Synthetic oligonucleotide
auaauacuugacacuccua

SEQ ID NO: 215530 - RNA, 19 nt, Artificial Sequence
  Description of Artificial Sequence: Synthetic oligonucleotide
cacacacgcacacacacau

SEQ ID NO: 215531 - RNA, 19 nt, Artificial Sequence
  Description of Artificial Sequence: Synthetic oligonucleotide
cacgugccuuauugguagc

SEQ ID NO: 215532 - RNA, 19 nt, Artificial Sequence
  Description of Artificial Sequence: Synthetic oligonucleotide
ggguaauaaaaucgcauuu

SEQ ID NO: 215533 - RNA, 19 nt, Artificial Sequence
  Description of Artificial Sequence: Synthetic oligonucleotide
uccaaccgaggaucucaaa

SEQ ID NO: 215534 - RNA, 19 nt, Artificial Sequence
  Description of Artificial Sequence: Synthetic oligonucleotide
aucgcauuuggugcaugaa

SEQ ID NO: 215535 - RNA, 19 nt, Artificial Sequence
  Description of Artificial Sequence: Synthetic oligonucleotide
cguaagcauaacaauggga

SEQ ID NO: 215536 - RNA, 19 nt, Artificial Sequence
  Description of Artificial Sequence: Synthetic oligonucleotide
cgcggucucauagugaaag

SEQ ID NO: 215537 - RNA, 19 nt, Artificial Sequence
  Description of Artificial Sequence: Synthetic oligonucleotide
cucuuguuugacauccgau

SEQ ID NO: 215538 - RNA, 19 nt, Artificial Sequence
  Description of Artificial Sequence: Synthetic oligonucleotide
uugggacucgugcgcgguc

SEQ ID NO: 215539 - RNA, 19 nt, Artificial Sequence
  Description of Artificial Sequence: Synthetic oligonucleotide
acacacacgcacacacaca

SEQ ID NO: 215540 - RNA, 19 nt, Artificial Sequence
  Description of Artificial Sequence: Synthetic oligonucleotide
auaagcucgugaagauaau

SEQ ID NO: 215541 - RNA, 19 nt, Artificial Sequence
  Description of Artificial Sequence: Synthetic oligonucleotide
cuggugaauauugcuguua

SEQ ID NO: 215542 - RNA, 19 nt, Artificial Sequence
  Description of Artificial Sequence: Synthetic oligonucleotide
caaaccgguucaucauaaa

SEQ ID NO: 215543 - RNA, 19 nt, Artificial Sequence
  Description of Artificial Sequence: Synthetic oligonucleotide
gcggggauuccuuaaguua

SEQ ID NO: 215544 - RNA, 19 nt, Artificial Sequence
  Description of Artificial Sequence: Synthetic oligonucleotide
cauugagaacuuccuuugu

SEQ ID NO: 215545 - RNA, 19 nt, Artificial Sequence
  Description of Artificial Sequence: Synthetic oligonucleotide
augugcccggugccgggug

SEQ ID NO: 215546 - RNA, 19 nt, Artificial Sequence
  Description of Artificial Sequence: Synthetic oligonucleotide
cccgucagauccuagcaga

SEQ ID NO: 215547 - RNA, 19 nt, Artificial Sequence
  Description of Artificial Sequence: Synthetic oligonucleotide
cuauggucuuaucagccuu

SEQ ID NO: 215548 - RNA, 19 nt, Artificial Sequence
  Description of Artificial Sequence: Synthetic oligonucleotide
acggugcccuccaaccgag

SEQ ID NO: 215549 - RNA, 19 nt, Artificial Sequence
  Description of Artificial Sequence: Synthetic oligonucleotide
gcgacauuuguagcagcug

SEQ ID NO: 215550 - RNA, 19 nt, Artificial Sequence
  Description of Artificial Sequence: Synthetic oligonucleotide
gagauuccucugaaacaua

SEQ ID NO: 215551 - RNA, 19 nt, Artificial Sequence
  Description of Artificial Sequence: Synthetic oligonucleotide
auguuaccguuuacaacuu

SEQ ID NO: 215552 - RNA, 19 nt, Artificial Sequence
  Description of Artificial Sequence: Synthetic oligonucleotide
cacuauaggcugucuaguu

SEQ ID NO: 215553 - RNA, 19 nt, Artificial Sequence
  Description of Artificial Sequence: Synthetic oligonucleotide
cgucauggauaacuuggug

SEQ ID NO: 215554 - RNA, 19 nt, Artificial Sequence
  Description of Artificial Sequence: Synthetic oligonucleotide
cuccaaccgaggaucucaa

SEQ ID NO: 215555 - RNA, 19 nt, Artificial Sequence
  Description of Artificial Sequence: Synthetic oligonucleotide
gugccuuauugguagccau

SEQ ID NO: 215556 - RNA, 19 nt, Artificial Sequence
  Description of Artificial Sequence: Synthetic oligonucleotide
ggugaauauugcuguuagu

SEQ ID NO: 215557 - RNA, 19 nt, Artificial Sequence
  Description of Artificial Sequence: Synthetic oligonucleotide
gugcagugcgguguaagcu

SEQ ID NO: 215558 - RNA, 19 nt, Artificial Sequence
  Description of Artificial Sequence: Synthetic oligonucleotide
gcgguguaagcuugccaca

SEQ ID NO: 215559 - RNA, 19 nt, Artificial Sequence
  Description of Artificial Sequence: Synthetic oligonucleotide
gugcggggauuccuuaagu

SEQ ID NO: 215560 - RNA, 19 nt, Artificial Sequence
  Description of Artificial Sequence: Synthetic oligonucleotide
gguagccauuaagaaacua

SEQ ID NO: 215561 - RNA, 19 nt, Artificial Sequence
  Description of Artificial Sequence: Synthetic oligonucleotide
cgugcgcggucucauagug

SEQ ID NO: 215562 - RNA, 19 nt, Artificial Sequence
  Description of Artificial Sequence: Synthetic oligonucleotide
acucgugcgcggucucaua

SEQ ID NO: 215563 - RNA, 19 nt, Artificial Sequence
  Description of Artificial Sequence: Synthetic oligonucleotide
gcggucucauagugaaaga

SEQ ID NO: 215564 - RNA, 19 nt, Artificial Sequence
  Description of Artificial Sequence: Synthetic oligonucleotide
ccuccaaccgaggaucuca

SEQ ID NO: 215565 - RNA, 19 nt, Artificial Sequence
  Description of Artificial Sequence: Synthetic oligonucleotide
cucuuucgguuuuccauuu

SEQ ID NO: 215566 - RNA, 19 nt, Artificial Sequence
  Description of Artificial Sequence: Synthetic oligonucleotide
gcauaacaaugggaguuaa

SEQ ID NO: 215567 - RNA, 19 nt, Artificial Sequence
  Description of Artificial Sequence: Synthetic oligonucleotide
gguguaagcuugccacacu

SEQ ID NO: 215568 - RNA, 19 nt, Artificial Sequence
  Description of Artificial Sequence: Synthetic oligonucleotide
ggcgacauuuguagcagcu

SEQ ID NO: 215569 - RNA, 19 nt, Artificial Sequence
  Description of Artificial Sequence: Synthetic oligonucleotide
gugcgcggucucauaguga

SEQ ID NO: 215570 - RNA, 19 nt, Artificial Sequence
  Description of Artificial Sequence: Synthetic oligonucleotide
acacacgcacacacacaua

SEQ ID NO: 215571 - RNA, 19 nt, Artificial Sequence
  Description of Artificial Sequence: Synthetic oligonucleotide
cuugggacucgugcgcggu

SEQ ID NO: 215572 - RNA, 19 nt, Artificial Sequence
  Description of Artificial Sequence: Synthetic oligonucleotide
ccacaccauuacauugaga

SEQ ID NO: 215573 - RNA, 19 nt, Artificial Sequence
  Description of Artificial Sequence: Synthetic oligonucleotide
gacucgugcgcggucucau

SEQ ID NO: 215574 - RNA, 19 nt, Artificial Sequence
  Description of Artificial Sequence: Synthetic oligonucleotide
gcugcccgucagauccuag

SEQ ID NO: 215575 - RNA, 19 nt, Artificial Sequence
  Description of Artificial Sequence: Synthetic oligonucleotide
ccgucauggauaacuuggu

SEQ ID NO: 215576 - RNA, 19 nt, Artificial Sequence
  Description of Artificial Sequence: Synthetic oligonucleotide
gggacucgugcgcggucuc

SEQ ID NO: 215577 - RNA, 19 nt, Artificial Sequence
  Description of Artificial Sequence: Synthetic oligonucleotide
gcacacacacauacacacu

SEQ ID NO: 215578 - RNA, 19 nt, Artificial Sequence
  Description of Artificial Sequence: Synthetic oligonucleotide
ccgaugcuugggacucgug

SEQ ID NO: 215579 - RNA, 19 nt, Artificial Sequence
  Description of Artificial Sequence: Synthetic oligonucleotide
ggacucgugcgcggucuca

SEQ ID NO: 215580 - RNA, 19 nt, Artificial Sequence
  Description of Artificial Sequence: Synthetic oligonucleotide
gaggucaauuugggcucuu

SEQ ID NO: 215581 - RNA, 19 nt, Artificial Sequence
  Description of Artificial Sequence: Synthetic oligonucleotide
ccguguugaagugcuccaa

SEQ ID NO: 215582 - RNA, 19 nt, Artificial Sequence
  Description of Artificial Sequence: Synthetic oligonucleotide
cuccuacggugcccuccaa

SEQ ID NO: 215583 - RNA, 19 nt, Artificial Sequence
  Description of Artificial Sequence: Synthetic oligonucleotide
gcugucuaguuaagauauu

SEQ ID NO: 215584 - RNA, 19 nt, Artificial Sequence
  Description of Artificial Sequence: Synthetic oligonucleotide
gcgcggucucauagugaaa

SEQ ID NO: 215585 - RNA, 19 nt, Artificial Sequence
  Description of Artificial Sequence: Synthetic oligonucleotide
ccaaacuuucuuggcccuu

SEQ ID NO: 215586 - RNA, 19 nt, Artificial Sequence
  Description of Artificial Sequence: Synthetic oligonucleotide
aauagguuagcuuuaaugg

SEQ ID NO: 215587 - RNA, 19 nt, Artificial Sequence
  Description of Artificial Sequence: Synthetic oligonucleotide
uaacauacaauaaaugugc

SEQ ID NO: 215588 - RNA, 19 nt, Artificial Sequence
  Description of Artificial Sequence: Synthetic oligonucleotide
aauugaugauuccacuugc

SEQ ID NO: 215589 - RNA, 19 nt, Artificial Sequence
  Description of Artificial Sequence: Synthetic oligonucleotide
agcuuuaauggauuaaugc

SEQ ID NO: 215590 - RNA, 19 nt, Artificial Sequence
  Description of Artificial Sequence: Synthetic oligonucleotide
aacaucaccacuaugccgc

SEQ ID NO: 215591 - RNA, 19 nt, Artificial Sequence
  Description of Artificial Sequence: Synthetic oligonucleotide
cuaacuaaucauuuguucg

SEQ ID NO: 215592 - RNA, 19 nt, Artificial Sequence
  Description of Artificial Sequence: Synthetic oligonucleotide
ugcucuauaaauaguacag

SEQ ID NO: 215593 - RNA, 19 nt, Artificial Sequence
  Description of Artificial Sequence: Synthetic oligonucleotide
auagucacuucccuuaacc

SEQ ID NO: 215594 - RNA, 19 nt, Artificial Sequence
  Description of Artificial Sequence: Synthetic oligonucleotide
aagaacgaaaucuuggaca

SEQ ID NO: 215595 - RNA, 19 nt, Artificial Sequence
  Description of Artificial Sequence: Synthetic oligonucleotide
ugaaccaauuaucuggagg

SEQ ID NO: 215596 - RNA, 19 nt, Artificial Sequence
  Description of Artificial Sequence: Synthetic oligonucleotide
uuuaauggauuaaugcugc

SEQ ID NO: 215597 - RNA, 19 nt, Artificial Sequence
  Description of Artificial Sequence: Synthetic oligonucleotide
aagcaauucggacucgacc

SEQ ID NO: 215598 - RNA, 19 nt, Artificial Sequence
  Description of Artificial Sequence: Synthetic oligonucleotide
gaaccaauuaucuggaggc

SEQ ID NO: 215599 - RNA, 19 nt, Artificial Sequence
  Description of Artificial Sequence: Synthetic oligonucleotide
agaacgaaaucuuggacac

SEQ ID NO: 215600 - RNA, 19 nt, Artificial Sequence
  Description of Artificial Sequence: Synthetic oligonucleotide
agucaguuauuucauuucc

SEQ ID NO: 215601 - RNA, 19 nt, Artificial Sequence
  Description of Artificial Sequence: Synthetic oligonucleotide
aguuaagaaacuuacggga

SEQ ID NO: 215602 - RNA, 19 nt, Artificial Sequence
  Description of Artificial Sequence: Synthetic oligonucleotide
uagaucuuaacauuaugcc

SEQ ID NO: 215603 - RNA, 19 nt, Artificial Sequence
  Description of Artificial Sequence: Synthetic oligonucleotide
accaacugaacucuuuugc

SEQ ID NO: 215604 - RNA, 19 nt, Artificial Sequence
  Description of Artificial Sequence: Synthetic oligonucleotide
  modified_base (16)..(16): a, c, u, g, unknown or other
acauauacaagacugngua

SEQ ID NO: 215605 - RNA, 19 nt, Artificial Sequence
  Description of Artificial Sequence: Synthetic oligonucleotide
auauaauguaaguucauca

SEQ ID NO: 215606 - RNA, 19 nt, Artificial Sequence
  Description of Artificial Sequence: Synthetic oligonucleotide
cauaguaagugagugaugg

SEQ ID NO: 215607 - RNA, 19 nt, Artificial Sequence
  Description of Artificial Sequence: Synthetic oligonucleotide
cuuuaauggauuaaugcug

SEQ ID NO: 215608 - RNA, 19 nt, Artificial Sequence
  Description of Artificial Sequence: Synthetic oligonucleotide
auauuuaguuucaagaguc

SEQ ID NO: 215609 - RNA, 19 nt, Artificial Sequence
  Description of Artificial Sequence: Synthetic oligonucleotide
uggaauggaauaaauaguc

SEQ ID NO: 215610 - RNA, 19 nt, Artificial Sequence
  Description of Artificial Sequence: Synthetic oligonucleotide
uacaucagaaacauggcga

SEQ ID NO: 215611 - RNA, 19 nt, Artificial Sequence
  Description of Artificial Sequence: Synthetic oligonucleotide
cuugacuaugaauuuagcc

SEQ ID NO: 215612 - RNA, 19 nt, Artificial Sequence
  Description of Artificial Sequence: Synthetic oligonucleotide
aaacaucaccacuaugccg

SEQ ID NO: 215613 - RNA, 19 nt, Artificial Sequence
  Description of Artificial Sequence: Synthetic oligonucleotide
uuaaguugauguccgauca

SEQ ID NO: 215614 - RNA, 19 nt, Artificial Sequence
  Description of Artificial Sequence: Synthetic oligonucleotide
ugagaugacaauccagugc

SEQ ID NO: 215615 - RNA, 19 nt, Artificial Sequence
  Description of Artificial Sequence: Synthetic oligonucleotide
auacaucagaaacauggcg

SEQ ID NO: 215616 - RNA, 19 nt, Artificial Sequence
  Description of Artificial Sequence: Synthetic oligonucleotide
gcaguuaagaaacuuacgg

SEQ ID NO: 215617 - RNA, 19 nt, Artificial Sequence
  Description of Artificial Sequence: Synthetic oligonucleotide
ucagguaacauguuauagc

SEQ ID NO: 215618 - RNA, 19 nt, Artificial Sequence
  Description of Artificial Sequence: Synthetic oligonucleotide
uauaauguaaguucaucaa

SEQ ID NO: 215619 - RNA, 19 nt, Artificial Sequence
  Description of Artificial Sequence: Synthetic oligonucleotide
uuaggauuaaguauguauu

SEQ ID NO: 215620 - RNA, 19 nt, Artificial Sequence
  Description of Artificial Sequence: Synthetic oligonucleotide
uuagaauagguaugaagca

SEQ ID NO: 215621 - RNA, 19 nt, Artificial Sequence
  Description of Artificial Sequence: Synthetic oligonucleotide
ugacuaugaauuuagccac

SEQ ID NO: 215622 - RNA, 19 nt, Artificial Sequence
  Description of Artificial Sequence: Synthetic oligonucleotide
caguuaagaaacuuacggg

SEQ ID NO: 215623 - RNA, 19 nt, Artificial Sequence
  Description of Artificial Sequence: Synthetic oligonucleotide
acgacuuuagaauagguau

SEQ ID NO: 215624 - RNA, 19 nt, Artificial Sequence
  Description of Artificial Sequence: Synthetic oligonucleotide
uauauuagaucuuaacauu

SEQ ID NO: 215625 - RNA, 19 nt, Artificial Sequence
  Description of Artificial Sequence: Synthetic oligonucleotide
uguaauauuggauucucua

SEQ ID NO: 215626 - RNA, 19 nt, Artificial Sequence
  Description of Artificial Sequence: Synthetic oligonucleotide
aauugaaauggaaagguaa

SEQ ID NO: 215627 - RNA, 19 nt, Artificial Sequence
  Description of Artificial Sequence: Synthetic oligonucleotide
aaguacaaccauguuguac

SEQ ID NO: 215628 - RNA, 19 nt, Artificial Sequence
  Description of Artificial Sequence: Synthetic oligonucleotide
aguguacccaauccaaaac

SEQ ID NO: 215629 - RNA, 19 nt, Artificial Sequence
  Description of Artificial Sequence: Synthetic oligonucleotide
auugaaaccgguguagcac

SEQ ID NO: 215630 - RNA, 19 nt, Artificial Sequence
  Description of Artificial Sequence: Synthetic oligonucleotide
agccuaauagguugaagac

SEQ ID NO: 215631 - RNA, 19 nt, Artificial Sequence
  Description of Artificial Sequence: Synthetic oligonucleotide
cuauauacacaaccaaggc

SEQ ID NO: 215632 - RNA, 19 nt, Artificial Sequence
  Description of Artificial Sequence: Synthetic oligonucleotide
ugcaguuaagaaacuuacg

SEQ ID NO: 215633 - RNA, 19 nt, Artificial Sequence
  Description of Artificial Sequence: Synthetic oligonucleotide
aaguauguauuuauuuuag

SEQ ID NO: 215634 - RNA, 19 nt, Artificial Sequence
  Description of Artificial Sequence: Synthetic oligonucleotide
aaccuuaaauugugcuccc

SEQ ID NO: 215635 - RNA, 19 nt, Artificial Sequence
  Description of Artificial Sequence: Synthetic oligonucleotide
acauacaauaaaugugcuc

SEQ ID NO: 215636 - RNA, 19 nt, Artificial Sequence
  Description of Artificial Sequence: Synthetic oligonucleotide
uuuacggaguuuaucgaca

SEQ ID NO: 215637 - RNA, 19 nt, Artificial Sequence
  Description of Artificial Sequence: Synthetic oligonucleotide
aaauagugcuucugagguc

SEQ ID NO: 215638 - RNA, 19 nt, Artificial Sequence
  Description of Artificial Sequence: Synthetic oligonucleotide
gaaugguuccguuaggcac

SEQ ID NO: 215639 - RNA, 19 nt, Artificial Sequence
  Description of Artificial Sequence: Synthetic oligonucleotide
guaagcaugcaguuggacc

SEQ ID NO: 215640 - RNA, 19 nt, Artificial Sequence
  Description of Artificial Sequence: Synthetic oligonucleotide
aaaaucagcauugcagcug

SEQ ID NO: 215641 - RNA, 19 nt, Artificial Sequence
  Description of Artificial Sequence: Synthetic oligonucleotide
uucccuuaacccaagacuc

SEQ ID NO: 215642 - RNA, 19 nt, Artificial Sequence
  Description of Artificial Sequence: Synthetic oligonucleotide
aguaacguggccugcaaug

SEQ ID NO: 215643 - RNA, 19 nt, Artificial Sequence
  Description of Artificial Sequence: Synthetic oligonucleotide
uacgggaauauauacauuu

SEQ ID NO: 215644 - RNA, 19 nt, Artificial Sequence
  Description of Artificial Sequence: Synthetic oligonucleotide
aaacuaaguacaaccaugu

SEQ ID NO: 215645 - RNA, 19 nt, Artificial Sequence
  Description of Artificial Sequence: Synthetic oligonucleotide
ugagugauggaacuccgga

SEQ ID NO: 215646 - RNA, 19 nt, Artificial Sequence
  Description of Artificial Sequence: Synthetic oligonucleotide
aaaaguucguccauucucu

SEQ ID NO: 215647 - RNA, 19 nt, Artificial Sequence
  Description of Artificial Sequence: Synthetic oligonucleotide
ugugacgccaccaacugaa

SEQ ID NO: 215648 - RNA, 19 nt, Artificial Sequence
  Description of Artificial Sequence: Synthetic oligonucleotide
uugauguccgaucaguuua

SEQ ID NO: 215649 - RNA, 19 nt, Artificial Sequence
  Description of Artificial Sequence: Synthetic oligonucleotide
aaacgucaggauuggcacg

SEQ ID NO: 215650 - RNA, 19 nt, Artificial Sequence
  Description of Artificial Sequence: Synthetic oligonucleotide
acaccguuaacauacaaua

SEQ ID NO: 215651 - RNA, 19 nt, Artificial Sequence
  Description of Artificial Sequence: Synthetic oligonucleotide
auuugguaccucaaaaguc

SEQ ID NO: 215652 - RNA, 19 nt, Artificial Sequence
  Description of Artificial Sequence: Synthetic oligonucleotide
ucauugugaucacauuuug

SEQ ID NO: 215653 - RNA, 19 nt, Artificial Sequence
  Description of Artificial Sequence: Synthetic oligonucleotide
auugaaauggaaagguaag

SEQ ID NO: 215654 - RNA, 19 nt, Artificial Sequence
  Description of Artificial Sequence: Synthetic oligonucleotide
uuaaauugugcucccucac

SEQ ID NO: 215655 - RNA, 19 nt, Artificial Sequence
  Description of Artificial Sequence: Synthetic oligonucleotide
uauuuaguuucaagaguca

SEQ ID NO: 215656 - RNA, 19 nt, Artificial Sequence
  Description of Artificial Sequence: Synthetic oligonucleotide
uaaauugugcucccucaca

SEQ ID NO: 215657 - RNA, 19 nt, Artificial Sequence
  Description of Artificial Sequence: Synthetic oligonucleotide
uuaagaaacuuacgggaau

SEQ ID NO: 215658 - RNA, 19 nt, Artificial Sequence
  Description of Artificial Sequence: Synthetic oligonucleotide
aaaccgaagauaucccuaa

SEQ ID NO: 215659 - RNA, 19 nt, Artificial Sequence
  Description of Artificial Sequence: Synthetic oligonucleotide
auggcgaagaacgaaaucu

SEQ ID NO: 215660 - RNA, 19 nt, Artificial Sequence
  Description of Artificial Sequence: Synthetic oligonucleotide
gaagaacgaaaucuuggac

SEQ ID NO: 215661 - RNA, 19 nt, Artificial Sequence
  Description of Artificial Sequence: Synthetic oligonucleotide
agauaaaguaacguggccu

SEQ ID NO: 215662 - RNA, 19 nt, Artificial Sequence
  Description of Artificial Sequence: Synthetic oligonucleotide
augcaguuaagaaacuuac

SEQ ID NO: 215663 - RNA, 19 nt, Artificial Sequence
  Description of Artificial Sequence: Synthetic oligonucleotide
accguuaacauacaauaaa

SEQ ID NO: 215664 - RNA, 19 nt, Artificial Sequence
  Description of Artificial Sequence: Synthetic oligonucleotide
gggaauucaguuuaggaac

SEQ ID NO: 215665 - RNA, 19 nt, Artificial Sequence
  Description of Artificial Sequence: Synthetic oligonucleotide
cuuuacggaguuuaucgac

SEQ ID NO: 215666 - RNA, 19 nt, Artificial Sequence
  Description of Artificial Sequence: Synthetic oligonucleotide
auauucaccauacaccguu

SEQ ID NO: 215667 - RNA, 19 nt, Artificial Sequence
  Description of Artificial Sequence: Synthetic oligonucleotide
uaacauuaugccugaugag

SEQ ID NO: 215668 - RNA, 19 nt, Artificial Sequence
  Description of Artificial Sequence: Synthetic oligonucleotide
ggaauuauguuauauuaga

SEQ ID NO: 215669 - RNA, 19 nt, Artificial Sequence
  Description of Artificial Sequence: Synthetic oligonucleotide
uagguuagcuuuaauggau

SEQ ID NO: 215670 - RNA, 19 nt, Artificial Sequence
  Description of Artificial Sequence: Synthetic oligonucleotide
uuagcuuuaauggauuaau

SEQ ID NO: 215671 - RNA, 19 nt, Artificial Sequence
  Description of Artificial Sequence: Synthetic oligonucleotide
auuuaguuucaagagucag

SEQ ID NO: 215672 - RNA, 19 nt, Artificial Sequence
  Description of Artificial Sequence: Synthetic oligonucleotide
uagcuuuaauggauuaaug

SEQ ID NO: 215673 - RNA, 19 nt, Artificial Sequence
  Description of Artificial Sequence: Synthetic oligonucleotide
accacuaugccgcuuacga

SEQ ID NO: 215674 - RNA, 19 nt, Artificial Sequence
  Description of Artificial Sequence: Synthetic oligonucleotide
uccguuaggcacauucaag

SEQ ID NO: 215675 - RNA, 19 nt, Artificial Sequence
  Description of Artificial Sequence: Synthetic oligonucleotide
uucacaucgaaugguuccg

SEQ ID NO: 215676 - RNA, 19 nt, Artificial Sequence
  Description of Artificial Sequence: Synthetic oligonucleotide
agaaacuaaguacaaccau

SEQ ID NO: 215677 - RNA, 19 nt, Artificial Sequence
  Description of Artificial Sequence: Synthetic oligonucleotide
uguucgauguaaacaaaua

SEQ ID NO: 215678 - RNA, 19 nt, Artificial Sequence
  Description of Artificial Sequence: Synthetic oligonucleotide
caucgaaugguuccguuag

SEQ ID NO: 215679 - RNA, 19 nt, Artificial Sequence
  Description of Artificial Sequence: Synthetic oligonucleotide
uccggauugggaaaauaac

SEQ ID NO: 215680 - RNA, 19 nt, Artificial Sequence
  Description of Artificial Sequence: Synthetic oligonucleotide
aagacucgugguuuugcug

SEQ ID NO: 215681 - RNA, 19 nt, Artificial Sequence
  Description of Artificial Sequence: Synthetic oligonucleotide
agacucgugguuuugcugu

SEQ ID NO: 215682 - RNA, 19 nt, Artificial Sequence
  Description of Artificial Sequence: Synthetic oligonucleotide
ccgaagauaucccuaaugg

SEQ ID NO: 215683 - RNA, 19 nt, Artificial Sequence
  Description of Artificial Sequence: Synthetic oligonucleotide
ugcuguuaauauccauucc

SEQ ID NO: 215684 - RNA, 19 nt, Artificial Sequence
  Description of Artificial Sequence: Synthetic oligonucleotide
aguuccaacaguauauaca

SEQ ID NO: 215685 - RNA, 19 nt, Artificial Sequence
  Description of Artificial Sequence: Synthetic oligonucleotide
uguuguacuauuuccccua

SEQ ID NO: 215686 - RNA, 19 nt, Artificial Sequence
  Description of Artificial Sequence: Synthetic oligonucleotide
aaugguuccguuaggcaca

SEQ ID NO: 215687 - RNA, 19 nt, Artificial Sequence
  Description of Artificial Sequence: Synthetic oligonucleotide
uagaauagguaugaagcaa

SEQ ID NO: 215688 - RNA, 19 nt, Artificial Sequence
  Description of Artificial Sequence: Synthetic oligonucleotide
uugaaaccgguguagcacu

SEQ ID NO: 215689 - RNA, 19 nt, Artificial Sequence
  Description of Artificial Sequence: Synthetic oligonucleotide
cuugaacuuaaguugaugu

SEQ ID NO: 215690 - RNA, 19 nt, Artificial Sequence
  Description of Artificial Sequence: Synthetic oligonucleotide
auucggacucgaccugucc

SEQ ID NO: 215691 - RNA, 19 nt, Artificial Sequence
  Description of Artificial Sequence: Synthetic oligonucleotide
gacuuuagaauagguauga

SEQ ID NO: 215692 - RNA, 19 nt, Artificial Sequence
  Description of Artificial Sequence: Synthetic oligonucleotide
acuaaucauuuguucgaug

SEQ ID NO: 215693 - RNA, 19 nt, Artificial Sequence
  Description of Artificial Sequence: Synthetic oligonucleotide
gaaaucuuggacacauuca

SEQ ID NO: 215694 - RNA, 19 nt, Artificial Sequence
  Description of Artificial Sequence: Synthetic oligonucleotide
ugccgaugcaccaaugaaa

SEQ ID NO: 215695 - RNA, 19 nt, Artificial Sequence
  Description of Artificial Sequence: Synthetic oligonucleotide
cagccuaauagguugaaga

SEQ ID NO: 215696 - RNA, 19 nt, Artificial Sequence
  Description of Artificial Sequence: Synthetic oligonucleotide
uacacggucugugaguuga

SEQ ID NO: 215697 - RNA, 19 nt, Artificial Sequence
  Description of Artificial Sequence: Synthetic oligonucleotide
uauauucaccauacaccgu

SEQ ID NO: 215698 - RNA, 19 nt, Artificial Sequence
  Description of Artificial Sequence: Synthetic oligonucleotide
aucuuaguuuaaugaacca

SEQ ID NO: 215699 - RNA, 19 nt, Artificial Sequence
  Description of Artificial Sequence: Synthetic oligonucleotide
aaaccgguguagcacuccu

SEQ ID NO: 215700 - RNA, 19 nt, Artificial Sequence
  Description of Artificial Sequence: Synthetic oligonucleotide
auauuggauucucuauaca

SEQ ID NO: 215701 - RNA, 19 nt, Artificial Sequence
  Description of Artificial Sequence: Synthetic oligonucleotide
ucccacgacuuuagaauag

SEQ ID NO: 215702 - RNA, 19 nt, Artificial Sequence
  Description of Artificial Sequence: Synthetic oligonucleotide
guaugaagcaauucggacu

SEQ ID NO: 215703 - RNA, 19 nt, Artificial Sequence
  Description of Artificial Sequence: Synthetic oligonucleotide
gguaugaagcaauucggac

SEQ ID NO: 215704 - RNA, 19 nt, Artificial Sequence
  Description of Artificial Sequence: Synthetic oligonucleotide
auauuagaucuuaacauua

SEQ ID NO: 215705 - RNA, 19 nt, Artificial Sequence
  Description of Artificial Sequence: Synthetic oligonucleotide
uaacguggccugcaaugag

SEQ ID NO: 215706 - RNA, 19 nt, Artificial Sequence
  Description of Artificial Sequence: Synthetic oligonucleotide
aacauggcgaagaacgaaa

SEQ ID NO: 215707 - RNA, 19 nt, Artificial Sequence
  Description of Artificial Sequence: Synthetic oligonucleotide
cacuaugccgcuuacgaga

SEQ ID NO: 215708 - RNA, 19 nt, Artificial Sequence
  Description of Artificial Sequence: Synthetic oligonucleotide
cuuacgggaauauauacau

SEQ ID NO: 215709 - RNA, 19 nt, Artificial Sequence
  Description of Artificial Sequence: Synthetic oligonucleotide
aaacuuacgggaauauaua

SEQ ID NO: 215710 - RNA, 19 nt, Artificial Sequence
  Description of Artificial Sequence: Synthetic oligonucleotide
ccggauugggaaaauaacc

SEQ ID NO: 215711 - RNA, 19 nt, Artificial Sequence
  Description of Artificial Sequence: Synthetic oligonucleotide
aaacauggcgaagaacgaa

SEQ ID NO: 215712 - RNA, 19 nt, Artificial Sequence
  Description of Artificial Sequence: Synthetic oligonucleotide
cugcucuauaaauaguaca

SEQ ID NO: 215713 - RNA, 19 nt, Artificial Sequence
  Description of Artificial Sequence: Synthetic oligonucleotide
uaaauaggacuugaacuua

SEQ ID NO: 215714 - RNA, 19 nt, Artificial Sequence
  Description of Artificial Sequence: Synthetic oligonucleotide
ugauggaacuccggauugg

SEQ ID NO: 215715 - RNA, 19 nt, Artificial Sequence
  Description of Artificial Sequence: Synthetic oligonucleotide
guuuaucgacaacugguuc

SEQ ID NO: 215716 - RNA, 19 nt, Artificial Sequence
  Description of Artificial Sequence: Synthetic oligonucleotide
gauuggcacggcauacacg

SEQ ID NO: 215717 - RNA, 19 nt, Artificial Sequence
  Description of Artificial Sequence: Synthetic oligonucleotide
aagaaacuuacgggaauau

SEQ ID NO: 215718 - RNA, 19 nt, Artificial Sequence
  Description of Artificial Sequence: Synthetic oligonucleotide
uggccaauugaugauucca

SEQ ID NO: 215719 - RNA, 19 nt, Artificial Sequence
  Description of Artificial Sequence: Synthetic oligonucleotide
guuagccucuaacaguaca

SEQ ID NO: 215720 - RNA, 19 nt, Artificial Sequence
  Description of Artificial Sequence: Synthetic oligonucleotide
gguuccguuaggcacauuc

SEQ ID NO: 215721 - RNA, 19 nt, Artificial Sequence
  Description of Artificial Sequence: Synthetic oligonucleotide
agaauagguaugaagcaau

SEQ ID NO: 215722 - RNA, 19 nt, Artificial Sequence
  Description of Artificial Sequence: Synthetic oligonucleotide
acuuacgggaauauauaca

SEQ ID NO: 215723 - RNA, 19 nt, Artificial Sequence
  Description of Artificial Sequence: Synthetic oligonucleotide
acuugaacuuaaguugaug

SEQ ID NO: 215724 - RNA, 19 nt, Artificial Sequence
  Description of Artificial Sequence: Synthetic oligonucleotide
auaguaagugagugaugga

SEQ ID NO: 215725 - RNA, 19 nt, Artificial Sequence
  Description of Artificial Sequence: Synthetic oligonucleotide
ucagccuaauagguugaag

SEQ ID NO: 215726 - RNA, 19 nt, Artificial Sequence
  Description of Artificial Sequence: Synthetic oligonucleotide
guaauauuggauucucuau

SEQ ID NO: 215727 - RNA, 19 nt, Artificial Sequence
  Description of Artificial Sequence: Synthetic oligonucleotide
gcgaagaacgaaaucuugg

SEQ ID NO: 215728 - RNA, 19 nt, Artificial Sequence
  Description of Artificial Sequence: Synthetic oligonucleotide
cuauuuccccuaacuaauc

SEQ ID NO: 215729 - RNA, 19 nt, Artificial Sequence
  Description of Artificial Sequence: Synthetic oligonucleotide
caguuccaacaguauauac

SEQ ID NO: 215730 - RNA, 19 nt, Artificial Sequence
  Description of Artificial Sequence: Synthetic oligonucleotide
aaccaauuaucuggaggca

SEQ ID NO: 215731 - RNA, 19 nt, Artificial Sequence
  Description of Artificial Sequence: Synthetic oligonucleotide
ugaagcaauucggacucga

SEQ ID NO: 215732 - RNA, 19 nt, Artificial Sequence
  Description of Artificial Sequence: Synthetic oligonucleotide
aauucggacucgaccuguc

SEQ ID NO: 215733 - RNA, 19 nt, Artificial Sequence
  Description of Artificial Sequence: Synthetic oligonucleotide
uucccacgacuuuagaaua

SEQ ID NO: 215734 - RNA, 19 nt, Artificial Sequence
  Description of Artificial Sequence: Synthetic oligonucleotide
uccgaucaguuuauugcaa

SEQ ID NO: 215735 - RNA, 19 nt, Artificial Sequence
  Description of Artificial Sequence: Synthetic oligonucleotide
gcuuacgagaaacagcaga

SEQ ID NO: 215736 - RNA, 19 nt, Artificial Sequence
  Description of Artificial Sequence: Synthetic oligonucleotide
guaagugagugauggaacu

SEQ ID NO: 215737 - RNA, 19 nt, Artificial Sequence
  Description of Artificial Sequence: Synthetic oligonucleotide
ugauguccgaucaguuuau

SEQ ID NO: 215738 - RNA, 19 nt, Artificial Sequence
  Description of Artificial Sequence: Synthetic oligonucleotide
cgauguaaacaaauaauuc

SEQ ID NO: 215739 - RNA, 19 nt, Artificial Sequence
  Description of Artificial Sequence: Synthetic oligonucleotide
aaauucguuuugaaccuua

SEQ ID NO: 215740 - RNA, 19 nt, Artificial Sequence
  Description of Artificial Sequence: Synthetic oligonucleotide
cauugaaaccgguguagca

SEQ ID NO: 215741 - RNA, 19 nt, Artificial Sequence
  Description of Artificial Sequence: Synthetic oligonucleotide
uggcgaagaacgaaaucuu

SEQ ID NO: 215742 - RNA, 19 nt, Artificial Sequence
  Description of Artificial Sequence: Synthetic oligonucleotide
acaucgaaugguuccguua

SEQ ID NO: 215743 - RNA, 19 nt, Artificial Sequence
  Description of Artificial Sequence: Synthetic oligonucleotide
accacuuaauggaauuaug

SEQ ID NO: 215744 - RNA, 19 nt, Artificial Sequence
  Description of Artificial Sequence: Synthetic oligonucleotide
acggaucucaaagauuccu

SEQ ID NO: 215745 - RNA, 19 nt, Artificial Sequence
  Description of Artificial Sequence: Synthetic oligonucleotide
aauucguuuugaaccuuaa

SEQ ID NO: 215746 - RNA, 19 nt, Artificial Sequence
  Description of Artificial Sequence: Synthetic oligonucleotide
guucccacgacuuuagaau

SEQ ID NO: 215747 - RNA, 19 nt, Artificial Sequence
  Description of Artificial Sequence: Synthetic oligonucleotide
uuacgggaauauauacauu

SEQ ID NO: 215748 - RNA, 19 nt, Artificial Sequence
  Description of Artificial Sequence: Synthetic oligonucleotide
cauggcgaagaacgaaauc

SEQ ID NO: 215749 - RNA, 19 nt, Artificial Sequence
  Description of Artificial Sequence: Synthetic oligonucleotide
cacuaacuugauguagaag

SEQ ID NO: 215750 - RNA, 19 nt, Artificial Sequence
  Description of Artificial Sequence: Synthetic oligonucleotide
cuguuaauauccauucccu

SEQ ID NO: 215751 - RNA, 19 nt, Artificial Sequence
  Description of Artificial Sequence: Synthetic oligonucleotide
gaaaccgaagauaucccua

SEQ ID NO: 215752 - RNA, 19 nt, Artificial Sequence
  Description of Artificial Sequence: Synthetic oligonucleotide
aaccgaagauaucccuaau

SEQ ID NO: 215753 - RNA, 19 nt, Artificial Sequence
  Description of Artificial Sequence: Synthetic oligonucleotide
uaugccugaugagcaaagu

SEQ ID NO: 215754 - RNA, 19 nt, Artificial Sequence
  Description of Artificial Sequence: Synthetic oligonucleotide
cacgacuuuagaauaggua

SEQ ID NO: 215755 - RNA, 19 nt, Artificial Sequence
  Description of Artificial Sequence: Synthetic oligonucleotide
ugaaaccgguguagcacuc

SEQ ID NO: 215756 - RNA, 19 nt, Artificial Sequence
  Description of Artificial Sequence: Synthetic oligonucleotide
cuccggauugggaaaauaa

SEQ ID NO: 215757 - RNA, 19 nt, Artificial Sequence
  Description of Artificial Sequence: Synthetic oligonucleotide
gaagcaauucggacucgac

SEQ ID NO: 215758 - RNA, 19 nt, Artificial Sequence
  Description of Artificial Sequence: Synthetic oligonucleotide
gguagggacaaagaugaca

SEQ ID NO: 215759 - RNA, 19 nt, Artificial Sequence
  Description of Artificial Sequence: Synthetic oligonucleotide
cccucaaccacuuaaugga

SEQ ID NO: 215760 - RNA, 19 nt, Artificial Sequence
  Description of Artificial Sequence: Synthetic oligonucleotide
ccgcuuacgagaaacagca

SEQ ID NO: 215761 - RNA, 19 nt, Artificial Sequence
  Description of Artificial Sequence: Synthetic oligonucleotide
acccaguuccaacaguaua

SEQ ID NO: 215762 - RNA, 19 nt, Artificial Sequence
  Description of Artificial Sequence: Synthetic oligonucleotide
acggcauacacggucugug

SEQ ID NO: 215763 - RNA, 19 nt, Artificial Sequence
  Description of Artificial Sequence: Synthetic oligonucleotide
gugagugauggaacuccgg

SEQ ID NO: 215764 - RNA, 19 nt, Artificial Sequence
  Description of Artificial Sequence: Synthetic oligonucleotide
cauuugaacccaagaccca

SEQ ID NO: 215765 - RNA, 19 nt, Artificial Sequence
  Description of Artificial Sequence: Synthetic oligonucleotide
gcggacaacaaggagaaga

SEQ ID NO: 215766 - RNA, 19 nt, Artificial Sequence
  Description of Artificial Sequence: Synthetic oligonucleotide
agaaacuuacgggaauaua

SEQ ID NO: 215767 - RNA, 19 nt, Artificial Sequence
  Description of Artificial Sequence: Synthetic oligonucleotide
  modified_base (17)..(17): a, c, u, g, unknown or other
cacauauacaagacugngu

SEQ ID NO: 215768 - RNA, 19 nt, Artificial Sequence
  Description of Artificial Sequence: Synthetic oligonucleotide
guaacguggccugcaauga

SEQ ID NO: 215769 - RNA, 19 nt, Artificial Sequence
  Description of Artificial Sequence: Synthetic oligonucleotide
accauacaccguuaacaua

SEQ ID NO: 215770 - RNA, 19 nt, Artificial Sequence
  Description of Artificial Sequence: Synthetic oligonucleotide
gacuaugaauuuagccaca

SEQ ID NO: 215771 - RNA, 19 nt, Artificial Sequence
  Description of Artificial Sequence: Synthetic oligonucleotide
uggagacauuuacacuaua

SEQ ID NO: 215772 - RNA, 19 nt, Artificial Sequence
  Description of Artificial Sequence: Synthetic oligonucleotide
gccugaugagcaaaguacc

SEQ ID NO: 215773 - RNA, 19 nt, Artificial Sequence
  Description of Artificial Sequence: Synthetic oligonucleotide
aaccuauuugguaccucaa

SEQ ID NO: 215774 - RNA, 19 nt, Artificial Sequence
  Description of Artificial Sequence: Synthetic oligonucleotide
uaaguacaaccauguugua

SEQ ID NO: 215775 - RNA, 19 nt, Artificial Sequence
  Description of Artificial Sequence: Synthetic oligonucleotide
caccguuaacauacaauaa

SEQ ID NO: 215776 - RNA, 19 nt, Artificial Sequence
  Description of Artificial Sequence: Synthetic oligonucleotide
ccuaauagguugaagacau

SEQ ID NO: 215777 - RNA, 19 nt, Artificial Sequence
  Description of Artificial Sequence: Synthetic oligonucleotide
cuuacugcaugggaaaccu

SEQ ID NO: 215778 - RNA, 19 nt, Artificial Sequence
  Description of Artificial Sequence: Synthetic oligonucleotide
ccucuaacaguacagugga

SEQ ID NO: 215779 - RNA, 19 nt, Artificial Sequence
  Description of Artificial Sequence: Synthetic oligonucleotide
augaagcaauucggacucg

SEQ ID NO: 215780 - RNA, 19 nt, Artificial Sequence
  Description of Artificial Sequence: Synthetic oligonucleotide
cgacuuuagaauagguaug

SEQ ID NO: 215781 - RNA, 19 nt, Artificial Sequence
  Description of Artificial Sequence: Synthetic oligonucleotide
guuccguuaggcacauuca

SEQ ID NO: 215782 - RNA, 19 nt, Artificial Sequence
  Description of Artificial Sequence: Synthetic oligonucleotide
caggauuggcacggcauac

SEQ ID NO: 215783 - RNA, 19 nt, Artificial Sequence
  Description of Artificial Sequence: Synthetic oligonucleotide
ggcgaagaacgaaaucuug

SEQ ID NO: 215784 - RNA, 19 nt, Artificial Sequence
  Description of Artificial Sequence: Synthetic oligonucleotide
cggauugggaaaauaacca

SEQ ID NO: 215785 - RNA, 19 nt, Artificial Sequence
  Description of Artificial Sequence: Synthetic oligonucleotide
gcuuuacggaguuuaucga

SEQ ID NO: 215786 - RNA, 19 nt, Artificial Sequence
  Description of Artificial Sequence: Synthetic oligonucleotide
acuaugccgcuuacgagaa

SEQ ID NO: 215787 - RNA, 19 nt, Artificial Sequence
  Description of Artificial Sequence: Synthetic oligonucleotide
gagugauggaacuccggau

SEQ ID NO: 215788 - RNA, 19 nt, Artificial Sequence
  Description of Artificial Sequence: Synthetic oligonucleotide
auguuauauuagaucuuaa

SEQ ID NO: 215789 - RNA, 19 nt, Artificial Sequence
  Description of Artificial Sequence: Synthetic oligonucleotide
gcugcucuauaaauaguac

SEQ ID NO: 215790 - RNA, 19 nt, Artificial Sequence
  Description of Artificial Sequence: Synthetic oligonucleotide
ggauuaaugcugcucuaua

SEQ ID NO: 215791 - RNA, 19 nt, Artificial Sequence
  Description of Artificial Sequence: Synthetic oligonucleotide
uucagccuaauagguugaa

SEQ ID NO: 215792 - RNA, 19 nt, Artificial Sequence
  Description of Artificial Sequence: Synthetic oligonucleotide
gccuaauagguugaagaca

SEQ ID NO: 215793 - RNA, 19 nt, Artificial Sequence
  Description of Artificial Sequence: Synthetic oligonucleotide
ccuuaaguguuggaauuug

SEQ ID NO: 215794 - RNA, 19 nt, Artificial Sequence
  Description of Artificial Sequence: Synthetic oligonucleotide
gcaauucggacucgaccug

SEQ ID NO: 215795 - RNA, 19 nt, Artificial Sequence
  Description of Artificial Sequence: Synthetic oligonucleotide
caccacuaugccgcuuacg

SEQ ID NO: 215796 - RNA, 19 nt, Artificial Sequence
  Description of Artificial Sequence: Synthetic oligonucleotide
ggaacuccggauugggaaa

SEQ ID NO: 215797 - RNA, 19 nt, Artificial Sequence
  Description of Artificial Sequence: Synthetic oligonucleotide
gaacgaaaucuuggacaca

SEQ ID NO: 215798 - RNA, 19 nt, Artificial Sequence
  Description of Artificial Sequence: Synthetic oligonucleotide
cugccgaugcaccaaugaa

SEQ ID NO: 215799 - RNA, 19 nt, Artificial Sequence
  Description of Artificial Sequence: Synthetic oligonucleotide
ccaagcuucaaaguaaugu

SEQ ID NO: 215800 - RNA, 19 nt, Artificial Sequence
  Description of Artificial Sequence: Synthetic oligonucleotide
ucgugguuuugcuguuaau

SEQ ID NO: 215801 - RNA, 19 nt, Artificial Sequence
  Description of Artificial Sequence: Synthetic oligonucleotide
gguaagcaugcaguuggac

SEQ ID NO: 215802 - RNA, 19 nt, Artificial Sequence
  Description of Artificial Sequence: Synthetic oligonucleotide
gcugccgaugcaccaauga

SEQ ID NO: 215803 - RNA, 19 nt, Artificial Sequence
  Description of Artificial Sequence: Synthetic oligonucleotide
cccacgacuuuagaauagg

SEQ ID NO: 215804 - RNA, 19 nt, Artificial Sequence
  Description of Artificial Sequence: Synthetic oligonucleotide
cacuugcuucccucaacca

SEQ ID NO: 215805 - RNA, 19 nt, Artificial Sequence
  Description of Artificial Sequence: Synthetic oligonucleotide
cguccauucucuggaaugg

SEQ ID NO: 215806 - RNA, 19 nt, Artificial Sequence
  Description of Artificial Sequence: Synthetic oligonucleotide
augcugcucuauaaauagu

SEQ ID NO: 215807 - RNA, 19 nt, Artificial Sequence
  Description of Artificial Sequence: Synthetic oligonucleotide
caagacucgugguuuugcu

SEQ ID NO: 215808 - RNA, 19 nt, Artificial Sequence
  Description of Artificial Sequence: Synthetic oligonucleotide
ccaauuaucuggaggcaaa

SEQ ID NO: 215809 - RNA, 19 nt, Artificial Sequence
  Description of Artificial Sequence: Synthetic oligonucleotide
augugcuccuaaagccaag

SEQ ID NO: 215810 - RNA, 19 nt, Artificial Sequence
  Description of Artificial Sequence: Synthetic oligonucleotide
acccaagacucgugguuuu

SEQ ID NO: 215811 - RNA, 19 nt, Artificial Sequence
  Description of Artificial Sequence: Synthetic oligonucleotide
cuaauagguugaagacaua

SEQ ID NO: 215812 - RNA, 19 nt, Artificial Sequence
  Description of Artificial Sequence: Synthetic oligonucleotide
ccguuaacauacaauaaau

SEQ ID NO: 215813 - RNA, 19 nt, Artificial Sequence
  Description of Artificial Sequence: Synthetic oligonucleotide
ugguacugugagggugaca

SEQ ID NO: 215814 - RNA, 19 nt, Artificial Sequence
  Description of Artificial Sequence: Synthetic oligonucleotide
gcugcggccuuucagcucu

SEQ ID NO: 215815 - RNA, 19 nt, Artificial Sequence
  Description of Artificial Sequence: Synthetic oligonucleotide
acuccggauugggaaaaua

SEQ ID NO: 215816 - RNA, 19 nt, Artificial Sequence
  Description of Artificial Sequence: Synthetic oligonucleotide
augccgcuuacgagaaaca

SEQ ID NO: 215817 - RNA, 19 nt, Artificial Sequence
  Description of Artificial Sequence: Synthetic oligonucleotide
guacccaauccaaaacaau

SEQ ID NO: 215818 - RNA, 19 nt, Artificial Sequence
  Description of Artificial Sequence: Synthetic oligonucleotide
ccgguguagcacuccuugc

SEQ ID NO: 215819 - RNA, 19 nt, Artificial Sequence
  Description of Artificial Sequence: Synthetic oligonucleotide
aaccgguguagcacuccuu

SEQ ID NO: 215820 - RNA, 19 nt, Artificial Sequence
  Description of Artificial Sequence: Synthetic oligonucleotide
ggacucgaccuguccauaa

SEQ ID NO: 215821 - RNA, 19 nt, Artificial Sequence
  Description of Artificial Sequence: Synthetic oligonucleotide
agcggacaacaaggagaag

SEQ ID NO: 215822 - RNA, 19 nt, Artificial Sequence
  Description of Artificial Sequence: Synthetic oligonucleotide
ccgaucaguuuauugcaaa

SEQ ID NO: 215823 - RNA, 19 nt, Artificial Sequence
  Description of Artificial Sequence: Synthetic oligonucleotide
augguuccguuaggcacau

SEQ ID NO: 215824 - RNA, 19 nt, Artificial Sequence
  Description of Artificial Sequence: Synthetic oligonucleotide
caauucggacucgaccugu

SEQ ID NO: 215825 - RNA, 19 nt, Artificial Sequence
  Description of Artificial Sequence: Synthetic oligonucleotide
gacccaguuccaacaguau

SEQ ID NO: 215826 - RNA, 19 nt, Artificial Sequence
  Description of Artificial Sequence: Synthetic oligonucleotide
gcacggcauacacggucug

SEQ ID NO: 215827 - RNA, 19 nt, Artificial Sequence
  Description of Artificial Sequence: Synthetic oligonucleotide
cccuaacacacagauaagu

SEQ ID NO: 215828 - RNA, 19 nt, Artificial Sequence
  Description of Artificial Sequence: Synthetic oligonucleotide
gauguccgaucaguuuauu

SEQ ID NO: 215829 - RNA, 19 nt, Artificial Sequence
  Description of Artificial Sequence: Synthetic oligonucleotide
cuaugccgcuuacgagaaa

SEQ ID NO: 215830 - RNA, 19 nt, Artificial Sequence
  Description of Artificial Sequence: Synthetic oligonucleotide
ccaguuccaacaguauaua

SEQ ID NO: 215831 - RNA, 19 nt, Artificial Sequence
  Description of Artificial Sequence: Synthetic oligonucleotide
ccacgacuuuagaauaggu

SEQ ID NO: 215832 - RNA, 19 nt, Artificial Sequence
  Description of Artificial Sequence: Synthetic oligonucleotide
cacggcauacacggucugu

SEQ ID NO: 215833 - RNA, 19 nt, Artificial Sequence
  Description of Artificial Sequence: Synthetic oligonucleotide
cggcauacacggucuguga

SEQ ID NO: 215834 - RNA, 19 nt, Artificial Sequence
  Description of Artificial Sequence: Synthetic oligonucleotide
cggaucucaaagauuccuu

SEQ ID NO: 215835 - RNA, 19 nt, Artificial Sequence
  Description of Artificial Sequence: Synthetic oligonucleotide
cggacucgaccuguccaua

SEQ ID NO: 215836 - RNA, 19 nt, Artificial Sequence
  Description of Artificial Sequence: Synthetic oligonucleotide
aaaauaaacgaauauuggg

SEQ ID NO: 215837 - RNA, 19 nt, Artificial Sequence
  Description of Artificial Sequence: Synthetic oligonucleotide
uguuaggucaacaacaagg

SEQ ID NO: 215838 - RNA, 19 nt, Artificial Sequence
  Description of Artificial Sequence: Synthetic oligonucleotide
auaauuucaaccucgacag

SEQ ID NO: 215839 - RNA, 19 nt, Artificial Sequence
  Description of Artificial Sequence: Synthetic oligonucleotide
agauaaauagaucugagca

SEQ ID NO: 215840 - RNA, 19 nt, Artificial Sequence
  Description of Artificial Sequence: Synthetic oligonucleotide
auaguuauuagauagugca

SEQ ID NO: 215841 - RNA, 19 nt, Artificial Sequence
  Description of Artificial Sequence: Synthetic oligonucleotide
ugaguaaauaauauucuag

SEQ ID NO: 215842 - RNA, 19 nt, Artificial Sequence
  Description of Artificial Sequence: Synthetic oligonucleotide
cacaauaguuauuagauag

SEQ ID NO: 215843 - RNA, 19 nt, Artificial Sequence
  Description of Artificial Sequence: Synthetic oligonucleotide
gauaauuucaaccucgaca

SEQ ID NO: 215844 - RNA, 19 nt, Artificial Sequence
  Description of Artificial Sequence: Synthetic oligonucleotide
aaaucuguauuguuagguc

SEQ ID NO: 215845 - RNA, 19 nt, Artificial Sequence
  Description of Artificial Sequence: Synthetic oligonucleotide
uuggauaauuucaaccucg

SEQ ID NO: 215846 - RNA, 19 nt, Artificial Sequence
  Description of Artificial Sequence: Synthetic oligonucleotide
uaagauacgagacauuuaa

SEQ ID NO: 215847 - RNA, 19 nt, Artificial Sequence
  Description of Artificial Sequence: Synthetic oligonucleotide
aaauaaacgaauauuggga

SEQ ID NO: 215848 - RNA, 19 nt, Artificial Sequence
  Description of Artificial Sequence: Synthetic oligonucleotide
aauaaacgaauauugggaa

SEQ ID NO: 215849 - RNA, 19 nt, Artificial Sequence
  Description of Artificial Sequence: Synthetic oligonucleotide
uaccaagcuaauaagauac

SEQ ID NO: 215850 - RNA, 19 nt, Artificial Sequence
  Description of Artificial Sequence: Synthetic oligonucleotide
uuugagauaaauagaucug

SEQ ID NO: 215851 - RNA, 19 nt, Artificial Sequence
  Description of Artificial Sequence: Synthetic oligonucleotide
aguaaauaauauucuagug

SEQ ID NO: 215852 - RNA, 19 nt, Artificial Sequence
  Description of Artificial Sequence: Synthetic oligonucleotide
uuagauagugcaaaagggu

SEQ ID NO: 215853 - RNA, 19 nt, Artificial Sequence
  Description of Artificial Sequence: Synthetic oligonucleotide
uuguccuuuauucauauaa

SEQ ID NO: 215854 - RNA, 19 nt, Artificial Sequence
  Description of Artificial Sequence: Synthetic oligonucleotide
uaccauauaauuuaaggau

SEQ ID NO: 215855 - RNA, 19 nt, Artificial Sequence
  Description of Artificial Sequence: Synthetic oligonucleotide
uaggucaacaacaagguuc

SEQ ID NO: 215856 - RNA, 19 nt, Artificial Sequence
  Description of Artificial Sequence: Synthetic oligonucleotide
agcucgaccaaacuuuucc

SEQ ID NO: 215857 - RNA, 19 nt, Artificial Sequence
  Description of Artificial Sequence: Synthetic oligonucleotide
auuagauagugcaaaaggg

SEQ ID NO: 215858 - RNA, 19 nt, Artificial Sequence
  Description of Artificial Sequence: Synthetic oligonucleotide
auaccauauaauuuaagga

SEQ ID NO: 215859 - RNA, 19 nt, Artificial Sequence
  Description of Artificial Sequence: Synthetic oligonucleotide
ugcaccuaaagacuaagug

SEQ ID NO: 215860 - RNA, 19 nt, Artificial Sequence
  Description of Artificial Sequence: Synthetic oligonucleotide
uuugaauccauacgcguug

SEQ ID NO: 215861 - RNA, 19 nt, Artificial Sequence
  Description of Artificial Sequence: Synthetic oligonucleotide
auauaauggguagaaaguc

SEQ ID NO: 215862 - RNA, 19 nt, Artificial Sequence
  Description of Artificial Sequence: Synthetic oligonucleotide
uaaacgaauauugggaaug

SEQ ID NO: 215863 - RNA, 19 nt, Artificial Sequence
  Description of Artificial Sequence: Synthetic oligonucleotide
auaauggguagaaagucgc

SEQ ID NO: 215864 - RNA, 19 nt, Artificial Sequence
  Description of Artificial Sequence: Synthetic oligonucleotide
cuaaagacuaagugguucc

SEQ ID NO: 215865 - RNA, 19 nt, Artificial Sequence
  Description of Artificial Sequence: Synthetic oligonucleotide
uuagaaaccguguuuuaca

SEQ ID NO: 215866 - RNA, 19 nt, Artificial Sequence
  Description of Artificial Sequence: Synthetic oligonucleotide
acuaagugguuccaacuac

SEQ ID NO: 215867 - RNA, 19 nt, Artificial Sequence
  Description of Artificial Sequence: Synthetic oligonucleotide
auuggauaauuucaaccuc

SEQ ID NO: 215868 - RNA, 19 nt, Artificial Sequence
  Description of Artificial Sequence: Synthetic oligonucleotide
uacgagacauuuaauuaag

SEQ ID NO: 215869 - RNA, 19 nt, Artificial Sequence
  Description of Artificial Sequence: Synthetic oligonucleotide
gauuuugaauccauacgcg

SEQ ID NO: 215870 - RNA, 19 nt, Artificial Sequence
  Description of Artificial Sequence: Synthetic oligonucleotide
cauggaauuaccugcacac

SEQ ID NO: 215871 - RNA, 19 nt, Artificial Sequence
  Description of Artificial Sequence: Synthetic oligonucleotide
uaaccuacuaaaaggauua

SEQ ID NO: 215872 - RNA, 19 nt, Artificial Sequence
  Description of Artificial Sequence: Synthetic oligonucleotide
uucacugacacacaauuua

SEQ ID NO: 215873 - RNA, 19 nt, Artificial Sequence
  Description of Artificial Sequence: Synthetic oligonucleotide
caagcuaauaagauacgag

SEQ ID NO: 215874 - RNA, 19 nt, Artificial Sequence
  Description of Artificial Sequence: Synthetic oligonucleotide
uuaaggauacuaagaguug

SEQ ID NO: 215875 - RNA, 19 nt, Artificial Sequence
  Description of Artificial Sequence: Synthetic oligonucleotide
ugcgcuuucuagaaaagga

SEQ ID NO: 215876 - RNA, 19 nt, Artificial Sequence
  Description of Artificial Sequence: Synthetic oligonucleotide
gaaaccguguuuuacaaaa

SEQ ID NO: 215877 - RNA, 19 nt, Artificial Sequence
  Description of Artificial Sequence: Synthetic oligonucleotide
aaucgcuucaaauauccuu

SEQ ID NO: 215878 - RNA, 19 nt, Artificial Sequence
  Description of Artificial Sequence: Synthetic oligonucleotide
guuggaaaugcguuugcgg

SEQ ID NO: 215879 - RNA, 19 nt, Artificial Sequence
  Description of Artificial Sequence: Synthetic oligonucleotide
uccuuguauacuaugcaca

SEQ ID NO: 215880 - RNA, 19 nt, Artificial Sequence
  Description of Artificial Sequence: Synthetic oligonucleotide
uagguaaacccuaaccuac

SEQ ID NO: 215881 - RNA, 19 nt, Artificial Sequence
  Description of Artificial Sequence: Synthetic oligonucleotide
agcuaauaagauacgagac

SEQ ID NO: 215882 - RNA, 19 nt, Artificial Sequence
  Description of Artificial Sequence: Synthetic oligonucleotide
ucggugggaaauuucauug

SEQ ID NO: 215883 - RNA, 19 nt, Artificial Sequence
  Description of Artificial Sequence: Synthetic oligonucleotide
aauuucaaccucgacagaa

SEQ ID NO: 215884 - RNA, 19 nt, Artificial Sequence
  Description of Artificial Sequence: Synthetic oligonucleotide
uuggaaaugcguuugcggu

SEQ ID NO: 215885 - RNA, 19 nt, Artificial Sequence
  Description of Artificial Sequence: Synthetic oligonucleotide
cuauugucccugaaaaccc

SEQ ID NO: 215886 - RNA, 19 nt, Artificial Sequence
  Description of Artificial Sequence: Synthetic oligonucleotide
uguauacuaugcacacugg

SEQ ID NO: 215887 - RNA, 19 nt, Artificial Sequence
  Description of Artificial Sequence: Synthetic oligonucleotide
aaacgaauauugggaaugg

SEQ ID NO: 215888 - RNA, 19 nt, Artificial Sequence
  Description of Artificial Sequence: Synthetic oligonucleotide
gauggcuacaucaagguga

SEQ ID NO: 215889 - RNA, 19 nt, Artificial Sequence
  Description of Artificial Sequence: Synthetic oligonucleotide
cuuugagauaaauagaucu

SEQ ID NO: 215890 - RNA, 19 nt, Artificial Sequence
  Description of Artificial Sequence: Synthetic oligonucleotide
gauacuaagaguuggcgua

SEQ ID NO: 215891 - RNA, 19 nt, Artificial Sequence
  Description of Artificial Sequence: Synthetic oligonucleotide
uuagagcacuguuucacag

SEQ ID NO: 215892 - RNA, 19 nt, Artificial Sequence
  Description of Artificial Sequence: Synthetic oligonucleotide
aggaauaucccgcaauucu

SEQ ID NO: 215893 - RNA, 19 nt, Artificial Sequence
  Description of Artificial Sequence: Synthetic oligonucleotide
agauacgagacauuuaauu

SEQ ID NO: 215894 - RNA, 19 nt, Artificial Sequence
  Description of Artificial Sequence: Synthetic oligonucleotide
gcaccuaaagacuaagugg

SEQ ID NO: 215895 - RNA, 19 nt, Artificial Sequence
  Description of Artificial Sequence: Synthetic oligonucleotide
uagauagugcaaaagggua

SEQ ID NO: 215896 - RNA, 19 nt, Artificial Sequence
  Description of Artificial Sequence: Synthetic oligonucleotide
aacgaauauugggaauggc

SEQ ID NO: 215897 - RNA, 19 nt, Artificial Sequence
  Description of Artificial Sequence: Synthetic oligonucleotide
aagcgaucagccuuggcca

SEQ ID NO: 215898 - RNA, 19 nt, Artificial Sequence
  Description of Artificial Sequence: Synthetic oligonucleotide
accacuauagcucuacuau

SEQ ID NO: 215899 - RNA, 19 nt, Artificial Sequence
  Description of Artificial Sequence: Synthetic oligonucleotide
auacgagacauuuaauuaa

SEQ ID NO: 215900 - RNA, 19 nt, Artificial Sequence
  Description of Artificial Sequence: Synthetic oligonucleotide
cucgacaauucuuagagca

SEQ ID NO: 215901 - RNA, 19 nt, Artificial Sequence
  Description of Artificial Sequence: Synthetic oligonucleotide
ugugauuggucgcucccgg

SEQ ID NO: 215902 - RNA, 19 nt, Artificial Sequence
  Description of Artificial Sequence: Synthetic oligonucleotide
ucuugcuuaccacuauagc

SEQ ID NO: 215903 - RNA, 19 nt, Artificial Sequence
  Description of Artificial Sequence: Synthetic oligonucleotide
cuaagugguuccaacuacc

SEQ ID NO: 215904 - RNA, 19 nt, Artificial Sequence
  Description of Artificial Sequence: Synthetic oligonucleotide
cacuagguaaacccuaacc

SEQ ID NO: 215905 - RNA, 19 nt, Artificial Sequence
  Description of Artificial Sequence: Synthetic oligonucleotide
uaucccgcaauucuucaug

SEQ ID NO: 215906 - RNA, 19 nt, Artificial Sequence
  Description of Artificial Sequence: Synthetic oligonucleotide
caauaguuauuagauagug

SEQ ID NO: 215907 - RNA, 19 nt, Artificial Sequence
  Description of Artificial Sequence: Synthetic oligonucleotide
guaaugauuaauccugcuc

SEQ ID NO: 215908 - RNA, 19 nt, Artificial Sequence
  Description of Artificial Sequence: Synthetic oligonucleotide
agucgcuaugcuuucaaug

SEQ ID NO: 215909 - RNA, 19 nt, Artificial Sequence
  Description of Artificial Sequence: Synthetic oligonucleotide
gucaacaacaagguucugg

SEQ ID NO: 215910 - RNA, 19 nt, Artificial Sequence
  Description of Artificial Sequence: Synthetic oligonucleotide
guauacuaugcacacuggc

SEQ ID NO: 215911 - RNA, 19 nt, Artificial Sequence
  Description of Artificial Sequence: Synthetic oligonucleotide
acauuauuuagaaaccgug

SEQ ID NO: 215912 - RNA, 19 nt, Artificial Sequence
  Description of Artificial Sequence: Synthetic oligonucleotide
caauuuagugaguaaauaa

SEQ ID NO: 215913 - RNA, 19 nt, Artificial Sequence
  Description of Artificial Sequence: Synthetic oligonucleotide
uuuugaauccauacgcguu

SEQ ID NO: 215914 - RNA, 19 nt, Artificial Sequence
  Description of Artificial Sequence: Synthetic oligonucleotide
auacuaugcacacuggcau

SEQ ID NO: 215915 - RNA, 19 nt, Artificial Sequence
  Description of Artificial Sequence: Synthetic oligonucleotide
uaggugacauuauuuagaa

SEQ ID NO: 215916 - RNA, 19 nt, Artificial Sequence
  Description of Artificial Sequence: Synthetic oligonucleotide
ugguaaugauuaauccugc

SEQ ID NO: 215917 - RNA, 19 nt, Artificial Sequence
  Description of Artificial Sequence: Synthetic oligonucleotide
aggucgucaaacucuccgc

SEQ ID NO: 215918 - RNA, 19 nt, Artificial Sequence
  Description of Artificial Sequence: Synthetic oligonucleotide
ugagcguaaagcugagacc

SEQ ID NO: 215919 - RNA, 19 nt, Artificial Sequence
  Description of Artificial Sequence: Synthetic oligonucleotide
ucuuagagcacuguuucac

SEQ ID NO: 215920 - RNA, 19 nt, Artificial Sequence
  Description of Artificial Sequence: Synthetic oligonucleotide
uuugugucggcgaucuugu

SEQ ID NO: 215921 - RNA, 19 nt, Artificial Sequence
  Description of Artificial Sequence: Synthetic oligonucleotide
ggcacauggaauuaccugc

SEQ ID NO: 215922 - RNA, 19 nt, Artificial Sequence
  Description of Artificial Sequence: Synthetic oligonucleotide
aauucuuagagcacuguuu

SEQ ID NO: 215923 - RNA, 19 nt, Artificial Sequence
  Description of Artificial Sequence: Synthetic oligonucleotide
uauuugauacuugacugaa

SEQ ID NO: 215924 - RNA, 19 nt, Artificial Sequence
  Description of Artificial Sequence: Synthetic oligonucleotide
uuacuuccauauaaugggu

SEQ ID NO: 215925 - RNA, 19 nt, Artificial Sequence
  Description of Artificial Sequence: Synthetic oligonucleotide
ucacucacaggugagagaa

SEQ ID NO: 215926 - RNA, 19 nt, Artificial Sequence
  Description of Artificial Sequence: Synthetic oligonucleotide
aggauuagauggaaaacag

SEQ ID NO: 215927 - RNA, 19 nt, Artificial Sequence
  Description of Artificial Sequence: Synthetic oligonucleotide
acgcguugccucuuugucc

SEQ ID NO: 215928 - RNA, 19 nt, Artificial Sequence
  Description of Artificial Sequence: Synthetic oligonucleotide
gcuaccauccgucaccugg

SEQ ID NO: 215929 - RNA, 19 nt, Artificial Sequence
  Description of Artificial Sequence: Synthetic oligonucleotide
uggauaauuucaaccucga

SEQ ID NO: 215930 - RNA, 19 nt, Artificial Sequence
  Description of Artificial Sequence: Synthetic oligonucleotide
aaacugagcucgaccaaac

SEQ ID NO: 215931 - RNA, 19 nt, Artificial Sequence
  Description of Artificial Sequence: Synthetic oligonucleotide
uacauaccauauaauuuaa

SEQ ID NO: 215932 - RNA, 19 nt, Artificial Sequence
  Description of Artificial Sequence: Synthetic oligonucleotide
uaugccugguacauaguaa

SEQ ID NO: 215933 - RNA, 19 nt, Artificial Sequence
  Description of Artificial Sequence: Synthetic oligonucleotide
gucgcuaugcuuucaauga

SEQ ID NO: 215934 - RNA, 19 nt, Artificial Sequence
  Description of Artificial Sequence: Synthetic oligonucleotide
ucuacuaugccugguacau

SEQ ID NO: 215935 - RNA, 19 nt, Artificial Sequence
  Description of Artificial Sequence: Synthetic oligonucleotide
agaccaggucgucaaacuc

SEQ ID NO: 215936 - RNA, 19 nt, Artificial Sequence
  Description of Artificial Sequence: Synthetic oligonucleotide
uuguuaggucaacaacaag

SEQ ID NO: 215937 - RNA, 19 nt, Artificial Sequence
  Description of Artificial Sequence: Synthetic oligonucleotide
ucaaccucgacagaaggau

SEQ ID NO: 215938 - RNA, 19 nt, Artificial Sequence
  Description of Artificial Sequence: Synthetic oligonucleotide
auaaacgaauauugggaau

SEQ ID NO: 215939 - RNA, 19 nt, Artificial Sequence
  Description of Artificial Sequence: Synthetic oligonucleotide
cuugcuuaccacuauagcu

SEQ ID NO: 215940 - RNA, 19 nt, Artificial Sequence
  Description of Artificial Sequence: Synthetic oligonucleotide
agacuaagugguuccaacu

SEQ ID NO: 215941 - RNA, 19 nt, Artificial Sequence
  Description of Artificial Sequence: Synthetic oligonucleotide
cucaagagauaagaguggc

SEQ ID NO: 215942 - RNA, 19 nt, Artificial Sequence
  Description of Artificial Sequence: Synthetic oligonucleotide
cauuggauaauuucaaccu

SEQ ID NO: 215943 - RNA, 19 nt, Artificial Sequence
  Description of Artificial Sequence: Synthetic oligonucleotide
uugaggaauaucccgcaau

SEQ ID NO: 215944 - RNA, 19 nt, Artificial Sequence
  Description of Artificial Sequence: Synthetic oligonucleotide
cauauaauggguagaaagu

SEQ ID NO: 215945 - RNA, 19 nt, Artificial Sequence
  Description of Artificial Sequence: Synthetic oligonucleotide
ucgacaauucuuagagcac

SEQ ID NO: 215946 - RNA, 19 nt, Artificial Sequence
  Description of Artificial Sequence: Synthetic oligonucleotide
acuagucccuccccacacc

SEQ ID NO: 215947 - RNA, 19 nt, Artificial Sequence
  Description of Artificial Sequence: Synthetic oligonucleotide
auacuaagaguuggcguac

SEQ ID NO: 215948 - RNA, 19 nt, Artificial Sequence
  Description of Artificial Sequence: Synthetic oligonucleotide
uauugucccugaaaacccu

SEQ ID NO: 215949 - RNA, 19 nt, Artificial Sequence
  Description of Artificial Sequence: Synthetic oligonucleotide
acgaauauugggaauggca

SEQ ID NO: 215950 - RNA, 19 nt, Artificial Sequence
  Description of Artificial Sequence: Synthetic oligonucleotide
agcucuccgaccaucaauc

SEQ ID NO: 215951 - RNA, 19 nt, Artificial Sequence
  Description of Artificial Sequence: Synthetic oligonucleotide
cagcucguguuuauguucc

SEQ ID NO: 215952 - RNA, 19 nt, Artificial Sequence
  Description of Artificial Sequence: Synthetic oligonucleotide
aggcaaguguaaugaaaag

SEQ ID NO: 215953 - RNA, 19 nt, Artificial Sequence
  Description of Artificial Sequence: Synthetic oligonucleotide
aauggguagaaagucgcua

SEQ ID NO: 215954 - RNA, 19 nt, Artificial Sequence
  Description of Artificial Sequence: Synthetic oligonucleotide
ugcuuaccacuauagcucu

SEQ ID NO: 215955 - RNA, 19 nt, Artificial Sequence
  Description of Artificial Sequence: Synthetic oligonucleotide
uguuaggaucgcucgcuug

SEQ ID NO: 215956 - RNA, 19 nt, Artificial Sequence
  Description of Artificial Sequence: Synthetic oligonucleotide
cauuguuaggaucgcucgc

SEQ ID NO: 215957 - RNA, 19 nt, Artificial Sequence
  Description of Artificial Sequence: Synthetic oligonucleotide
ucagacgucuauauacauu

SEQ ID NO: 215958 - RNA, 19 nt, Artificial Sequence
  Description of Artificial Sequence: Synthetic oligonucleotide
guuaggaucgcucgcuuga

SEQ ID NO: 215959 - RNA, 19 nt, Artificial Sequence
  Description of Artificial Sequence: Synthetic oligonucleotide
gcuaauaagauacgagaca

SEQ ID NO: 215960 - RNA, 19 nt, Artificial Sequence
  Description of Artificial Sequence: Synthetic oligonucleotide
uacuuccauauaaugggua

SEQ ID NO: 215961 - RNA, 19 nt, Artificial Sequence
  Description of Artificial Sequence: Synthetic oligonucleotide
ucucgacaauucuuagagc

SEQ ID NO: 215962 - RNA, 19 nt, Artificial Sequence
  Description of Artificial Sequence: Synthetic oligonucleotide
aagugguuccaacuaccaa

SEQ ID NO: 215963 - RNA, 19 nt, Artificial Sequence
  Description of Artificial Sequence: Synthetic oligonucleotide
acaauaguuauuagauagu

SEQ ID NO: 215964 - RNA, 19 nt, Artificial Sequence
  Description of Artificial Sequence: Synthetic oligonucleotide
caccuaaagacuaaguggu

SEQ ID NO: 215965 - RNA, 19 nt, Artificial Sequence
  Description of Artificial Sequence: Synthetic oligonucleotide
auuggucgcucccggcuac

SEQ ID NO: 215966 - RNA, 19 nt, Artificial Sequence
  Description of Artificial Sequence: Synthetic oligonucleotide
cauuauuuagaaaccgugu

SEQ ID NO: 215967 - RNA, 19 nt, Artificial Sequence
  Description of Artificial Sequence: Synthetic oligonucleotide
gacaauucuuagagcacug

SEQ ID NO: 215968 - RNA, 19 nt, Artificial Sequence
  Description of Artificial Sequence: Synthetic oligonucleotide
uuaggucaacaacaagguu

SEQ ID NO: 215969 - RNA, 19 nt, Artificial Sequence
  Description of Artificial Sequence: Synthetic oligonucleotide
aaagacuaagugguuccaa

SEQ ID NO: 215970 - RNA, 19 nt, Artificial Sequence
  Description of Artificial Sequence: Synthetic oligonucleotide
ccauuguuaggaucgcucg

SEQ ID NO: 215971 - RNA, 19 nt, Artificial Sequence
  Description of Artificial Sequence: Synthetic oligonucleotide
aaccuacuaaaaggauuag

SEQ ID NO: 215972 - RNA, 19 nt, Artificial Sequence
  Description of Artificial Sequence: Synthetic oligonucleotide
cuagguaaacccuaaccua

SEQ ID NO: 215973 - RNA, 19 nt, Artificial Sequence
  Description of Artificial Sequence: Synthetic oligonucleotide
gugcaaaaggguaauguuc

SEQ ID NO: 215974 - RNA, 19 nt, Artificial Sequence
  Description of Artificial Sequence: Synthetic oligonucleotide
aggucaacaacaagguucu

SEQ ID NO: 215975 - RNA, 19 nt, Artificial Sequence
  Description of Artificial Sequence: Synthetic oligonucleotide
uaauuucaaccucgacaga

SEQ ID NO: 215976 - RNA, 19 nt, Artificial Sequence
  Description of Artificial Sequence: Synthetic oligonucleotide
uaccacuauagcucuacua

SEQ ID NO: 215977 - RNA, 19 nt, Artificial Sequence
  Description of Artificial Sequence: Synthetic oligonucleotide
aggaucgcucgcuugauuu

SEQ ID NO: 215978 - RNA, 19 nt, Artificial Sequence
  Description of Artificial Sequence: Synthetic oligonucleotide
ugucuugcuuaccacuaua

SEQ ID NO: 215979 - RNA, 19 nt, Artificial Sequence
  Description of Artificial Sequence: Synthetic oligonucleotide
gaucccuugccaucugcac

SEQ ID NO: 215980 - RNA, 19 nt, Artificial Sequence
  Description of Artificial Sequence: Synthetic oligonucleotide
aaaugcguuugcgguuccg

SEQ ID NO: 215981 - RNA, 19 nt, Artificial Sequence
  Description of Artificial Sequence: Synthetic oligonucleotide
ccgaccaucaaucacugac

SEQ ID NO: 215982 - RNA, 19 nt, Artificial Sequence
  Description of Artificial Sequence: Synthetic oligonucleotide
acauaccauauaauuuaag

SEQ ID NO: 215983 - RNA, 19 nt, Artificial Sequence
  Description of Artificial Sequence: Synthetic oligonucleotide
uuaccacuauagcucuacu

SEQ ID NO: 215984 - RNA, 19 nt, Artificial Sequence
  Description of Artificial Sequence: Synthetic oligonucleotide
accaaacuuuuccugcuau

SEQ ID NO: 215985 - RNA, 19 nt, Artificial Sequence
  Description of Artificial Sequence: Synthetic oligonucleotide
ccuuguauacuaugcacac

SEQ ID NO: 215986 - RNA, 19 nt, Artificial Sequence
  Description of Artificial Sequence: Synthetic oligonucleotide
aguucuagucaggccaaag

SEQ ID NO: 215987 - RNA, 19 nt, Artificial Sequence
  Description of Artificial Sequence: Synthetic oligonucleotide
cugcgcuuucuagaaaagg

SEQ ID NO: 215988 - RNA, 19 nt, Artificial Sequence
  Description of Artificial Sequence: Synthetic oligonucleotide
ucgcuaugcuuucaaugaa

SEQ ID NO: 215989 - RNA, 19 nt, Artificial Sequence
  Description of Artificial Sequence: Synthetic oligonucleotide
guaaacccuaaccuacuaa

SEQ ID NO: 215990 - RNA, 19 nt, Artificial Sequence
  Description of Artificial Sequence: Synthetic oligonucleotide
accaagcuaauaagauacg

SEQ ID NO: 215991 - RNA, 19 nt, Artificial Sequence
  Description of Artificial Sequence: Synthetic oligonucleotide
guuaggucaacaacaaggu

SEQ ID NO: 215992 - RNA, 19 nt, Artificial Sequence
  Description of Artificial Sequence: Synthetic oligonucleotide
auccauacgcguugccucu

SEQ ID NO: 215993 - RNA, 19 nt, Artificial Sequence
  Description of Artificial Sequence: Synthetic oligonucleotide
uggaaaugcguuugcgguu

SEQ ID NO: 215994 - RNA, 19 nt, Artificial Sequence
  Description of Artificial Sequence: Synthetic oligonucleotide
cuaccaagcuaauaagaua

SEQ ID NO: 215995 - RNA, 19 nt, Artificial Sequence
  Description of Artificial Sequence: Synthetic oligonucleotide
acucagacgucuauauaca

SEQ ID NO: 215996 - RNA, 19 nt, Artificial Sequence
  Description of Artificial Sequence: Synthetic oligonucleotide
aagauacgagacauuuaau

SEQ ID NO: 215997 - RNA, 19 nt, Artificial Sequence
  Description of Artificial Sequence: Synthetic oligonucleotide
cuaaccuacuaaaaggauu

SEQ ID NO: 215998 - RNA, 19 nt, Artificial Sequence
  Description of Artificial Sequence: Synthetic oligonucleotide
cuaagcauuauaguucaua

SEQ ID NO: 215999 - RNA, 19 nt, Artificial Sequence
  Description of Artificial Sequence: Synthetic oligonucleotide
acaauucuuagagcacugu

SEQ ID NO: 216000 - RNA, 19 nt, Artificial Sequence
  Description of Artificial Sequence: Synthetic oligonucleotide
caaccucgacagaaggaug

SEQ ID NO: 216001 - RNA, 19 nt, Artificial Sequence
  Description of Artificial Sequence: Synthetic oligonucleotide
agggcaaggggacaugcua

SEQ ID NO: 216002 - RNA, 19 nt, Artificial Sequence
  Description of Artificial Sequence: Synthetic oligonucleotide
ugcgguuccguuugaguuu

SEQ ID NO: 216003 - RNA, 19 nt, Artificial Sequence
  Description of Artificial Sequence: Synthetic oligonucleotide
gauguaggugacauuauuu

SEQ ID NO: 216004 - RNA, 19 nt, Artificial Sequence
  Description of Artificial Sequence: Synthetic oligonucleotide
aaacccuauuaaaguguga

SEQ ID NO: 216005 - RNA, 19 nt, Artificial Sequence
  Description of Artificial Sequence: Synthetic oligonucleotide
agcaucccuguagauacug

SEQ ID NO: 216006 - RNA, 19 nt, Artificial Sequence
  Description of Artificial Sequence: Synthetic oligonucleotide
ucguguuuauguuccucua

SEQ ID NO: 216007 - RNA, 19 nt, Artificial Sequence
  Description of Artificial Sequence: Synthetic oligonucleotide
cucaauuuagugaguaaau

SEQ ID NO: 216008 - RNA, 19 nt, Artificial Sequence
  Description of Artificial Sequence: Synthetic oligonucleotide
gaaaugcguuugcgguucc

SEQ ID NO: 216009 - RNA, 19 nt, Artificial Sequence
  Description of Artificial Sequence: Synthetic oligonucleotide
ccuacuaaaaggauuagau

SEQ ID NO: 216010 - RNA, 19 nt, Artificial Sequence
  Description of Artificial Sequence: Synthetic oligonucleotide
cuacuuacaccagcaccag

SEQ ID NO: 216011 - RNA, 19 nt, Artificial Sequence
  Description of Artificial Sequence: Synthetic oligonucleotide
ggcacuuagucagggacag

SEQ ID NO: 216012 - RNA, 19 nt, Artificial Sequence
  Description of Artificial Sequence: Synthetic oligonucleotide
gaucgcucgcuugauuuca

SEQ ID NO: 216013 - RNA, 19 nt, Artificial Sequence
  Description of Artificial Sequence: Synthetic oligonucleotide
cucuacuaugccugguaca

SEQ ID NO: 216014 - RNA, 19 nt, Artificial Sequence
  Description of Artificial Sequence: Synthetic oligonucleotide
cagaacgaaucgcuuccac

SEQ ID NO: 216015 - RNA, 19 nt, Artificial Sequence
  Description of Artificial Sequence: Synthetic oligonucleotide
cacacuggcauucuauugu

SEQ ID NO: 216016 - RNA, 19 nt, Artificial Sequence
  Description of Artificial Sequence: Synthetic oligonucleotide
ggauaauuucaaccucgac

SEQ ID NO: 216017 - RNA, 19 nt, Artificial Sequence
  Description of Artificial Sequence: Synthetic oligonucleotide
aauuaccugcacacaguuu

SEQ ID NO: 216018 - RNA, 19 nt, Artificial Sequence
  Description of Artificial Sequence: Synthetic oligonucleotide
uccaacuaccaagcuaaua

SEQ ID NO: 216019 - RNA, 19 nt, Artificial Sequence
  Description of Artificial Sequence: Synthetic oligonucleotide
cuauagcucuacuaugccu

SEQ ID NO: 216020 - RNA, 19 nt, Artificial Sequence
  Description of Artificial Sequence: Synthetic oligonucleotide
ccuaaagacuaagugguuc

SEQ ID NO: 216021 - RNA, 19 nt, Artificial Sequence
  Description of Artificial Sequence: Synthetic oligonucleotide
caguucuuugacuuuaaau

SEQ ID NO: 216022 - RNA, 19 nt, Artificial Sequence
  Description of Artificial Sequence: Synthetic oligonucleotide
uuguuaggaucgcucgcuu

SEQ ID NO: 216023 - RNA, 19 nt, Artificial Sequence
  Description of Artificial Sequence: Synthetic oligonucleotide
auaagauacgagacauuua

SEQ ID NO: 216024 - RNA, 19 nt, Artificial Sequence
  Description of Artificial Sequence: Synthetic oligonucleotide
gagggcgcugcuucugaac

SEQ ID NO: 216025 - RNA, 19 nt, Artificial Sequence
  Description of Artificial Sequence: Synthetic oligonucleotide
gagaccaggucgucaaacu

SEQ ID NO: 216026 - RNA, 19 nt, Artificial Sequence
  Description of Artificial Sequence: Synthetic oligonucleotide
uccucugagccagaacgaa

SEQ ID NO: 216027 - RNA, 19 nt, Artificial Sequence
  Description of Artificial Sequence: Synthetic oligonucleotide
auggcacauggaauuaccu

SEQ ID NO: 216028 - RNA, 19 nt, Artificial Sequence
  Description of Artificial Sequence: Synthetic oligonucleotide
ccacuauagcucuacuaug

SEQ ID NO: 216029 - RNA, 19 nt, Artificial Sequence
  Description of Artificial Sequence: Synthetic oligonucleotide
cccuaaccuacuaaaagga

SEQ ID NO: 216030 - RNA, 19 nt, Artificial Sequence
  Description of Artificial Sequence: Synthetic oligonucleotide
gugauuggucgcucccggc

SEQ ID NO: 216031 - RNA, 19 nt, Artificial Sequence
  Description of Artificial Sequence: Synthetic oligonucleotide
ggaaaugcguuugcgguuc

SEQ ID NO: 216032 - RNA, 19 nt, Artificial Sequence
  Description of Artificial Sequence: Synthetic oligonucleotide
acgagacauuuaauuaagu

SEQ ID NO: 216033 - RNA, 19 nt, Artificial Sequence
  Description of Artificial Sequence: Synthetic oligonucleotide
guuugcgguuccguuugag

SEQ ID NO: 216034 - RNA, 19 nt, Artificial Sequence
  Description of Artificial Sequence: Synthetic oligonucleotide
ugcagucuuugcugguaau

SEQ ID NO: 216035 - RNA, 19 nt, Artificial Sequence
  Description of Artificial Sequence: Synthetic oligonucleotide
agguaaacccuaaccuacu

SEQ ID NO: 216036 - RNA, 19 nt, Artificial Sequence
  Description of Artificial Sequence: Synthetic oligonucleotide
gauuggucgcucccggcua

SEQ ID NO: 216037 - RNA, 19 nt, Artificial Sequence
  Description of Artificial Sequence: Synthetic oligonucleotide
agaucccuugccaucugca

SEQ ID NO: 216038 - RNA, 19 nt, Artificial Sequence
  Description of Artificial Sequence: Synthetic oligonucleotide
aggcacuuagucagggaca

SEQ ID NO: 216039 - RNA, 19 nt, Artificial Sequence
  Description of Artificial Sequence: Synthetic oligonucleotide
uuaggaucgcucgcuugau

SEQ ID NO: 216040 - RNA, 19 nt, Artificial Sequence
  Description of Artificial Sequence: Synthetic oligonucleotide
cagcucucgacaauucuua

SEQ ID NO: 216041 - RNA, 19 nt, Artificial Sequence
  Description of Artificial Sequence: Synthetic oligonucleotide
gauaugcagcauggccuac

SEQ ID NO: 216042 - RNA, 19 nt, Artificial Sequence
  Description of Artificial Sequence: Synthetic oligonucleotide
uaggaucgcucgcuugauu

SEQ ID NO: 216043 - RNA, 19 nt, Artificial Sequence
  Description of Artificial Sequence: Synthetic oligonucleotide
cguguuuauguuccucuag

SEQ ID NO: 216044 - RNA, 19 nt, Artificial Sequence
  Description of Artificial Sequence: Synthetic oligonucleotide
gguaaugauuaauccugcu

SEQ ID NO: 216045 - RNA, 19 nt, Artificial Sequence
  Description of Artificial Sequence: Synthetic oligonucleotide
augcguuugcgguuccguu

SEQ ID NO: 216046 - RNA, 19 nt, Artificial Sequence
  Description of Artificial Sequence: Synthetic oligonucleotide
ccggcuaccauccgucacc

SEQ ID NO: 216047 - RNA, 19 nt, Artificial Sequence
  Description of Artificial Sequence: Synthetic oligonucleotide
uacacccaaugaagucauc

SEQ ID NO: 216048 - RNA, 19 nt, Artificial Sequence
  Description of Artificial Sequence: Synthetic oligonucleotide
agcguaaagcugagaccag

SEQ ID NO: 216049 - RNA, 19 nt, Artificial Sequence
  Description of Artificial Sequence: Synthetic oligonucleotide
aguuggcguacagguagcu

SEQ ID NO: 216050 - RNA, 19 nt, Artificial Sequence
  Description of Artificial Sequence: Synthetic oligonucleotide
aaguucuagucaggccaaa

SEQ ID NO: 216051 - RNA, 19 nt, Artificial Sequence
  Description of Artificial Sequence: Synthetic oligonucleotide
cauauaauuuaaggauacu

SEQ ID NO: 216052 - RNA, 19 nt, Artificial Sequence
  Description of Artificial Sequence: Synthetic oligonucleotide
cuuugcugguaaugauuaa

SEQ ID NO: 216053 - RNA, 19 nt, Artificial Sequence
  Description of Artificial Sequence: Synthetic oligonucleotide
agcucguguuuauguuccu

SEQ ID NO: 216054 - RNA, 19 nt, Artificial Sequence
  Description of Artificial Sequence: Synthetic oligonucleotide
caauucuuagagcacuguu

SEQ ID NO: 216055 - RNA, 19 nt, Artificial Sequence
  Description of Artificial Sequence: Synthetic oligonucleotide
ccaagcuaauaagauacga

SEQ ID NO: 216056 - RNA, 19 nt, Artificial Sequence
  Description of Artificial Sequence: Synthetic oligonucleotide
gguaaacccuaaccuacua

SEQ ID NO: 216057 - RNA, 19 nt, Artificial Sequence
  Description of Artificial Sequence: Synthetic oligonucleotide
acuaugccugguacauagu

SEQ ID NO: 216058 - RNA, 19 nt, Artificial Sequence
  Description of Artificial Sequence: Synthetic oligonucleotide
cucagacgucuauauacau

SEQ ID NO: 216059 - RNA, 19 nt, Artificial Sequence
  Description of Artificial Sequence: Synthetic oligonucleotide
cuuguauacuaugcacacu

SEQ ID NO: 216060 - RNA, 19 nt, Artificial Sequence
  Description of Artificial Sequence: Synthetic oligonucleotide
accuaaagacuaagugguu

SEQ ID NO: 216061 - RNA, 19 nt, Artificial Sequence
  Description of Artificial Sequence: Synthetic oligonucleotide
caccugguuggaaaugcgu

SEQ ID NO: 216062 - RNA, 19 nt, Artificial Sequence
  Description of Artificial Sequence: Synthetic oligonucleotide
ggaauuaccugcacacagu

SEQ ID NO: 216063 - RNA, 19 nt, Artificial Sequence
  Description of Artificial Sequence: Synthetic oligonucleotide
gcgguuccguuugaguuug

SEQ ID NO: 216064 - RNA, 19 nt, Artificial Sequence
  Description of Artificial Sequence: Synthetic oligonucleotide
gcuacaucaaggugaggau

SEQ ID NO: 216065 - RNA, 19 nt, Artificial Sequence
  Description of Artificial Sequence: Synthetic oligonucleotide
ggauguaggugacauuauu

SEQ ID NO: 216066 - RNA, 19 nt, Artificial Sequence
  Description of Artificial Sequence: Synthetic oligonucleotide
gucucauaacacacauaua

SEQ ID NO: 216067 - RNA, 19 nt, Artificial Sequence
  Description of Artificial Sequence: Synthetic oligonucleotide
acuaagcauuauaguucau

SEQ ID NO: 216068 - RNA, 19 nt, Artificial Sequence
  Description of Artificial Sequence: Synthetic oligonucleotide
gguuccguuugaguuugga

SEQ ID NO: 216069 - RNA, 19 nt, Artificial Sequence
  Description of Artificial Sequence: Synthetic oligonucleotide
ccacuagguaaacccuaac

SEQ ID NO: 216070 - RNA, 19 nt, Artificial Sequence
  Description of Artificial Sequence: Synthetic oligonucleotide
gucgucaaacucuccgcuu

SEQ ID NO: 216071 - RNA, 19 nt, Artificial Sequence
  Description of Artificial Sequence: Synthetic oligonucleotide
uccauacgcguugccucuu

SEQ ID NO: 216072 - RNA, 19 nt, Artificial Sequence
  Description of Artificial Sequence: Synthetic oligonucleotide
gcucuccgaccaucaauca

SEQ ID NO: 216073 - RNA, 19 nt, Artificial Sequence
  Description of Artificial Sequence: Synthetic oligonucleotide
gcucguguuuauguuccuc

SEQ ID NO: 216074 - RNA, 19 nt, Artificial Sequence
  Description of Artificial Sequence: Synthetic oligonucleotide
aucgcucgcuugauuucau

SEQ ID NO: 216075 - RNA, 19 nt, Artificial Sequence
  Description of Artificial Sequence: Synthetic oligonucleotide
cuacuaugccugguacaua

SEQ ID NO: 216076 - RNA, 19 nt, Artificial Sequence
  Description of Artificial Sequence: Synthetic oligonucleotide
gcgcuuucuagaaaaggau

SEQ ID NO: 216077 - RNA, 19 nt, Artificial Sequence
  Description of Artificial Sequence: Synthetic oligonucleotide
cccggcuaccauccgucac

SEQ ID NO: 216078 - RNA, 19 nt, Artificial Sequence
  Description of Artificial Sequence: Synthetic oligonucleotide
cauguaaauugaggacuuu

SEQ ID NO: 216079 - RNA, 19 nt, Artificial Sequence
  Description of Artificial Sequence: Synthetic oligonucleotide
ggcuaccauccgucaccug

SEQ ID NO: 216080 - RNA, 19 nt, Artificial Sequence
  Description of Artificial Sequence: Synthetic oligonucleotide
caucaaggugaggaugguu

SEQ ID NO: 216081 - RNA, 19 nt, Artificial Sequence
  Description of Artificial Sequence: Synthetic oligonucleotide
cgacaauucuuagagcacu

SEQ ID NO: 216082 - RNA, 19 nt, Artificial Sequence
  Description of Artificial Sequence: Synthetic oligonucleotide
ccagaacgaaucgcuucca

SEQ ID NO: 216083 - RNA, 19 nt, Artificial Sequence
  Description of Artificial Sequence: Synthetic oligonucleotide
gcuuuauuggagagccauu

SEQ ID NO: 216084 - RNA, 19 nt, Artificial Sequence
  Description of Artificial Sequence: Synthetic oligonucleotide
gcaucccuguagauacugu

SEQ ID NO: 216085 - RNA, 19 nt, Artificial Sequence
  Description of Artificial Sequence: Synthetic oligonucleotide
cgguuccguuugaguuugg

SEQ ID NO: 216086 - RNA, 19 nt, Artificial Sequence
  Description of Artificial Sequence: Synthetic oligonucleotide
ccauacgcguugccucuuu

SEQ ID NO: 216087 - RNA, 19 nt, Artificial Sequence
  Description of Artificial Sequence: Synthetic oligonucleotide
cggcuaccauccgucaccu

SEQ ID NO: 216088 - RNA, 19 nt, Artificial Sequence
  Description of Artificial Sequence: Synthetic oligonucleotide
gcguugccucuuuguccuu

SEQ ID NO: 216089 - RNA, 19 nt, Artificial Sequence
  Description of Artificial Sequence: Synthetic oligonucleotide
acuaggaaaagucaggugc

SEQ ID NO: 216090 - RNA, 19 nt, Artificial Sequence
  Description of Artificial Sequence: Synthetic oligonucleotide
aauaguuugucacucuuuc

SEQ ID NO: 216091 - RNA, 19 nt, Artificial Sequence
  Description of Artificial Sequence: Synthetic oligonucleotide
aaugucuuaauccuuagaa

SEQ ID NO: 216092 - RNA, 19 nt, Artificial Sequence
  Description of Artificial Sequence: Synthetic oligonucleotide
aaacaggugacuucauccc

SEQ ID NO: 216093 - RNA, 19 nt, Artificial Sequence
  Description of Artificial Sequence: Synthetic oligonucleotide
aauuaaggaaaacacgggu

SEQ ID NO: 216094 - RNA, 19 nt, Artificial Sequence
  Description of Artificial Sequence: Synthetic oligonucleotide
uauucuacccucaaggugu

SEQ ID NO: 216095 - RNA, 19 nt, Artificial Sequence
  Description of Artificial Sequence: Synthetic oligonucleotide
aaugcaacuagagggagcg

SEQ ID NO: 216096 - RNA, 19 nt, Artificial Sequence
  Description of Artificial Sequence: Synthetic oligonucleotide
ucuuucauugaucuuagga

SEQ ID NO: 216097 - RNA, 19 nt, Artificial Sequence
  Description of Artificial Sequence: Synthetic oligonucleotide
ugucuuaauccuuagaacu

SEQ ID NO: 216098 - RNA, 19 nt, Artificial Sequence
  Description of Artificial Sequence: Synthetic oligonucleotide
aaauaacugauauucgcca

SEQ ID NO: 216099 - RNA, 19 nt, Artificial Sequence
  Description of Artificial Sequence: Synthetic oligonucleotide
uaaugauugagaaaaugcu

SEQ ID NO: 216100 - RNA, 19 nt, Artificial Sequence
  Description of Artificial Sequence: Synthetic oligonucleotide
uuugcuaccacgcaguuau

SEQ ID NO: 216101 - RNA, 19 nt, Artificial Sequence
  Description of Artificial Sequence: Synthetic oligonucleotide
aacgcaacugcacaguuug

SEQ ID NO: 216102 - RNA, 19 nt, Artificial Sequence
  Description of Artificial Sequence: Synthetic oligonucleotide
ugacuggauaaccacaucc

SEQ ID NO: 216103 - RNA, 19 nt, Artificial Sequence
  Description of Artificial Sequence: Synthetic oligonucleotide
aaaaccacucgugacuggc

SEQ ID NO: 216104 - RNA, 19 nt, Artificial Sequence
  Description of Artificial Sequence: Synthetic oligonucleotide
gacuagaacaaacagguga

SEQ ID NO: 216105 - RNA, 19 nt, Artificial Sequence
  Description of Artificial Sequence: Synthetic oligonucleotide
uuacuuaauauagagauuu

SEQ ID NO: 216106 - RNA, 19 nt, Artificial Sequence
  Description of Artificial Sequence: Synthetic oligonucleotide
acuugaauguguucguaac

SEQ ID NO: 216107 - RNA, 19 nt, Artificial Sequence
  Description of Artificial Sequence: Synthetic oligonucleotide
cuacaugaaugaauuaagg

SEQ ID NO: 216108 - RNA, 19 nt, Artificial Sequence
  Description of Artificial Sequence: Synthetic oligonucleotide
auaugcuuauugcuuggcc

SEQ ID NO: 216109 - RNA, 19 nt, Artificial Sequence
  Description of Artificial Sequence: Synthetic oligonucleotide
cauaccaaauagcauacgc

SEQ ID NO: 216110 - RNA, 19 nt, Artificial Sequence
  Description of Artificial Sequence: Synthetic oligonucleotide
uugaucuuaggaauuuccc

SEQ ID NO: 216111 - RNA, 19 nt, Artificial Sequence
  Description of Artificial Sequence: Synthetic oligonucleotide
aggaggauuucucaagacg

SEQ ID NO: 216112 - RNA, 19 nt, Artificial Sequence
  Description of Artificial Sequence: Synthetic oligonucleotide
cuacaccugaagcagaucc

SEQ ID NO: 216113 - RNA, 19 nt, Artificial Sequence
  Description of Artificial Sequence: Synthetic oligonucleotide
aguccuagugcuuucacug

SEQ ID NO: 216114 - RNA, 19 nt, Artificial Sequence
  Description of Artificial Sequence: Synthetic oligonucleotide
uuguauacuaugaucugcu

SEQ ID NO: 216115 - RNA, 19 nt, Artificial Sequence
  Description of Artificial Sequence: Synthetic oligonucleotide
acuagaacaaacaggugac

SEQ ID NO: 216116 - RNA, 19 nt, Artificial Sequence
  Description of Artificial Sequence: Synthetic oligonucleotide
uucacagcucaaaauaacu

SEQ ID NO: 216117 - RNA, 19 nt, Artificial Sequence
  Description of Artificial Sequence: Synthetic oligonucleotide
guacuaaugcaacuagagg

SEQ ID NO: 216118 - RNA, 19 nt, Artificial Sequence
  Description of Artificial Sequence: Synthetic oligonucleotide
ugguuagucggaaugaaaa

SEQ ID NO: 216119 - RNA, 19 nt, Artificial Sequence
  Description of Artificial Sequence: Synthetic oligonucleotide
uauacuaugaucugcucuu

SEQ ID NO: 216120 - RNA, 19 nt, Artificial Sequence
  Description of Artificial Sequence: Synthetic oligonucleotide
uguaaugaaagucgguaau

SEQ ID NO: 216121 - RNA, 19 nt, Artificial Sequence
  Description of Artificial Sequence: Synthetic oligonucleotide
gaugggaauuccuaucuug

SEQ ID NO: 216122 - RNA, 19 nt, Artificial Sequence
  Description of Artificial Sequence: Synthetic oligonucleotide
uauuacuguaucuuuuggu

SEQ ID NO: 216123 - RNA, 19 nt, Artificial Sequence
  Description of Artificial Sequence: Synthetic oligonucleotide
uucgccaagacuaaacauc

SEQ ID NO: 216124 - RNA, 19 nt, Artificial Sequence
  Description of Artificial Sequence: Synthetic oligonucleotide
gacaacuaggaaaagucag

SEQ ID NO: 216125 - RNA, 19 nt, Artificial Sequence
  Description of Artificial Sequence: Synthetic oligonucleotide
uauucgccaagacuaaaca

SEQ ID NO: 216126 - RNA, 19 nt, Artificial Sequence
  Description of Artificial Sequence: Synthetic oligonucleotide
auuacuguaucuuuugguu

SEQ ID NO: 216127 - RNA, 19 nt, Artificial Sequence
  Description of Artificial Sequence: Synthetic oligonucleotide
ugcauguuugucacaacgc

SEQ ID NO: 216128 - RNA, 19 nt, Artificial Sequence
  Description of Artificial Sequence: Synthetic oligonucleotide
uccagacuacaccugaagc

SEQ ID NO: 216129 - RNA, 19 nt, Artificial Sequence
  Description of Artificial Sequence: Synthetic oligonucleotide
cuugugaccuccaggagag

SEQ ID NO: 216130 - RNA, 19 nt, Artificial Sequence
  Description of Artificial Sequence: Synthetic oligonucleotide
cugauauucgccaagacua

SEQ ID NO: 216131 - RNA, 19 nt, Artificial Sequence
  Description of Artificial Sequence: Synthetic oligonucleotide
caguacauggcuauauuac

SEQ ID NO: 216132 - RNA, 19 nt, Artificial Sequence
  Description of Artificial Sequence: Synthetic oligonucleotide
ucacuuugcuaccacgcag

SEQ ID NO: 216133 - RNA, 19 nt, Artificial Sequence
  Description of Artificial Sequence: Synthetic oligonucleotide
uguguucguaacaugaguu

SEQ ID NO: 216134 - RNA, 19 nt, Artificial Sequence
  Description of Artificial Sequence: Synthetic oligonucleotide
uguaacucagaguaagcau

SEQ ID NO: 216135 - RNA, 19 nt, Artificial Sequence
  Description of Artificial Sequence: Synthetic oligonucleotide
uaccaaauagcauacgcua

SEQ ID NO: 216136 - RNA, 19 nt, Artificial Sequence
  Description of Artificial Sequence: Synthetic oligonucleotide
acccucacauaccaaauag

SEQ ID NO: 216137 - RNA, 19 nt, Artificial Sequence
  Description of Artificial Sequence: Synthetic oligonucleotide
caagacgguaucuuugagc

SEQ ID NO: 216138 - RNA, 19 nt, Artificial Sequence
  Description of Artificial Sequence: Synthetic oligonucleotide
uuugguugugaguaugccu

SEQ ID NO: 216139 - RNA, 19 nt, Artificial Sequence
  Description of Artificial Sequence: Synthetic oligonucleotide
agcgcagagguacagaaga

SEQ ID NO: 216140 - RNA, 19 nt, Artificial Sequence
  Description of Artificial Sequence: Synthetic oligonucleotide
ucaaauaggaugggaauuc

SEQ ID NO: 216141 - RNA, 19 nt, Artificial Sequence
  Description of Artificial Sequence: Synthetic oligonucleotide
gacaagaacugggucauag

SEQ ID NO: 216142 - RNA, 19 nt, Artificial Sequence
  Description of Artificial Sequence: Synthetic oligonucleotide
gagucaccaacucagcgug

SEQ ID NO: 216143 - RNA, 19 nt, Artificial Sequence
  Description of Artificial Sequence: Synthetic oligonucleotide
ccaauuuugguaucaaggc

SEQ ID NO: 216144 - RNA, 19 nt, Artificial Sequence
  Description of Artificial Sequence: Synthetic oligonucleotide
aaccacucgugacuggcag

SEQ ID NO: 216145 - RNA, 19 nt, Artificial Sequence
  Description of Artificial Sequence: Synthetic oligonucleotide
auauucgccaagacuaaac

SEQ ID NO: 216146 - RNA, 19 nt, Artificial Sequence
  Description of Artificial Sequence: Synthetic oligonucleotide
guaccugucccaaacacag

SEQ ID NO: 216147 - RNA, 19 nt, Artificial Sequence
  Description of Artificial Sequence: Synthetic oligonucleotide
guagcgauggguuucuuca

SEQ ID NO: 216148 - RNA, 19 nt, Artificial Sequence
  Description of Artificial Sequence: Synthetic oligonucleotide
auuaucacuuuggaguuug

SEQ ID NO: 216149 - RNA, 19 nt, Artificial Sequence
  Description of Artificial Sequence: Synthetic oligonucleotide
uuauugcuuggccucuugc

SEQ ID NO: 216150 - RNA, 19 nt, Artificial Sequence
  Description of Artificial Sequence: Synthetic oligonucleotide
acugaaacccucacauacc

SEQ ID NO: 216151 - RNA, 19 nt, Artificial Sequence
  Description of Artificial Sequence: Synthetic oligonucleotide
uuuguacugaaacccucac

SEQ ID NO: 216152 - RNA, 19 nt, Artificial Sequence
  Description of Artificial Sequence: Synthetic oligonucleotide
uccuaucuuguauacuaug

SEQ ID NO: 216153 - RNA, 19 nt, Artificial Sequence
  Description of Artificial Sequence: Synthetic oligonucleotide
gcaguuguaacucagagua

SEQ ID NO: 216154 - RNA, 19 nt, Artificial Sequence
  Description of Artificial Sequence: Synthetic oligonucleotide
uguuaagugcacagaaaua

SEQ ID NO: 216155 - RNA, 19 nt, Artificial Sequence
  Description of Artificial Sequence: Synthetic oligonucleotide
ugcaacuagagggagcgcc

SEQ ID NO: 216156 - RNA, 19 nt, Artificial Sequence
  Description of Artificial Sequence: Synthetic oligonucleotide
uguucguaacaugaguuac

SEQ ID NO: 216157 - RNA, 19 nt, Artificial Sequence
  Description of Artificial Sequence: Synthetic oligonucleotide
acuaaacaucaccagaguu

SEQ ID NO: 216158 - RNA, 19 nt, Artificial Sequence
  Description of Artificial Sequence: Synthetic oligonucleotide
gagggagcgccucuaaaag

SEQ ID NO: 216159 - RNA, 19 nt, Artificial Sequence
  Description of Artificial Sequence: Synthetic oligonucleotide
acagauacagucucccaga

SEQ ID NO: 216160 - RNA, 19 nt, Artificial Sequence
  Description of Artificial Sequence: Synthetic oligonucleotide
agacggagccuucaugcac

SEQ ID NO: 216161 - RNA, 19 nt, Artificial Sequence
  Description of Artificial Sequence: Synthetic oligonucleotide
cuucacagcucaaaauaac

SEQ ID NO: 216162 - RNA, 19 nt, Artificial Sequence
  Description of Artificial Sequence: Synthetic oligonucleotide
aggaugggaauuccuaucu

SEQ ID NO: 216163 - RNA, 19 nt, Artificial Sequence
  Description of Artificial Sequence: Synthetic oligonucleotide
uuaagugccacugguacau

SEQ ID NO: 216164 - RNA, 19 nt, Artificial Sequence
  Description of Artificial Sequence: Synthetic oligonucleotide
aguguaaugaaagucggua

SEQ ID NO: 216165 - RNA, 19 nt, Artificial Sequence
  Description of Artificial Sequence: Synthetic oligonucleotide
auagcauacgcuaggaggu

SEQ ID NO: 216166 - RNA, 19 nt, Artificial Sequence
  Description of Artificial Sequence: Synthetic oligonucleotide
auaagcaagcaaucgccga

SEQ ID NO: 216167 - RNA, 19 nt, Artificial Sequence
  Description of Artificial Sequence: Synthetic oligonucleotide
uggauaaccacauccgguu

SEQ ID NO: 216168 - RNA, 19 nt, Artificial Sequence
  Description of Artificial Sequence: Synthetic oligonucleotide
agugacggaugucuaaccu

SEQ ID NO: 216169 - RNA, 19 nt, Artificial Sequence
  Description of Artificial Sequence: Synthetic oligonucleotide
uaaugaaagucgguaauua

SEQ ID NO: 216170 - RNA, 19 nt, Artificial Sequence
  Description of Artificial Sequence: Synthetic oligonucleotide
uuguacugaaacccucaca

SEQ ID NO: 216171 - RNA, 19 nt, Artificial Sequence
  Description of Artificial Sequence: Synthetic oligonucleotide
ggaccauuaccccaaagug

SEQ ID NO: 216172 - RNA, 19 nt, Artificial Sequence
  Description of Artificial Sequence: Synthetic oligonucleotide
ucacucccaauuuugguau

SEQ ID NO: 216173 - RNA, 19 nt, Artificial Sequence
  Description of Artificial Sequence: Synthetic oligonucleotide
auugcauguuugucacaac

SEQ ID NO: 216174 - RNA, 19 nt, Artificial Sequence
  Description of Artificial Sequence: Synthetic oligonucleotide
uaccacgcaguuauuuaug

SEQ ID NO: 216175 - RNA, 19 nt, Artificial Sequence
  Description of Artificial Sequence: Synthetic oligonucleotide
ggcacgagacacuugaaug

SEQ ID NO: 216176 - RNA, 19 nt, Artificial Sequence
  Description of Artificial Sequence: Synthetic oligonucleotide
gccucuaaaagacggagcc

SEQ ID NO: 216177 - RNA, 19 nt, Artificial Sequence
  Description of Artificial Sequence: Synthetic oligonucleotide
uggacagauacagucuccc

SEQ ID NO: 216178 - RNA, 19 nt, Artificial Sequence
  Description of Artificial Sequence: Synthetic oligonucleotide
ugauauucgccaagacuaa

SEQ ID NO: 216179 - RNA, 19 nt, Artificial Sequence
  Description of Artificial Sequence: Synthetic oligonucleotide
guacauggcuauauuacug

SEQ ID NO: 216180 - RNA, 19 nt, Artificial Sequence
  Description of Artificial Sequence: Synthetic oligonucleotide
uuaucacuuuggaguuugg

SEQ ID NO: 216181 - RNA, 19 nt, Artificial Sequence
  Description of Artificial Sequence: Synthetic oligonucleotide
auaccaaauagcauacgcu

SEQ ID NO: 216182 - RNA, 19 nt, Artificial Sequence
  Description of Artificial Sequence: Synthetic oligonucleotide
gaaaaggucaggacaguga

SEQ ID NO: 216183 - RNA, 19 nt, Artificial Sequence
  Description of Artificial Sequence: Synthetic oligonucleotide
aacucagcgugaagcuucc

SEQ ID NO: 216184 - RNA, 19 nt, Artificial Sequence
  Description of Artificial Sequence: Synthetic oligonucleotide
uuacacccacaacagcucu

SEQ ID NO: 216185 - RNA, 19 nt, Artificial Sequence
  Description of Artificial Sequence: Synthetic oligonucleotide
ugaaugaauuaaggaaaac

SEQ ID NO: 216186 - RNA, 19 nt, Artificial Sequence
  Description of Artificial Sequence: Synthetic oligonucleotide
ucacaaggauaauuuugcu

SEQ ID NO: 216187 - RNA, 19 nt, Artificial Sequence
  Description of Artificial Sequence: Synthetic oligonucleotide
aagacggagccuucaugca

SEQ ID NO: 216188 - RNA, 19 nt, Artificial Sequence
  Description of Artificial Sequence: Synthetic oligonucleotide
gccaagacuaaacaucacc

SEQ ID NO: 216189 - RNA, 19 nt, Artificial Sequence
  Description of Artificial Sequence: Synthetic oligonucleotide
acuuaauauagagauuuua

SEQ ID NO: 216190 - RNA, 19 nt, Artificial Sequence
  Description of Artificial Sequence: Synthetic oligonucleotide
gagcgccucuaaaagacgg

SEQ ID NO: 216191 - RNA, 19 nt, Artificial Sequence
  Description of Artificial Sequence: Synthetic oligonucleotide
ugguacauaguaagaugaa

SEQ ID NO: 216192 - RNA, 19 nt, Artificial Sequence
  Description of Artificial Sequence: Synthetic oligonucleotide
auuaaggaaaacacgggua

SEQ ID NO: 216193 - RNA, 19 nt, Artificial Sequence
  Description of Artificial Sequence: Synthetic oligonucleotide
auucgccaagacuaaacau

SEQ ID NO: 216194 - RNA, 19 nt, Artificial Sequence
  Description of Artificial Sequence: Synthetic oligonucleotide
ucauagaguugcugaucag

SEQ ID NO: 216195 - RNA, 19 nt, Artificial Sequence
  Description of Artificial Sequence: Synthetic oligonucleotide
auccgguuguucuuuccuc

SEQ ID NO: 216196 - RNA, 19 nt, Artificial Sequence
  Description of Artificial Sequence: Synthetic oligonucleotide
cuuuggaugacuggauaac

SEQ ID NO: 216197 - RNA, 19 nt, Artificial Sequence
  Description of Artificial Sequence: Synthetic oligonucleotide
ugcuaggcugaccuaaaua

SEQ ID NO: 216198 - RNA, 19 nt, Artificial Sequence
  Description of Artificial Sequence: Synthetic oligonucleotide
agagggagcgccucuaaaa

SEQ ID NO: 216199 - RNA, 19 nt, Artificial Sequence
  Description of Artificial Sequence: Synthetic oligonucleotide
cuaaugcaacuagagggag

SEQ ID NO: 216200 - RNA, 19 nt, Artificial Sequence
  Description of Artificial Sequence: Synthetic oligonucleotide
ugcuauauucuacccucaa

SEQ ID NO: 216201 - RNA, 19 nt, Artificial Sequence
  Description of Artificial Sequence: Synthetic oligonucleotide
agcucgcauaugcuuauug

SEQ ID NO: 216202 - RNA, 19 nt, Artificial Sequence
  Description of Artificial Sequence: Synthetic oligonucleotide
guauacuaugaucugcucu

SEQ ID NO: 216203 - RNA, 19 nt, Artificial Sequence
  Description of Artificial Sequence: Synthetic oligonucleotide
accacgcaguuauuuauga

SEQ ID NO: 216204 - RNA, 19 nt, Artificial Sequence
  Description of Artificial Sequence: Synthetic oligonucleotide
ucgacguagcuguucuacc

SEQ ID NO: 216205 - RNA, 19 nt, Artificial Sequence
  Description of Artificial Sequence: Synthetic oligonucleotide
agucucccagaauguuacc

SEQ ID NO: 216206 - RNA, 19 nt, Artificial Sequence
  Description of Artificial Sequence: Synthetic oligonucleotide
aacacggguagggaguccu

SEQ ID NO: 216207 - RNA, 19 nt, Artificial Sequence
  Description of Artificial Sequence: Synthetic oligonucleotide
ggagagaugggucucauua

SEQ ID NO: 216208 - RNA, 19 nt, Artificial Sequence
  Description of Artificial Sequence: Synthetic oligonucleotide
aacuagagggagcgccucu

SEQ ID NO: 216209 - RNA, 19 nt, Artificial Sequence
  Description of Artificial Sequence: Synthetic oligonucleotide
acauccgugggaaagggga

SEQ ID NO: 216210 - RNA, 19 nt, Artificial Sequence
  Description of Artificial Sequence: Synthetic oligonucleotide
ucgaucugccguaaccuau

SEQ ID NO: 216211 - RNA, 19 nt, Artificial Sequence
  Description of Artificial Sequence: Synthetic oligonucleotide
gcuauauucuacccucaag

SEQ ID NO: 216212 - RNA, 19 nt, Artificial Sequence
  Description of Artificial Sequence: Synthetic oligonucleotide
ugaguucccuggcacgaga

SEQ ID NO: 216213 - RNA, 19 nt, Artificial Sequence
  Description of Artificial Sequence: Synthetic oligonucleotide
uacuuaauauagagauuuu

SEQ ID NO: 216214 - RNA, 19 nt, Artificial Sequence
  Description of Artificial Sequence: Synthetic oligonucleotide
uaccccaaagugagggucu

SEQ ID NO: 216215 - RNA, 19 nt, Artificial Sequence
  Description of Artificial Sequence: Synthetic oligonucleotide
aggugucaaguguucagga

SEQ ID NO: 216216 - RNA, 19 nt, Artificial Sequence
  Description of Artificial Sequence: Synthetic oligonucleotide
cucaagacgguaucuuuga

SEQ ID NO: 216217 - RNA, 19 nt, Artificial Sequence
  Description of Artificial Sequence: Synthetic oligonucleotide
guaacaugaguuacagaca

SEQ ID NO: 216218 - RNA, 19 nt, Artificial Sequence
  Description of Artificial Sequence: Synthetic oligonucleotide
gaguuugguugugaguaug

SEQ ID NO: 216219 - RNA, 19 nt, Artificial Sequence
  Description of Artificial Sequence: Synthetic oligonucleotide
gaucugccguaaccuaugc

SEQ ID NO: 216220 - RNA, 19 nt, Artificial Sequence
  Description of Artificial Sequence: Synthetic oligonucleotide
ucccuucaaaccugcuaag

SEQ ID NO: 216221 - RNA, 19 nt, Artificial Sequence
  Description of Artificial Sequence: Synthetic oligonucleotide
aaguguaaugaaagucggu

SEQ ID NO: 216222 - RNA, 19 nt, Artificial Sequence
  Description of Artificial Sequence: Synthetic oligonucleotide
acauaccaaauagcauacg

SEQ ID NO: 216223 - RNA, 19 nt, Artificial Sequence
  Description of Artificial Sequence: Synthetic oligonucleotide
uugugaguaugccuuucua

SEQ ID NO: 216224 - RNA, 19 nt, Artificial Sequence
  Description of Artificial Sequence: Synthetic oligonucleotide
guuugguugugaguaugcc

SEQ ID NO: 216225 - RNA, 19 nt, Artificial Sequence
  Description of Artificial Sequence: Synthetic oligonucleotide
aagcaaucgccgaggagug

SEQ ID NO: 216226 - RNA, 19 nt, Artificial Sequence
  Description of Artificial Sequence: Synthetic oligonucleotide
guaucagagacaaaauagu

SEQ ID NO: 216227 - RNA, 19 nt, Artificial Sequence
  Description of Artificial Sequence: Synthetic oligonucleotide
agcuuaagguggcacguaa

SEQ ID NO: 216228 - RNA, 19 nt, Artificial Sequence
  Description of Artificial Sequence: Synthetic oligonucleotide
cagugacggaugucuaacc

SEQ ID NO: 216229 - RNA, 19 nt, Artificial Sequence
  Description of Artificial Sequence: Synthetic oligonucleotide
ucugcuaggcugaccuaaa

SEQ ID NO: 216230 - RNA, 19 nt, Artificial Sequence
  Description of Artificial Sequence: Synthetic oligonucleotide
gcacauugcauguuuguca

SEQ ID NO: 216231 - RNA, 19 nt, Artificial Sequence
  Description of Artificial Sequence: Synthetic oligonucleotide
acgcaguuauuuaugaaau

SEQ ID NO: 216232 - RNA, 19 nt, Artificial Sequence
  Description of Artificial Sequence: Synthetic oligonucleotide
gcucgcauaugcuuauugc

SEQ ID NO: 216233 - RNA, 19 nt, Artificial Sequence
  Description of Artificial Sequence: Synthetic oligonucleotide
guggcacguaaagucaucc

SEQ ID NO: 216234 - RNA, 19 nt, Artificial Sequence
  Description of Artificial Sequence: Synthetic oligonucleotide
ucguaacaugaguuacaga

SEQ ID NO: 216235 - RNA, 19 nt, Artificial Sequence
  Description of Artificial Sequence: Synthetic oligonucleotide
agggagcgccucuaaaaga

SEQ ID NO: 216236 - RNA, 19 nt, Artificial Sequence
  Description of Artificial Sequence: Synthetic oligonucleotide
cuaagaauggacaggucau

SEQ ID NO: 216237 - RNA, 19 nt, Artificial Sequence
  Description of Artificial Sequence: Synthetic oligonucleotide
uggcacguaaagucauccu

SEQ ID NO: 216238 - RNA, 19 nt, Artificial Sequence
  Description of Artificial Sequence: Synthetic oligonucleotide
ccuaucuuguauacuauga

SEQ ID NO: 216239 - RNA, 19 nt, Artificial Sequence
  Description of Artificial Sequence: Synthetic oligonucleotide
gucacuuugcuaccacgca

SEQ ID NO: 216240 - RNA, 19 nt, Artificial Sequence
  Description of Artificial Sequence: Synthetic oligonucleotide
gucgacguagcuguucuac

SEQ ID NO: 216241 - RNA, 19 nt, Artificial Sequence
  Description of Artificial Sequence: Synthetic oligonucleotide
acauggcuauauuacugua

SEQ ID NO: 216242 - RNA, 19 nt, Artificial Sequence
  Description of Artificial Sequence: Synthetic oligonucleotide
cucgcauaugcuuauugcu

SEQ ID NO: 216243 - RNA, 19 nt, Artificial Sequence
  Description of Artificial Sequence: Synthetic oligonucleotide
agcagugacggaugucuaa

SEQ ID NO: 216244 - RNA, 19 nt, Artificial Sequence
  Description of Artificial Sequence: Synthetic oligonucleotide
gaugacuggauaaccacau

SEQ ID NO: 216245 - RNA, 19 nt, Artificial Sequence
  Description of Artificial Sequence: Synthetic oligonucleotide
agauacagucucccagaau

SEQ ID NO: 216246 - RNA, 19 nt, Artificial Sequence
  Description of Artificial Sequence: Synthetic oligonucleotide
aaccuaugcuggaucacau

SEQ ID NO: 216247 - RNA, 19 nt, Artificial Sequence
  Description of Artificial Sequence: Synthetic oligonucleotide
gacggagccuucaugcaca

SEQ ID NO: 216248 - RNA, 19 nt, Artificial Sequence
  Description of Artificial Sequence: Synthetic oligonucleotide
cuaaaagacggagccuuca

SEQ ID NO: 216249 - RNA, 19 nt, Artificial Sequence
  Description of Artificial Sequence: Synthetic oligonucleotide
ggauaaccacauccgguug

SEQ ID NO: 216250 - RNA, 19 nt, Artificial Sequence
  Description of Artificial Sequence: Synthetic oligonucleotide
gauauucgccaagacuaaa

SEQ ID NO: 216251 - RNA, 19 nt, Artificial Sequence
  Description of Artificial Sequence: Synthetic oligonucleotide
aagccguagcgauggguuu

SEQ ID NO: 216252 - RNA, 19 nt, Artificial Sequence
  Description of Artificial Sequence: Synthetic oligonucleotide
aacacaguacauggcuaua

SEQ ID NO: 216253 - RNA, 19 nt, Artificial Sequence
  Description of Artificial Sequence: Synthetic oligonucleotide
ucucgaaccugucgacgua

SEQ ID NO: 216254 - RNA, 19 nt, Artificial Sequence
  Description of Artificial Sequence: Synthetic oligonucleotide
gaagugggcaguggaacaa

SEQ ID NO: 216255 - RNA, 19 nt, Artificial Sequence
  Description of Artificial Sequence: Synthetic oligonucleotide
ugcuaccacgcaguuauuu

SEQ ID NO: 216256 - RNA, 19 nt, Artificial Sequence
  Description of Artificial Sequence: Synthetic oligonucleotide
guaaccuaugcuggaucac

SEQ ID NO: 216257 - RNA, 19 nt, Artificial Sequence
  Description of Artificial Sequence: Synthetic oligonucleotide
gggagcgccucuaaaagac

SEQ ID NO: 216258 - RNA, 19 nt, Artificial Sequence
  Description of Artificial Sequence: Synthetic oligonucleotide
ggcacauauacaaggggca

SEQ ID NO: 216259 - RNA, 19 nt, Artificial Sequence
  Description of Artificial Sequence: Synthetic oligonucleotide
uacagucucccagaauguu

SEQ ID NO: 216260 - RNA, 19 nt, Artificial Sequence
  Description of Artificial Sequence: Synthetic oligonucleotide
guugugaguaugccuuucu

SEQ ID NO: 216261 - RNA, 19 nt, Artificial Sequence
  Description of Artificial Sequence: Synthetic oligonucleotide
cgcauaugcuuauugcuug

SEQ ID NO: 216262 - RNA, 19 nt, Artificial Sequence
  Description of Artificial Sequence: Synthetic oligonucleotide
acggagccuucaugcacag

SEQ ID NO: 216263 - RNA, 19 nt, Artificial Sequence
  Description of Artificial Sequence: Synthetic oligonucleotide
ugcuucgaucugccguaac

SEQ ID NO: 216264 - RNA, 19 nt, Artificial Sequence
  Description of Artificial Sequence: Synthetic oligonucleotide
gaguucccuggcacgagac

SEQ ID NO: 216265 - RNA, 19 nt, Artificial Sequence
  Description of Artificial Sequence: Synthetic oligonucleotide
cauggcuauauuacuguau

SEQ ID NO: 216266 - RNA, 19 nt, Artificial Sequence
  Description of Artificial Sequence: Synthetic oligonucleotide
cacggguagggaguccuag

SEQ ID NO: 216267 - RNA, 19 nt, Artificial Sequence
  Description of Artificial Sequence: Synthetic oligonucleotide
cucccguguuagcaccagg

SEQ ID NO: 216268 - RNA, 19 nt, Artificial Sequence
  Description of Artificial Sequence: Synthetic oligonucleotide
ggagucaccaacucagcgu

SEQ ID NO: 216269 - RNA, 19 nt, Artificial Sequence
  Description of Artificial Sequence: Synthetic oligonucleotide
cacuuugcuaccacgcagu

SEQ ID NO: 216270 - RNA, 19 nt, Artificial Sequence
  Description of Artificial Sequence: Synthetic oligonucleotide
ggaugacuggauaaccaca

SEQ ID NO: 216271 - RNA, 19 nt, Artificial Sequence
  Description of Artificial Sequence: Synthetic oligonucleotide
cugcuaagaauggacaggu

SEQ ID NO: 216272 - RNA, 19 nt, Artificial Sequence
  Description of Artificial Sequence: Synthetic oligonucleotide
gcuauauuacuguaucuuu

SEQ ID NO: 216273 - RNA, 19 nt, Artificial Sequence
  Description of Artificial Sequence: Synthetic oligonucleotide
ugcuuguacccugcuucga

SEQ ID NO: 216274 - RNA, 19 nt, Artificial Sequence
  Description of Artificial Sequence: Synthetic oligonucleotide
guaaugaaagucgguaauu

SEQ ID NO: 216275 - RNA, 19 nt, Artificial Sequence
  Description of Artificial Sequence: Synthetic oligonucleotide
gaagccguagcgauggguu

SEQ ID NO: 216276 - RNA, 19 nt, Artificial Sequence
  Description of Artificial Sequence: Synthetic oligonucleotide
acguaaagucauccucaua

SEQ ID NO: 216277 - RNA, 19 nt, Artificial Sequence
  Description of Artificial Sequence: Synthetic oligonucleotide
acgagacacuugaaugugu

SEQ ID NO: 216278 - RNA, 19 nt, Artificial Sequence
  Description of Artificial Sequence: Synthetic oligonucleotide
ggagcgccucuaaaagacg

SEQ ID NO: 216279 - RNA, 19 nt, Artificial Sequence
  Description of Artificial Sequence: Synthetic oligonucleotide
agcauacgcuaggagguaa

SEQ ID NO: 216280 - RNA, 19 nt, Artificial Sequence
  Description of Artificial Sequence: Synthetic oligonucleotide
cuaccacgcaguuauuuau

SEQ ID NO: 216281 - RNA, 19 nt, Artificial Sequence
  Description of Artificial Sequence: Synthetic oligonucleotide
gcagugacggaugucuaac

SEQ ID NO: 216282 - RNA, 19 nt, Artificial Sequence
  Description of Artificial Sequence: Synthetic oligonucleotide
caacugccuucacagcuca

SEQ ID NO: 216283 - RNA, 19 nt, Artificial Sequence
  Description of Artificial Sequence: Synthetic oligonucleotide
gcgccucuaaaagacggag

SEQ ID NO: 216284 - RNA, 19 nt, Artificial Sequence
  Description of Artificial Sequence: Synthetic oligonucleotide
gcuaccacgcaguuauuua

SEQ ID NO: 216285 - RNA, 19 nt, Artificial Sequence
  Description of Artificial Sequence: Synthetic oligonucleotide
uugcuguuuugggucacuu

SEQ ID NO: 216286 - RNA, 19 nt, Artificial Sequence
  Description of Artificial Sequence: Synthetic oligonucleotide
uaaccacauccgguuguuc

SEQ ID NO: 216287 - RNA, 19 nt, Artificial Sequence
  Description of Artificial Sequence: Synthetic oligonucleotide
uagcauacgcuaggaggua

SEQ ID NO: 216288 - RNA, 19 nt, Artificial Sequence
  Description of Artificial Sequence: Synthetic oligonucleotide
acuagagggagcgccucua

SEQ ID NO: 216289 - RNA, 19 nt, Artificial Sequence
  Description of Artificial Sequence: Synthetic oligonucleotide
cugucgacguagcuguucu

SEQ ID NO: 216290 - RNA, 19 nt, Artificial Sequence
  Description of Artificial Sequence: Synthetic oligonucleotide
acgcaacugcacaguuugg

SEQ ID NO: 216291 - RNA, 19 nt, Artificial Sequence
  Description of Artificial Sequence: Synthetic oligonucleotide
agcgccucuaaaagacgga

SEQ ID NO: 216292 - RNA, 19 nt, Artificial Sequence
  Description of Artificial Sequence: Synthetic oligonucleotide
ugucgacguagcuguucua

SEQ ID NO: 216293 - RNA, 19 nt, Artificial Sequence
  Description of Artificial Sequence: Synthetic oligonucleotide
cagcacauugcauguuugu

SEQ ID NO: 216294 - RNA, 19 nt, Artificial Sequence
  Description of Artificial Sequence: Synthetic oligonucleotide
cuagagggagcgccucuaa

SEQ ID NO: 216295 - RNA, 19 nt, Artificial Sequence
  Description of Artificial Sequence: Synthetic oligonucleotide
cgccucuaaaagacggagc

SEQ ID NO: 216296 - RNA, 19 nt, Artificial Sequence
  Description of Artificial Sequence: Synthetic oligonucleotide
gguugugaguaugccuuuc

SEQ ID NO: 216297 - RNA, 19 nt, Artificial Sequence
  Description of Artificial Sequence: Synthetic oligonucleotide
gcgacagcagugacggaug

SEQ ID NO: 216298 - RNA, 19 nt, Artificial Sequence
  Description of Artificial Sequence: Synthetic oligonucleotide
ccguaaccuaugcuggauc

SEQ ID NO: 216299 - RNA, 19 nt, Artificial Sequence
  Description of Artificial Sequence: Synthetic oligonucleotide
gcgcagagguacagaagag

SEQ ID NO: 216300 - RNA, 19 nt, Artificial Sequence
  Description of Artificial Sequence: Synthetic oligonucleotide
cguagcgauggguuucuuc

SEQ ID NO: 216301 - RNA, 19 nt, Artificial Sequence
  Description of Artificial Sequence: Synthetic oligonucleotide
gguggcacguaaagucauc

SEQ ID NO: 216302 - RNA, 19 nt, Artificial Sequence
  Description of Artificial Sequence: Synthetic oligonucleotide
cuggcacgagacacuugaa

SEQ ID NO: 216303 - RNA, 19 nt, Artificial Sequence
  Description of Artificial Sequence: Synthetic oligonucleotide
ggcuuugugcuggagacuu

SEQ ID NO: 216304 - RNA, 19 nt, Artificial Sequence
  Description of Artificial Sequence: Synthetic oligonucleotide
caacgcaacugcacaguuu

SEQ ID NO: 216305 - RNA, 19 nt, Artificial Sequence
  Description of Artificial Sequence: Synthetic oligonucleotide
ggaguuugguugugaguau

SEQ ID NO: 216306 - RNA, 19 nt, Artificial Sequence
  Description of Artificial Sequence: Synthetic oligonucleotide
acucagcgugaagcuucca

SEQ ID NO: 216307 - RNA, 19 nt, Artificial Sequence
  Description of Artificial Sequence: Synthetic oligonucleotide
gcucccguguuagcaccag

SEQ ID NO: 216308 - RNA, 19 nt, Artificial Sequence
  Description of Artificial Sequence: Synthetic oligonucleotide
gcauacgcuaggagguaaa

SEQ ID NO: 216309 - RNA, 19 nt, Artificial Sequence
  Description of Artificial Sequence: Synthetic oligonucleotide
cagcuuaagguggcacgua

SEQ ID NO: 216310 - RNA, 19 nt, Artificial Sequence
  Description of Artificial Sequence: Synthetic oligonucleotide
acacggguagggaguccua

SEQ ID NO: 216311 - RNA, 19 nt, Artificial Sequence
  Description of Artificial Sequence: Synthetic oligonucleotide
ccucuaaaagacggagccu

SEQ ID NO: 216312 - RNA, 19 nt, Artificial Sequence
  Description of Artificial Sequence: Synthetic oligonucleotide
gccguagcgauggguuucu

SEQ ID NO: 216313 - RNA, 19 nt, Artificial Sequence
  Description of Artificial Sequence: Synthetic oligonucleotide
ccacauccgguuguucuuu

SEQ ID NO: 216314 - RNA, 19 nt, Artificial Sequence
  Description of Artificial Sequence: Synthetic oligonucleotide
cagcucgcauaugcuuauu

SEQ ID NO: 216315 - RNA, 19 nt, Artificial Sequence
  Description of Artificial Sequence: Synthetic oligonucleotide
ccguagcgauggguuucuu

SEQ ID NO: 216316 - RNA, 19 nt, Artificial Sequence
  Description of Artificial Sequence: Synthetic oligonucleotide
aaaugauugaggcccaggc

SEQ ID NO: 216317 - RNA, 19 nt, Artificial Sequence
  Description of Artificial Sequence: Synthetic oligonucleotide
ugcauaagcacacacgucc

SEQ ID NO: 216318 - RNA, 19 nt, Artificial Sequence
  Description of Artificial Sequence: Synthetic oligonucleotide
uucggaauggcucugacac

SEQ ID NO: 216319 - RNA, 19 nt, Artificial Sequence
  Description of Artificial Sequence: Synthetic oligonucleotide
aauuuuagaggcuugggua

SEQ ID NO: 216320 - RNA, 19 nt, Artificial Sequence
  Description of Artificial Sequence: Synthetic oligonucleotide
aaauuuuagaggcuugggu

SEQ ID NO: 216321 - RNA, 19 nt, Artificial Sequence
  Description of Artificial Sequence: Synthetic oligonucleotide
caacuggugagauagaggc

SEQ ID NO: 216322 - RNA, 19 nt, Artificial Sequence
  Description of Artificial Sequence: Synthetic oligonucleotide
aaaacuucggaauggcucu

SEQ ID NO: 216323 - RNA, 19 nt, Artificial Sequence
  Description of Artificial Sequence: Synthetic oligonucleotide
uguaccuucagcacauucc

SEQ ID NO: 216324 - RNA, 19 nt, Artificial Sequence
  Description of Artificial Sequence: Synthetic oligonucleotide
auggaaccaagucucaugg

SEQ ID NO: 216325 - RNA, 19 nt, Artificial Sequence
  Description of Artificial Sequence: Synthetic oligonucleotide
aguucacgaucccacaggc

SEQ ID NO: 216326 - RNA, 19 nt, Artificial Sequence
  Description of Artificial Sequence: Synthetic oligonucleotide
uccauaauggucugaagga

SEQ ID NO: 216327 - RNA, 19 nt, Artificial Sequence
  Description of Artificial Sequence: Synthetic oligonucleotide
ugagagaauuugcucagag

SEQ ID NO: 216328 - RNA, 19 nt, Artificial Sequence
  Description of Artificial Sequence: Synthetic oligonucleotide
uccggaguauaacaaaacc

SEQ ID NO: 216329 - RNA, 19 nt, Artificial Sequence
  Description of Artificial Sequence: Synthetic oligonucleotide
cauagugugauuugccuag

SEQ ID NO: 216330 - RNA, 19 nt, Artificial Sequence
  Description of Artificial Sequence: Synthetic oligonucleotide
aagcgcaaucccuagaaca

SEQ ID NO: 216331 - RNA, 19 nt, Artificial Sequence
  Description of Artificial Sequence: Synthetic oligonucleotide
acuugaggcauucacgcuc

SEQ ID NO: 216332 - RNA, 19 nt, Artificial Sequence
  Description of Artificial Sequence: Synthetic oligonucleotide
ucguggauuugaaacagag

SEQ ID NO: 216333 - RNA, 19 nt, Artificial Sequence
  Description of Artificial Sequence: Synthetic oligonucleotide
agacgagcauuauugguac

SEQ ID NO: 216334 - RNA, 19 nt, Artificial Sequence
  Description of Artificial Sequence: Synthetic oligonucleotide
aaauguguaaggcccugug

SEQ ID NO: 216335 - RNA, 19 nt, Artificial Sequence
  Description of Artificial Sequence: Synthetic oligonucleotide
auaggagguaacaauuccc

SEQ ID NO: 216336 - RNA, 19 nt, Artificial Sequence
  Description of Artificial Sequence: Synthetic oligonucleotide
uuauugguaccacugccca

SEQ ID NO: 216337 - RNA, 19 nt, Artificial Sequence
  Description of Artificial Sequence: Synthetic oligonucleotide
gauuggagccagcauaagc

SEQ ID NO: 216338 - RNA, 19 nt, Artificial Sequence
  Description of Artificial Sequence: Synthetic oligonucleotide
auaauggucugaaggaugg

SEQ ID NO: 216339 - RNA, 19 nt, Artificial Sequence
  Description of Artificial Sequence: Synthetic oligonucleotide
gaaacggcugaacuuucgg

SEQ ID NO: 216340 - RNA, 19 nt, Artificial Sequence
  Description of Artificial Sequence: Synthetic oligonucleotide
auagguauccuugagcuca

SEQ ID NO: 216341 - RNA, 19 nt, Artificial Sequence
  Description of Artificial Sequence: Synthetic oligonucleotide
cuagaccaaagauggaacc

SEQ ID NO: 216342 - RNA, 19 nt, Artificial Sequence
  Description of Artificial Sequence: Synthetic oligonucleotide
agugcuaaggguacagccc

SEQ ID NO: 216343 - RNA, 19 nt, Artificial Sequence
  Description of Artificial Sequence: Synthetic oligonucleotide
ugaccaaagguucgcagug

SEQ ID NO: 216344 - RNA, 19 nt, Artificial Sequence
  Description of Artificial Sequence: Synthetic oligonucleotide
gacguaacauugcagccag

SEQ ID NO: 216345 - RNA, 19 nt, Artificial Sequence
  Description of Artificial Sequence: Synthetic oligonucleotide
gcuaggauugccucgauag

SEQ ID NO: 216346 - RNA, 19 nt, Artificial Sequence
  Description of Artificial Sequence: Synthetic oligonucleotide
uuauaggaaacuucuggau

SEQ ID NO: 216347 - RNA, 19 nt, Artificial Sequence
  Description of Artificial Sequence: Synthetic oligonucleotide
ugaguacgcguucucaucu

SEQ ID NO: 216348 - RNA, 19 nt, Artificial Sequence
  Description of Artificial Sequence: Synthetic oligonucleotide
ugaaggaugguagaaguaa

SEQ ID NO: 216349 - RNA, 19 nt, Artificial Sequence
  Description of Artificial Sequence: Synthetic oligonucleotide
cuagaaugauguuucggac

SEQ ID NO: 216350 - RNA, 19 nt, Artificial Sequence
  Description of Artificial Sequence: Synthetic oligonucleotide
agaaucaugccaagggacg

SEQ ID NO: 216351 - RNA, 19 nt, Artificial Sequence
  Description of Artificial Sequence: Synthetic oligonucleotide
aauaagcgcaaucccuaga

SEQ ID NO: 216352 - RNA, 19 nt, Artificial Sequence
  Description of Artificial Sequence: Synthetic oligonucleotide
ucccuaaauguguaaggcc

SEQ ID NO: 216353 - RNA, 19 nt, Artificial Sequence
  Description of Artificial Sequence: Synthetic oligonucleotide
aaacggcugaacuuucgga

SEQ ID NO: 216354 - RNA, 19 nt, Artificial Sequence
  Description of Artificial Sequence: Synthetic oligonucleotide
aaggaaacgagcacaguga

SEQ ID NO: 216355 - RNA, 19 nt, Artificial Sequence
  Description of Artificial Sequence: Synthetic oligonucleotide
aaagguucgcagugccauc

SEQ ID NO: 216356 - RNA, 19 nt, Artificial Sequence
  Description of Artificial Sequence: Synthetic oligonucleotide
auaagcgcaaucccuagaa

SEQ ID NO: 216357 - RNA, 19 nt, Artificial Sequence
  Description of Artificial Sequence: Synthetic oligonucleotide
guuaugagccauguuguag

SEQ ID NO: 216358 - RNA, 19 nt, Artificial Sequence
  Description of Artificial Sequence: Synthetic oligonucleotide
aggaaacgagcacagugag

SEQ ID NO: 216359 - RNA, 19 nt, Artificial Sequence
  Description of Artificial Sequence: Synthetic oligonucleotide
cagugcuaaggguacagcc

SEQ ID NO: 216360 - RNA, 19 nt, Artificial Sequence
  Description of Artificial Sequence: Synthetic oligonucleotide
agaguucacgaucccacag

SEQ ID NO: 216361 - RNA, 19 nt, Artificial Sequence
  Description of Artificial Sequence: Synthetic oligonucleotide
cugccgaucacugugguag

SEQ ID NO: 216362 - RNA, 19 nt, Artificial Sequence
  Description of Artificial Sequence: Synthetic oligonucleotide
uacccuucccuaaaugugu

SEQ ID NO: 216363 - RNA, 19 nt, Artificial Sequence
  Description of Artificial Sequence: Synthetic oligonucleotide
uggcgacccagcaugaaug

SEQ ID NO: 216364 - RNA, 19 nt, Artificial Sequence
  Description of Artificial Sequence: Synthetic oligonucleotide
guuguaggggacaaucucc

SEQ ID NO: 216365 - RNA, 19 nt, Artificial Sequence
  Description of Artificial Sequence: Synthetic oligonucleotide
cccuaaauguguaaggccc

SEQ ID NO: 216366 - RNA, 19 nt, Artificial Sequence
  Description of Artificial Sequence: Synthetic oligonucleotide
accgcuacuugacucauga

SEQ ID NO: 216367 - RNA, 19 nt, Artificial Sequence
  Description of Artificial Sequence: Synthetic oligonucleotide
uaggauugccucgauagcu

SEQ ID NO: 216368 - RNA, 19 nt, Artificial Sequence
  Description of Artificial Sequence: Synthetic oligonucleotide
gaaacagagauuagugcca

SEQ ID NO: 216369 - RNA, 19 nt, Artificial Sequence
  Description of Artificial Sequence: Synthetic oligonucleotide
ugcccguuccccaugggcc

SEQ ID NO: 216370 - RNA, 19 nt, Artificial Sequence
  Description of Artificial Sequence: Synthetic oligonucleotide
cauguuguaggggacaauc

SEQ ID NO: 216371 - RNA, 19 nt, Artificial Sequence
  Description of Artificial Sequence: Synthetic oligonucleotide
caugcuccgcguuaugagc

SEQ ID NO: 216372 - RNA, 19 nt, Artificial Sequence
  Description of Artificial Sequence: Synthetic oligonucleotide
ugacuugauauaguccuca

SEQ ID NO: 216373 - RNA, 19 nt, Artificial Sequence
  Description of Artificial Sequence: Synthetic oligonucleotide
uagaccaaagauggaacca

SEQ ID NO: 216374 - RNA, 19 nt, Artificial Sequence
  Description of Artificial Sequence: Synthetic oligonucleotide
ugacguaacauugcagcca

SEQ ID NO: 216375 - RNA, 19 nt, Artificial Sequence
  Description of Artificial Sequence: Synthetic oligonucleotide
uguuggcaaaacuucggaa

SEQ ID NO: 216376 - RNA, 19 nt, Artificial Sequence
  Description of Artificial Sequence: Synthetic oligonucleotide
auacugggcuaacugacgu

SEQ ID NO: 216377 - RNA, 19 nt, Artificial Sequence
  Description of Artificial Sequence: Synthetic oligonucleotide
auacucaugaccccaugau

SEQ ID NO: 216378 - RNA, 19 nt, Artificial Sequence
  Description of Artificial Sequence: Synthetic oligonucleotide
gagucguggauuugaaaca

SEQ ID NO: 216379 - RNA, 19 nt, Artificial Sequence
  Description of Artificial Sequence: Synthetic oligonucleotide
uguggacgaagaaauuuua

SEQ ID NO: 216380 - RNA, 19 nt, Artificial Sequence
  Description of Artificial Sequence: Synthetic oligonucleotide
gguucugguacauaauuca

SEQ ID NO: 216381 - RNA, 19 nt, Artificial Sequence
  Description of Artificial Sequence: Synthetic oligonucleotide
gugagauagaggcagaccu

SEQ ID NO: 216382 - RNA, 19 nt, Artificial Sequence
  Description of Artificial Sequence: Synthetic oligonucleotide
aaggaugguagaaguaaca

SEQ ID NO: 216383 - RNA, 19 nt, Artificial Sequence
  Description of Artificial Sequence: Synthetic oligonucleotide
accuguuauucucuaggug

SEQ ID NO: 216384 - RNA, 19 nt, Artificial Sequence
  Description of Artificial Sequence: Synthetic oligonucleotide
guuugccauaguguggacg

SEQ ID NO: 216385 - RNA, 19 nt, Artificial Sequence
  Description of Artificial Sequence: Synthetic oligonucleotide
caauaagcgcaaucccuag

SEQ ID NO: 216386 - RNA, 19 nt, Artificial Sequence
  Description of Artificial Sequence: Synthetic oligonucleotide
gaaucaugccaagggacgc

SEQ ID NO: 216387 - RNA, 19 nt, Artificial Sequence
  Description of Artificial Sequence: Synthetic oligonucleotide
auguuucggacauccaaga

SEQ ID NO: 216388 - RNA, 19 nt, Artificial Sequence
  Description of Artificial Sequence: Synthetic oligonucleotide
agcgcaguagggcagaguu

SEQ ID NO: 216389 - RNA, 19 nt, Artificial Sequence
  Description of Artificial Sequence: Synthetic oligonucleotide
gaaggaugguagaaguaac

SEQ ID NO: 216390 - RNA, 19 nt, Artificial Sequence
  Description of Artificial Sequence: Synthetic oligonucleotide
augcuccgcguuaugagcc

SEQ ID NO: 216391 - RNA, 19 nt, Artificial Sequence
  Description of Artificial Sequence: Synthetic oligonucleotide
ucacgaucccacaggcaag

SEQ ID NO: 216392 - RNA, 19 nt, Artificial Sequence
  Description of Artificial Sequence: Synthetic oligonucleotide
cacagugagcaacccagcc

SEQ ID NO: 216393 - RNA, 19 nt, Artificial Sequence
  Description of Artificial Sequence: Synthetic oligonucleotide
cuaggauugccucgauagc

SEQ ID NO: 216394 - RNA, 19 nt, Artificial Sequence
  Description of Artificial Sequence: Synthetic oligonucleotide
ucgauagcuucacccuucc

SEQ ID NO: 216395 - RNA, 19 nt, Artificial Sequence
  Description of Artificial Sequence: Synthetic oligonucleotide
caugggccaacaacacugg

SEQ ID NO: 216396 - RNA, 19 nt, Artificial Sequence
  Description of Artificial Sequence: Synthetic oligonucleotide
uucauucgggcagagucca

SEQ ID NO: 216397 - RNA, 19 nt, Artificial Sequence
  Description of Artificial Sequence: Synthetic oligonucleotide
agcgcaaucccuagaacag

SEQ ID NO: 216398 - RNA, 19 nt, Artificial Sequence
  Description of Artificial Sequence: Synthetic oligonucleotide
acauagugugauuugccua

SEQ ID NO: 216399 - RNA, 19 nt, Artificial Sequence
  Description of Artificial Sequence: Synthetic oligonucleotide
ugccuagaaugauguuucg

SEQ ID NO: 216400 - RNA, 19 nt, Artificial Sequence
  Description of Artificial Sequence: Synthetic oligonucleotide
uaagcgcaaucccuagaac

SEQ ID NO: 216401 - RNA, 19 nt, Artificial Sequence
  Description of Artificial Sequence: Synthetic oligonucleotide
uugaguacgcguucucauc

SEQ ID NO: 216402 - RNA, 19 nt, Artificial Sequence
  Description of Artificial Sequence: Synthetic oligonucleotide
cucauuccggaccccagag

SEQ ID NO: 216403 - RNA, 19 nt, Artificial Sequence
  Description of Artificial Sequence: Synthetic oligonucleotide
agccaccgcuacuugacuc

SEQ ID NO: 216404 - RNA, 19 nt, Artificial Sequence
  Description of Artificial Sequence: Synthetic oligonucleotide
uccauugcaggaucccacu

SEQ ID NO: 216405 - RNA, 19 nt, Artificial Sequence
  Description of Artificial Sequence: Synthetic oligonucleotide
acgagcauuauugguacca

SEQ ID NO: 216406 - RNA, 19 nt, Artificial Sequence
  Description of Artificial Sequence: Synthetic oligonucleotide
ccccaaaugauugaggccc

SEQ ID NO: 216407 - RNA, 19 nt, Artificial Sequence
  Description of Artificial Sequence: Synthetic oligonucleotide
guggacgaagaaauuuuag

SEQ ID NO: 216408 - RNA, 19 nt, Artificial Sequence
  Description of Artificial Sequence: Synthetic oligonucleotide
gguauugcuguuauggaga

SEQ ID NO: 216409 - RNA, 19 nt, Artificial Sequence
  Description of Artificial Sequence: Synthetic oligonucleotide
gaguuauaggaaacuucug

SEQ ID NO: 216410 - RNA, 19 nt, Artificial Sequence
  Description of Artificial Sequence: Synthetic oligonucleotide
gaccaaagauggaaccaag

SEQ ID NO: 216411 - RNA, 19 nt, Artificial Sequence
  Description of Artificial Sequence: Synthetic oligonucleotide
agauuagugccagugcuaa

SEQ ID NO: 216412 - RNA, 19 nt, Artificial Sequence
  Description of Artificial Sequence: Synthetic oligonucleotide
ccuagaaugauguuucgga

SEQ ID NO: 216413 - RNA, 19 nt, Artificial Sequence
  Description of Artificial Sequence: Synthetic oligonucleotide
cagacgagcauuauuggua

SEQ ID NO: 216414 - RNA, 19 nt, Artificial Sequence
  Description of Artificial Sequence: Synthetic oligonucleotide
gauaugaugucagcagcaa

SEQ ID NO: 216415 - RNA, 19 nt, Artificial Sequence
  Description of Artificial Sequence: Synthetic oligonucleotide
gaaacuggcaauggccgca

SEQ ID NO: 216416 - RNA, 19 nt, Artificial Sequence
  Description of Artificial Sequence: Synthetic oligonucleotide
acggacagaaacuggcaau

SEQ ID NO: 216417 - RNA, 19 nt, Artificial Sequence
  Description of Artificial Sequence: Synthetic oligonucleotide
cauacucaugaccccauga

SEQ ID NO: 216418 - RNA, 19 nt, Artificial Sequence
  Description of Artificial Sequence: Synthetic oligonucleotide
aacgagcauagguauccuu

SEQ ID NO: 216419 - RNA, 19 nt, Artificial Sequence
  Description of Artificial Sequence: Synthetic oligonucleotide
cagcauaagccaagccuag

SEQ ID NO: 216420 - RNA, 19 nt, Artificial Sequence
  Description of Artificial Sequence: Synthetic oligonucleotide
cgcguuaugagccauguug

SEQ ID NO: 216421 - RNA, 19 nt, Artificial Sequence
  Description of Artificial Sequence: Synthetic oligonucleotide
acaaaacaauaggagguaa

SEQ ID NO: 216422 - RNA, 19 nt, Artificial Sequence
  Description of Artificial Sequence: Synthetic oligonucleotide
guucugguacauaauucac

SEQ ID NO: 216423 - RNA, 19 nt, Artificial Sequence
  Description of Artificial Sequence: Synthetic oligonucleotide
ggaugguagaaguaacauc

SEQ ID NO: 216424 - RNA, 19 nt, Artificial Sequence
  Description of Artificial Sequence: Synthetic oligonucleotide
cuugacucaugagcugccg

SEQ ID NO: 216425 - RNA, 19 nt, Artificial Sequence
  Description of Artificial Sequence: Synthetic oligonucleotide
cauucgggcagaguccacc

SEQ ID NO: 216426 - RNA, 19 nt, Artificial Sequence
  Description of Artificial Sequence: Synthetic oligonucleotide
agaccaaagauggaaccaa

SEQ ID NO: 216427 - RNA, 19 nt, Artificial Sequence
  Description of Artificial Sequence: Synthetic oligonucleotide
cuaaauguguaaggcccug

SEQ ID NO: 216428 - RNA, 19 nt, Artificial Sequence
  Description of Artificial Sequence: Synthetic oligonucleotide
ucauuccggaccccagagu

SEQ ID NO: 216429 - RNA, 19 nt, Artificial Sequence
  Description of Artificial Sequence: Synthetic oligonucleotide
auaccucagcaagugacca

SEQ ID NO: 216430 - RNA, 19 nt, Artificial Sequence
  Description of Artificial Sequence: Synthetic oligonucleotide
cauugagcaucaaugccaa

SEQ ID NO: 216431 - RNA, 19 nt, Artificial Sequence
  Description of Artificial Sequence: Synthetic oligonucleotide
cuugaggcauucacgcuca

SEQ ID NO: 216432 - RNA, 19 nt, Artificial Sequence
  Description of Artificial Sequence: Synthetic oligonucleotide
auucgggcagaguccaccu

SEQ ID NO: 216433 - RNA, 19 nt, Artificial Sequence
  Description of Artificial Sequence: Synthetic oligonucleotide
guguuggcaaaacuucgga

SEQ ID NO: 216434 - RNA, 19 nt, Artificial Sequence
  Description of Artificial Sequence: Synthetic oligonucleotide
ugccgaucacugugguagg

SEQ ID NO: 216435 - RNA, 19 nt, Artificial Sequence
  Description of Artificial Sequence: Synthetic oligonucleotide
agugcagcuaggauugccu

SEQ ID NO: 216436 - RNA, 19 nt, Artificial Sequence
  Description of Artificial Sequence: Synthetic oligonucleotide
agggaaacggcugaacuuu

SEQ ID NO: 216437 - RNA, 19 nt, Artificial Sequence
  Description of Artificial Sequence: Synthetic oligonucleotide
gacgagcauuauugguacc

SEQ ID NO: 216438 - RNA, 19 nt, Artificial Sequence
  Description of Artificial Sequence: Synthetic oligonucleotide
aaacuucggaauggcucug

SEQ ID NO: 216439 - RNA, 19 nt, Artificial Sequence
  Description of Artificial Sequence: Synthetic oligonucleotide
gccaucaucagucagcagu

SEQ ID NO: 216440 - RNA, 19 nt, Artificial Sequence
  Description of Artificial Sequence: Synthetic oligonucleotide
caagcgcaccaugaagagg

SEQ ID NO: 216441 - RNA, 19 nt, Artificial Sequence
  Description of Artificial Sequence: Synthetic oligonucleotide
aguacgcguucucaucuau

SEQ ID NO: 216442 - RNA, 19 nt, Artificial Sequence
  Description of Artificial Sequence: Synthetic oligonucleotide
caguuugccauagugugga

SEQ ID NO: 216443 - RNA, 19 nt, Artificial Sequence
  Description of Artificial Sequence: Synthetic oligonucleotide
cuguaccuucagcacauuc

SEQ ID NO: 216444 - RNA, 19 nt, Artificial Sequence
  Description of Artificial Sequence: Synthetic oligonucleotide
agaccuuugaguacgcguu

SEQ ID NO: 216445 - RNA, 19 nt, Artificial Sequence
  Description of Artificial Sequence: Synthetic oligonucleotide
aagagguuauugggguccu

SEQ ID NO: 216446 - RNA, 19 nt, Artificial Sequence
  Description of Artificial Sequence: Synthetic oligonucleotide
auggaguuauaggaaacuu

SEQ ID NO: 216447 - RNA, 19 nt, Artificial Sequence
  Description of Artificial Sequence: Synthetic oligonucleotide
auggcgacccagcaugaau

SEQ ID NO: 216448 - RNA, 19 nt, Artificial Sequence
  Description of Artificial Sequence: Synthetic oligonucleotide
gaccaaagguucgcagugc

SEQ ID NO: 216449 - RNA, 19 nt, Artificial Sequence
  Description of Artificial Sequence: Synthetic oligonucleotide
gaccuuugaguacgcguuc

SEQ ID NO: 216450 - RNA, 19 nt, Artificial Sequence
  Description of Artificial Sequence: Synthetic oligonucleotide
ucggaauggcucugacaca

SEQ ID NO: 216451 - RNA, 19 nt, Artificial Sequence
  Description of Artificial Sequence: Synthetic oligonucleotide
uccgcguuaugagccaugu

SEQ ID NO: 216452 - RNA, 19 nt, Artificial Sequence
  Description of Artificial Sequence: Synthetic oligonucleotide
uaaccagcauucggggcug

SEQ ID NO: 216453 - RNA, 19 nt, Artificial Sequence
  Description of Artificial Sequence: Synthetic oligonucleotide
auguuguaggggacaaucu

SEQ ID NO: 216454 - RNA, 19 nt, Artificial Sequence
  Description of Artificial Sequence: Synthetic oligonucleotide
ugaucguuuuaggcuuccc

SEQ ID NO: 216455 - RNA, 19 nt, Artificial Sequence
  Description of Artificial Sequence: Synthetic oligonucleotide
ggugagauagaggcagacc

SEQ ID NO: 216456 - RNA, 19 nt, Artificial Sequence
  Description of Artificial Sequence: Synthetic oligonucleotide
caaugccaaucucagagcu

SEQ ID NO: 216457 - RNA, 19 nt, Artificial Sequence
  Description of Artificial Sequence: Synthetic oligonucleotide
gguacccuucccuaaaugu

SEQ ID NO: 216458 - RNA, 19 nt, Artificial Sequence
  Description of Artificial Sequence: Synthetic oligonucleotide
gugaccaaagguucgcagu

SEQ ID NO: 216459 - RNA, 19 nt, Artificial Sequence
  Description of Artificial Sequence: Synthetic oligonucleotide
ugagggucggcuccccaua

SEQ ID NO: 216460 - RNA, 19 nt, Artificial Sequence
  Description of Artificial Sequence: Synthetic oligonucleotide
cagcuacucccugaugugc

SEQ ID NO: 216461 - RNA, 19 nt, Artificial Sequence
  Description of Artificial Sequence: Synthetic oligonucleotide
cuucggaauggcucugaca

SEQ ID NO: 216462 - RNA, 19 nt, Artificial Sequence
  Description of Artificial Sequence: Synthetic oligonucleotide
ggaaacggcugaacuuucg

SEQ ID NO: 216463 - RNA, 19 nt, Artificial Sequence
  Description of Artificial Sequence: Synthetic oligonucleotide
uugccucgauagcuucacc

SEQ ID NO: 216464 - RNA, 19 nt, Artificial Sequence
  Description of Artificial Sequence: Synthetic oligonucleotide
cacacccaaggcacagcgc

SEQ ID NO: 216465 - RNA, 19 nt, Artificial Sequence
  Description of Artificial Sequence: Synthetic oligonucleotide
auuccggaccccagaguuc

SEQ ID NO: 216466 - RNA, 19 nt, Artificial Sequence
  Description of Artificial Sequence: Synthetic oligonucleotide
ccuucccuaaauguguaag

SEQ ID NO: 216467 - RNA, 19 nt, Artificial Sequence
  Description of Artificial Sequence: Synthetic oligonucleotide
gccaccaaaccuguuauuc

SEQ ID NO: 216468 - RNA, 19 nt, Artificial Sequence
  Description of Artificial Sequence: Synthetic oligonucleotide
ugcuccgcguuaugagcca

SEQ ID NO: 216469 - RNA, 19 nt, Artificial Sequence
  Description of Artificial Sequence: Synthetic oligonucleotide
ggaacaguauccaccccug

SEQ ID NO: 216470 - RNA, 19 nt, Artificial Sequence
  Description of Artificial Sequence: Synthetic oligonucleotide
gagcauuauugguaccacu

SEQ ID NO: 216471 - RNA, 19 nt, Artificial Sequence
  Description of Artificial Sequence: Synthetic oligonucleotide
gagaauuugcucagaguau

SEQ ID NO: 216472 - RNA, 19 nt, Artificial Sequence
  Description of Artificial Sequence: Synthetic oligonucleotide
ccgagcuaaggccaagaag

SEQ ID NO: 216473 - RNA, 19 nt, Artificial Sequence
  Description of Artificial Sequence: Synthetic oligonucleotide
agugguucccgcugcgcuu

SEQ ID NO: 216474 - RNA, 19 nt, Artificial Sequence
  Description of Artificial Sequence: Synthetic oligonucleotide
gagggucggcuccccauac

SEQ ID NO: 216475 - RNA, 19 nt, Artificial Sequence
  Description of Artificial Sequence: Synthetic oligonucleotide
ccaagcgcaccaugaagag

SEQ ID NO: 216476 - RNA, 19 nt, Artificial Sequence
  Description of Artificial Sequence: Synthetic oligonucleotide
guacgcguucucaucuaug

SEQ ID NO: 216477 - RNA, 19 nt, Artificial Sequence
  Description of Artificial Sequence: Synthetic oligonucleotide
cacggacagaaacuggcaa

SEQ ID NO: 216478 - RNA, 19 nt, Artificial Sequence
  Description of Artificial Sequence: Synthetic oligonucleotide
uuaggacaucuucccgauu

SEQ ID NO: 216479 - RNA, 19 nt, Artificial Sequence
  Description of Artificial Sequence: Synthetic oligonucleotide
auagugugauuugccuaga

SEQ ID NO: 216480 - RNA, 19 nt, Artificial Sequence
  Description of Artificial Sequence: Synthetic oligonucleotide
augagagaauuugcucaga

SEQ ID NO: 216481 - RNA, 19 nt, Artificial Sequence
  Description of Artificial Sequence: Synthetic oligonucleotide
ggcgacccagcaugaaugc

SEQ ID NO: 216482 - RNA, 19 nt, Artificial Sequence
  Description of Artificial Sequence: Synthetic oligonucleotide
ccccauggcaauaagcgca

SEQ ID NO: 216483 - RNA, 19 nt, Artificial Sequence
  Description of Artificial Sequence: Synthetic oligonucleotide
cucaugcuccgcguuauga

SEQ ID NO: 216484 - RNA, 19 nt, Artificial Sequence
  Description of Artificial Sequence: Synthetic oligonucleotide
guaaggcccugugccaagc

SEQ ID NO: 216485 - RNA, 19 nt, Artificial Sequence
  Description of Artificial Sequence: Synthetic oligonucleotide
ucauucgggcagaguccac

SEQ ID NO: 216486 - RNA, 19 nt, Artificial Sequence
  Description of Artificial Sequence: Synthetic oligonucleotide
acgcagcagcacuuaacau

SEQ ID NO: 216487 - RNA, 19 nt, Artificial Sequence
  Description of Artificial Sequence: Synthetic oligonucleotide
cugugaucguuuuaggcuu

SEQ ID NO: 216488 - RNA, 19 nt, Artificial Sequence
  Description of Artificial Sequence: Synthetic oligonucleotide
gugaucguuuuaggcuucc

SEQ ID NO: 216489 - RNA, 19 nt, Artificial Sequence
  Description of Artificial Sequence: Synthetic oligonucleotide
ggauugccucgauagcuuc

SEQ ID NO: 216490 - RNA, 19 nt, Artificial Sequence
  Description of Artificial Sequence: Synthetic oligonucleotide
cauuccggaccccagaguu

SEQ ID NO: 216491 - RNA, 19 nt, Artificial Sequence
  Description of Artificial Sequence: Synthetic oligonucleotide
cacugcuaucauuccacaa

SEQ ID NO: 216492 - RNA, 19 nt, Artificial Sequence
  Description of Artificial Sequence: Synthetic oligonucleotide
ccggaguauaacaaaaccu

SEQ ID NO: 216493 - RNA, 19 nt, Artificial Sequence
  Description of Artificial Sequence: Synthetic oligonucleotide
ggcaauaagcgcaaucccu

SEQ ID NO: 216494 - RNA, 19 nt, Artificial Sequence
  Description of Artificial Sequence: Synthetic oligonucleotide
gugccagugcuaaggguac

SEQ ID NO: 216495 - RNA, 19 nt, Artificial Sequence
  Description of Artificial Sequence: Synthetic oligonucleotide
gcugcguucacaaagccau

SEQ ID NO: 216496 - RNA, 19 nt, Artificial Sequence
  Description of Artificial Sequence: Synthetic oligonucleotide
gcaauaagcgcaaucccua

SEQ ID NO: 216497 - RNA, 19 nt, Artificial Sequence
  Description of Artificial Sequence: Synthetic oligonucleotide
aggauugccucgauagcuu

SEQ ID NO: 216498 - RNA, 19 nt, Artificial Sequence
  Description of Artificial Sequence: Synthetic oligonucleotide
cuccgcguuaugagccaug

SEQ ID NO: 216499 - RNA, 19 nt, Artificial Sequence
  Description of Artificial Sequence: Synthetic oligonucleotide
agccucaugcuccgcguua

SEQ ID NO: 216500 - RNA, 19 nt, Artificial Sequence
  Description of Artificial Sequence: Synthetic oligonucleotide
caagggacgcagcagcacu

SEQ ID NO: 216501 - RNA, 19 nt, Artificial Sequence
  Description of Artificial Sequence: Synthetic oligonucleotide
ggagcccacuagccgauac

SEQ ID NO: 216502 - RNA, 19 nt, Artificial Sequence
  Description of Artificial Sequence: Synthetic oligonucleotide
gaguacgcguucucaucua

SEQ ID NO: 216503 - RNA, 19 nt, Artificial Sequence
  Description of Artificial Sequence: Synthetic oligonucleotide
gcuaaggguacagcccgcc

SEQ ID NO: 216504 - RNA, 19 nt, Artificial Sequence
  Description of Artificial Sequence: Synthetic oligonucleotide
gccaccgcuacuugacuca

SEQ ID NO: 216505 - RNA, 19 nt, Artificial Sequence
  Description of Artificial Sequence: Synthetic oligonucleotide
ccacuuaaaggucauaguu

SEQ ID NO: 216506 - RNA, 19 nt, Artificial Sequence
  Description of Artificial Sequence: Synthetic oligonucleotide
ggggauaaaggucuuuauu

SEQ ID NO: 216507 - RNA, 19 nt, Artificial Sequence
  Description of Artificial Sequence: Synthetic oligonucleotide
guguggacgaagaaauuuu

SEQ ID NO: 216508 - RNA, 19 nt, Artificial Sequence
  Description of Artificial Sequence: Synthetic oligonucleotide
ggaagacuccauggcgacc

SEQ ID NO: 216509 - RNA, 19 nt, Artificial Sequence
  Description of Artificial Sequence: Synthetic oligonucleotide
gagcccacuagccgauacu

SEQ ID NO: 216510 - RNA, 19 nt, Artificial Sequence
  Description of Artificial Sequence: Synthetic oligonucleotide
caggguacccuucccuaaa

SEQ ID NO: 216511 - RNA, 19 nt, Artificial Sequence
  Description of Artificial Sequence: Synthetic oligonucleotide
caccgcuacuugacucaug

SEQ ID NO: 216512 - RNA, 19 nt, Artificial Sequence
  Description of Artificial Sequence: Synthetic oligonucleotide
ggacgcagcagcacuuaac

SEQ ID NO: 216513 - RNA, 19 nt, Artificial Sequence
  Description of Artificial Sequence: Synthetic oligonucleotide
gccacuuaaaggucauagu

SEQ ID NO: 216514 - RNA, 19 nt, Artificial Sequence
  Description of Artificial Sequence: Synthetic oligonucleotide
uauccaccccuggcagaca

SEQ ID NO: 216515 - RNA, 19 nt, Artificial Sequence
  Description of Artificial Sequence: Synthetic oligonucleotide
gccgaucacugugguaggg

SEQ ID NO: 216516 - RNA, 19 nt, Artificial Sequence
  Description of Artificial Sequence: Synthetic oligonucleotide
cuugaccaaaggcugcguu

SEQ ID NO: 216517 - RNA, 19 nt, Artificial Sequence
  Description of Artificial Sequence: Synthetic oligonucleotide
gcgcaaucccuagaacagc

SEQ ID NO: 216518 - RNA, 19 nt, Artificial Sequence
  Description of Artificial Sequence: Synthetic oligonucleotide
ggacaucuucccgauugga

SEQ ID NO: 216519 - RNA, 19 nt, Artificial Sequence
  Description of Artificial Sequence: Synthetic oligonucleotide
cuaaggguacagcccgccu

SEQ ID NO: 216520 - RNA, 19 nt, Artificial Sequence
  Description of Artificial Sequence: Synthetic oligonucleotide
cgagcauagguauccuuga

SEQ ID NO: 216521 - RNA, 19 nt, Artificial Sequence
  Description of Artificial Sequence: Synthetic oligonucleotide
ccuaaauguguaaggcccu

SEQ ID NO: 216522 - RNA, 19 nt, Artificial Sequence
  Description of Artificial Sequence: Synthetic oligonucleotide
ccagacgagcauuauuggu

SEQ ID NO: 216523 - RNA, 19 nt, Artificial Sequence
  Description of Artificial Sequence: Synthetic oligonucleotide
ccgccugagggucggcucc

SEQ ID NO: 216524 - RNA, 19 nt, Artificial Sequence
  Description of Artificial Sequence: Synthetic oligonucleotide
cgagcauuauugguaccac

SEQ ID NO: 216525 - RNA, 19 nt, Artificial Sequence
  Description of Artificial Sequence: Synthetic oligonucleotide
gcgacccagcaugaaugcc

SEQ ID NO: 216526 - RNA, 19 nt, Artificial Sequence
  Description of Artificial Sequence: Synthetic oligonucleotide
gggaaacggcugaacuuuc

SEQ ID NO: 216527 - RNA, 19 nt, Artificial Sequence
  Description of Artificial Sequence: Synthetic oligonucleotide
ccgcuacuugacucaugag

SEQ ID NO: 216528 - RNA, 19 nt, Artificial Sequence
  Description of Artificial Sequence: Synthetic oligonucleotide
cccaaaugauugaggccca

SEQ ID NO: 216529 - RNA, 19 nt, Artificial Sequence
  Description of Artificial Sequence: Synthetic oligonucleotide
gcagugguucccgcugcgc

SEQ ID NO: 216530 - RNA, 19 nt, Artificial Sequence
  Description of Artificial Sequence: Synthetic oligonucleotide
gucucaugguauugcuguu

SEQ ID NO: 216531 - RNA, 19 nt, Artificial Sequence
  Description of Artificial Sequence: Synthetic oligonucleotide
ggguucuuccggaguauaa

SEQ ID NO: 216532 - RNA, 19 nt, Artificial Sequence
  Description of Artificial Sequence: Synthetic oligonucleotide
ccacugcuaucauuccaca

SEQ ID NO: 216533 - RNA, 19 nt, Artificial Sequence
  Description of Artificial Sequence: Synthetic oligonucleotide
cauggcgacccagcaugaa

SEQ ID NO: 216534 - RNA, 19 nt, Artificial Sequence
  Description of Artificial Sequence: Synthetic oligonucleotide
cacgcucaccacucauggu

SEQ ID NO: 216535 - RNA, 19 nt, Artificial Sequence
  Description of Artificial Sequence: Synthetic oligonucleotide
cccauaccucagcaaguga

SEQ ID NO: 216536 - RNA, 19 nt, Artificial Sequence
  Description of Artificial Sequence: Synthetic oligonucleotide
agcccgccugagggucggc

SEQ ID NO: 216537 - RNA, 19 nt, Artificial Sequence
  Description of Artificial Sequence: Synthetic oligonucleotide
ccucaugcuccgcguuaug

SEQ ID NO: 216538 - RNA, 19 nt, Artificial Sequence
  Description of Artificial Sequence: Synthetic oligonucleotide
cccgccugagggucggcuc

SEQ ID NO: 216539 - RNA, 19 nt, Artificial Sequence
  Description of Artificial Sequence: Synthetic oligonucleotide
agcgcaccaugaagagguu

SEQ ID NO: 216540 - RNA, 19 nt, Artificial Sequence
  Description of Artificial Sequence: Synthetic oligonucleotide
ccagugcagcuaggauugc

SEQ ID NO: 216541 - RNA, 19 nt, Artificial Sequence
  Description of Artificial Sequence: Synthetic oligonucleotide
gcgcaccaugaagagguua

SEQ ID NO: 216542 - RNA, 19 nt, Artificial Sequence
  Description of Artificial Sequence: Synthetic oligonucleotide
gccugagggucggcucccc

SEQ ID NO: 216543 - RNA, 19 nt, Artificial Sequence
  Description of Artificial Sequence: Synthetic oligonucleotide
gcuccgcguuaugagccau

SEQ ID NO: 216544 - RNA, 19 nt, Artificial Sequence
  Description of Artificial Sequence: Synthetic oligonucleotide
gcccgccugagggucggcu

SEQ ID NO: 216545 - RNA, 19 nt, Artificial Sequence
  Description of Artificial Sequence: Synthetic oligonucleotide
gcuguaccuucagcacauu

SEQ ID NO: 216546 - RNA, 19 nt, Artificial Sequence
  Description of Artificial Sequence: Synthetic oligonucleotide
ccaccgcuacuugacucau

SEQ ID NO: 216547 - RNA, 19 nt, Artificial Sequence
  Description of Artificial Sequence: Synthetic oligonucleotide
ccgcguuaugagccauguu

SEQ ID NO: 216548 - RNA, 19 nt, Artificial Sequence
  Description of Artificial Sequence: Synthetic oligonucleotide
uguacuaccaccuuuagcu

SEQ ID NO: 216549 - RNA, 19 nt, Artificial Sequence
  Description of Artificial Sequence: Synthetic oligonucleotide
uuagaggcgguaaagaucu

SEQ ID NO: 216550 - RNA, 19 nt, Artificial Sequence
  Description of Artificial Sequence: Synthetic oligonucleotide
uguaaaagaguggaugucg

SEQ ID NO: 216551 - RNA, 19 nt, Artificial Sequence
  Description of Artificial Sequence: Synthetic oligonucleotide
uguuguauccgugagaccc

SEQ ID NO: 216552 - RNA, 19 nt, Artificial Sequence
  Description of Artificial Sequence: Synthetic oligonucleotide
gauuaggcaacaauggcgg

SEQ ID NO: 216553 - RNA, 19 nt, Artificial Sequence
  Description of Artificial Sequence: Synthetic oligonucleotide
agauugagaauguugagcu

SEQ ID NO: 216554 - RNA, 19 nt, Artificial Sequence
  Description of Artificial Sequence: Synthetic oligonucleotide
ugaaucauucuccauagaa

SEQ ID NO: 216555 - RNA, 19 nt, Artificial Sequence
  Description of Artificial Sequence: Synthetic oligonucleotide
aguguuguauccgugagac

SEQ ID NO: 216556 - RNA, 19 nt, Artificial Sequence
  Description of Artificial Sequence: Synthetic oligonucleotide
aaguugucgacugaauugg

SEQ ID NO: 216557 - RNA, 19 nt, Artificial Sequence
  Description of Artificial Sequence: Synthetic oligonucleotide
aaaagaguggaugucgaag

SEQ ID NO: 216558 - RNA, 19 nt, Artificial Sequence
  Description of Artificial Sequence: Synthetic oligonucleotide
uguaguaauccaauggaaa

SEQ ID NO: 216559 - RNA, 19 nt, Artificial Sequence
  Description of Artificial Sequence: Synthetic oligonucleotide
uguguaaaagaguggaugu

SEQ ID NO: 216560 - RNA, 19 nt, Artificial Sequence
  Description of Artificial Sequence: Synthetic oligonucleotide
aggaguaccggaaugaaac

SEQ ID NO: 216561 - RNA, 19 nt, Artificial Sequence
  Description of Artificial Sequence: Synthetic oligonucleotide
gaagacacauuagaggcgg

SEQ ID NO: 216562 - RNA, 19 nt, Artificial Sequence
  Description of Artificial Sequence: Synthetic oligonucleotide
ugaagacacauuagaggcg

SEQ ID NO: 216563 - RNA, 19 nt, Artificial Sequence
  Description of Artificial Sequence: Synthetic oligonucleotide
aacccgagauaucuggcac

SEQ ID NO: 216564 - RNA, 19 nt, Artificial Sequence
  Description of Artificial Sequence: Synthetic oligonucleotide
auaggaaucaucaguauug

SEQ ID NO: 216565 - RNA, 19 nt, Artificial Sequence
  Description of Artificial Sequence: Synthetic oligonucleotide
ugaggucaccagaauaagg

SEQ ID NO: 216566 - RNA, 19 nt, Artificial Sequence
  Description of Artificial Sequence: Synthetic oligonucleotide
uagacuacugccacuauuc

SEQ ID NO: 216567 - RNA, 19 nt, Artificial Sequence
  Description of Artificial Sequence: Synthetic oligonucleotide
accuucaacagauugcgug

SEQ ID NO: 216568 - RNA, 19 nt, Artificial Sequence
  Description of Artificial Sequence: Synthetic oligonucleotide
uucaaaucauacugcacca

SEQ ID NO: 216569 - RNA, 19 nt, Artificial Sequence
  Description of Artificial Sequence: Synthetic oligonucleotide
uggaugucgaaguacgccc

SEQ ID NO: 216570 - RNA, 19 nt, Artificial Sequence
  Description of Artificial Sequence: Synthetic oligonucleotide
aauggcgggacuccaggag

SEQ ID NO: 216571 - RNA, 19 nt, Artificial Sequence
  Description of Artificial Sequence: Synthetic oligonucleotide
uuuucggggauaauuugac

SEQ ID NO: 216572 - RNA, 19 nt, Artificial Sequence
  Description of Artificial Sequence: Synthetic oligonucleotide
agauuuagcccugagauau

SEQ ID NO: 216573 - RNA, 19 nt, Artificial Sequence
  Description of Artificial Sequence: Synthetic oligonucleotide
acucugauaaccagacucc

SEQ ID NO: 216574 - RNA, 19 nt, Artificial Sequence
  Description of Artificial Sequence: Synthetic oligonucleotide
uucgaguugaggcugugac

SEQ ID NO: 216575 - RNA, 19 nt, Artificial Sequence
  Description of Artificial Sequence: Synthetic oligonucleotide
auggauuaggcaacaaugg

SEQ ID NO: 216576 - RNA, 19 nt, Artificial Sequence
  Description of Artificial Sequence: Synthetic oligonucleotide
uaguauggcaggcuggugu

SEQ ID NO: 216577 - RNA, 19 nt, Artificial Sequence
  Description of Artificial Sequence: Synthetic oligonucleotide
aauaaggguugcuggccag

SEQ ID NO: 216578 - RNA, 19 nt, Artificial Sequence
  Description of Artificial Sequence: Synthetic oligonucleotide
aucuuagaugucaaggagg

SEQ ID NO: 216579 - RNA, 19 nt, Artificial Sequence
  Description of Artificial Sequence: Synthetic oligonucleotide
uacuggaggugacugauac

SEQ ID NO: 216580 - RNA, 19 nt, Artificial Sequence
  Description of Artificial Sequence: Synthetic oligonucleotide
aacagauugcguggucugc

SEQ ID NO: 216581 - RNA, 19 nt, Artificial Sequence
  Description of Artificial Sequence: Synthetic oligonucleotide
ugcguggucugcaacugcg

SEQ ID NO: 216582 - RNA, 19 nt, Artificial Sequence
  Description of Artificial Sequence: Synthetic oligonucleotide
auacaccaguguuguaucc

SEQ ID NO: 216583 - RNA, 19 nt, Artificial Sequence
  Description of Artificial Sequence: Synthetic oligonucleotide
uguuggaaagggguggccg

SEQ ID NO: 216584 - RNA, 19 nt, Artificial Sequence
  Description of Artificial Sequence: Synthetic oligonucleotide
gaguggaugucgaaguacg

SEQ ID NO: 216585 - RNA, 19 nt, Artificial Sequence
  Description of Artificial Sequence: Synthetic oligonucleotide
uggcucaagccacuuaaag

SEQ ID NO: 216586 - RNA, 19 nt, Artificial Sequence
  Description of Artificial Sequence: Synthetic oligonucleotide
uuggaaucuccucacugug

SEQ ID NO: 216587 - RNA, 19 nt, Artificial Sequence
  Description of Artificial Sequence: Synthetic oligonucleotide
cugagauaucugcugagcc

SEQ ID NO: 216588 - RNA, 19 nt, Artificial Sequence
  Description of Artificial Sequence: Synthetic oligonucleotide
gguuagaugaaacuguaga

SEQ ID NO: 216589 - RNA, 19 nt, Artificial Sequence
  Description of Artificial Sequence: Synthetic oligonucleotide
cagaacccgagauaucugg

SEQ ID NO: 216590 - RNA, 19 nt, Artificial Sequence
  Description of Artificial Sequence: Synthetic oligonucleotide
uacuauugccauaggaauc

SEQ ID NO: 216591 - RNA, 19 nt, Artificial Sequence
  Description of Artificial Sequence: Synthetic oligonucleotide
agccauaauauauggauua

SEQ ID NO: 216592 - RNA, 19 nt, Artificial Sequence
  Description of Artificial Sequence: Synthetic oligonucleotide
ugauacaccaguguuguau

SEQ ID NO: 216593 - RNA, 19 nt, Artificial Sequence
  Description of Artificial Sequence: Synthetic oligonucleotide
aaacugcaaugccccaaac

SEQ ID NO: 216594 - RNA, 19 nt, Artificial Sequence
  Description of Artificial Sequence: Synthetic oligonucleotide
ggauuaggcaacaauggcg

SEQ ID NO: 216595 - RNA, 19 nt, Artificial Sequence
  Description of Artificial Sequence: Synthetic oligonucleotide
uauacuuguggcggguagg

SEQ ID NO: 216596 - RNA, 19 nt, Artificial Sequence
  Description of Artificial Sequence: Synthetic oligonucleotide
acuacuauugccauaggaa

SEQ ID NO: 216597 - RNA, 19 nt, Artificial Sequence
  Description of Artificial Sequence: Synthetic oligonucleotide
guauacaggcuacuaggag

SEQ ID NO: 216598 - RNA, 19 nt, Artificial Sequence
  Description of Artificial Sequence: Synthetic oligonucleotide
agguggauuugcuuggcag

SEQ ID NO: 216599 - RNA, 19 nt, Artificial Sequence
  Description of Artificial Sequence: Synthetic oligonucleotide
auauacuuguggcggguag

SEQ ID NO: 216600 - RNA, 19 nt, Artificial Sequence
  Description of Artificial Sequence: Synthetic oligonucleotide
auauggauuaggcaacaau

SEQ ID NO: 216601 - RNA, 19 nt, Artificial Sequence
  Description of Artificial Sequence: Synthetic oligonucleotide
gaugaugaaggaucugaga

SEQ ID NO: 216602 - RNA, 19 nt, Artificial Sequence
  Description of Artificial Sequence: Synthetic oligonucleotide
guagauaacgcacugcugu

SEQ ID NO: 216603 - RNA, 19 nt, Artificial Sequence
  Description of Artificial Sequence: Synthetic oligonucleotide
auacuuguggcggguaggc

SEQ ID NO: 216604 - RNA, 19 nt, Artificial Sequence
  Description of Artificial Sequence: Synthetic oligonucleotide
uauaaguugucgacugaau

SEQ ID NO: 216605 - RNA, 19 nt, Artificial Sequence
  Description of Artificial Sequence: Synthetic oligonucleotide
gauacaccaguguuguauc

SEQ ID NO: 216606 - RNA, 19 nt, Artificial Sequence
  Description of Artificial Sequence: Synthetic oligonucleotide
caggcuaaggccuagacua

SEQ ID NO: 216607 - RNA, 19 nt, Artificial Sequence
  Description of Artificial Sequence: Synthetic oligonucleotide
ugaugggcccuccacuucc

SEQ ID NO: 216608 - RNA, 19 nt, Artificial Sequence
  Description of Artificial Sequence: Synthetic oligonucleotide
ugggagguauaaguugucg

SEQ ID NO: 216609 - RNA, 19 nt, Artificial Sequence
  Description of Artificial Sequence: Synthetic oligonucleotide
accauauacuuguggcggg

SEQ ID NO: 216610 - RNA, 19 nt, Artificial Sequence
  Description of Artificial Sequence: Synthetic oligonucleotide
gagauaucuggcacgcccg

SEQ ID NO: 216611 - RNA, 19 nt, Artificial Sequence
  Description of Artificial Sequence: Synthetic oligonucleotide
aggccuagacuacugccac

SEQ ID NO: 216612 - RNA, 19 nt, Artificial Sequence
  Description of Artificial Sequence: Synthetic oligonucleotide
ucaacagauugcguggucu

SEQ ID NO: 216613 - RNA, 19 nt, Artificial Sequence
  Description of Artificial Sequence: Synthetic oligonucleotide
uagauaacgcacugcugug

SEQ ID NO: 216614 - RNA, 19 nt, Artificial Sequence
  Description of Artificial Sequence: Synthetic oligonucleotide
gacucauaaucagaaagga

SEQ ID NO: 216615 - RNA, 19 nt, Artificial Sequence
  Description of Artificial Sequence: Synthetic oligonucleotide
uuucggggauaauuugacc

SEQ ID NO: 216616 - RNA, 19 nt, Artificial Sequence
  Description of Artificial Sequence: Synthetic oligonucleotide
acucugguuagaugaaacu

SEQ ID NO: 216617 - RNA, 19 nt, Artificial Sequence
  Description of Artificial Sequence: Synthetic oligonucleotide
cuggccgugguagagaaag

SEQ ID NO: 216618 - RNA, 19 nt, Artificial Sequence
  Description of Artificial Sequence: Synthetic oligonucleotide
gaguaccggaaugaaaccc

SEQ ID NO: 216619 - RNA, 19 nt, Artificial Sequence
  Description of Artificial Sequence: Synthetic oligonucleotide
aggguauucugcuguguag

SEQ ID NO: 216620 - RNA, 19 nt, Artificial Sequence
  Description of Artificial Sequence: Synthetic oligonucleotide
accggaaugaaacccuugu

SEQ ID NO: 216621 - RNA, 19 nt, Artificial Sequence
  Description of Artificial Sequence: Synthetic oligonucleotide
ugggaaacgggauacugua

SEQ ID NO: 216622 - RNA, 19 nt, Artificial Sequence
  Description of Artificial Sequence: Synthetic oligonucleotide
auuaggcaacaauggcggg

SEQ ID NO: 216623 - RNA, 19 nt, Artificial Sequence
  Description of Artificial Sequence: Synthetic oligonucleotide
uguaguauggcaggcuggu

SEQ ID NO: 216624 - RNA, 19 nt, Artificial Sequence
  Description of Artificial Sequence: Synthetic oligonucleotide
ugucgaaguacgcccagaa

SEQ ID NO: 216625 - RNA, 19 nt, Artificial Sequence
  Description of Artificial Sequence: Synthetic oligonucleotide
uuaggcaacaauggcggga

SEQ ID NO: 216626 - RNA, 19 nt, Artificial Sequence
  Description of Artificial Sequence: Synthetic oligonucleotide
gaauaaggguugcuggcca

SEQ ID NO: 216627 - RNA, 19 nt, Artificial Sequence
  Description of Artificial Sequence: Synthetic oligonucleotide
ggagguauaaguugucgac

SEQ ID NO: 216628 - RNA, 19 nt, Artificial Sequence
  Description of Artificial Sequence: Synthetic oligonucleotide
auaucuggcacgcccgugu

SEQ ID NO: 216629 - RNA, 19 nt, Artificial Sequence
  Description of Artificial Sequence: Synthetic oligonucleotide
uaaaagaguggaugucgaa

SEQ ID NO: 216630 - RNA, 19 nt, Artificial Sequence
  Description of Artificial Sequence: Synthetic oligonucleotide
cuaaggccuagacuacugc

SEQ ID NO: 216631 - RNA, 19 nt, Artificial Sequence
  Description of Artificial Sequence: Synthetic oligonucleotide
uggcucugcauaaucggcu

SEQ ID NO: 216632 - RNA, 19 nt, Artificial Sequence
  Description of Artificial Sequence: Synthetic oligonucleotide
uuuagcccugagauaucug

SEQ ID NO: 216633 - RNA, 19 nt, Artificial Sequence
  Description of Artificial Sequence: Synthetic oligonucleotide
gguauacuagaaguggaag

SEQ ID NO: 216634 - RNA, 19 nt, Artificial Sequence
  Description of Artificial Sequence: Synthetic oligonucleotide
uggcgcuuuguaaaaggac

SEQ ID NO: 216635 - RNA, 19 nt, Artificial Sequence
  Description of Artificial Sequence: Synthetic oligonucleotide
gaugucgaaguacgcccag

SEQ ID NO: 216636 - RNA, 19 nt, Artificial Sequence
  Description of Artificial Sequence: Synthetic oligonucleotide
acuuguggcggguaggcau

SEQ ID NO: 216637 - RNA, 19 nt, Artificial Sequence
  Description of Artificial Sequence: Synthetic oligonucleotide
gcauguaacagcccuggag

SEQ ID NO: 216638 - RNA, 19 nt, Artificial Sequence
  Description of Artificial Sequence: Synthetic oligonucleotide
acccgagauaucuggcacg

SEQ ID NO: 216639 - RNA, 19 nt, Artificial Sequence
  Description of Artificial Sequence: Synthetic oligonucleotide
ugguugucugaagaccccg

SEQ ID NO: 216640 - RNA, 19 nt, Artificial Sequence
  Description of Artificial Sequence: Synthetic oligonucleotide
agacuccugacucugguua

SEQ ID NO: 216641 - RNA, 19 nt, Artificial Sequence
  Description of Artificial Sequence: Synthetic oligonucleotide
aagaguggaugucgaagua

SEQ ID NO: 216642 - RNA, 19 nt, Artificial Sequence
  Description of Artificial Sequence: Synthetic oligonucleotide
gauggggugaaugccuggc

SEQ ID NO: 216643 - RNA, 19 nt, Artificial Sequence
  Description of Artificial Sequence: Synthetic oligonucleotide
acgcccguguuacuggagg

SEQ ID NO: 216644 - RNA, 19 nt, Artificial Sequence
  Description of Artificial Sequence: Synthetic oligonucleotide
aggcauguaacagcccugg

SEQ ID NO: 216645 - RNA, 19 nt, Artificial Sequence
  Description of Artificial Sequence: Synthetic oligonucleotide
gaacccgagauaucuggca

SEQ ID NO: 216646 - RNA, 19 nt, Artificial Sequence
  Description of Artificial Sequence: Synthetic oligonucleotide
ucuggcacgcccguguuac

SEQ ID NO: 216647 - RNA, 19 nt, Artificial Sequence
  Description of Artificial Sequence: Synthetic oligonucleotide
uaggcaacaauggcgggac

SEQ ID NO: 216648 - RNA, 19 nt, Artificial Sequence
  Description of Artificial Sequence: Synthetic oligonucleotide
cugacccaaacugcaaugc

SEQ ID NO: 216649 - RNA, 19 nt, Artificial Sequence
  Description of Artificial Sequence: Synthetic oligonucleotide
cuacuaggagccuggcuug

SEQ ID NO: 216650 - RNA, 19 nt, Artificial Sequence
  Description of Artificial Sequence: Synthetic oligonucleotide
guggaugucgaaguacgcc

SEQ ID NO: 216651 - RNA, 19 nt, Artificial Sequence
  Description of Artificial Sequence: Synthetic oligonucleotide
cugcuuggaauuacugaac

SEQ ID NO: 216652 - RNA, 19 nt, Artificial Sequence
  Description of Artificial Sequence: Synthetic oligonucleotide
guguagauaacgcacugcu

SEQ ID NO: 216653 - RNA, 19 nt, Artificial Sequence
  Description of Artificial Sequence: Synthetic oligonucleotide
cucugcauaaucggcuggg

SEQ ID NO: 216654 - RNA, 19 nt, Artificial Sequence
  Description of Artificial Sequence: Synthetic oligonucleotide
aguaccggaaugaaacccu

SEQ ID NO: 216655 - RNA, 19 nt, Artificial Sequence
  Description of Artificial Sequence: Synthetic oligonucleotide
aaaggguauucugcugugu

SEQ ID NO: 216656 - RNA, 19 nt, Artificial Sequence
  Description of Artificial Sequence: Synthetic oligonucleotide
guugucgacugaauugggc

SEQ ID NO: 216657 - RNA, 19 nt, Artificial Sequence
  Description of Artificial Sequence: Synthetic oligonucleotide
ggagccauaauauauggau

SEQ ID NO: 216658 - RNA, 19 nt, Artificial Sequence
  Description of Artificial Sequence: Synthetic oligonucleotide
auaaggguugcuggccagg

SEQ ID NO: 216659 - RNA, 19 nt, Artificial Sequence
  Description of Artificial Sequence: Synthetic oligonucleotide
gaguacacagaacccgaga

SEQ ID NO: 216660 - RNA, 19 nt, Artificial Sequence
  Description of Artificial Sequence: Synthetic oligonucleotide
aggaagguugggcggagcu

SEQ ID NO: 216661 - RNA, 19 nt, Artificial Sequence
  Description of Artificial Sequence: Synthetic oligonucleotide
gauugcguggucugcaacu

SEQ ID NO: 216662 - RNA, 19 nt, Artificial Sequence
  Description of Artificial Sequence: Synthetic oligonucleotide
augccuggcgcuuuguaaa

SEQ ID NO: 216663 - RNA, 19 nt, Artificial Sequence
  Description of Artificial Sequence: Synthetic oligonucleotide
gucgaaguacgcccagaag

SEQ ID NO: 216664 - RNA, 19 nt, Artificial Sequence
  Description of Artificial Sequence: Synthetic oligonucleotide
cuuccuagggcugaaggca

SEQ ID NO: 216665 - RNA, 19 nt, Artificial Sequence
  Description of Artificial Sequence: Synthetic oligonucleotide
uucauugagagaggguaua

SEQ ID NO: 216666 - RNA, 19 nt, Artificial Sequence
  Description of Artificial Sequence: Synthetic oligonucleotide
acacauuagaggcgguaaa

SEQ ID NO: 216667 - RNA, 19 nt, Artificial Sequence
  Description of Artificial Sequence: Synthetic oligonucleotide
cuuguggcggguaggcaug

SEQ ID NO: 216668 - RNA, 19 nt, Artificial Sequence
  Description of Artificial Sequence: Synthetic oligonucleotide
agaggcgguaaagaucuug

SEQ ID NO: 216669 - RNA, 19 nt, Artificial Sequence
  Description of Artificial Sequence: Synthetic oligonucleotide
uuccuagggcugaaggcaa

SEQ ID NO: 216670 - RNA, 19 nt, Artificial Sequence
  Description of Artificial Sequence: Synthetic oligonucleotide
cuacuauugccauaggaau

SEQ ID NO: 216671 - RNA, 19 nt, Artificial Sequence
  Description of Artificial Sequence: Synthetic oligonucleotide
uucaacagauugcgugguc

SEQ ID NO: 216672 - RNA, 19 nt, Artificial Sequence
  Description of Artificial Sequence: Synthetic oligonucleotide
gauugaugggcccuccacu

SEQ ID NO: 216673 - RNA, 19 nt, Artificial Sequence
  Description of Artificial Sequence: Synthetic oligonucleotide
ugcugcgugguguggugag

SEQ ID NO: 216674 - RNA, 19 nt, Artificial Sequence
  Description of Artificial Sequence: Synthetic oligonucleotide
ggcucaagccacuuaaaga

SEQ ID NO: 216675 - RNA, 19 nt, Artificial Sequence
  Description of Artificial Sequence: Synthetic oligonucleotide
guguaguauggcaggcugg

SEQ ID NO: 216676 - RNA, 19 nt, Artificial Sequence
  Description of Artificial Sequence: Synthetic oligonucleotide
gauggagcugggauaccgc

SEQ ID NO: 216677 - RNA, 19 nt, Artificial Sequence
  Description of Artificial Sequence: Synthetic oligonucleotide
gacacauuagaggcgguaa

SEQ ID NO: 216678 - RNA, 19 nt, Artificial Sequence
  Description of Artificial Sequence: Synthetic oligonucleotide
ggagauucgcuucacucuc

SEQ ID NO: 216679 - RNA, 19 nt, Artificial Sequence
  Description of Artificial Sequence: Synthetic oligonucleotide
auugcguggucugcaacug

SEQ ID NO: 216680 - RNA, 19 nt, Artificial Sequence
  Description of Artificial Sequence: Synthetic oligonucleotide
agauaucuggcacgcccgu

SEQ ID NO: 216681 - RNA, 19 nt, Artificial Sequence
  Description of Artificial Sequence: Synthetic oligonucleotide
uggauugaugggcccucca

SEQ ID NO: 216682 - RNA, 19 nt, Artificial Sequence
  Description of Artificial Sequence: Synthetic oligonucleotide
gagacaucuguggagccga

SEQ ID NO: 216683 - RNA, 19 nt, Artificial Sequence
  Description of Artificial Sequence: Synthetic oligonucleotide
ucucaaauuuucggggaua

SEQ ID NO: 216684 - RNA, 19 nt, Artificial Sequence
  Description of Artificial Sequence: Synthetic oligonucleotide
ggaguaccggaaugaaacc

SEQ ID NO: 216685 - RNA, 19 nt, Artificial Sequence
  Description of Artificial Sequence: Synthetic oligonucleotide
uugcguggucugcaacugc

SEQ ID NO: 216686 - RNA, 19 nt, Artificial Sequence
  Description of Artificial Sequence: Synthetic oligonucleotide
agauaacgcacugcugugu

SEQ ID NO: 216687 - RNA, 19 nt, Artificial Sequence
  Description of Artificial Sequence: Synthetic oligonucleotide
aguugucgacugaauuggg

SEQ ID NO: 216688 - RNA, 19 nt, Artificial Sequence
  Description of Artificial Sequence: Synthetic oligonucleotide
acgggauacuguaguaauc

SEQ ID NO: 216689 - RNA, 19 nt, Artificial Sequence
  Description of Artificial Sequence: Synthetic oligonucleotide
auccccacggccgaacuug

SEQ ID NO: 216690 - RNA, 19 nt, Artificial Sequence
  Description of Artificial Sequence: Synthetic oligonucleotide
acugagcuucgaguugagg

SEQ ID NO: 216691 - RNA, 19 nt, Artificial Sequence
  Description of Artificial Sequence: Synthetic oligonucleotide
guguaaaagaguggauguc

SEQ ID NO: 216692 - RNA, 19 nt, Artificial Sequence
  Description of Artificial Sequence: Synthetic oligonucleotide
ggugaggucaccagaauaa

SEQ ID NO: 216693 - RNA, 19 nt, Artificial Sequence
  Description of Artificial Sequence: Synthetic oligonucleotide
gauaucuggcacgcccgug

SEQ ID NO: 216694 - RNA, 19 nt, Artificial Sequence
  Description of Artificial Sequence: Synthetic oligonucleotide
gauaccgccgcgucugugu

SEQ ID NO: 216695 - RNA, 19 nt, Artificial Sequence
  Description of Artificial Sequence: Synthetic oligonucleotide
gagguauaaguugucgacu

SEQ ID NO: 216696 - RNA, 19 nt, Artificial Sequence
  Description of Artificial Sequence: Synthetic oligonucleotide
gggagguauaaguugucga

SEQ ID NO: 216697 - RNA, 19 nt, Artificial Sequence
  Description of Artificial Sequence: Synthetic oligonucleotide
ggaaacgggauacuguagu

SEQ ID NO: 216698 - RNA, 19 nt, Artificial Sequence
  Description of Artificial Sequence: Synthetic oligonucleotide
auaccgccgcgucugugug

SEQ ID NO: 216699 - RNA, 19 nt, Artificial Sequence
  Description of Artificial Sequence: Synthetic oligonucleotide
gaagaccccggagacaucu

SEQ ID NO: 216700 - RNA, 19 nt, Artificial Sequence
  Description of Artificial Sequence: Synthetic oligonucleotide
ggauugaugggcccuccac

SEQ ID NO: 216701 - RNA, 19 nt, Artificial Sequence
  Description of Artificial Sequence: Synthetic oligonucleotide
ggugacugauacaccagug

SEQ ID NO: 216702 - RNA, 19 nt, Artificial Sequence
  Description of Artificial Sequence: Synthetic oligonucleotide
acuggccgugcugguauac

SEQ ID NO: 216703 - RNA, 19 nt, Artificial Sequence
  Description of Artificial Sequence: Synthetic oligonucleotide
auuugaccccucaacccca

SEQ ID NO: 216704 - RNA, 19 nt, Artificial Sequence
  Description of Artificial Sequence: Synthetic oligonucleotide
aggcuaaggccuagacuac

SEQ ID NO: 216705 - RNA, 19 nt, Artificial Sequence
  Description of Artificial Sequence: Synthetic oligonucleotide
gauaacgcacugcuguguu

SEQ ID NO: 216706 - RNA, 19 nt, Artificial Sequence
  Description of Artificial Sequence: Synthetic oligonucleotide
ugcguggccugcacagaac

SEQ ID NO: 216707 - RNA, 19 nt, Artificial Sequence
  Description of Artificial Sequence: Synthetic oligonucleotide
gguauaaguugucgacuga

SEQ ID NO: 216708 - RNA, 19 nt, Artificial Sequence
  Description of Artificial Sequence: Synthetic oligonucleotide
cccugagcauuauuuuggg

SEQ ID NO: 216709 - RNA, 19 nt, Artificial Sequence
  Description of Artificial Sequence: Synthetic oligonucleotide
auucagacuggaggagaca

SEQ ID NO: 216710 - RNA, 19 nt, Artificial Sequence
  Description of Artificial Sequence: Synthetic oligonucleotide
ccaguguuguauccgugag

SEQ ID NO: 216711 - RNA, 19 nt, Artificial Sequence
  Description of Artificial Sequence: Synthetic oligonucleotide
uaccgccgcgucugugugg

SEQ ID NO: 216712 - RNA, 19 nt, Artificial Sequence
  Description of Artificial Sequence: Synthetic oligonucleotide
gaauugggccacucugaua

SEQ ID NO: 216713 - RNA, 19 nt, Artificial Sequence
  Description of Artificial Sequence: Synthetic oligonucleotide
caccaguguuguauccgug

SEQ ID NO: 216714 - RNA, 19 nt, Artificial Sequence
  Description of Artificial Sequence: Synthetic oligonucleotide
ugccuggcgcuuuguaaaa

SEQ ID NO: 216715 - RNA, 19 nt, Artificial Sequence
  Description of Artificial Sequence: Synthetic oligonucleotide
cugcagauuuagcccugag

SEQ ID NO: 216716 - RNA, 19 nt, Artificial Sequence
  Description of Artificial Sequence: Synthetic oligonucleotide
gauuggcugucgucaguaa

SEQ ID NO: 216717 - RNA, 19 nt, Artificial Sequence
  Description of Artificial Sequence: Synthetic oligonucleotide
uaucuggcacgcccguguu

SEQ ID NO: 216718 - RNA, 19 nt, Artificial Sequence
  Description of Artificial Sequence: Synthetic oligonucleotide
gcggguaggcauguaacag

SEQ ID NO: 216719 - RNA, 19 nt, Artificial Sequence
  Description of Artificial Sequence: Synthetic oligonucleotide
cagauuuagcccugagaua

SEQ ID NO: 216720 - RNA, 19 nt, Artificial Sequence
  Description of Artificial Sequence: Synthetic oligonucleotide
gacccauauccacuuggcu

SEQ ID NO: 216721 - RNA, 19 nt, Artificial Sequence
  Description of Artificial Sequence: Synthetic oligonucleotide
uacuaggagccuggcuuga

SEQ ID NO: 216722 - RNA, 19 nt, Artificial Sequence
  Description of Artificial Sequence: Synthetic oligonucleotide
agacacauuagaggcggua

SEQ ID NO: 216723 - RNA, 19 nt, Artificial Sequence
  Description of Artificial Sequence: Synthetic oligonucleotide
uacuuguggcggguaggca

SEQ ID NO: 216724 - RNA, 19 nt, Artificial Sequence
  Description of Artificial Sequence: Synthetic oligonucleotide
caguguuguauccgugaga

SEQ ID NO: 216725 - RNA, 19 nt, Artificial Sequence
  Description of Artificial Sequence: Synthetic oligonucleotide
gagcauuauuuugggaggu

SEQ ID NO: 216726 - RNA, 19 nt, Artificial Sequence
  Description of Artificial Sequence: Synthetic oligonucleotide
uuguauccgugagacccau

SEQ ID NO: 216727 - RNA, 19 nt, Artificial Sequence
  Description of Artificial Sequence: Synthetic oligonucleotide
ggagccgagguggauuugc

SEQ ID NO: 216728 - RNA, 19 nt, Artificial Sequence
  Description of Artificial Sequence: Synthetic oligonucleotide
gcuaaggccuagacuacug

SEQ ID NO: 216729 - RNA, 19 nt, Artificial Sequence
  Description of Artificial Sequence: Synthetic oligonucleotide
guaguauggcaggcuggug

SEQ ID NO: 216730 - RNA, 19 nt, Artificial Sequence
  Description of Artificial Sequence: Synthetic oligonucleotide
ugccacuacuauugccaua

SEQ ID NO: 216731 - RNA, 19 nt, Artificial Sequence
  Description of Artificial Sequence: Synthetic oligonucleotide
guggcggguaggcauguaa

SEQ ID NO: 216732 - RNA, 19 nt, Artificial Sequence
  Description of Artificial Sequence: Synthetic oligonucleotide
cauucuccgcaggcagagg

SEQ ID NO: 216733 - RNA, 19 nt, Artificial Sequence
  Description of Artificial Sequence: Synthetic oligonucleotide
gggaaacgggauacuguag

SEQ ID NO: 216734 - RNA, 19 nt, Artificial Sequence
  Description of Artificial Sequence: Synthetic oligonucleotide
cugcgugguguggugaguc

SEQ ID NO: 216735 - RNA, 19 nt, Artificial Sequence
  Description of Artificial Sequence: Synthetic oligonucleotide
cggguaggcauguaacagc

SEQ ID NO: 216736 - RNA, 19 nt, Artificial Sequence
  Description of Artificial Sequence: Synthetic oligonucleotide
cuaccaucccucccaguaa

SEQ ID NO: 216737 - RNA, 19 nt, Artificial Sequence
  Description of Artificial Sequence: Synthetic oligonucleotide
aagaccccggagacaucug

SEQ ID NO: 216738 - RNA, 19 nt, Artificial Sequence
  Description of Artificial Sequence: Synthetic oligonucleotide
ugaagaccccggagacauc

SEQ ID NO: 216739 - RNA, 19 nt, Artificial Sequence
  Description of Artificial Sequence: Synthetic oligonucleotide
gucucaaauuuucggggau

SEQ ID NO: 216740 - RNA, 19 nt, Artificial Sequence
  Description of Artificial Sequence: Synthetic oligonucleotide
ucgacugaauugggccacu

SEQ ID NO: 216741 - RNA, 19 nt, Artificial Sequence
  Description of Artificial Sequence: Synthetic oligonucleotide
cacgcccguguuacuggag

SEQ ID NO: 216742 - RNA, 19 nt, Artificial Sequence
  Description of Artificial Sequence: Synthetic oligonucleotide
ccaugcuaugaugagaaaa

SEQ ID NO: 216743 - RNA, 19 nt, Artificial Sequence
  Description of Artificial Sequence: Synthetic oligonucleotide
cccgagauaucuggcacgc

SEQ ID NO: 216744 - RNA, 19 nt, Artificial Sequence
  Description of Artificial Sequence: Synthetic oligonucleotide
aggcaaguugaaggaggca

SEQ ID NO: 216745 - RNA, 19 nt, Artificial Sequence
  Description of Artificial Sequence: Synthetic oligonucleotide
gguaaagaucuuggucuca

SEQ ID NO: 216746 - RNA, 19 nt, Artificial Sequence
  Description of Artificial Sequence: Synthetic oligonucleotide
agcugggauaccgccgcgu

SEQ ID NO: 216747 - RNA, 19 nt, Artificial Sequence
  Description of Artificial Sequence: Synthetic oligonucleotide
ggaugucgaaguacgccca

SEQ ID NO: 216748 - RNA, 19 nt, Artificial Sequence
  Description of Artificial Sequence: Synthetic oligonucleotide
cuucgaguugaggcuguga

SEQ ID NO: 216749 - RNA, 19 nt, Artificial Sequence
  Description of Artificial Sequence: Synthetic oligonucleotide
gcugggauaccgccgcguc

SEQ ID NO: 216750 - RNA, 19 nt, Artificial Sequence
  Description of Artificial Sequence: Synthetic oligonucleotide
cauauacuuguggcgggua

SEQ ID NO: 216751 - RNA, 19 nt, Artificial Sequence
  Description of Artificial Sequence: Synthetic oligonucleotide
cuucaacagauugcguggu

SEQ ID NO: 216752 - RNA, 19 nt, Artificial Sequence
  Description of Artificial Sequence: Synthetic oligonucleotide
cucugauaaccagacuccu

SEQ ID NO: 216753 - RNA, 19 nt, Artificial Sequence
  Description of Artificial Sequence: Synthetic oligonucleotide
uggagccgagguggauuug

SEQ ID NO: 216754 - RNA, 19 nt, Artificial Sequence
  Description of Artificial Sequence: Synthetic oligonucleotide
caacugcguggccugcaca

SEQ ID NO: 216755 - RNA, 19 nt, Artificial Sequence
  Description of Artificial Sequence: Synthetic oligonucleotide
ccgugguagagaaagugcu

SEQ ID NO: 216756 - RNA, 19 nt, Artificial Sequence
  Description of Artificial Sequence: Synthetic oligonucleotide
aagguugggcggagcuuuu

SEQ ID NO: 216757 - RNA, 19 nt, Artificial Sequence
  Description of Artificial Sequence: Synthetic oligonucleotide
gccuagacuacugccacua

SEQ ID NO: 216758 - RNA, 19 nt, Artificial Sequence
  Description of Artificial Sequence: Synthetic oligonucleotide
gccggguucaggaaugucu

SEQ ID NO: 216759 - RNA, 19 nt, Artificial Sequence
  Description of Artificial Sequence: Synthetic oligonucleotide
gcgugguguggugagucug

SEQ ID NO: 216760 - RNA, 19 nt, Artificial Sequence
  Description of Artificial Sequence: Synthetic oligonucleotide
ggcauguaacagcccugga

SEQ ID NO: 216761 - RNA, 19 nt, Artificial Sequence
  Description of Artificial Sequence: Synthetic oligonucleotide
ggggugaaugccuggcgcu

SEQ ID NO: 216762 - RNA, 19 nt, Artificial Sequence
  Description of Artificial Sequence: Synthetic oligonucleotide
gcccguguuacuggaggug

SEQ ID NO: 216763 - RNA, 19 nt, Artificial Sequence
  Description of Artificial Sequence: Synthetic oligonucleotide
gccuggcgcuuuguaaaag

SEQ ID NO: 216764 - RNA, 19 nt, Artificial Sequence
  Description of Artificial Sequence: Synthetic oligonucleotide
cugauacaccaguguugua

SEQ ID NO: 216765 - RNA, 19 nt, Artificial Sequence
  Description of Artificial Sequence: Synthetic oligonucleotide
augccccaaacugcagauu

SEQ ID NO: 216766 - RNA, 19 nt, Artificial Sequence
  Description of Artificial Sequence: Synthetic oligonucleotide
gcccgggaccccuguguag

SEQ ID NO: 216767 - RNA, 19 nt, Artificial Sequence
  Description of Artificial Sequence: Synthetic oligonucleotide
gccgcgucuguguggaucu

SEQ ID NO: 216768 - RNA, 19 nt, Artificial Sequence
  Description of Artificial Sequence: Synthetic oligonucleotide
cugggauaccgccgcgucu

SEQ ID NO: 216769 - RNA, 19 nt, Artificial Sequence
  Description of Artificial Sequence: Synthetic oligonucleotide
gagccgagguggauuugcu

SEQ ID NO: 216770 - RNA, 19 nt, Artificial Sequence
  Description of Artificial Sequence: Synthetic oligonucleotide
ccaggcuaaggccuagacu

SEQ ID NO: 216771 - RNA, 19 nt, Artificial Sequence
  Description of Artificial Sequence: Synthetic oligonucleotide
guaccggaaugaaacccuu

SEQ ID NO: 216772 - RNA, 19 nt, Artificial Sequence
  Description of Artificial Sequence: Synthetic oligonucleotide
gcuucgaguugaggcugug

SEQ ID NO: 216773 - RNA, 19 nt, Artificial Sequence
  Description of Artificial Sequence: Synthetic oligonucleotide
agagggcccugagcauuau

SEQ ID NO: 216774 - RNA, 19 nt, Artificial Sequence
  Description of Artificial Sequence: Synthetic oligonucleotide
ggcuaaggccuagacuacu

SEQ ID NO: 216775 - RNA, 19 nt, Artificial Sequence
  Description of Artificial Sequence: Synthetic oligonucleotide
ggcauccccacggccgaac

SEQ ID NO: 216776 - RNA, 19 nt, Artificial Sequence
  Description of Artificial Sequence: Synthetic oligonucleotide
cuccugacucugguuagau

SEQ ID NO: 216777 - RNA, 19 nt, Artificial Sequence
  Description of Artificial Sequence: Synthetic oligonucleotide
gugugggaaacgggauacu

SEQ ID NO: 216778 - RNA, 19 nt, Artificial Sequence
  Description of Artificial Sequence: Synthetic oligonucleotide
caccagaauaaggguugcu

SEQ ID NO: 216779 - RNA, 19 nt, Artificial Sequence
  Description of Artificial Sequence: Synthetic oligonucleotide
cuuagaugucaaggagguu

SEQ ID NO: 216780 - RNA, 19 nt, Artificial Sequence
  Description of Artificial Sequence: Synthetic oligonucleotide
gcagcgccggguucaggaa

SEQ ID NO: 216781 - RNA, 19 nt, Artificial Sequence
  Description of Artificial Sequence: Synthetic oligonucleotide
ggcccgggaccccugugua

SEQ ID NO: 216782 - RNA, 19 nt, Artificial Sequence
  Description of Artificial Sequence: Synthetic oligonucleotide
cagcgccggguucaggaau

SEQ ID NO: 216783 - RNA, 19 nt, Artificial Sequence
  Description of Artificial Sequence: Synthetic oligonucleotide
cauccccacggccgaacuu

SEQ ID NO: 216784 - RNA, 19 nt, Artificial Sequence
  Description of Artificial Sequence: Synthetic oligonucleotide
cgacugaauugggccacuc

SEQ ID NO: 216785 - RNA, 19 nt, Artificial Sequence
  Description of Artificial Sequence: Synthetic oligonucleotide
ccggaaugaaacccuuguu

SEQ ID NO: 216786 - RNA, 19 nt, Artificial Sequence
  Description of Artificial Sequence: Synthetic oligonucleotide
cuggcacgcccguguuacu

SEQ ID NO: 216787 - RNA, 19 nt, Artificial Sequence
  Description of Artificial Sequence: Synthetic oligonucleotide
cgccgcgucuguguggauc

SEQ ID NO: 216788 - RNA, 19 nt, Artificial Sequence
  Description of Artificial Sequence: Synthetic oligonucleotide
ggcuaccaucccucccagu

SEQ ID NO: 216789 - RNA, 19 nt, Artificial Sequence
  Description of Artificial Sequence: Synthetic oligonucleotide
gggugaaugccuggcgcuu

SEQ ID NO: 216790 - RNA, 19 nt, Artificial Sequence
  Description of Artificial Sequence: Synthetic oligonucleotide
ccgugcugguauacaggcu

SEQ ID NO: 216791 - RNA, 19 nt, Artificial Sequence
  Description of Artificial Sequence: Synthetic oligonucleotide
cccgggaccccuguguagu

SEQ ID NO: 216792 - RNA, 19 nt, Artificial Sequence
  Description of Artificial Sequence: Synthetic oligonucleotide
gcguggucugcaacugcgu

SEQ ID NO: 216793 - RNA, 19 nt, Artificial Sequence
  Description of Artificial Sequence: Synthetic oligonucleotide
gcugcgugguguggugagu

SEQ ID NO: 216794 - RNA, 19 nt, Artificial Sequence
  Description of Artificial Sequence: Synthetic oligonucleotide
ccgggaccccuguguagua

SEQ ID NO: 216795 - RNA, 19 nt, Artificial Sequence
  Description of Artificial Sequence: Synthetic oligonucleotide
cgccggguucaggaauguc

SEQ ID NO: 216796 - RNA, 19 nt, Artificial Sequence
  Description of Artificial Sequence: Synthetic oligonucleotide
ccgcgucuguguggaucuc

SEQ ID NO: 216797 - RNA, 19 nt, Artificial Sequence
  Description of Artificial Sequence: Synthetic oligonucleotide
gcgccggguucaggaaugu

SEQ ID NO: 216798 - RNA, 19 nt, Artificial Sequence
  Description of Artificial Sequence: Synthetic oligonucleotide
ccccacggccgaacuuggu

SEQ ID NO: 216799 - RNA, 19 nt, Artificial Sequence
  Description of Artificial Sequence: Synthetic oligonucleotide
aauauuaucaccagugacc

SEQ ID NO: 216800 - RNA, 19 nt, Artificial Sequence
  Description of Artificial Sequence: Synthetic oligonucleotide
aggaauauugaccacagcc

SEQ ID NO: 216801 - RNA, 19 nt, Artificial Sequence
  Description of Artificial Sequence: Synthetic oligonucleotide
aauuaucucagaugcaccc

SEQ ID NO: 216802 - RNA, 19 nt, Artificial Sequence
  Description of Artificial Sequence: Synthetic oligonucleotide
uuuuauuacccacaugacg

SEQ ID NO: 216803 - RNA, 19 nt, Artificial Sequence
  Description of Artificial Sequence: Synthetic oligonucleotide
aaaccuuguaaacagaucu

SEQ ID NO: 216804 - RNA, 19 nt, Artificial Sequence
  Description of Artificial Sequence: Synthetic oligonucleotide
uguacaaugcuucuucugg

SEQ ID NO: 216805 - RNA, 19 nt, Artificial Sequence
  Description of Artificial Sequence: Synthetic oligonucleotide
agaacuacgaaaugcauuc

SEQ ID NO: 216806 - RNA, 19 nt, Artificial Sequence
  Description of Artificial Sequence: Synthetic oligonucleotide
uguauaagcacaauugaca

SEQ ID NO: 216807 - RNA, 19 nt, Artificial Sequence
  Description of Artificial Sequence: Synthetic oligonucleotide
uuccuaacagaauugaagg

SEQ ID NO: 216808 - RNA, 19 nt, Artificial Sequence
  Description of Artificial Sequence: Synthetic oligonucleotide
uguguuaacauucagcuua

SEQ ID NO: 216809 - RNA, 19 nt, Artificial Sequence
  Description of Artificial Sequence: Synthetic oligonucleotide
agucuugaguaauacaagc

SEQ ID NO: 216810 - RNA, 19 nt, Artificial Sequence
  Description of Artificial Sequence: Synthetic oligonucleotide
ugcauuaguuauaaggaag

SEQ ID NO: 216811 - RNA, 19 nt, Artificial Sequence
  Description of Artificial Sequence: Synthetic oligonucleotide
ugagucuugaguaauacaa

SEQ ID NO: 216812 - RNA, 19 nt, Artificial Sequence
  Description of Artificial Sequence: Synthetic oligonucleotide
aguacucgaagcuuuggcc

SEQ ID NO: 216813 - RNA, 19 nt, Artificial Sequence
  Description of Artificial Sequence: Synthetic oligonucleotide
ugcuaauacaccuucagga

SEQ ID NO: 216814 - RNA, 19 nt, Artificial Sequence
  Description of Artificial Sequence: Synthetic oligonucleotide
agaauuaucucagaugcac

SEQ ID NO: 216815 - RNA, 19 nt, Artificial Sequence
  Description of Artificial Sequence: Synthetic oligonucleotide
uuuacaaugcagcuagugu

SEQ ID NO: 216816 - RNA, 19 nt, Artificial Sequence
  Description of Artificial Sequence: Synthetic oligonucleotide
accgagauaaaccacagcu

SEQ ID NO: 216817 - RNA, 19 nt, Artificial Sequence
  Description of Artificial Sequence: Synthetic oligonucleotide
uuaucuauuuggcuauuag

SEQ ID NO: 216818 - RNA, 19 nt, Artificial Sequence
  Description of Artificial Sequence: Synthetic oligonucleotide
uuaauauuaucaccaguga

SEQ ID NO: 216819 - RNA, 19 nt, Artificial Sequence
  Description of Artificial Sequence: Synthetic oligonucleotide
acuacgaguugauagaaug

SEQ ID NO: 216820 - RNA, 19 nt, Artificial Sequence
  Description of Artificial Sequence: Synthetic oligonucleotide
cuauccuaaacucagggug

SEQ ID NO: 216821 - RNA, 19 nt, Artificial Sequence
  Description of Artificial Sequence: Synthetic oligonucleotide
uguacgugagaugagaggc

SEQ ID NO: 216822 - RNA, 19 nt, Artificial Sequence
  Description of Artificial Sequence: Synthetic oligonucleotide
ucuauuguaaggugaauuc

SEQ ID NO: 216823 - RNA, 19 nt, Artificial Sequence
  Description of Artificial Sequence: Synthetic oligonucleotide
uucuauugaaaguucugag

SEQ ID NO: 216824 - RNA, 19 nt, Artificial Sequence
  Description of Artificial Sequence: Synthetic oligonucleotide
uguugaaguccaaagacaa

SEQ ID NO: 216825 - RNA, 19 nt, Artificial Sequence
  Description of Artificial Sequence: Synthetic oligonucleotide
uguaaggugaauuccgcug

SEQ ID NO: 216826 - RNA, 19 nt, Artificial Sequence
  Description of Artificial Sequence: Synthetic oligonucleotide
ucauauaaagaacuacgaa

SEQ ID NO: 216827 - RNA, 19 nt, Artificial Sequence
  Description of Artificial Sequence: Synthetic oligonucleotide
aggaauuuuaaacggcuag

SEQ ID NO: 216828 - RNA, 19 nt, Artificial Sequence
  Description of Artificial Sequence: Synthetic oligonucleotide
uucauuucuauuguaaggu

SEQ ID NO: 216829 - RNA, 19 nt, Artificial Sequence
  Description of Artificial Sequence: Synthetic oligonucleotide
uucaccguggauuuuccgg

SEQ ID NO: 216830 - RNA, 19 nt, Artificial Sequence
  Description of Artificial Sequence: Synthetic oligonucleotide
uuuuaaacggcuaguugga

SEQ ID NO: 216831 - RNA, 19 nt, Artificial Sequence
  Description of Artificial Sequence: Synthetic oligonucleotide
agaucuguaucauuuauaa

SEQ ID NO: 216832 - RNA, 19 nt, Artificial Sequence
  Description of Artificial Sequence: Synthetic oligonucleotide
gauguauaagcacaauuga

SEQ ID NO: 216833 - RNA, 19 nt, Artificial Sequence
  Description of Artificial Sequence: Synthetic oligonucleotide
uacagcuacaacuuggcgu

SEQ ID NO: 216834 - RNA, 19 nt, Artificial Sequence
  Description of Artificial Sequence: Synthetic oligonucleotide
uaguguguuaacauucagc

SEQ ID NO: 216835 - RNA, 19 nt, Artificial Sequence
  Description of Artificial Sequence: Synthetic oligonucleotide
ugcacaauuauuaucugua

SEQ ID NO: 216836 - RNA, 19 nt, Artificial Sequence
  Description of Artificial Sequence: Synthetic oligonucleotide
guugagauaagcuggcccc

SEQ ID NO: 216837 - RNA, 19 nt, Artificial Sequence
  Description of Artificial Sequence: Synthetic oligonucleotide
uucaauccccacaacagca

SEQ ID NO: 216838 - RNA, 19 nt, Artificial Sequence
  Description of Artificial Sequence: Synthetic oligonucleotide
uucauuucguauucuucgg

SEQ ID NO: 216839 - RNA, 19 nt, Artificial Sequence
  Description of Artificial Sequence: Synthetic oligonucleotide
aaaugcauucaccacucga

SEQ ID NO: 216840 - RNA, 19 nt, Artificial Sequence
  Description of Artificial Sequence: Synthetic oligonucleotide
caauuauaccuuuaaccag

SEQ ID NO: 216841 - RNA, 19 nt, Artificial Sequence
  Description of Artificial Sequence: Synthetic oligonucleotide
agguauuaaacacaauagu

SEQ ID NO: 216842 - RNA, 19 nt, Artificial Sequence
  Description of Artificial Sequence: Synthetic oligonucleotide
agaguaagguccccauucc

SEQ ID NO: 216843 - RNA, 19 nt, Artificial Sequence
  Description of Artificial Sequence: Synthetic oligonucleotide
ugaucuugcaaguacucga

SEQ ID NO: 216844 - RNA, 19 nt, Artificial Sequence
  Description of Artificial Sequence: Synthetic oligonucleotide
ugggguugcguuuuguagg

SEQ ID NO: 216845 - RNA, 19 nt, Artificial Sequence
  Description of Artificial Sequence: Synthetic oligonucleotide
accucuaaaccacaagauc

SEQ ID NO: 216846 - RNA, 19 nt, Artificial Sequence
  Description of Artificial Sequence: Synthetic oligonucleotide
aacccuucauauaaagaac

SEQ ID NO: 216847 - RNA, 19 nt, Artificial Sequence
  Description of Artificial Sequence: Synthetic oligonucleotide
cuaauacaccuucaggacc

SEQ ID NO: 216848 - RNA, 19 nt, Artificial Sequence
  Description of Artificial Sequence: Synthetic oligonucleotide
aucauuguacgugagauga

SEQ ID NO: 216849 - RNA, 19 nt, Artificial Sequence
  Description of Artificial Sequence: Synthetic oligonucleotide
uaucuauuuggcuauuagu

SEQ ID NO: 216850 - RNA, 19 nt, Artificial Sequence
  Description of Artificial Sequence: Synthetic oligonucleotide
aauacaagcgcccgugaaa

SEQ ID NO: 216851 - RNA, 19 nt, Artificial Sequence
  Description of Artificial Sequence: Synthetic oligonucleotide
acuacgaaaugcauucacc

SEQ ID NO: 216852 - RNA, 19 nt, Artificial Sequence
  Description of Artificial Sequence: Synthetic oligonucleotide
cuacauucguacaagugug

SEQ ID NO: 216853 - RNA, 19 nt, Artificial Sequence
  Description of Artificial Sequence: Synthetic oligonucleotide
acuguacucauggacuucc

SEQ ID NO: 216854 - RNA, 19 nt, Artificial Sequence
  Description of Artificial Sequence: Synthetic oligonucleotide
ucaccguggauuuuccggg

SEQ ID NO: 216855 - RNA, 19 nt, Artificial Sequence
  Description of Artificial Sequence: Synthetic oligonucleotide
accauuagcacucaagauu

SEQ ID NO: 216856 - RNA, 19 nt, Artificial Sequence
  Description of Artificial Sequence: Synthetic oligonucleotide
cuuggcguugcucugagac

SEQ ID NO: 216857 - RNA, 19 nt, Artificial Sequence
  Description of Artificial Sequence: Synthetic oligonucleotide
aauaccacauuugguagca

SEQ ID NO: 216858 - RNA, 19 nt, Artificial Sequence
  Description of Artificial Sequence: Synthetic oligonucleotide
uucaggaccacucuaggua

SEQ ID NO: 216859 - RNA, 19 nt, Artificial Sequence
  Description of Artificial Sequence: Synthetic oligonucleotide
aaaagugacucggugggug

SEQ ID NO: 216860 - RNA, 19 nt, Artificial Sequence
  Description of Artificial Sequence: Synthetic oligonucleotide
aagcauuaguguuaucuau

SEQ ID NO: 216861 - RNA, 19 nt, Artificial Sequence
  Description of Artificial Sequence: Synthetic oligonucleotide
ucauucaaugauccagggc

SEQ ID NO: 216862 - RNA, 19 nt, Artificial Sequence
  Description of Artificial Sequence: Synthetic oligonucleotide
auaguguaauguuccgagg

SEQ ID NO: 216863 - RNA, 19 nt, Artificial Sequence
  Description of Artificial Sequence: Synthetic oligonucleotide
uuacagcuacaacuuggcg

SEQ ID NO: 216864 - RNA, 19 nt, Artificial Sequence
  Description of Artificial Sequence: Synthetic oligonucleotide
agcaaugcaaguaaggcca

SEQ ID NO: 216865 - RNA, 19 nt, Artificial Sequence
  Description of Artificial Sequence: Synthetic oligonucleotide
aguuacagcuacaacuugg

SEQ ID NO: 216866 - RNA, 19 nt, Artificial Sequence
  Description of Artificial Sequence: Synthetic oligonucleotide
auaaaguuguggauugaac

SEQ ID NO: 216867 - RNA, 19 nt, Artificial Sequence
  Description of Artificial Sequence: Synthetic oligonucleotide
caugacgugguaauccacc

SEQ ID NO: 216868 - RNA, 19 nt, Artificial Sequence
  Description of Artificial Sequence: Synthetic oligonucleotide
ucauuucuauuguaaggug

SEQ ID NO: 216869 - RNA, 19 nt, Artificial Sequence
  Description of Artificial Sequence: Synthetic oligonucleotide
uauuuggcuauuaguauua

SEQ ID NO: 216870 - RNA, 19 nt, Artificial Sequence
  Description of Artificial Sequence: Synthetic oligonucleotide
gaaauccccaacaaggcac

SEQ ID NO: 216871 - RNA, 19 nt, Artificial Sequence
  Description of Artificial Sequence: Synthetic oligonucleotide
ucuaaaccacaagaucugg

SEQ ID NO: 216872 - RNA, 19 nt, Artificial Sequence
  Description of Artificial Sequence: Synthetic oligonucleotide
cuacgaguugauagaaugc

SEQ ID NO: 216873 - RNA, 19 nt, Artificial Sequence
  Description of Artificial Sequence: Synthetic oligonucleotide
aaacuauguagugggcuuc

SEQ ID NO: 216874 - RNA, 19 nt, Artificial Sequence
  Description of Artificial Sequence: Synthetic oligonucleotide
cuauuguaaggugaauucc

SEQ ID NO: 216875 - RNA, 19 nt, Artificial Sequence
  Description of Artificial Sequence: Synthetic oligonucleotide
uacgaguugauagaaugca

SEQ ID NO: 216876 - RNA, 19 nt, Artificial Sequence
  Description of Artificial Sequence: Synthetic oligonucleotide
cuagguaccacagaugauc

SEQ ID NO: 216877 - RNA, 19 nt, Artificial Sequence
  Description of Artificial Sequence: Synthetic oligonucleotide
gugccuaaaacaauugugc

SEQ ID NO: 216878 - RNA, 19 nt, Artificial Sequence
  Description of Artificial Sequence: Synthetic oligonucleotide
ugauccacgggucacuuau

SEQ ID NO: 216879 - RNA, 19 nt, Artificial Sequence
  Description of Artificial Sequence: Synthetic oligonucleotide
cucgcuuuaaaauccaaga

SEQ ID NO: 216880 - RNA, 19 nt, Artificial Sequence
  Description of Artificial Sequence: Synthetic oligonucleotide
cuuccgaagcaaaagugac

SEQ ID NO: 216881 - RNA, 19 nt, Artificial Sequence
  Description of Artificial Sequence: Synthetic oligonucleotide
uaaacggcuaguuggaauu

SEQ ID NO: 216882 - RNA, 19 nt, Artificial Sequence
  Description of Artificial Sequence: Synthetic oligonucleotide
accguuguuuaucugucag

SEQ ID NO: 216883 - RNA, 19 nt, Artificial Sequence
  Description of Artificial Sequence: Synthetic oligonucleotide
uccgaagcaaaagugacuc

SEQ ID NO: 216884 - RNA, 19 nt, Artificial Sequence
  Description of Artificial Sequence: Synthetic oligonucleotide
ucucguuaucccacucugg

SEQ ID NO: 216885 - RNA, 19 nt, Artificial Sequence
  Description of Artificial Sequence: Synthetic oligonucleotide
uuucguauucuucgguuaa

SEQ ID NO: 216886 - RNA, 19 nt, Artificial Sequence
  Description of Artificial Sequence: Synthetic oligonucleotide
cucuaaaccacaagaucug

SEQ ID NO: 216887 - RNA, 19 nt, Artificial Sequence
  Description of Artificial Sequence: Synthetic oligonucleotide
auacaagcgcccgugaaag

SEQ ID NO: 216888 - RNA, 19 nt, Artificial Sequence
  Description of Artificial Sequence: Synthetic oligonucleotide
aucuauuuggcuauuagua

SEQ ID NO: 216889 - RNA, 19 nt, Artificial Sequence
  Description of Artificial Sequence: Synthetic oligonucleotide
uuaaacggcuaguuggaau

SEQ ID NO: 216890 - RNA, 19 nt, Artificial Sequence
  Description of Artificial Sequence: Synthetic oligonucleotide
gaauuaucucagaugcacc

SEQ ID NO: 216891 - RNA, 19 nt, Artificial Sequence
  Description of Artificial Sequence: Synthetic oligonucleotide
ucauuucguauucuucggu

SEQ ID NO: 216892 - RNA, 19 nt, Artificial Sequence
  Description of Artificial Sequence: Synthetic oligonucleotide
accacuacgaguugauaga

SEQ ID NO: 216893 - RNA, 19 nt, Artificial Sequence
  Description of Artificial Sequence: Synthetic oligonucleotide
uucuguucagaccucuaaa

SEQ ID NO: 216894 - RNA, 19 nt, Artificial Sequence
  Description of Artificial Sequence: Synthetic oligonucleotide
ugaauuccgcugucaacag

SEQ ID NO: 216895 - RNA, 19 nt, Artificial Sequence
  Description of Artificial Sequence: Synthetic oligonucleotide
uauuaguauuagcaauuua

SEQ ID NO: 216896 - RNA, 19 nt, Artificial Sequence
  Description of Artificial Sequence: Synthetic oligonucleotide
ugaccaugcgcacaguaau

SEQ ID NO: 216897 - RNA, 19 nt, Artificial Sequence
  Description of Artificial Sequence: Synthetic oligonucleotide
ucacuuaugccgaguuacc

SEQ ID NO: 216898 - RNA, 19 nt, Artificial Sequence
  Description of Artificial Sequence: Synthetic oligonucleotide
uuaccguuguuuaucuguc

SEQ ID NO: 216899 - RNA, 19 nt, Artificial Sequence
  Description of Artificial Sequence: Synthetic oligonucleotide
gucacuuaugccgaguuac

SEQ ID NO: 216900 - RNA, 19 nt, Artificial Sequence
  Description of Artificial Sequence: Synthetic oligonucleotide
cuucuauccuaaacucagg

SEQ ID NO: 216901 - RNA, 19 nt, Artificial Sequence
  Description of Artificial Sequence: Synthetic oligonucleotide
acuuuuguacaaugcuucu

SEQ ID NO: 216902 - RNA, 19 nt, Artificial Sequence
  Description of Artificial Sequence: Synthetic oligonucleotide
uggcuauuaguauuagcaa

SEQ ID NO: 216903 - RNA, 19 nt, Artificial Sequence
  Description of Artificial Sequence: Synthetic oligonucleotide
guuacagcuacaacuuggc

SEQ ID NO: 216904 - RNA, 19 nt, Artificial Sequence
  Description of Artificial Sequence: Synthetic oligonucleotide
caauugugcagaagauggc

SEQ ID NO: 216905 - RNA, 19 nt, Artificial Sequence
  Description of Artificial Sequence: Synthetic oligonucleotide
cacauuugguagcaauggc

SEQ ID NO: 216906 - RNA, 19 nt, Artificial Sequence
  Description of Artificial Sequence: Synthetic oligonucleotide
uuucaccguggauuuuccg

SEQ ID NO: 216907 - RNA, 19 nt, Artificial Sequence
  Description of Artificial Sequence: Synthetic oligonucleotide
cugggguugcguuuuguag

SEQ ID NO: 216908 - RNA, 19 nt, Artificial Sequence
  Description of Artificial Sequence: Synthetic oligonucleotide
acauucguacaaguguguc

SEQ ID NO: 216909 - RNA, 19 nt, Artificial Sequence
  Description of Artificial Sequence: Synthetic oligonucleotide
aauggcccgagcuguauua

SEQ ID NO: 216910 - RNA, 19 nt, Artificial Sequence
  Description of Artificial Sequence: Synthetic oligonucleotide
guacucgaagcuuuggcca

SEQ ID NO: 216911 - RNA, 19 nt, Artificial Sequence
  Description of Artificial Sequence: Synthetic oligonucleotide
auuguacgugagaugagag

SEQ ID NO: 216912 - RNA, 19 nt, Artificial Sequence
  Description of Artificial Sequence: Synthetic oligonucleotide
gccuaaaacaauugugcag

SEQ ID NO: 216913 - RNA, 19 nt, Artificial Sequence
  Description of Artificial Sequence: Synthetic oligonucleotide
uacauucguacaagugugu

SEQ ID NO: 216914 - RNA, 19 nt, Artificial Sequence
  Description of Artificial Sequence: Synthetic oligonucleotide
uaugccgaguuaccguugu

SEQ ID NO: 216915 - RNA, 19 nt, Artificial Sequence
  Description of Artificial Sequence: Synthetic oligonucleotide
auuucguauucuucgguua

SEQ ID NO: 216916 - RNA, 19 nt, Artificial Sequence
  Description of Artificial Sequence: Synthetic oligonucleotide
ugaaaagacucaguuucaa

SEQ ID NO: 216917 - RNA, 19 nt, Artificial Sequence
  Description of Artificial Sequence: Synthetic oligonucleotide
gcuaauacaccuucaggac

SEQ ID NO: 216918 - RNA, 19 nt, Artificial Sequence
  Description of Artificial Sequence: Synthetic oligonucleotide
gaugcacccuugcugaaga

SEQ ID NO: 216919 - RNA, 19 nt, Artificial Sequence
  Description of Artificial Sequence: Synthetic oligonucleotide
gcauuaguuauaaggaagc

SEQ ID NO: 216920 - RNA, 19 nt, Artificial Sequence
  Description of Artificial Sequence: Synthetic oligonucleotide
auguuugucagugggagau

SEQ ID NO: 216921 - RNA, 19 nt, Artificial Sequence
  Description of Artificial Sequence: Synthetic oligonucleotide
ucuuucaccguggauuuuc

SEQ ID NO: 216922 - RNA, 19 nt, Artificial Sequence
  Description of Artificial Sequence: Synthetic oligonucleotide
ccacgggucacuuaugccg

SEQ ID NO: 216923 - RNA, 19 nt, Artificial Sequence
  Description of Artificial Sequence: Synthetic oligonucleotide
uaccuuuaaccaguguaug

SEQ ID NO: 216924 - RNA, 19 nt, Artificial Sequence
  Description of Artificial Sequence: Synthetic oligonucleotide
cacuuaugccgaguuaccg

SEQ ID NO: 216925 - RNA, 19 nt, Artificial Sequence
  Description of Artificial Sequence: Synthetic oligonucleotide
acucccuuucggcaugauc

SEQ ID NO: 216926 - RNA, 19 nt, Artificial Sequence
  Description of Artificial Sequence: Synthetic oligonucleotide
agcuacaacuuggcguugc

SEQ ID NO: 216927 - RNA, 19 nt, Artificial Sequence
  Description of Artificial Sequence: Synthetic oligonucleotide
caucauuguacgugagaug

SEQ ID NO: 216928 - RNA, 19 nt, Artificial Sequence
  Description of Artificial Sequence: Synthetic oligonucleotide
cuuucaccguggauuuucc

SEQ ID NO: 216929 - RNA, 19 nt, Artificial Sequence
  Description of Artificial Sequence: Synthetic oligonucleotide
auaccuuuaaccaguguau

SEQ ID NO: 216930 - RNA, 19 nt, Artificial Sequence
  Description of Artificial Sequence: Synthetic oligonucleotide
agaauacuaucuuguccgu

SEQ ID NO: 216931 - RNA, 19 nt, Artificial Sequence
  Description of Artificial Sequence: Synthetic oligonucleotide
uuaugccgaguuaccguug

SEQ ID NO: 216932 - RNA, 19 nt, Artificial Sequence
  Description of Artificial Sequence: Synthetic oligonucleotide
ggaauauugaccacagcca

SEQ ID NO: 216933 - RNA, 19 nt, Artificial Sequence
  Description of Artificial Sequence: Synthetic oligonucleotide
gguugcguuuuguaggagc

SEQ ID NO: 216934 - RNA, 19 nt, Artificial Sequence
  Description of Artificial Sequence: Synthetic oligonucleotide
aggccagacauaugguucu

SEQ ID NO: 216935 - RNA, 19 nt, Artificial Sequence
  Description of Artificial Sequence: Synthetic oligonucleotide
cagaauugaagguuauaaa

SEQ ID NO: 216936 - RNA, 19 nt, Artificial Sequence
  Description of Artificial Sequence: Synthetic oligonucleotide
augcaaguaaggccaguga

SEQ ID NO: 216937 - RNA, 19 nt, Artificial Sequence
  Description of Artificial Sequence: Synthetic oligonucleotide
gcagaaauuaaaguauuca

SEQ ID NO: 216938 - RNA, 19 nt, Artificial Sequence
  Description of Artificial Sequence: Synthetic oligonucleotide
aaauccccaacaaggcaca

SEQ ID NO: 216939 - RNA, 19 nt, Artificial Sequence
  Description of Artificial Sequence: Synthetic oligonucleotide
caacaaucacugcuacuac

SEQ ID NO: 216940 - RNA, 19 nt, Artificial Sequence
  Description of Artificial Sequence: Synthetic oligonucleotide
acaagcgcccgugaaagca

SEQ ID NO: 216941 - RNA, 19 nt, Artificial Sequence
  Description of Artificial Sequence: Synthetic oligonucleotide
gacuuccuaacagaauuga

SEQ ID NO: 216942 - RNA, 19 nt, Artificial Sequence
  Description of Artificial Sequence: Synthetic oligonucleotide
ugcguuuuguaggagcauc

SEQ ID NO: 216943 - RNA, 19 nt, Artificial Sequence
  Description of Artificial Sequence: Synthetic oligonucleotide
cacucaagauuuugaaaca

SEQ ID NO: 216944 - RNA, 19 nt, Artificial Sequence
  Description of Artificial Sequence: Synthetic oligonucleotide
caugcgcacaguaauucca

SEQ ID NO: 216945 - RNA, 19 nt, Artificial Sequence
  Description of Artificial Sequence: Synthetic oligonucleotide
cuaaacucaggguguguca

SEQ ID NO: 216946 - RNA, 19 nt, Artificial Sequence
  Description of Artificial Sequence: Synthetic oligonucleotide
agcaacaaucacugcuacu

SEQ ID NO: 216947 - RNA, 19 nt, Artificial Sequence
  Description of Artificial Sequence: Synthetic oligonucleotide
ucuagguaccacagaugau

SEQ ID NO: 216948 - RNA, 19 nt, Artificial Sequence
  Description of Artificial Sequence: Synthetic oligonucleotide
uccagcaaauaagagcgua

SEQ ID NO: 216949 - RNA, 19 nt, Artificial Sequence
  Description of Artificial Sequence: Synthetic oligonucleotide
caaguacucgaagcuuugg

SEQ ID NO: 216950 - RNA, 19 nt, Artificial Sequence
  Description of Artificial Sequence: Synthetic oligonucleotide
guugcguuuuguaggagca

SEQ ID NO: 216951 - RNA, 19 nt, Artificial Sequence
  Description of Artificial Sequence: Synthetic oligonucleotide
uuuaaacggcuaguuggaa

SEQ ID NO: 216952 - RNA, 19 nt, Artificial Sequence
  Description of Artificial Sequence: Synthetic oligonucleotide
gaccgagauaaaccacagc

SEQ ID NO: 216953 - RNA, 19 nt, Artificial Sequence
  Description of Artificial Sequence: Synthetic oligonucleotide
auaugguucucaggccuuc

SEQ ID NO: 216954 - RNA, 19 nt, Artificial Sequence
  Description of Artificial Sequence: Synthetic oligonucleotide
caagagaaauccccaacaa

SEQ ID NO: 216955 - RNA, 19 nt, Artificial Sequence
  Description of Artificial Sequence: Synthetic oligonucleotide
uuucggcaugaucaaucuc

SEQ ID NO: 216956 - RNA, 19 nt, Artificial Sequence
  Description of Artificial Sequence: Synthetic oligonucleotide
aaacuucucuccagcaaau

SEQ ID NO: 216957 - RNA, 19 nt, Artificial Sequence
  Description of Artificial Sequence: Synthetic oligonucleotide
gaauacuaucuuguccguc

SEQ ID NO: 216958 - RNA, 19 nt, Artificial Sequence
  Description of Artificial Sequence: Synthetic oligonucleotide
guaaggugaauuccgcugu

SEQ ID NO: 216959 - RNA, 19 nt, Artificial Sequence
  Description of Artificial Sequence: Synthetic oligonucleotide
cauuguacgugagaugaga

SEQ ID NO: 216960 - RNA, 19 nt, Artificial Sequence
  Description of Artificial Sequence: Synthetic oligonucleotide
aacggcuaguuggaauugu

SEQ ID NO: 216961 - RNA, 19 nt, Artificial Sequence
  Description of Artificial Sequence: Synthetic oligonucleotide
ccacauuugguagcaaugg

SEQ ID NO: 216962 - RNA, 19 nt, Artificial Sequence
  Description of Artificial Sequence: Synthetic oligonucleotide
ugcaccgccuuaaguggug

SEQ ID NO: 216963 - RNA, 19 nt, Artificial Sequence
  Description of Artificial Sequence: Synthetic oligonucleotide
uaccguuguuuaucuguca

SEQ ID NO: 216964 - RNA, 19 nt, Artificial Sequence
  Description of Artificial Sequence: Synthetic oligonucleotide
gaaaagacucaguuucaau

SEQ ID NO: 216965 - RNA, 19 nt, Artificial Sequence
  Description of Artificial Sequence: Synthetic oligonucleotide
accacaagaucuggccacg

SEQ ID NO: 216966 - RNA, 19 nt, Artificial Sequence
  Description of Artificial Sequence: Synthetic oligonucleotide
gcacccuugcugaagaucc

SEQ ID NO: 216967 - RNA, 19 nt, Artificial Sequence
  Description of Artificial Sequence: Synthetic oligonucleotide
cacucgaaucuguguuugg

SEQ ID NO: 216968 - RNA, 19 nt, Artificial Sequence
  Description of Artificial Sequence: Synthetic oligonucleotide
acaugacgugguaauccac

SEQ ID NO: 216969 - RNA, 19 nt, Artificial Sequence
  Description of Artificial Sequence: Synthetic oligonucleotide
ucucugcauuaguuauaag

SEQ ID NO: 216970 - RNA, 19 nt, Artificial Sequence
  Description of Artificial Sequence: Synthetic oligonucleotide
uacaagcgcccgugaaagc

SEQ ID NO: 216971 - RNA, 19 nt, Artificial Sequence
  Description of Artificial Sequence: Synthetic oligonucleotide
ugcugucaauuauaccuuu

SEQ ID NO: 216972 - RNA, 19 nt, Artificial Sequence
  Description of Artificial Sequence: Synthetic oligonucleotide
uggugagucuugaguaaua

SEQ ID NO: 216973 - RNA, 19 nt, Artificial Sequence
  Description of Artificial Sequence: Synthetic oligonucleotide
guaauacaagcgcccguga

SEQ ID NO: 216974 - RNA, 19 nt, Artificial Sequence
  Description of Artificial Sequence: Synthetic oligonucleotide
aagcgcccgugaaagcaac

SEQ ID NO: 216975 - RNA, 19 nt, Artificial Sequence
  Description of Artificial Sequence: Synthetic oligonucleotide
ggcauuauuaaagauuccu

SEQ ID NO: 216976 - RNA, 19 nt, Artificial Sequence
  Description of Artificial Sequence: Synthetic oligonucleotide
cuauuuggcuauuaguauu

SEQ ID NO: 216977 - RNA, 19 nt, Artificial Sequence
  Description of Artificial Sequence: Synthetic oligonucleotide
ccuuucggcaugaucaauc

SEQ ID NO: 216978 - RNA, 19 nt, Artificial Sequence
  Description of Artificial Sequence: Synthetic oligonucleotide
auuacccacaugacguggu

SEQ ID NO: 216979 - RNA, 19 nt, Artificial Sequence
  Description of Artificial Sequence: Synthetic oligonucleotide
caucgccaguuacagcuac

SEQ ID NO: 216980 - RNA, 19 nt, Artificial Sequence
  Description of Artificial Sequence: Synthetic oligonucleotide
augcagcuaguguguuaac

SEQ ID NO: 216981 - RNA, 19 nt, Artificial Sequence
  Description of Artificial Sequence: Synthetic oligonucleotide
ucgccaguuacagcuacaa

SEQ ID NO: 216982 - RNA, 19 nt, Artificial Sequence
  Description of Artificial Sequence: Synthetic oligonucleotide
auagaaugcaugacccaaa

SEQ ID NO: 216983 - RNA, 19 nt, Artificial Sequence
  Description of Artificial Sequence: Synthetic oligonucleotide
ggugagucuugaguaauac

SEQ ID NO: 216984 - RNA, 19 nt, Artificial Sequence
  Description of Artificial Sequence: Synthetic oligonucleotide
gccaucgccaguuacagcu

SEQ ID NO: 216985 - RNA, 19 nt, Artificial Sequence
  Description of Artificial Sequence: Synthetic oligonucleotide
guguuaacauucagcuuac

SEQ ID NO: 216986 - RNA, 19 nt, Artificial Sequence
  Description of Artificial Sequence: Synthetic oligonucleotide
ucccuuucggcaugaucaa

SEQ ID NO: 216987 - RNA, 19 nt, Artificial Sequence
  Description of Artificial Sequence: Synthetic oligonucleotide
ucguuaucccacucugguu

SEQ ID NO: 216988 - RNA, 19 nt, Artificial Sequence
  Description of Artificial Sequence: Synthetic oligonucleotide
uucguauucuucgguuaaa

SEQ ID NO: 216989 - RNA, 19 nt, Artificial Sequence
  Description of Artificial Sequence: Synthetic oligonucleotide
ugccgaguuaccguuguuu

SEQ ID NO: 216990 - RNA, 19 nt, Artificial Sequence
  Description of Artificial Sequence: Synthetic oligonucleotide
caggaccacucuagguacc

SEQ ID NO: 216991 - RNA, 19 nt, Artificial Sequence
  Description of Artificial Sequence: Synthetic oligonucleotide
guguuaucuauuuggcuau

SEQ ID NO: 216992 - RNA, 19 nt, Artificial Sequence
  Description of Artificial Sequence: Synthetic oligonucleotide
cauucguacaagugugucu

SEQ ID NO: 216993 - RNA, 19 nt, Artificial Sequence
  Description of Artificial Sequence: Synthetic oligonucleotide
caccguggauuuuccgggc

SEQ ID NO: 216994 - RNA, 19 nt, Artificial Sequence
  Description of Artificial Sequence: Synthetic oligonucleotide
ggcuauuaguauuagcaau

SEQ ID NO: 216995 - RNA, 19 nt, Artificial Sequence
  Description of Artificial Sequence: Synthetic oligonucleotide
cuuucggcaugaucaaucu

SEQ ID NO: 216996 - RNA, 19 nt, Artificial Sequence
  Description of Artificial Sequence: Synthetic oligonucleotide
gggugugucauaaaguugu

SEQ ID NO: 216997 - RNA, 19 nt, Artificial Sequence
  Description of Artificial Sequence: Synthetic oligonucleotide
ggcuuccgaagcaaaagug

SEQ ID NO: 216998 - RNA, 19 nt, Artificial Sequence
  Description of Artificial Sequence: Synthetic oligonucleotide
aaaccacuacgaguugaua

SEQ ID NO: 216999 - RNA, 19 nt, Artificial Sequence
  Description of Artificial Sequence: Synthetic oligonucleotide
ucgaagcuuuggccaaauc

SEQ ID NO: 217000 - RNA, 19 nt, Artificial Sequence
  Description of Artificial Sequence: Synthetic oligonucleotide
gcuuccgaagcaaaaguga

SEQ ID NO: 217001 - RNA, 19 nt, Artificial Sequence
  Description of Artificial Sequence: Synthetic oligonucleotide
cacgggucacuuaugccga

SEQ ID NO: 217002 - RNA, 19 nt, Artificial Sequence
  Description of Artificial Sequence: Synthetic oligonucleotide
ggacuuccuaacagaauug

SEQ ID NO: 217003 - RNA, 19 nt, Artificial Sequence
  Description of Artificial Sequence: Synthetic oligonucleotide
ccgagauaaaccacagcuc

SEQ ID NO: 217004 - RNA, 19 nt, Artificial Sequence
  Description of Artificial Sequence: Synthetic oligonucleotide
cagggugugucauaaaguu

SEQ ID NO: 217005 - RNA, 19 nt, Artificial Sequence
  Description of Artificial Sequence: Synthetic oligonucleotide
gccgcaacucccuuucggc

SEQ ID NO: 217006 - RNA, 19 nt, Artificial Sequence
  Description of Artificial Sequence: Synthetic oligonucleotide
gugucauaaaguuguggau

SEQ ID NO: 217007 - RNA, 19 nt, Artificial Sequence
  Description of Artificial Sequence: Synthetic oligonucleotide
uacccacaugacgugguaa

SEQ ID NO: 217008 - RNA, 19 nt, Artificial Sequence
  Description of Artificial Sequence: Synthetic oligonucleotide
accgccuuaaguggugagu

SEQ ID NO: 217009 - RNA, 19 nt, Artificial Sequence
  Description of Artificial Sequence: Synthetic oligonucleotide
ugacucggugggugguucu

SEQ ID NO: 217010 - RNA, 19 nt, Artificial Sequence
  Description of Artificial Sequence: Synthetic oligonucleotide
acgaguugauagaaugcau

SEQ ID NO: 217011 - RNA, 19 nt, Artificial Sequence
  Description of Artificial Sequence: Synthetic oligonucleotide
agcuuacaaucagagugau

SEQ ID NO: 217012 - RNA, 19 nt, Artificial Sequence
  Description of Artificial Sequence: Synthetic oligonucleotide
cuuaugccgaguuaccguu

SEQ ID NO: 217013 - RNA, 19 nt, Artificial Sequence
  Description of Artificial Sequence: Synthetic oligonucleotide
uccuaaacucagggugugu

SEQ ID NO: 217014 - RNA, 19 nt, Artificial Sequence
  Description of Artificial Sequence: Synthetic oligonucleotide
ggaccgagauaaaccacag

SEQ ID NO: 217015 - RNA, 19 nt, Artificial Sequence
  Description of Artificial Sequence: Synthetic oligonucleotide
cauuucguauucuucgguu

SEQ ID NO: 217016 - RNA, 19 nt, Artificial Sequence
  Description of Artificial Sequence: Synthetic oligonucleotide
gauccacgggucacuuaug

SEQ ID NO: 217017 - RNA, 19 nt, Artificial Sequence
  Description of Artificial Sequence: Synthetic oligonucleotide
gcuaguguguuaacauuca

SEQ ID NO: 217018 - RNA, 19 nt, Artificial Sequence
  Description of Artificial Sequence: Synthetic oligonucleotide
acuauguagugggcuuccu

SEQ ID NO: 217019 - RNA, 19 nt, Artificial Sequence
  Description of Artificial Sequence: Synthetic oligonucleotide
caccgccuuaaguggugag

SEQ ID NO: 217020 - RNA, 19 nt, Artificial Sequence
  Description of Artificial Sequence: Synthetic oligonucleotide
ccgaagcaaaagugacucg

SEQ ID NO: 217021 - RNA, 19 nt, Artificial Sequence
  Description of Artificial Sequence: Synthetic oligonucleotide
uggcccgagcuguauuaau

SEQ ID NO: 217022 - RNA, 19 nt, Artificial Sequence
  Description of Artificial Sequence: Synthetic oligonucleotide
uugcguuuuguaggagcau

SEQ ID NO: 217023 - RNA, 19 nt, Artificial Sequence
  Description of Artificial Sequence: Synthetic oligonucleotide
gcuauuaguauuagcaauu

SEQ ID NO: 217024 - RNA, 19 nt, Artificial Sequence
  Description of Artificial Sequence: Synthetic oligonucleotide
gcaacucccuuucggcaug

SEQ ID NO: 217025 - RNA, 19 nt, Artificial Sequence
  Description of Artificial Sequence: Synthetic oligonucleotide
ccauuagcacucaagauuu

SEQ ID NO: 217026 - RNA, 19 nt, Artificial Sequence
  Description of Artificial Sequence: Synthetic oligonucleotide
acgccgcaacucccuuucg

SEQ ID NO: 217027 - RNA, 19 nt, Artificial Sequence
  Description of Artificial Sequence: Synthetic oligonucleotide
caagcgcccgugaaagcaa

SEQ ID NO: 217028 - RNA, 19 nt, Artificial Sequence
  Description of Artificial Sequence: Synthetic oligonucleotide
cgagauaaaccacagcucu

SEQ ID NO: 217029 - RNA, 19 nt, Artificial Sequence
  Description of Artificial Sequence: Synthetic oligonucleotide
cgaguuaccguuguuuauc

SEQ ID NO: 217030 - RNA, 19 nt, Artificial Sequence
  Description of Artificial Sequence: Synthetic oligonucleotide
aagagguagcagacuuguu

SEQ ID NO: 217031 - RNA, 19 nt, Artificial Sequence
  Description of Artificial Sequence: Synthetic oligonucleotide
gccgaguuaccguuguuua

SEQ ID NO: 217032 - RNA, 19 nt, Artificial Sequence
  Description of Artificial Sequence: Synthetic oligonucleotide
aucucgcuuuaaaauccaa

SEQ ID NO: 217033 - RNA, 19 nt, Artificial Sequence
  Description of Artificial Sequence: Synthetic oligonucleotide
ccccuggguguaaaauacc

SEQ ID NO: 217034 - RNA, 19 nt, Artificial Sequence
  Description of Artificial Sequence: Synthetic oligonucleotide
gcguuuuguaggagcauca

SEQ ID NO: 217035 - RNA, 19 nt, Artificial Sequence
  Description of Artificial Sequence: Synthetic oligonucleotide
aucgccaguuacagcuaca

SEQ ID NO: 217036 - RNA, 19 nt, Artificial Sequence
  Description of Artificial Sequence: Synthetic oligonucleotide
gugacucggugggugguuc

SEQ ID NO: 217037 - RNA, 19 nt, Artificial Sequence
  Description of Artificial Sequence: Synthetic oligonucleotide
cggcuaguuggaauuguug

SEQ ID NO: 217038 - RNA, 19 nt, Artificial Sequence
  Description of Artificial Sequence: Synthetic oligonucleotide
gcgcacaguaauuccagcu

SEQ ID NO: 217039 - RNA, 19 nt, Artificial Sequence
  Description of Artificial Sequence: Synthetic oligonucleotide
ccgccuuaaguggugaguc

SEQ ID NO: 217040 - RNA, 19 nt, Artificial Sequence
  Description of Artificial Sequence: Synthetic oligonucleotide
cauaugguucucaggccuu

SEQ ID NO: 217041 - RNA, 19 nt, Artificial Sequence
  Description of Artificial Sequence: Synthetic oligonucleotide
ccuaacagaauugaagguu

SEQ ID NO: 217042 - RNA, 19 nt, Artificial Sequence
  Description of Artificial Sequence: Synthetic oligonucleotide
ggucacuuaugccgaguua

SEQ ID NO: 217043 - RNA, 19 nt, Artificial Sequence
  Description of Artificial Sequence: Synthetic oligonucleotide
ggguguaaaauaccacauu

SEQ ID NO: 217044 - RNA, 19 nt, Artificial Sequence
  Description of Artificial Sequence: Synthetic oligonucleotide
caucacggucccugggucu

SEQ ID NO: 217045 - RNA, 19 nt, Artificial Sequence
  Description of Artificial Sequence: Synthetic oligonucleotide
gugcugucaauuauaccuu

SEQ ID NO: 217046 - RNA, 19 nt, Artificial Sequence
  Description of Artificial Sequence: Synthetic oligonucleotide
gcaguauuugaaggacuaa

SEQ ID NO: 217047 - RNA, 19 nt, Artificial Sequence
  Description of Artificial Sequence: Synthetic oligonucleotide
augccgaguuaccguuguu

SEQ ID NO: 217048 - RNA, 19 nt, Artificial Sequence
  Description of Artificial Sequence: Synthetic oligonucleotide
gaccaugcgcacaguaauu

SEQ ID NO: 217049 - RNA, 19 nt, Artificial Sequence
  Description of Artificial Sequence: Synthetic oligonucleotide
agcgcccgugaaagcaaca

SEQ ID NO: 217050 - RNA, 19 nt, Artificial Sequence
  Description of Artificial Sequence: Synthetic oligonucleotide
ggcccgagcuguauuaaua

SEQ ID NO: 217051 - RNA, 19 nt, Artificial Sequence
  Description of Artificial Sequence: Synthetic oligonucleotide
acgugagaugagaggcuua

SEQ ID NO: 217052 - RNA, 19 nt, Artificial Sequence
  Description of Artificial Sequence: Synthetic oligonucleotide
ggguugcguuuuguaggag

SEQ ID NO: 217053 - RNA, 19 nt, Artificial Sequence
  Description of Artificial Sequence: Synthetic oligonucleotide
ccgcaacucccuuucggca

SEQ ID NO: 217054 - RNA, 19 nt, Artificial Sequence
  Description of Artificial Sequence: Synthetic oligonucleotide
ggaccacucuagguaccac

SEQ ID NO: 217055 - RNA, 19 nt, Artificial Sequence
  Description of Artificial Sequence: Synthetic oligonucleotide
gggucacuuaugccgaguu

SEQ ID NO: 217056 - RNA, 19 nt, Artificial Sequence
  Description of Artificial Sequence: Synthetic oligonucleotide
ccacuacgaguugauagaa

SEQ ID NO: 217057 - RNA, 19 nt, Artificial Sequence
  Description of Artificial Sequence: Synthetic oligonucleotide
ccgcuggaaaaucucugaa

SEQ ID NO: 217058 - RNA, 19 nt, Artificial Sequence
  Description of Artificial Sequence: Synthetic oligonucleotide
ccguuguuuaucugucagu

SEQ ID NO: 217059 - RNA, 19 nt, Artificial Sequence
  Description of Artificial Sequence: Synthetic oligonucleotide
gcgcccgugaaagcaacaa

SEQ ID NO: 217060 - RNA, 19 nt, Artificial Sequence
  Description of Artificial Sequence: Synthetic oligonucleotide
ggccagacauaugguucuc

SEQ ID NO: 217061 - RNA, 19 nt, Artificial Sequence
  Description of Artificial Sequence: Synthetic oligonucleotide
gcaccgccuuaagugguga

SEQ ID NO: 217062 - RNA, 19 nt, Artificial Sequence
  Description of Artificial Sequence: Synthetic oligonucleotide
ccgaguuaccguuguuuau

SEQ ID NO: 217063 - RNA, 19 nt, Artificial Sequence
  Description of Artificial Sequence: Synthetic oligonucleotide
ccaucgccaguuacagcua

SEQ ID NO: 217064 - RNA, 19 nt, Artificial Sequence
  Description of Artificial Sequence: Synthetic oligonucleotide
gcucuccgucuugcccagc

SEQ ID NO: 217065 - RNA, 19 nt, Artificial Sequence
  Description of Artificial Sequence: Synthetic oligonucleotide
ggcugggguugcguuuugu

SEQ ID NO: 217066 - RNA, 19 nt, Artificial Sequence
  Description of Artificial Sequence: Synthetic oligonucleotide
cguuuuguaggagcaucau

SEQ ID NO: 217067 - RNA, 19 nt, Artificial Sequence
  Description of Artificial Sequence: Synthetic oligonucleotide
ggcguugcucugagacagu

SEQ ID NO: 217068 - RNA, 19 nt, Artificial Sequence
  Description of Artificial Sequence: Synthetic oligonucleotide
cgcccgugaaagcaacaau

SEQ ID NO: 217069 - RNA, 19 nt, Artificial Sequence
  Description of Artificial Sequence: Synthetic oligonucleotide
cccuuucggcaugaucaau

SEQ ID NO: 217070 - RNA, 19 nt, Artificial Sequence
  Description of Artificial Sequence: Synthetic oligonucleotide
cguggauuuuccgggcauu

SEQ ID NO: 217071 - RNA, 19 nt, Artificial Sequence
  Description of Artificial Sequence: Synthetic oligonucleotide
cgggucacuuaugccgagu

SEQ ID NO: 217072 - RNA, 19 nt, Artificial Sequence
  Description of Artificial Sequence: Synthetic oligonucleotide
aaugaauuaacacagguca

SEQ ID NO: 217073 - RNA, 19 nt, Artificial Sequence
  Description of Artificial Sequence: Synthetic oligonucleotide
aauagaagagucccgaacc

SEQ ID NO: 217074 - RNA, 19 nt, Artificial Sequence
  Description of Artificial Sequence: Synthetic oligonucleotide
auuguauaaagucagguac

SEQ ID NO: 217075 - RNA, 19 nt, Artificial Sequence
  Description of Artificial Sequence: Synthetic oligonucleotide
uauacgaacaauaucaccc

SEQ ID NO: 217076 - RNA, 19 nt, Artificial Sequence
  Description of Artificial Sequence: Synthetic oligonucleotide
uauauaugagaacagguag

SEQ ID NO: 217077 - RNA, 19 nt, Artificial Sequence
  Description of Artificial Sequence: Synthetic oligonucleotide
uauuacuguaucaauaaag

SEQ ID NO: 217078 - RNA, 19 nt, Artificial Sequence
  Description of Artificial Sequence: Synthetic oligonucleotide
agaugguugauccaagucc

SEQ ID NO: 217079 - RNA, 19 nt, Artificial Sequence
  Description of Artificial Sequence: Synthetic oligonucleotide
aaugugaucgguuucucag

SEQ ID NO: 217080 - RNA, 19 nt, Artificial Sequence
  Description of Artificial Sequence: Synthetic oligonucleotide
aagacuauauaugagaaca

SEQ ID NO: 217081 - RNA, 19 nt, Artificial Sequence
  Description of Artificial Sequence: Synthetic oligonucleotide
aaagacuauauaugagaac

SEQ ID NO: 217082 - RNA, 19 nt, Artificial Sequence
  Description of Artificial Sequence: Synthetic oligonucleotide
aaaauggccagagaauccc

SEQ ID NO: 217083 - RNA, 19 nt, Artificial Sequence
  Description of Artificial Sequence: Synthetic oligonucleotide
cauuaucugaguuauggcg

SEQ ID NO: 217084 - RNA, 19 nt, Artificial Sequence
  Description of Artificial Sequence: Synthetic oligonucleotide
acaaaguacauauucuggg

SEQ ID NO: 217085 - RNA, 19 nt, Artificial Sequence
  Description of Artificial Sequence: Synthetic oligonucleotide
uguaucaaucauaagcuga

SEQ ID NO: 217086 - RNA, 19 nt, Artificial Sequence
  Description of Artificial Sequence: Synthetic oligonucleotide
uccaaaagacuauauauga

SEQ ID NO: 217087 - RNA, 19 nt, Artificial Sequence
  Description of Artificial Sequence: Synthetic oligonucleotide
auuaaaguauaguggcccc

SEQ ID NO: 217088 - RNA, 19 nt, Artificial Sequence
  Description of Artificial Sequence: Synthetic oligonucleotide
ugaguuauggcgcaaccag

SEQ ID NO: 217089 - RNA, 19 nt, Artificial Sequence
  Description of Artificial Sequence: Synthetic oligonucleotide
ugaggcaugcaaaagauaa

SEQ ID NO: 217090 - RNA, 19 nt, Artificial Sequence
  Description of Artificial Sequence: Synthetic oligonucleotide
uauuaaaguauaguggccc

SEQ ID NO: 217091 - RNA, 19 nt, Artificial Sequence
  Description of Artificial Sequence: Synthetic oligonucleotide
uauaugagaacagguaggg

SEQ ID NO: 217092 - RNA, 19 nt, Artificial Sequence
  Description of Artificial Sequence: Synthetic oligonucleotide
auuaucugaguuauggcgc

SEQ ID NO: 217093 - RNA, 19 nt, Artificial Sequence
  Description of Artificial Sequence: Synthetic oligonucleotide
acauaauacagcugaacag

SEQ ID NO: 217094 - RNA, 19 nt, Artificial Sequence
  Description of Artificial Sequence: Synthetic oligonucleotide
aagaugguugauccaaguc

SEQ ID NO: 217095 - RNA, 19 nt, Artificial Sequence
  Description of Artificial Sequence: Synthetic oligonucleotide
gaugcggugggucaaaacc

SEQ ID NO: 217096 - RNA, 19 nt, Artificial Sequence
  Description of Artificial Sequence: Synthetic oligonucleotide
ucccgaaccacacuaaucc

SEQ ID NO: 217097 - RNA, 19 nt, Artificial Sequence
  Description of Artificial Sequence: Synthetic oligonucleotide
uaugguugggacuacaccu

SEQ ID NO: 217098 - RNA, 19 nt, Artificial Sequence
  Description of Artificial Sequence: Synthetic oligonucleotide
accaauuugaagucuagug

SEQ ID NO: 217099 - RNA, 19 nt, Artificial Sequence
  Description of Artificial Sequence: Synthetic oligonucleotide
uuugaucuagucuuuacaa

SEQ ID NO: 217100 - RNA, 19 nt, Artificial Sequence
  Description of Artificial Sequence: Synthetic oligonucleotide
ugguauguaauuuacccac

SEQ ID NO: 217101 - RNA, 19 nt, Artificial Sequence
  Description of Artificial Sequence: Synthetic oligonucleotide
uguaauaaccaugacugug

SEQ ID NO: 217102 - RNA, 19 nt, Artificial Sequence
  Description of Artificial Sequence: Synthetic oligonucleotide
gaauaauggaaguccacug

SEQ ID NO: 217103 - RNA, 19 nt, Artificial Sequence
  Description of Artificial Sequence: Synthetic oligonucleotide
aauacaugagggucuauau

SEQ ID NO: 217104 - RNA, 19 nt, Artificial Sequence
  Description of Artificial Sequence: Synthetic oligonucleotide
acgacaacauaauacagcu

SEQ ID NO: 217105 - RNA, 19 nt, Artificial Sequence
  Description of Artificial Sequence: Synthetic oligonucleotide
agagaaauuuaaaucuagc

SEQ ID NO: 217106 - RNA, 19 nt, Artificial Sequence
  Description of Artificial Sequence: Synthetic oligonucleotide
aaggguagcuauucuaaug

SEQ ID NO: 217107 - RNA, 19 nt, Artificial Sequence
  Description of Artificial Sequence: Synthetic oligonucleotide
auauguuguuccaaaagac

SEQ ID NO: 217108 - RNA, 19 nt, Artificial Sequence
  Description of Artificial Sequence: Synthetic oligonucleotide
agauauuguauaaagucag

SEQ ID NO: 217109 - RNA, 19 nt, Artificial Sequence
  Description of Artificial Sequence: Synthetic oligonucleotide
ccaaauuuuaguaugguug

SEQ ID NO: 217110 - RNA, 19 nt, Artificial Sequence
  Description of Artificial Sequence: Synthetic oligonucleotide
caaaagacuauauaugaga

SEQ ID NO: 217111 - RNA, 19 nt, Artificial Sequence
  Description of Artificial Sequence: Synthetic oligonucleotide
ugguaauuggacugguagg

SEQ ID NO: 217112 - RNA, 19 nt, Artificial Sequence
  Description of Artificial Sequence: Synthetic oligonucleotide
uuuggcuauacgaacaaua

SEQ ID NO: 217113 - RNA, 19 nt, Artificial Sequence
  Description of Artificial Sequence: Synthetic oligonucleotide
uuacuacccacacugaaaa

SEQ ID NO: 217114 - RNA, 19 nt, Artificial Sequence
  Description of Artificial Sequence: Synthetic oligonucleotide
ucuagucuuuacaagucca

SEQ ID NO: 217115 - RNA, 19 nt, Artificial Sequence
  Description of Artificial Sequence: Synthetic oligonucleotide
cugucgaucaaauacuuuc

SEQ ID NO: 217116 - RNA, 19 nt, Artificial Sequence
  Description of Artificial Sequence: Synthetic oligonucleotide
uauuguauaaagucaggua

SEQ ID NO: 217117 - RNA, 19 nt, Artificial Sequence
  Description of Artificial Sequence: Synthetic oligonucleotide
uauaguggccccagcaaag

SEQ ID NO: 217118 - RNA, 19 nt, Artificial Sequence
  Description of Artificial Sequence: Synthetic oligonucleotide
auaauagauccccagguaa

SEQ ID NO: 217119 - RNA, 19 nt, Artificial Sequence
  Description of Artificial Sequence: Synthetic oligonucleotide
auauaugagaacagguagg

SEQ ID NO: 217120 - RNA, 19 nt, Artificial Sequence
  Description of Artificial Sequence: Synthetic oligonucleotide
cuauacgaacaauaucacc

SEQ ID NO: 217121 - RNA, 19 nt, Artificial Sequence
  Description of Artificial Sequence: Synthetic oligonucleotide
uguaaaggugccauacgac

SEQ ID NO: 217122 - RNA, 19 nt, Artificial Sequence
  Description of Artificial Sequence: Synthetic oligonucleotide
uaauagauccccagguaac

SEQ ID NO: 217123 - RNA, 19 nt, Artificial Sequence
  Description of Artificial Sequence: Synthetic oligonucleotide
ugugcuuacuuguaucaug

SEQ ID NO: 217124 - RNA, 19 nt, Artificial Sequence
  Description of Artificial Sequence: Synthetic oligonucleotide
aaaguuugccacucuucug

SEQ ID NO: 217125 - RNA, 19 nt, Artificial Sequence
  Description of Artificial Sequence: Synthetic oligonucleotide
aauagaguucucaaggcaa

SEQ ID NO: 217126 - RNA, 19 nt, Artificial Sequence
  Description of Artificial Sequence: Synthetic oligonucleotide
cugagugcaagagauaagc

SEQ ID NO: 217127 - RNA, 19 nt, Artificial Sequence
  Description of Artificial Sequence: Synthetic oligonucleotide
uuuuaguaugguugcauuc

SEQ ID NO: 217128 - RNA, 19 nt, Artificial Sequence
  Description of Artificial Sequence: Synthetic oligonucleotide
ugaaugugcuucaguaagc

SEQ ID NO: 217129 - RNA, 19 nt, Artificial Sequence
  Description of Artificial Sequence: Synthetic oligonucleotide
aggguagcuauucuaaugu

SEQ ID NO: 217130 - RNA, 19 nt, Artificial Sequence
  Description of Artificial Sequence: Synthetic oligonucleotide
ugguccaguacagaaaugc

SEQ ID NO: 217131 - RNA, 19 nt, Artificial Sequence
  Description of Artificial Sequence: Synthetic oligonucleotide
agugaaugguucuaccucu

SEQ ID NO: 217132 - RNA, 19 nt, Artificial Sequence
  Description of Artificial Sequence: Synthetic oligonucleotide
uuaaaucuagcuacugcau

SEQ ID NO: 217133 - RNA, 19 nt, Artificial Sequence
  Description of Artificial Sequence: Synthetic oligonucleotide
aaagcuuacuacccacacu

SEQ ID NO: 217134 - RNA, 19 nt, Artificial Sequence
  Description of Artificial Sequence: Synthetic oligonucleotide
cuuuaaugcucaagagacg

SEQ ID NO: 217135 - RNA, 19 nt, Artificial Sequence
  Description of Artificial Sequence: Synthetic oligonucleotide
uaaugugacaaugguaugu

SEQ ID NO: 217136 - RNA, 19 nt, Artificial Sequence
  Description of Artificial Sequence: Synthetic oligonucleotide
uuggcuauacgaacaauau

SEQ ID NO: 217137 - RNA, 19 nt, Artificial Sequence
  Description of Artificial Sequence: Synthetic oligonucleotide
guaccaaacguccaguuuc

SEQ ID NO: 217138 - RNA, 19 nt, Artificial Sequence
  Description of Artificial Sequence: Synthetic oligonucleotide
uacuaaugucccgauagag

SEQ ID NO: 217139 - RNA, 19 nt, Artificial Sequence
  Description of Artificial Sequence: Synthetic oligonucleotide
agaauaauggaaguccacu

SEQ ID NO: 217140 - RNA, 19 nt, Artificial Sequence
  Description of Artificial Sequence: Synthetic oligonucleotide
uagugaaugguucuaccuc

SEQ ID NO: 217141 - RNA, 19 nt, Artificial Sequence
  Description of Artificial Sequence: Synthetic oligonucleotide
ggcuauacgaacaauauca

SEQ ID NO: 217142 - RNA, 19 nt, Artificial Sequence
  Description of Artificial Sequence: Synthetic oligonucleotide
gacguaaaacuaucuuugc

SEQ ID NO: 217143 - RNA, 19 nt, Artificial Sequence
  Description of Artificial Sequence: Synthetic oligonucleotide
agagucaagaugcuccugu

SEQ ID NO: 217144 - RNA, 19 nt, Artificial Sequence
  Description of Artificial Sequence: Synthetic oligonucleotide
aauuuacccacuaaagauu

SEQ ID NO: 217145 - RNA, 19 nt, Artificial Sequence
  Description of Artificial Sequence: Synthetic oligonucleotide
cacauuaacuuuccccacg

SEQ ID NO: 217146 - RNA, 19 nt, Artificial Sequence
  Description of Artificial Sequence: Synthetic oligonucleotide
aauagauccccagguaaca

SEQ ID NO: 217147 - RNA, 19 nt, Artificial Sequence
  Description of Artificial Sequence: Synthetic oligonucleotide
uuuacauacuuggucacaa

SEQ ID NO: 217148 - RNA, 19 nt, Artificial Sequence
  Description of Artificial Sequence: Synthetic oligonucleotide
uuuauaggaugaagacccc

SEQ ID NO: 217149 - RNA, 19 nt, Artificial Sequence
  Description of Artificial Sequence: Synthetic oligonucleotide
uuaucugaguuauggcgca

SEQ ID NO: 217150 - RNA, 19 nt, Artificial Sequence
  Description of Artificial Sequence: Synthetic oligonucleotide
acaacauaaacaggagcuc

SEQ ID NO: 217151 - RNA, 19 nt, Artificial Sequence
  Description of Artificial Sequence: Synthetic oligonucleotide
uuacuaaugucccgauaga

SEQ ID NO: 217152 - RNA, 19 nt, Artificial Sequence
  Description of Artificial Sequence: Synthetic oligonucleotide
aauagacaaguaacaacca

SEQ ID NO: 217153 - RNA, 19 nt, Artificial Sequence
  Description of Artificial Sequence: Synthetic oligonucleotide
auacgaacaauaucaccca

SEQ ID NO: 217154 - RNA, 19 nt, Artificial Sequence
  Description of Artificial Sequence: Synthetic oligonucleotide
aaggauccgaugcacucca

SEQ ID NO: 217155 - RNA, 19 nt, Artificial Sequence
  Description of Artificial Sequence: Synthetic oligonucleotide
acguaaaacuaucuuugca

SEQ ID NO: 217156 - RNA, 19 nt, Artificial Sequence
  Description of Artificial Sequence: Synthetic oligonucleotide
aaauaacuguacaagggua

SEQ ID NO: 217157 - RNA, 19 nt, Artificial Sequence
  Description of Artificial Sequence: Synthetic oligonucleotide
uccaagacggucucaacuc

SEQ ID NO: 217158 - RNA, 19 nt, Artificial Sequence
  Description of Artificial Sequence: Synthetic oligonucleotide
cagucuuauuacuuuugcc

SEQ ID NO: 217159 - RNA, 19 nt, Artificial Sequence
  Description of Artificial Sequence: Synthetic oligonucleotide
ccauacgacaacauaauac

SEQ ID NO: 217160 - RNA, 19 nt, Artificial Sequence
  Description of Artificial Sequence: Synthetic oligonucleotide
augaaaugauccgauuauc

SEQ ID NO: 217161 - RNA, 19 nt, Artificial Sequence
  Description of Artificial Sequence: Synthetic oligonucleotide
aguuauggcgcaaccaguc

SEQ ID NO: 217162 - RNA, 19 nt, Artificial Sequence
  Description of Artificial Sequence: Synthetic oligonucleotide
cuucuuuacccaugauucc

SEQ ID NO: 217163 - RNA, 19 nt, Artificial Sequence
  Description of Artificial Sequence: Synthetic oligonucleotide
auagaagagucccgaacca

SEQ ID NO: 217164 - RNA, 19 nt, Artificial Sequence
  Description of Artificial Sequence: Synthetic oligonucleotide
ugggacuacaccuuccuau

SEQ ID NO: 217165 - RNA, 19 nt, Artificial Sequence
  Description of Artificial Sequence: Synthetic oligonucleotide
gaugguugauccaagucca

SEQ ID NO: 217166 - RNA, 19 nt, Artificial Sequence
  Description of Artificial Sequence: Synthetic oligonucleotide
acauuaacuuuccccacga

SEQ ID NO: 217167 - RNA, 19 nt, Artificial Sequence
  Description of Artificial Sequence: Synthetic oligonucleotide
uacuguuaucacaaagaau

SEQ ID NO: 217168 - RNA, 19 nt, Artificial Sequence
  Description of Artificial Sequence: Synthetic oligonucleotide
ugaagucuagugaaugguu

SEQ ID NO: 217169 - RNA, 19 nt, Artificial Sequence
  Description of Artificial Sequence: Synthetic oligonucleotide
uuaguaugguugcauucaa

SEQ ID NO: 217170 - RNA, 19 nt, Artificial Sequence
  Description of Artificial Sequence: Synthetic oligonucleotide
uaccaaacguccaguuucc

SEQ ID NO: 217171 - RNA, 19 nt, Artificial Sequence
  Description of Artificial Sequence: Synthetic oligonucleotide
gcaagagauaagcuggucc

SEQ ID NO: 217172 - RNA, 19 nt, Artificial Sequence
  Description of Artificial Sequence: Synthetic oligonucleotide
accaaaacuccuuaauauu

SEQ ID NO: 217173 - RNA, 19 nt, Artificial Sequence
  Description of Artificial Sequence: Synthetic oligonucleotide
gacaaguaacaaccaugag

SEQ ID NO: 217174 - RNA, 19 nt, Artificial Sequence
  Description of Artificial Sequence: Synthetic oligonucleotide
gacuacaccuuccuaugac

SEQ ID NO: 217175 - RNA, 19 nt, Artificial Sequence
  Description of Artificial Sequence: Synthetic oligonucleotide
augcggugggucaaaaccc

SEQ ID NO: 217176 - RNA, 19 nt, Artificial Sequence
  Description of Artificial Sequence: Synthetic oligonucleotide
cauaaaagcuuacuaccca

SEQ ID NO: 217177 - RNA, 19 nt, Artificial Sequence
  Description of Artificial Sequence: Synthetic oligonucleotide
uaagcuggucccaucuacu

SEQ ID NO: 217178 - RNA, 19 nt, Artificial Sequence
  Description of Artificial Sequence: Synthetic oligonucleotide
auccgaugcacuccacaac

SEQ ID NO: 217179 - RNA, 19 nt, Artificial Sequence
  Description of Artificial Sequence: Synthetic oligonucleotide
aagcugucgaucaaauacu

SEQ ID NO: 217180 - RNA, 19 nt, Artificial Sequence
  Description of Artificial Sequence: Synthetic oligonucleotide
aauggagaggguucaugua

SEQ ID NO: 217181 - RNA, 19 nt, Artificial Sequence
  Description of Artificial Sequence: Synthetic oligonucleotide
gcaaccagucuucauagcc

SEQ ID NO: 217182 - RNA, 19 nt, Artificial Sequence
  Description of Artificial Sequence: Synthetic oligonucleotide
uuaaugcucaagagacggu

SEQ ID NO: 217183 - RNA, 19 nt, Artificial Sequence
  Description of Artificial Sequence: Synthetic oligonucleotide
guguaucaaucauaagcug

SEQ ID NO: 217184 - RNA, 19 nt, Artificial Sequence
  Description of Artificial Sequence: Synthetic oligonucleotide
uccuaugacucgcuccagc

SEQ ID NO: 217185 - RNA, 19 nt, Artificial Sequence
  Description of Artificial Sequence: Synthetic oligonucleotide
auauucugggaucccaaaa

SEQ ID NO: 217186 - RNA, 19 nt, Artificial Sequence
  Description of Artificial Sequence: Synthetic oligonucleotide
uggcuauacgaacaauauc

SEQ ID NO: 217187 - RNA, 19 nt, Artificial Sequence
  Description of Artificial Sequence: Synthetic oligonucleotide
agaaaaugguuagaaacuu

SEQ ID NO: 217188 - RNA, 19 nt, Artificial Sequence
  Description of Artificial Sequence: Synthetic oligonucleotide
cuaaugaauuaacacaggu

SEQ ID NO: 217189 - RNA, 19 nt, Artificial Sequence
  Description of Artificial Sequence: Synthetic oligonucleotide
auacuuggaugaaaugauc

SEQ ID NO: 217190 - RNA, 19 nt, Artificial Sequence
  Description of Artificial Sequence: Synthetic oligonucleotide
uucuuaauaccaagucuuu

SEQ ID NO: 217191 - RNA, 19 nt, Artificial Sequence
  Description of Artificial Sequence: Synthetic oligonucleotide
agguguauauaggccauuc

SEQ ID NO: 217192 - RNA, 19 nt, Artificial Sequence
  Description of Artificial Sequence: Synthetic oligonucleotide
gauaugguugggacuacac

SEQ ID NO: 217193 - RNA, 19 nt, Artificial Sequence
  Description of Artificial Sequence: Synthetic oligonucleotide
uuacccacuaaagauuuua

SEQ ID NO: 217194 - RNA, 19 nt, Artificial Sequence
  Description of Artificial Sequence: Synthetic oligonucleotide
aaacaccaauuugaagucu

SEQ ID NO: 217195 - RNA, 19 nt, Artificial Sequence
  Description of Artificial Sequence: Synthetic oligonucleotide
aggaccaaaacuccuuaau

SEQ ID NO: 217196 - RNA, 19 nt, Artificial Sequence
  Description of Artificial Sequence: Synthetic oligonucleotide
auacgacaacauaauacag

SEQ ID NO: 217197 - RNA, 19 nt, Artificial Sequence
  Description of Artificial Sequence: Synthetic oligonucleotide
gcucuguaauacaugaggg

SEQ ID NO: 217198 - RNA, 19 nt, Artificial Sequence
  Description of Artificial Sequence: Synthetic oligonucleotide
acuguacaaggguagcuau

SEQ ID NO: 217199 - RNA, 19 nt, Artificial Sequence
  Description of Artificial Sequence: Synthetic oligonucleotide
aaguaccaaacguccaguu

SEQ ID NO: 217200 - RNA, 19 nt, Artificial Sequence
  Description of Artificial Sequence: Synthetic oligonucleotide
uuauggcgcaaccagucuu

SEQ ID NO: 217201 - RNA, 19 nt, Artificial Sequence
  Description of Artificial Sequence: Synthetic oligonucleotide
cuuccuaugacucgcucca

SEQ ID NO: 217202 - RNA, 19 nt, Artificial Sequence
  Description of Artificial Sequence: Synthetic oligonucleotide
aacuguacaaggguagcua

SEQ ID NO: 217203 - RNA, 19 nt, Artificial Sequence
  Description of Artificial Sequence: Synthetic oligonucleotide
cugcugauaugguugggac

SEQ ID NO: 217204 - RNA, 19 nt, Artificial Sequence
  Description of Artificial Sequence: Synthetic oligonucleotide
aguaauuuggagagaaauu

SEQ ID NO: 217205 - RNA, 19 nt, Artificial Sequence
  Description of Artificial Sequence: Synthetic oligonucleotide
agacuauauaugagaacag

SEQ ID NO: 217206 - RNA, 19 nt, Artificial Sequence
  Description of Artificial Sequence: Synthetic oligonucleotide
ugauccgauuaucuauaaa

SEQ ID NO: 217207 - RNA, 19 nt, Artificial Sequence
  Description of Artificial Sequence: Synthetic oligonucleotide
ugcugauaugguugggacu

SEQ ID NO: 217208 - RNA, 19 nt, Artificial Sequence
  Description of Artificial Sequence: Synthetic oligonucleotide
ucuuuacccaugauuccua

SEQ ID NO: 217209 - RNA, 19 nt, Artificial Sequence
  Description of Artificial Sequence: Synthetic oligonucleotide
ugguuagaaacuugcucuc

SEQ ID NO: 217210 - RNA, 19 nt, Artificial Sequence
  Description of Artificial Sequence: Synthetic oligonucleotide
guaauuuggagagaaauuu

SEQ ID NO: 217211 - RNA, 19 nt, Artificial Sequence
  Description of Artificial Sequence: Synthetic oligonucleotide
gagaggguucauguaacug

SEQ ID NO: 217212 - RNA, 19 nt, Artificial Sequence
  Description of Artificial Sequence: Synthetic oligonucleotide
aagacggucucaacuccuc

SEQ ID NO: 217213 - RNA, 19 nt, Artificial Sequence
  Description of Artificial Sequence: Synthetic oligonucleotide
auauauuagccagguugag

SEQ ID NO: 217214 - RNA, 19 nt, Artificial Sequence
  Description of Artificial Sequence: Synthetic oligonucleotide
acaagagacguaaaacuau

SEQ ID NO: 217215 - RNA, 19 nt, Artificial Sequence
  Description of Artificial Sequence: Synthetic oligonucleotide
uuauggcaguuacuguuau

SEQ ID NO: 217216 - RNA, 19 nt, Artificial Sequence
  Description of Artificial Sequence: Synthetic oligonucleotide
uguaauacaugagggucua

SEQ ID NO: 217217 - RNA, 19 nt, Artificial Sequence
  Description of Artificial Sequence: Synthetic oligonucleotide
aguaccaaacguccaguuu

SEQ ID NO: 217218 - RNA, 19 nt, Artificial Sequence
  Description of Artificial Sequence: Synthetic oligonucleotide
uagguguaucaaucauaag

SEQ ID NO: 217219 - RNA, 19 nt, Artificial Sequence
  Description of Artificial Sequence: Synthetic oligonucleotide
ugagggaaucuguuggcua

SEQ ID NO: 217220 - RNA, 19 nt, Artificial Sequence
  Description of Artificial Sequence: Synthetic oligonucleotide
ugcucccugagugcaagag

SEQ ID NO: 217221 - RNA, 19 nt, Artificial Sequence
  Description of Artificial Sequence: Synthetic oligonucleotide
ugucccgauagaggguagg

SEQ ID NO: 217222 - RNA, 19 nt, Artificial Sequence
  Description of Artificial Sequence: Synthetic oligonucleotide
gugccauacgacaacauaa

SEQ ID NO: 217223 - RNA, 19 nt, Artificial Sequence
  Description of Artificial Sequence: Synthetic oligonucleotide
guauguaauuuacccacua

SEQ ID NO: 217224 - RNA, 19 nt, Artificial Sequence
  Description of Artificial Sequence: Synthetic oligonucleotide
guaauuggacugguaggug

SEQ ID NO: 217225 - RNA, 19 nt, Artificial Sequence
  Description of Artificial Sequence: Synthetic oligonucleotide
auauggcaaaccacaccgg

SEQ ID NO: 217226 - RNA, 19 nt, Artificial Sequence
  Description of Artificial Sequence: Synthetic oligonucleotide
accuuccuaugacucgcuc

SEQ ID NO: 217227 - RNA, 19 nt, Artificial Sequence
  Description of Artificial Sequence: Synthetic oligonucleotide
cuagugaaugguucuaccu

SEQ ID NO: 217228 - RNA, 19 nt, Artificial Sequence
  Description of Artificial Sequence: Synthetic oligonucleotide
ugauaugguugggacuaca

SEQ ID NO: 217229 - RNA, 19 nt, Artificial Sequence
  Description of Artificial Sequence: Synthetic oligonucleotide
aauuggacugguaggugua

SEQ ID NO: 217230 - RNA, 19 nt, Artificial Sequence
  Description of Artificial Sequence: Synthetic oligonucleotide
gaucgguuucucaggugag

SEQ ID NO: 217231 - RNA, 19 nt, Artificial Sequence
  Description of Artificial Sequence: Synthetic oligonucleotide
uggcaguuacuguuaucac

SEQ ID NO: 217232 - RNA, 19 nt, Artificial Sequence
  Description of Artificial Sequence: Synthetic oligonucleotide
aaugcucaagagacgguuu

SEQ ID NO: 217233 - RNA, 19 nt, Artificial Sequence
  Description of Artificial Sequence: Synthetic oligonucleotide
aaauggccagagaauccca

SEQ ID NO: 217234 - RNA, 19 nt, Artificial Sequence
  Description of Artificial Sequence: Synthetic oligonucleotide
uggaugaaaugauccgauu

SEQ ID NO: 217235 - RNA, 19 nt, Artificial Sequence
  Description of Artificial Sequence: Synthetic oligonucleotide
gggacuacaccuuccuaug

SEQ ID NO: 217236 - RNA, 19 nt, Artificial Sequence
  Description of Artificial Sequence: Synthetic oligonucleotide
caauaucacccacacguaa

SEQ ID NO: 217237 - RNA, 19 nt, Artificial Sequence
  Description of Artificial Sequence: Synthetic oligonucleotide
uucaguaagcugugccuuu

SEQ ID NO: 217238 - RNA, 19 nt, Artificial Sequence
  Description of Artificial Sequence: Synthetic oligonucleotide
augcucaagagacgguuuu

SEQ ID NO: 217239 - RNA, 19 nt, Artificial Sequence
  Description of Artificial Sequence: Synthetic oligonucleotide
augauccgauuaucuauaa

SEQ ID NO: 217240 - RNA, 19 nt, Artificial Sequence
  Description of Artificial Sequence: Synthetic oligonucleotide
acaccaauuugaagucuag

SEQ ID NO: 217241 - RNA, 19 nt, Artificial Sequence
  Description of Artificial Sequence: Synthetic oligonucleotide
auagaguucucaaggcaaa

SEQ ID NO: 217242 - RNA, 19 nt, Artificial Sequence
  Description of Artificial Sequence: Synthetic oligonucleotide
gcgcaaccagucuucauag

SEQ ID NO: 217243 - RNA, 19 nt, Artificial Sequence
  Description of Artificial Sequence: Synthetic oligonucleotide
ugguugcauucaaauuaaa

SEQ ID NO: 217244 - RNA, 19 nt, Artificial Sequence
  Description of Artificial Sequence: Synthetic oligonucleotide
guaggcuugcucuguaaua

SEQ ID NO: 217245 - RNA, 19 nt, Artificial Sequence
  Description of Artificial Sequence: Synthetic oligonucleotide
ucccgauagaggguaggcu

SEQ ID NO: 217246 - RNA, 19 nt, Artificial Sequence
  Description of Artificial Sequence: Synthetic oligonucleotide
uugggacuacaccuuccua

SEQ ID NO: 217247 - RNA, 19 nt, Artificial Sequence
  Description of Artificial Sequence: Synthetic oligonucleotide
ugcaagagauaagcugguc

SEQ ID NO: 217248 - RNA, 19 nt, Artificial Sequence
  Description of Artificial Sequence: Synthetic oligonucleotide
gcuauacgaacaauaucac

SEQ ID NO: 217249 - RNA, 19 nt, Artificial Sequence
  Description of Artificial Sequence: Synthetic oligonucleotide
gaugcuccugucauuggua

SEQ ID NO: 217250 - RNA, 19 nt, Artificial Sequence
  Description of Artificial Sequence: Synthetic oligonucleotide
gggucuauauguuguucca

SEQ ID NO: 217251 - RNA, 19 nt, Artificial Sequence
  Description of Artificial Sequence: Synthetic oligonucleotide
gucccgauagaggguaggc

SEQ ID NO: 217252 - RNA, 19 nt, Artificial Sequence
  Description of Artificial Sequence: Synthetic oligonucleotide
uggccuuuuauaggaugaa

SEQ ID NO: 217253 - RNA, 19 nt, Artificial Sequence
  Description of Artificial Sequence: Synthetic oligonucleotide
ccaagacggucucaacucc

SEQ ID NO: 217254 - RNA, 19 nt, Artificial Sequence
  Description of Artificial Sequence: Synthetic oligonucleotide
uuccuaugacucgcuccag

SEQ ID NO: 217255 - RNA, 19 nt, Artificial Sequence
  Description of Artificial Sequence: Synthetic oligonucleotide
ggcgcaaccagucuucaua

SEQ ID NO: 217256 - RNA, 19 nt, Artificial Sequence
  Description of Artificial Sequence: Synthetic oligonucleotide
gcuuacuacccacacugaa

SEQ ID NO: 217257 - RNA, 19 nt, Artificial Sequence
  Description of Artificial Sequence: Synthetic oligonucleotide
caagaugguugauccaagu

SEQ ID NO: 217258 - RNA, 19 nt, Artificial Sequence
  Description of Artificial Sequence: Synthetic oligonucleotide
gguagguguaucaaucaua

SEQ ID NO: 217259 - RNA, 19 nt, Artificial Sequence
  Description of Artificial Sequence: Synthetic oligonucleotide
cagaaauuaccccuuucuu

SEQ ID NO: 217260 - RNA, 19 nt, Artificial Sequence
  Description of Artificial Sequence: Synthetic oligonucleotide
cauuggcgagagagucaag

SEQ ID NO: 217261 - RNA, 19 nt, Artificial Sequence
  Description of Artificial Sequence: Synthetic oligonucleotide
agcugucgaucaaauacuu

SEQ ID NO: 217262 - RNA, 19 nt, Artificial Sequence
  Description of Artificial Sequence: Synthetic oligonucleotide
caucuuuaccgugacugua

SEQ ID NO: 217263 - RNA, 19 nt, Artificial Sequence
  Description of Artificial Sequence: Synthetic oligonucleotide
uugaugcggugggucaaaa

SEQ ID NO: 217264 - RNA, 19 nt, Artificial Sequence
  Description of Artificial Sequence: Synthetic oligonucleotide
gguguauauaggccauucu

SEQ ID NO: 217265 - RNA, 19 nt, Artificial Sequence
  Description of Artificial Sequence: Synthetic oligonucleotide
ggacuacaccuuccuauga

SEQ ID NO: 217266 - RNA, 19 nt, Artificial Sequence
  Description of Artificial Sequence: Synthetic oligonucleotide
caagacggucucaacuccu

SEQ ID NO: 217267 - RNA, 19 nt, Artificial Sequence
  Description of Artificial Sequence: Synthetic oligonucleotide
agcuuacuacccacacuga

SEQ ID NO: 217268 - RNA, 19 nt, Artificial Sequence
  Description of Artificial Sequence: Synthetic oligonucleotide
cuguuuuauggcaguuacu

SEQ ID NO: 217269 - RNA, 19 nt, Artificial Sequence
  Description of Artificial Sequence: Synthetic oligonucleotide
aggguaggcuugcucugua

SEQ ID NO: 217270 - RNA, 19 nt, Artificial Sequence
  Description of Artificial Sequence: Synthetic oligonucleotide
agaguccuacugucccuuu

SEQ ID NO: 217271 - RNA, 19 nt, Artificial Sequence
  Description of Artificial Sequence: Synthetic oligonucleotide
agaugugcauggggucucu

SEQ ID NO: 217272 - RNA, 19 nt, Artificial Sequence
  Description of Artificial Sequence: Synthetic oligonucleotide
cuuugaugcggugggucaa

SEQ ID NO: 217273 - RNA, 19 nt, Artificial Sequence
  Description of Artificial Sequence: Synthetic oligonucleotide
caaggguagcuauucuaau

SEQ ID NO: 217274 - RNA, 19 nt, Artificial Sequence
  Description of Artificial Sequence: Synthetic oligonucleotide
ggucucaacuccuccacau

SEQ ID NO: 217275 - RNA, 19 nt, Artificial Sequence
  Description of Artificial Sequence: Synthetic oligonucleotide
aggauccgaugcacuccac

SEQ ID NO: 217276 - RNA, 19 nt, Artificial Sequence
  Description of Artificial Sequence: Synthetic oligonucleotide
uggcgcaaccagucuucau

SEQ ID NO: 217277 - RNA, 19 nt, Artificial Sequence
  Description of Artificial Sequence: Synthetic oligonucleotide
gaacuccaagacggucuca

SEQ ID NO: 217278 - RNA, 19 nt, Artificial Sequence
  Description of Artificial Sequence: Synthetic oligonucleotide
ccaaacguccaguuuccaa

SEQ ID NO: 217279 - RNA, 19 nt, Artificial Sequence
  Description of Artificial Sequence: Synthetic oligonucleotide
cccugagugcaagagauaa

SEQ ID NO: 217280 - RNA, 19 nt, Artificial Sequence
  Description of Artificial Sequence: Synthetic oligonucleotide
cgaaccacacuaauccuaa

SEQ ID NO: 217281 - RNA, 19 nt, Artificial Sequence
  Description of Artificial Sequence: Synthetic oligonucleotide
gccaaugugaucgguuucu

SEQ ID NO: 217282 - RNA, 19 nt, Artificial Sequence
  Description of Artificial Sequence: Synthetic oligonucleotide
ccgaaccacacuaauccua

SEQ ID NO: 217283 - RNA, 19 nt, Artificial Sequence
  Description of Artificial Sequence: Synthetic oligonucleotide
uccccacgaaaagcuucaa

SEQ ID NO: 217284 - RNA, 19 nt, Artificial Sequence
  Description of Artificial Sequence: Synthetic oligonucleotide
guaauucuccuggcaaguu

SEQ ID NO: 217285 - RNA, 19 nt, Artificial Sequence
  Description of Artificial Sequence: Synthetic oligonucleotide
cgauagaggguaggcuugc

SEQ ID NO: 217286 - RNA, 19 nt, Artificial Sequence
  Description of Artificial Sequence: Synthetic oligonucleotide
cgcaaccagucuucauagc

SEQ ID NO: 217287 - RNA, 19 nt, Artificial Sequence
  Description of Artificial Sequence: Synthetic oligonucleotide
ggguaggcuugcucuguaa

SEQ ID NO: 217288 - RNA, 19 nt, Artificial Sequence
  Description of Artificial Sequence: Synthetic oligonucleotide
gcaaguugccucaauuguu

SEQ ID NO: 217289 - RNA, 19 nt, Artificial Sequence
  Description of Artificial Sequence: Synthetic oligonucleotide
cccgauagaggguaggcuu

SEQ ID NO: 217290 - RNA, 19 nt, Artificial Sequence
  Description of Artificial Sequence: Synthetic oligonucleotide
ccaucuuuaccgugacugu

SEQ ID NO: 217291 - RNA, 19 nt, Artificial Sequence
  Description of Artificial Sequence: Synthetic oligonucleotide
gagguguauauaggccauu

SEQ ID NO: 217292 - RNA, 19 nt, Artificial Sequence
  Description of Artificial Sequence: Synthetic oligonucleotide
cacuugacaggagcugaau

SEQ ID NO: 217293 - RNA, 19 nt, Artificial Sequence
  Description of Artificial Sequence: Synthetic oligonucleotide
cggucucaacuccuccaca

SEQ ID NO: 217294 - RNA, 19 nt, Artificial Sequence
  Description of Artificial Sequence: Synthetic oligonucleotide
aauauauauauauauauua

SEQ ID NO: 217295 - RNA, 19 nt, Artificial Sequence
  Description of Artificial Sequence: Synthetic oligonucleotide
auauauauuauauauauau

SEQ ID NO: 217296 - RNA, 19 nt, Artificial Sequence
  Description of Artificial Sequence: Synthetic oligonucleotide
uguaaagacuucaugauag

SEQ ID NO: 217297 - RNA, 19 nt, Artificial Sequence
  Description of Artificial Sequence: Synthetic oligonucleotide
acuaauauaguacauucgg

SEQ ID NO: 217298 - RNA, 19 nt, Artificial Sequence
  Description of Artificial Sequence: Synthetic oligonucleotide
uauauuauauauauauaug

SEQ ID NO: 217299 - RNA, 19 nt, Artificial Sequence
  Description of Artificial Sequence: Synthetic oligonucleotide
auauauauauauuauauau

SEQ ID NO: 217300 - RNA, 19 nt, Artificial Sequence
  Description of Artificial Sequence: Synthetic oligonucleotide
auauuauauauauauaugu

SEQ ID NO: 217301 - RNA, 19 nt, Artificial Sequence
  Description of Artificial Sequence: Synthetic oligonucleotide
auuauauauauauaugucu

SEQ ID NO: 217302 - RNA, 19 nt, Artificial Sequence
  Description of Artificial Sequence: Synthetic oligonucleotide
auuaaggucaccccagucc

SEQ ID NO: 217303 - RNA, 19 nt, Artificial Sequence
  Description of Artificial Sequence: Synthetic oligonucleotide
auauauauauuauauauau

SEQ ID NO: 217304 - RNA, 19 nt, Artificial Sequence
  Description of Artificial Sequence: Synthetic oligonucleotide
agcucaauaaggcaguugc

SEQ ID NO: 217305 - RNA, 19 nt, Artificial Sequence
  Description of Artificial Sequence: Synthetic oligonucleotide
auauauuauauauauauau

SEQ ID NO: 217306 - RNA, 19 nt, Artificial Sequence
  Description of Artificial Sequence: Synthetic oligonucleotide
acuuaaaccgauaaggagc

SEQ ID NO: 217307 - RNA, 19 nt, Artificial Sequence
  Description of Artificial Sequence: Synthetic oligonucleotide
acauucggcaauuacagcg

SEQ ID NO: 217308 - RNA, 19 nt, Artificial Sequence
  Description of Artificial Sequence: Synthetic oligonucleotide
cuuacuggcacaaagggag

SEQ ID NO: 217309 - RNA, 19 nt, Artificial Sequence
  Description of Artificial Sequence: Synthetic oligonucleotide
agaaucauagcauacugag

SEQ ID NO: 217310 - RNA, 19 nt, Artificial Sequence
  Description of Artificial Sequence: Synthetic oligonucleotide
uagaaauauauauauauau

SEQ ID NO: 217311 - RNA, 19 nt, Artificial Sequence
  Description of Artificial Sequence: Synthetic oligonucleotide
uucauagugaaccagccca

SEQ ID NO: 217312 - RNA, 19 nt, Artificial Sequence
  Description of Artificial Sequence: Synthetic oligonucleotide
cuuauagauagcauugggg

SEQ ID NO: 217313 - RNA, 19 nt, Artificial Sequence
  Description of Artificial Sequence: Synthetic oligonucleotide
uauuauauauauauauguc

SEQ ID NO: 217314 - RNA, 19 nt, Artificial Sequence
  Description of Artificial Sequence: Synthetic oligonucleotide
uuauauauauauaugucua

SEQ ID NO: 217315 - RNA, 19 nt, Artificial Sequence
  Description of Artificial Sequence: Synthetic oligonucleotide
cacacuuaaaccgauaagg

SEQ ID NO: 217316 - RNA, 19 nt, Artificial Sequence
  Description of Artificial Sequence: Synthetic oligonucleotide
uauauauauauauauuaua

SEQ ID NO: 217317 - RNA, 19 nt, Artificial Sequence
  Description of Artificial Sequence: Synthetic oligonucleotide
aguucgacggaccacacuc

SEQ ID NO: 217318 - RNA, 19 nt, Artificial Sequence
  Description of Artificial Sequence: Synthetic oligonucleotide
gaaauauauauauauauau

SEQ ID NO: 217319 - RNA, 19 nt, Artificial Sequence
  Description of Artificial Sequence: Synthetic oligonucleotide
uauauauauauuauauaua

SEQ ID NO: 217320 - RNA, 19 nt, Artificial Sequence
  Description of Artificial Sequence: Synthetic oligonucleotide
uaacuaauauaguacauuc

SEQ ID NO: 217321 - RNA, 19 nt, Artificial Sequence
  Description of Artificial Sequence: Synthetic oligonucleotide
aauauaguacauucggcaa

SEQ ID NO: 217322 - RNA, 19 nt, Artificial Sequence
  Description of Artificial Sequence: Synthetic oligonucleotide
agugguagcaaaauacugc

SEQ ID NO: 217323 - RNA, 19 nt, Artificial Sequence
  Description of Artificial Sequence: Synthetic oligonucleotide
cuuaaaccgauaaggagcc

SEQ ID NO: 217324 - RNA, 19 nt, Artificial Sequence
  Description of Artificial Sequence: Synthetic oligonucleotide
aauaaggcaguugcgauug

SEQ ID NO: 217325 - RNA, 19 nt, Artificial Sequence
  Description of Artificial Sequence: Synthetic oligonucleotide
cacauuucgaccaggaaag

SEQ ID NO: 217326 - RNA, 19 nt, Artificial Sequence
  Description of Artificial Sequence: Synthetic oligonucleotide
uauauauuauauauauaua

SEQ ID NO: 217327 - RNA, 19 nt, Artificial Sequence
  Description of Artificial Sequence: Synthetic oligonucleotide
uuagaaauauauauauaua

SEQ ID NO: 217328 - RNA, 19 nt, Artificial Sequence
  Description of Artificial Sequence: Synthetic oligonucleotide
uauauauauauauuauaua

SEQ ID NO: 217329 - RNA, 19 nt, Artificial Sequence
  Description of Artificial Sequence: Synthetic oligonucleotide
auauauauauauauuauau

SEQ ID NO: 217330 - RNA, 19 nt, Artificial Sequence
  Description of Artificial Sequence: Synthetic oligonucleotide
aauuaaggucaccccaguc

SEQ ID NO: 217331 - RNA, 19 nt, Artificial Sequence
  Description of Artificial Sequence: Synthetic oligonucleotide
aacuaauauaguacauucg

SEQ ID NO: 217332 - RNA, 19 nt, Artificial Sequence
  Description of Artificial Sequence: Synthetic oligonucleotide
ugaaaugauccgcuggacc

SEQ ID NO: 217333 - RNA, 19 nt, Artificial Sequence
  Description of Artificial Sequence: Synthetic oligonucleotide
gacaguugaauggugagag

SEQ ID NO: 217334 - RNA, 19 nt, Artificial Sequence
  Description of Artificial Sequence: Synthetic oligonucleotide
aaaugaucuucugaccccg

SEQ ID NO: 217335 - RNA, 19 nt, Artificial Sequence
  Description of Artificial Sequence: Synthetic oligonucleotide
uugaacgggucucaguucc

SEQ ID NO: 217336 - RNA, 19 nt, Artificial Sequence
  Description of Artificial Sequence: Synthetic oligonucleotide
cuuagaaauauauauauau

SEQ ID NO: 217337 - RNA, 19 nt, Artificial Sequence
  Description of Artificial Sequence: Synthetic oligonucleotide
aauuugcgaaaugaucuuc

SEQ ID NO: 217338 - RNA, 19 nt, Artificial Sequence
  Description of Artificial Sequence: Synthetic oligonucleotide
aaauauauauauauauauu

SEQ ID NO: 217339 - RNA, 19 nt, Artificial Sequence
  Description of Artificial Sequence: Synthetic oligonucleotide
gaaaugaucuucugacccc

SEQ ID NO: 217340 - RNA, 19 nt, Artificial Sequence
  Description of Artificial Sequence: Synthetic oligonucleotide
ucacccuuauaacugacac

SEQ ID NO: 217341 - RNA, 19 nt, Artificial Sequence
  Description of Artificial Sequence: Synthetic oligonucleotide
ugugacaguugaaugguga

SEQ ID NO: 217342 - RNA, 19 nt, Artificial Sequence
  Description of Artificial Sequence: Synthetic oligonucleotide
uauauauauauaugucuau

SEQ ID NO: 217343 - RNA, 19 nt, Artificial Sequence
  Description of Artificial Sequence: Synthetic oligonucleotide
uauauauauuauauauaua

SEQ ID NO: 217344 - RNA, 19 nt, Artificial Sequence
  Description of Artificial Sequence: Synthetic oligonucleotide
uguugcgcaggauacuagg

SEQ ID NO: 217345 - RNA, 19 nt, Artificial Sequence
  Description of Artificial Sequence: Synthetic oligonucleotide
uccgauuuuguuucuagcu

SEQ ID NO: 217346 - RNA, 19 nt, Artificial Sequence
  Description of Artificial Sequence: Synthetic oligonucleotide
ucuagggcauaccccaggg

SEQ ID NO: 217347 - RNA, 19 nt, Artificial Sequence
  Description of Artificial Sequence: Synthetic oligonucleotide
caccaguuuagacuuaucc

SEQ ID NO: 217348 - RNA, 19 nt, Artificial Sequence
  Description of Artificial Sequence: Synthetic oligonucleotide
aagcuggaaccugacacgc

SEQ ID NO: 217349 - RNA, 19 nt, Artificial Sequence
  Description of Artificial Sequence: Synthetic oligonucleotide
uacagcgugaaaugauccg

SEQ ID NO: 217350 - RNA, 19 nt, Artificial Sequence
  Description of Artificial Sequence: Synthetic oligonucleotide
aauucgugguggaugagag

SEQ ID NO: 217351 - RNA, 19 nt, Artificial Sequence
  Description of Artificial Sequence: Synthetic oligonucleotide
cacuuaaaccgauaaggag

SEQ ID NO: 217352 - RNA, 19 nt, Artificial Sequence
  Description of Artificial Sequence: Synthetic oligonucleotide
uguaacuaauauaguacau

SEQ ID NO: 217353 - RNA, 19 nt, Artificial Sequence
  Description of Artificial Sequence: Synthetic oligonucleotide
gaugucaugacuguaacua

SEQ ID NO: 217354 - RNA, 19 nt, Artificial Sequence
  Description of Artificial Sequence: Synthetic oligonucleotide
gguagcaaaauacugcaug

SEQ ID NO: 217355 - RNA, 19 nt, Artificial Sequence
  Description of Artificial Sequence: Synthetic oligonucleotide
gacuguaacuaauauagua

SEQ ID NO: 217356 - RNA, 19 nt, Artificial Sequence
  Description of Artificial Sequence: Synthetic oligonucleotide
acagcgugaaaugauccgc

SEQ ID NO: 217357 - RNA, 19 nt, Artificial Sequence
  Description of Artificial Sequence: Synthetic oligonucleotide
auauauauauauauauuau

SEQ ID NO: 217358 - RNA, 19 nt, Artificial Sequence
  Description of Artificial Sequence: Synthetic oligonucleotide
uucucuaagugccguaucu

SEQ ID NO: 217359 - RNA, 19 nt, Artificial Sequence
  Description of Artificial Sequence: Synthetic oligonucleotide
aaauuaaggucaccccagu

SEQ ID NO: 217360 - RNA, 19 nt, Artificial Sequence
  Description of Artificial Sequence: Synthetic oligonucleotide
ucagguccgauuuuguuuc

SEQ ID NO: 217361 - RNA, 19 nt, Artificial Sequence
  Description of Artificial Sequence: Synthetic oligonucleotide
gaaccugacacgcuguuuc

SEQ ID NO: 217362 - RNA, 19 nt, Artificial Sequence
  Description of Artificial Sequence: Synthetic oligonucleotide
caguugaauggugagaggc

SEQ ID NO: 217363 - RNA, 19 nt, Artificial Sequence
  Description of Artificial Sequence: Synthetic oligonucleotide
cuguaacuaauauaguaca

SEQ ID NO: 217364 - RNA, 19 nt, Artificial Sequence
  Description of Artificial Sequence: Synthetic oligonucleotide
agcccuggcuccuaaugcc

SEQ ID NO: 217365 - RNA, 19 nt, Artificial Sequence
  Description of Artificial Sequence: Synthetic oligonucleotide
caccaaauuaaggucaccc

SEQ ID NO: 217366 - RNA, 19 nt, Artificial Sequence
  Description of Artificial Sequence: Synthetic oligonucleotide
aacucaguucgacggacca

SEQ ID NO: 217367 - RNA, 19 nt, Artificial Sequence
  Description of Artificial Sequence: Synthetic oligonucleotide
uaagugccguaucugggcc

SEQ ID NO: 217368 - RNA, 19 nt, Artificial Sequence
  Description of Artificial Sequence: Synthetic oligonucleotide
gauuguauaugucauccgu

SEQ ID NO: 217369 - RNA, 19 nt, Artificial Sequence
  Description of Artificial Sequence: Synthetic oligonucleotide
aggauacuaggcuuggaca

SEQ ID NO: 217370 - RNA, 19 nt, Artificial Sequence
  Description of Artificial Sequence: Synthetic oligonucleotide
gacacaaugacacagccuu

SEQ ID NO: 217371 - RNA, 19 nt, Artificial Sequence
  Description of Artificial Sequence: Synthetic oligonucleotide
uccuauggaagaacugaug

SEQ ID NO: 217372 - RNA, 19 nt, Artificial Sequence
  Description of Artificial Sequence: Synthetic oligonucleotide
agaaauauauauauauaua

SEQ ID NO: 217373 - RNA, 19 nt, Artificial Sequence
  Description of Artificial Sequence: Synthetic oligonucleotide
auauaguacauucggcaau

SEQ ID NO: 217374 - RNA, 19 nt, Artificial Sequence
  Description of Artificial Sequence: Synthetic oligonucleotide
accgauaaggagccgagcu

SEQ ID NO: 217375 - RNA, 19 nt, Artificial Sequence
  Description of Artificial Sequence: Synthetic oligonucleotide
caucuaacaggcaagucca

SEQ ID NO: 217376 - RNA, 19 nt, Artificial Sequence
  Description of Artificial Sequence: Synthetic oligonucleotide
ucauccuauggaagaacug

SEQ ID NO: 217377 - RNA, 19 nt, Artificial Sequence
  Description of Artificial Sequence: Synthetic oligonucleotide
uaaaccgauaaggagccga

SEQ ID NO: 217378 - RNA, 19 nt, Artificial Sequence
  Description of Artificial Sequence: Synthetic oligonucleotide
caccauaccaugcuggaug

SEQ ID NO: 217379 - RNA, 19 nt, Artificial Sequence
  Description of Artificial Sequence: Synthetic oligonucleotide
uuugcgaaaugaucuucug

SEQ ID NO: 217380 - RNA, 19 nt, Artificial Sequence
  Description of Artificial Sequence: Synthetic oligonucleotide
guagaggaaccucuguagc

SEQ ID NO: 217381 - RNA, 19 nt, Artificial Sequence
  Description of Artificial Sequence: Synthetic oligonucleotide
gauccuagacugcagucac

SEQ ID NO: 217382 - RNA, 19 nt, Artificial Sequence
  Description of Artificial Sequence: Synthetic oligonucleotide
ucuagcuuuccccguaccu

SEQ ID NO: 217383 - RNA, 19 nt, Artificial Sequence
  Description of Artificial Sequence: Synthetic oligonucleotide
auucucuagggcauacccc

SEQ ID NO: 217384 - RNA, 19 nt, Artificial Sequence
  Description of Artificial Sequence: Synthetic oligonucleotide
ucugucaggcgccaacgug

SEQ ID NO: 217385 - RNA, 19 nt, Artificial Sequence
  Description of Artificial Sequence: Synthetic oligonucleotide
ugucaugacuguaacuaau

SEQ ID NO: 217386 - RNA, 19 nt, Artificial Sequence
  Description of Artificial Sequence: Synthetic oligonucleotide
acugcguucccggugcucc

SEQ ID NO: 217387 - RNA, 19 nt, Artificial Sequence
  Description of Artificial Sequence: Synthetic oligonucleotide
uuucgcagcuccauuuugu

SEQ ID NO: 217388 - RNA, 19 nt, Artificial Sequence
  Description of Artificial Sequence: Synthetic oligonucleotide
accuaguggggcugcaucg

SEQ ID NO: 217389 - RNA, 19 nt, Artificial Sequence
  Description of Artificial Sequence: Synthetic oligonucleotide
ucccuaugagcuccaaagc

SEQ ID NO: 217390 - RNA, 19 nt, Artificial Sequence
  Description of Artificial Sequence: Synthetic oligonucleotide
uggcaugaagggaagcucu

SEQ ID NO: 217391 - RNA, 19 nt, Artificial Sequence
  Description of Artificial Sequence: Synthetic oligonucleotide
cauagcauacugagcuggg

SEQ ID NO: 217392 - RNA, 19 nt, Artificial Sequence
  Description of Artificial Sequence: Synthetic oligonucleotide
uucagguccgauuuuguuu

SEQ ID NO: 217393 - RNA, 19 nt, Artificial Sequence
  Description of Artificial Sequence: Synthetic oligonucleotide
auauauauauaugucuauu

SEQ ID NO: 217394 - RNA, 19 nt, Artificial Sequence
  Description of Artificial Sequence: Synthetic oligonucleotide
gaaucauagcauacugagc

SEQ ID NO: 217395 - RNA, 19 nt, Artificial Sequence
  Description of Artificial Sequence: Synthetic oligonucleotide
uccagaaucauagcauacu

SEQ ID NO: 217396 - RNA, 19 nt, Artificial Sequence
  Description of Artificial Sequence: Synthetic oligonucleotide
ugcaguuggaaauccuuaa

SEQ ID NO: 217397 - RNA, 19 nt, Artificial Sequence
  Description of Artificial Sequence: Synthetic oligonucleotide
gguagcaccaaauuaaggu

SEQ ID NO: 217398 - RNA, 19 nt, Artificial Sequence
  Description of Artificial Sequence: Synthetic oligonucleotide
aaccgauaaggagccgagc

SEQ ID NO: 217399 - RNA, 19 nt, Artificial Sequence
  Description of Artificial Sequence: Synthetic oligonucleotide
uaauuugcgaaaugaucuu

SEQ ID NO: 217400 - RNA, 19 nt, Artificial Sequence
  Description of Artificial Sequence: Synthetic oligonucleotide
ggauacuaggcuuggacac

SEQ ID NO: 217401 - RNA, 19 nt, Artificial Sequence
  Description of Artificial Sequence: Synthetic oligonucleotide
uacauucggcaauuacagc

SEQ ID NO: 217402 - RNA, 19 nt, Artificial Sequence
  Description of Artificial Sequence: Synthetic oligonucleotide
caugccaucuaacaggcaa

SEQ ID NO: 217403 - RNA, 19 nt, Artificial Sequence
  Description of Artificial Sequence: Synthetic oligonucleotide
agaagguuguucauaguga

SEQ ID NO: 217404 - RNA, 19 nt, Artificial Sequence
  Description of Artificial Sequence: Synthetic oligonucleotide
uauaguacauucggcaauu

SEQ ID NO: 217405 - RNA, 19 nt, Artificial Sequence
  Description of Artificial Sequence: Synthetic oligonucleotide
acacuuaaaccgauaagga

SEQ ID NO: 217406 - RNA, 19 nt, Artificial Sequence
  Description of Artificial Sequence: Synthetic oligonucleotide
ccuuauagauagcauuggg

SEQ ID NO: 217407 - RNA, 19 nt, Artificial Sequence
  Description of Artificial Sequence: Synthetic oligonucleotide
uggcccugggccuaauaag

SEQ ID NO: 217408 - RNA, 19 nt, Artificial Sequence
  Description of Artificial Sequence: Synthetic oligonucleotide
ucucuaagugccguaucug

SEQ ID NO: 217409 - RNA, 19 nt, Artificial Sequence
  Description of Artificial Sequence: Synthetic oligonucleotide
cauccuauggaagaacuga

SEQ ID NO: 217410 - RNA, 19 nt, Artificial Sequence
  Description of Artificial Sequence: Synthetic oligonucleotide
agauccuagacugcaguca

SEQ ID NO: 217411 - RNA, 19 nt, Artificial Sequence
  Description of Artificial Sequence: Synthetic oligonucleotide
aaugaucuucugaccccgg

SEQ ID NO: 217412 - RNA, 19 nt, Artificial Sequence
  Description of Artificial Sequence: Synthetic oligonucleotide
cagacugcguucccggugc

SEQ ID NO: 217413 - RNA, 19 nt, Artificial Sequence
  Description of Artificial Sequence: Synthetic oligonucleotide
ggguucuacauggagaagc

SEQ ID NO: 217414 - RNA, 19 nt, Artificial Sequence
  Description of Artificial Sequence: Synthetic oligonucleotide
uuucucuaagugccguauc

SEQ ID NO: 217415 - RNA, 19 nt, Artificial Sequence
  Description of Artificial Sequence: Synthetic oligonucleotide
gaucuccagaucacuugcg

SEQ ID NO: 217416 - RNA, 19 nt, Artificial Sequence
  Description of Artificial Sequence: Synthetic oligonucleotide
uguuucuagcuuuccccgu

SEQ ID NO: 217417 - RNA, 19 nt, Artificial Sequence
  Description of Artificial Sequence: Synthetic oligonucleotide
ugucaggcgccaacgugcc

SEQ ID NO: 217418 - RNA, 19 nt, Artificial Sequence
  Description of Artificial Sequence: Synthetic oligonucleotide
uuacuggcacaaagggaga

SEQ ID NO: 217419 - RNA, 19 nt, Artificial Sequence
  Description of Artificial Sequence: Synthetic oligonucleotide
uucggcaauuacagcguga

SEQ ID NO: 217420 - RNA, 19 nt, Artificial Sequence
  Description of Artificial Sequence: Synthetic oligonucleotide
cagaaucauagcauacuga

SEQ ID NO: 217421 - RNA, 19 nt, Artificial Sequence
  Description of Artificial Sequence: Synthetic oligonucleotide
ggcaaccagagcuuuucgg

SEQ ID NO: 217422 - RNA, 19 nt, Artificial Sequence
  Description of Artificial Sequence: Synthetic oligonucleotide
ugcgauuguauaugucauc

SEQ ID NO: 217423 - RNA, 19 nt, Artificial Sequence
  Description of Artificial Sequence: Synthetic oligonucleotide
uucgacggaccacacucac

SEQ ID NO: 217424 - RNA, 19 nt, Artificial Sequence
  Description of Artificial Sequence: Synthetic oligonucleotide
uuguuucagugugucacca

SEQ ID NO: 217425 - RNA, 19 nt, Artificial Sequence
  Description of Artificial Sequence: Synthetic oligonucleotide
cuuuccccguaccucagac

SEQ ID NO: 217426 - RNA, 19 nt, Artificial Sequence
  Description of Artificial Sequence: Synthetic oligonucleotide
auucggcaauuacagcgug

SEQ ID NO: 217427 - RNA, 19 nt, Artificial Sequence
  Description of Artificial Sequence: Synthetic oligonucleotide
aaggcaguugcgauuguau

SEQ ID NO: 217428 - RNA, 19 nt, Artificial Sequence
  Description of Artificial Sequence: Synthetic oligonucleotide
agggucgaugucaugacug

SEQ ID NO: 217429 - RNA, 19 nt, Artificial Sequence
  Description of Artificial Sequence: Synthetic oligonucleotide
uuuccccguaccucagacc

SEQ ID NO: 217430 - RNA, 19 nt, Artificial Sequence
  Description of Artificial Sequence: Synthetic oligonucleotide
gauuaccugggcaaccaga

SEQ ID NO: 217431 - RNA, 19 nt, Artificial Sequence
  Description of Artificial Sequence: Synthetic oligonucleotide
uuaaaccgauaaggagccg

SEQ ID NO: 217432 - RNA, 19 nt, Artificial Sequence
  Description of Artificial Sequence: Synthetic oligonucleotide
cucccgagugagcacacag

SEQ ID NO: 217433 - RNA, 19 nt, Artificial Sequence
  Description of Artificial Sequence: Synthetic oligonucleotide
agcgugaaaugauccgcug

SEQ ID NO: 217434 - RNA, 19 nt, Artificial Sequence
  Description of Artificial Sequence: Synthetic oligonucleotide
ucccgagugagcacacaga

SEQ ID NO: 217435 - RNA, 19 nt, Artificial Sequence
  Description of Artificial Sequence: Synthetic oligonucleotide
aagugccguaucugggcca

SEQ ID NO: 217436 - RNA, 19 nt, Artificial Sequence
  Description of Artificial Sequence: Synthetic oligonucleotide
ccagaaucauagcauacug

SEQ ID NO: 217437 - RNA, 19 nt, Artificial Sequence
  Description of Artificial Sequence: Synthetic oligonucleotide
cuugcgccugcugaagagg

SEQ ID NO: 217438 - RNA, 19 nt, Artificial Sequence
  Description of Artificial Sequence: Synthetic oligonucleotide
aguugcgauuguauauguc

SEQ ID NO: 217439 - RNA, 19 nt, Artificial Sequence
  Description of Artificial Sequence: Synthetic oligonucleotide
gcgugaaaugauccgcugg

SEQ ID NO: 217440 - RNA, 19 nt, Artificial Sequence
  Description of Artificial Sequence: Synthetic oligonucleotide
aggguagcaccaaauuaag

SEQ ID NO: 217441 - RNA, 19 nt, Artificial Sequence
  Description of Artificial Sequence: Synthetic oligonucleotide
cagauccuagacugcaguc

SEQ ID NO: 217442 - RNA, 19 nt, Artificial Sequence
  Description of Artificial Sequence: Synthetic oligonucleotide
ugguagcaaaauacugcau

SEQ ID NO: 217443 - RNA, 19 nt, Artificial Sequence
  Description of Artificial Sequence: Synthetic oligonucleotide
acucaguucgacggaccac

SEQ ID NO: 217444 - RNA, 19 nt, Artificial Sequence
  Description of Artificial Sequence: Synthetic oligonucleotide
cuucacuacugguauucca

SEQ ID NO: 217445 - RNA, 19 nt, Artificial Sequence
  Description of Artificial Sequence: Synthetic oligonucleotide
gguugguagaaauuuccaa

SEQ ID NO: 217446 - RNA, 19 nt, Artificial Sequence
  Description of Artificial Sequence: Synthetic oligonucleotide
gcuccuaaugccauccucc

SEQ ID NO: 217447 - RNA, 19 nt, Artificial Sequence
  Description of Artificial Sequence: Synthetic oligonucleotide
ucgacggaccacacucaca

SEQ ID NO: 217448 - RNA, 19 nt, Artificial Sequence
  Description of Artificial Sequence: Synthetic oligonucleotide
guugaacgggucucaguuc

SEQ ID NO: 217449 - RNA, 19 nt, Artificial Sequence
  Description of Artificial Sequence: Synthetic oligonucleotide
cucaguucgacggaccaca

SEQ ID NO: 217450 - RNA, 19 nt, Artificial Sequence
  Description of Artificial Sequence: Synthetic oligonucleotide
ucaguucgacggaccacac

SEQ ID NO: 217451 - RNA, 19 nt, Artificial Sequence
  Description of Artificial Sequence: Synthetic oligonucleotide
cacuuuuguccaccaugcc

SEQ ID NO: 217452 - RNA, 19 nt, Artificial Sequence
  Description of Artificial Sequence: Synthetic oligonucleotide
aggccagcgguugaacggg

SEQ ID NO: 217453 - RNA, 19 nt, Artificial Sequence
  Description of Artificial Sequence: Synthetic oligonucleotide
ugcaucgucuguugcuauc

SEQ ID NO: 217454 - RNA, 19 nt, Artificial Sequence
  Description of Artificial Sequence: Synthetic oligonucleotide
gcaguugcgauuguauaug

SEQ ID NO: 217455 - RNA, 19 nt, Artificial Sequence
  Description of Artificial Sequence: Synthetic oligonucleotide
agaucacuugcgccugcug

SEQ ID NO: 217456 - RNA, 19 nt, Artificial Sequence
  Description of Artificial Sequence: Synthetic oligonucleotide
ucaccaguuuagacuuauc

SEQ ID NO: 217457 - RNA, 19 nt, Artificial Sequence
  Description of Artificial Sequence: Synthetic oligonucleotide
gcaauaugcuacugcgcug

SEQ ID NO: 217458 - RNA, 19 nt, Artificial Sequence
  Description of Artificial Sequence: Synthetic oligonucleotide
ccacauuucgaccaggaaa

SEQ ID NO: 217459 - RNA, 19 nt, Artificial Sequence
  Description of Artificial Sequence: Synthetic oligonucleotide
gauaaggagccgagcuuuc

SEQ ID NO: 217460 - RNA, 19 nt, Artificial Sequence
  Description of Artificial Sequence: Synthetic oligonucleotide
auaaggagccgagcuuucu

SEQ ID NO: 217461 - RNA, 19 nt, Artificial Sequence
  Description of Artificial Sequence: Synthetic oligonucleotide
uggaaccugacacgcuguu

SEQ ID NO: 217462 - RNA, 19 nt, Artificial Sequence
  Description of Artificial Sequence: Synthetic oligonucleotide
uaaggcaguugcgauugua

SEQ ID NO: 217463 - RNA, 19 nt, Artificial Sequence
  Description of Artificial Sequence: Synthetic oligonucleotide
caauucgugguggaugaga

SEQ ID NO: 217464 - RNA, 19 nt, Artificial Sequence
  Description of Artificial Sequence: Synthetic oligonucleotide
cacccuuauaacugacaca

SEQ ID NO: 217465 - RNA, 19 nt, Artificial Sequence
  Description of Artificial Sequence: Synthetic oligonucleotide
ggguagcaccaaauuaagg

SEQ ID NO: 217466 - RNA, 19 nt, Artificial Sequence
  Description of Artificial Sequence: Synthetic oligonucleotide
cacgaagaaccaucuggca

SEQ ID NO: 217467 - RNA, 19 nt, Artificial Sequence
  Description of Artificial Sequence: Synthetic oligonucleotide
auccuauggaagaacugau

SEQ ID NO: 217468 - RNA, 19 nt, Artificial Sequence
  Description of Artificial Sequence: Synthetic oligonucleotide
gucaugacuguaacuaaua

SEQ ID NO: 217469 - RNA, 19 nt, Artificial Sequence
  Description of Artificial Sequence: Synthetic oligonucleotide
cccgagugagcacacagac

SEQ ID NO: 217470 - RNA, 19 nt, Artificial Sequence
  Description of Artificial Sequence: Synthetic oligonucleotide
cauucggcaauuacagcgu

SEQ ID NO: 217471 - RNA, 19 nt, Artificial Sequence
  Description of Artificial Sequence: Synthetic oligonucleotide
cauuucgaccaggaaagaa

SEQ ID NO: 217472 - RNA, 19 nt, Artificial Sequence
  Description of Artificial Sequence: Synthetic oligonucleotide
gguugaacgggucucaguu

SEQ ID NO: 217473 - RNA, 19 nt, Artificial Sequence
  Description of Artificial Sequence: Synthetic oligonucleotide
auccuagacugcagucacg

SEQ ID NO: 217474 - RNA, 19 nt, Artificial Sequence
  Description of Artificial Sequence: Synthetic oligonucleotide
ucaccauaccaugcuggau

SEQ ID NO: 217475 - RNA, 19 nt, Artificial Sequence
  Description of Artificial Sequence: Synthetic oligonucleotide
guacuccagacaggguagc

SEQ ID NO: 217476 - RNA, 19 nt, Artificial Sequence
  Description of Artificial Sequence: Synthetic oligonucleotide
acauuucgaccaggaaaga

SEQ ID NO: 217477 - RNA, 19 nt, Artificial Sequence
  Description of Artificial Sequence: Synthetic oligonucleotide
ggcuuaauuugaguugcca

SEQ ID NO: 217478 - RNA, 19 nt, Artificial Sequence
  Description of Artificial Sequence: Synthetic oligonucleotide
cacucacaucuuccuguug

SEQ ID NO: 217479 - RNA, 19 nt, Artificial Sequence
  Description of Artificial Sequence: Synthetic oligonucleotide
ggcaguugcgauuguauau

SEQ ID NO: 217480 - RNA, 19 nt, Artificial Sequence
  Description of Artificial Sequence: Synthetic oligonucleotide
ccggugcuccucaauauuc

SEQ ID NO: 217481 - RNA, 19 nt, Artificial Sequence
  Description of Artificial Sequence: Synthetic oligonucleotide
ggcuccuaaugccauccuc

SEQ ID NO: 217482 - RNA, 19 nt, Artificial Sequence
  Description of Artificial Sequence: Synthetic oligonucleotide
ggcgccaacgugccugggc

SEQ ID NO: 217483 - RNA, 19 nt, Artificial Sequence
  Description of Artificial Sequence: Synthetic oligonucleotide
cuacugcgcugcuccucag

SEQ ID NO: 217484 - RNA, 19 nt, Artificial Sequence
  Description of Artificial Sequence: Synthetic oligonucleotide
guucgacggaccacacuca

SEQ ID NO: 217485 - RNA, 19 nt, Artificial Sequence
  Description of Artificial Sequence: Synthetic oligonucleotide
gggucucaguucccuauga

SEQ ID NO: 217486 - RNA, 19 nt, Artificial Sequence
  Description of Artificial Sequence: Synthetic oligonucleotide
caguugcgauuguauaugu

SEQ ID NO: 217487 - RNA, 19 nt, Artificial Sequence
  Description of Artificial Sequence: Synthetic oligonucleotide
gcgccaacgugccugggca

SEQ ID NO: 217488 - RNA, 19 nt, Artificial Sequence
  Description of Artificial Sequence: Synthetic oligonucleotide
agaccccuccccucagcuu

SEQ ID NO: 217489 - RNA, 19 nt, Artificial Sequence
  Description of Artificial Sequence: Synthetic oligonucleotide
agacugcguucccggugcu

SEQ ID NO: 217490 - RNA, 19 nt, Artificial Sequence
  Description of Artificial Sequence: Synthetic oligonucleotide
acguguugccgcacagccu

SEQ ID NO: 217491 - RNA, 19 nt, Artificial Sequence
  Description of Artificial Sequence: Synthetic oligonucleotide
ccccucagcuuacuggcac

SEQ ID NO: 217492 - RNA, 19 nt, Artificial Sequence
  Description of Artificial Sequence: Synthetic oligonucleotide
agauagcauuggggagaag

SEQ ID NO: 217493 - RNA, 19 nt, Artificial Sequence
  Description of Artificial Sequence: Synthetic oligonucleotide
gguuccaaucugugguugu

SEQ ID NO: 217494 - RNA, 19 nt, Artificial Sequence
  Description of Artificial Sequence: Synthetic oligonucleotide
gucaccaguuuagacuuau

SEQ ID NO: 217495 - RNA, 19 nt, Artificial Sequence
  Description of Artificial Sequence: Synthetic oligonucleotide
caugccucccacugccugu

SEQ ID NO: 217496 - RNA, 19 nt, Artificial Sequence
  Description of Artificial Sequence: Synthetic oligonucleotide
gcgcaggauacuaggcuug

SEQ ID NO: 217497 - RNA, 19 nt, Artificial Sequence
  Description of Artificial Sequence: Synthetic oligonucleotide
cuggaaccugacacgcugu

SEQ ID NO: 217498 - RNA, 19 nt, Artificial Sequence
  Description of Artificial Sequence: Synthetic oligonucleotide
gacugcguucccggugcuc

SEQ ID NO: 217499 - RNA, 19 nt, Artificial Sequence
  Description of Artificial Sequence: Synthetic oligonucleotide
caguucccuaugagcucca

SEQ ID NO: 217500 - RNA, 19 nt, Artificial Sequence
  Description of Artificial Sequence: Synthetic oligonucleotide
cagggucgaugucaugacu

SEQ ID NO: 217501 - RNA, 19 nt, Artificial Sequence
  Description of Artificial Sequence: Synthetic oligonucleotide
gccguaucugggccacgug

SEQ ID NO: 217502 - RNA, 19 nt, Artificial Sequence
  Description of Artificial Sequence: Synthetic oligonucleotide
ccaacgugccugggcaaag

SEQ ID NO: 217503 - RNA, 19 nt, Artificial Sequence
  Description of Artificial Sequence: Synthetic oligonucleotide
gcgguugaacgggucucag

SEQ ID NO: 217504 - RNA, 19 nt, Artificial Sequence
  Description of Artificial Sequence: Synthetic oligonucleotide
acccacacuuaaaccgaua

SEQ ID NO: 217505 - RNA, 19 nt, Artificial Sequence
  Description of Artificial Sequence: Synthetic oligonucleotide
cucugucaggcgccaacgu

SEQ ID NO: 217506 - RNA, 19 nt, Artificial Sequence
  Description of Artificial Sequence: Synthetic oligonucleotide
ccccguaccucagacccug

SEQ ID NO: 217507 - RNA, 19 nt, Artificial Sequence
  Description of Artificial Sequence: Synthetic oligonucleotide
ccgauuuuguuucuagcuu

SEQ ID NO: 217508 - RNA, 19 nt, Artificial Sequence
  Description of Artificial Sequence: Synthetic oligonucleotide
caguucgacggaccacacu

SEQ ID NO: 217509 - RNA, 19 nt, Artificial Sequence
  Description of Artificial Sequence: Synthetic oligonucleotide
ccgcugcaguuggaaaucc

SEQ ID NO: 217510 - RNA, 19 nt, Artificial Sequence
  Description of Artificial Sequence: Synthetic oligonucleotide
cacccacacuuaaaccgau

SEQ ID NO: 217511 - RNA, 19 nt, Artificial Sequence
  Description of Artificial Sequence: Synthetic oligonucleotide
gcuccacgaagaaccaucu

SEQ ID NO: 217512 - RNA, 19 nt, Artificial Sequence
  Description of Artificial Sequence: Synthetic oligonucleotide
ccguaucugggccacgugu

SEQ ID NO: 217513 - RNA, 19 nt, Artificial Sequence
  Description of Artificial Sequence: Synthetic oligonucleotide
cgacggaccacacucacau

SEQ ID NO: 217514 - RNA, 19 nt, Artificial Sequence
  Description of Artificial Sequence: Synthetic oligonucleotide
cugcaucgucuguugcuau

SEQ ID NO: 217515 - RNA, 19 nt, Artificial Sequence
  Description of Artificial Sequence: Synthetic oligonucleotide
cagaucacuugcgccugcu

SEQ ID NO: 217516 - RNA, 19 nt, Artificial Sequence
  Description of Artificial Sequence: Synthetic oligonucleotide
ggacaggccagcgguugaa

SEQ ID NO: 217517 - RNA, 19 nt, Artificial Sequence
  Description of Artificial Sequence: Synthetic oligonucleotide
ccagcgguugaacgggucu

SEQ ID NO: 217518 - RNA, 19 nt, Artificial Sequence
  Description of Artificial Sequence: Synthetic oligonucleotide
caacgugccugggcaaagu

SEQ ID NO: 217519 - RNA, 19 nt, Artificial Sequence
  Description of Artificial Sequence: Synthetic oligonucleotide
cugggcaaccagagcuuuu

SEQ ID NO: 217520 - RNA, 19 nt, Artificial Sequence
  Description of Artificial Sequence: Synthetic oligonucleotide
ccgucuggcaggcagcaau

SEQ ID NO: 217521 - RNA, 19 nt, Artificial Sequence
  Description of Artificial Sequence: Synthetic oligonucleotide
gccagcgguugaacggguc

SEQ ID NO: 217522 - RNA, 19 nt, Artificial Sequence
  Description of Artificial Sequence: Synthetic oligonucleotide
cgauaaggagccgagcuuu

SEQ ID NO: 217523 - RNA, 19 nt, Artificial Sequence
  Description of Artificial Sequence: Synthetic oligonucleotide
ccgauaaggagccgagcuu

SEQ ID NO: 217524 - RNA, 19 nt, Artificial Sequence
  Description of Artificial Sequence: Synthetic oligonucleotide
cguaucugggccacguguu

SEQ ID NO: 217525 - RNA, 19 nt, Artificial Sequence
  Description of Artificial Sequence: Synthetic oligonucleotide
ccucccgagugagcacaca

SEQ ID NO: 217526 - RNA, 19 nt, Artificial Sequence
  Description of Artificial Sequence: Synthetic oligonucleotide
ggccagcgguugaacgggu

SEQ ID NO: 217527 - RNA, 19 nt, Artificial Sequence
  Description of Artificial Sequence: Synthetic oligonucleotide
aaacaagucaccuacacuc

SEQ ID NO: 217528 - RNA, 19 nt, Artificial Sequence
  Description of Artificial Sequence: Synthetic oligonucleotide
aauucaguguaguugaacu

SEQ ID NO: 217529 - RNA, 19 nt, Artificial Sequence
  Description of Artificial Sequence: Synthetic oligonucleotide
aaauucaagaacauuugac

SEQ ID NO: 217530 - RNA, 19 nt, Artificial Sequence
  Description of Artificial Sequence: Synthetic oligonucleotide
aaauuugaaaccacuuugc

SEQ ID NO: 217531 - RNA, 19 nt, Artificial Sequence
  Description of Artificial Sequence: Synthetic oligonucleotide
uguuaggucacacagcccc

SEQ ID NO: 217532 - RNA, 19 nt, Artificial Sequence
  Description of Artificial Sequence: Synthetic oligonucleotide
ucaaaggagccuuugauug

SEQ ID NO: 217533 - RNA, 19 nt, Artificial Sequence
  Description of Artificial Sequence: Synthetic oligonucleotide
aaaugggacaccgugugcc

SEQ ID NO: 217534 - RNA, 19 nt, Artificial Sequence
  Description of Artificial Sequence: Synthetic oligonucleotide
ugauuaucuaacuaaggug

SEQ ID NO: 217535 - RNA, 19 nt, Artificial Sequence
  Description of Artificial Sequence: Synthetic oligonucleotide
uauucaagcacaccccugg

SEQ ID NO: 217536 - RNA, 19 nt, Artificial Sequence
  Description of Artificial Sequence: Synthetic oligonucleotide
acauaauggaugcagagug

SEQ ID NO: 217537 - RNA, 19 nt, Artificial Sequence
  Description of Artificial Sequence: Synthetic oligonucleotide
ugugauaaauauucaagca

SEQ ID NO: 217538 - RNA, 19 nt, Artificial Sequence
  Description of Artificial Sequence: Synthetic oligonucleotide
aaacacuugaucuguccac

SEQ ID NO: 217539 - RNA, 19 nt, Artificial Sequence
  Description of Artificial Sequence: Synthetic oligonucleotide
aaugaguagaggaagaaga

SEQ ID NO: 217540 - RNA, 19 nt, Artificial Sequence
  Description of Artificial Sequence: Synthetic oligonucleotide
ugccgaaccacaaagagga

SEQ ID NO: 217541 - RNA, 19 nt, Artificial Sequence
  Description of Artificial Sequence: Synthetic oligonucleotide
uaacuaaggugguugaccg

SEQ ID NO: 217542 - RNA, 19 nt, Artificial Sequence
  Description of Artificial Sequence: Synthetic oligonucleotide
uggccguugaaguagaggg

SEQ ID NO: 217543 - RNA, 19 nt, Artificial Sequence
  Description of Artificial Sequence: Synthetic oligonucleotide
acuagaauggcuguggagg

SEQ ID NO: 217544 - RNA, 19 nt, Artificial Sequence
  Description of Artificial Sequence: Synthetic oligonucleotide
agaggauugucucuguugg

SEQ ID NO: 217545 - RNA, 19 nt, Artificial Sequence
  Description of Artificial Sequence: Synthetic oligonucleotide
uuuugaaucccauagcguc

SEQ ID NO: 217546 - RNA, 19 nt, Artificial Sequence
  Description of Artificial Sequence: Synthetic oligonucleotide
aaaugauuaucuaacuaag

SEQ ID NO: 217547 - RNA, 19 nt, Artificial Sequence
  Description of Artificial Sequence: Synthetic oligonucleotide
aaugauuaucuaacuaagg

SEQ ID NO: 217548 - RNA, 19 nt, Artificial Sequence
  Description of Artificial Sequence: Synthetic oligonucleotide
agcuauguaaacaagucac

SEQ ID NO: 217549 - RNA, 19 nt, Artificial Sequence
  Description of Artificial Sequence: Synthetic oligonucleotide
aauauucaagcacaccccu

SEQ ID NO: 217550 - RNA, 19 nt, Artificial Sequence
  Description of Artificial Sequence: Synthetic oligonucleotide
auugaagugagucaccagu

SEQ ID NO: 217551 - RNA, 19 nt, Artificial Sequence
  Description of Artificial Sequence: Synthetic oligonucleotide
uccgguggagacauaaugg

SEQ ID NO: 217552 - RNA, 19 nt, Artificial Sequence
  Description of Artificial Sequence: Synthetic oligonucleotide
aacucccaucacuagggcc

SEQ ID NO: 217553 - RNA, 19 nt, Artificial Sequence
  Description of Artificial Sequence: Synthetic oligonucleotide
acucugaaauaaccuaugc

SEQ ID NO: 217554 - RNA, 19 nt, Artificial Sequence
  Description of Artificial Sequence: Synthetic oligonucleotide
aacacuugaucuguccacc

SEQ ID NO: 217555 - RNA, 19 nt, Artificial Sequence
  Description of Artificial Sequence: Synthetic oligonucleotide
uuuacuccgaagucagugg

SEQ ID NO: 217556 - RNA, 19 nt, Artificial Sequence
  Description of Artificial Sequence: Synthetic oligonucleotide
aguaauuggagaaaguucu

SEQ ID NO: 217557 - RNA, 19 nt, Artificial Sequence
  Description of Artificial Sequence: Synthetic oligonucleotide
accagugcggcucugaguc

SEQ ID NO: 217558 - RNA, 19 nt, Artificial Sequence
  Description of Artificial Sequence: Synthetic oligonucleotide
uucaagaacauuugacccc

SEQ ID NO: 217559 - RNA, 19 nt, Artificial Sequence
  Description of Artificial Sequence: Synthetic oligonucleotide
auugugccgaaccacaaag

SEQ ID NO: 217560 - RNA, 19 nt, Artificial Sequence
  Description of Artificial Sequence: Synthetic oligonucleotide
agcgucuuggaucugccgc

SEQ ID NO: 217561 - RNA, 19 nt, Artificial Sequence
  Description of Artificial Sequence: Synthetic oligonucleotide
ugagauugcauucacgcua

SEQ ID NO: 217562 - RNA, 19 nt, Artificial Sequence
  Description of Artificial Sequence: Synthetic oligonucleotide
uguuggauugugccgaacc

SEQ ID NO: 217563 - RNA, 19 nt, Artificial Sequence
  Description of Artificial Sequence: Synthetic oligonucleotide
cauaccccagcuaaggagg

SEQ ID NO: 217564 - RNA, 19 nt, Artificial Sequence
  Description of Artificial Sequence: Synthetic oligonucleotide
ugaaauaaccuaugcggug

SEQ ID NO: 217565 - RNA, 19 nt, Artificial Sequence
  Description of Artificial Sequence: Synthetic oligonucleotide
cucugaaauaaccuaugcg

SEQ ID NO: 217566 - RNA, 19 nt, Artificial Sequence
  Description of Artificial Sequence: Synthetic oligonucleotide
uguauggcuguccagugca

SEQ ID NO: 217567 - RNA, 19 nt, Artificial Sequence
  Description of Artificial Sequence: Synthetic oligonucleotide
ugaugagccaggcacacac

SEQ ID NO: 217568 - RNA, 19 nt, Artificial Sequence
  Description of Artificial Sequence: Synthetic oligonucleotide
aguaagucacugaucauac

SEQ ID NO: 217569 - RNA, 19 nt, Artificial Sequence
  Description of Artificial Sequence: Synthetic oligonucleotide
aaggcggucauucccgcgg

SEQ ID NO: 217570 - RNA, 19 nt, Artificial Sequence
  Description of Artificial Sequence: Synthetic oligonucleotide
uaucuaacuaaggugguug

SEQ ID NO: 217571 - RNA, 19 nt, Artificial Sequence
  Description of Artificial Sequence: Synthetic oligonucleotide
caaauuagcacugaaguca

SEQ ID NO: 217572 - RNA, 19 nt, Artificial Sequence
  Description of Artificial Sequence: Synthetic oligonucleotide
agacauaauggaugcagag

SEQ ID NO: 217573 - RNA, 19 nt, Artificial Sequence
  Description of Artificial Sequence: Synthetic oligonucleotide
ucaauuggcccaugaagag

SEQ ID NO: 217574 - RNA, 19 nt, Artificial Sequence
  Description of Artificial Sequence: Synthetic oligonucleotide
cucaauacugggcaaacac

SEQ ID NO: 217575 - RNA, 19 nt, Artificial Sequence
  Description of Artificial Sequence: Synthetic oligonucleotide
ucgaaugaguucagcaucc

SEQ ID NO: 217576 - RNA, 19 nt, Artificial Sequence
  Description of Artificial Sequence: Synthetic oligonucleotide
ucaggaguggugaauucag

SEQ ID NO: 217577 - RNA, 19 nt, Artificial Sequence
  Description of Artificial Sequence: Synthetic oligonucleotide
uuuaacgugggcugccaag

SEQ ID NO: 217578 - RNA, 19 nt, Artificial Sequence
  Description of Artificial Sequence: Synthetic oligonucleotide
gaucauaccccagcuaagg

SEQ ID NO: 217579 - RNA, 19 nt, Artificial Sequence
  Description of Artificial Sequence: Synthetic oligonucleotide
aaccuaugcggugucaggg

SEQ ID NO: 217580 - RNA, 19 nt, Artificial Sequence
  Description of Artificial Sequence: Synthetic oligonucleotide
ggaaaugacacauugaagu

SEQ ID NO: 217581 - RNA, 19 nt, Artificial Sequence
  Description of Artificial Sequence: Synthetic oligonucleotide
uguuaggcugccacuaggc

SEQ ID NO: 217582 - RNA, 19 nt, Artificial Sequence
  Description of Artificial Sequence: Synthetic oligonucleotide
uugucgaaugaguucagca

SEQ ID NO: 217583 - RNA, 19 nt, Artificial Sequence
  Description of Artificial Sequence: Synthetic oligonucleotide
cuaacuaaggugguugacc

SEQ ID NO: 217584 - RNA, 19 nt, Artificial Sequence
  Description of Artificial Sequence: Synthetic oligonucleotide
gugaauucaguguaguuga

SEQ ID NO: 217585 - RNA, 19 nt, Artificial Sequence
  Description of Artificial Sequence: Synthetic oligonucleotide
aaaccaaagagaauggguu

SEQ ID NO: 217586 - RNA, 19 nt, Artificial Sequence
  Description of Artificial Sequence: Synthetic oligonucleotide
aggaagacgccaccguacc

SEQ ID NO: 217587 - RNA, 19 nt, Artificial Sequence
  Description of Artificial Sequence: Synthetic oligonucleotide
ugauagggcaguuccagga

SEQ ID NO: 217588 - RNA, 19 nt, Artificial Sequence
  Description of Artificial Sequence: Synthetic oligonucleotide
cauaauggaugcagagugg

SEQ ID NO: 217589 - RNA, 19 nt, Artificial Sequence
  Description of Artificial Sequence: Synthetic oligonucleotide
ucugcuuauaacagcucca

SEQ ID NO: 217590 - RNA, 19 nt, Artificial Sequence
  Description of Artificial Sequence: Synthetic oligonucleotide
uaaagcagacccuuuccca

SEQ ID NO: 217591 - RNA, 19 nt, Artificial Sequence
  Description of Artificial Sequence: Synthetic oligonucleotide
uuccgguggagacauaaug

SEQ ID NO: 217592 - RNA, 19 nt, Artificial Sequence
  Description of Artificial Sequence: Synthetic oligonucleotide
ucucguugauuuugaaucc

SEQ ID NO: 217593 - RNA, 19 nt, Artificial Sequence
  Description of Artificial Sequence: Synthetic oligonucleotide
gacucgugaagucagccug

SEQ ID NO: 217594 - RNA, 19 nt, Artificial Sequence
  Description of Artificial Sequence: Synthetic oligonucleotide
gaaagacucgugaagucag

SEQ ID NO: 217595 - RNA, 19 nt, Artificial Sequence
  Description of Artificial Sequence: Synthetic oligonucleotide
uuacuccgaagucaguggc

SEQ ID NO: 217596 - RNA, 19 nt, Artificial Sequence
  Description of Artificial Sequence: Synthetic oligonucleotide
gagacuagaauggcugugg

SEQ ID NO: 217597 - RNA, 19 nt, Artificial Sequence
  Description of Artificial Sequence: Synthetic oligonucleotide
ugacacauugaagugaguc

SEQ ID NO: 217598 - RNA, 19 nt, Artificial Sequence
  Description of Artificial Sequence: Synthetic oligonucleotide
guccuguuaggucacacag

SEQ ID NO: 217599 - RNA, 19 nt, Artificial Sequence
  Description of Artificial Sequence: Synthetic oligonucleotide
aaguaagucacugaucaua

SEQ ID NO: 217600 - RNA, 19 nt, Artificial Sequence
  Description of Artificial Sequence: Synthetic oligonucleotide
aacuaaggugguugaccgg

SEQ ID NO: 217601 - RNA, 19 nt, Artificial Sequence
  Description of Artificial Sequence: Synthetic oligonucleotide
uuuugaagggcgcugcgau

SEQ ID NO: 217602 - RNA, 19 nt, Artificial Sequence
  Description of Artificial Sequence: Synthetic oligonucleotide
guggagacauaauggaugc

SEQ ID NO: 217603 - RNA, 19 nt, Artificial Sequence
  Description of Artificial Sequence: Synthetic oligonucleotide
uggguugggcuaaacaugu

SEQ ID NO: 217604 - RNA, 19 nt, Artificial Sequence
  Description of Artificial Sequence: Synthetic oligonucleotide
uuuccuucgagaguccgag

SEQ ID NO: 217605 - RNA, 19 nt, Artificial Sequence
  Description of Artificial Sequence: Synthetic oligonucleotide
aaaaccacguuccgauccu

SEQ ID NO: 217606 - RNA, 19 nt, Artificial Sequence
  Description of Artificial Sequence: Synthetic oligonucleotide
uguuccacggccccaugag

SEQ ID NO: 217607 - RNA, 19 nt, Artificial Sequence
  Description of Artificial Sequence: Synthetic oligonucleotide
auucacgcuaccuucuugu

SEQ ID NO: 217608 - RNA, 19 nt, Artificial Sequence
  Description of Artificial Sequence: Synthetic oligonucleotide
ucaagcacaccccuggcau

SEQ ID NO: 217609 - RNA, 19 nt, Artificial Sequence
  Description of Artificial Sequence: Synthetic oligonucleotide
cuuggacagcuuacgaggg

SEQ ID NO: 217610 - RNA, 19 nt, Artificial Sequence
  Description of Artificial Sequence: Synthetic oligonucleotide
uggauugugccgaaccaca

SEQ ID NO: 217611 - RNA, 19 nt, Artificial Sequence
  Description of Artificial Sequence: Synthetic oligonucleotide
uccuucgagaguccgaggu

SEQ ID NO: 217612 - RNA, 19 nt, Artificial Sequence
  Description of Artificial Sequence: Synthetic oligonucleotide
aacuuaggcaggaugagaa

SEQ ID NO: 217613 - RNA, 19 nt, Artificial Sequence
  Description of Artificial Sequence: Synthetic oligonucleotide
ugaucauaccccagcuaag

SEQ ID NO: 217614 - RNA, 19 nt, Artificial Sequence
  Description of Artificial Sequence: Synthetic oligonucleotide
ggugaauucaguguaguug

SEQ ID NO: 217615 - RNA, 19 nt, Artificial Sequence
  Description of Artificial Sequence: Synthetic oligonucleotide
ugaucauaccucuggugug

SEQ ID NO: 217616 - RNA, 19 nt, Artificial Sequence
  Description of Artificial Sequence: Synthetic oligonucleotide
agugccguaccccugagau

SEQ ID NO: 217617 - RNA, 19 nt, Artificial Sequence
  Description of Artificial Sequence: Synthetic oligonucleotide
aaagccacgggagcggaag

SEQ ID NO: 217618 - RNA, 19 nt, Artificial Sequence
  Description of Artificial Sequence: Synthetic oligonucleotide
uuaggcaggaugagaaguc

SEQ ID NO: 217619 - RNA, 19 nt, Artificial Sequence
  Description of Artificial Sequence: Synthetic oligonucleotide
caugcuaaggguuucucca

SEQ ID NO: 217620 - RNA, 19 nt, Artificial Sequence
  Description of Artificial Sequence: Synthetic oligonucleotide
uggcaaguaagucacugau

SEQ ID NO: 217621 - RNA, 19 nt, Artificial Sequence
  Description of Artificial Sequence: Synthetic oligonucleotide
ugccguaccccugagauac

SEQ ID NO: 217622 - RNA, 19 nt, Artificial Sequence
  Description of Artificial Sequence: Synthetic oligonucleotide
uuaacgugggcugccaagc

SEQ ID NO: 217623 - RNA, 19 nt, Artificial Sequence
  Description of Artificial Sequence: Synthetic oligonucleotide
ugcgaugaacaugcuaagg

SEQ ID NO: 217624 - RNA, 19 nt, Artificial Sequence
  Description of Artificial Sequence: Synthetic oligonucleotide
agcuuacgagggcaggagc

SEQ ID NO: 217625 - RNA, 19 nt, Artificial Sequence
  Description of Artificial Sequence: Synthetic oligonucleotide
uccauugucgaaugaguuc

SEQ ID NO: 217626 - RNA, 19 nt, Artificial Sequence
  Description of Artificial Sequence: Synthetic oligonucleotide
gacuagaauggcuguggag

SEQ ID NO: 217627 - RNA, 19 nt, Artificial Sequence
  Description of Artificial Sequence: Synthetic oligonucleotide
auugucgaaugaguucagc

SEQ ID NO: 217628 - RNA, 19 nt, Artificial Sequence
  Description of Artificial Sequence: Synthetic oligonucleotide
ucguugauuuugaauccca

SEQ ID NO: 217629 - RNA, 19 nt, Artificial Sequence
  Description of Artificial Sequence: Synthetic oligonucleotide
aagauggcgucggcggugc

SEQ ID NO: 217630 - RNA, 19 nt, Artificial Sequence
  Description of Artificial Sequence: Synthetic oligonucleotide
gugaagucagccuggguug

SEQ ID NO: 217631 - RNA, 19 nt, Artificial Sequence
  Description of Artificial Sequence: Synthetic oligonucleotide
ggagacauaauggaugcag

SEQ ID NO: 217632 - RNA, 19 nt, Artificial Sequence
  Description of Artificial Sequence: Synthetic oligonucleotide
aguauugggauaagggugu

SEQ ID NO: 217633 - RNA, 19 nt, Artificial Sequence
  Description of Artificial Sequence: Synthetic oligonucleotide
auauagaccccaaauggga

SEQ ID NO: 217634 - RNA, 19 nt, Artificial Sequence
  Description of Artificial Sequence: Synthetic oligonucleotide
ccuguuaggucacacagcc

SEQ ID NO: 217635 - RNA, 19 nt, Artificial Sequence
  Description of Artificial Sequence: Synthetic oligonucleotide
caucacuagggccacccgg

SEQ ID NO: 217636 - RNA, 19 nt, Artificial Sequence
  Description of Artificial Sequence: Synthetic oligonucleotide
uuuuccuucgagaguccga

SEQ ID NO: 217637 - RNA, 19 nt, Artificial Sequence
  Description of Artificial Sequence: Synthetic oligonucleotide
gaucauaccucuggugugc

SEQ ID NO: 217638 - RNA, 19 nt, Artificial Sequence
  Description of Artificial Sequence: Synthetic oligonucleotide
caagcaucaccuuggcaag

SEQ ID NO: 217639 - RNA, 19 nt, Artificial Sequence
  Description of Artificial Sequence: Synthetic oligonucleotide
ccuacacucugaaauaacc

SEQ ID NO: 217640 - RNA, 19 nt, Artificial Sequence
  Description of Artificial Sequence: Synthetic oligonucleotide
uagcuuguggcacccaccu

SEQ ID NO: 217641 - RNA, 19 nt, Artificial Sequence
  Description of Artificial Sequence: Synthetic oligonucleotide
gauaaggguguuaggcugc

SEQ ID NO: 217642 - RNA, 19 nt, Artificial Sequence
  Description of Artificial Sequence: Synthetic oligonucleotide
gucgaaugaguucagcauc

SEQ ID NO: 217643 - RNA, 19 nt, Artificial Sequence
  Description of Artificial Sequence: Synthetic oligonucleotide
accagaaugaggcguguca

SEQ ID NO: 217644 - RNA, 19 nt, Artificial Sequence
  Description of Artificial Sequence: Synthetic oligonucleotide
gaugucguaguaguggcca

SEQ ID NO: 217645 - RNA, 19 nt, Artificial Sequence
  Description of Artificial Sequence: Synthetic oligonucleotide
caccguaccacucucguuc

SEQ ID NO: 217646 - RNA, 19 nt, Artificial Sequence
  Description of Artificial Sequence: Synthetic oligonucleotide
gucaccuacacucugaaau

SEQ ID NO: 217647 - RNA, 19 nt, Artificial Sequence
  Description of Artificial Sequence: Synthetic oligonucleotide
cuggguugggcuaaacaug

SEQ ID NO: 217648 - RNA, 19 nt, Artificial Sequence
  Description of Artificial Sequence: Synthetic oligonucleotide
ggauaaggguguuaggcug

SEQ ID NO: 217649 - RNA, 19 nt, Artificial Sequence
  Description of Artificial Sequence: Synthetic oligonucleotide
gaggcgugucagcugaucc

SEQ ID NO: 217650 - RNA, 19 nt, Artificial Sequence
  Description of Artificial Sequence: Synthetic oligonucleotide
ugggcuaaacaugucaguc

SEQ ID NO: 217651 - RNA, 19 nt, Artificial Sequence
  Description of Artificial Sequence: Synthetic oligonucleotide
acuuaggcaggaugagaag

SEQ ID NO: 217652 - RNA, 19 nt, Artificial Sequence
  Description of Artificial Sequence: Synthetic oligonucleotide
uugcauucacgcuaccuuc

SEQ ID NO: 217653 - RNA, 19 nt, Artificial Sequence
  Description of Artificial Sequence: Synthetic oligonucleotide
gacgaagauggcgucggcg

SEQ ID NO: 217654 - RNA, 19 nt, Artificial Sequence
  Description of Artificial Sequence: Synthetic oligonucleotide
ugcugucaagguuccauca

SEQ ID NO: 217655 - RNA, 19 nt, Artificial Sequence
  Description of Artificial Sequence: Synthetic oligonucleotide
uaugcggugucaggggagg

SEQ ID NO: 217656 - RNA, 19 nt, Artificial Sequence
  Description of Artificial Sequence: Synthetic oligonucleotide
ggcaaauuagcacugaagu

SEQ ID NO: 217657 - RNA, 19 nt, Artificial Sequence
  Description of Artificial Sequence: Synthetic oligonucleotide
cugaucauaccccagcuaa

SEQ ID NO: 217658 - RNA, 19 nt, Artificial Sequence
  Description of Artificial Sequence: Synthetic oligonucleotide
ugcauucacgcuaccuucu

SEQ ID NO: 217659 - RNA, 19 nt, Artificial Sequence
  Description of Artificial Sequence: Synthetic oligonucleotide
accuaugcggugucagggg

SEQ ID NO: 217660 - RNA, 19 nt, Artificial Sequence
  Description of Artificial Sequence: Synthetic oligonucleotide
uguccuguuaggucacaca

SEQ ID NO: 217661 - RNA, 19 nt, Artificial Sequence
  Description of Artificial Sequence: Synthetic oligonucleotide
uuugucccgagugaaggcu

SEQ ID NO: 217662 - RNA, 19 nt, Artificial Sequence
  Description of Artificial Sequence: Synthetic oligonucleotide
acaagucaccuacacucug

SEQ ID NO: 217663 - RNA, 19 nt, Artificial Sequence
  Description of Artificial Sequence: Synthetic oligonucleotide
aucuaacuaaggugguuga

SEQ ID NO: 217664 - RNA, 19 nt, Artificial Sequence
  Description of Artificial Sequence: Synthetic oligonucleotide
cagacuuguggaagaggcg

SEQ ID NO: 217665 - RNA, 19 nt, Artificial Sequence
  Description of Artificial Sequence: Synthetic oligonucleotide
ucaccuacacucugaaaua

SEQ ID NO: 217666 - RNA, 19 nt, Artificial Sequence
  Description of Artificial Sequence: Synthetic oligonucleotide
aaguucuguccuguuaggu

SEQ ID NO: 217667 - RNA, 19 nt, Artificial Sequence
  Description of Artificial Sequence: Synthetic oligonucleotide
uacuccgaagucaguggcc

SEQ ID NO: 217668 - RNA, 19 nt, Artificial Sequence
  Description of Artificial Sequence: Synthetic oligonucleotide
ugagacuagaauggcugug

SEQ ID NO: 217669 - RNA, 19 nt, Artificial Sequence
  Description of Artificial Sequence: Synthetic oligonucleotide
auucccgcgguguaccuug

SEQ ID NO: 217670 - RNA, 19 nt, Artificial Sequence
  Description of Artificial Sequence: Synthetic oligonucleotide
guguuaggcugccacuagg

SEQ ID NO: 217671 - RNA, 19 nt, Artificial Sequence
  Description of Artificial Sequence: Synthetic oligonucleotide
gaagacgccaccguaccac

SEQ ID NO: 217672 - RNA, 19 nt, Artificial Sequence
  Description of Artificial Sequence: Synthetic oligonucleotide
aacaagucaccuacacucu

SEQ ID NO: 217673 - RNA, 19 nt, Artificial Sequence
  Description of Artificial Sequence: Synthetic oligonucleotide
auuuugaaucccauagcgu

SEQ ID NO: 217674 - RNA, 19 nt, Artificial Sequence
  Description of Artificial Sequence: Synthetic oligonucleotide
gcauaaugaguagaggaag

SEQ ID NO: 217675 - RNA, 19 nt, Artificial Sequence
  Description of Artificial Sequence: Synthetic oligonucleotide
uggacagcuuacgagggca

SEQ ID NO: 217676 - RNA, 19 nt, Artificial Sequence
  Description of Artificial Sequence: Synthetic oligonucleotide
caaacacuugaucugucca

SEQ ID NO: 217677 - RNA, 19 nt, Artificial Sequence
  Description of Artificial Sequence: Synthetic oligonucleotide
gaguggugaauucagugua

SEQ ID NO: 217678 - RNA, 19 nt, Artificial Sequence
  Description of Artificial Sequence: Synthetic oligonucleotide
gaaauaaccuaugcggugu

SEQ ID NO: 217679 - RNA, 19 nt, Artificial Sequence
  Description of Artificial Sequence: Synthetic oligonucleotide
gcucacauacagcagccgg

SEQ ID NO: 217680 - RNA, 19 nt, Artificial Sequence
  Description of Artificial Sequence: Synthetic oligonucleotide
cauagcgucuuggaucugc

SEQ ID NO: 217681 - RNA, 19 nt, Artificial Sequence
  Description of Artificial Sequence: Synthetic oligonucleotide
ucucccgaaagaguacuug

SEQ ID NO: 217682 - RNA, 19 nt, Artificial Sequence
  Description of Artificial Sequence: Synthetic oligonucleotide
ugcuuauaacagcuccagu

SEQ ID NO: 217683 - RNA, 19 nt, Artificial Sequence
  Description of Artificial Sequence: Synthetic oligonucleotide
gagauugcauucacgcuac

SEQ ID NO: 217684 - RNA, 19 nt, Artificial Sequence
  Description of Artificial Sequence: Synthetic oligonucleotide
aggcaaauuagcacugaag

SEQ ID NO: 217685 - RNA, 19 nt, Artificial Sequence
  Description of Artificial Sequence: Synthetic oligonucleotide
caucaugggcacagagacg

SEQ ID NO: 217686 - RNA, 19 nt, Artificial Sequence
  Description of Artificial Sequence: Synthetic oligonucleotide
acguuccgauccuuggagg

SEQ ID NO: 217687 - RNA, 19 nt, Artificial Sequence
  Description of Artificial Sequence: Synthetic oligonucleotide
auucaguguaguugaacuu

SEQ ID NO: 217688 - RNA, 19 nt, Artificial Sequence
  Description of Artificial Sequence: Synthetic oligonucleotide
auagcgucuuggaucugcc

SEQ ID NO: 217689 - RNA, 19 nt, Artificial Sequence
  Description of Artificial Sequence: Synthetic oligonucleotide
aucauaccccagcuaagga

SEQ ID NO: 217690 - RNA, 19 nt, Artificial Sequence
  Description of Artificial Sequence: Synthetic oligonucleotide
ucuaacuaaggugguugac

SEQ ID NO: 217691 - RNA, 19 nt, Artificial Sequence
  Description of Artificial Sequence: Synthetic oligonucleotide
ucuuccgguggagacauaa

SEQ ID NO: 217692 - RNA, 19 nt, Artificial Sequence
  Description of Artificial Sequence: Synthetic oligonucleotide
ggcgcugcgaugaacaugc

SEQ ID NO: 217693 - RNA, 19 nt, Artificial Sequence
  Description of Artificial Sequence: Synthetic oligonucleotide
agacucgugaagucagccu

SEQ ID NO: 217694 - RNA, 19 nt, Artificial Sequence
  Description of Artificial Sequence: Synthetic oligonucleotide
aagacgccaccguaccacu

SEQ ID NO: 217695 - RNA, 19 nt, Artificial Sequence
  Description of Artificial Sequence: Synthetic oligonucleotide
cucguugauuuugaauccc

SEQ ID NO: 217696 - RNA, 19 nt, Artificial Sequence
  Description of Artificial Sequence: Synthetic oligonucleotide
gcugagacuagaauggcug

SEQ ID NO: 217697 - RNA, 19 nt, Artificial Sequence
  Description of Artificial Sequence: Synthetic oligonucleotide
ggugcuaauuucauucuug

SEQ ID NO: 217698 - RNA, 19 nt, Artificial Sequence
  Description of Artificial Sequence: Synthetic oligonucleotide
gcaaauuagcacugaaguc

SEQ ID NO: 217699 - RNA, 19 nt, Artificial Sequence
  Description of Artificial Sequence: Synthetic oligonucleotide
cugaucauaccucuggugu

SEQ ID NO: 217700 - RNA, 19 nt, Artificial Sequence
  Description of Artificial Sequence: Synthetic oligonucleotide
aucauaccucuggugugcc

SEQ ID NO: 217701 - RNA, 19 nt, Artificial Sequence
  Description of Artificial Sequence: Synthetic oligonucleotide
aacgugggcugccaagcau

SEQ ID NO: 217702 - RNA, 19 nt, Artificial Sequence
  Description of Artificial Sequence: Synthetic oligonucleotide
uuuugcagggccugagcua

SEQ ID NO: 217703 - RNA, 19 nt, Artificial Sequence
  Description of Artificial Sequence: Synthetic oligonucleotide
cugaaauaaccuaugcggu

SEQ ID NO: 217704 - RNA, 19 nt, Artificial Sequence
  Description of Artificial Sequence: Synthetic oligonucleotide
uucacgcuaccuucuugug

SEQ ID NO: 217705 - RNA, 19 nt, Artificial Sequence
  Description of Artificial Sequence: Synthetic oligonucleotide
cuagaauggcuguggagga

SEQ ID NO: 217706 - RNA, 19 nt, Artificial Sequence
  Description of Artificial Sequence: Synthetic oligonucleotide
agacuagaauggcugugga

SEQ ID NO: 217707 - RNA, 19 nt, Artificial Sequence
  Description of Artificial Sequence: Synthetic oligonucleotide
uagcgucuuggaucugccg

SEQ ID NO: 217708 - RNA, 19 nt, Artificial Sequence
  Description of Artificial Sequence: Synthetic oligonucleotide
uaacgugggcugccaagca

SEQ ID NO: 217709 - RNA, 19 nt, Artificial Sequence
  Description of Artificial Sequence: Synthetic oligonucleotide
gcgggcugagacuagaaug

SEQ ID NO: 217710 - RNA, 19 nt, Artificial Sequence
  Description of Artificial Sequence: Synthetic oligonucleotide
gugguugaccgggagcugg

SEQ ID NO: 217711 - RNA, 19 nt, Artificial Sequence
  Description of Artificial Sequence: Synthetic oligonucleotide
aagcagacccuuucccaaa

SEQ ID NO: 217712 - RNA, 19 nt, Artificial Sequence
  Description of Artificial Sequence: Synthetic oligonucleotide
aggauugucucuguuggau

SEQ ID NO: 217713 - RNA, 19 nt, Artificial Sequence
  Description of Artificial Sequence: Synthetic oligonucleotide
uggccaucaggagugguga

SEQ ID NO: 217714 - RNA, 19 nt, Artificial Sequence
  Description of Artificial Sequence: Synthetic oligonucleotide
ucacuagggccacccggag

SEQ ID NO: 217715 - RNA, 19 nt, Artificial Sequence
  Description of Artificial Sequence: Synthetic oligonucleotide
uuaucuaacuaaggugguu

SEQ ID NO: 217716 - RNA, 19 nt, Artificial Sequence
  Description of Artificial Sequence: Synthetic oligonucleotide
acagccccuauugccauuc

SEQ ID NO: 217717 - RNA, 19 nt, Artificial Sequence
  Description of Artificial Sequence: Synthetic oligonucleotide
aguuuugucccgagugaag

SEQ ID NO: 217718 - RNA, 19 nt, Artificial Sequence
  Description of Artificial Sequence: Synthetic oligonucleotide
gcacaaaaggagcugggac

SEQ ID NO: 217719 - RNA, 19 nt, Artificial Sequence
  Description of Artificial Sequence: Synthetic oligonucleotide
caccccgacagggagauug

SEQ ID NO: 217720 - RNA, 19 nt, Artificial Sequence
  Description of Artificial Sequence: Synthetic oligonucleotide
ggaguauugggauaagggu

SEQ ID NO: 217721 - RNA, 19 nt, Artificial Sequence
  Description of Artificial Sequence: Synthetic oligonucleotide
cuuguggcacccaccucag

SEQ ID NO: 217722 - RNA, 19 nt, Artificial Sequence
  Description of Artificial Sequence: Synthetic oligonucleotide
gagucacccaguaauugga

SEQ ID NO: 217723 - RNA, 19 nt, Artificial Sequence
  Description of Artificial Sequence: Synthetic oligonucleotide
guguauggcuguccagugc

SEQ ID NO: 217724 - RNA, 19 nt, Artificial Sequence
  Description of Artificial Sequence: Synthetic oligonucleotide
gggagauuggggaugauga

SEQ ID NO: 217725 - RNA, 19 nt, Artificial Sequence
  Description of Artificial Sequence: Synthetic oligonucleotide
gaacuuaggcaggaugaga

SEQ ID NO: 217726 - RNA, 19 nt, Artificial Sequence
  Description of Artificial Sequence: Synthetic oligonucleotide
agggagauuggggaugaug

SEQ ID NO: 217727 - RNA, 19 nt, Artificial Sequence
  Description of Artificial Sequence: Synthetic oligonucleotide
cauugucgaaugaguucag

SEQ ID NO: 217728 - RNA, 19 nt, Artificial Sequence
  Description of Artificial Sequence: Synthetic oligonucleotide
gacauaauggaugcagagu

SEQ ID NO: 217729 - RNA, 19 nt, Artificial Sequence
  Description of Artificial Sequence: Synthetic oligonucleotide
gaggcaaauuagcacugaa

SEQ ID NO: 217730 - RNA, 19 nt, Artificial Sequence
  Description of Artificial Sequence: Synthetic oligonucleotide
uuccuuuaacgugggcugc

SEQ ID NO: 217731 - RNA, 19 nt, Artificial Sequence
  Description of Artificial Sequence: Synthetic oligonucleotide
uuccuucgagaguccgagg

SEQ ID NO: 217732 - RNA, 19 nt, Artificial Sequence
  Description of Artificial Sequence: Synthetic oligonucleotide
uccuuuaacgugggcugcc

SEQ ID NO: 217733 - RNA, 19 nt, Artificial Sequence
  Description of Artificial Sequence: Synthetic oligonucleotide
auacagggauauagacccc

SEQ ID NO: 217734 - RNA, 19 nt, Artificial Sequence
  Description of Artificial Sequence: Synthetic oligonucleotide
gaagauggcgucggcggug

SEQ ID NO: 217735 - RNA, 19 nt, Artificial Sequence
  Description of Artificial Sequence: Synthetic oligonucleotide
acuccgaagucaguggccu

SEQ ID NO: 217736 - RNA, 19 nt, Artificial Sequence
  Description of Artificial Sequence: Synthetic oligonucleotide
ugaggcaaauuagcacuga

SEQ ID NO: 217737 - RNA, 19 nt, Artificial Sequence
  Description of Artificial Sequence: Synthetic oligonucleotide
cuccaacaagcacacaaga

SEQ ID NO: 217738 - RNA, 19 nt, Artificial Sequence
  Description of Artificial Sequence: Synthetic oligonucleotide
caagucaccuacacucuga

SEQ ID NO: 217739 - RNA, 19 nt, Artificial Sequence
  Description of Artificial Sequence: Synthetic oligonucleotide
agggugaggcaaauuagca

SEQ ID NO: 217740 - RNA, 19 nt, Artificial Sequence
  Description of Artificial Sequence: Synthetic oligonucleotide
caaagaggaagggucgguc

SEQ ID NO: 217741 - RNA, 19 nt, Artificial Sequence
  Description of Artificial Sequence: Synthetic oligonucleotide
acacgguguauggcugucc

SEQ ID NO: 217742 - RNA, 19 nt, Artificial Sequence
  Description of Artificial Sequence: Synthetic oligonucleotide
acucgugaagucagccugg

SEQ ID NO: 217743 - RNA, 19 nt, Artificial Sequence
  Description of Artificial Sequence: Synthetic oligonucleotide
ugguugaccgggagcuggc

SEQ ID NO: 217744 - RNA, 19 nt, Artificial Sequence
  Description of Artificial Sequence: Synthetic oligonucleotide
cuguuaggucacacagccc

SEQ ID NO: 217745 - RNA, 19 nt, Artificial Sequence
  Description of Artificial Sequence: Synthetic oligonucleotide
ugcaagagguggccagagu

SEQ ID NO: 217746 - RNA, 19 nt, Artificial Sequence
  Description of Artificial Sequence: Synthetic oligonucleotide
aggcgugucagcugaucca

SEQ ID NO: 217747 - RNA, 19 nt, Artificial Sequence
  Description of Artificial Sequence: Synthetic oligonucleotide
guugaccgggagcuggcug

SEQ ID NO: 217748 - RNA, 19 nt, Artificial Sequence
  Description of Artificial Sequence: Synthetic oligonucleotide
ggccugaugggcugugugg

SEQ ID NO: 217749 - RNA, 19 nt, Artificial Sequence
  Description of Artificial Sequence: Synthetic oligonucleotide
gggugaggcaaauuagcac

SEQ ID NO: 217750 - RNA, 19 nt, Artificial Sequence
  Description of Artificial Sequence: Synthetic oligonucleotide
gguguaccuugggagaagg

SEQ ID NO: 217751 - RNA, 19 nt, Artificial Sequence
  Description of Artificial Sequence: Synthetic oligonucleotide
cuuacgagggcaggagcug

SEQ ID NO: 217752 - RNA, 19 nt, Artificial Sequence
  Description of Artificial Sequence: Synthetic oligonucleotide
acagcuuacgagggcagga

SEQ ID NO: 217753 - RNA, 19 nt, Artificial Sequence
  Description of Artificial Sequence: Synthetic oligonucleotide
acaugcuuaaacacuuuua

SEQ ID NO: 217754 - RNA, 19 nt, Artificial Sequence
  Description of Artificial Sequence: Synthetic oligonucleotide
uuccgauccuuggaggccu

SEQ ID NO: 217755 - RNA, 19 nt, Artificial Sequence
  Description of Artificial Sequence: Synthetic oligonucleotide
aucacuagggccacccgga

SEQ ID NO: 217756 - RNA, 19 nt, Artificial Sequence
  Description of Artificial Sequence: Synthetic oligonucleotide
gucauucccgcgguguacc

SEQ ID NO: 217757 - RNA, 19 nt, Artificial Sequence
  Description of Artificial Sequence: Synthetic oligonucleotide
acgugggcugccaagcauc

SEQ ID NO: 217758 - RNA, 19 nt, Artificial Sequence
  Description of Artificial Sequence: Synthetic oligonucleotide
guuccacggccccaugagc

SEQ ID NO: 217759 - RNA, 19 nt, Artificial Sequence
  Description of Artificial Sequence: Synthetic oligonucleotide
cugauccacagcccuuuug

SEQ ID NO: 217760 - RNA, 19 nt, Artificial Sequence
  Description of Artificial Sequence: Synthetic oligonucleotide
cacuagggccacccggagg

SEQ ID NO: 217761 - RNA, 19 nt, Artificial Sequence
  Description of Artificial Sequence: Synthetic oligonucleotide
ucggcggugcuaauuucau

SEQ ID NO: 217762 - RNA, 19 nt, Artificial Sequence
  Description of Artificial Sequence: Synthetic oligonucleotide
ggcaaggcggucauucccg

SEQ ID NO: 217763 - RNA, 19 nt, Artificial Sequence
  Description of Artificial Sequence: Synthetic oligonucleotide
auuucccacugugggagug

SEQ ID NO: 217764 - RNA, 19 nt, Artificial Sequence
  Description of Artificial Sequence: Synthetic oligonucleotide
gguguuaggcugccacuag

SEQ ID NO: 217765 - RNA, 19 nt, Artificial Sequence
  Description of Artificial Sequence: Synthetic oligonucleotide
agccccuauugccauucug

SEQ ID NO: 217766 - RNA, 19 nt, Artificial Sequence
  Description of Artificial Sequence: Synthetic oligonucleotide
auugucucuguuggauugu

SEQ ID NO: 217767 - RNA, 19 nt, Artificial Sequence
  Description of Artificial Sequence: Synthetic oligonucleotide
guuccgauccuuggaggcc

SEQ ID NO: 217768 - RNA, 19 nt, Artificial Sequence
  Description of Artificial Sequence: Synthetic oligonucleotide
acgguguauggcuguccag

SEQ ID NO: 217769 - RNA, 19 nt, Artificial Sequence
  Description of Artificial Sequence: Synthetic oligonucleotide
ccuauugccauucugcucu

SEQ ID NO: 217770 - RNA, 19 nt, Artificial Sequence
  Description of Artificial Sequence: Synthetic oligonucleotide
ggugcugccaucagacuug

SEQ ID NO: 217771 - RNA, 19 nt, Artificial Sequence
  Description of Artificial Sequence: Synthetic oligonucleotide
gauugcauucacgcuaccu

SEQ ID NO: 217772 - RNA, 19 nt, Artificial Sequence
  Description of Artificial Sequence: Synthetic oligonucleotide
gaugagaagucggggaagu

SEQ ID NO: 217773 - RNA, 19 nt, Artificial Sequence
  Description of Artificial Sequence: Synthetic oligonucleotide
ggcuguccagugcauaaug

SEQ ID NO: 217774 - RNA, 19 nt, Artificial Sequence
  Description of Artificial Sequence: Synthetic oligonucleotide
uugaaaccacuuugcccuc

SEQ ID NO: 217775 - RNA, 19 nt, Artificial Sequence
  Description of Artificial Sequence: Synthetic oligonucleotide
auacagcagccggaaauga

SEQ ID NO: 217776 - RNA, 19 nt, Artificial Sequence
  Description of Artificial Sequence: Synthetic oligonucleotide
acuaggcggcagugugaac

SEQ ID NO: 217777 - RNA, 19 nt, Artificial Sequence
  Description of Artificial Sequence: Synthetic oligonucleotide
ugcggugucaggggagggc

SEQ ID NO: 217778 - RNA, 19 nt, Artificial Sequence
  Description of Artificial Sequence: Synthetic oligonucleotide
agcuuguggcacccaccuc

SEQ ID NO: 217779 - RNA, 19 nt, Artificial Sequence
  Description of Artificial Sequence: Synthetic oligonucleotide
cucuucucguugauuuuga

SEQ ID NO: 217780 - RNA, 19 nt, Artificial Sequence
  Description of Artificial Sequence: Synthetic oligonucleotide
gcggcucugagucacccag

SEQ ID NO: 217781 - RNA, 19 nt, Artificial Sequence
  Description of Artificial Sequence: Synthetic oligonucleotide
gucguaguaguggccauca

SEQ ID NO: 217782 - RNA, 19 nt, Artificial Sequence
  Description of Artificial Sequence: Synthetic oligonucleotide
ccggaaaugacacauugaa

SEQ ID NO: 217783 - RNA, 19 nt, Artificial Sequence
  Description of Artificial Sequence: Synthetic oligonucleotide
gagugaguuagacucuuuu

SEQ ID NO: 217784 - RNA, 19 nt, Artificial Sequence
  Description of Artificial Sequence: Synthetic oligonucleotide
ucauaccucuggugugccu

SEQ ID NO: 217785 - RNA, 19 nt, Artificial Sequence
  Description of Artificial Sequence: Synthetic oligonucleotide
gccccuauugccauucugc

SEQ ID NO: 217786 - RNA, 19 nt, Artificial Sequence
  Description of Artificial Sequence: Synthetic oligonucleotide
ccauugucgaaugaguuca

SEQ ID NO: 217787 - RNA, 19 nt, Artificial Sequence
  Description of Artificial Sequence: Synthetic oligonucleotide
agccacgggagcggaaggg

SEQ ID NO: 217788 - RNA, 19 nt, Artificial Sequence
  Description of Artificial Sequence: Synthetic oligonucleotide
gcuaaggguuucuccauga

SEQ ID NO: 217789 - RNA, 19 nt, Artificial Sequence
  Description of Artificial Sequence: Synthetic oligonucleotide
gauagggcaguuccaggau

SEQ ID NO: 217790 - RNA, 19 nt, Artificial Sequence
  Description of Artificial Sequence: Synthetic oligonucleotide
acgccaccguaccacucuc

SEQ ID NO: 217791 - RNA, 19 nt, Artificial Sequence
  Description of Artificial Sequence: Synthetic oligonucleotide
uggagacauaauggaugca

SEQ ID NO: 217792 - RNA, 19 nt, Artificial Sequence
  Description of Artificial Sequence: Synthetic oligonucleotide
cagcuuacgagggcaggag

SEQ ID NO: 217793 - RNA, 19 nt, Artificial Sequence
  Description of Artificial Sequence: Synthetic oligonucleotide
cuaggcggcagugugaacu

SEQ ID NO: 217794 - RNA, 19 nt, Artificial Sequence
  Description of Artificial Sequence: Synthetic oligonucleotide
ggcaaggucccuaaggaaa

SEQ ID NO: 217795 - RNA, 19 nt, Artificial Sequence
  Description of Artificial Sequence: Synthetic oligonucleotide
ggaugagaagucggggaag

SEQ ID NO: 217796 - RNA, 19 nt, Artificial Sequence
  Description of Artificial Sequence: Synthetic oligonucleotide
ucgugaagucagccugggu

SEQ ID NO: 217797 - RNA, 19 nt, Artificial Sequence
  Description of Artificial Sequence: Synthetic oligonucleotide
ugcaccccgacagggagau

SEQ ID NO: 217798 - RNA, 19 nt, Artificial Sequence
  Description of Artificial Sequence: Synthetic oligonucleotide
agagugccguaccccugag

SEQ ID NO: 217799 - RNA, 19 nt, Artificial Sequence
  Description of Artificial Sequence: Synthetic oligonucleotide
uucucccgaaagaguacuu

SEQ ID NO: 217800 - RNA, 19 nt, Artificial Sequence
  Description of Artificial Sequence: Synthetic oligonucleotide
uauugggauaaggguguua

SEQ ID NO: 217801 - RNA, 19 nt, Artificial Sequence
  Description of Artificial Sequence: Synthetic oligonucleotide
uucccgcgguguaccuugg

SEQ ID NO: 217802 - RNA, 19 nt, Artificial Sequence
  Description of Artificial Sequence: Synthetic oligonucleotide
agucaccuacacucugaaa

SEQ ID NO: 217803 - RNA, 19 nt, Artificial Sequence
  Description of Artificial Sequence: Synthetic oligonucleotide
ucauucccgcgguguaccu

SEQ ID NO: 217804 - RNA, 19 nt, Artificial Sequence
  Description of Artificial Sequence: Synthetic oligonucleotide
cacgguguauggcugucca

SEQ ID NO: 217805 - RNA, 19 nt, Artificial Sequence
  Description of Artificial Sequence: Synthetic oligonucleotide
ccagaaugaggcgugucag

SEQ ID NO: 217806 - RNA, 19 nt, Artificial Sequence
  Description of Artificial Sequence: Synthetic oligonucleotide
agcagccggaaaugacaca

SEQ ID NO: 217807 - RNA, 19 nt, Artificial Sequence
  Description of Artificial Sequence: Synthetic oligonucleotide
agugcggcucugagucacc

SEQ ID NO: 217808 - RNA, 19 nt, Artificial Sequence
  Description of Artificial Sequence: Synthetic oligonucleotide
uccacggccccaugagcuc

SEQ ID NO: 217809 - RNA, 19 nt, Artificial Sequence
  Description of Artificial Sequence: Synthetic oligonucleotide
gacgccaccguaccacucu

SEQ ID NO: 217810 - RNA, 19 nt, Artificial Sequence
  Description of Artificial Sequence: Synthetic oligonucleotide
ugaagggcgcugcgaugaa

SEQ ID NO: 217811 - RNA, 19 nt, Artificial Sequence
  Description of Artificial Sequence: Synthetic oligonucleotide
augucguaguaguggccau

SEQ ID NO: 217812 - RNA, 19 nt, Artificial Sequence
  Description of Artificial Sequence: Synthetic oligonucleotide
cuaaggugguugaccggga

SEQ ID NO: 217813 - RNA, 19 nt, Artificial Sequence
  Description of Artificial Sequence: Synthetic oligonucleotide
cguuccgauccuuggaggc

SEQ ID NO: 217814 - RNA, 19 nt, Artificial Sequence
  Description of Artificial Sequence: Synthetic oligonucleotide
ccgacagggagauugggga

SEQ ID NO: 217815 - RNA, 19 nt, Artificial Sequence
  Description of Artificial Sequence: Synthetic oligonucleotide
gucggcggugcuaauuuca

SEQ ID NO: 217816 - RNA, 19 nt, Artificial Sequence
  Description of Artificial Sequence: Synthetic oligonucleotide
ugaggcgugucagcugauc

SEQ ID NO: 217817 - RNA, 19 nt, Artificial Sequence
  Description of Artificial Sequence: Synthetic oligonucleotide
ucaccagaaugaggcgugu

SEQ ID NO: 217818 - RNA, 19 nt, Artificial Sequence
  Description of Artificial Sequence: Synthetic oligonucleotide
cuguccuguuaggucacac

SEQ ID NO: 217819 - RNA, 19 nt, Artificial Sequence
  Description of Artificial Sequence: Synthetic oligonucleotide
uacacgguguauggcuguc

SEQ ID NO: 217820 - RNA, 19 nt, Artificial Sequence
  Description of Artificial Sequence: Synthetic oligonucleotide
uccgauccuuggaggccug

SEQ ID NO: 217821 - RNA, 19 nt, Artificial Sequence
  Description of Artificial Sequence: Synthetic oligonucleotide
cagugcggcucugagucac

SEQ ID NO: 217822 - RNA, 19 nt, Artificial Sequence
  Description of Artificial Sequence: Synthetic oligonucleotide
ccgcgguguaccuugggag

SEQ ID NO: 217823 - RNA, 19 nt, Artificial Sequence
  Description of Artificial Sequence: Synthetic oligonucleotide
ggcaggcuuguagagugcc

SEQ ID NO: 217824 - RNA, 19 nt, Artificial Sequence
  Description of Artificial Sequence: Synthetic oligonucleotide
accgugugccaugacuuaa

SEQ ID NO: 217825 - RNA, 19 nt, Artificial Sequence
  Description of Artificial Sequence: Synthetic oligonucleotide
caguuuugucccgagugaa

SEQ ID NO: 217826 - RNA, 19 nt, Artificial Sequence
  Description of Artificial Sequence: Synthetic oligonucleotide
guguaccuugggagaaggc

SEQ ID NO: 217827 - RNA, 19 nt, Artificial Sequence
  Description of Artificial Sequence: Synthetic oligonucleotide
cuuuaacgugggcugccaa

SEQ ID NO: 217828 - RNA, 19 nt, Artificial Sequence
  Description of Artificial Sequence: Synthetic oligonucleotide
gggucgguccaugaucacc

SEQ ID NO: 217829 - RNA, 19 nt, Artificial Sequence
  Description of Artificial Sequence: Synthetic oligonucleotide
caccuacacucugaaauaa

SEQ ID NO: 217830 - RNA, 19 nt, Artificial Sequence
  Description of Artificial Sequence: Synthetic oligonucleotide
ggcuuguagagugccguac

SEQ ID NO: 217831 - RNA, 19 nt, Artificial Sequence
  Description of Artificial Sequence: Synthetic oligonucleotide
cuccgaagucaguggccug

SEQ ID NO: 217832 - RNA, 19 nt, Artificial Sequence
  Description of Artificial Sequence: Synthetic oligonucleotide
ccgguggagacauaaugga

SEQ ID NO: 217833 - RNA, 19 nt, Artificial Sequence
  Description of Artificial Sequence: Synthetic oligonucleotide
ugccacuaggcggcagugu

SEQ ID NO: 217834 - RNA, 19 nt, Artificial Sequence
  Description of Artificial Sequence: Synthetic oligonucleotide
accccgacagggagauugg

SEQ ID NO: 217835 - RNA, 19 nt, Artificial Sequence
  Description of Artificial Sequence: Synthetic oligonucleotide
aggcuuguagagugccgua

SEQ ID NO: 217836 - RNA, 19 nt, Artificial Sequence
  Description of Artificial Sequence: Synthetic oligonucleotide
agacgccaccguaccacuc

SEQ ID NO: 217837 - RNA, 19 nt, Artificial Sequence
  Description of Artificial Sequence: Synthetic oligonucleotide
ggcucaauacugggcaaac

SEQ ID NO: 217838 - RNA, 19 nt, Artificial Sequence
  Description of Artificial Sequence: Synthetic oligonucleotide
gagugccguaccccugaga

SEQ ID NO: 217839 - RNA, 19 nt, Artificial Sequence
  Description of Artificial Sequence: Synthetic oligonucleotide
augaugagccaggcacaca

SEQ ID NO: 217840 - RNA, 19 nt, Artificial Sequence
  Description of Artificial Sequence: Synthetic oligonucleotide
cugucaagguuccaucaau

SEQ ID NO: 217841 - RNA, 19 nt, Artificial Sequence
  Description of Artificial Sequence: Synthetic oligonucleotide
cacaugcuuaaacacuuuu

SEQ ID NO: 217842 - RNA, 19 nt, Artificial Sequence
  Description of Artificial Sequence: Synthetic oligonucleotide
ccaguuuugucccgaguga

SEQ ID NO: 217843 - RNA, 19 nt, Artificial Sequence
  Description of Artificial Sequence: Synthetic oligonucleotide
augcggugucaggggaggg

SEQ ID NO: 217844 - RNA, 19 nt, Artificial Sequence
  Description of Artificial Sequence: Synthetic oligonucleotide
ggccguugaaguagagggc

SEQ ID NO: 217845 - RNA, 19 nt, Artificial Sequence
  Description of Artificial Sequence: Synthetic oligonucleotide
gcaggcuuguagagugccg

SEQ ID NO: 217846 - RNA, 19 nt, Artificial Sequence
  Description of Artificial Sequence: Synthetic oligonucleotide
gguuuucccugcugugguc

SEQ ID NO: 217847 - RNA, 19 nt, Artificial Sequence
  Description of Artificial Sequence: Synthetic oligonucleotide
gugaagggaaaugccuucu

SEQ ID NO: 217848 - RNA, 19 nt, Artificial Sequence
  Description of Artificial Sequence: Synthetic oligonucleotide
cacuaggcggcagugugaa

SEQ ID NO: 217849 - RNA, 19 nt, Artificial Sequence
  Description of Artificial Sequence: Synthetic oligonucleotide
cccuauugccauucugcuc

SEQ ID NO: 217850 - RNA, 19 nt, Artificial Sequence
  Description of Artificial Sequence: Synthetic oligonucleotide
gcaaggcggucauucccgc

SEQ ID NO: 217851 - RNA, 19 nt, Artificial Sequence
  Description of Artificial Sequence: Synthetic oligonucleotide
guacacgguguauggcugu

SEQ ID NO: 217852 - RNA, 19 nt, Artificial Sequence
  Description of Artificial Sequence: Synthetic oligonucleotide
gacuuguggaagaggcggu

SEQ ID NO: 217853 - RNA, 19 nt, Artificial Sequence
  Description of Artificial Sequence: Synthetic oligonucleotide
ggaagacgccaccguacca

SEQ ID NO: 217854 - RNA, 19 nt, Artificial Sequence
  Description of Artificial Sequence: Synthetic oligonucleotide
cguaccacucucguucacc

SEQ ID NO: 217855 - RNA, 19 nt, Artificial Sequence
  Description of Artificial Sequence: Synthetic oligonucleotide
ggagaaaguucuguccugu

SEQ ID NO: 217856 - RNA, 19 nt, Artificial Sequence
  Description of Artificial Sequence: Synthetic oligonucleotide
caugcgggcugagacuaga

SEQ ID NO: 217857 - RNA, 19 nt, Artificial Sequence
  Description of Artificial Sequence: Synthetic oligonucleotide
cccauagcgucuuggaucu

SEQ ID NO: 217858 - RNA, 19 nt, Artificial Sequence
  Description of Artificial Sequence: Synthetic oligonucleotide
caaguaagucacugaucau

SEQ ID NO: 217859 - RNA, 19 nt, Artificial Sequence
  Description of Artificial Sequence: Synthetic oligonucleotide
cuaaggguuucuccaugau

SEQ ID NO: 217860 - RNA, 19 nt, Artificial Sequence
  Description of Artificial Sequence: Synthetic oligonucleotide
agagugaguuagacucuuu

SEQ ID NO: 217861 - RNA, 19 nt, Artificial Sequence
  Description of Artificial Sequence: Synthetic oligonucleotide
ccaucaauuggcccaugaa

SEQ ID NO: 217862 - RNA, 19 nt, Artificial Sequence
  Description of Artificial Sequence: Synthetic oligonucleotide
caggaguggugaauucagu

SEQ ID NO: 217863 - RNA, 19 nt, Artificial Sequence
  Description of Artificial Sequence: Synthetic oligonucleotide
gcagccggaaaugacacau

SEQ ID NO: 217864 - RNA, 19 nt, Artificial Sequence
  Description of Artificial Sequence: Synthetic oligonucleotide
ccuaugcggugucagggga

SEQ ID NO: 217865 - RNA, 19 nt, Artificial Sequence
  Description of Artificial Sequence: Synthetic oligonucleotide
gcuuacgagggcaggagcu

SEQ ID NO: 217866 - RNA, 19 nt, Artificial Sequence
  Description of Artificial Sequence: Synthetic oligonucleotide
ugaccgggagcuggcuguc

SEQ ID NO: 217867 - RNA, 19 nt, Artificial Sequence
  Description of Artificial Sequence: Synthetic oligonucleotide
gcucaauacugggcaaaca

SEQ ID NO: 217868 - RNA, 19 nt, Artificial Sequence
  Description of Artificial Sequence: Synthetic oligonucleotide
guuccaucaauuggcccau

SEQ ID NO: 217869 - RNA, 19 nt, Artificial Sequence
  Description of Artificial Sequence: Synthetic oligonucleotide
ggauugugccgaaccacaa

SEQ ID NO: 217870 - RNA, 19 nt, Artificial Sequence
  Description of Artificial Sequence: Synthetic oligonucleotide
cacgggagcggaagggagu

SEQ ID NO: 217871 - RNA, 19 nt, Artificial Sequence
  Description of Artificial Sequence: Synthetic oligonucleotide
caccgugugccaugacuua

SEQ ID NO: 217872 - RNA, 19 nt, Artificial Sequence
  Description of Artificial Sequence: Synthetic oligonucleotide
gggcgcugcgaugaacaug

SEQ ID NO: 217873 - RNA, 19 nt, Artificial Sequence
  Description of Artificial Sequence: Synthetic oligonucleotide
ccguaccccugagauacag

SEQ ID NO: 217874 - RNA, 19 nt, Artificial Sequence
  Description of Artificial Sequence: Synthetic oligonucleotide
ggacaccccauagggagaa

SEQ ID NO: 217875 - RNA, 19 nt, Artificial Sequence
  Description of Artificial Sequence: Synthetic oligonucleotide
gugccguaccccugagaua

SEQ ID NO: 217876 - RNA, 19 nt, Artificial Sequence
  Description of Artificial Sequence: Synthetic oligonucleotide
cuuccgguggagacauaau

SEQ ID NO: 217877 - RNA, 19 nt, Artificial Sequence
  Description of Artificial Sequence: Synthetic oligonucleotide
uucuuccgguggagacaua

SEQ ID NO: 217878 - RNA, 19 nt, Artificial Sequence
  Description of Artificial Sequence: Synthetic oligonucleotide
gcgucuuggaucugccgcu

SEQ ID NO: 217879 - RNA, 19 nt, Artificial Sequence
  Description of Artificial Sequence: Synthetic oligonucleotide
acagcccuuuuggcaagua

SEQ ID NO: 217880 - RNA, 19 nt, Artificial Sequence
  Description of Artificial Sequence: Synthetic oligonucleotide
ccugagcuacagagagcug

SEQ ID NO: 217881 - RNA, 19 nt, Artificial Sequence
  Description of Artificial Sequence: Synthetic oligonucleotide
gccaugcgggcugagacua

SEQ ID NO: 217882 - RNA, 19 nt, Artificial Sequence
  Description of Artificial Sequence: Synthetic oligonucleotide
cccaaaugggacaccgugu

SEQ ID NO: 217883 - RNA, 19 nt, Artificial Sequence
  Description of Artificial Sequence: Synthetic oligonucleotide
cccgcuggacgaagauggc

SEQ ID NO: 217884 - RNA, 19 nt, Artificial Sequence
  Description of Artificial Sequence: Synthetic oligonucleotide
gggcucaauacugggcaaa

SEQ ID NO: 217885 - RNA, 19 nt, Artificial Sequence
  Description of Artificial Sequence: Synthetic oligonucleotide
gccaccguaccacucucgu

SEQ ID NO: 217886 - RNA, 19 nt, Artificial Sequence
  Description of Artificial Sequence: Synthetic oligonucleotide
ggggucuuccacuggccgu

SEQ ID NO: 217887 - RNA, 19 nt, Artificial Sequence
  Description of Artificial Sequence: Synthetic oligonucleotide
cagagugaguuagacucuu

SEQ ID NO: 217888 - RNA, 19 nt, Artificial Sequence
  Description of Artificial Sequence: Synthetic oligonucleotide
ccacuaggcggcaguguga

SEQ ID NO: 217889 - RNA, 19 nt, Artificial Sequence
  Description of Artificial Sequence: Synthetic oligonucleotide
cgcgguguaccuugggaga

SEQ ID NO: 217890 - RNA, 19 nt, Artificial Sequence
  Description of Artificial Sequence: Synthetic oligonucleotide
ccaugcgggcugagacuag

SEQ ID NO: 217891 - RNA, 19 nt, Artificial Sequence
  Description of Artificial Sequence: Synthetic oligonucleotide
ggagcggaagggaguggga

SEQ ID NO: 217892 - RNA, 19 nt, Artificial Sequence
  Description of Artificial Sequence: Synthetic oligonucleotide
gcgguguaccuugggagaa

SEQ ID NO: 217893 - RNA, 19 nt, Artificial Sequence
  Description of Artificial Sequence: Synthetic oligonucleotide
ggucuuccacuggccguug

SEQ ID NO: 217894 - RNA, 19 nt, Artificial Sequence
  Description of Artificial Sequence: Synthetic oligonucleotide
ggggccucuguggguacac

SEQ ID NO: 217895 - RNA, 19 nt, Artificial Sequence
  Description of Artificial Sequence: Synthetic oligonucleotide
ccuuuaacgugggcugcca

SEQ ID NO: 217896 - RNA, 19 nt, Artificial Sequence
  Description of Artificial Sequence: Synthetic oligonucleotide
ccgugugccaugacuuaaa

SEQ ID NO: 217897 - RNA, 19 nt, Artificial Sequence
  Description of Artificial Sequence: Synthetic oligonucleotide
cugagccaucaugggcaca

SEQ ID NO: 217898 - RNA, 19 nt, Artificial Sequence
  Description of Artificial Sequence: Synthetic oligonucleotide
ggccugcuaugagauugca

SEQ ID NO: 217899 - RNA, 19 nt, Artificial Sequence
  Description of Artificial Sequence: Synthetic oligonucleotide
ggguugggcuaaacauguc

SEQ ID NO: 217900 - RNA, 19 nt, Artificial Sequence
  Description of Artificial Sequence: Synthetic oligonucleotide
guauugggauaaggguguu

SEQ ID NO: 217901 - RNA, 19 nt, Artificial Sequence
  Description of Artificial Sequence: Synthetic oligonucleotide
ccgauccuuggaggccugg

SEQ ID NO: 217902 - RNA, 19 nt, Artificial Sequence
  Description of Artificial Sequence: Synthetic oligonucleotide
gcggucauucccgcggugu

SEQ ID NO: 217903 - RNA, 19 nt, Artificial Sequence
  Description of Artificial Sequence: Synthetic oligonucleotide
cgucggcggugcuaauuuc

SEQ ID NO: 217904 - RNA, 19 nt, Artificial Sequence
  Description of Artificial Sequence: Synthetic oligonucleotide
ccguaccacucucguucac

SEQ ID NO: 217905 - RNA, 19 nt, Artificial Sequence
  Description of Artificial Sequence: Synthetic oligonucleotide
cgguguaccuugggagaag

SEQ ID NO: 217906 - RNA, 19 nt, Artificial Sequence
  Description of Artificial Sequence: Synthetic oligonucleotide
gggucuuccacuggccguu

SEQ ID NO: 217907 - RNA, 19 nt, Artificial Sequence
  Description of Artificial Sequence: Synthetic oligonucleotide
cgaaugaguucagcaucca

SEQ ID NO: 217908 - RNA, 19 nt, Artificial Sequence
  Description of Artificial Sequence: Synthetic oligonucleotide
gcgugucagcugauccaca

SEQ ID NO: 217909 - RNA, 19 nt, Artificial Sequence
  Description of Artificial Sequence: Synthetic oligonucleotide
caccucgaucuugacuuuu

SEQ ID NO: 217910 - RNA, 19 nt, Artificial Sequence
  Description of Artificial Sequence: Synthetic oligonucleotide
gguugaccgggagcuggcu

SEQ ID NO: 217911 - RNA, 19 nt, Artificial Sequence
  Description of Artificial Sequence: Synthetic oligonucleotide
cauucccgcgguguaccuu

SEQ ID NO: 217912 - RNA, 19 nt, Artificial Sequence
  Description of Artificial Sequence: Synthetic oligonucleotide
gccugcuaugagauugcau

SEQ ID NO: 217913 - RNA, 19 nt, Artificial Sequence
  Description of Artificial Sequence: Synthetic oligonucleotide
cgcugcgaugaacaugcua

SEQ ID NO: 217914 - RNA, 19 nt, Artificial Sequence
  Description of Artificial Sequence: Synthetic oligonucleotide
gccgaaccacaaagaggaa

SEQ ID NO: 217915 - RNA, 19 nt, Artificial Sequence
  Description of Artificial Sequence: Synthetic oligonucleotide
cagccccuauugccauucu

SEQ ID NO: 217916 - RNA, 19 nt, Artificial Sequence
  Description of Artificial Sequence: Synthetic oligonucleotide
ccauagcgucuuggaucug

SEQ ID NO: 217917 - RNA, 19 nt, Artificial Sequence
  Description of Artificial Sequence: Synthetic oligonucleotide
ggcgucggcggugcuaauu

SEQ ID NO: 217918 - RNA, 19 nt, Artificial Sequence
  Description of Artificial Sequence: Synthetic oligonucleotide
gccguaccccugagauaca

SEQ ID NO: 217919 - RNA, 19 nt, Artificial Sequence
  Description of Artificial Sequence: Synthetic oligonucleotide
cggucauucccgcggugua

SEQ ID NO: 217920 - RNA, 19 nt, Artificial Sequence
  Description of Artificial Sequence: Synthetic oligonucleotide
ccaccguaccacucucguu

SEQ ID NO: 217921 - RNA, 19 nt, Artificial Sequence
  Description of Artificial Sequence: Synthetic oligonucleotide
cagggagauuggggaugau

SEQ ID NO: 217922 - RNA, 19 nt, Artificial Sequence
  Description of Artificial Sequence: Synthetic oligonucleotide
cccggaggggcaggcuugu

SEQ ID NO: 217923 - RNA, 19 nt, Artificial Sequence
  Description of Artificial Sequence: Synthetic oligonucleotide
gcgcugcgaugaacaugcu

SEQ ID NO: 217924 - RNA, 19 nt, Artificial Sequence
  Description of Artificial Sequence: Synthetic oligonucleotide
ccggaggggcaggcuugua

SEQ ID NO: 217925 - RNA, 19 nt, Artificial Sequence
  Description of Artificial Sequence: Synthetic oligonucleotide
uuuaagaucaagaagaagg

SEQ ID NO: 217926 - RNA, 19 nt, Artificial Sequence
  Description of Artificial Sequence: Synthetic oligonucleotide
aaaacuaaugauuauagca

SEQ ID NO: 217927 - RNA, 19 nt, Artificial Sequence
  Description of Artificial Sequence: Synthetic oligonucleotide
uuuaauagaaccuuggaug

SEQ ID NO: 217928 - RNA, 19 nt, Artificial Sequence
  Description of Artificial Sequence: Synthetic oligonucleotide
aaauagaagauacuugagg

SEQ ID NO: 217929 - RNA, 19 nt, Artificial Sequence
  Description of Artificial Sequence: Synthetic oligonucleotide
agauaauuaaguuuagagg

SEQ ID NO: 217930 - RNA, 19 nt, Artificial Sequence
  Description of Artificial Sequence: Synthetic oligonucleotide
ugauguauuuaauagaacc

SEQ ID NO: 217931 - RNA, 19 nt, Artificial Sequence
  Description of Artificial Sequence: Synthetic oligonucleotide
aauugcaacagcucgauug

SEQ ID NO: 217932 - RNA, 19 nt, Artificial Sequence
  Description of Artificial Sequence: Synthetic oligonucleotide
uuaaauuccugaaaugggg

SEQ ID NO: 217933 - RNA, 19 nt, Artificial Sequence
  Description of Artificial Sequence: Synthetic oligonucleotide
aauucaaaacaaaucauac

SEQ ID NO: 217934 - RNA, 19 nt, Artificial Sequence
  Description of Artificial Sequence: Synthetic oligonucleotide
uacacgaucuuuaagauca

SEQ ID NO: 217935 - RNA, 19 nt, Artificial Sequence
  Description of Artificial Sequence: Synthetic oligonucleotide
uuuaaauuccugaaauggg

SEQ ID NO: 217936 - RNA, 19 nt, Artificial Sequence
  Description of Artificial Sequence: Synthetic oligonucleotide
auauguuccacucuaagag

SEQ ID NO: 217937 - RNA, 19 nt, Artificial Sequence
  Description of Artificial Sequence: Synthetic oligonucleotide
gauaauuaaguuuagaggu

SEQ ID NO: 217938 - RNA, 19 nt, Artificial Sequence
  Description of Artificial Sequence: Synthetic oligonucleotide
auagaauugcaacagcucg

SEQ ID NO: 217939 - RNA, 19 nt, Artificial Sequence
  Description of Artificial Sequence: Synthetic oligonucleotide
uguuuauuuagaaugccag

SEQ ID NO: 217940 - RNA, 19 nt, Artificial Sequence
  Description of Artificial Sequence: Synthetic oligonucleotide
uuugauaucugaaauauuu

SEQ ID NO: 217941 - RNA, 19 nt, Artificial Sequence
  Description of Artificial Sequence: Synthetic oligonucleotide
uucaacauacccaucuucg

SEQ ID NO: 217942 - RNA, 19 nt, Artificial Sequence
  Description of Artificial Sequence: Synthetic oligonucleotide
agacuuugcauacaguagc

SEQ ID NO: 217943 - RNA, 19 nt, Artificial Sequence
  Description of Artificial Sequence: Synthetic oligonucleotide
gacaacucuaaauaggugc

SEQ ID NO: 217944 - RNA, 19 nt, Artificial Sequence
  Description of Artificial Sequence: Synthetic oligonucleotide
uuuguuaagacuuguggcc

SEQ ID NO: 217945 - RNA, 19 nt, Artificial Sequence
  Description of Artificial Sequence: Synthetic oligonucleotide
ucucuuaaagguuacaaga

SEQ ID NO: 217946 - RNA, 19 nt, Artificial Sequence
  Description of Artificial Sequence: Synthetic oligonucleotide
ugacacaaaacccauauuc

SEQ ID NO: 217947 - RNA, 19 nt, Artificial Sequence
  Description of Artificial Sequence: Synthetic oligonucleotide
uuaagaucaagaagaaggc

SEQ ID NO: 217948 - RNA, 19 nt, Artificial Sequence
  Description of Artificial Sequence: Synthetic oligonucleotide
uuuuccguuaaguuguagg

SEQ ID NO: 217949 - RNA, 19 nt, Artificial Sequence
  Description of Artificial Sequence: Synthetic oligonucleotide
uccauuuauguccuggagg

SEQ ID NO: 217950 - RNA, 19 nt, Artificial Sequence
  Description of Artificial Sequence: Synthetic oligonucleotide
uucguuucuauuaaaauau

SEQ ID NO: 217951 - RNA, 19 nt, Artificial Sequence
  Description of Artificial Sequence: Synthetic oligonucleotide
cuuaaagguuacaagaaug

SEQ ID NO: 217952 - RNA, 19 nt, Artificial Sequence
  Description of Artificial Sequence: Synthetic oligonucleotide
uguauuuaauagaaccuug

SEQ ID NO: 217953 - RNA, 19 nt, Artificial Sequence
  Description of Artificial Sequence: Synthetic oligonucleotide
uuauccaucuuccucaaac

SEQ ID NO: 217954 - RNA, 19 nt, Artificial Sequence
  Description of Artificial Sequence: Synthetic oligonucleotide
aaucagacuuugcauacag

SEQ ID NO: 217955 - RNA, 19 nt, Artificial Sequence
  Description of Artificial Sequence: Synthetic oligonucleotide
aaugaaaacugauucccgu

SEQ ID NO: 217956 - RNA, 19 nt, Artificial Sequence
  Description of Artificial Sequence: Synthetic oligonucleotide
uguagcuugaacuuccagc

SEQ ID NO: 217957 - RNA, 19 nt, Artificial Sequence
  Description of Artificial Sequence: Synthetic oligonucleotide
uuaauagaaccuuggaugu

SEQ ID NO: 217958 - RNA, 19 nt, Artificial Sequence
  Description of Artificial Sequence: Synthetic oligonucleotide
aacaccuuggcaguuaauc

SEQ ID NO: 217959 - RNA, 19 nt, Artificial Sequence
  Description of Artificial Sequence: Synthetic oligonucleotide
aaaacugauucccgugacg

SEQ ID NO: 217960 - RNA, 19 nt, Artificial Sequence
  Description of Artificial Sequence: Synthetic oligonucleotide
uuugcaaagauguugguuu

SEQ ID NO: 217961 - RNA, 19 nt, Artificial Sequence
  Description of Artificial Sequence: Synthetic oligonucleotide
uauccuuagacucacucac

SEQ ID NO: 217962 - RNA, 19 nt, Artificial Sequence
  Description of Artificial Sequence: Synthetic oligonucleotide
aagacugggguuuccaaag

SEQ ID NO: 217963 - RNA, 19 nt, Artificial Sequence
  Description of Artificial Sequence: Synthetic oligonucleotide
guuuguuaagacuuguggc

SEQ ID NO: 217964 - RNA, 19 nt, Artificial Sequence
  Description of Artificial Sequence: Synthetic oligonucleotide
gugaauaggugucugaacc

SEQ ID NO: 217965 - RNA, 19 nt, Artificial Sequence
  Description of Artificial Sequence: Synthetic oligonucleotide
aaugcuuagaacaaaggau

SEQ ID NO: 217966 - RNA, 19 nt, Artificial Sequence
  Description of Artificial Sequence: Synthetic oligonucleotide
agauugauauguuccacuc

SEQ ID NO: 217967 - RNA, 19 nt, Artificial Sequence
  Description of Artificial Sequence: Synthetic oligonucleotide
uuugauucgagaacuggga

SEQ ID NO: 217968 - RNA, 19 nt, Artificial Sequence
  Description of Artificial Sequence: Synthetic oligonucleotide
acggaaaagcccuggaggc

SEQ ID NO: 217969 - RNA, 19 nt, Artificial Sequence
  Description of Artificial Sequence: Synthetic oligonucleotide
uugauaaugauguccucag

SEQ ID NO: 217970 - RNA, 19 nt, Artificial Sequence
  Description of Artificial Sequence: Synthetic oligonucleotide
ucgucggucauaucaaugg

SEQ ID NO: 217971 - RNA, 19 nt, Artificial Sequence
  Description of Artificial Sequence: Synthetic oligonucleotide
auugcaaaacccuaacugu

SEQ ID NO: 217972 - RNA, 19 nt, Artificial Sequence
  Description of Artificial Sequence: Synthetic oligonucleotide
cucucuaugauuauccaug

SEQ ID NO: 217973 - RNA, 19 nt, Artificial Sequence
  Description of Artificial Sequence: Synthetic oligonucleotide
agagaauccaaacauugca

SEQ ID NO: 217974 - RNA, 19 nt, Artificial Sequence
  Description of Artificial Sequence: Synthetic oligonucleotide
uuuucugugaauagguguc

SEQ ID NO: 217975 - RNA, 19 nt, Artificial Sequence
  Description of Artificial Sequence: Synthetic oligonucleotide
acaccuuggcaguuaaucc

SEQ ID NO: 217976 - RNA, 19 nt, Artificial Sequence
  Description of Artificial Sequence: Synthetic oligonucleotide
agauguuuauuuagaaugc

SEQ ID NO: 217977 - RNA, 19 nt, Artificial Sequence
  Description of Artificial Sequence: Synthetic oligonucleotide
agcuacacgaucuuuaaga

SEQ ID NO: 217978 - RNA, 19 nt, Artificial Sequence
  Description of Artificial Sequence: Synthetic oligonucleotide
agccuuagcacuuuucagg

SEQ ID NO: 217979 - RNA, 19 nt, Artificial Sequence
  Description of Artificial Sequence: Synthetic oligonucleotide
aaacuaaugauuauagcaa

SEQ ID NO: 217980 - RNA, 19 nt, Artificial Sequence
  Description of Artificial Sequence: Synthetic oligonucleotide
uccauaaauaguuguaagu

SEQ ID NO: 217981 - RNA, 19 nt, Artificial Sequence
  Description of Artificial Sequence: Synthetic oligonucleotide
ucuaagagaacagcaaccc

SEQ ID NO: 217982 - RNA, 19 nt, Artificial Sequence
  Description of Artificial Sequence: Synthetic oligonucleotide
uguagauugauauguucca

SEQ ID NO: 217983 - RNA, 19 nt, Artificial Sequence
  Description of Artificial Sequence: Synthetic oligonucleotide
ccuacaguugauuaaaagg

SEQ ID NO: 217984 - RNA, 19 nt, Artificial Sequence
  Description of Artificial Sequence: Synthetic oligonucleotide
aacauacccaucuucgggu

SEQ ID NO: 217985 - RNA, 19 nt, Artificial Sequence
  Description of Artificial Sequence: Synthetic oligonucleotide
uuuccguuaaguuguagga

SEQ ID NO: 217986 - RNA, 19 nt, Artificial Sequence
  Description of Artificial Sequence: Synthetic oligonucleotide
aauacuggcucaucugugu

SEQ ID NO: 217987 - RNA, 19 nt, Artificial Sequence
  Description of Artificial Sequence: Synthetic oligonucleotide
gguuuguuaagacuugugg

SEQ ID NO: 217988 - RNA, 19 nt, Artificial Sequence
  Description of Artificial Sequence: Synthetic oligonucleotide
ugaaaacugauucccguga

SEQ ID NO: 217989 - RNA, 19 nt, Artificial Sequence
  Description of Artificial Sequence: Synthetic oligonucleotide
acuaaacuaacaaugccuc

SEQ ID NO: 217990 - RNA, 19 nt, Artificial Sequence
  Description of Artificial Sequence: Synthetic oligonucleotide
ugugagcucuuuaagcugc

SEQ ID NO: 217991 - RNA, 19 nt, Artificial Sequence
  Description of Artificial Sequence: Synthetic oligonucleotide
aacuaaugauuauagcaaa

SEQ ID NO: 217992 - RNA, 19 nt, Artificial Sequence
  Description of Artificial Sequence: Synthetic oligonucleotide
uuuauuuagaaugccagua

SEQ ID NO: 217993 - RNA, 19 nt, Artificial Sequence
  Description of Artificial Sequence: Synthetic oligonucleotide
aucgugucgaacuucuuuc

SEQ ID NO: 217994 - RNA, 19 nt, Artificial Sequence
  Description of Artificial Sequence: Synthetic oligonucleotide
agagugacaacucuaaaua

SEQ ID NO: 217995 - RNA, 19 nt, Artificial Sequence
  Description of Artificial Sequence: Synthetic oligonucleotide
auuaaguuuagagguuccc

SEQ ID NO: 217996 - RNA, 19 nt, Artificial Sequence
  Description of Artificial Sequence: Synthetic oligonucleotide
uguccauaggacaacuggc

SEQ ID NO: 217997 - RNA, 19 nt, Artificial Sequence
  Description of Artificial Sequence: Synthetic oligonucleotide
ucugauugaguccuuucca

SEQ ID NO: 217998 - RNA, 19 nt, Artificial Sequence
  Description of Artificial Sequence: Synthetic oligonucleotide
uuagaaugccaguauucag

SEQ ID NO: 217999 - RNA, 19 nt, Artificial Sequence
  Description of Artificial Sequence: Synthetic oligonucleotide
ucuaaaacuaaugauuaua

SEQ ID NO: 218000 - RNA, 19 nt, Artificial Sequence
  Description of Artificial Sequence: Synthetic oligonucleotide
aaaagggaauucaugauaa

SEQ ID NO: 218001 - RNA, 19 nt, Artificial Sequence
  Description of Artificial Sequence: Synthetic oligonucleotide
ucccuuauaacaucuccag

SEQ ID NO: 218002 - RNA, 19 nt, Artificial Sequence
  Description of Artificial Sequence: Synthetic oligonucleotide
uagaacaaaggaugauggg

SEQ ID NO: 218003 - RNA, 19 nt, Artificial Sequence
  Description of Artificial Sequence: Synthetic oligonucleotide
ucuggguguagauugauau

SEQ ID NO: 218004 - RNA, 19 nt, Artificial Sequence
  Description of Artificial Sequence: Synthetic oligonucleotide
gaguuuaggaauucguuuc

SEQ ID NO: 218005 - RNA, 19 nt, Artificial Sequence
  Description of Artificial Sequence: Synthetic oligonucleotide
ugauugaguccuuuccagg

SEQ ID NO: 218006 - RNA, 19 nt, Artificial Sequence
  Description of Artificial Sequence: Synthetic oligonucleotide
agugacaacucuaaauagg

SEQ ID NO: 218007 - RNA, 19 nt, Artificial Sequence
  Description of Artificial Sequence: Synthetic oligonucleotide
ucucccuuauaacaucucc

SEQ ID NO: 218008 - RNA, 19 nt, Artificial Sequence
  Description of Artificial Sequence: Synthetic oligonucleotide
aguacagagcuacagcucu

SEQ ID NO: 218009 - RNA, 19 nt, Artificial Sequence
  Description of Artificial Sequence: Synthetic oligonucleotide
aauuuacugaccuguggaa

SEQ ID NO: 218010 - RNA, 19 nt, Artificial Sequence
  Description of Artificial Sequence: Synthetic oligonucleotide
ucuucgggugguuaccucg

SEQ ID NO: 218011 - RNA, 19 nt, Artificial Sequence
  Description of Artificial Sequence: Synthetic oligonucleotide
uuguuuauuuuccucucga

SEQ ID NO: 218012 - RNA, 19 nt, Artificial Sequence
  Description of Artificial Sequence: Synthetic oligonucleotide
uuuacugaccuguggaagu

SEQ ID NO: 218013 - RNA, 19 nt, Artificial Sequence
  Description of Artificial Sequence: Synthetic oligonucleotide
uccuuagacucacucaccc

SEQ ID NO: 218014 - RNA, 19 nt, Artificial Sequence
  Description of Artificial Sequence: Synthetic oligonucleotide
ucugccgaacuuuucaucu

SEQ ID NO: 218015 - RNA, 19 nt, Artificial Sequence
  Description of Artificial Sequence: Synthetic oligonucleotide
uuauccuuagacucacuca

SEQ ID NO: 218016 - RNA, 19 nt, Artificial Sequence
  Description of Artificial Sequence: Synthetic oligonucleotide
gagugacaacucuaaauag

SEQ ID NO: 218017 - RNA, 19 nt, Artificial Sequence
  Description of Artificial Sequence: Synthetic oligonucleotide
cacggaaaagcccuggagg

SEQ ID NO: 218018 - RNA, 19 nt, Artificial Sequence
  Description of Artificial Sequence: Synthetic oligonucleotide
aaacugauucccgugacga

SEQ ID NO: 218019 - RNA, 19 nt, Artificial Sequence
  Description of Artificial Sequence: Synthetic oligonucleotide
uuccucuaaauuuacugac

SEQ ID NO: 218020 - RNA, 19 nt, Artificial Sequence
  Description of Artificial Sequence: Synthetic oligonucleotide
uuaaaagggaauucaugau

SEQ ID NO: 218021 - RNA, 19 nt, Artificial Sequence
  Description of Artificial Sequence: Synthetic oligonucleotide
ugggacuuuauuauaguau

SEQ ID NO: 218022 - RNA, 19 nt, Artificial Sequence
  Description of Artificial Sequence: Synthetic oligonucleotide
uccucuaaauuuacugacc

SEQ ID NO: 218023 - RNA, 19 nt, Artificial Sequence
  Description of Artificial Sequence: Synthetic oligonucleotide
uuauugcaaaacccuaacu

SEQ ID NO: 218024 - RNA, 19 nt, Artificial Sequence
  Description of Artificial Sequence: Synthetic oligonucleotide
aaguuguaggaguuuauuu

SEQ ID NO: 218025 - RNA, 19 nt, Artificial Sequence
  Description of Artificial Sequence: Synthetic oligonucleotide
uccguuaaguuguaggagu

SEQ ID NO: 218026 - RNA, 19 nt, Artificial Sequence
  Description of Artificial Sequence: Synthetic oligonucleotide
uagagugacaacucuaaau

SEQ ID NO: 218027 - RNA, 19 nt, Artificial Sequence
  Description of Artificial Sequence: Synthetic oligonucleotide
aguuaaucccuccaugaga

SEQ ID NO: 218028 - RNA, 19 nt, Artificial Sequence
  Description of Artificial Sequence: Synthetic oligonucleotide
aacacugccgaugucauaa

SEQ ID NO: 218029 - RNA, 19 nt, Artificial Sequence
  Description of Artificial Sequence: Synthetic oligonucleotide
ucuuuaagaucaagaagaa

SEQ ID NO: 218030 - RNA, 19 nt, Artificial Sequence
  Description of Artificial Sequence: Synthetic oligonucleotide
ugacaaauucccauccacu

SEQ ID NO: 218031 - RNA, 19 nt, Artificial Sequence
  Description of Artificial Sequence: Synthetic oligonucleotide
ugacgauagagugacaacu

SEQ ID NO: 218032 - RNA, 19 nt, Artificial Sequence
  Description of Artificial Sequence: Synthetic oligonucleotide
gguuacauagaauugcaac

SEQ ID NO: 218033 - RNA, 19 nt, Artificial Sequence
  Description of Artificial Sequence: Synthetic oligonucleotide
caccaagccacugugaucc

SEQ ID NO: 218034 - RNA, 19 nt, Artificial Sequence
  Description of Artificial Sequence: Synthetic oligonucleotide
caacauacccaucuucggg

SEQ ID NO: 218035 - RNA, 19 nt, Artificial Sequence
  Description of Artificial Sequence: Synthetic oligonucleotide
gauguugguuuguuaagac

SEQ ID NO: 218036 - RNA, 19 nt, Artificial Sequence
  Description of Artificial Sequence: Synthetic oligonucleotide
ucauagaaccccuggcaag

SEQ ID NO: 218037 - RNA, 19 nt, Artificial Sequence
  Description of Artificial Sequence: Synthetic oligonucleotide
aaacuaacaaugccucuaa

SEQ ID NO: 218038 - RNA, 19 nt, Artificial Sequence
  Description of Artificial Sequence: Synthetic oligonucleotide
augauuauccaugacacaa

SEQ ID NO: 218039 - RNA, 19 nt, Artificial Sequence
  Description of Artificial Sequence: Synthetic oligonucleotide
guguagauugauauguucc

SEQ ID NO: 218040 - RNA, 19 nt, Artificial Sequence
  Description of Artificial Sequence: Synthetic oligonucleotide
acaacucuaaauaggugcg

SEQ ID NO: 218041 - RNA, 19 nt, Artificial Sequence
  Description of Artificial Sequence: Synthetic oligonucleotide
augcuuagaacaaaggaug

SEQ ID NO: 218042 - RNA, 19 nt, Artificial Sequence
  Description of Artificial Sequence: Synthetic oligonucleotide
gauucgagaacugggauuc

SEQ ID NO: 218043 - RNA, 19 nt, Artificial Sequence
  Description of Artificial Sequence: Synthetic oligonucleotide
aaaacccauauucuuucaa

SEQ ID NO: 218044 - RNA, 19 nt, Artificial Sequence
  Description of Artificial Sequence: Synthetic oligonucleotide
ugcugacaaauucccaucc

SEQ ID NO: 218045 - RNA, 19 nt, Artificial Sequence
  Description of Artificial Sequence: Synthetic oligonucleotide
uucccgauauuucggaucu

SEQ ID NO: 218046 - RNA, 19 nt, Artificial Sequence
  Description of Artificial Sequence: Synthetic oligonucleotide
ugaauaggugucugaacca

SEQ ID NO: 218047 - RNA, 19 nt, Artificial Sequence
  Description of Artificial Sequence: Synthetic oligonucleotide
cauacaguagcugagagaa

SEQ ID NO: 218048 - RNA, 19 nt, Artificial Sequence
  Description of Artificial Sequence: Synthetic oligonucleotide
gguacauucucaucagggg

SEQ ID NO: 218049 - RNA, 19 nt, Artificial Sequence
  Description of Artificial Sequence: Synthetic oligonucleotide
ugcuuagaacaaaggauga

SEQ ID NO: 218050 - RNA, 19 nt, Artificial Sequence
  Description of Artificial Sequence: Synthetic oligonucleotide
augccucuaaaacuaauga

SEQ ID NO: 218051 - RNA, 19 nt, Artificial Sequence
  Description of Artificial Sequence: Synthetic oligonucleotide
augaaaacugauucccgug

SEQ ID NO: 218052 - RNA, 19 nt, Artificial Sequence
  Description of Artificial Sequence: Synthetic oligonucleotide
accuacaguugauuaaaag

SEQ ID NO: 218053 - RNA, 19 nt, Artificial Sequence
  Description of Artificial Sequence: Synthetic oligonucleotide
guuauugcaaaacccuaac

SEQ ID NO: 218054 - RNA, 19 nt, Artificial Sequence
  Description of Artificial Sequence: Synthetic oligonucleotide
uaaugauguccucaggcau

SEQ ID NO: 218055 - RNA, 19 nt, Artificial Sequence
  Description of Artificial Sequence: Synthetic oligonucleotide
gaaguacagagcuacagcu

SEQ ID NO: 218056 - RNA, 19 nt, Artificial Sequence
  Description of Artificial Sequence: Synthetic oligonucleotide
uuguacguacggaacaccu

SEQ ID NO: 218057 - RNA, 19 nt, Artificial Sequence
  Description of Artificial Sequence: Synthetic oligonucleotide
uaguaucugauugaguccu

SEQ ID NO: 218058 - RNA, 19 nt, Artificial Sequence
  Description of Artificial Sequence: Synthetic oligonucleotide
cagagcaagcuuaucaaug

SEQ ID NO: 218059 - RNA, 19 nt, Artificial Sequence
  Description of Artificial Sequence: Synthetic oligonucleotide
auuggcccgauuguaagac

SEQ ID NO: 218060 - RNA, 19 nt, Artificial Sequence
  Description of Artificial Sequence: Synthetic oligonucleotide
ucccuuuucauagaacccc

SEQ ID NO: 218061 - RNA, 19 nt, Artificial Sequence
  Description of Artificial Sequence: Synthetic oligonucleotide
agcucgauuggcccgauug

SEQ ID NO: 218062 - RNA, 19 nt, Artificial Sequence
  Description of Artificial Sequence: Synthetic oligonucleotide
aaguuuaaugaaaacugau

SEQ ID NO: 218063 - RNA, 19 nt, Artificial Sequence
  Description of Artificial Sequence: Synthetic oligonucleotide
guacguacggaacaccuug

SEQ ID NO: 218064 - RNA, 19 nt, Artificial Sequence
  Description of Artificial Sequence: Synthetic oligonucleotide
ucucuaugauuauccauga

SEQ ID NO: 218065 - RNA, 19 nt, Artificial Sequence
  Description of Artificial Sequence: Synthetic oligonucleotide
cugauugaguccuuuccag

SEQ ID NO: 218066 - RNA, 19 nt, Artificial Sequence
  Description of Artificial Sequence: Synthetic oligonucleotide
uucccgugacgauagagug

SEQ ID NO: 218067 - RNA, 19 nt, Artificial Sequence
  Description of Artificial Sequence: Synthetic oligonucleotide
uggcccgauuguaagacag

SEQ ID NO: 218068 - RNA, 19 nt, Artificial Sequence
  Description of Artificial Sequence: Synthetic oligonucleotide
ugaccauccaauucugggu

SEQ ID NO: 218069 - RNA, 19 nt, Artificial Sequence
  Description of Artificial Sequence: Synthetic oligonucleotide
guuuagagguucccaaggc

SEQ ID NO: 218070 - RNA, 19 nt, Artificial Sequence
  Description of Artificial Sequence: Synthetic oligonucleotide
auuuacugaccuguggaag

SEQ ID NO: 218071 - RNA, 19 nt, Artificial Sequence
  Description of Artificial Sequence: Synthetic oligonucleotide
aagcuacacgaucuuuaag

SEQ ID NO: 218072 - RNA, 19 nt, Artificial Sequence
  Description of Artificial Sequence: Synthetic oligonucleotide
aacucuaaauaggugcgcu

SEQ ID NO: 218073 - RNA, 19 nt, Artificial Sequence
  Description of Artificial Sequence: Synthetic oligonucleotide
uggugguuacauagaauug

SEQ ID NO: 218074 - RNA, 19 nt, Artificial Sequence
  Description of Artificial Sequence: Synthetic oligonucleotide
aaguacagagcuacagcuc

SEQ ID NO: 218075 - RNA, 19 nt, Artificial Sequence
  Description of Artificial Sequence: Synthetic oligonucleotide
agaaugcuuagaacaaagg

SEQ ID NO: 218076 - RNA, 19 nt, Artificial Sequence
  Description of Artificial Sequence: Synthetic oligonucleotide
ugugaauaggugucugaac

SEQ ID NO: 218077 - RNA, 19 nt, Artificial Sequence
  Description of Artificial Sequence: Synthetic oligonucleotide
aguuuaggaauucguuucu

SEQ ID NO: 218078 - RNA, 19 nt, Artificial Sequence
  Description of Artificial Sequence: Synthetic oligonucleotide
auuguacguacggaacacc

SEQ ID NO: 218079 - RNA, 19 nt, Artificial Sequence
  Description of Artificial Sequence: Synthetic oligonucleotide
cuuguuaucgugucgaacu

SEQ ID NO: 218080 - RNA, 19 nt, Artificial Sequence
  Description of Artificial Sequence: Synthetic oligonucleotide
ucggccacggaaaagcccu

SEQ ID NO: 218081 - RNA, 19 nt, Artificial Sequence
  Description of Artificial Sequence: Synthetic oligonucleotide
uacguacggaacaccuugg

SEQ ID NO: 218082 - RNA, 19 nt, Artificial Sequence
  Description of Artificial Sequence: Synthetic oligonucleotide
caaguuuaaugaaaacuga

SEQ ID NO: 218083 - RNA, 19 nt, Artificial Sequence
  Description of Artificial Sequence: Synthetic oligonucleotide
aaauaggugcgcuggguuu

SEQ ID NO: 218084 - RNA, 19 nt, Artificial Sequence
  Description of Artificial Sequence: Synthetic oligonucleotide
ucuccauaaauaguuguaa

SEQ ID NO: 218085 - RNA, 19 nt, Artificial Sequence
  Description of Artificial Sequence: Synthetic oligonucleotide
ugauuauccaugacacaaa

SEQ ID NO: 218086 - RNA, 19 nt, Artificial Sequence
  Description of Artificial Sequence: Synthetic oligonucleotide
uuaggaauucguuucuauu

SEQ ID NO: 218087 - RNA, 19 nt, Artificial Sequence
  Description of Artificial Sequence: Synthetic oligonucleotide
uaaccuacaguugauuaaa

SEQ ID NO: 218088 - RNA, 19 nt, Artificial Sequence
  Description of Artificial Sequence: Synthetic oligonucleotide
ccgauuguaagacagaauc

SEQ ID NO: 218089 - RNA, 19 nt, Artificial Sequence
  Description of Artificial Sequence: Synthetic oligonucleotide
ugguuuguuaagacuugug

SEQ ID NO: 218090 - RNA, 19 nt, Artificial Sequence
  Description of Artificial Sequence: Synthetic oligonucleotide
agcuagaauuuugauaucu

SEQ ID NO: 218091 - RNA, 19 nt, Artificial Sequence
  Description of Artificial Sequence: Synthetic oligonucleotide
cugauucccgugacgauag

SEQ ID NO: 218092 - RNA, 19 nt, Artificial Sequence
  Description of Artificial Sequence: Synthetic oligonucleotide
uaaauaggugcgcuggguu

SEQ ID NO: 218093 - RNA, 19 nt, Artificial Sequence
  Description of Artificial Sequence: Synthetic oligonucleotide
ggcucuaucuugaaguugg

SEQ ID NO: 218094 - RNA, 19 nt, Artificial Sequence
  Description of Artificial Sequence: Synthetic oligonucleotide
aacaaaggaugaugggaaa

SEQ ID NO: 218095 - RNA, 19 nt, Artificial Sequence
  Description of Artificial Sequence: Synthetic oligonucleotide
uuugcuuagguugguaauc

SEQ ID NO: 218096 - RNA, 19 nt, Artificial Sequence
  Description of Artificial Sequence: Synthetic oligonucleotide
uggucaaaacucguagucc

SEQ ID NO: 218097 - RNA, 19 nt, Artificial Sequence
  Description of Artificial Sequence: Synthetic oligonucleotide
gagagaauccaaacauugc

SEQ ID NO: 218098 - RNA, 19 nt, Artificial Sequence
  Description of Artificial Sequence: Synthetic oligonucleotide
guugauaaugauguccuca

SEQ ID NO: 218099 - RNA, 19 nt, Artificial Sequence
  Description of Artificial Sequence: Synthetic oligonucleotide
cuggucaaaacucguaguc

SEQ ID NO: 218100 - RNA, 19 nt, Artificial Sequence
  Description of Artificial Sequence: Synthetic oligonucleotide
uggcaauccgcucucuaug

SEQ ID NO: 218101 - RNA, 19 nt, Artificial Sequence
  Description of Artificial Sequence: Synthetic oligonucleotide
acguacggaacaccuuggc

SEQ ID NO: 218102 - RNA, 19 nt, Artificial Sequence
  Description of Artificial Sequence: Synthetic oligonucleotide
uaucgugucgaacuucuuu

SEQ ID NO: 218103 - RNA, 19 nt, Artificial Sequence
  Description of Artificial Sequence: Synthetic oligonucleotide
uguaggaguuuauuuuaaa

SEQ ID NO: 218104 - RNA, 19 nt, Artificial Sequence
  Description of Artificial Sequence: Synthetic oligonucleotide
uuccguuaaguuguaggag

SEQ ID NO: 218105 - RNA, 19 nt, Artificial Sequence
  Description of Artificial Sequence: Synthetic oligonucleotide
ugguuucagucacugauua

SEQ ID NO: 218106 - RNA, 19 nt, Artificial Sequence
  Description of Artificial Sequence: Synthetic oligonucleotide
uugauucgagaacugggau

SEQ ID NO: 218107 - RNA, 19 nt, Artificial Sequence
  Description of Artificial Sequence: Synthetic oligonucleotide
ugccucuaaaacuaaugau

SEQ ID NO: 218108 - RNA, 19 nt, Artificial Sequence
  Description of Artificial Sequence: Synthetic oligonucleotide
gauagagugacaacucuaa

SEQ ID NO: 218109 - RNA, 19 nt, Artificial Sequence
  Description of Artificial Sequence: Synthetic oligonucleotide
aguugauuaaaagggaauu

SEQ ID NO: 218110 - RNA, 19 nt, Artificial Sequence
  Description of Artificial Sequence: Synthetic oligonucleotide
aagucaaauuccacgacau

SEQ ID NO: 218111 - RNA, 19 nt, Artificial Sequence
  Description of Artificial Sequence: Synthetic oligonucleotide
aaaagcccuaaaaucuuga

SEQ ID NO: 218112 - RNA, 19 nt, Artificial Sequence
  Description of Artificial Sequence: Synthetic oligonucleotide
uuguaggaguuuauuuuaa

SEQ ID NO: 218113 - RNA, 19 nt, Artificial Sequence
  Description of Artificial Sequence: Synthetic oligonucleotide
ucauaucaauggcccaagc

SEQ ID NO: 218114 - RNA, 19 nt, Artificial Sequence
  Description of Artificial Sequence: Synthetic oligonucleotide
auuugcuuagguugguaau

SEQ ID NO: 218115 - RNA, 19 nt, Artificial Sequence
  Description of Artificial Sequence: Synthetic oligonucleotide
auguauuuaauagaaccuu

SEQ ID NO: 218116 - RNA, 19 nt, Artificial Sequence
  Description of Artificial Sequence: Synthetic oligonucleotide
uggaggcucuaucuugaag

SEQ ID NO: 218117 - RNA, 19 nt, Artificial Sequence
  Description of Artificial Sequence: Synthetic oligonucleotide
uuuugauaucugaaauauu

SEQ ID NO: 218118 - RNA, 19 nt, Artificial Sequence
  Description of Artificial Sequence: Synthetic oligonucleotide
guaaccuuguuaucguguc

SEQ ID NO: 218119 - RNA, 19 nt, Artificial Sequence
  Description of Artificial Sequence: Synthetic oligonucleotide
cauaucaauggcccaagca

SEQ ID NO: 218120 - RNA, 19 nt, Artificial Sequence
  Description of Artificial Sequence: Synthetic oligonucleotide
aguuuaaugaaaacugauu

SEQ ID NO: 218121 - RNA, 19 nt, Artificial Sequence
  Description of Artificial Sequence: Synthetic oligonucleotide
uccauaggacaacuggcuc

SEQ ID NO: 218122 - RNA, 19 nt, Artificial Sequence
  Description of Artificial Sequence: Synthetic oligonucleotide
acgaucuuuaagaucaaga

SEQ ID NO: 218123 - RNA, 19 nt, Artificial Sequence
  Description of Artificial Sequence: Synthetic oligonucleotide
acgauagagugacaacucu

SEQ ID NO: 218124 - RNA, 19 nt, Artificial Sequence
  Description of Artificial Sequence: Synthetic oligonucleotide
aaagggaauucaugauaaa

SEQ ID NO: 218125 - RNA, 19 nt, Artificial Sequence
  Description of Artificial Sequence: Synthetic oligonucleotide
uuuugcaaagauguugguu

SEQ ID NO: 218126 - RNA, 19 nt, Artificial Sequence
  Description of Artificial Sequence: Synthetic oligonucleotide
guuguaggaguuuauuuua

SEQ ID NO: 218127 - RNA, 19 nt, Artificial Sequence
  Description of Artificial Sequence: Synthetic oligonucleotide
acucuaaauaggugcgcug

SEQ ID NO: 218128 - RNA, 19 nt, Artificial Sequence
  Description of Artificial Sequence: Synthetic oligonucleotide
ugauucgagaacugggauu

SEQ ID NO: 218129 - RNA, 19 nt, Artificial Sequence
  Description of Artificial Sequence: Synthetic oligonucleotide
gauucccgugacgauagag

SEQ ID NO: 218130 - RNA, 19 nt, Artificial Sequence
  Description of Artificial Sequence: Synthetic oligonucleotide
aauccgcucucuaugauua

SEQ ID NO: 218131 - RNA, 19 nt, Artificial Sequence
  Description of Artificial Sequence: Synthetic oligonucleotide
caggaaauauuuucucauc

SEQ ID NO: 218132 - RNA, 19 nt, Artificial Sequence
  Description of Artificial Sequence: Synthetic oligonucleotide
cucuaaauuuacugaccug

SEQ ID NO: 218133 - RNA, 19 nt, Artificial Sequence
  Description of Artificial Sequence: Synthetic oligonucleotide
cacuaaacuaacaaugccu

SEQ ID NO: 218134 - RNA, 19 nt, Artificial Sequence
  Description of Artificial Sequence: Synthetic oligonucleotide
gaaguuggcaauccgcucu

SEQ ID NO: 218135 - RNA, 19 nt, Artificial Sequence
  Description of Artificial Sequence: Synthetic oligonucleotide
cucaccuuugauucgagaa

SEQ ID NO: 218136 - RNA, 19 nt, Artificial Sequence
  Description of Artificial Sequence: Synthetic oligonucleotide
gaugucauaacugcuucaa

SEQ ID NO: 218137 - RNA, 19 nt, Artificial Sequence
  Description of Artificial Sequence: Synthetic oligonucleotide
gacuagccaaguaaccuug

SEQ ID NO: 218138 - RNA, 19 nt, Artificial Sequence
  Description of Artificial Sequence: Synthetic oligonucleotide
ucgugucgaacuucuuucc

SEQ ID NO: 218139 - RNA, 19 nt, Artificial Sequence
  Description of Artificial Sequence: Synthetic oligonucleotide
agcuacagcucucugccga

SEQ ID NO: 218140 - RNA, 19 nt, Artificial Sequence
  Description of Artificial Sequence: Synthetic oligonucleotide
aucuuagacugcaaguuca

SEQ ID NO: 218141 - RNA, 19 nt, Artificial Sequence
  Description of Artificial Sequence: Synthetic oligonucleotide
cuacacgaucuuuaagauc

SEQ ID NO: 218142 - RNA, 19 nt, Artificial Sequence
  Description of Artificial Sequence: Synthetic oligonucleotide
ucuuagacugcaaguucau

SEQ ID NO: 218143 - RNA, 19 nt, Artificial Sequence
  Description of Artificial Sequence: Synthetic oligonucleotide
acaccaagccacugugauc

SEQ ID NO: 218144 - RNA, 19 nt, Artificial Sequence
  Description of Artificial Sequence: Synthetic oligonucleotide
uuacaccaagccacuguga

SEQ ID NO: 218145 - RNA, 19 nt, Artificial Sequence
  Description of Artificial Sequence: Synthetic oligonucleotide
caucucuuuggacuuccag

SEQ ID NO: 218146 - RNA, 19 nt, Artificial Sequence
  Description of Artificial Sequence: Synthetic oligonucleotide
uacggaacaccuuggcagu

SEQ ID NO: 218147 - RNA, 19 nt, Artificial Sequence
  Description of Artificial Sequence: Synthetic oligonucleotide
ugguuacauagaauugcaa

SEQ ID NO: 218148 - RNA, 19 nt, Artificial Sequence
  Description of Artificial Sequence: Synthetic oligonucleotide
agacuuguggccucucccu

SEQ ID NO: 218149 - RNA, 19 nt, Artificial Sequence
  Description of Artificial Sequence: Synthetic oligonucleotide
uaaguuguaggaguuuauu

SEQ ID NO: 218150 - RNA, 19 nt, Artificial Sequence
  Description of Artificial Sequence: Synthetic oligonucleotide
cuuccgagccucugauugg

SEQ ID NO: 218151 - RNA, 19 nt, Artificial Sequence
  Description of Artificial Sequence: Synthetic oligonucleotide
aguuauugcaaaacccuaa

SEQ ID NO: 218152 - RNA, 19 nt, Artificial Sequence
  Description of Artificial Sequence: Synthetic oligonucleotide
gacgauagagugacaacuc

SEQ ID NO: 218153 - RNA, 19 nt, Artificial Sequence
  Description of Artificial Sequence: Synthetic oligonucleotide
uagagguucccaaggcuau

SEQ ID NO: 218154 - RNA, 19 nt, Artificial Sequence
  Description of Artificial Sequence: Synthetic oligonucleotide
aucuuucaaaugaaagacu

SEQ ID NO: 218155 - RNA, 19 nt, Artificial Sequence
  Description of Artificial Sequence: Synthetic oligonucleotide
acauacccaucuucgggug

SEQ ID NO: 218156 - RNA, 19 nt, Artificial Sequence
  Description of Artificial Sequence: Synthetic oligonucleotide
gucggucauaucaauggcc

SEQ ID NO: 218157 - RNA, 19 nt, Artificial Sequence
  Description of Artificial Sequence: Synthetic oligonucleotide
caaaggucuuugguggugc

SEQ ID NO: 218158 - RNA, 19 nt, Artificial Sequence
  Description of Artificial Sequence: Synthetic oligonucleotide
cuggguguagauugauaug

SEQ ID NO: 218159 - RNA, 19 nt, Artificial Sequence
  Description of Artificial Sequence: Synthetic oligonucleotide
accuguggaaguuuugaua

SEQ ID NO: 218160 - RNA, 19 nt, Artificial Sequence
  Description of Artificial Sequence: Synthetic oligonucleotide
auaauuaaguuuagagguu

SEQ ID NO: 218161 - RNA, 19 nt, Artificial Sequence
  Description of Artificial Sequence: Synthetic oligonucleotide
auagagugacaacucuaaa

SEQ ID NO: 218162 - RNA, 19 nt, Artificial Sequence
  Description of Artificial Sequence: Synthetic oligonucleotide
cauacccaucuucgggugg

SEQ ID NO: 218163 - RNA, 19 nt, Artificial Sequence
  Description of Artificial Sequence: Synthetic oligonucleotide
uugguuuguuaagacuugu

SEQ ID NO: 218164 - RNA, 19 nt, Artificial Sequence
  Description of Artificial Sequence: Synthetic oligonucleotide
aauaggugcgcuggguuuu

SEQ ID NO: 218165 - RNA, 19 nt, Artificial Sequence
  Description of Artificial Sequence: Synthetic oligonucleotide
acuaaugauuauagcaaaa

SEQ ID NO: 218166 - RNA, 19 nt, Artificial Sequence
  Description of Artificial Sequence: Synthetic oligonucleotide
uguacguacggaacaccuu

SEQ ID NO: 218167 - RNA, 19 nt, Artificial Sequence
  Description of Artificial Sequence: Synthetic oligonucleotide
gauuggcccgauuguaaga

SEQ ID NO: 218168 - RNA, 19 nt, Artificial Sequence
  Description of Artificial Sequence: Synthetic oligonucleotide
guaggaguuuauuuuaaau

SEQ ID NO: 218169 - RNA, 19 nt, Artificial Sequence
  Description of Artificial Sequence: Synthetic oligonucleotide
aacugauucccgugacgau

SEQ ID NO: 218170 - RNA, 19 nt, Artificial Sequence
  Description of Artificial Sequence: Synthetic oligonucleotide
uuguuaucgugucgaacuu

SEQ ID NO: 218171 - RNA, 19 nt, Artificial Sequence
  Description of Artificial Sequence: Synthetic oligonucleotide
ucgggugguuaccucggcc

SEQ ID NO: 218172 - RNA, 19 nt, Artificial Sequence
  Description of Artificial Sequence: Synthetic oligonucleotide
ucccgugacgauagaguga

SEQ ID NO: 218173 - RNA, 19 nt, Artificial Sequence
  Description of Artificial Sequence: Synthetic oligonucleotide
cgcaccaauauaaucagac

SEQ ID NO: 218174 - RNA, 19 nt, Artificial Sequence
  Description of Artificial Sequence: Synthetic oligonucleotide
guaagacagaaucuuugcu

SEQ ID NO: 218175 - RNA, 19 nt, Artificial Sequence
  Description of Artificial Sequence: Synthetic oligonucleotide
auucccgugacgauagagu

SEQ ID NO: 218176 - RNA, 19 nt, Artificial Sequence
  Description of Artificial Sequence: Synthetic oligonucleotide
gcaguuaaucccuccauga

SEQ ID NO: 218177 - RNA, 19 nt, Artificial Sequence
  Description of Artificial Sequence: Synthetic oligonucleotide
acaaaggaugaugggaaaa

SEQ ID NO: 218178 - RNA, 19 nt, Artificial Sequence
  Description of Artificial Sequence: Synthetic oligonucleotide
gugacgauagagugacaac

SEQ ID NO: 218179 - RNA, 19 nt, Artificial Sequence
  Description of Artificial Sequence: Synthetic oligonucleotide
gucauaucaauggcccaag

SEQ ID NO: 218180 - RNA, 19 nt, Artificial Sequence
  Description of Artificial Sequence: Synthetic oligonucleotide
ugccgaugucauaacugcu

SEQ ID NO: 218181 - RNA, 19 nt, Artificial Sequence
  Description of Artificial Sequence: Synthetic oligonucleotide
ucucugccgaacuuuucau

SEQ ID NO: 218182 - RNA, 19 nt, Artificial Sequence
  Description of Artificial Sequence: Synthetic oligonucleotide
guuaaucccuccaugagau

SEQ ID NO: 218183 - RNA, 19 nt, Artificial Sequence
  Description of Artificial Sequence: Synthetic oligonucleotide
auacuugaggaaagaugag

SEQ ID NO: 218184 - RNA, 19 nt, Artificial Sequence
  Description of Artificial Sequence: Synthetic oligonucleotide
ggcaguuaaucccuccaug

SEQ ID NO: 218185 - RNA, 19 nt, Artificial Sequence
  Description of Artificial Sequence: Synthetic oligonucleotide
caacucuaaauaggugcgc

SEQ ID NO: 218186 - RNA, 19 nt, Artificial Sequence
  Description of Artificial Sequence: Synthetic oligonucleotide
aguuguccauaggacaacu

SEQ ID NO: 218187 - RNA, 19 nt, Artificial Sequence
  Description of Artificial Sequence: Synthetic oligonucleotide
gcuguagcgugauggaggc

SEQ ID NO: 218188 - RNA, 19 nt, Artificial Sequence
  Description of Artificial Sequence: Synthetic oligonucleotide
aguauucagccgaucaaaa

SEQ ID NO: 218189 - RNA, 19 nt, Artificial Sequence
  Description of Artificial Sequence: Synthetic oligonucleotide
auaggugucugaaccaaaa

SEQ ID NO: 218190 - RNA, 19 nt, Artificial Sequence
  Description of Artificial Sequence: Synthetic oligonucleotide
uuaccucggccacggaaaa

SEQ ID NO: 218191 - RNA, 19 nt, Artificial Sequence
  Description of Artificial Sequence: Synthetic oligonucleotide
acuuuucaggucccuucga

SEQ ID NO: 218192 - RNA, 19 nt, Artificial Sequence
  Description of Artificial Sequence: Synthetic oligonucleotide
uccagucuucccgauauuu

SEQ ID NO: 218193 - RNA, 19 nt, Artificial Sequence
  Description of Artificial Sequence: Synthetic oligonucleotide
gagcuacagcucucugccg

SEQ ID NO: 218194 - RNA, 19 nt, Artificial Sequence
  Description of Artificial Sequence: Synthetic oligonucleotide
cauagaaccccuggcaaga

SEQ ID NO: 218195 - RNA, 19 nt, Artificial Sequence
  Description of Artificial Sequence: Synthetic oligonucleotide
acugauucccgugacgaua

SEQ ID NO: 218196 - RNA, 19 nt, Artificial Sequence
  Description of Artificial Sequence: Synthetic oligonucleotide
ggcaagacuggucaaaacu

SEQ ID NO: 218197 - RNA, 19 nt, Artificial Sequence
  Description of Artificial Sequence: Synthetic oligonucleotide
uggcaagacuggucaaaac

SEQ ID NO: 218198 - RNA, 19 nt, Artificial Sequence
  Description of Artificial Sequence: Synthetic oligonucleotide
ucuucccgauauuucggau

SEQ ID NO: 218199 - RNA, 19 nt, Artificial Sequence
  Description of Artificial Sequence: Synthetic oligonucleotide
cucugccgaacuuuucauc

SEQ ID NO: 218200 - RNA, 19 nt, Artificial Sequence
  Description of Artificial Sequence: Synthetic oligonucleotide
aucaagaagaaggcuuaaa

SEQ ID NO: 218201 - RNA, 19 nt, Artificial Sequence
  Description of Artificial Sequence: Synthetic oligonucleotide
ccgcucucuaugauuaucc

SEQ ID NO: 218202 - RNA, 19 nt, Artificial Sequence
  Description of Artificial Sequence: Synthetic oligonucleotide
ccuuugauucgagaacugg

SEQ ID NO: 218203 - RNA, 19 nt, Artificial Sequence
  Description of Artificial Sequence: Synthetic oligonucleotide
guuaccucggccacggaaa

SEQ ID NO: 218204 - RNA, 19 nt, Artificial Sequence
  Description of Artificial Sequence: Synthetic oligonucleotide
augacacaaaacccauauu

SEQ ID NO: 218205 - RNA, 19 nt, Artificial Sequence
  Description of Artificial Sequence: Synthetic oligonucleotide
caagcuuaucaaugaagua

SEQ ID NO: 218206 - RNA, 19 nt, Artificial Sequence
  Description of Artificial Sequence: Synthetic oligonucleotide
gccaguauucagccgauca

SEQ ID NO: 218207 - RNA, 19 nt, Artificial Sequence
  Description of Artificial Sequence: Synthetic oligonucleotide
guuaucgugucgaacuucu

SEQ ID NO: 218208 - RNA, 19 nt, Artificial Sequence
  Description of Artificial Sequence: Synthetic oligonucleotide
cuaucuugaaguuggcaau

SEQ ID NO: 218209 - RNA, 19 nt, Artificial Sequence
  Description of Artificial Sequence: Synthetic oligonucleotide
uuggcccgauuguaagaca

SEQ ID NO: 218210 - RNA, 19 nt, Artificial Sequence
  Description of Artificial Sequence: Synthetic oligonucleotide
uaguccucgucggucauau

SEQ ID NO: 218211 - RNA, 19 nt, Artificial Sequence
  Description of Artificial Sequence: Synthetic oligonucleotide
cugggacuuuauuauagua

SEQ ID NO: 218212 - RNA, 19 nt, Artificial Sequence
  Description of Artificial Sequence: Synthetic oligonucleotide
guuguccauaggacaacug

SEQ ID NO: 218213 - RNA, 19 nt, Artificial Sequence
  Description of Artificial Sequence: Synthetic oligonucleotide
gcugugagcucuuuaagcu

SEQ ID NO: 218214 - RNA, 19 nt, Artificial Sequence
  Description of Artificial Sequence: Synthetic oligonucleotide
gguuacaagaaugcuuaga

SEQ ID NO: 218215 - RNA, 19 nt, Artificial Sequence
  Description of Artificial Sequence: Synthetic oligonucleotide
ggaggagaaggaaccuugg

SEQ ID NO: 218216 - RNA, 19 nt, Artificial Sequence
  Description of Artificial Sequence: Synthetic oligonucleotide
uuccgagccucugauuggu

SEQ ID NO: 218217 - RNA, 19 nt, Artificial Sequence
  Description of Artificial Sequence: Synthetic oligonucleotide
auacccaucuucggguggu

SEQ ID NO: 218218 - RNA, 19 nt, Artificial Sequence
  Description of Artificial Sequence: Synthetic oligonucleotide
uccgcucucuaugauuauc

SEQ ID NO: 218219 - RNA, 19 nt, Artificial Sequence
  Description of Artificial Sequence: Synthetic oligonucleotide
cuaaacuaacaaugccucu

SEQ ID NO: 218220 - RNA, 19 nt, Artificial Sequence
  Description of Artificial Sequence: Synthetic oligonucleotide
gggaauggacucugcacac

SEQ ID NO: 218221 - RNA, 19 nt, Artificial Sequence
  Description of Artificial Sequence: Synthetic oligonucleotide
aggcucuaucuugaaguug

SEQ ID NO: 218222 - RNA, 19 nt, Artificial Sequence
  Description of Artificial Sequence: Synthetic oligonucleotide
ccaaccccaagcuacacga

SEQ ID NO: 218223 - RNA, 19 nt, Artificial Sequence
  Description of Artificial Sequence: Synthetic oligonucleotide
cgaucuuuaagaucaagaa

SEQ ID NO: 218224 - RNA, 19 nt, Artificial Sequence
  Description of Artificial Sequence: Synthetic oligonucleotide
cucguaguccucgucgguc

SEQ ID NO: 218225 - RNA, 19 nt, Artificial Sequence
  Description of Artificial Sequence: Synthetic oligonucleotide
caguauucagccgaucaaa

SEQ ID NO: 218226 - RNA, 19 nt, Artificial Sequence
  Description of Artificial Sequence: Synthetic oligonucleotide
ggaguuuaggaauucguuu

SEQ ID NO: 218227 - RNA, 19 nt, Artificial Sequence
  Description of Artificial Sequence: Synthetic oligonucleotide
cugugaauaggugucugaa

SEQ ID NO: 218228 - RNA, 19 nt, Artificial Sequence
  Description of Artificial Sequence: Synthetic oligonucleotide
aaccccuggcaagacuggu

SEQ ID NO: 218229 - RNA, 19 nt, Artificial Sequence
  Description of Artificial Sequence: Synthetic oligonucleotide
cugccgaacuuuucaucuc

SEQ ID NO: 218230 - RNA, 19 nt, Artificial Sequence
  Description of Artificial Sequence: Synthetic oligonucleotide
uuaucgugucgaacuucuu

SEQ ID NO: 218231 - RNA, 19 nt, Artificial Sequence
  Description of Artificial Sequence: Synthetic oligonucleotide
gauggaucucuuaaagguu

SEQ ID NO: 218232 - RNA, 19 nt, Artificial Sequence
  Description of Artificial Sequence: Synthetic oligonucleotide
gaucaagaagaaggcuuaa

SEQ ID NO: 218233 - RNA, 19 nt, Artificial Sequence
  Description of Artificial Sequence: Synthetic oligonucleotide
gcuuagguugguaaucaca

SEQ ID NO: 218234 - RNA, 19 nt, Artificial Sequence
  Description of Artificial Sequence: Synthetic oligonucleotide
ggcaauccgcucucuauga

SEQ ID NO: 218235 - RNA, 19 nt, Artificial Sequence
  Description of Artificial Sequence: Synthetic oligonucleotide
ugauucccgugacgauaga

SEQ ID NO: 218236 - RNA, 19 nt, Artificial Sequence
  Description of Artificial Sequence: Synthetic oligonucleotide
ccauaggacaacuggcuca

SEQ ID NO: 218237 - RNA, 19 nt, Artificial Sequence
  Description of Artificial Sequence: Synthetic oligonucleotide
cccgugacgauagagugac

SEQ ID NO: 218238 - RNA, 19 nt, Artificial Sequence
  Description of Artificial Sequence: Synthetic oligonucleotide
ccugaccauccaauucugg

SEQ ID NO: 218239 - RNA, 19 nt, Artificial Sequence
  Description of Artificial Sequence: Synthetic oligonucleotide
gucaaaacucguaguccuc

SEQ ID NO: 218240 - RNA, 19 nt, Artificial Sequence
  Description of Artificial Sequence: Synthetic oligonucleotide
gacuuuggcaucagccuua

SEQ ID NO: 218241 - RNA, 19 nt, Artificial Sequence
  Description of Artificial Sequence: Synthetic oligonucleotide
gaaccaaaacacugccgau

SEQ ID NO: 218242 - RNA, 19 nt, Artificial Sequence
  Description of Artificial Sequence: Synthetic oligonucleotide
agacucacucacccuucau

SEQ ID NO: 218243 - RNA, 19 nt, Artificial Sequence
  Description of Artificial Sequence: Synthetic oligonucleotide
aaagcccuggaggcucuau

SEQ ID NO: 218244 - RNA, 19 nt, Artificial Sequence
  Description of Artificial Sequence: Synthetic oligonucleotide
ggugguuaccucggccacg

SEQ ID NO: 218245 - RNA, 19 nt, Artificial Sequence
  Description of Artificial Sequence: Synthetic oligonucleotide
gcugacaaauucccaucca

SEQ ID NO: 218246 - RNA, 19 nt, Artificial Sequence
  Description of Artificial Sequence: Synthetic oligonucleotide
caaaggaugaugggaaaau

SEQ ID NO: 218247 - RNA, 19 nt, Artificial Sequence
  Description of Artificial Sequence: Synthetic oligonucleotide
guuuaggaauucguuucua

SEQ ID NO: 218248 - RNA, 19 nt, Artificial Sequence
  Description of Artificial Sequence: Synthetic oligonucleotide
cagccgccgagcagucucg

SEQ ID NO: 218249 - RNA, 19 nt, Artificial Sequence
  Description of Artificial Sequence: Synthetic oligonucleotide
agacuggucaaaacucgua

SEQ ID NO: 218250 - RNA, 19 nt, Artificial Sequence
  Description of Artificial Sequence: Synthetic oligonucleotide
gccucuaaaacuaaugauu

SEQ ID NO: 218251 - RNA, 19 nt, Artificial Sequence
  Description of Artificial Sequence: Synthetic oligonucleotide
gugucgaacuucuuuccau

SEQ ID NO: 218252 - RNA, 19 nt, Artificial Sequence
  Description of Artificial Sequence: Synthetic oligonucleotide
gaggcucuaucuugaaguu

SEQ ID NO: 218253 - RNA, 19 nt, Artificial Sequence
  Description of Artificial Sequence: Synthetic oligonucleotide
caaggcuauuuguuuauuu

SEQ ID NO: 218254 - RNA, 19 nt, Artificial Sequence
  Description of Artificial Sequence: Synthetic oligonucleotide
cccgauauuucggaucuug

SEQ ID NO: 218255 - RNA, 19 nt, Artificial Sequence
  Description of Artificial Sequence: Synthetic oligonucleotide
cgauuggcccgauuguaag

SEQ ID NO: 218256 - RNA, 19 nt, Artificial Sequence
  Description of Artificial Sequence: Synthetic oligonucleotide
cuaaauaggugcgcugggu

SEQ ID NO: 218257 - RNA, 19 nt, Artificial Sequence
  Description of Artificial Sequence: Synthetic oligonucleotide
gacaacuggcucagcucuc

SEQ ID NO: 218258 - RNA, 19 nt, Artificial Sequence
  Description of Artificial Sequence: Synthetic oligonucleotide
acccguuucucaacuggga

SEQ ID NO: 218259 - RNA, 19 nt, Artificial Sequence
  Description of Artificial Sequence: Synthetic oligonucleotide
ccucuaaauuuacugaccu

SEQ ID NO: 218260 - RNA, 19 nt, Artificial Sequence
  Description of Artificial Sequence: Synthetic oligonucleotide
gcuacacgaucuuuaagau

SEQ ID NO: 218261 - RNA, 19 nt, Artificial Sequence
  Description of Artificial Sequence: Synthetic oligonucleotide
cuggcaagacuggucaaaa

SEQ ID NO: 218262 - RNA, 19 nt, Artificial Sequence
  Description of Artificial Sequence: Synthetic oligonucleotide
gcaccaauauaaucagacu

SEQ ID NO: 218263 - RNA, 19 nt, Artificial Sequence
  Description of Artificial Sequence: Synthetic oligonucleotide
caaaacucguaguccucgu

SEQ ID NO: 218264 - RNA, 19 nt, Artificial Sequence
  Description of Artificial Sequence: Synthetic oligonucleotide
cgucggucauaucaauggc

SEQ ID NO: 218265 - RNA, 19 nt, Artificial Sequence
  Description of Artificial Sequence: Synthetic oligonucleotide
ugcuuccgagccucugauu

SEQ ID NO: 218266 - RNA, 19 nt, Artificial Sequence
  Description of Artificial Sequence: Synthetic oligonucleotide
cucaggcaugauccuucuc

SEQ ID NO: 218267 - RNA, 19 nt, Artificial Sequence
  Description of Artificial Sequence: Synthetic oligonucleotide
cucgauuggcccgauugua

SEQ ID NO: 218268 - RNA, 19 nt, Artificial Sequence
  Description of Artificial Sequence: Synthetic oligonucleotide
auccgcucucuaugauuau

SEQ ID NO: 218269 - RNA, 19 nt, Artificial Sequence
  Description of Artificial Sequence: Synthetic oligonucleotide
caaugccucuaaaacuaau

SEQ ID NO: 218270 - RNA, 19 nt, Artificial Sequence
  Description of Artificial Sequence: Synthetic oligonucleotide
caucaggggcugugagcuc

SEQ ID NO: 218271 - RNA, 19 nt, Artificial Sequence
  Description of Artificial Sequence: Synthetic oligonucleotide
ccaguauucagccgaucaa

SEQ ID NO: 218272 - RNA, 19 nt, Artificial Sequence
  Description of Artificial Sequence: Synthetic oligonucleotide
ugccaguauucagccgauc

SEQ ID NO: 218273 - RNA, 19 nt, Artificial Sequence
  Description of Artificial Sequence: Synthetic oligonucleotide
ugguuaccucggccacgga

SEQ ID NO: 218274 - RNA, 19 nt, Artificial Sequence
  Description of Artificial Sequence: Synthetic oligonucleotide
ggaauggacucugcacaca

SEQ ID NO: 218275 - RNA, 19 nt, Artificial Sequence
  Description of Artificial Sequence: Synthetic oligonucleotide
gaauugcaacagcucgauu

SEQ ID NO: 218276 - RNA, 19 nt, Artificial Sequence
  Description of Artificial Sequence: Synthetic oligonucleotide
aaaagcccuggaggcucua

SEQ ID NO: 218277 - RNA, 19 nt, Artificial Sequence
  Description of Artificial Sequence: Synthetic oligonucleotide
aguaucugauugaguccuu

SEQ ID NO: 218278 - RNA, 19 nt, Artificial Sequence
  Description of Artificial Sequence: Synthetic oligonucleotide
gcccgauuguaagacagaa

SEQ ID NO: 218279 - RNA, 19 nt, Artificial Sequence
  Description of Artificial Sequence: Synthetic oligonucleotide
cgugacgauagagugacaa

SEQ ID NO: 218280 - RNA, 19 nt, Artificial Sequence
  Description of Artificial Sequence: Synthetic oligonucleotide
cacugccgaugucauaacu

SEQ ID NO: 218281 - RNA, 19 nt, Artificial Sequence
  Description of Artificial Sequence: Synthetic oligonucleotide
augccaguauucagccgau

SEQ ID NO: 218282 - RNA, 19 nt, Artificial Sequence
  Description of Artificial Sequence: Synthetic oligonucleotide
cauuauccuuagacucacu

SEQ ID NO: 218283 - RNA, 19 nt, Artificial Sequence
  Description of Artificial Sequence: Synthetic oligonucleotide
cguacggaacaccuuggca

SEQ ID NO: 218284 - RNA, 19 nt, Artificial Sequence
  Description of Artificial Sequence: Synthetic oligonucleotide
gggaguuuaggaauucguu

SEQ ID NO: 218285 - RNA, 19 nt, Artificial Sequence
  Description of Artificial Sequence: Synthetic oligonucleotide
acacgaucuuuaagaucaa

SEQ ID NO: 218286 - RNA, 19 nt, Artificial Sequence
  Description of Artificial Sequence: Synthetic oligonucleotide
gcucgauuggcccgauugu

SEQ ID NO: 218287 - RNA, 19 nt, Artificial Sequence
  Description of Artificial Sequence: Synthetic oligonucleotide
caucuucgggugguuaccu

SEQ ID NO: 218288 - RNA, 19 nt, Artificial Sequence
  Description of Artificial Sequence: Synthetic oligonucleotide
ccguuucucaacugggacu

SEQ ID NO: 218289 - RNA, 19 nt, Artificial Sequence
  Description of Artificial Sequence: Synthetic oligonucleotide
ggcaagugaggcucaguuu

SEQ ID NO: 218290 - RNA, 19 nt, Artificial Sequence
  Description of Artificial Sequence: Synthetic oligonucleotide
cgugucgaacuucuuucca

SEQ ID NO: 218291 - RNA, 19 nt, Artificial Sequence
  Description of Artificial Sequence: Synthetic oligonucleotide
uacccaucuucgggugguu

SEQ ID NO: 218292 - RNA, 19 nt, Artificial Sequence
  Description of Artificial Sequence: Synthetic oligonucleotide
ccgauauuucggaucuugu

SEQ ID NO: 218293 - RNA, 19 nt, Artificial Sequence
  Description of Artificial Sequence: Synthetic oligonucleotide
ucccgauauuucggaucuu

SEQ ID NO: 218294 - RNA, 19 nt, Artificial Sequence
  Description of Artificial Sequence: Synthetic oligonucleotide
ggcccgauuguaagacaga

SEQ ID NO: 218295 - RNA, 19 nt, Artificial Sequence
  Description of Artificial Sequence: Synthetic oligonucleotide
gccgaugucauaacugcuu

SEQ ID NO: 218296 - RNA, 19 nt, Artificial Sequence
  Description of Artificial Sequence: Synthetic oligonucleotide
cgcucucuaugauuaucca

SEQ ID NO: 218297 - RNA, 19 nt, Artificial Sequence
  Description of Artificial Sequence: Synthetic oligonucleotide
ccuuagacucacucacccu

SEQ ID NO: 218298 - RNA, 19 nt, Artificial Sequence
  Description of Artificial Sequence: Synthetic oligonucleotide
acagcucgauuggcccgau

SEQ ID NO: 218299 - RNA, 19 nt, Artificial Sequence
  Description of Artificial Sequence: Synthetic oligonucleotide
agccgccgagcagucucgu

SEQ ID NO: 218300 - RNA, 19 nt, Artificial Sequence
  Description of Artificial Sequence: Synthetic oligonucleotide
gcaauccgcucucuaugau

SEQ ID NO: 218301 - RNA, 19 nt, Artificial Sequence
  Description of Artificial Sequence: Synthetic oligonucleotide
cuguagcgugauggaggca

SEQ ID NO: 218302 - RNA, 19 nt, Artificial Sequence
  Description of Artificial Sequence: Synthetic oligonucleotide
caggucccuucgagcaucu

SEQ ID NO: 218303 - RNA, 19 nt, Artificial Sequence
  Description of Artificial Sequence: Synthetic oligonucleotide
cccgauuguaagacagaau

SEQ ID NO: 218304 - RNA, 19 nt, Artificial Sequence
  Description of Artificial Sequence: Synthetic oligonucleotide
cguuucucaacugggacuu

SEQ ID NO: 218305 - RNA, 19 nt, Artificial Sequence
  Description of Artificial Sequence: Synthetic oligonucleotide
guagcgugauggaggcauu

SEQ ID NO: 218306 - RNA, 19 nt, Artificial Sequence
  Description of Artificial Sequence: Synthetic oligonucleotide
ccgaacuuuucaucucuuu

SEQ ID NO: 218307 - RNA, 19 nt, Artificial Sequence
  Description of Artificial Sequence: Synthetic oligonucleotide
ccuuggcaucuuugcuaca

SEQ ID NO: 218308 - RNA, 19 nt, Artificial Sequence
  Description of Artificial Sequence: Synthetic oligonucleotide
gccgagcagucucguauuu

SEQ ID NO: 218309 - RNA, 19 nt, Artificial Sequence
  Description of Artificial Sequence: Synthetic oligonucleotide
ccgugacgauagagugaca

SEQ ID NO: 218310 - RNA, 19 nt, Artificial Sequence
  Description of Artificial Sequence: Synthetic oligonucleotide
cccaagcuacacgaucuuu

SEQ ID NO: 218311 - RNA, 19 nt, Artificial Sequence
  Description of Artificial Sequence: Synthetic oligonucleotide
cagcucgauuggcccgauu

SEQ ID NO: 218312 - RNA, 19 nt, Artificial Sequence
  Description of Artificial Sequence: Synthetic oligonucleotide
cgcauuugcuuagguuggu

SEQ ID NO: 218313 - RNA, 19 nt, Artificial Sequence
  Description of Artificial Sequence: Synthetic oligonucleotide
ccgagcagucucguauuuu

SEQ ID NO: 218314 - RNA, 19 nt, Artificial Sequence
  Description of Artificial Sequence: Synthetic oligonucleotide
cgccgagcagucucguauu

SEQ ID NO: 218315 - RNA, 19 nt, Artificial Sequence
  Description of Artificial Sequence: Synthetic oligonucleotide
aauccuuuaacuugguugc

SEQ ID NO: 218316 - RNA, 19 nt, Artificial Sequence
  Description of Artificial Sequence: Synthetic oligonucleotide
aaauuugagguuaagaauc

SEQ ID NO: 218317 - RNA, 19 nt, Artificial Sequence
  Description of Artificial Sequence: Synthetic oligonucleotide
uauaauauaaucucauaca

SEQ ID NO: 218318 - RNA, 19 nt, Artificial Sequence
  Description of Artificial Sequence: Synthetic oligonucleotide
aaaggcuacacuuugucag

SEQ ID NO: 218319 - RNA, 19 nt, Artificial Sequence
  Description of Artificial Sequence: Synthetic oligonucleotide
uguaaauagggcaaggaca

SEQ ID NO: 218320 - RNA, 19 nt, Artificial Sequence
  Description of Artificial Sequence: Synthetic oligonucleotide
auuaaucuuuaccuaauac

SEQ ID NO: 218321 - RNA, 19 nt, Artificial Sequence
  Description of Artificial Sequence: Synthetic oligonucleotide
uguauucagaaguagacug

SEQ ID NO: 218322 - RNA, 19 nt, Artificial Sequence
  Description of Artificial Sequence: Synthetic oligonucleotide
uguaauuagacaacuuaag

SEQ ID NO: 218323 - RNA, 19 nt, Artificial Sequence
  Description of Artificial Sequence: Synthetic oligonucleotide
aaaauuugcaauauguuga

SEQ ID NO: 218324 - RNA, 19 nt, Artificial Sequence
  Description of Artificial Sequence: Synthetic oligonucleotide
agggcaaggacauauaagg

SEQ ID NO: 218325 - RNA, 19 nt, Artificial Sequence
  Description of Artificial Sequence: Synthetic oligonucleotide
aacggcauacagaagaugc

SEQ ID NO: 218326 - RNA, 19 nt, Artificial Sequence
  Description of Artificial Sequence: Synthetic oligonucleotide
ucuauaaaccgauaugacc

SEQ ID NO: 218327 - RNA, 19 nt, Artificial Sequence
  Description of Artificial Sequence: Synthetic oligonucleotide
uaaauauguguccugaaac

SEQ ID NO: 218328 - RNA, 19 nt, Artificial Sequence
  Description of Artificial Sequence: Synthetic oligonucleotide
uuaagcagucuuaagcacg

SEQ ID NO: 218329 - RNA, 19 nt, Artificial Sequence
  Description of Artificial Sequence: Synthetic oligonucleotide
auaacuacccucugaaaac

SEQ ID NO: 218330 - RNA, 19 nt, Artificial Sequence
  Description of Artificial Sequence: Synthetic oligonucleotide
agguuaagaaucaugaggc

SEQ ID NO: 218331 - RNA, 19 nt, Artificial Sequence
  Description of Artificial Sequence: Synthetic oligonucleotide
agcagaucacucuagauuc

SEQ ID NO: 218332 - RNA, 19 nt, Artificial Sequence
  Description of Artificial Sequence: Synthetic oligonucleotide
agaacaaugguaguggucg

SEQ ID NO: 218333 - RNA, 19 nt, Artificial Sequence
  Description of Artificial Sequence: Synthetic oligonucleotide
acuuucaacauggagaaac

SEQ ID NO: 218334 - RNA, 19 nt, Artificial Sequence
  Description of Artificial Sequence: Synthetic oligonucleotide
aaagaagcuaugcuagguc

SEQ ID NO: 218335 - RNA, 19 nt, Artificial Sequence
  Description of Artificial Sequence: Synthetic oligonucleotide
uauaacuacccucugaaaa

SEQ ID NO: 218336 - RNA, 19 nt, Artificial Sequence
  Description of Artificial Sequence: Synthetic oligonucleotide
uuaacaguacucaucaaac

SEQ ID NO: 218337 - RNA, 19 nt, Artificial Sequence
  Description of Artificial Sequence: Synthetic oligonucleotide
aaauauguguccugaaaca

SEQ ID NO: 218338 - RNA, 19 nt, Artificial Sequence
  Description of Artificial Sequence: Synthetic oligonucleotide
uaaacacucacuucuaaug

SEQ ID NO: 218339 - RNA, 19 nt, Artificial Sequence
  Description of Artificial Sequence: Synthetic oligonucleotide
aauguuauucuaauuagcu

SEQ ID NO: 218340 - RNA, 19 nt, Artificial Sequence
  Description of Artificial Sequence: Synthetic oligonucleotide
uuguuaauauaauauaauc

SEQ ID NO: 218341 - RNA, 19 nt, Artificial Sequence
  Description of Artificial Sequence: Synthetic oligonucleotide
aaauuaaagcauguuuggg

SEQ ID NO: 218342 - RNA, 19 nt, Artificial Sequence
  Description of Artificial Sequence: Synthetic oligonucleotide
uuugucacgugcaucagcc

SEQ ID NO: 218343 - RNA, 19 nt, Artificial Sequence
  Description of Artificial Sequence: Synthetic oligonucleotide
auaauauaaucucauacau

SEQ ID NO: 218344 - RNA, 19 nt, Artificial Sequence
  Description of Artificial Sequence: Synthetic oligonucleotide
cauauauuccccuuccucc

SEQ ID NO: 218345 - RNA, 19 nt, Artificial Sequence
  Description of Artificial Sequence: Synthetic oligonucleotide
aauuuugggugcuagaguu

SEQ ID NO: 218346 - RNA, 19 nt, Artificial Sequence
  Description of Artificial Sequence: Synthetic oligonucleotide
uaauauaauauaaucucau

SEQ ID NO: 218347 - RNA, 19 nt, Artificial Sequence
  Description of Artificial Sequence: Synthetic oligonucleotide
cucacuucgaaccugggcg

SEQ ID NO: 218348 - RNA, 19 nt, Artificial Sequence
  Description of Artificial Sequence: Synthetic oligonucleotide
uucgacaucucauuuaucu

SEQ ID NO: 218349 - RNA, 19 nt, Artificial Sequence
  Description of Artificial Sequence: Synthetic oligonucleotide
gauuuccugagcuucgugg

SEQ ID NO: 218350 - RNA, 19 nt, Artificial Sequence
  Description of Artificial Sequence: Synthetic oligonucleotide
cuuaagaaaaggaacacca

SEQ ID NO: 218351 - RNA, 19 nt, Artificial Sequence
  Description of Artificial Sequence: Synthetic oligonucleotide
ugugauaacucgcuuaccu

SEQ ID NO: 218352 - RNA, 19 nt, Artificial Sequence
  Description of Artificial Sequence: Synthetic oligonucleotide
uaauguuauucuaauuagc

SEQ ID NO: 218353 - RNA, 19 nt, Artificial Sequence
  Description of Artificial Sequence: Synthetic oligonucleotide
uaugcuaggucacagugca

SEQ ID NO: 218354 - RNA, 19 nt, Artificial Sequence
  Description of Artificial Sequence: Synthetic oligonucleotide
aaugguaguggucggcgac

SEQ ID NO: 218355 - RNA, 19 nt, Artificial Sequence
  Description of Artificial Sequence: Synthetic oligonucleotide
cuaguuuuacuucuucugg

SEQ ID NO: 218356 - RNA, 19 nt, Artificial Sequence
  Description of Artificial Sequence: Synthetic oligonucleotide
uuuuaguuaacaguacuca

SEQ ID NO: 218357 - RNA, 19 nt, Artificial Sequence
  Description of Artificial Sequence: Synthetic oligonucleotide
uaaucucauacauaggggu

SEQ ID NO: 218358 - RNA, 19 nt, Artificial Sequence
  Description of Artificial Sequence: Synthetic oligonucleotide
aauauaauauaaucucaua

SEQ ID NO: 218359 - RNA, 19 nt, Artificial Sequence
  Description of Artificial Sequence: Synthetic oligonucleotide
cauguuuggggaauggagg

SEQ ID NO: 218360 - RNA, 19 nt, Artificial Sequence
  Description of Artificial Sequence: Synthetic oligonucleotide
uguuuacagauacucagcu

SEQ ID NO: 218361 - RNA, 19 nt, Artificial Sequence
  Description of Artificial Sequence: Synthetic oligonucleotide
auucuauaaaccgauauga

SEQ ID NO: 218362 - RNA, 19 nt, Artificial Sequence
  Description of Artificial Sequence: Synthetic oligonucleotide
acauauauuccccuuccuc

SEQ ID NO: 218363 - RNA, 19 nt, Artificial Sequence
  Description of Artificial Sequence: Synthetic oligonucleotide
uaccuaugcaguuuugagg

SEQ ID NO: 218364 - RNA, 19 nt, Artificial Sequence
  Description of Artificial Sequence: Synthetic oligonucleotide
uaaaggacgcuaaacacuc

SEQ ID NO: 218365 - RNA, 19 nt, Artificial Sequence
  Description of Artificial Sequence: Synthetic oligonucleotide
gccacuuuuauuuugcugg

SEQ ID NO: 218366 - RNA, 19 nt, Artificial Sequence
  Description of Artificial Sequence: Synthetic oligonucleotide
uuuaaccugaaagucaaca

SEQ ID NO: 218367 - RNA, 19 nt, Artificial Sequence
  Description of Artificial Sequence: Synthetic oligonucleotide
uggaauauauaacuacccu

SEQ ID NO: 218368 - RNA, 19 nt, Artificial Sequence
  Description of Artificial Sequence: Synthetic oligonucleotide
uuuugagaaacgcuugacu

SEQ ID NO: 218369 - RNA, 19 nt, Artificial Sequence
  Description of Artificial Sequence: Synthetic oligonucleotide
accuaugcaguuuugagga

SEQ ID NO: 218370 - RNA, 19 nt, Artificial Sequence
  Description of Artificial Sequence: Synthetic oligonucleotide
uuugcaaaaugaaccaagu

SEQ ID NO: 218371 - RNA, 19 nt, Artificial Sequence
  Description of Artificial Sequence: Synthetic oligonucleotide
auucuaauuagcuuagaaa

SEQ ID NO: 218372 - RNA, 19 nt, Artificial Sequence
  Description of Artificial Sequence: Synthetic oligonucleotide
uggacaaacuuucaacaug

SEQ ID NO: 218373 - RNA, 19 nt, Artificial Sequence
  Description of Artificial Sequence: Synthetic oligonucleotide
ugcuaaggcauuuacuuca

SEQ ID NO: 218374 - RNA, 19 nt, Artificial Sequence
  Description of Artificial Sequence: Synthetic oligonucleotide
aacgcuugacuguaauuag

SEQ ID NO: 218375 - RNA, 19 nt, Artificial Sequence
  Description of Artificial Sequence: Synthetic oligonucleotide
acucaucaaaccgugagac

SEQ ID NO: 218376 - RNA, 19 nt, Artificial Sequence
  Description of Artificial Sequence: Synthetic oligonucleotide
cuaaacuacagcauauauc

SEQ ID NO: 218377 - RNA, 19 nt, Artificial Sequence
  Description of Artificial Sequence: Synthetic oligonucleotide
cauguuaccauguuggaca

SEQ ID NO: 218378 - RNA, 19 nt, Artificial Sequence
  Description of Artificial Sequence: Synthetic oligonucleotide
ucguucaaaacuuuggaau

SEQ ID NO: 218379 - RNA, 19 nt, Artificial Sequence
  Description of Artificial Sequence: Synthetic oligonucleotide
aaggcuacacuuugucagg

SEQ ID NO: 218380 - RNA, 19 nt, Artificial Sequence
  Description of Artificial Sequence: Synthetic oligonucleotide
ugcaauauguugauuuacu

SEQ ID NO: 218381 - RNA, 19 nt, Artificial Sequence
  Description of Artificial Sequence: Synthetic oligonucleotide
aacucguucaaaacuuugg

SEQ ID NO: 218382 - RNA, 19 nt, Artificial Sequence
  Description of Artificial Sequence: Synthetic oligonucleotide
uuaagcacgguuaucuaaa

SEQ ID NO: 218383 - RNA, 19 nt, Artificial Sequence
  Description of Artificial Sequence: Synthetic oligonucleotide
aaccgauaugaccuccugg

SEQ ID NO: 218384 - RNA, 19 nt, Artificial Sequence
  Description of Artificial Sequence: Synthetic oligonucleotide
uguucggugauggacacag

SEQ ID NO: 218385 - RNA, 19 nt, Artificial Sequence
  Description of Artificial Sequence: Synthetic oligonucleotide
ggaacuaacuucuuccagg

SEQ ID NO: 218386 - RNA, 19 nt, Artificial Sequence
  Description of Artificial Sequence: Synthetic oligonucleotide
cuauaaaccgauaugaccu

SEQ ID NO: 218387 - RNA, 19 nt, Artificial Sequence
  Description of Artificial Sequence: Synthetic oligonucleotide
ucuagauucuaaagagaug

SEQ ID NO: 218388 - RNA, 19 nt, Artificial Sequence
  Description of Artificial Sequence: Synthetic oligonucleotide
uuugcuaggcaccauguua

SEQ ID NO: 218389 - RNA, 19 nt, Artificial Sequence
  Description of Artificial Sequence: Synthetic oligonucleotide
gagaccuguaaauagggca

SEQ ID NO: 218390 - RNA, 19 nt, Artificial Sequence
  Description of Artificial Sequence: Synthetic oligonucleotide
caacuuaagaaaaggaaca

SEQ ID NO: 218391 - RNA, 19 nt, Artificial Sequence
  Description of Artificial Sequence: Synthetic oligonucleotide
uuuacuucuucugggacug

SEQ ID NO: 218392 - RNA, 19 nt, Artificial Sequence
  Description of Artificial Sequence: Synthetic oligonucleotide
ucuuuuggcuguaaacaca

SEQ ID NO: 218393 - RNA, 19 nt, Artificial Sequence
  Description of Artificial Sequence: Synthetic oligonucleotide
gaguuugggguguuuacag

SEQ ID NO: 218394 - RNA, 19 nt, Artificial Sequence
  Description of Artificial Sequence: Synthetic oligonucleotide
aaucaauuuugggugcuag

SEQ ID NO: 218395 - RNA, 19 nt, Artificial Sequence
  Description of Artificial Sequence: Synthetic oligonucleotide
aaacgcuugacuguaauua

SEQ ID NO: 218396 - RNA, 19 nt, Artificial Sequence
  Description of Artificial Sequence: Synthetic oligonucleotide
acgcuaaacacucacuucu

SEQ ID NO: 218397 - RNA, 19 nt, Artificial Sequence
  Description of Artificial Sequence: Synthetic oligonucleotide
uucauuucggacaacgcuu

SEQ ID NO: 218398 - RNA, 19 nt, Artificial Sequence
  Description of Artificial Sequence: Synthetic oligonucleotide
aacuuguggaguaggagag

SEQ ID NO: 218399 - RNA, 19 nt, Artificial Sequence
  Description of Artificial Sequence: Synthetic oligonucleotide
uggagcauuuugagaaacg

SEQ ID NO: 218400 - RNA, 19 nt, Artificial Sequence
  Description of Artificial Sequence: Synthetic oligonucleotide
uccaggaaucaauuuuggg

SEQ ID NO: 218401 - RNA, 19 nt, Artificial Sequence
  Description of Artificial Sequence: Synthetic oligonucleotide
ugcuaggugcucuuugagg

SEQ ID NO: 218402 - RNA, 19 nt, Artificial Sequence
  Description of Artificial Sequence: Synthetic oligonucleotide
cucguguucugcuuugugg

SEQ ID NO: 218403 - RNA, 19 nt, Artificial Sequence
  Description of Artificial Sequence: Synthetic oligonucleotide
uggaacuaacuucuuccag

SEQ ID NO: 218404 - RNA, 19 nt, Artificial Sequence
  Description of Artificial Sequence: Synthetic oligonucleotide
uguaaggacaguucacccu

SEQ ID NO: 218405 - RNA, 19 nt, Artificial Sequence
  Description of Artificial Sequence: Synthetic oligonucleotide
guuaacaguacucaucaaa

SEQ ID NO: 218406 - RNA, 19 nt, Artificial Sequence
  Description of Artificial Sequence: Synthetic oligonucleotide
ucggacaacgcuucuuccg

SEQ ID NO: 218407 - RNA, 19 nt, Artificial Sequence
  Description of Artificial Sequence: Synthetic oligonucleotide
accgauaugaccuccuggu

SEQ ID NO: 218408 - RNA, 19 nt, Artificial Sequence
  Description of Artificial Sequence: Synthetic oligonucleotide
cuguaaauagggcaaggac

SEQ ID NO: 218409 - RNA, 19 nt, Artificial Sequence
  Description of Artificial Sequence: Synthetic oligonucleotide
aggcauuuacuucacucuc

SEQ ID NO: 218410 - RNA, 19 nt, Artificial Sequence
  Description of Artificial Sequence: Synthetic oligonucleotide
uugggguguuuacagauac

SEQ ID NO: 218411 - RNA, 19 nt, Artificial Sequence
  Description of Artificial Sequence: Synthetic oligonucleotide
uuguaaggacaguucaccc

SEQ ID NO: 218412 - RNA, 19 nt, Artificial Sequence
  Description of Artificial Sequence: Synthetic oligonucleotide
guuauucuaauuagcuuag

SEQ ID NO: 218413 - RNA, 19 nt, Artificial Sequence
  Description of Artificial Sequence: Synthetic oligonucleotide
caacauauauuccccuucc

SEQ ID NO: 218414 - RNA, 19 nt, Artificial Sequence
  Description of Artificial Sequence: Synthetic oligonucleotide
uccuacaaaaugucucaag

SEQ ID NO: 218415 - RNA, 19 nt, Artificial Sequence
  Description of Artificial Sequence: Synthetic oligonucleotide
aguuuuacuucuucuggga

SEQ ID NO: 218416 - RNA, 19 nt, Artificial Sequence
  Description of Artificial Sequence: Synthetic oligonucleotide
uaccuguuuauugaguuca

SEQ ID NO: 218417 - RNA, 19 nt, Artificial Sequence
  Description of Artificial Sequence: Synthetic oligonucleotide
auaaaccgauaugaccucc

SEQ ID NO: 218418 - RNA, 19 nt, Artificial Sequence
  Description of Artificial Sequence: Synthetic oligonucleotide
guaccuaugcaguuuugag

SEQ ID NO: 218419 - RNA, 19 nt, Artificial Sequence
  Description of Artificial Sequence: Synthetic oligonucleotide
uagcagaucacucuagauu

SEQ ID NO: 218420 - RNA, 19 nt, Artificial Sequence
  Description of Artificial Sequence: Synthetic oligonucleotide
aauuugagguuaagaauca

SEQ ID NO: 218421 - RNA, 19 nt, Artificial Sequence
  Description of Artificial Sequence: Synthetic oligonucleotide
cucgcuuaccuguuuauug

SEQ ID NO: 218422 - RNA, 19 nt, Artificial Sequence
  Description of Artificial Sequence: Synthetic oligonucleotide
aguagacugcagaaaauuc

SEQ ID NO: 218423 - RNA, 19 nt, Artificial Sequence
  Description of Artificial Sequence: Synthetic oligonucleotide
uuuacuguccuuuguugaa

SEQ ID NO: 218424 - RNA, 19 nt, Artificial Sequence
  Description of Artificial Sequence: Synthetic oligonucleotide
ggaauauauaacuacccuc

SEQ ID NO: 218425 - RNA, 19 nt, Artificial Sequence
  Description of Artificial Sequence: Synthetic oligonucleotide
cugaacggcauacagaaga

SEQ ID NO: 218426 - RNA, 19 nt, Artificial Sequence
  Description of Artificial Sequence: Synthetic oligonucleotide
gaugcauucuauaaaccga

SEQ ID NO: 218427 - RNA, 19 nt, Artificial Sequence
  Description of Artificial Sequence: Synthetic oligonucleotide
aacauauauuccccuuccu

SEQ ID NO: 218428 - RNA, 19 nt, Artificial Sequence
  Description of Artificial Sequence: Synthetic oligonucleotide
aguugcuugagcugaguca

SEQ ID NO: 218429 - RNA, 19 nt, Artificial Sequence
  Description of Artificial Sequence: Synthetic oligonucleotide
aaccgugagaccuguaaau

SEQ ID NO: 218430 - RNA, 19 nt, Artificial Sequence
  Description of Artificial Sequence: Synthetic oligonucleotide
aauucuagguguacuggug

SEQ ID NO: 218431 - RNA, 19 nt, Artificial Sequence
  Description of Artificial Sequence: Synthetic oligonucleotide
uuucggacaacgcuucuuc

SEQ ID NO: 218432 - RNA, 19 nt, Artificial Sequence
  Description of Artificial Sequence: Synthetic oligonucleotide
auaggaagacuuggggacc

SEQ ID NO: 218433 - RNA, 19 nt, Artificial Sequence
  Description of Artificial Sequence: Synthetic oligonucleotide
gaacuaacuucuuccagga

SEQ ID NO: 218434 - RNA, 19 nt, Artificial Sequence
  Description of Artificial Sequence: Synthetic oligonucleotide
ugagaccuguaaauagggc

SEQ ID NO: 218435 - RNA, 19 nt, Artificial Sequence
  Description of Artificial Sequence: Synthetic oligonucleotide
aaacuuuggaauacugaga

SEQ ID NO: 218436 - RNA, 19 nt, Artificial Sequence
  Description of Artificial Sequence: Synthetic oligonucleotide
ugaauggcacagcccaaag

SEQ ID NO: 218437 - RNA, 19 nt, Artificial Sequence
  Description of Artificial Sequence: Synthetic oligonucleotide
aaaccgugagaccuguaaa

SEQ ID NO: 218438 - RNA, 19 nt, Artificial Sequence
  Description of Artificial Sequence: Synthetic oligonucleotide
caggagcuaaucaucacac

SEQ ID NO: 218439 - RNA, 19 nt, Artificial Sequence
  Description of Artificial Sequence: Synthetic oligonucleotide
agcgcgcuggaauuucugc

SEQ ID NO: 218440 - RNA, 19 nt, Artificial Sequence
  Description of Artificial Sequence: Synthetic oligonucleotide
cuuucauauccccagcguc

SEQ ID NO: 218441 - RNA, 19 nt, Artificial Sequence
  Description of Artificial Sequence: Synthetic oligonucleotide
aaaccgauaugaccuccug

SEQ ID NO: 218442 - RNA, 19 nt, Artificial Sequence
  Description of Artificial Sequence: Synthetic oligonucleotide
cuaugcuaggucacagugc

SEQ ID NO: 218443 - RNA, 19 nt, Artificial Sequence
  Description of Artificial Sequence: Synthetic oligonucleotide
aguggucggcgacaacucc

SEQ ID NO: 218444 - RNA, 19 nt, Artificial Sequence
  Description of Artificial Sequence: Synthetic oligonucleotide
uuucacuugggagaccuca

SEQ ID NO: 218445 - RNA, 19 nt, Artificial Sequence
  Description of Artificial Sequence: Synthetic oligonucleotide
guguucgucuaccaguugc

SEQ ID NO: 218446 - RNA, 19 nt, Artificial Sequence
  Description of Artificial Sequence: Synthetic oligonucleotide
aaguagacugcagaaaauu

SEQ ID NO: 218447 - RNA, 19 nt, Artificial Sequence
  Description of Artificial Sequence: Synthetic oligonucleotide
uccuaguuuuacuucuucu

SEQ ID NO: 218448 - RNA, 19 nt, Artificial Sequence
  Description of Artificial Sequence: Synthetic oligonucleotide
acuuugucaggcauccuac

SEQ ID NO: 218449 - RNA, 19 nt, Artificial Sequence
  Description of Artificial Sequence: Synthetic oligonucleotide
uuuaccuaauacagauuau

SEQ ID NO: 218450 - RNA, 19 nt, Artificial Sequence
  Description of Artificial Sequence: Synthetic oligonucleotide
aacuugguugcuaaggcau

SEQ ID NO: 218451 - RNA, 19 nt, Artificial Sequence
  Description of Artificial Sequence: Synthetic oligonucleotide
ucgcuuaccuguuuauuga

SEQ ID NO: 218452 - RNA, 19 nt, Artificial Sequence
  Description of Artificial Sequence: Synthetic oligonucleotide
uuaccuaauacagauuauu

SEQ ID NO: 218453 - RNA, 19 nt, Artificial Sequence
  Description of Artificial Sequence: Synthetic oligonucleotide
acaaugguaguggucggcg

SEQ ID NO: 218454 - RNA, 19 nt, Artificial Sequence
  Description of Artificial Sequence: Synthetic oligonucleotide
cuggcauuaaucuuuaccu

SEQ ID NO: 218455 - RNA, 19 nt, Artificial Sequence
  Description of Artificial Sequence: Synthetic oligonucleotide
uuguggauauacucagcug

SEQ ID NO: 218456 - RNA, 19 nt, Artificial Sequence
  Description of Artificial Sequence: Synthetic oligonucleotide
auccuaguuuuacuucuuc

SEQ ID NO: 218457 - RNA, 19 nt, Artificial Sequence
  Description of Artificial Sequence: Synthetic oligonucleotide
ugucacgugcaucagccuc

SEQ ID NO: 218458 - RNA, 19 nt, Artificial Sequence
  Description of Artificial Sequence: Synthetic oligonucleotide
uuuggaauacugagacuuc

SEQ ID NO: 218459 - RNA, 19 nt, Artificial Sequence
  Description of Artificial Sequence: Synthetic oligonucleotide
uguucgucuaccaguugcu

SEQ ID NO: 218460 - RNA, 19 nt, Artificial Sequence
  Description of Artificial Sequence: Synthetic oligonucleotide
cuucguggaugacagcagg

SEQ ID NO: 218461 - RNA, 19 nt, Artificial Sequence
  Description of Artificial Sequence: Synthetic oligonucleotide
uauaaaccgauaugaccuc

SEQ ID NO: 218462 - RNA, 19 nt, Artificial Sequence
  Description of Artificial Sequence: Synthetic oligonucleotide
guuuacagauacucagcug

SEQ ID NO: 218463 - RNA, 19 nt, Artificial Sequence
  Description of Artificial Sequence: Synthetic oligonucleotide
uagcuaugaaaacaucuuu

SEQ ID NO: 218464 - RNA, 19 nt, Artificial Sequence
  Description of Artificial Sequence: Synthetic oligonucleotide
uaaaccgauaugaccuccu

SEQ ID NO: 218465 - RNA, 19 nt, Artificial Sequence
  Description of Artificial Sequence: Synthetic oligonucleotide
cuaauuagcuuagaaauua

SEQ ID NO: 218466 - RNA, 19 nt, Artificial Sequence
  Description of Artificial Sequence: Synthetic oligonucleotide
cuaggaguugcuucuccag

SEQ ID NO: 218467 - RNA, 19 nt, Artificial Sequence
  Description of Artificial Sequence: Synthetic oligonucleotide
uacucagcuggcaaagaaa

SEQ ID NO: 218468 - RNA, 19 nt, Artificial Sequence
  Description of Artificial Sequence: Synthetic oligonucleotide
ugacuguaauuagacaacu

SEQ ID NO: 218469 - RNA, 19 nt, Artificial Sequence
  Description of Artificial Sequence: Synthetic oligonucleotide
gaauccuaguuuuacuucu

SEQ ID NO: 218470 - RNA, 19 nt, Artificial Sequence
  Description of Artificial Sequence: Synthetic oligonucleotide
uuagcagaucacucuagau

SEQ ID NO: 218471 - RNA, 19 nt, Artificial Sequence
  Description of Artificial Sequence: Synthetic oligonucleotide
cagauggagggaaaagaug

SEQ ID NO: 218472 - RNA, 19 nt, Artificial Sequence
  Description of Artificial Sequence: Synthetic oligonucleotide
gugauaacucgcuuaccug

SEQ ID NO: 218473 - RNA, 19 nt, Artificial Sequence
  Description of Artificial Sequence: Synthetic oligonucleotide
ucacuguauucagaaguag

SEQ ID NO: 218474 - RNA, 19 nt, Artificial Sequence
  Description of Artificial Sequence: Synthetic oligonucleotide
uccuguagcaucuguacuu

SEQ ID NO: 218475 - RNA, 19 nt, Artificial Sequence
  Description of Artificial Sequence: Synthetic oligonucleotide
cauccuacaaaaugucuca

SEQ ID NO: 218476 - RNA, 19 nt, Artificial Sequence
  Description of Artificial Sequence: Synthetic oligonucleotide
auagggcaaggacauauaa

SEQ ID NO: 218477 - RNA, 19 nt, Artificial Sequence
  Description of Artificial Sequence: Synthetic oligonucleotide
ugggugcuagaguuugggg

SEQ ID NO: 218478 - RNA, 19 nt, Artificial Sequence
  Description of Artificial Sequence: Synthetic oligonucleotide
uuaucacuugcagauguuc

SEQ ID NO: 218479 - RNA, 19 nt, Artificial Sequence
  Description of Artificial Sequence: Synthetic oligonucleotide
caugaucagggccauaaga

SEQ ID NO: 218480 - RNA, 19 nt, Artificial Sequence
  Description of Artificial Sequence: Synthetic oligonucleotide
uugcaauauguugauuuac

SEQ ID NO: 218481 - RNA, 19 nt, Artificial Sequence
  Description of Artificial Sequence: Synthetic oligonucleotide
accacguaaagccacuuuu

SEQ ID NO: 218482 - RNA, 19 nt, Artificial Sequence
  Description of Artificial Sequence: Synthetic oligonucleotide
ugaacggcauacagaagau

SEQ ID NO: 218483 - RNA, 19 nt, Artificial Sequence
  Description of Artificial Sequence: Synthetic oligonucleotide
ggugcuagaguuuggggug

SEQ ID NO: 218484 - RNA, 19 nt, Artificial Sequence
  Description of Artificial Sequence: Synthetic oligonucleotide
uggcuuagcagaucacucu

SEQ ID NO: 218485 - RNA, 19 nt, Artificial Sequence
  Description of Artificial Sequence: Synthetic oligonucleotide
aagcauguuuggggaaugg

SEQ ID NO: 218486 - RNA, 19 nt, Artificial Sequence
  Description of Artificial Sequence: Synthetic oligonucleotide
gacgcuaaacacucacuuc

SEQ ID NO: 218487 - RNA, 19 nt, Artificial Sequence
  Description of Artificial Sequence: Synthetic oligonucleotide
ugguugcuaaggcauuuac

SEQ ID NO: 218488 - RNA, 19 nt, Artificial Sequence
  Description of Artificial Sequence: Synthetic oligonucleotide
agacaacuuaagaaaagga

SEQ ID NO: 218489 - RNA, 19 nt, Artificial Sequence
  Description of Artificial Sequence: Synthetic oligonucleotide
gauguucggugauggacac

SEQ ID NO: 218490 - RNA, 19 nt, Artificial Sequence
  Description of Artificial Sequence: Synthetic oligonucleotide
acgugcaucagccucucgu

SEQ ID NO: 218491 - RNA, 19 nt, Artificial Sequence
  Description of Artificial Sequence: Synthetic oligonucleotide
gaucaggagcuaaucauca

SEQ ID NO: 218492 - RNA, 19 nt, Artificial Sequence
  Description of Artificial Sequence: Synthetic oligonucleotide
ggcaaggacauauaaggca

SEQ ID NO: 218493 - RNA, 19 nt, Artificial Sequence
  Description of Artificial Sequence: Synthetic oligonucleotide
gcuaugcuaggucacagug

SEQ ID NO: 218494 - RNA, 19 nt, Artificial Sequence
  Description of Artificial Sequence: Synthetic oligonucleotide
agcuucguggaugacagca

SEQ ID NO: 218495 - RNA, 19 nt, Artificial Sequence
  Description of Artificial Sequence: Synthetic oligonucleotide
ucguggaugacagcaggag

SEQ ID NO: 218496 - RNA, 19 nt, Artificial Sequence
  Description of Artificial Sequence: Synthetic oligonucleotide
cuguaaacacacaguuuac

SEQ ID NO: 218497 - RNA, 19 nt, Artificial Sequence
  Description of Artificial Sequence: Synthetic oligonucleotide
uaacuacccucugaaaacu

SEQ ID NO: 218498 - RNA, 19 nt, Artificial Sequence
  Description of Artificial Sequence: Synthetic oligonucleotide
caacucguucaaaacuuug

SEQ ID NO: 218499 - RNA, 19 nt, Artificial Sequence
  Description of Artificial Sequence: Synthetic oligonucleotide
uuguguucgucuaccaguu

SEQ ID NO: 218500 - RNA, 19 nt, Artificial Sequence
  Description of Artificial Sequence: Synthetic oligonucleotide
ucggcgacaacuccagauc

SEQ ID NO: 218501 - RNA, 19 nt, Artificial Sequence
  Description of Artificial Sequence: Synthetic oligonucleotide
ugagaaacgcuugacugua

SEQ ID NO: 218502 - RNA, 19 nt, Artificial Sequence
  Description of Artificial Sequence: Synthetic oligonucleotide
agauguucggugauggaca

SEQ ID NO: 218503 - RNA, 19 nt, Artificial Sequence
  Description of Artificial Sequence: Synthetic oligonucleotide
cuuaagcacgguuaucuaa

SEQ ID NO: 218504 - RNA, 19 nt, Artificial Sequence
  Description of Artificial Sequence: Synthetic oligonucleotide
cuucgugacuucugcuucc

SEQ ID NO: 218505 - RNA, 19 nt, Artificial Sequence
  Description of Artificial Sequence: Synthetic oligonucleotide
agaaacgcuugacuguaau

SEQ ID NO: 218506 - RNA, 19 nt, Artificial Sequence
  Description of Artificial Sequence: Synthetic oligonucleotide
uuuggcaguuguccgcagu

SEQ ID NO: 218507 - RNA, 19 nt, Artificial Sequence
  Description of Artificial Sequence: Synthetic oligonucleotide
acuuguggaguaggagagc

SEQ ID NO: 218508 - RNA, 19 nt, Artificial Sequence
  Description of Artificial Sequence: Synthetic oligonucleotide
uuaccauguuggacaaacu

SEQ ID NO: 218509 - RNA, 19 nt, Artificial Sequence
  Description of Artificial Sequence: Synthetic oligonucleotide
uucggacaacgcuucuucc

SEQ ID NO: 218510 - RNA, 19 nt, Artificial Sequence
  Description of Artificial Sequence: Synthetic oligonucleotide
aacucgcuuaccuguuuau

SEQ ID NO: 218511 - RNA, 19 nt, Artificial Sequence
  Description of Artificial Sequence: Synthetic oligonucleotide
ucaacucguucaaaacuuu

SEQ ID NO: 218512 - RNA, 19 nt, Artificial Sequence
  Description of Artificial Sequence: Synthetic oligonucleotide
ugggagaccucacuucgaa

SEQ ID NO: 218513 - RNA, 19 nt, Artificial Sequence
  Description of Artificial Sequence: Synthetic oligonucleotide
acuggcuuagcagaucacu

SEQ ID NO: 218514 - RNA, 19 nt, Artificial Sequence
  Description of Artificial Sequence: Synthetic oligonucleotide
uuugggguguuuacagaua

SEQ ID NO: 218515 - RNA, 19 nt, Artificial Sequence
  Description of Artificial Sequence: Synthetic oligonucleotide
acaguucacccuuggauua

SEQ ID NO: 218516 - RNA, 19 nt, Artificial Sequence
  Description of Artificial Sequence: Synthetic oligonucleotide
ugcaagcaaguuaaacauu

SEQ ID NO: 218517 - RNA, 19 nt, Artificial Sequence
  Description of Artificial Sequence: Synthetic oligonucleotide
agaauacuuguaauaaaua

SEQ ID NO: 218518 - RNA, 19 nt, Artificial Sequence
  Description of Artificial Sequence: Synthetic oligonucleotide
aggcuacacuuugucaggc

SEQ ID NO: 218519 - RNA, 19 nt, Artificial Sequence
  Description of Artificial Sequence: Synthetic oligonucleotide
accaucgcgucggucaugg

SEQ ID NO: 218520 - RNA, 19 nt, Artificial Sequence
  Description of Artificial Sequence: Synthetic oligonucleotide
gcugugauaacucgcuuac

SEQ ID NO: 218521 - RNA, 19 nt, Artificial Sequence
  Description of Artificial Sequence: Synthetic oligonucleotide
aucgcgucggucauggcag

SEQ ID NO: 218522 - RNA, 19 nt, Artificial Sequence
  Description of Artificial Sequence: Synthetic oligonucleotide
guugcuugagcugagucaa

SEQ ID NO: 218523 - RNA, 19 nt, Artificial Sequence
  Description of Artificial Sequence: Synthetic oligonucleotide
gcaacaaaggggcaguguc

SEQ ID NO: 218524 - RNA, 19 nt, Artificial Sequence
  Description of Artificial Sequence: Synthetic oligonucleotide
uuuugcuaggcaccauguu

SEQ ID NO: 218525 - RNA, 19 nt, Artificial Sequence
  Description of Artificial Sequence: Synthetic oligonucleotide
agcuaugaaaacaucuuua

SEQ ID NO: 218526 - RNA, 19 nt, Artificial Sequence
  Description of Artificial Sequence: Synthetic oligonucleotide
agcugugauaacucgcuua

SEQ ID NO: 218527 - RNA, 19 nt, Artificial Sequence
  Description of Artificial Sequence: Synthetic oligonucleotide
ucuuaagcacgguuaucua

SEQ ID NO: 218528 - RNA, 19 nt, Artificial Sequence
  Description of Artificial Sequence: Synthetic oligonucleotide
aguuuugaggagggcauca

SEQ ID NO: 218529 - RNA, 19 nt, Artificial Sequence
  Description of Artificial Sequence: Synthetic oligonucleotide
cugguuggaacuaacuucu

SEQ ID NO: 218530 - RNA, 19 nt, Artificial Sequence
  Description of Artificial Sequence: Synthetic oligonucleotide
uggccucuuucauaucccc

SEQ ID NO: 218531 - RNA, 19 nt, Artificial Sequence
  Description of Artificial Sequence: Synthetic oligonucleotide
cugggacaaaaucuuucac

SEQ ID NO: 218532 - RNA, 19 nt, Artificial Sequence
  Description of Artificial Sequence: Synthetic oligonucleotide
guaaauagggcaaggacau

SEQ ID NO: 218533 - RNA, 19 nt, Artificial Sequence
  Description of Artificial Sequence: Synthetic oligonucleotide
uuauucuaauuagcuuaga

SEQ ID NO: 218534 - RNA, 19 nt, Artificial Sequence
  Description of Artificial Sequence: Synthetic oligonucleotide
gugguuuuguaauuucuua

SEQ ID NO: 218535 - RNA, 19 nt, Artificial Sequence
  Description of Artificial Sequence: Synthetic oligonucleotide
cucguucaaaacuuuggaa

SEQ ID NO: 218536 - RNA, 19 nt, Artificial Sequence
  Description of Artificial Sequence: Synthetic oligonucleotide
uuguggaguaggagagcug

SEQ ID NO: 218537 - RNA, 19 nt, Artificial Sequence
  Description of Artificial Sequence: Synthetic oligonucleotide
uguguucgucuaccaguug

SEQ ID NO: 218538 - RNA, 19 nt, Artificial Sequence
  Description of Artificial Sequence: Synthetic oligonucleotide
accauguuaccauguugga

SEQ ID NO: 218539 - RNA, 19 nt, Artificial Sequence
  Description of Artificial Sequence: Synthetic oligonucleotide
aggaacaccaccacguaaa

SEQ ID NO: 218540 - RNA, 19 nt, Artificial Sequence
  Description of Artificial Sequence: Synthetic oligonucleotide
agaccuguaaauagggcaa

SEQ ID NO: 218541 - RNA, 19 nt, Artificial Sequence
  Description of Artificial Sequence: Synthetic oligonucleotide
acguaaagccacuuuuauu

SEQ ID NO: 218542 - RNA, 19 nt, Artificial Sequence
  Description of Artificial Sequence: Synthetic oligonucleotide
acuucgaaccugggcgacc

SEQ ID NO: 218543 - RNA, 19 nt, Artificial Sequence
  Description of Artificial Sequence: Synthetic oligonucleotide
aauaggcaacaaaggggca

SEQ ID NO: 218544 - RNA, 19 nt, Artificial Sequence
  Description of Artificial Sequence: Synthetic oligonucleotide
agucuuaagcacgguuauc

SEQ ID NO: 218545 - RNA, 19 nt, Artificial Sequence
  Description of Artificial Sequence: Synthetic oligonucleotide
agcagucuuaagcacgguu

SEQ ID NO: 218546 - RNA, 19 nt, Artificial Sequence
  Description of Artificial Sequence: Synthetic oligonucleotide
ccauaagagaggcugcaag

SEQ ID NO: 218547 - RNA, 19 nt, Artificial Sequence
  Description of Artificial Sequence: Synthetic oligonucleotide
gacaguucacccuuggauu

SEQ ID NO: 218548 - RNA, 19 nt, Artificial Sequence
  Description of Artificial Sequence: Synthetic oligonucleotide
gucuuaagcacgguuaucu

SEQ ID NO: 218549 - RNA, 19 nt, Artificial Sequence
  Description of Artificial Sequence: Synthetic oligonucleotide
guagacugcagaaaauucu

SEQ ID NO: 218550 - RNA, 19 nt, Artificial Sequence
  Description of Artificial Sequence: Synthetic oligonucleotide
uccgcagugugguuaucac

SEQ ID NO: 218551 - RNA, 19 nt, Artificial Sequence
  Description of Artificial Sequence: Synthetic oligonucleotide
caaaccgugagaccuguaa

SEQ ID NO: 218552 - RNA, 19 nt, Artificial Sequence
  Description of Artificial Sequence: Synthetic oligonucleotide
ugcagaaguuccguuacuu

SEQ ID NO: 218553 - RNA, 19 nt, Artificial Sequence
  Description of Artificial Sequence: Synthetic oligonucleotide
cugcaagcaaguuaaacau

SEQ ID NO: 218554 - RNA, 19 nt, Artificial Sequence
  Description of Artificial Sequence: Synthetic oligonucleotide
uaguggucggcgacaacuc

SEQ ID NO: 218555 - RNA, 19 nt, Artificial Sequence
  Description of Artificial Sequence: Synthetic oligonucleotide
gacagguuugucacgugca

SEQ ID NO: 218556 - RNA, 19 nt, Artificial Sequence
  Description of Artificial Sequence: Synthetic oligonucleotide
gaacggcauacagaagaug

SEQ ID NO: 218557 - RNA, 19 nt, Artificial Sequence
  Description of Artificial Sequence: Synthetic oligonucleotide
aggagcuaaucaucacacu

SEQ ID NO: 218558 - RNA, 19 nt, Artificial Sequence
  Description of Artificial Sequence: Synthetic oligonucleotide
ugcuaggcaccauguuacc

SEQ ID NO: 218559 - RNA, 19 nt, Artificial Sequence
  Description of Artificial Sequence: Synthetic oligonucleotide
cucacuguauucagaagua

SEQ ID NO: 218560 - RNA, 19 nt, Artificial Sequence
  Description of Artificial Sequence: Synthetic oligonucleotide
auguuaccauguuggacaa

SEQ ID NO: 218561 - RNA, 19 nt, Artificial Sequence
  Description of Artificial Sequence: Synthetic oligonucleotide
ggguuuagcuaugaaaaca

SEQ ID NO: 218562 - RNA, 19 nt, Artificial Sequence
  Description of Artificial Sequence: Synthetic oligonucleotide
cauggauaagaacaauggu

SEQ ID NO: 218563 - RNA, 19 nt, Artificial Sequence
  Description of Artificial Sequence: Synthetic oligonucleotide
cuuaccuguuuauugaguu

SEQ ID NO: 218564 - RNA, 19 nt, Artificial Sequence
  Description of Artificial Sequence: Synthetic oligonucleotide
acacaguuuacuguccuuu

SEQ ID NO: 218565 - RNA, 19 nt, Artificial Sequence
  Description of Artificial Sequence: Synthetic oligonucleotide
ucggucauggcagcuuucu

SEQ ID NO: 218566 - RNA, 19 nt, Artificial Sequence
  Description of Artificial Sequence: Synthetic oligonucleotide
aauagggcaaggacauaua

SEQ ID NO: 218567 - RNA, 19 nt, Artificial Sequence
  Description of Artificial Sequence: Synthetic oligonucleotide
uccuugcuugcuaggugcu

SEQ ID NO: 218568 - RNA, 19 nt, Artificial Sequence
  Description of Artificial Sequence: Synthetic oligonucleotide
caguugcuugagcugaguc

SEQ ID NO: 218569 - RNA, 19 nt, Artificial Sequence
  Description of Artificial Sequence: Synthetic oligonucleotide
gggguguuuacagauacuc

SEQ ID NO: 218570 - RNA, 19 nt, Artificial Sequence
  Description of Artificial Sequence: Synthetic oligonucleotide
caucgcgucggucauggca

SEQ ID NO: 218571 - RNA, 19 nt, Artificial Sequence
  Description of Artificial Sequence: Synthetic oligonucleotide
ugguguugcuucuuacauu

SEQ ID NO: 218572 - RNA, 19 nt, Artificial Sequence
  Description of Artificial Sequence: Synthetic oligonucleotide
cauuaaucuuuaccuaaua

SEQ ID NO: 218573 - RNA, 19 nt, Artificial Sequence
  Description of Artificial Sequence: Synthetic oligonucleotide
ugagcgcgcuggaauuucu

SEQ ID NO: 218574 - RNA, 19 nt, Artificial Sequence
  Description of Artificial Sequence: Synthetic oligonucleotide
gcauccuacaaaaugucuc

SEQ ID NO: 218575 - RNA, 19 nt, Artificial Sequence
  Description of Artificial Sequence: Synthetic oligonucleotide
ccgugagaccuguaaauag

SEQ ID NO: 218576 - RNA, 19 nt, Artificial Sequence
  Description of Artificial Sequence: Synthetic oligonucleotide
guaguggucggcgacaacu

SEQ ID NO: 218577 - RNA, 19 nt, Artificial Sequence
  Description of Artificial Sequence: Synthetic oligonucleotide
agaaacugguuggaacuaa

SEQ ID NO: 218578 - RNA, 19 nt, Artificial Sequence
  Description of Artificial Sequence: Synthetic oligonucleotide
auaacucgcuuaccuguuu

SEQ ID NO: 218579 - RNA, 19 nt, Artificial Sequence
  Description of Artificial Sequence: Synthetic oligonucleotide
uccccagcgucaucagggc

SEQ ID NO: 218580 - RNA, 19 nt, Artificial Sequence
  Description of Artificial Sequence: Synthetic oligonucleotide
ucucauacauagggguuua

SEQ ID NO: 218581 - RNA, 19 nt, Artificial Sequence
  Description of Artificial Sequence: Synthetic oligonucleotide
acacucacuucuaauguua

SEQ ID NO: 218582 - RNA, 19 nt, Artificial Sequence
  Description of Artificial Sequence: Synthetic oligonucleotide
gcaauauguugauuuacua

SEQ ID NO: 218583 - RNA, 19 nt, Artificial Sequence
  Description of Artificial Sequence: Synthetic oligonucleotide
aucaaaccgugagaccugu

SEQ ID NO: 218584 - RNA, 19 nt, Artificial Sequence
  Description of Artificial Sequence: Synthetic oligonucleotide
aaaggacgcuaaacacuca

SEQ ID NO: 218585 - RNA, 19 nt, Artificial Sequence
  Description of Artificial Sequence: Synthetic oligonucleotide
ccagcuucgugacuucugc

SEQ ID NO: 218586 - RNA, 19 nt, Artificial Sequence
  Description of Artificial Sequence: Synthetic oligonucleotide
ggcccugaacggcauacag

SEQ ID NO: 218587 - RNA, 19 nt, Artificial Sequence
  Description of Artificial Sequence: Synthetic oligonucleotide
uggacagguuugucacgug

SEQ ID NO: 218588 - RNA, 19 nt, Artificial Sequence
  Description of Artificial Sequence: Synthetic oligonucleotide
uuccgcuuuugcccuggac

SEQ ID NO: 218589 - RNA, 19 nt, Artificial Sequence
  Description of Artificial Sequence: Synthetic oligonucleotide
uggauuuccugagcuucgu

SEQ ID NO: 218590 - RNA, 19 nt, Artificial Sequence
  Description of Artificial Sequence: Synthetic oligonucleotide
gagaccucacuucgaaccu

SEQ ID NO: 218591 - RNA, 19 nt, Artificial Sequence
  Description of Artificial Sequence: Synthetic oligonucleotide
uccguuacuuccugcucuu

SEQ ID NO: 218592 - RNA, 19 nt, Artificial Sequence
  Description of Artificial Sequence: Synthetic oligonucleotide
aguacucaucaaaccguga

SEQ ID NO: 218593 - RNA, 19 nt, Artificial Sequence
  Description of Artificial Sequence: Synthetic oligonucleotide
accugggcgaccuccgaau

SEQ ID NO: 218594 - RNA, 19 nt, Artificial Sequence
  Description of Artificial Sequence: Synthetic oligonucleotide
gggcaaggacauauaaggc

SEQ ID NO: 218595 - RNA, 19 nt, Artificial Sequence
  Description of Artificial Sequence: Synthetic oligonucleotide
gcagcucauguugaguuug

SEQ ID NO: 218596 - RNA, 19 nt, Artificial Sequence
  Description of Artificial Sequence: Synthetic oligonucleotide
acggcauacagaagaugca

SEQ ID NO: 218597 - RNA, 19 nt, Artificial Sequence
  Description of Artificial Sequence: Synthetic oligonucleotide
agcgucaucagggcuuccu

SEQ ID NO: 218598 - RNA, 19 nt, Artificial Sequence
  Description of Artificial Sequence: Synthetic oligonucleotide
accgugagaccuguaaaua

SEQ ID NO: 218599 - RNA, 19 nt, Artificial Sequence
  Description of Artificial Sequence: Synthetic oligonucleotide
auuucggacaacgcuucuu

SEQ ID NO: 218600 - RNA, 19 nt, Artificial Sequence
  Description of Artificial Sequence: Synthetic oligonucleotide
acgcuugacuguaauuaga

SEQ ID NO: 218601 - RNA, 19 nt, Artificial Sequence
  Description of Artificial Sequence: Synthetic oligonucleotide
cuuguggaguaggagagcu

SEQ ID NO: 218602 - RNA, 19 nt, Artificial Sequence
  Description of Artificial Sequence: Synthetic oligonucleotide
acaacgcuucuuccgcuuu

SEQ ID NO: 218603 - RNA, 19 nt, Artificial Sequence
  Description of Artificial Sequence: Synthetic oligonucleotide
gguuuagcuaugaaaacau

SEQ ID NO: 218604 - RNA, 19 nt, Artificial Sequence
  Description of Artificial Sequence: Synthetic oligonucleotide
uugguugcuaaggcauuua

SEQ ID NO: 218605 - RNA, 19 nt, Artificial Sequence
  Description of Artificial Sequence: Synthetic oligonucleotide
gcuaaacuacagcauauau

SEQ ID NO: 218606 - RNA, 19 nt, Artificial Sequence
  Description of Artificial Sequence: Synthetic oligonucleotide
caaugguaguggucggcga

SEQ ID NO: 218607 - RNA, 19 nt, Artificial Sequence
  Description of Artificial Sequence: Synthetic oligonucleotide
ccucacuucgaaccugggc

SEQ ID NO: 218608 - RNA, 19 nt, Artificial Sequence
  Description of Artificial Sequence: Synthetic oligonucleotide
ucauauccccagcgucauc

SEQ ID NO: 218609 - RNA, 19 nt, Artificial Sequence
  Description of Artificial Sequence: Synthetic oligonucleotide
aggacgcuaaacacucacu

SEQ ID NO: 218610 - RNA, 19 nt, Artificial Sequence
  Description of Artificial Sequence: Synthetic oligonucleotide
aggacucacuguauucaga

SEQ ID NO: 218611 - RNA, 19 nt, Artificial Sequence
  Description of Artificial Sequence: Synthetic oligonucleotide
cucauacauagggguuuag

SEQ ID NO: 218612 - RNA, 19 nt, Artificial Sequence
  Description of Artificial Sequence: Synthetic oligonucleotide
gucaacauauauuccccuu

SEQ ID NO: 218613 - RNA, 19 nt, Artificial Sequence
  Description of Artificial Sequence: Synthetic oligonucleotide
gcuaaacacucacuucuaa

SEQ ID NO: 218614 - RNA, 19 nt, Artificial Sequence
  Description of Artificial Sequence: Synthetic oligonucleotide
gugcugaauggcacagccc

SEQ ID NO: 218615 - RNA, 19 nt, Artificial Sequence
  Description of Artificial Sequence: Synthetic oligonucleotide
gaaucaauuuugggugcua

SEQ ID NO: 218616 - RNA, 19 nt, Artificial Sequence
  Description of Artificial Sequence: Synthetic oligonucleotide
ugguaguggucggcgacaa

SEQ ID NO: 218617 - RNA, 19 nt, Artificial Sequence
  Description of Artificial Sequence: Synthetic oligonucleotide
agugcacaccauggauaag

SEQ ID NO: 218618 - RNA, 19 nt, Artificial Sequence
  Description of Artificial Sequence: Synthetic oligonucleotide
agacuucauuucggacaac

SEQ ID NO: 218619 - RNA, 19 nt, Artificial Sequence
  Description of Artificial Sequence: Synthetic oligonucleotide
gucggcgacaacuccagau

SEQ ID NO: 218620 - RNA, 19 nt, Artificial Sequence
  Description of Artificial Sequence: Synthetic oligonucleotide
ccuuuaacuugguugcuaa

SEQ ID NO: 218621 - RNA, 19 nt, Artificial Sequence
  Description of Artificial Sequence: Synthetic oligonucleotide
ccauuuggcccugaacggc

SEQ ID NO: 218622 - RNA, 19 nt, Artificial Sequence
  Description of Artificial Sequence: Synthetic oligonucleotide
ggcaguguccugccaagga

SEQ ID NO: 218623 - RNA, 19 nt, Artificial Sequence
  Description of Artificial Sequence: Synthetic oligonucleotide
aagcagucuuaagcacggu

SEQ ID NO: 218624 - RNA, 19 nt, Artificial Sequence
  Description of Artificial Sequence: Synthetic oligonucleotide
cuuccuucgacaucucauu

SEQ ID NO: 218625 - RNA, 19 nt, Artificial Sequence
  Description of Artificial Sequence: Synthetic oligonucleotide
guggucggcgacaacucca

SEQ ID NO: 218626 - RNA, 19 nt, Artificial Sequence
  Description of Artificial Sequence: Synthetic oligonucleotide
cacguaaagccacuuuuau

SEQ ID NO: 218627 - RNA, 19 nt, Artificial Sequence
  Description of Artificial Sequence: Synthetic oligonucleotide
caguuuugaggagggcauc

SEQ ID NO: 218628 - RNA, 19 nt, Artificial Sequence
  Description of Artificial Sequence: Synthetic oligonucleotide
acucgcuuaccuguuuauu

SEQ ID NO: 218629 - RNA, 19 nt, Artificial Sequence
  Description of Artificial Sequence: Synthetic oligonucleotide
ggcuuagcagaucacucua

SEQ ID NO: 218630 - RNA, 19 nt, Artificial Sequence
  Description of Artificial Sequence: Synthetic oligonucleotide
aggcaaguuugcauagaaa

SEQ ID NO: 218631 - RNA, 19 nt, Artificial Sequence
  Description of Artificial Sequence: Synthetic oligonucleotide
gcuucguggaugacagcag

SEQ ID NO: 218632 - RNA, 19 nt, Artificial Sequence
  Description of Artificial Sequence: Synthetic oligonucleotide
gagcgcgcuggaauuucug

SEQ ID NO: 218633 - RNA, 19 nt, Artificial Sequence
  Description of Artificial Sequence: Synthetic oligonucleotide
ccuaugcaguuuugaggag

SEQ ID NO: 218634 - RNA, 19 nt, Artificial Sequence
  Description of Artificial Sequence: Synthetic oligonucleotide
guccgcagugugguuauca

SEQ ID NO: 218635 - RNA, 19 nt, Artificial Sequence
  Description of Artificial Sequence: Synthetic oligonucleotide
cggacaacgcuucuuccgc

SEQ ID NO: 218636 - RNA, 19 nt, Artificial Sequence
  Description of Artificial Sequence: Synthetic oligonucleotide
gaaccugggcgaccuccga

SEQ ID NO: 218637 - RNA, 19 nt, Artificial Sequence
  Description of Artificial Sequence: Synthetic oligonucleotide
gauaacucgcuuaccuguu

SEQ ID NO: 218638 - RNA, 19 nt, Artificial Sequence
  Description of Artificial Sequence: Synthetic oligonucleotide
ggacgcuaaacacucacuu

SEQ ID NO: 218639 - RNA, 19 nt, Artificial Sequence
  Description of Artificial Sequence: Synthetic oligonucleotide
ggaauacugagacuucauu

SEQ ID NO: 218640 - RNA, 19 nt, Artificial Sequence
  Description of Artificial Sequence: Synthetic oligonucleotide
aggcaacaaaggggcagug

SEQ ID NO: 218641 - RNA, 19 nt, Artificial Sequence
  Description of Artificial Sequence: Synthetic oligonucleotide
ucgcgucggucauggcagc

SEQ ID NO: 218642 - RNA, 19 nt, Artificial Sequence
  Description of Artificial Sequence: Synthetic oligonucleotide
cugagcgcgcuggaauuuc

SEQ ID NO: 218643 - RNA, 19 nt, Artificial Sequence
  Description of Artificial Sequence: Synthetic oligonucleotide
ccuguaaauagggcaagga

SEQ ID NO: 218644 - RNA, 19 nt, Artificial Sequence
  Description of Artificial Sequence: Synthetic oligonucleotide
cacuucgaaccugggcgac

SEQ ID NO: 218645 - RNA, 19 nt, Artificial Sequence
  Description of Artificial Sequence: Synthetic oligonucleotide
cgcuuaccuguuuauugag

SEQ ID NO: 218646 - RNA, 19 nt, Artificial Sequence
  Description of Artificial Sequence: Synthetic oligonucleotide
cugaaguaccuaugcaguu

SEQ ID NO: 218647 - RNA, 19 nt, Artificial Sequence
  Description of Artificial Sequence: Synthetic oligonucleotide
cagucuuaagcacgguuau

SEQ ID NO: 218648 - RNA, 19 nt, Artificial Sequence
  Description of Artificial Sequence: Synthetic oligonucleotide
gacuguaauuagacaacuu

SEQ ID NO: 218649 - RNA, 19 nt, Artificial Sequence
  Description of Artificial Sequence: Synthetic oligonucleotide
gacaacgcuucuuccgcuu

SEQ ID NO: 218650 - RNA, 19 nt, Artificial Sequence
  Description of Artificial Sequence: Synthetic oligonucleotide
ggcuacacuuugucaggca

SEQ ID NO: 218651 - RNA, 19 nt, Artificial Sequence
  Description of Artificial Sequence: Synthetic oligonucleotide
aguuguccgcagugugguu

SEQ ID NO: 218652 - RNA, 19 nt, Artificial Sequence
  Description of Artificial Sequence: Synthetic oligonucleotide
ucgugacuucugcuuccuu

SEQ ID NO: 218653 - RNA, 19 nt, Artificial Sequence
  Description of Artificial Sequence: Synthetic oligonucleotide
agccucucguguucugcuu

SEQ ID NO: 218654 - RNA, 19 nt, Artificial Sequence
  Description of Artificial Sequence: Synthetic oligonucleotide
ccgauaugaccuccuggug

SEQ ID NO: 218655 - RNA, 19 nt, Artificial Sequence
  Description of Artificial Sequence: Synthetic oligonucleotide
gagaaacgcuugacuguaa

SEQ ID NO: 218656 - RNA, 19 nt, Artificial Sequence
  Description of Artificial Sequence: Synthetic oligonucleotide
gguugcuaaggcauuuacu

SEQ ID NO: 218657 - RNA, 19 nt, Artificial Sequence
  Description of Artificial Sequence: Synthetic oligonucleotide
gcgcgcuggaauuucugca

SEQ ID NO: 218658 - RNA, 19 nt, Artificial Sequence
  Description of Artificial Sequence: Synthetic oligonucleotide
ccucucguguucugcuuug

SEQ ID NO: 218659 - RNA, 19 nt, Artificial Sequence
  Description of Artificial Sequence: Synthetic oligonucleotide
cgaaugggcuuucucuuuc

SEQ ID NO: 218660 - RNA, 19 nt, Artificial Sequence
  Description of Artificial Sequence: Synthetic oligonucleotide
auguucggugauggacaca

SEQ ID NO: 218661 - RNA, 19 nt, Artificial Sequence
  Description of Artificial Sequence: Synthetic oligonucleotide
caucuaucauccuguucau

SEQ ID NO: 218662 - RNA, 19 nt, Artificial Sequence
  Description of Artificial Sequence: Synthetic oligonucleotide
gcgacaacuccagaucuaa

SEQ ID NO: 218663 - RNA, 19 nt, Artificial Sequence
  Description of Artificial Sequence: Synthetic oligonucleotide
ggcauuuacuucacucucu

SEQ ID NO: 218664 - RNA, 19 nt, Artificial Sequence
  Description of Artificial Sequence: Synthetic oligonucleotide
gaccaucgcgucggucaug

SEQ ID NO: 218665 - RNA, 19 nt, Artificial Sequence
  Description of Artificial Sequence: Synthetic oligonucleotide
ggaaucaauuuugggugcu

SEQ ID NO: 218666 - RNA, 19 nt, Artificial Sequence
  Description of Artificial Sequence: Synthetic oligonucleotide
cuucgaaccugggcgaccu

SEQ ID NO: 218667 - RNA, 19 nt, Artificial Sequence
  Description of Artificial Sequence: Synthetic oligonucleotide
ggcauccuacaaaaugucu

SEQ ID NO: 218668 - RNA, 19 nt, Artificial Sequence
  Description of Artificial Sequence: Synthetic oligonucleotide
ccacguaaagccacuuuua

SEQ ID NO: 218669 - RNA, 19 nt, Artificial Sequence
  Description of Artificial Sequence: Synthetic oligonucleotide
uggggaccaucgcgucggu

SEQ ID NO: 218670 - RNA, 19 nt, Artificial Sequence
  Description of Artificial Sequence: Synthetic oligonucleotide
ccuucgacaucucauuuau

SEQ ID NO: 218671 - RNA, 19 nt, Artificial Sequence
  Description of Artificial Sequence: Synthetic oligonucleotide
gcauuaaucuuuaccuaau

SEQ ID NO: 218672 - RNA, 19 nt, Artificial Sequence
  Description of Artificial Sequence: Synthetic oligonucleotide
ugcuagaguuugggguguu

SEQ ID NO: 218673 - RNA, 19 nt, Artificial Sequence
  Description of Artificial Sequence: Synthetic oligonucleotide
ggcaaagaaaggacucacu

SEQ ID NO: 218674 - RNA, 19 nt, Artificial Sequence
  Description of Artificial Sequence: Synthetic oligonucleotide
guuuugaggagggcaucau

SEQ ID NO: 218675 - RNA, 19 nt, Artificial Sequence
  Description of Artificial Sequence: Synthetic oligonucleotide
ccugggcgaccuccgaaug

SEQ ID NO: 218676 - RNA, 19 nt, Artificial Sequence
  Description of Artificial Sequence: Synthetic oligonucleotide
gcccugaacggcauacaga

SEQ ID NO: 218677 - RNA, 19 nt, Artificial Sequence
  Description of Artificial Sequence: Synthetic oligonucleotide
caguucacccuuggauuaa

SEQ ID NO: 218678 - RNA, 19 nt, Artificial Sequence
  Description of Artificial Sequence: Synthetic oligonucleotide
gcuuaccuguuuauugagu

SEQ ID NO: 218679 - RNA, 19 nt, Artificial Sequence
  Description of Artificial Sequence: Synthetic oligonucleotide
gagcugcgagaggcuguug

SEQ ID NO: 218680 - RNA, 19 nt, Artificial Sequence
  Description of Artificial Sequence: Synthetic oligonucleotide
cugcagaaguuccguuacu

SEQ ID NO: 218681 - RNA, 19 nt, Artificial Sequence
  Description of Artificial Sequence: Synthetic oligonucleotide
ggacaacgcuucuuccgcu

SEQ ID NO: 218682 - RNA, 19 nt, Artificial Sequence
  Description of Artificial Sequence: Synthetic oligonucleotide
gguguacugguggcagcuc

SEQ ID NO: 218683 - RNA, 19 nt, Artificial Sequence
  Description of Artificial Sequence: Synthetic oligonucleotide
ggcacgaaggaggugguuu

SEQ ID NO: 218684 - RNA, 19 nt, Artificial Sequence
  Description of Artificial Sequence: Synthetic oligonucleotide
uguccgcagugugguuauc

SEQ ID NO: 218685 - RNA, 19 nt, Artificial Sequence
  Description of Artificial Sequence: Synthetic oligonucleotide
ggcaacaaaggggcagugu

SEQ ID NO: 218686 - RNA, 19 nt, Artificial Sequence
  Description of Artificial Sequence: Synthetic oligonucleotide
gccauaagagaggcugcaa

SEQ ID NO: 218687 - RNA, 19 nt, Artificial Sequence
  Description of Artificial Sequence: Synthetic oligonucleotide
gcccaaaggcagagaucag

SEQ ID NO: 218688 - RNA, 19 nt, Artificial Sequence
  Description of Artificial Sequence: Synthetic oligonucleotide
gcacgaaggaggugguuuu

SEQ ID NO: 218689 - RNA, 19 nt, Artificial Sequence
  Description of Artificial Sequence: Synthetic oligonucleotide
ggcgacaacuccagaucua

SEQ ID NO: 218690 - RNA, 19 nt, Artificial Sequence
  Description of Artificial Sequence: Synthetic oligonucleotide
cuuugagguugccgauuuu

SEQ ID NO: 218691 - RNA, 19 nt, Artificial Sequence
  Description of Artificial Sequence: Synthetic oligonucleotide
gggcgaccuccgaaugggc

SEQ ID NO: 218692 - RNA, 19 nt, Artificial Sequence
  Description of Artificial Sequence: Synthetic oligonucleotide
cagcgucaucagggcuucc

SEQ ID NO: 218693 - RNA, 19 nt, Artificial Sequence
  Description of Artificial Sequence: Synthetic oligonucleotide
aggcugcaagcaaguuaaa

SEQ ID NO: 218694 - RNA, 19 nt, Artificial Sequence
  Description of Artificial Sequence: Synthetic oligonucleotide
ggaccaucgcgucggucau

SEQ ID NO: 218695 - RNA, 19 nt, Artificial Sequence
  Description of Artificial Sequence: Synthetic oligonucleotide
cuuuugcccuggacagguu

SEQ ID NO: 218696 - RNA, 19 nt, Artificial Sequence
  Description of Artificial Sequence: Synthetic oligonucleotide
ccgcagugugguuaucacu

SEQ ID NO: 218697 - RNA, 19 nt, Artificial Sequence
  Description of Artificial Sequence: Synthetic oligonucleotide
ccaucgcgucggucauggc

SEQ ID NO: 218698 - RNA, 19 nt, Artificial Sequence
  Description of Artificial Sequence: Synthetic oligonucleotide
cggcgacaacuccagaucu

SEQ ID NO: 218699 - RNA, 19 nt, Artificial Sequence
  Description of Artificial Sequence: Synthetic oligonucleotide
ccgaaugggcuuucucuuu

SEQ ID NO: 218700 - RNA, 19 nt, Artificial Sequence
  Description of Artificial Sequence: Synthetic oligonucleotide
gcuagaguuugggguguuu

SEQ ID NO: 218701 - RNA, 19 nt, Artificial Sequence
  Description of Artificial Sequence: Synthetic oligonucleotide
cccucaccucugcuggucu

SEQ ID NO: 218702 - RNA, 19 nt, Artificial Sequence
  Description of Artificial Sequence: Synthetic oligonucleotide
gcgucggucauggcagcuu

SEQ ID NO: 218703 - RNA, 19 nt, Artificial Sequence
  Description of Artificial Sequence: Synthetic oligonucleotide
cgucggucauggcagcuuu

SEQ ID NO: 218704 - RNA, 19 nt, Artificial Sequence
  Description of Artificial Sequence: Synthetic oligonucleotide
gggcacgaaggaggugguu

SEQ ID NO: 218705 - RNA, 19 nt, Artificial Sequence
  Description of Artificial Sequence: Synthetic oligonucleotide
cgaccuccgaaugggcuuu

SEQ ID NO: 218706 - RNA, 19 nt, Artificial Sequence
  Description of Artificial Sequence: Synthetic oligonucleotide
ccguuacuuccugcucuuu

SEQ ID NO: 218707 - RNA, 19 nt, Artificial Sequence
  Description of Artificial Sequence: Synthetic oligonucleotide
cgcgucggucauggcagcu

SEQ ID NO: 218708 - RNA, 19 nt, Artificial Sequence
  Description of Artificial Sequence: Synthetic oligonucleotide
aaaggggauacuuaaaagc

SEQ ID NO: 218709 - RNA, 19 nt, Artificial Sequence
  Description of Artificial Sequence: Synthetic oligonucleotide
aaauagcucaguuuauccc

SEQ ID NO: 218710 - RNA, 19 nt, Artificial Sequence
  Description of Artificial Sequence: Synthetic oligonucleotide
aauucuaggcuacagucac

SEQ ID NO: 218711 - RNA, 19 nt, Artificial Sequence
  Description of Artificial Sequence: Synthetic oligonucleotide
aacacgguaaucuagucag

SEQ ID NO: 218712 - RNA, 19 nt, Artificial Sequence
  Description of Artificial Sequence: Synthetic oligonucleotide
aguagcauuagucuucugc

SEQ ID NO: 218713 - RNA, 19 nt, Artificial Sequence
  Description of Artificial Sequence: Synthetic oligonucleotide
uacaguaagggauugaaag

SEQ ID NO: 218714 - RNA, 19 nt, Artificial Sequence
  Description of Artificial Sequence: Synthetic oligonucleotide
gucacuuggaaauaaaggg

SEQ ID NO: 218715 - RNA, 19 nt, Artificial Sequence
  Description of Artificial Sequence: Synthetic oligonucleotide
agaaugagcacagaaaggc

SEQ ID NO: 218716 - RNA, 19 nt, Artificial Sequence
  Description of Artificial Sequence: Synthetic oligonucleotide
ugugguaagaauucuaggc

SEQ ID NO: 218717 - RNA, 19 nt, Artificial Sequence
  Description of Artificial Sequence: Synthetic oligonucleotide
ugaaaguuuguaaacagac

SEQ ID NO: 218718 - RNA, 19 nt, Artificial Sequence
  Description of Artificial Sequence: Synthetic oligonucleotide
aaggggauacuuaaaagcc

SEQ ID NO: 218719 - RNA, 19 nt, Artificial Sequence
  Description of Artificial Sequence: Synthetic oligonucleotide
agaauucuaggcuacaguc

SEQ ID NO: 218720 - RNA, 19 nt, Artificial Sequence
  Description of Artificial Sequence: Synthetic oligonucleotide
uugacaagagauuacuagg

SEQ ID NO: 218721 - RNA, 19 nt, Artificial Sequence
  Description of Artificial Sequence: Synthetic oligonucleotide
aaacagacgcuucucuugc

SEQ ID NO: 218722 - RNA, 19 nt, Artificial Sequence
  Description of Artificial Sequence: Synthetic oligonucleotide
guuccuaacauuuggaugc

SEQ ID NO: 218723 - RNA, 19 nt, Artificial Sequence
  Description of Artificial Sequence: Synthetic oligonucleotide
aaaagaccaggacucuugc

SEQ ID NO: 218724 - RNA, 19 nt, Artificial Sequence
  Description of Artificial Sequence: Synthetic oligonucleotide
aauagcucaguuuauccca

SEQ ID NO: 218725 - RNA, 19 nt, Artificial Sequence
  Description of Artificial Sequence: Synthetic oligonucleotide
aaggguaggcauuccaggc

SEQ ID NO: 218726 - RNA, 19 nt, Artificial Sequence
  Description of Artificial Sequence: Synthetic oligonucleotide
uggacaacucuccaggugg

SEQ ID NO: 218727 - RNA, 19 nt, Artificial Sequence
  Description of Artificial Sequence: Synthetic oligonucleotide
ugaagcuacauuccuauug

SEQ ID NO: 218728 - RNA, 19 nt, Artificial Sequence
  Description of Artificial Sequence: Synthetic oligonucleotide
uuaaccagagauacaauga

SEQ ID NO: 218729 - RNA, 19 nt, Artificial Sequence
  Description of Artificial Sequence: Synthetic oligonucleotide
aaucuagagaacuaagaau

SEQ ID NO: 218730 - RNA, 19 nt, Artificial Sequence
  Description of Artificial Sequence: Synthetic oligonucleotide
aacaaauccggguacuuug

SEQ ID NO: 218731 - RNA, 19 nt, Artificial Sequence
  Description of Artificial Sequence: Synthetic oligonucleotide
aguaagugagcuuaaauaa

SEQ ID NO: 218732 - RNA, 19 nt, Artificial Sequence
  Description of Artificial Sequence: Synthetic oligonucleotide
uuuugauuguccaguacag

SEQ ID NO: 218733 - RNA, 19 nt, Artificial Sequence
  Description of Artificial Sequence: Synthetic oligonucleotide
aucuagagaacuaagaaug

SEQ ID NO: 218734 - RNA, 19 nt, Artificial Sequence
  Description of Artificial Sequence: Synthetic oligonucleotide
gcuaaauuuccuuagacug

SEQ ID NO: 218735 - RNA, 19 nt, Artificial Sequence
  Description of Artificial Sequence: Synthetic oligonucleotide
aaucucaggaaauucuagu

SEQ ID NO: 218736 - RNA, 19 nt, Artificial Sequence
  Description of Artificial Sequence: Synthetic oligonucleotide
auauauacagcuuccacau

SEQ ID NO: 218737 - RNA, 19 nt, Artificial Sequence
  Description of Artificial Sequence: Synthetic oligonucleotide
auacagacuaaucucagga

SEQ ID NO: 218738 - RNA, 19 nt, Artificial Sequence
  Description of Artificial Sequence: Synthetic oligonucleotide
ucucaucucauccagcugu

SEQ ID NO: 218739 - RNA, 19 nt, Artificial Sequence
  Description of Artificial Sequence: Synthetic oligonucleotide
aauccggguacuuugcucu

SEQ ID NO: 218740 - RNA, 19 nt, Artificial Sequence
  Description of Artificial Sequence: Synthetic oligonucleotide
ugacaagagauuacuagga

SEQ ID NO: 218741 - RNA, 19 nt, Artificial Sequence
  Description of Artificial Sequence: Synthetic oligonucleotide
gaaaguuuguaaacagacg

SEQ ID NO: 218742 - RNA, 19 nt, Artificial Sequence
  Description of Artificial Sequence: Synthetic oligonucleotide
aagaauucuaggcuacagu

SEQ ID NO: 218743 - RNA, 19 nt, Artificial Sequence
  Description of Artificial Sequence: Synthetic oligonucleotide
ucuagagaacuaagaaugc

SEQ ID NO: 218744 - RNA, 19 nt, Artificial Sequence
  Description of Artificial Sequence: Synthetic oligonucleotide
uaaucucaggaaauucuag

SEQ ID NO: 218745 - RNA, 19 nt, Artificial Sequence
  Description of Artificial Sequence: Synthetic oligonucleotide
uaaggguaggcauuccagg

SEQ ID NO: 218746 - RNA, 19 nt, Artificial Sequence
  Description of Artificial Sequence: Synthetic oligonucleotide
aguuuaugcacauucuccu

SEQ ID NO: 218747 - RNA, 19 nt, Artificial Sequence
  Description of Artificial Sequence: Synthetic oligonucleotide
uguaauaccagacggucua

SEQ ID NO: 218748 - RNA, 19 nt, Artificial Sequence
  Description of Artificial Sequence: Synthetic oligonucleotide
uaucgagccaacagaacag

SEQ ID NO: 218749 - RNA, 19 nt, Artificial Sequence
  Description of Artificial Sequence: Synthetic oligonucleotide
ucuaggauuuuauuagacu

SEQ ID NO: 218750 - RNA, 19 nt, Artificial Sequence
  Description of Artificial Sequence: Synthetic oligonucleotide
aguuccuaacauuuggaug

SEQ ID NO: 218751 - RNA, 19 nt, Artificial Sequence
  Description of Artificial Sequence: Synthetic oligonucleotide
uuauuagacugcuuucccc

SEQ ID NO: 218752 - RNA, 19 nt, Artificial Sequence
  Description of Artificial Sequence: Synthetic oligonucleotide
ugcuaaauuuccuuagacu

SEQ ID NO: 218753 - RNA, 19 nt, Artificial Sequence
  Description of Artificial Sequence: Synthetic oligonucleotide
gaaauucuaguuccuaaca

SEQ ID NO: 218754 - RNA, 19 nt, Artificial Sequence
  Description of Artificial Sequence: Synthetic oligonucleotide
gacaagagauuacuaggag

SEQ ID NO: 218755 - RNA, 19 nt, Artificial Sequence
  Description of Artificial Sequence: Synthetic oligonucleotide
gcuuuguaauaccagacgg

SEQ ID NO: 218756 - RNA, 19 nt, Artificial Sequence
  Description of Artificial Sequence: Synthetic oligonucleotide
uaacgguucugcaguaagg

SEQ ID NO: 218757 - RNA, 19 nt, Artificial Sequence
  Description of Artificial Sequence: Synthetic oligonucleotide
auuacuaggagcagagguc

SEQ ID NO: 218758 - RNA, 19 nt, Artificial Sequence
  Description of Artificial Sequence: Synthetic oligonucleotide
cugaacucuaaauacucug

SEQ ID NO: 218759 - RNA, 19 nt, Artificial Sequence
  Description of Artificial Sequence: Synthetic oligonucleotide
auaacgguucugcaguaag

SEQ ID NO: 218760 - RNA, 19 nt, Artificial Sequence
  Description of Artificial Sequence: Synthetic oligonucleotide
uggacauuagagcaucacu

SEQ ID NO: 218761 - RNA, 19 nt, Artificial Sequence
  Description of Artificial Sequence: Synthetic oligonucleotide
ugcuuauguauaaaguuuu

SEQ ID NO: 218762 - RNA, 19 nt, Artificial Sequence
  Description of Artificial Sequence: Synthetic oligonucleotide
uaccuguauuggaagauug

SEQ ID NO: 218763 - RNA, 19 nt, Artificial Sequence
  Description of Artificial Sequence: Synthetic oligonucleotide
aagggauugaaaguugccu

SEQ ID NO: 218764 - RNA, 19 nt, Artificial Sequence
  Description of Artificial Sequence: Synthetic oligonucleotide
ugauuguccaguacagaac

SEQ ID NO: 218765 - RNA, 19 nt, Artificial Sequence
  Description of Artificial Sequence: Synthetic oligonucleotide
agaucaacccauuuaucga

SEQ ID NO: 218766 - RNA, 19 nt, Artificial Sequence
  Description of Artificial Sequence: Synthetic oligonucleotide
uauagagcuccuacaggcc

SEQ ID NO: 218767 - RNA, 19 nt, Artificial Sequence
  Description of Artificial Sequence: Synthetic oligonucleotide
gauuacuaggagcagaggu

SEQ ID NO: 218768 - RNA, 19 nt, Artificial Sequence
  Description of Artificial Sequence: Synthetic oligonucleotide
uaagggauugaaaguugcc

SEQ ID NO: 218769 - RNA, 19 nt, Artificial Sequence
  Description of Artificial Sequence: Synthetic oligonucleotide
auacucaacauugccaaag

SEQ ID NO: 218770 - RNA, 19 nt, Artificial Sequence
  Description of Artificial Sequence: Synthetic oligonucleotide
gacucgauacuccuugagc

SEQ ID NO: 218771 - RNA, 19 nt, Artificial Sequence
  Description of Artificial Sequence: Synthetic oligonucleotide
uuuccuuagacuggcuggg

SEQ ID NO: 218772 - RNA, 19 nt, Artificial Sequence
  Description of Artificial Sequence: Synthetic oligonucleotide
uggaugcuuucaaauguag

SEQ ID NO: 218773 - RNA, 19 nt, Artificial Sequence
  Description of Artificial Sequence: Synthetic oligonucleotide
uuggcagauuuaaauuuug

SEQ ID NO: 218774 - RNA, 19 nt, Artificial Sequence
  Description of Artificial Sequence: Synthetic oligonucleotide
uccuauuguguagaacugg

SEQ ID NO: 218775 - RNA, 19 nt, Artificial Sequence
  Description of Artificial Sequence: Synthetic oligonucleotide
agacauaggauuauugcug

SEQ ID NO: 218776 - RNA, 19 nt, Artificial Sequence
  Description of Artificial Sequence: Synthetic oligonucleotide
uuacuaggagcagagguca

SEQ ID NO: 218777 - RNA, 19 nt, Artificial Sequence
  Description of Artificial Sequence: Synthetic oligonucleotide
agcaccaugucgcuucgcg

SEQ ID NO: 218778 - RNA, 19 nt, Artificial Sequence
  Description of Artificial Sequence: Synthetic oligonucleotide
uggcagauuuaaauuuugc

SEQ ID NO: 218779 - RNA, 19 nt, Artificial Sequence
  Description of Artificial Sequence: Synthetic oligonucleotide
agacacaucaguaggagcu

SEQ ID NO: 218780 - RNA, 19 nt, Artificial Sequence
  Description of Artificial Sequence: Synthetic oligonucleotide
aauacucugucuaggauuu

SEQ ID NO: 218781 - RNA, 19 nt, Artificial Sequence
  Description of Artificial Sequence: Synthetic oligonucleotide
gucaggacacaauggagag

SEQ ID NO: 218782 - RNA, 19 nt, Artificial Sequence
  Description of Artificial Sequence: Synthetic oligonucleotide
cuacauuccuauuguguag

SEQ ID NO: 218783 - RNA, 19 nt, Artificial Sequence
  Description of Artificial Sequence: Synthetic oligonucleotide
gacauaggauuauugcuga

SEQ ID NO: 218784 - RNA, 19 nt, Artificial Sequence
  Description of Artificial Sequence: Synthetic oligonucleotide
agagauucagacagagugg

SEQ ID NO: 218785 - RNA, 19 nt, Artificial Sequence
  Description of Artificial Sequence: Synthetic oligonucleotide
gaacuaagaaugcucagua

SEQ ID NO: 218786 - RNA, 19 nt, Artificial Sequence
  Description of Artificial Sequence: Synthetic oligonucleotide
ucaacccauuuaucgagcc

SEQ ID NO: 218787 - RNA, 19 nt, Artificial Sequence
  Description of Artificial Sequence: Synthetic oligonucleotide
uuuaucgagccaacagaac

SEQ ID NO: 218788 - RNA, 19 nt, Artificial Sequence
  Description of Artificial Sequence: Synthetic oligonucleotide
gagaacuaagaaugcucag

SEQ ID NO: 218789 - RNA, 19 nt, Artificial Sequence
  Description of Artificial Sequence: Synthetic oligonucleotide
acgguaaucuagucaguuc

SEQ ID NO: 218790 - RNA, 19 nt, Artificial Sequence
  Description of Artificial Sequence: Synthetic oligonucleotide
uaagaaccaccccaaguaa

SEQ ID NO: 218791 - RNA, 19 nt, Artificial Sequence
  Description of Artificial Sequence: Synthetic oligonucleotide
guaagucagggacccaggg

SEQ ID NO: 218792 - RNA, 19 nt, Artificial Sequence
  Description of Artificial Sequence: Synthetic oligonucleotide
gauuguccaguacagaacu

SEQ ID NO: 218793 - RNA, 19 nt, Artificial Sequence
  Description of Artificial Sequence: Synthetic oligonucleotide
cuaaauacucugucuagga

SEQ ID NO: 218794 - RNA, 19 nt, Artificial Sequence
  Description of Artificial Sequence: Synthetic oligonucleotide
ugguaagaauucuaggcua

SEQ ID NO: 218795 - RNA, 19 nt, Artificial Sequence
  Description of Artificial Sequence: Synthetic oligonucleotide
guaauaacgguucugcagu

SEQ ID NO: 218796 - RNA, 19 nt, Artificial Sequence
  Description of Artificial Sequence: Synthetic oligonucleotide
cauuuaucgagccaacaga

SEQ ID NO: 218797 - RNA, 19 nt, Artificial Sequence
  Description of Artificial Sequence: Synthetic oligonucleotide
accacgaccuaucccuccc

SEQ ID NO: 218798 - RNA, 19 nt, Artificial Sequence
  Description of Artificial Sequence: Synthetic oligonucleotide
aaaguugccugaagaauga

SEQ ID NO: 218799 - RNA, 19 nt, Artificial Sequence
  Description of Artificial Sequence: Synthetic oligonucleotide
ugacucgauacuccuugag

SEQ ID NO: 218800 - RNA, 19 nt, Artificial Sequence
  Description of Artificial Sequence: Synthetic oligonucleotide
ggcuuuguaauaccagacg

SEQ ID NO: 218801 - RNA, 19 nt, Artificial Sequence
  Description of Artificial Sequence: Synthetic oligonucleotide
gaccuaucccuccccagcg

SEQ ID NO: 218802 - RNA, 19 nt, Artificial Sequence
  Description of Artificial Sequence: Synthetic oligonucleotide
ugccuuguaauccuugcua

SEQ ID NO: 218803 - RNA, 19 nt, Artificial Sequence
  Description of Artificial Sequence: Synthetic oligonucleotide
cauaauccuacccugguaa

SEQ ID NO: 218804 - RNA, 19 nt, Artificial Sequence
  Description of Artificial Sequence: Synthetic oligonucleotide
ccgaaugucauccauaguc

SEQ ID NO: 218805 - RNA, 19 nt, Artificial Sequence
  Description of Artificial Sequence: Synthetic oligonucleotide
agaccaaggacaucccucu

SEQ ID NO: 218806 - RNA, 19 nt, Artificial Sequence
  Description of Artificial Sequence: Synthetic oligonucleotide
acaaauccggguacuuugc

SEQ ID NO: 218807 - RNA, 19 nt, Artificial Sequence
  Description of Artificial Sequence: Synthetic oligonucleotide
aucgagccaacagaacagc

SEQ ID NO: 218808 - RNA, 19 nt, Artificial Sequence
  Description of Artificial Sequence: Synthetic oligonucleotide
guuuaugcacauucuccug

SEQ ID NO: 218809 - RNA, 19 nt, Artificial Sequence
  Description of Artificial Sequence: Synthetic oligonucleotide
uaguuccuaacauuuggau

SEQ ID NO: 218810 - RNA, 19 nt, Artificial Sequence
  Description of Artificial Sequence: Synthetic oligonucleotide
uacagacuaaucucaggaa

SEQ ID NO: 218811 - RNA, 19 nt, Artificial Sequence
  Description of Artificial Sequence: Synthetic oligonucleotide
guaagggauugaaaguugc

SEQ ID NO: 218812 - RNA, 19 nt, Artificial Sequence
  Description of Artificial Sequence: Synthetic oligonucleotide
caccaugucgcuucgcggc

SEQ ID NO: 218813 - RNA, 19 nt, Artificial Sequence
  Description of Artificial Sequence: Synthetic oligonucleotide
aggacucuugcauccuaac

SEQ ID NO: 218814 - RNA, 19 nt, Artificial Sequence
  Description of Artificial Sequence: Synthetic oligonucleotide
uagcauuagucuucugcug

SEQ ID NO: 218815 - RNA, 19 nt, Artificial Sequence
  Description of Artificial Sequence: Synthetic oligonucleotide
agucagaucaacccauuua

SEQ ID NO: 218816 - RNA, 19 nt, Artificial Sequence
  Description of Artificial Sequence: Synthetic oligonucleotide
auuuaucgagccaacagaa

SEQ ID NO: 218817 - RNA, 19 nt, Artificial Sequence
  Description of Artificial Sequence: Synthetic oligonucleotide
aggauuuuauuagacugcu

SEQ ID NO: 218818 - RNA, 19 nt, Artificial Sequence
  Description of Artificial Sequence: Synthetic oligonucleotide
acccugguaaacuggggag

SEQ ID NO: 218819 - RNA, 19 nt, Artificial Sequence
  Description of Artificial Sequence: Synthetic oligonucleotide
cauuagagcaucacuaaua

SEQ ID NO: 218820 - RNA, 19 nt, Artificial Sequence
  Description of Artificial Sequence: Synthetic oligonucleotide
aucaacccauuuaucgagc

SEQ ID NO: 218821 - RNA, 19 nt, Artificial Sequence
  Description of Artificial Sequence: Synthetic oligonucleotide
uuugauuguccaguacaga

SEQ ID NO: 218822 - RNA, 19 nt, Artificial Sequence
  Description of Artificial Sequence: Synthetic oligonucleotide
uauuaaccagagauacaau

SEQ ID NO: 218823 - RNA, 19 nt, Artificial Sequence
  Description of Artificial Sequence: Synthetic oligonucleotide
gaauucuaggcuacaguca

SEQ ID NO: 218824 - RNA, 19 nt, Artificial Sequence
  Description of Artificial Sequence: Synthetic oligonucleotide
cuguauuggaagauugaga

SEQ ID NO: 218825 - RNA, 19 nt, Artificial Sequence
  Description of Artificial Sequence: Synthetic oligonucleotide
guacuggccuuucucgccg

SEQ ID NO: 218826 - RNA, 19 nt, Artificial Sequence
  Description of Artificial Sequence: Synthetic oligonucleotide
cugggugccaagauccggc

SEQ ID NO: 218827 - RNA, 19 nt, Artificial Sequence
  Description of Artificial Sequence: Synthetic oligonucleotide
guagcauuagucuucugcu

SEQ ID NO: 218828 - RNA, 19 nt, Artificial Sequence
  Description of Artificial Sequence: Synthetic oligonucleotide
acagggaccuacgaaagca

SEQ ID NO: 218829 - RNA, 19 nt, Artificial Sequence
  Description of Artificial Sequence: Synthetic oligonucleotide
gaccuacgaaagcacagac

SEQ ID NO: 218830 - RNA, 19 nt, Artificial Sequence
  Description of Artificial Sequence: Synthetic oligonucleotide
aaagagauucagacagagu

SEQ ID NO: 218831 - RNA, 19 nt, Artificial Sequence
  Description of Artificial Sequence: Synthetic oligonucleotide
aguaagggauugaaaguug

SEQ ID NO: 218832 - RNA, 19 nt, Artificial Sequence
  Description of Artificial Sequence: Synthetic oligonucleotide
cagaccaaggacaucccuc

SEQ ID NO: 218833 - RNA, 19 nt, Artificial Sequence
  Description of Artificial Sequence: Synthetic oligonucleotide
agaggaucagucucccgca

SEQ ID NO: 218834 - RNA, 19 nt, Artificial Sequence
  Description of Artificial Sequence: Synthetic oligonucleotide
cagagauacaaugacuuga

SEQ ID NO: 218835 - RNA, 19 nt, Artificial Sequence
  Description of Artificial Sequence: Synthetic oligonucleotide
ucuccccaagugaauacuc

SEQ ID NO: 218836 - RNA, 19 nt, Artificial Sequence
  Description of Artificial Sequence: Synthetic oligonucleotide
gacagggaccuacgaaagc

SEQ ID NO: 218837 - RNA, 19 nt, Artificial Sequence
  Description of Artificial Sequence: Synthetic oligonucleotide
agcuacauuccuauugugu

SEQ ID NO: 218838 - RNA, 19 nt, Artificial Sequence
  Description of Artificial Sequence: Synthetic oligonucleotide
cuaaucucaggaaauucua

SEQ ID NO: 218839 - RNA, 19 nt, Artificial Sequence
  Description of Artificial Sequence: Synthetic oligonucleotide
cagcuaauuugaaagacua

SEQ ID NO: 218840 - RNA, 19 nt, Artificial Sequence
  Description of Artificial Sequence: Synthetic oligonucleotide
ucaacacgguaaucuaguc

SEQ ID NO: 218841 - RNA, 19 nt, Artificial Sequence
  Description of Artificial Sequence: Synthetic oligonucleotide
gugguaagaauucuaggcu

SEQ ID NO: 218842 - RNA, 19 nt, Artificial Sequence
  Description of Artificial Sequence: Synthetic oligonucleotide
auguuaaagggcaucuaga

SEQ ID NO: 218843 - RNA, 19 nt, Artificial Sequence
  Description of Artificial Sequence: Synthetic oligonucleotide
auauaucuuagaggaucag

SEQ ID NO: 218844 - RNA, 19 nt, Artificial Sequence
  Description of Artificial Sequence: Synthetic oligonucleotide
ucuuggugcuuagagcacu

SEQ ID NO: 218845 - RNA, 19 nt, Artificial Sequence
  Description of Artificial Sequence: Synthetic oligonucleotide
aauaacgguucugcaguaa

SEQ ID NO: 218846 - RNA, 19 nt, Artificial Sequence
  Description of Artificial Sequence: Synthetic oligonucleotide
agauuacuaggagcagagg

SEQ ID NO: 218847 - RNA, 19 nt, Artificial Sequence
  Description of Artificial Sequence: Synthetic oligonucleotide
gugcuuagagcacuugaca

SEQ ID NO: 218848 - RNA, 19 nt, Artificial Sequence
  Description of Artificial Sequence: Synthetic oligonucleotide
cugaccacgaccuaucccu

SEQ ID NO: 218849 - RNA, 19 nt, Artificial Sequence
  Description of Artificial Sequence: Synthetic oligonucleotide
cagacauaggauuauugcu

SEQ ID NO: 218850 - RNA, 19 nt, Artificial Sequence
  Description of Artificial Sequence: Synthetic oligonucleotide
aacagacgcuucucuugcu

SEQ ID NO: 218851 - RNA, 19 nt, Artificial Sequence
  Description of Artificial Sequence: Synthetic oligonucleotide
auaauccuacccugguaaa

SEQ ID NO: 218852 - RNA, 19 nt, Artificial Sequence
  Description of Artificial Sequence: Synthetic oligonucleotide
auccuacccugguaaacug

SEQ ID NO: 218853 - RNA, 19 nt, Artificial Sequence
  Description of Artificial Sequence: Synthetic oligonucleotide
cuacccugguaaacugggg

SEQ ID NO: 218854 - RNA, 19 nt, Artificial Sequence
  Description of Artificial Sequence: Synthetic oligonucleotide
gucgcuucgcggcucggcg

SEQ ID NO: 218855 - RNA, 19 nt, Artificial Sequence
  Description of Artificial Sequence: Synthetic oligonucleotide
caacacgguaaucuaguca

SEQ ID NO: 218856 - RNA, 19 nt, Artificial Sequence
  Description of Artificial Sequence: Synthetic oligonucleotide
ccuacccugguaaacuggg

SEQ ID NO: 218857 - RNA, 19 nt, Artificial Sequence
  Description of Artificial Sequence: Synthetic oligonucleotide
uaauaacgguucugcagua

SEQ ID NO: 218858 - RNA, 19 nt, Artificial Sequence
  Description of Artificial Sequence: Synthetic oligonucleotide
cuggacaacucuccaggug

SEQ ID NO: 218859 - RNA, 19 nt, Artificial Sequence
  Description of Artificial Sequence: Synthetic oligonucleotide
uccagacuacugugguaag

SEQ ID NO: 218860 - RNA, 19 nt, Artificial Sequence
  Description of Artificial Sequence: Synthetic oligonucleotide
ucgaacaaauccggguacu

SEQ ID NO: 218861 - RNA, 19 nt, Artificial Sequence
  Description of Artificial Sequence: Synthetic oligonucleotide
ggacucuugcauccuaacc

SEQ ID NO: 218862 - RNA, 19 nt, Artificial Sequence
  Description of Artificial Sequence: Synthetic oligonucleotide
cuuuguaauaccagacggu

SEQ ID NO: 218863 - RNA, 19 nt, Artificial Sequence
  Description of Artificial Sequence: Synthetic oligonucleotide
gcuacauuccuauugugua

SEQ ID NO: 218864 - RNA, 19 nt, Artificial Sequence
  Description of Artificial Sequence: Synthetic oligonucleotide
gguaagaauucuaggcuac

SEQ ID NO: 218865 - RNA, 19 nt, Artificial Sequence
  Description of Artificial Sequence: Synthetic oligonucleotide
acggucuauuuguucacaa

SEQ ID NO: 218866 - RNA, 19 nt, Artificial Sequence
  Description of Artificial Sequence: Synthetic oligonucleotide
aggggauacuuaaaagcca

SEQ ID NO: 218867 - RNA, 19 nt, Artificial Sequence
  Description of Artificial Sequence: Synthetic oligonucleotide
gaccacgaccuaucccucc

SEQ ID NO: 218868 - RNA, 19 nt, Artificial Sequence
  Description of Artificial Sequence: Synthetic oligonucleotide
caugucgcuucgcggcucg

SEQ ID NO: 218869 - RNA, 19 nt, Artificial Sequence
  Description of Artificial Sequence: Synthetic oligonucleotide
cagggaccuacgaaagcac

SEQ ID NO: 218870 - RNA, 19 nt, Artificial Sequence
  Description of Artificial Sequence: Synthetic oligonucleotide
guaauccuugcuaaguacu

SEQ ID NO: 218871 - RNA, 19 nt, Artificial Sequence
  Description of Artificial Sequence: Synthetic oligonucleotide
gccaagauccggcuugugc

SEQ ID NO: 218872 - RNA, 19 nt, Artificial Sequence
  Description of Artificial Sequence: Synthetic oligonucleotide
acgaccuaucccuccccag

SEQ ID NO: 218873 - RNA, 19 nt, Artificial Sequence
  Description of Artificial Sequence: Synthetic oligonucleotide
aggaucagucucccgcaca

SEQ ID NO: 218874 - RNA, 19 nt, Artificial Sequence
  Description of Artificial Sequence: Synthetic oligonucleotide
ccccaauauaccuguauug

SEQ ID NO: 218875 - RNA, 19 nt, Artificial Sequence
  Description of Artificial Sequence: Synthetic oligonucleotide
ggaucagucucccgcacac

SEQ ID NO: 218876 - RNA, 19 nt, Artificial Sequence
  Description of Artificial Sequence: Synthetic oligonucleotide
augacucgauacuccuuga

SEQ ID NO: 218877 - RNA, 19 nt, Artificial Sequence
  Description of Artificial Sequence: Synthetic oligonucleotide
cauagucagaucaacccau

SEQ ID NO: 218878 - RNA, 19 nt, Artificial Sequence
  Description of Artificial Sequence: Synthetic oligonucleotide
auguguuuugcuaggggaa

SEQ ID NO: 218879 - RNA, 19 nt, Artificial Sequence
  Description of Artificial Sequence: Synthetic oligonucleotide
cacugaccacgaccuaucc

SEQ ID NO: 218880 - RNA, 19 nt, Artificial Sequence
  Description of Artificial Sequence: Synthetic oligonucleotide
agcuccuacaggccacacu

SEQ ID NO: 218881 - RNA, 19 nt, Artificial Sequence
  Description of Artificial Sequence: Synthetic oligonucleotide
guaagaauucuaggcuaca

SEQ ID NO: 218882 - RNA, 19 nt, Artificial Sequence
  Description of Artificial Sequence: Synthetic oligonucleotide
gacagaccaaggacauccc

SEQ ID NO: 218883 - RNA, 19 nt, Artificial Sequence
  Description of Artificial Sequence: Synthetic oligonucleotide
uuccuaacauuuggaugcu

SEQ ID NO: 218884 - RNA, 19 nt, Artificial Sequence
  Description of Artificial Sequence: Synthetic oligonucleotide
gccaaucuagagaacuaag

SEQ ID NO: 218885 - RNA, 19 nt, Artificial Sequence
  Description of Artificial Sequence: Synthetic oligonucleotide
auaccuguauuggaagauu

SEQ ID NO: 218886 - RNA, 19 nt, Artificial Sequence
  Description of Artificial Sequence: Synthetic oligonucleotide
accuguauuggaagauuga

SEQ ID NO: 218887 - RNA, 19 nt, Artificial Sequence
  Description of Artificial Sequence: Synthetic oligonucleotide
accaugucgcuucgcggcu

SEQ ID NO: 218888 - RNA, 19 nt, Artificial Sequence
  Description of Artificial Sequence: Synthetic oligonucleotide
accuacgaaagcacagaca

SEQ ID NO: 218889 - RNA, 19 nt, Artificial Sequence
  Description of Artificial Sequence: Synthetic oligonucleotide
gcauucgaacaaauccggg

SEQ ID NO: 218890 - RNA, 19 nt, Artificial Sequence
  Description of Artificial Sequence: Synthetic oligonucleotide
ccuacgaaagcacagacau

SEQ ID NO: 218891 - RNA, 19 nt, Artificial Sequence
  Description of Artificial Sequence: Synthetic oligonucleotide
gggaccuacgaaagcacag

SEQ ID NO: 218892 - RNA, 19 nt, Artificial Sequence
  Description of Artificial Sequence: Synthetic oligonucleotide
ggggcuagcauucgaacaa

SEQ ID NO: 218893 - RNA, 19 nt, Artificial Sequence
  Description of Artificial Sequence: Synthetic oligonucleotide
uggacauauagagcuccua

SEQ ID NO: 218894 - RNA, 19 nt, Artificial Sequence
  Description of Artificial Sequence: Synthetic oligonucleotide
agcuaauuugaaagacuaa

SEQ ID NO: 218895 - RNA, 19 nt, Artificial Sequence
  Description of Artificial Sequence: Synthetic oligonucleotide
cuagagaacuaagaaugcu

SEQ ID NO: 218896 - RNA, 19 nt, Artificial Sequence
  Description of Artificial Sequence: Synthetic oligonucleotide
gcuuuugauuguccaguac

SEQ ID NO: 218897 - RNA, 19 nt, Artificial Sequence
  Description of Artificial Sequence: Synthetic oligonucleotide
ggacagggaccuacgaaag

SEQ ID NO: 218898 - RNA, 19 nt, Artificial Sequence
  Description of Artificial Sequence: Synthetic oligonucleotide
augaagcuacauuccuauu

SEQ ID NO: 218899 - RNA, 19 nt, Artificial Sequence
  Description of Artificial Sequence: Synthetic oligonucleotide
ggguggaguagcauuaguc

SEQ ID NO: 218900 - RNA, 19 nt, Artificial Sequence
  Description of Artificial Sequence: Synthetic oligonucleotide
cauuagucuucugcuguca

SEQ ID NO: 218901 - RNA, 19 nt, Artificial Sequence
  Description of Artificial Sequence: Synthetic oligonucleotide
ugucgcuucgcggcucggc

SEQ ID NO: 218902 - RNA, 19 nt, Artificial Sequence
  Description of Artificial Sequence: Synthetic oligonucleotide
cugaaguaagugagcuuaa

SEQ ID NO: 218903 - RNA, 19 nt, Artificial Sequence
  Description of Artificial Sequence: Synthetic oligonucleotide
ccauagucagaucaaccca

SEQ ID NO: 218904 - RNA, 19 nt, Artificial Sequence
  Description of Artificial Sequence: Synthetic oligonucleotide
agcuacaguaagggauuga

SEQ ID NO: 218905 - RNA, 19 nt, Artificial Sequence
  Description of Artificial Sequence: Synthetic oligonucleotide
gcaggaugacucgauacuc

SEQ ID NO: 218906 - RNA, 19 nt, Artificial Sequence
  Description of Artificial Sequence: Synthetic oligonucleotide
caguaagggauugaaaguu

SEQ ID NO: 218907 - RNA, 19 nt, Artificial Sequence
  Description of Artificial Sequence: Synthetic oligonucleotide
ugacuugaguagggguuau

SEQ ID NO: 218908 - RNA, 19 nt, Artificial Sequence
  Description of Artificial Sequence: Synthetic oligonucleotide
auucuaggcuacagucacu

SEQ ID NO: 218909 - RNA, 19 nt, Artificial Sequence
  Description of Artificial Sequence: Synthetic oligonucleotide
ggcaggaugacucgauacu

SEQ ID NO: 218910 - RNA, 19 nt, Artificial Sequence
  Description of Artificial Sequence: Synthetic oligonucleotide
ccugguaaacuggggagac

SEQ ID NO: 218911 - RNA, 19 nt, Artificial Sequence
  Description of Artificial Sequence: Synthetic oligonucleotide
gaacaaauccggguacuuu

SEQ ID NO: 218912 - RNA, 19 nt, Artificial Sequence
  Description of Artificial Sequence: Synthetic oligonucleotide
caaagacggccugccacuc

SEQ ID NO: 218913 - RNA, 19 nt, Artificial Sequence
  Description of Artificial Sequence: Synthetic oligonucleotide
cuacgaaagcacagacaua

SEQ ID NO: 218914 - RNA, 19 nt, Artificial Sequence
  Description of Artificial Sequence: Synthetic oligonucleotide
agcauacaccauauaucuu

SEQ ID NO: 218915 - RNA, 19 nt, Artificial Sequence
  Description of Artificial Sequence: Synthetic oligonucleotide
cauccuaaccagccucaaa

SEQ ID NO: 218916 - RNA, 19 nt, Artificial Sequence
  Description of Artificial Sequence: Synthetic oligonucleotide
agcucugaauacagacuaa

SEQ ID NO: 218917 - RNA, 19 nt, Artificial Sequence
  Description of Artificial Sequence: Synthetic oligonucleotide
cacgaccuaucccucccca

SEQ ID NO: 218918 - RNA, 19 nt, Artificial Sequence
  Description of Artificial Sequence: Synthetic oligonucleotide
caggaaauucuaguuccua

SEQ ID NO: 218919 - RNA, 19 nt, Artificial Sequence
  Description of Artificial Sequence: Synthetic oligonucleotide
cauagggcucguucaccaa

SEQ ID NO: 218920 - RNA, 19 nt, Artificial Sequence
  Description of Artificial Sequence: Synthetic oligonucleotide
cgaccuaucccuccccagc

SEQ ID NO: 218921 - RNA, 19 nt, Artificial Sequence
  Description of Artificial Sequence: Synthetic oligonucleotide
ggauugaaaguugccugaa

SEQ ID NO: 218922 - RNA, 19 nt, Artificial Sequence
  Description of Artificial Sequence: Synthetic oligonucleotide
acacgguaaucuagucagu

SEQ ID NO: 218923 - RNA, 19 nt, Artificial Sequence
  Description of Artificial Sequence: Synthetic oligonucleotide
ggauaugcacaugcccaca

SEQ ID NO: 218924 - RNA, 19 nt, Artificial Sequence
  Description of Artificial Sequence: Synthetic oligonucleotide
cugccuuguaauccuugcu

SEQ ID NO: 218925 - RNA, 19 nt, Artificial Sequence
  Description of Artificial Sequence: Synthetic oligonucleotide
cacgguaaucuagucaguu

SEQ ID NO: 218926 - RNA, 19 nt, Artificial Sequence
  Description of Artificial Sequence: Synthetic oligonucleotide
accagacggucuauuuguu

SEQ ID NO: 218927 - RNA, 19 nt, Artificial Sequence
  Description of Artificial Sequence: Synthetic oligonucleotide
augucgcuucgcggcucgg

SEQ ID NO: 218928 - RNA, 19 nt, Artificial Sequence
  Description of Artificial Sequence: Synthetic oligonucleotide
gcucugaauacagacuaau

SEQ ID NO: 218929 - RNA, 19 nt, Artificial Sequence
  Description of Artificial Sequence: Synthetic oligonucleotide
cuucgcggcucggcggcug

SEQ ID NO: 218930 - RNA, 19 nt, Artificial Sequence
  Description of Artificial Sequence: Synthetic oligonucleotide
cuuucucgccgucauccuu

SEQ ID NO: 218931 - RNA, 19 nt, Artificial Sequence
  Description of Artificial Sequence: Synthetic oligonucleotide
ccacgaccuaucccucccc

SEQ ID NO: 218932 - RNA, 19 nt, Artificial Sequence
  Description of Artificial Sequence: Synthetic oligonucleotide
gaccaaggacaucccucuu

SEQ ID NO: 218933 - RNA, 19 nt, Artificial Sequence
  Description of Artificial Sequence: Synthetic oligonucleotide
gggacagaccaaggacauc

SEQ ID NO: 218934 - RNA, 19 nt, Artificial Sequence
  Description of Artificial Sequence: Synthetic oligonucleotide
gacuugaguagggguuauu

SEQ ID NO: 218935 - RNA, 19 nt, Artificial Sequence
  Description of Artificial Sequence: Synthetic oligonucleotide
ccaugucgcuucgcggcuc

SEQ ID NO: 218936 - RNA, 19 nt, Artificial Sequence
  Description of Artificial Sequence: Synthetic oligonucleotide
aaaagugugcuuuacucgc

SEQ ID NO: 218937 - RNA, 19 nt, Artificial Sequence
  Description of Artificial Sequence: Synthetic oligonucleotide
aaaugaacaccccagguac

SEQ ID NO: 218938 - RNA, 19 nt, Artificial Sequence
  Description of Artificial Sequence: Synthetic oligonucleotide
uuaaagaggauacugauga

SEQ ID NO: 218939 - RNA, 19 nt, Artificial Sequence
  Description of Artificial Sequence: Synthetic oligonucleotide
aaaucgaauuaccaguuac

SEQ ID NO: 218940 - RNA, 19 nt, Artificial Sequence
  Description of Artificial Sequence: Synthetic oligonucleotide
uuauguaccucccauaucc

SEQ ID NO: 218941 - RNA, 19 nt, Artificial Sequence
  Description of Artificial Sequence: Synthetic oligonucleotide
uaucauucaagcaucaaug

SEQ ID NO: 218942 - RNA, 19 nt, Artificial Sequence
  Description of Artificial Sequence: Synthetic oligonucleotide
ugagauguaauuacauggg

SEQ ID NO: 218943 - RNA, 19 nt, Artificial Sequence
  Description of Artificial Sequence: Synthetic oligonucleotide
aaugauuauauuucagaga

SEQ ID NO: 218944 - RNA, 19 nt, Artificial Sequence
  Description of Artificial Sequence: Synthetic oligonucleotide
gacaaaaucgaauuaccag

SEQ ID NO: 218945 - RNA, 19 nt, Artificial Sequence
  Description of Artificial Sequence: Synthetic oligonucleotide
aauuagcccaguuuugcuc

SEQ ID NO: 218946 - RNA, 19 nt, Artificial Sequence
  Description of Artificial Sequence: Synthetic oligonucleotide
uaugccgguaucuagaucu

SEQ ID NO: 218947 - RNA, 19 nt, Artificial Sequence
  Description of Artificial Sequence: Synthetic oligonucleotide
cuaaaugacauuauucgac

SEQ ID NO: 218948 - RNA, 19 nt, Artificial Sequence
  Description of Artificial Sequence: Synthetic oligonucleotide
auuaauauguaguuaagua

SEQ ID NO: 218949 - RNA, 19 nt, Artificial Sequence
  Description of Artificial Sequence: Synthetic oligonucleotide
gaaccuagguauuauaaug

SEQ ID NO: 218950 - RNA, 19 nt, Artificial Sequence
  Description of Artificial Sequence: Synthetic oligonucleotide
ugacgguaguuuaacaugg

SEQ ID NO: 218951 - RNA, 19 nt, Artificial Sequence
  Description of Artificial Sequence: Synthetic oligonucleotide
uacaaaauuccuuuaggca

SEQ ID NO: 218952 - RNA, 19 nt, Artificial Sequence
  Description of Artificial Sequence: Synthetic oligonucleotide
uuguaauugcggcaggagg

SEQ ID NO: 218953 - RNA, 19 nt, Artificial Sequence
  Description of Artificial Sequence: Synthetic oligonucleotide
acgaauaugaucugaagga

SEQ ID NO: 218954 - RNA, 19 nt, Artificial Sequence
  Description of Artificial Sequence: Synthetic oligonucleotide
ugaauguaaggaauaguug

SEQ ID NO: 218955 - RNA, 19 nt, Artificial Sequence
  Description of Artificial Sequence: Synthetic oligonucleotide
guagauguaccacugaaug

SEQ ID NO: 218956 - RNA, 19 nt, Artificial Sequence
  Description of Artificial Sequence: Synthetic oligonucleotide
cacgaauaugaucugaagg

SEQ ID NO: 218957 - RNA, 19 nt, Artificial Sequence
  Description of Artificial Sequence: Synthetic oligonucleotide
aaauuauccuuauguaccu

SEQ ID NO: 218958 - RNA, 19 nt, Artificial Sequence
  Description of Artificial Sequence: Synthetic oligonucleotide
aauauugagcauggcuugc

SEQ ID NO: 218959 - RNA, 19 nt, Artificial Sequence
  Description of Artificial Sequence: Synthetic oligonucleotide
ucaaucauauguguaauga

SEQ ID NO: 218960 - RNA, 19 nt, Artificial Sequence
  Description of Artificial Sequence: Synthetic oligonucleotide
auuagcccaguuuugcucg

SEQ ID NO: 218961 - RNA, 19 nt, Artificial Sequence
  Description of Artificial Sequence: Synthetic oligonucleotide
aaugauaacucagcauuuc

SEQ ID NO: 218962 - RNA, 19 nt, Artificial Sequence
  Description of Artificial Sequence: Synthetic oligonucleotide
aagugauuguuaaauauug

SEQ ID NO: 218963 - RNA, 19 nt, Artificial Sequence
  Description of Artificial Sequence: Synthetic oligonucleotide
cucacauuaaugacuaaag

SEQ ID NO: 218964 - RNA, 19 nt, Artificial Sequence
  Description of Artificial Sequence: Synthetic oligonucleotide
uauucgaccguuagaaaug

SEQ ID NO: 218965 - RNA, 19 nt, Artificial Sequence
  Description of Artificial Sequence: Synthetic oligonucleotide
uccuuaacgcccuugaaga

SEQ ID NO: 218966 - RNA, 19 nt, Artificial Sequence
  Description of Artificial Sequence: Synthetic oligonucleotide
cuucacgcgauccuuaacg

SEQ ID NO: 218967 - RNA, 19 nt, Artificial Sequence
  Description of Artificial Sequence: Synthetic oligonucleotide
aggcauauuuuggagagcc

SEQ ID NO: 218968 - RNA, 19 nt, Artificial Sequence
  Description of Artificial Sequence: Synthetic oligonucleotide
ucgaccguuagaaauguug

SEQ ID NO: 218969 - RNA, 19 nt, Artificial Sequence
  Description of Artificial Sequence: Synthetic oligonucleotide
uuauucgaccguuagaaau

SEQ ID NO: 218970 - RNA, 19 nt, Artificial Sequence
  Description of Artificial Sequence: Synthetic oligonucleotide
aacaugacgguaguuuaac

SEQ ID NO: 218971 - RNA, 19 nt, Artificial Sequence
  Description of Artificial Sequence: Synthetic oligonucleotide
aguguuacagcgaaaggcg

SEQ ID NO: 218972 - RNA, 19 nt, Artificial Sequence
  Description of Artificial Sequence: Synthetic oligonucleotide
uucuaagccucauaguuga

SEQ ID NO: 218973 - RNA, 19 nt, Artificial Sequence
  Description of Artificial Sequence: Synthetic oligonucleotide
ugaggaagguucaaauuug

SEQ ID NO: 218974 - RNA, 19 nt, Artificial Sequence
  Description of Artificial Sequence: Synthetic oligonucleotide
ucgaguggcgucuuuaugc

SEQ ID NO: 218975 - RNA, 19 nt, Artificial Sequence
  Description of Artificial Sequence: Synthetic oligonucleotide
gauguaauuacaugggcaa

SEQ ID NO: 218976 - RNA, 19 nt, Artificial Sequence
  Description of Artificial Sequence: Synthetic oligonucleotide
uguaauuagcccaguuuug

SEQ ID NO: 218977 - RNA, 19 nt, Artificial Sequence
  Description of Artificial Sequence: Synthetic oligonucleotide
uuugugaguuuauacuacc

SEQ ID NO: 218978 - RNA, 19 nt, Artificial Sequence
  Description of Artificial Sequence: Synthetic oligonucleotide
gacauuauucgaccguuag

SEQ ID NO: 218979 - RNA, 19 nt, Artificial Sequence
  Description of Artificial Sequence: Synthetic oligonucleotide
guucuuaagguucgguugg

SEQ ID NO: 218980 - RNA, 19 nt, Artificial Sequence
  Description of Artificial Sequence: Synthetic oligonucleotide
uaucuagaucuccagguca

SEQ ID NO: 218981 - RNA, 19 nt, Artificial Sequence
  Description of Artificial Sequence: Synthetic oligonucleotide
acuaaaugacauuauucga

SEQ ID NO: 218982 - RNA, 19 nt, Artificial Sequence
  Description of Artificial Sequence: Synthetic oligonucleotide
guugagagaaacuguuccg

SEQ ID NO: 218983 - RNA, 19 nt, Artificial Sequence
  Description of Artificial Sequence: Synthetic oligonucleotide
agcuaugaucacccaaugc

SEQ ID NO: 218984 - RNA, 19 nt, Artificial Sequence
  Description of Artificial Sequence: Synthetic oligonucleotide
accaguuacuacaaaauuc

SEQ ID NO: 218985 - RNA, 19 nt, Artificial Sequence
  Description of Artificial Sequence: Synthetic oligonucleotide
aagaggauacugaugaugu

SEQ ID NO: 218986 - RNA, 19 nt, Artificial Sequence
  Description of Artificial Sequence: Synthetic oligonucleotide
aguuaucacccacucacuc

SEQ ID NO: 218987 - RNA, 19 nt, Artificial Sequence
  Description of Artificial Sequence: Synthetic oligonucleotide
ucgucacucuaaaagacug

SEQ ID NO: 218988 - RNA, 19 nt, Artificial Sequence
  Description of Artificial Sequence: Synthetic oligonucleotide
uuaacgcccuugaagaaga

SEQ ID NO: 218989 - RNA, 19 nt, Artificial Sequence
  Description of Artificial Sequence: Synthetic oligonucleotide
ugugaguuuauacuaccuc

SEQ ID NO: 218990 - RNA, 19 nt, Artificial Sequence
  Description of Artificial Sequence: Synthetic oligonucleotide
auccuuaacgcccuugaag

SEQ ID NO: 218991 - RNA, 19 nt, Artificial Sequence
  Description of Artificial Sequence: Synthetic oligonucleotide
ucucccgagcacaugauug

SEQ ID NO: 218992 - RNA, 19 nt, Artificial Sequence
  Description of Artificial Sequence: Synthetic oligonucleotide
cauuaaugacuaaagccug

SEQ ID NO: 218993 - RNA, 19 nt, Artificial Sequence
  Description of Artificial Sequence: Synthetic oligonucleotide
aauuacaugggcaaucuuu

SEQ ID NO: 218994 - RNA, 19 nt, Artificial Sequence
  Description of Artificial Sequence: Synthetic oligonucleotide
guagacggcacucaggcug

SEQ ID NO: 218995 - RNA, 19 nt, Artificial Sequence
  Description of Artificial Sequence: Synthetic oligonucleotide
uuggacuaggucuacauua

SEQ ID NO: 218996 - RNA, 19 nt, Artificial Sequence
  Description of Artificial Sequence: Synthetic oligonucleotide
augacgguaguuuaacaug

SEQ ID NO: 218997 - RNA, 19 nt, Artificial Sequence
  Description of Artificial Sequence: Synthetic oligonucleotide
ugaguguuacagcgaaagg

SEQ ID NO: 218998 - RNA, 19 nt, Artificial Sequence
  Description of Artificial Sequence: Synthetic oligonucleotide
gaauaugaucugaaggacc

SEQ ID NO: 218999 - RNA, 19 nt, Artificial Sequence
  Description of Artificial Sequence: Synthetic oligonucleotide
gcuuacuagaauuugaauc

SEQ ID NO: 219000 - RNA, 19 nt, Artificial Sequence
  Description of Artificial Sequence: Synthetic oligonucleotide
guuaaacucagaauacaag

SEQ ID NO: 219001 - RNA, 19 nt, Artificial Sequence
  Description of Artificial Sequence: Synthetic oligonucleotide
ucuuuaugccgguaucuag

SEQ ID NO: 219002 - RNA, 19 nt, Artificial Sequence
  Description of Artificial Sequence: Synthetic oligonucleotide
acgugagccaaauacagga

SEQ ID NO: 219003 - RNA, 19 nt, Artificial Sequence
  Description of Artificial Sequence: Synthetic oligonucleotide
ccaguuacuacaaaauucc

SEQ ID NO: 219004 - RNA, 19 nt, Artificial Sequence
  Description of Artificial Sequence: Synthetic oligonucleotide
acaaaaccauuuauguagc

SEQ ID NO: 219005 - RNA, 19 nt, Artificial Sequence
  Description of Artificial Sequence: Synthetic oligonucleotide
aauggcauuauugcuacau

SEQ ID NO: 219006 - RNA, 19 nt, Artificial Sequence
  Description of Artificial Sequence: Synthetic oligonucleotide
uaccuagcuaugaucaccc

SEQ ID NO: 219007 - RNA, 19 nt, Artificial Sequence
  Description of Artificial Sequence: Synthetic oligonucleotide
aaaagacuguuaaacucag

SEQ ID NO: 219008 - RNA, 19 nt, Artificial Sequence
  Description of Artificial Sequence: Synthetic oligonucleotide
ucaaucccguacuugaacu

SEQ ID NO: 219009 - RNA, 19 nt, Artificial Sequence
  Description of Artificial Sequence: Synthetic oligonucleotide
ugucuuuagcauauaguuc

SEQ ID NO: 219010 - RNA, 19 nt, Artificial Sequence
  Description of Artificial Sequence: Synthetic oligonucleotide
auucgauuuugcuccgcgc

SEQ ID NO: 219011 - RNA, 19 nt, Artificial Sequence
  Description of Artificial Sequence: Synthetic oligonucleotide
agcgagagacaccaaggac

SEQ ID NO: 219012 - RNA, 19 nt, Artificial Sequence
  Description of Artificial Sequence: Synthetic oligonucleotide
uguaccucccauaucccca

SEQ ID NO: 219013 - RNA, 19 nt, Artificial Sequence
  Description of Artificial Sequence: Synthetic oligonucleotide
aaccuagguauuauaaugu

SEQ ID NO: 219014 - RNA, 19 nt, Artificial Sequence
  Description of Artificial Sequence: Synthetic oligonucleotide
guguagacggcacucaggc

SEQ ID NO: 219015 - RNA, 19 nt, Artificial Sequence
  Description of Artificial Sequence: Synthetic oligonucleotide
guaaggaucgcuccuuccc

SEQ ID NO: 219016 - RNA, 19 nt, Artificial Sequence
  Description of Artificial Sequence: Synthetic oligonucleotide
auucgaagaaacugguaga

SEQ ID NO: 219017 - RNA, 19 nt, Artificial Sequence
  Description of Artificial Sequence: Synthetic oligonucleotide
accgguaaccagcuuguac

SEQ ID NO: 219018 - RNA, 19 nt, Artificial Sequence
  Description of Artificial Sequence: Synthetic oligonucleotide
cacgcgauccuuaacgccc

SEQ ID NO: 219019 - RNA, 19 nt, Artificial Sequence
  Description of Artificial Sequence: Synthetic oligonucleotide
caaagcgagagacaccaag

SEQ ID NO: 219020 - RNA, 19 nt, Artificial Sequence
  Description of Artificial Sequence: Synthetic oligonucleotide
uucaaucccguacuugaac

SEQ ID NO: 219021 - RNA, 19 nt, Artificial Sequence
  Description of Artificial Sequence: Synthetic oligonucleotide
uguuacagcgaaaggcgga

SEQ ID NO: 219022 - RNA, 19 nt, Artificial Sequence
  Description of Artificial Sequence: Synthetic oligonucleotide
auuguuaaauauugagcau

SEQ ID NO: 219023 - RNA, 19 nt, Artificial Sequence
  Description of Artificial Sequence: Synthetic oligonucleotide
uagauguaccacugaauga

SEQ ID NO: 219024 - RNA, 19 nt, Artificial Sequence
  Description of Artificial Sequence: Synthetic oligonucleotide
uuaccuagcuaugaucacc

SEQ ID NO: 219025 - RNA, 19 nt, Artificial Sequence
  Description of Artificial Sequence: Synthetic oligonucleotide
aaucgaauuaccaguuacu

SEQ ID NO: 219026 - RNA, 19 nt, Artificial Sequence
  Description of Artificial Sequence: Synthetic oligonucleotide
uaggucuacauuacaugca

SEQ ID NO: 219027 - RNA, 19 nt, Artificial Sequence
  Description of Artificial Sequence: Synthetic oligonucleotide
guaauuagcccaguuuugc

SEQ ID NO: 219028 - RNA, 19 nt, Artificial Sequence
  Description of Artificial Sequence: Synthetic oligonucleotide
agcacaugauugcuuggac

SEQ ID NO: 219029 - RNA, 19 nt, Artificial Sequence
  Description of Artificial Sequence: Synthetic oligonucleotide
aaugcaacgcuuacuagaa

SEQ ID NO: 219030 - RNA, 19 nt, Artificial Sequence
  Description of Artificial Sequence: Synthetic oligonucleotide
agaaacuguuccgugaaug

SEQ ID NO: 219031 - RNA, 19 nt, Artificial Sequence
  Description of Artificial Sequence: Synthetic oligonucleotide
augauaacucagcauuuca

SEQ ID NO: 219032 - RNA, 19 nt, Artificial Sequence
  Description of Artificial Sequence: Synthetic oligonucleotide
ugcaacgcuuacuagaauu

SEQ ID NO: 219033 - RNA, 19 nt, Artificial Sequence
  Description of Artificial Sequence: Synthetic oligonucleotide
cuugccgugcucuucaauc

SEQ ID NO: 219034 - RNA, 19 nt, Artificial Sequence
  Description of Artificial Sequence: Synthetic oligonucleotide
acacuuaauaguccacucu

SEQ ID NO: 219035 - RNA, 19 nt, Artificial Sequence
  Description of Artificial Sequence: Synthetic oligonucleotide
uugugaguuuauacuaccu

SEQ ID NO: 219036 - RNA, 19 nt, Artificial Sequence
  Description of Artificial Sequence: Synthetic oligonucleotide
augugcacuacugaaaccu

SEQ ID NO: 219037 - RNA, 19 nt, Artificial Sequence
  Description of Artificial Sequence: Synthetic oligonucleotide
cauucgauuuugcuccgcg

SEQ ID NO: 219038 - RNA, 19 nt, Artificial Sequence
  Description of Artificial Sequence: Synthetic oligonucleotide
cuuucuguaagcaccccuc

SEQ ID NO: 219039 - RNA, 19 nt, Artificial Sequence
  Description of Artificial Sequence: Synthetic oligonucleotide
gaauuguuucugucaccgg

SEQ ID NO: 219040 - RNA, 19 nt, Artificial Sequence
  Description of Artificial Sequence: Synthetic oligonucleotide
aaaaucgaauuaccaguua

SEQ ID NO: 219041 - RNA, 19 nt, Artificial Sequence
  Description of Artificial Sequence: Synthetic oligonucleotide
acacgaauaugaucugaag

SEQ ID NO: 219042 - RNA, 19 nt, Artificial Sequence
  Description of Artificial Sequence: Synthetic oligonucleotide
cauuauucgaccguuagaa

SEQ ID NO: 219043 - RNA, 19 nt, Artificial Sequence
  Description of Artificial Sequence: Synthetic oligonucleotide
uuuauguagcugacaugca

SEQ ID NO: 219044 - RNA, 19 nt, Artificial Sequence
  Description of Artificial Sequence: Synthetic oligonucleotide
agauguaauuacaugggca

SEQ ID NO: 219045 - RNA, 19 nt, Artificial Sequence
  Description of Artificial Sequence: Synthetic oligonucleotide
aacacgugagccaaauaca

SEQ ID NO: 219046 - RNA, 19 nt, Artificial Sequence
  Description of Artificial Sequence: Synthetic oligonucleotide
gaccguuagaaauguugag

SEQ ID NO: 219047 - RNA, 19 nt, Artificial Sequence
  Description of Artificial Sequence: Synthetic oligonucleotide
uaauuagcccaguuuugcu

SEQ ID NO: 219048 - RNA, 19 nt, Artificial Sequence
  Description of Artificial Sequence: Synthetic oligonucleotide
uauguaccucccauauccc

SEQ ID NO: 219049 - RNA, 19 nt, Artificial Sequence
  Description of Artificial Sequence: Synthetic oligonucleotide
uucacgcgauccuuaacgc

SEQ ID NO: 219050 - RNA, 19 nt, Artificial Sequence
  Description of Artificial Sequence: Synthetic oligonucleotide
gaaccguucuuaagguucg

SEQ ID NO: 219051 - RNA, 19 nt, Artificial Sequence
  Description of Artificial Sequence: Synthetic oligonucleotide
cuuaacgcccuugaagaag

SEQ ID NO: 219052 - RNA, 19 nt, Artificial Sequence
  Description of Artificial Sequence: Synthetic oligonucleotide
ugcuuuacucgcacagcag

SEQ ID NO: 219053 - RNA, 19 nt, Artificial Sequence
  Description of Artificial Sequence: Synthetic oligonucleotide
aacgcuuacuagaauuuga

SEQ ID NO: 219054 - RNA, 19 nt, Artificial Sequence
  Description of Artificial Sequence: Synthetic oligonucleotide
caaaauuccuuuaggcaca

SEQ ID NO: 219055 - RNA, 19 nt, Artificial Sequence
  Description of Artificial Sequence: Synthetic oligonucleotide
uauccuuauguaccuccca

SEQ ID NO: 219056 - RNA, 19 nt, Artificial Sequence
  Description of Artificial Sequence: Synthetic oligonucleotide
acauuauucgaccguuaga

SEQ ID NO: 219057 - RNA, 19 nt, Artificial Sequence
  Description of Artificial Sequence: Synthetic oligonucleotide
agacuguuaaacucagaau

SEQ ID NO: 219058 - RNA, 19 nt, Artificial Sequence
  Description of Artificial Sequence: Synthetic oligonucleotide
aaucgaguggcgucuuuau

SEQ ID NO: 219059 - RNA, 19 nt, Artificial Sequence
  Description of Artificial Sequence: Synthetic oligonucleotide
aguggcgucuuuaugccgg

SEQ ID NO: 219060 - RNA, 19 nt, Artificial Sequence
  Description of Artificial Sequence: Synthetic oligonucleotide
ccguuagaaauguugagag

SEQ ID NO: 219061 - RNA, 19 nt, Artificial Sequence
  Description of Artificial Sequence: Synthetic oligonucleotide
ugaucacccaaugcaacgc

SEQ ID NO: 219062 - RNA, 19 nt, Artificial Sequence
  Description of Artificial Sequence: Synthetic oligonucleotide
caucaaugauuauauuuca

SEQ ID NO: 219063 - RNA, 19 nt, Artificial Sequence
  Description of Artificial Sequence: Synthetic oligonucleotide
uccacaaucgaguggcguc

SEQ ID NO: 219064 - RNA, 19 nt, Artificial Sequence
  Description of Artificial Sequence: Synthetic oligonucleotide
accguuagaaauguugaga

SEQ ID NO: 219065 - RNA, 19 nt, Artificial Sequence
  Description of Artificial Sequence: Synthetic oligonucleotide
ucuaagucucucacauuaa

SEQ ID NO: 219066 - RNA, 19 nt, Artificial Sequence
  Description of Artificial Sequence: Synthetic oligonucleotide
uugccgugcucuucaaucc

SEQ ID NO: 219067 - RNA, 19 nt, Artificial Sequence
  Description of Artificial Sequence: Synthetic oligonucleotide
acguagaagugauuguuaa

SEQ ID NO: 219068 - RNA, 19 nt, Artificial Sequence
  Description of Artificial Sequence: Synthetic oligonucleotide
ucaagguugcucgucacuc

SEQ ID NO: 219069 - RNA, 19 nt, Artificial Sequence
  Description of Artificial Sequence: Synthetic oligonucleotide
accacuaaaugacauuauu

SEQ ID NO: 219070 - RNA, 19 nt, Artificial Sequence
  Description of Artificial Sequence: Synthetic oligonucleotide
cacgugagccaaauacagg

SEQ ID NO: 219071 - RNA, 19 nt, Artificial Sequence
  Description of Artificial Sequence: Synthetic oligonucleotide
uagcuaugaucacccaaug

SEQ ID NO: 219072 - RNA, 19 nt, Artificial Sequence
  Description of Artificial Sequence: Synthetic oligonucleotide
acacgugagccaaauacag

SEQ ID NO: 219073 - RNA, 19 nt, Artificial Sequence
  Description of Artificial Sequence: Synthetic oligonucleotide
aggaauucuagaauguaaa

SEQ ID NO: 219074 - RNA, 19 nt, Artificial Sequence
  Description of Artificial Sequence: Synthetic oligonucleotide
cacacuuaauaguccacuc

SEQ ID NO: 219075 - RNA, 19 nt, Artificial Sequence
  Description of Artificial Sequence: Synthetic oligonucleotide
gagacauaggcgagagggg

SEQ ID NO: 219076 - RNA, 19 nt, Artificial Sequence
  Description of Artificial Sequence: Synthetic oligonucleotide
aucauauguguaaugaguu

SEQ ID NO: 219077 - RNA, 19 nt, Artificial Sequence
  Description of Artificial Sequence: Synthetic oligonucleotide
uacuagaauuugaaucuuu

SEQ ID NO: 219078 - RNA, 19 nt, Artificial Sequence
  Description of Artificial Sequence: Synthetic oligonucleotide
ucacgcgauccuuaacgcc

SEQ ID NO: 219079 - RNA, 19 nt, Artificial Sequence
  Description of Artificial Sequence: Synthetic oligonucleotide
caugugcacuacugaaacc

SEQ ID NO: 219080 - RNA, 19 nt, Artificial Sequence
  Description of Artificial Sequence: Synthetic oligonucleotide
ccacuaaaugacauuauuc

SEQ ID NO: 219081 - RNA, 19 nt, Artificial Sequence
  Description of Artificial Sequence: Synthetic oligonucleotide
guaucuagaucuccagguc

SEQ ID NO: 219082 - RNA, 19 nt, Artificial Sequence
  Description of Artificial Sequence: Synthetic oligonucleotide
gguggcgugguaaggaucg

SEQ ID NO: 219083 - RNA, 19 nt, Artificial Sequence
  Description of Artificial Sequence: Synthetic oligonucleotide
ucacucuaaaagacuguua

SEQ ID NO: 219084 - RNA, 19 nt, Artificial Sequence
  Description of Artificial Sequence: Synthetic oligonucleotide
guagaagugauuguuaaau

SEQ ID NO: 219085 - RNA, 19 nt, Artificial Sequence
  Description of Artificial Sequence: Synthetic oligonucleotide
ugaagccguagauguacca

SEQ ID NO: 219086 - RNA, 19 nt, Artificial Sequence
  Description of Artificial Sequence: Synthetic oligonucleotide
cuuaccuagcuaugaucac

SEQ ID NO: 219087 - RNA, 19 nt, Artificial Sequence
  Description of Artificial Sequence: Synthetic oligonucleotide
auuauucgaccguuagaaa

SEQ ID NO: 219088 - RNA, 19 nt, Artificial Sequence
  Description of Artificial Sequence: Synthetic oligonucleotide
auccuuauguaccucccau

SEQ ID NO: 219089 - RNA, 19 nt, Artificial Sequence
  Description of Artificial Sequence: Synthetic oligonucleotide
ugcuccgcgcuguaauuag

SEQ ID NO: 219090 - RNA, 19 nt, Artificial Sequence
  Description of Artificial Sequence: Synthetic oligonucleotide
agggcgcugguccacaaug

SEQ ID NO: 219091 - RNA, 19 nt, Artificial Sequence
  Description of Artificial Sequence: Synthetic oligonucleotide
uuacucgcacagcaggaau

SEQ ID NO: 219092 - RNA, 19 nt, Artificial Sequence
  Description of Artificial Sequence: Synthetic oligonucleotide
uucuuaagguucgguuggg

SEQ ID NO: 219093 - RNA, 19 nt, Artificial Sequence
  Description of Artificial Sequence: Synthetic oligonucleotide
auuaaugacuaaagccugu

SEQ ID NO: 219094 - RNA, 19 nt, Artificial Sequence
  Description of Artificial Sequence: Synthetic oligonucleotide
ugcuccacccagcuauccc

SEQ ID NO: 219095 - RNA, 19 nt, Artificial Sequence
  Description of Artificial Sequence: Synthetic oligonucleotide
ugauugcuuggacuagguc

SEQ ID NO: 219096 - RNA, 19 nt, Artificial Sequence
  Description of Artificial Sequence: Synthetic oligonucleotide
cucccgagcacaugauugc

SEQ ID NO: 219097 - RNA, 19 nt, Artificial Sequence
  Description of Artificial Sequence: Synthetic oligonucleotide
aguuacuacaaaauuccuu

SEQ ID NO: 219098 - RNA, 19 nt, Artificial Sequence
  Description of Artificial Sequence: Synthetic oligonucleotide
acaccccagguacacuuuc

SEQ ID NO: 219099 - RNA, 19 nt, Artificial Sequence
  Description of Artificial Sequence: Synthetic oligonucleotide
acgugagagauggggaagg

SEQ ID NO: 219100 - RNA, 19 nt, Artificial Sequence
  Description of Artificial Sequence: Synthetic oligonucleotide
agguguagacggcacucag

SEQ ID NO: 219101 - RNA, 19 nt, Artificial Sequence
  Description of Artificial Sequence: Synthetic oligonucleotide
aagguugcucgucacucua

SEQ ID NO: 219102 - RNA, 19 nt, Artificial Sequence
  Description of Artificial Sequence: Synthetic oligonucleotide
ucacccaaugcaacgcuua

SEQ ID NO: 219103 - RNA, 19 nt, Artificial Sequence
  Description of Artificial Sequence: Synthetic oligonucleotide
aucgaauuaccaguuacua

SEQ ID NO: 219104 - RNA, 19 nt, Artificial Sequence
  Description of Artificial Sequence: Synthetic oligonucleotide
gacgguaguuuaacauggg

SEQ ID NO: 219105 - RNA, 19 nt, Artificial Sequence
  Description of Artificial Sequence: Synthetic oligonucleotide
aucaagguugcucgucacu

SEQ ID NO: 219106 - RNA, 19 nt, Artificial Sequence
  Description of Artificial Sequence: Synthetic oligonucleotide
gugacgagcagccauugaa

SEQ ID NO: 219107 - RNA, 19 nt, Artificial Sequence
  Description of Artificial Sequence: Synthetic oligonucleotide
caggaauucuagaauguaa

SEQ ID NO: 219108 - RNA, 19 nt, Artificial Sequence
  Description of Artificial Sequence: Synthetic oligonucleotide
auauuggcccacaacacaa

SEQ ID NO: 219109 - RNA, 19 nt, Artificial Sequence
  Description of Artificial Sequence: Synthetic oligonucleotide
acaugacgguaguuuaaca

SEQ ID NO: 219110 - RNA, 19 nt, Artificial Sequence
  Description of Artificial Sequence: Synthetic oligonucleotide
ccuuaccuagcuaugauca

SEQ ID NO: 219111 - RNA, 19 nt, Artificial Sequence
  Description of Artificial Sequence: Synthetic oligonucleotide
aaacuguuccgugaaugua

SEQ ID NO: 219112 - RNA, 19 nt, Artificial Sequence
  Description of Artificial Sequence: Synthetic oligonucleotide
cuuauguaccucccauauc

SEQ ID NO: 219113 - RNA, 19 nt, Artificial Sequence
  Description of Artificial Sequence: Synthetic oligonucleotide
cugaagccguagauguacc

SEQ ID NO: 219114 - RNA, 19 nt, Artificial Sequence
  Description of Artificial Sequence: Synthetic oligonucleotide
agguauuauaaugucuuuu

SEQ ID NO: 219115 - RNA, 19 nt, Artificial Sequence
  Description of Artificial Sequence: Synthetic oligonucleotide
uguuucugucaccgguaac

SEQ ID NO: 219116 - RNA, 19 nt, Artificial Sequence
  Description of Artificial Sequence: Synthetic oligonucleotide
cuuuacucgcacagcagga

SEQ ID NO: 219117 - RNA, 19 nt, Artificial Sequence
  Description of Artificial Sequence: Synthetic oligonucleotide
guuacagcgaaaggcggac

SEQ ID NO: 219118 - RNA, 19 nt, Artificial Sequence
  Description of Artificial Sequence: Synthetic oligonucleotide
ugacauuauucgaccguua

SEQ ID NO: 219119 - RNA, 19 nt, Artificial Sequence
  Description of Artificial Sequence: Synthetic oligonucleotide
gacagacuuaaagaggaua

SEQ ID NO: 219120 - RNA, 19 nt, Artificial Sequence
  Description of Artificial Sequence: Synthetic oligonucleotide
aacgcccuugaagaagaca

SEQ ID NO: 219121 - RNA, 19 nt, Artificial Sequence
  Description of Artificial Sequence: Synthetic oligonucleotide
aggugcauguccacauugg

SEQ ID NO: 219122 - RNA, 19 nt, Artificial Sequence
  Description of Artificial Sequence: Synthetic oligonucleotide
cuagcuaugaucacccaau

SEQ ID NO: 219123 - RNA, 19 nt, Artificial Sequence
  Description of Artificial Sequence: Synthetic oligonucleotide
aacccgcugagauguaauu

SEQ ID NO: 219124 - RNA, 19 nt, Artificial Sequence
  Description of Artificial Sequence: Synthetic oligonucleotide
gcauauuuuggagagccac

SEQ ID NO: 219125 - RNA, 19 nt, Artificial Sequence
  Description of Artificial Sequence: Synthetic oligonucleotide
uccuuauguaccucccaua

SEQ ID NO: 219126 - RNA, 19 nt, Artificial Sequence
  Description of Artificial Sequence: Synthetic oligonucleotide
uuaugccgguaucuagauc

SEQ ID NO: 219127 - RNA, 19 nt, Artificial Sequence
  Description of Artificial Sequence: Synthetic oligonucleotide
auugcuuggacuaggucua

SEQ ID NO: 219128 - RNA, 19 nt, Artificial Sequence
  Description of Artificial Sequence: Synthetic oligonucleotide
auucgaccguuagaaaugu

SEQ ID NO: 219129 - RNA, 19 nt, Artificial Sequence
  Description of Artificial Sequence: Synthetic oligonucleotide
caccauauuggcccacaac

SEQ ID NO: 219130 - RNA, 19 nt, Artificial Sequence
  Description of Artificial Sequence: Synthetic oligonucleotide
acacguagaagugauuguu

SEQ ID NO: 219131 - RNA, 19 nt, Artificial Sequence
  Description of Artificial Sequence: Synthetic oligonucleotide
uguacccgggaggagacau

SEQ ID NO: 219132 - RNA, 19 nt, Artificial Sequence
  Description of Artificial Sequence: Synthetic oligonucleotide
accccagguacacuuucug

SEQ ID NO: 219133 - RNA, 19 nt, Artificial Sequence
  Description of Artificial Sequence: Synthetic oligonucleotide
uagaacacgugagccaaau

SEQ ID NO: 219134 - RNA, 19 nt, Artificial Sequence
  Description of Artificial Sequence: Synthetic oligonucleotide
caacgcuuacuagaauuug

SEQ ID NO: 219135 - RNA, 19 nt, Artificial Sequence
  Description of Artificial Sequence: Synthetic oligonucleotide
uguagacggcacucaggcu

SEQ ID NO: 219136 - RNA, 19 nt, Artificial Sequence
  Description of Artificial Sequence: Synthetic oligonucleotide
caugacgguaguuuaacau

SEQ ID NO: 219137 - RNA, 19 nt, Artificial Sequence
  Description of Artificial Sequence: Synthetic oligonucleotide
cguucuuaagguucgguug

SEQ ID NO: 219138 - RNA, 19 nt, Artificial Sequence
  Description of Artificial Sequence: Synthetic oligonucleotide
gucguagcagacauuuuca

SEQ ID NO: 219139 - RNA, 19 nt, Artificial Sequence
  Description of Artificial Sequence: Synthetic oligonucleotide
auacccacacguagaagug

SEQ ID NO: 219140 - RNA, 19 nt, Artificial Sequence
  Description of Artificial Sequence: Synthetic oligonucleotide
gaacacucucccgagcaca

SEQ ID NO: 219141 - RNA, 19 nt, Artificial Sequence
  Description of Artificial Sequence: Synthetic oligonucleotide
aaccguucuuaagguucgg

SEQ ID NO: 219142 - RNA, 19 nt, Artificial Sequence
  Description of Artificial Sequence: Synthetic oligonucleotide
gcgagagacaccaaggaca

SEQ ID NO: 219143 - RNA, 19 nt, Artificial Sequence
  Description of Artificial Sequence: Synthetic oligonucleotide
uccggccgaggucugcugc

SEQ ID NO: 219144 - RNA, 19 nt, Artificial Sequence
  Description of Artificial Sequence: Synthetic oligonucleotide
auggcauuauugcuacauu

SEQ ID NO: 219145 - RNA, 19 nt, Artificial Sequence
  Description of Artificial Sequence: Synthetic oligonucleotide
gacgagcagccauugaagu

SEQ ID NO: 219146 - RNA, 19 nt, Artificial Sequence
  Description of Artificial Sequence: Synthetic oligonucleotide
gguaaggaucgcuccuucc

SEQ ID NO: 219147 - RNA, 19 nt, Artificial Sequence
  Description of Artificial Sequence: Synthetic oligonucleotide
ggacaaaaucgaauuacca

SEQ ID NO: 219148 - RNA, 19 nt, Artificial Sequence
  Description of Artificial Sequence: Synthetic oligonucleotide
uaggcauauuuuggagagc

SEQ ID NO: 219149 - RNA, 19 nt, Artificial Sequence
  Description of Artificial Sequence: Synthetic oligonucleotide
ccuccuuuaaccccucuug

SEQ ID NO: 219150 - RNA, 19 nt, Artificial Sequence
  Description of Artificial Sequence: Synthetic oligonucleotide
guccgucugggccacuuug

SEQ ID NO: 219151 - RNA, 19 nt, Artificial Sequence
  Description of Artificial Sequence: Synthetic oligonucleotide
uuggcaccguccgucuggg

SEQ ID NO: 219152 - RNA, 19 nt, Artificial Sequence
  Description of Artificial Sequence: Synthetic oligonucleotide
ccacacguagaagugauug

SEQ ID NO: 219153 - RNA, 19 nt, Artificial Sequence
  Description of Artificial Sequence: Synthetic oligonucleotide
gcugaagccguagauguac

SEQ ID NO: 219154 - RNA, 19 nt, Artificial Sequence
  Description of Artificial Sequence: Synthetic oligonucleotide
guaccucccauauccccac

SEQ ID NO: 219155 - RNA, 19 nt, Artificial Sequence
  Description of Artificial Sequence: Synthetic oligonucleotide
gaacaugacgguaguuuaa

SEQ ID NO: 219156 - RNA, 19 nt, Artificial Sequence
  Description of Artificial Sequence: Synthetic oligonucleotide
gcugacucaaccgcugucc

SEQ ID NO: 219157 - RNA, 19 nt, Artificial Sequence
  Description of Artificial Sequence: Synthetic oligonucleotide
cuucgagccuugucugaac

SEQ ID NO: 219158 - RNA, 19 nt, Artificial Sequence
  Description of Artificial Sequence: Synthetic oligonucleotide
ccagaagcgcacgugagag

SEQ ID NO: 219159 - RNA, 19 nt, Artificial Sequence
  Description of Artificial Sequence: Synthetic oligonucleotide
auguaauuacaugggcaau

SEQ ID NO: 219160 - RNA, 19 nt, Artificial Sequence
  Description of Artificial Sequence: Synthetic oligonucleotide
acgcuuacuagaauuugaa

SEQ ID NO: 219161 - RNA, 19 nt, Artificial Sequence
  Description of Artificial Sequence: Synthetic oligonucleotide
cacccaaugcaacgcuuac

SEQ ID NO: 219162 - RNA, 19 nt, Artificial Sequence
  Description of Artificial Sequence: Synthetic oligonucleotide
guaugggcgcuggugacac

SEQ ID NO: 219163 - RNA, 19 nt, Artificial Sequence
  Description of Artificial Sequence: Synthetic oligonucleotide
cauauguguaaugaguuuu

SEQ ID NO: 219164 - RNA, 19 nt, Artificial Sequence
  Description of Artificial Sequence: Synthetic oligonucleotide
ucaaagcgagagacaccaa

SEQ ID NO: 219165 - RNA, 19 nt, Artificial Sequence
  Description of Artificial Sequence: Synthetic oligonucleotide
gaucacccaaugcaacgcu

SEQ ID NO: 219166 - RNA, 19 nt, Artificial Sequence
  Description of Artificial Sequence: Synthetic oligonucleotide
ugccgguaucuagaucucc

SEQ ID NO: 219167 - RNA, 19 nt, Artificial Sequence
  Description of Artificial Sequence: Synthetic oligonucleotide
cacguagaagugauuguua

SEQ ID NO: 219168 - RNA, 19 nt, Artificial Sequence
  Description of Artificial Sequence: Synthetic oligonucleotide
cagcgguggaguaggcuug

SEQ ID NO: 219169 - RNA, 19 nt, Artificial Sequence
  Description of Artificial Sequence: Synthetic oligonucleotide
uaacgcccuugaagaagac

SEQ ID NO: 219170 - RNA, 19 nt, Artificial Sequence
  Description of Artificial Sequence: Synthetic oligonucleotide
cucgucacucuaaaagacu

SEQ ID NO: 219171 - RNA, 19 nt, Artificial Sequence
  Description of Artificial Sequence: Synthetic oligonucleotide
uuacagcgaaaggcggacu

SEQ ID NO: 219172 - RNA, 19 nt, Artificial Sequence
  Description of Artificial Sequence: Synthetic oligonucleotide
gcgcacgugagagaugggg

SEQ ID NO: 219173 - RNA, 19 nt, Artificial Sequence
  Description of Artificial Sequence: Synthetic oligonucleotide
guaauugcggcaggaggaa

SEQ ID NO: 219174 - RNA, 19 nt, Artificial Sequence
  Description of Artificial Sequence: Synthetic oligonucleotide
ccaaugcaacgcuuacuag

SEQ ID NO: 219175 - RNA, 19 nt, Artificial Sequence
  Description of Artificial Sequence: Synthetic oligonucleotide
gcgaaaggcggacugcuca

SEQ ID NO: 219176 - RNA, 19 nt, Artificial Sequence
  Description of Artificial Sequence: Synthetic oligonucleotide
aggaagguucaaauuugaa

SEQ ID NO: 219177 - RNA, 19 nt, Artificial Sequence
  Description of Artificial Sequence: Synthetic oligonucleotide
gggaaggacuugucguagc

SEQ ID NO: 219178 - RNA, 19 nt, Artificial Sequence
  Description of Artificial Sequence: Synthetic oligonucleotide
cacucuaagcauuucuuuu

SEQ ID NO: 219179 - RNA, 19 nt, Artificial Sequence
  Description of Artificial Sequence: Synthetic oligonucleotide
gcucgucacucuaaaagac

SEQ ID NO: 219180 - RNA, 19 nt, Artificial Sequence
  Description of Artificial Sequence: Synthetic oligonucleotide
agcgaaaggcggacugcuc

SEQ ID NO: 219181 - RNA, 19 nt, Artificial Sequence
  Description of Artificial Sequence: Synthetic oligonucleotide
gcgugguaaggaucgcucc

SEQ ID NO: 219182 - RNA, 19 nt, Artificial Sequence
  Description of Artificial Sequence: Synthetic oligonucleotide
ggaaccuagguauuauaau

SEQ ID NO: 219183 - RNA, 19 nt, Artificial Sequence
  Description of Artificial Sequence: Synthetic oligonucleotide
uaauugcggcaggaggaau

SEQ ID NO: 219184 - RNA, 19 nt, Artificial Sequence
  Description of Artificial Sequence: Synthetic oligonucleotide
cgguaguuuaacaugggga

SEQ ID NO: 219185 - RNA, 19 nt, Artificial Sequence
  Description of Artificial Sequence: Synthetic oligonucleotide
gaaaggcggacugcucauc

SEQ ID NO: 219186 - RNA, 19 nt, Artificial Sequence
  Description of Artificial Sequence: Synthetic oligonucleotide
accuagcuaugaucaccca

SEQ ID NO: 219187 - RNA, 19 nt, Artificial Sequence
  Description of Artificial Sequence: Synthetic oligonucleotide
ucccugaugcggacucaaa

SEQ ID NO: 219188 - RNA, 19 nt, Artificial Sequence
  Description of Artificial Sequence: Synthetic oligonucleotide
auaggcgagaggggagcug

SEQ ID NO: 219189 - RNA, 19 nt, Artificial Sequence
  Description of Artificial Sequence: Synthetic oligonucleotide
ggggaaggacuugucguag

SEQ ID NO: 219190 - RNA, 19 nt, Artificial Sequence
  Description of Artificial Sequence: Synthetic oligonucleotide
uugcuccgcgcuguaauua

SEQ ID NO: 219191 - RNA, 19 nt, Artificial Sequence
  Description of Artificial Sequence: Synthetic oligonucleotide
augcaacgcuuacuagaau

SEQ ID NO: 219192 - RNA, 19 nt, Artificial Sequence
  Description of Artificial Sequence: Synthetic oligonucleotide
cgaguggcgucuuuaugcc

SEQ ID NO: 219193 - RNA, 19 nt, Artificial Sequence
  Description of Artificial Sequence: Synthetic oligonucleotide
agaacccgcugagauguaa

SEQ ID NO: 219194 - RNA, 19 nt, Artificial Sequence
  Description of Artificial Sequence: Synthetic oligonucleotide
cgguaucuagaucuccagg

SEQ ID NO: 219195 - RNA, 19 nt, Artificial Sequence
  Description of Artificial Sequence: Synthetic oligonucleotide
uucccuucacgcgauccuu

SEQ ID NO: 219196 - RNA, 19 nt, Artificial Sequence
  Description of Artificial Sequence: Synthetic oligonucleotide
ccgguaucuagaucuccag

SEQ ID NO: 219197 - RNA, 19 nt, Artificial Sequence
  Description of Artificial Sequence: Synthetic oligonucleotide
ccuugucugaacuucuaaa

SEQ ID NO: 219198 - RNA, 19 nt, Artificial Sequence
  Description of Artificial Sequence: Synthetic oligonucleotide
augccgguaucuagaucuc

SEQ ID NO: 219199 - RNA, 19 nt, Artificial Sequence
  Description of Artificial Sequence: Synthetic oligonucleotide
cccaaugcaacgcuuacua

SEQ ID NO: 219200 - RNA, 19 nt, Artificial Sequence
  Description of Artificial Sequence: Synthetic oligonucleotide
gucuuuaugccgguaucua

SEQ ID NO: 219201 - RNA, 19 nt, Artificial Sequence
  Description of Artificial Sequence: Synthetic oligonucleotide
acccacacguagaagugau

SEQ ID NO: 219202 - RNA, 19 nt, Artificial Sequence
  Description of Artificial Sequence: Synthetic oligonucleotide
uucgaccguuagaaauguu

SEQ ID NO: 219203 - RNA, 19 nt, Artificial Sequence
  Description of Artificial Sequence: Synthetic oligonucleotide
gcuuguacccgggaggaga

SEQ ID NO: 219204 - RNA, 19 nt, Artificial Sequence
  Description of Artificial Sequence: Synthetic oligonucleotide
acccgcugagauguaauua

SEQ ID NO: 219205 - RNA, 19 nt, Artificial Sequence
  Description of Artificial Sequence: Synthetic oligonucleotide
gacggcacucaggcugaag

SEQ ID NO: 219206 - RNA, 19 nt, Artificial Sequence
  Description of Artificial Sequence: Synthetic oligonucleotide
ggacuaggucuacauuaca

SEQ ID NO: 219207 - RNA, 19 nt, Artificial Sequence
  Description of Artificial Sequence: Synthetic oligonucleotide
acaaucgaguggcgucuuu

SEQ ID NO: 219208 - RNA, 19 nt, Artificial Sequence
  Description of Artificial Sequence: Synthetic oligonucleotide
cgcgcuguaauuagcccag

SEQ ID NO: 219209 - RNA, 19 nt, Artificial Sequence
  Description of Artificial Sequence: Synthetic oligonucleotide
cgaccguuagaaauguuga

SEQ ID NO: 219210 - RNA, 19 nt, Artificial Sequence
  Description of Artificial Sequence: Synthetic oligonucleotide
caccuucccgccagcggug

SEQ ID NO: 219211 - RNA, 19 nt, Artificial Sequence
  Description of Artificial Sequence: Synthetic oligonucleotide
uugcuuggacuaggucuac

SEQ ID NO: 219212 - RNA, 19 nt, Artificial Sequence
  Description of Artificial Sequence: Synthetic oligonucleotide
cucgcuugcuuguuguaau

SEQ ID NO: 219213 - RNA, 19 nt, Artificial Sequence
  Description of Artificial Sequence: Synthetic oligonucleotide
uaugggcgcuggugacaca

SEQ ID NO: 219214 - RNA, 19 nt, Artificial Sequence
  Description of Artificial Sequence: Synthetic oligonucleotide
ggcgugguaaggaucgcuc

SEQ ID NO: 219215 - RNA, 19 nt, Artificial Sequence
  Description of Artificial Sequence: Synthetic oligonucleotide
ggacuugucguagcagaca

SEQ ID NO: 219216 - RNA, 19 nt, Artificial Sequence
  Description of Artificial Sequence: Synthetic oligonucleotide
gcgucuuuaugccgguauc

SEQ ID NO: 219217 - RNA, 19 nt, Artificial Sequence
  Description of Artificial Sequence: Synthetic oligonucleotide
aucacccaaugcaacgcuu

SEQ ID NO: 219218 - RNA, 19 nt, Artificial Sequence
  Description of Artificial Sequence: Synthetic oligonucleotide
ccuagcuaugaucacccaa

SEQ ID NO: 219219 - RNA, 19 nt, Artificial Sequence
  Description of Artificial Sequence: Synthetic oligonucleotide
caagguugcucgucacucu

SEQ ID NO: 219220 - RNA, 19 nt, Artificial Sequence
  Description of Artificial Sequence: Synthetic oligonucleotide
caaucgaguggcgucuuua

SEQ ID NO: 219221 - RNA, 19 nt, Artificial Sequence
  Description of Artificial Sequence: Synthetic oligonucleotide
cuucccuucacgcgauccu

SEQ ID NO: 219222 - RNA, 19 nt, Artificial Sequence
  Description of Artificial Sequence: Synthetic oligonucleotide
gccgguaucuagaucucca

SEQ ID NO: 219223 - RNA, 19 nt, Artificial Sequence
  Description of Artificial Sequence: Synthetic oligonucleotide
ccuuuaaccccucuuguau

SEQ ID NO: 219224 - RNA, 19 nt, Artificial Sequence
  Description of Artificial Sequence: Synthetic oligonucleotide
gcaggaauucuagaaugua

SEQ ID NO: 219225 - RNA, 19 nt, Artificial Sequence
  Description of Artificial Sequence: Synthetic oligonucleotide
cauauacagaaccguucuu

SEQ ID NO: 219226 - RNA, 19 nt, Artificial Sequence
  Description of Artificial Sequence: Synthetic oligonucleotide
gcuuggacuaggucuacau

SEQ ID NO: 219227 - RNA, 19 nt, Artificial Sequence
  Description of Artificial Sequence: Synthetic oligonucleotide
ccguagauguaccacugaa

SEQ ID NO: 219228 - RNA, 19 nt, Artificial Sequence
  Description of Artificial Sequence: Synthetic oligonucleotide
cguuagaaauguugagaga

SEQ ID NO: 219229 - RNA, 19 nt, Artificial Sequence
  Description of Artificial Sequence: Synthetic oligonucleotide
gcggacugcucaucacccc

SEQ ID NO: 219230 - RNA, 19 nt, Artificial Sequence
  Description of Artificial Sequence: Synthetic oligonucleotide
acgcgauccuuaacgcccu

SEQ ID NO: 219231 - RNA, 19 nt, Artificial Sequence
  Description of Artificial Sequence: Synthetic oligonucleotide
ggugacgagcagccauuga

SEQ ID NO: 219232 - RNA, 19 nt, Artificial Sequence
  Description of Artificial Sequence: Synthetic oligonucleotide
gaacccgcugagauguaau

SEQ ID NO: 219233 - RNA, 19 nt, Artificial Sequence
  Description of Artificial Sequence: Synthetic oligonucleotide
caaggaaccuagguauuau

SEQ ID NO: 219234 - RNA, 19 nt, Artificial Sequence
  Description of Artificial Sequence: Synthetic oligonucleotide
ggcauauuuuggagagcca

SEQ ID NO: 219235 - RNA, 19 nt, Artificial Sequence
  Description of Artificial Sequence: Synthetic oligonucleotide
caaucccguacuugaacuu

SEQ ID NO: 219236 - RNA, 19 nt, Artificial Sequence
  Description of Artificial Sequence: Synthetic oligonucleotide
ggcgucuuuaugccgguau

SEQ ID NO: 219237 - RNA, 19 nt, Artificial Sequence
  Description of Artificial Sequence: Synthetic oligonucleotide
gccguagauguaccacuga

SEQ ID NO: 219238 - RNA, 19 nt, Artificial Sequence
  Description of Artificial Sequence: Synthetic oligonucleotide
ccuucacgcgauccuuaac

SEQ ID NO: 219239 - RNA, 19 nt, Artificial Sequence
  Description of Artificial Sequence: Synthetic oligonucleotide
ccgaggucugcugcuggcg

SEQ ID NO: 219240 - RNA, 19 nt, Artificial Sequence
  Description of Artificial Sequence: Synthetic oligonucleotide
cgauccuuaacgcccuuga

SEQ ID NO: 219241 - RNA, 19 nt, Artificial Sequence
  Description of Artificial Sequence: Synthetic oligonucleotide
cguagaagugauuguuaaa

SEQ ID NO: 219242 - RNA, 19 nt, Artificial Sequence
  Description of Artificial Sequence: Synthetic oligonucleotide
uggcaccguccgucugggc

SEQ ID NO: 219243 - RNA, 19 nt, Artificial Sequence
  Description of Artificial Sequence: Synthetic oligonucleotide
gcucgcuugcuuguuguaa

SEQ ID NO: 219244 - RNA, 19 nt, Artificial Sequence
  Description of Artificial Sequence: Synthetic oligonucleotide
ccuuaacgcccuugaagaa

SEQ ID NO: 219245 - RNA, 19 nt, Artificial Sequence
  Description of Artificial Sequence: Synthetic oligonucleotide
aagaacccgcugagaugua

SEQ ID NO: 219246 - RNA, 19 nt, Artificial Sequence
  Description of Artificial Sequence: Synthetic oligonucleotide
ccccaaggcacuccaguca

SEQ ID NO: 219247 - RNA, 19 nt, Artificial Sequence
  Description of Artificial Sequence: Synthetic oligonucleotide
cuccacaaucgaguggcgu

SEQ ID NO: 219248 - RNA, 19 nt, Artificial Sequence
  Description of Artificial Sequence: Synthetic oligonucleotide
gcaacgcuuacuagaauuu

SEQ ID NO: 219249 - RNA, 19 nt, Artificial Sequence
  Description of Artificial Sequence: Synthetic oligonucleotide
cugugggccgcgagaggaa

SEQ ID NO: 219250 - RNA, 19 nt, Artificial Sequence
  Description of Artificial Sequence: Synthetic oligonucleotide
ccauucgauuuugcuccgc

SEQ ID NO: 219251 - RNA, 19 nt, Artificial Sequence
  Description of Artificial Sequence: Synthetic oligonucleotide
caccccagguacacuuucu

SEQ ID NO: 219252 - RNA, 19 nt, Artificial Sequence
  Description of Artificial Sequence: Synthetic oligonucleotide
cagcgaaaggcggacugcu

SEQ ID NO: 219253 - RNA, 19 nt, Artificial Sequence
  Description of Artificial Sequence: Synthetic oligonucleotide
gccgcgagaggaagcaguc

SEQ ID NO: 219254 - RNA, 19 nt, Artificial Sequence
  Description of Artificial Sequence: Synthetic oligonucleotide
guggcgucuuuaugccggu

SEQ ID NO: 219255 - RNA, 19 nt, Artificial Sequence
  Description of Artificial Sequence: Synthetic oligonucleotide
cauaggcgagaggggagcu

SEQ ID NO: 219256 - RNA, 19 nt, Artificial Sequence
  Description of Artificial Sequence: Synthetic oligonucleotide
ggccuggcccauucgauuu

SEQ ID NO: 219257 - RNA, 19 nt, Artificial Sequence
  Description of Artificial Sequence: Synthetic oligonucleotide
cucucccgagcacaugauu

SEQ ID NO: 219258 - RNA, 19 nt, Artificial Sequence
  Description of Artificial Sequence: Synthetic oligonucleotide
gugggccggugguggcgug

SEQ ID NO: 219259 - RNA, 19 nt, Artificial Sequence
  Description of Artificial Sequence: Synthetic oligonucleotide
caccguccgucugggccac

SEQ ID NO: 219260 - RNA, 19 nt, Artificial Sequence
  Description of Artificial Sequence: Synthetic oligonucleotide
ccgcgagaggaagcagucc

SEQ ID NO: 219261 - RNA, 19 nt, Artificial Sequence
  Description of Artificial Sequence: Synthetic oligonucleotide
gcccuuaccuagcuaugau

SEQ ID NO: 219262 - RNA, 19 nt, Artificial Sequence
  Description of Artificial Sequence: Synthetic oligonucleotide
ggccgcgagaggaagcagu

SEQ ID NO: 219263 - RNA, 19 nt, Artificial Sequence
  Description of Artificial Sequence: Synthetic oligonucleotide
ccacaaucgaguggcgucu

SEQ ID NO: 219264 - RNA, 19 nt, Artificial Sequence
  Description of Artificial Sequence: Synthetic oligonucleotide
caccgguaaccagcuugua

SEQ ID NO: 219265 - RNA, 19 nt, Artificial Sequence
  Description of Artificial Sequence: Synthetic oligonucleotide
cacaaucgaguggcgucuu

SEQ ID NO: 219266 - RNA, 19 nt, Artificial Sequence
  Description of Artificial Sequence: Synthetic oligonucleotide
cgaaaggcggacugcucau

SEQ ID NO: 219267 - RNA, 19 nt, Artificial Sequence
  Description of Artificial Sequence: Synthetic oligonucleotide
ccggccgaggucugcugcu

SEQ ID NO: 219268 - RNA, 19 nt, Artificial Sequence
  Description of Artificial Sequence: Synthetic oligonucleotide
ccuucccgccagcggugga

SEQ ID NO: 219269 - RNA, 19 nt, Artificial Sequence
  Description of Artificial Sequence: Synthetic oligonucleotide
gcgcuguaauuagcccagu

SEQ ID NO: 219270 - RNA, 19 nt, Artificial Sequence
  Description of Artificial Sequence: Synthetic oligonucleotide
ccguccgucugggccacuu

SEQ ID NO: 219271 - RNA, 19 nt, Artificial Sequence
  Description of Artificial Sequence: Synthetic oligonucleotide
cguccgucugggccacuuu

SEQ ID NO: 219272 - RNA, 19 nt, Artificial Sequence
  Description of Artificial Sequence: Synthetic oligonucleotide
aaauaacuaagcuccauac

SEQ ID NO: 219273 - RNA, 19 nt, Artificial Sequence
  Description of Artificial Sequence: Synthetic oligonucleotide
aguuauauaaacuugguau

SEQ ID NO: 219274 - RNA, 19 nt, Artificial Sequence
  Description of Artificial Sequence: Synthetic oligonucleotide
aaauccuuagccuuuugac

SEQ ID NO: 219275 - RNA, 19 nt, Artificial Sequence
  Description of Artificial Sequence: Synthetic oligonucleotide
uacaauauuaacaaucugu

SEQ ID NO: 219276 - RNA, 19 nt, Artificial Sequence
  Description of Artificial Sequence: Synthetic oligonucleotide
auaacuaagcuccauacag

SEQ ID NO: 219277 - RNA, 19 nt, Artificial Sequence
  Description of Artificial Sequence: Synthetic oligonucleotide
acuaacuuguucuucaacg

SEQ ID NO: 219278 - RNA, 19 nt, Artificial Sequence
  Description of Artificial Sequence: Synthetic oligonucleotide
aaaagugucugucaucauc

SEQ ID NO: 219279 - RNA, 19 nt, Artificial Sequence
  Description of Artificial Sequence: Synthetic oligonucleotide
aaccucaacagucaaacag

SEQ ID NO: 219280 - RNA, 19 nt, Artificial Sequence
  Description of Artificial Sequence: Synthetic oligonucleotide
aacuaagcuccauacagcg

SEQ ID NO: 219281 - RNA, 19 nt, Artificial Sequence
  Description of Artificial Sequence: Synthetic oligonucleotide
aacaacuuguguuugaagu

SEQ ID NO: 219282 - RNA, 19 nt, Artificial Sequence
  Description of Artificial Sequence: Synthetic oligonucleotide
agacuaugaaaccaggccc

SEQ ID NO: 219283 - RNA, 19 nt, Artificial Sequence
  Description of Artificial Sequence: Synthetic oligonucleotide
uaauuuagcauaaaaucga

SEQ ID NO: 219284 - RNA, 19 nt, Artificial Sequence
  Description of Artificial Sequence: Synthetic oligonucleotide
uuaaacuccgccuuuaaca

SEQ ID NO: 219285 - RNA, 19 nt, Artificial Sequence
  Description of Artificial Sequence: Synthetic oligonucleotide
uugaugaacgucucgaagg

SEQ ID NO: 219286 - RNA, 19 nt, Artificial Sequence
  Description of Artificial Sequence: Synthetic oligonucleotide
ugauacuuaaagaguaagg

SEQ ID NO: 219287 - RNA, 19 nt, Artificial Sequence
  Description of Artificial Sequence: Synthetic oligonucleotide
gaugaaacgaaacaguauc

SEQ ID NO: 219288 - RNA, 19 nt, Artificial Sequence
  Description of Artificial Sequence: Synthetic oligonucleotide
aaaaucggcauguccaauc

SEQ ID NO: 219289 - RNA, 19 nt, Artificial Sequence
  Description of Artificial Sequence: Synthetic oligonucleotide
uuugucucgcuccauauag

SEQ ID NO: 219290 - RNA, 19 nt, Artificial Sequence
  Description of Artificial Sequence: Synthetic oligonucleotide
uuuagcauaaaaucgaguu

SEQ ID NO: 219291 - RNA, 19 nt, Artificial Sequence
  Description of Artificial Sequence: Synthetic oligonucleotide
agagauccaagacaguccc

SEQ ID NO: 219292 - RNA, 19 nt, Artificial Sequence
  Description of Artificial Sequence: Synthetic oligonucleotide
aaucacacacacaacacac

SEQ ID NO: 219293 - RNA, 19 nt, Artificial Sequence
  Description of Artificial Sequence: Synthetic oligonucleotide
augguuaguauguucaccg

SEQ ID NO: 219294 - RNA, 19 nt, Artificial Sequence
  Description of Artificial Sequence: Synthetic oligonucleotide
aaacuagaagguugugacc

SEQ ID NO: 219295 - RNA, 19 nt, Artificial Sequence
  Description of Artificial Sequence: Synthetic oligonucleotide
aaucgaguuauauaaacuu

SEQ ID NO: 219296 - RNA, 19 nt, Artificial Sequence
  Description of Artificial Sequence: Synthetic oligonucleotide
gggacuuuuaaucagaacc

SEQ ID NO: 219297 - RNA, 19 nt, Artificial Sequence
  Description of Artificial Sequence: Synthetic oligonucleotide
aaacgaaacaguaucauga

SEQ ID NO: 219298 - RNA, 19 nt, Artificial Sequence
  Description of Artificial Sequence: Synthetic oligonucleotide
aaacaugcuacuuuguaaa

SEQ ID NO: 219299 - RNA, 19 nt, Artificial Sequence
  Description of Artificial Sequence: Synthetic oligonucleotide
aaaucuccaggcuuuacug

SEQ ID NO: 219300 - RNA, 19 nt, Artificial Sequence
  Description of Artificial Sequence: Synthetic oligonucleotide
ucuuucucgggauugauga

SEQ ID NO: 219301 - RNA, 19 nt, Artificial Sequence
  Description of Artificial Sequence: Synthetic oligonucleotide
agucaaacagcagucaccc

SEQ ID NO: 219302 - RNA, 19 nt, Artificial Sequence
  Description of Artificial Sequence: Synthetic oligonucleotide
ucaucagguugauaaaacg

SEQ ID NO: 219303 - RNA, 19 nt, Artificial Sequence
  Description of Artificial Sequence: Synthetic oligonucleotide
aauuucagcugauuguaca

SEQ ID NO: 219304 - RNA, 19 nt, Artificial Sequence
  Description of Artificial Sequence: Synthetic oligonucleotide
aauguugcaaaagugucug

SEQ ID NO: 219305 - RNA, 19 nt, Artificial Sequence
  Description of Artificial Sequence: Synthetic oligonucleotide
uauaagaaguagaaauaga

SEQ ID NO: 219306 - RNA, 19 nt, Artificial Sequence
  Description of Artificial Sequence: Synthetic oligonucleotide
ucgggauugaugacaaugg

SEQ ID NO: 219307 - RNA, 19 nt, Artificial Sequence
  Description of Artificial Sequence: Synthetic oligonucleotide
gauacuuaaagaguaagga

SEQ ID NO: 219308 - RNA, 19 nt, Artificial Sequence
  Description of Artificial Sequence: Synthetic oligonucleotide
acacacacaacacaccacg

SEQ ID NO: 219309 - RNA, 19 nt, Artificial Sequence
  Description of Artificial Sequence: Synthetic oligonucleotide
uuuuaaucagaacccgugc

SEQ ID NO: 219310 - RNA, 19 nt, Artificial Sequence
  Description of Artificial Sequence: Synthetic oligonucleotide
gaaacaaaugugaagcccc

SEQ ID NO: 219311 - RNA, 19 nt, Artificial Sequence
  Description of Artificial Sequence: Synthetic oligonucleotide
aaaauaacuaagcuccaua

SEQ ID NO: 219312 - RNA, 19 nt, Artificial Sequence
  Description of Artificial Sequence: Synthetic oligonucleotide
aacuagaagguugugacca

SEQ ID NO: 219313 - RNA, 19 nt, Artificial Sequence
  Description of Artificial Sequence: Synthetic oligonucleotide
uaaagaguaaggauuuuaa

SEQ ID NO: 219314 - RNA, 19 nt, Artificial Sequence
  Description of Artificial Sequence: Synthetic oligonucleotide
cuaacuuguucuucaacgg

SEQ ID NO: 219315 - RNA, 19 nt, Artificial Sequence
  Description of Artificial Sequence: Synthetic oligonucleotide
gaaaacgcacagaacagcg

SEQ ID NO: 219316 - RNA, 19 nt, Artificial Sequence
  Description of Artificial Sequence: Synthetic oligonucleotide
agaagugugacaucucaag

SEQ ID NO: 219317 - RNA, 19 nt, Artificial Sequence
  Description of Artificial Sequence: Synthetic oligonucleotide
ucuaaagccagagaguaca

SEQ ID NO: 219318 - RNA, 19 nt, Artificial Sequence
  Description of Artificial Sequence: Synthetic oligonucleotide
caucagguugauaaaacgc

SEQ ID NO: 219319 - RNA, 19 nt, Artificial Sequence
  Description of Artificial Sequence: Synthetic oligonucleotide
uuuaaucagaacccgugcu

SEQ ID NO: 219320 - RNA, 19 nt, Artificial Sequence
  Description of Artificial Sequence: Synthetic oligonucleotide
ucaacgguuuccuucaucu

SEQ ID NO: 219321 - RNA, 19 nt, Artificial Sequence
  Description of Artificial Sequence: Synthetic oligonucleotide
ugauguauucacuccagug

SEQ ID NO: 219322 - RNA, 19 nt, Artificial Sequence
  Description of Artificial Sequence: Synthetic oligonucleotide
cuuuuaaucagaacccgug

SEQ ID NO: 219323 - RNA, 19 nt, Artificial Sequence
  Description of Artificial Sequence: Synthetic oligonucleotide
uggaauacucucucugugg

SEQ ID NO: 219324 - RNA, 19 nt, Artificial Sequence
  Description of Artificial Sequence: Synthetic oligonucleotide
uauuauggucaucacacaa

SEQ ID NO: 219325 - RNA, 19 nt, Artificial Sequence
  Description of Artificial Sequence: Synthetic oligonucleotide
aaacgcacagaacagcggu

SEQ ID NO: 219326 - RNA, 19 nt, Artificial Sequence
  Description of Artificial Sequence: Synthetic oligonucleotide
aaaucuauuuggucuuuca

SEQ ID NO: 219327 - RNA, 19 nt, Artificial Sequence
  Description of Artificial Sequence: Synthetic oligonucleotide
gaaacgaaacaguaucaug

SEQ ID NO: 219328 - RNA, 19 nt, Artificial Sequence
  Description of Artificial Sequence: Synthetic oligonucleotide
aaguuuggaacuuucugaa

SEQ ID NO: 219329 - RNA, 19 nt, Artificial Sequence
  Description of Artificial Sequence: Synthetic oligonucleotide
agcgccagggcagagaucc

SEQ ID NO: 219330 - RNA, 19 nt, Artificial Sequence
  Description of Artificial Sequence: Synthetic oligonucleotide
uguaugugggccaguagcc

SEQ ID NO: 219331 - RNA, 19 nt, Artificial Sequence
  Description of Artificial Sequence: Synthetic oligonucleotide
ucacacacacaacacacca

SEQ ID NO: 219332 - RNA, 19 nt, Artificial Sequence
  Description of Artificial Sequence: Synthetic oligonucleotide
uuaauaugggaacccaaaa

SEQ ID NO: 219333 - RNA, 19 nt, Artificial Sequence
  Description of Artificial Sequence: Synthetic oligonucleotide
aaagggagaauccuuuaau

SEQ ID NO: 219334 - RNA, 19 nt, Artificial Sequence
  Description of Artificial Sequence: Synthetic oligonucleotide
acuaaaaucggcaugucca

SEQ ID NO: 219335 - RNA, 19 nt, Artificial Sequence
  Description of Artificial Sequence: Synthetic oligonucleotide
uucaaaguaagucuacauu

SEQ ID NO: 219336 - RNA, 19 nt, Artificial Sequence
  Description of Artificial Sequence: Synthetic oligonucleotide
uaaacuccgccuuuaacac

SEQ ID NO: 219337 - RNA, 19 nt, Artificial Sequence
  Description of Artificial Sequence: Synthetic oligonucleotide
uccacacucagccagcaug

SEQ ID NO: 219338 - RNA, 19 nt, Artificial Sequence
  Description of Artificial Sequence: Synthetic oligonucleotide
aucuauuuggucuuucaga

SEQ ID NO: 219339 - RNA, 19 nt, Artificial Sequence
  Description of Artificial Sequence: Synthetic oligonucleotide
uaacuaagcuccauacagc

SEQ ID NO: 219340 - RNA, 19 nt, Artificial Sequence
  Description of Artificial Sequence: Synthetic oligonucleotide
ucugcugacacaucacgcc

SEQ ID NO: 219341 - RNA, 19 nt, Artificial Sequence
  Description of Artificial Sequence: Synthetic oligonucleotide
uuugggacuuuuaaucaga

SEQ ID NO: 219342 - RNA, 19 nt, Artificial Sequence
  Description of Artificial Sequence: Synthetic oligonucleotide
aaaucgaguuauauaaacu

SEQ ID NO: 219343 - RNA, 19 nt, Artificial Sequence
  Description of Artificial Sequence: Synthetic oligonucleotide
aaccugauuuacagaagcc

SEQ ID NO: 219344 - RNA, 19 nt, Artificial Sequence
  Description of Artificial Sequence: Synthetic oligonucleotide
auacuuaaagaguaaggau

SEQ ID NO: 219345 - RNA, 19 nt, Artificial Sequence
  Description of Artificial Sequence: Synthetic oligonucleotide
uguugcuugaagugaacca

SEQ ID NO: 219346 - RNA, 19 nt, Artificial Sequence
  Description of Artificial Sequence: Synthetic oligonucleotide
uucaucagguugauaaaac

SEQ ID NO: 219347 - RNA, 19 nt, Artificial Sequence
  Description of Artificial Sequence: Synthetic oligonucleotide
aaaucggcauguccaaucu

SEQ ID NO: 219348 - RNA, 19 nt, Artificial Sequence
  Description of Artificial Sequence: Synthetic oligonucleotide
ucagucgccucuuuguugc

SEQ ID NO: 219349 - RNA, 19 nt, Artificial Sequence
  Description of Artificial Sequence: Synthetic oligonucleotide
uguucuuacugcucaaccu

SEQ ID NO: 219350 - RNA, 19 nt, Artificial Sequence
  Description of Artificial Sequence: Synthetic oligonucleotide
agugauucaauccucuuuu

SEQ ID NO: 219351 - RNA, 19 nt, Artificial Sequence
  Description of Artificial Sequence: Synthetic oligonucleotide
caaguagccuucuggacgg

SEQ ID NO: 219352 - RNA, 19 nt, Artificial Sequence
  Description of Artificial Sequence: Synthetic oligonucleotide
agguagaaagucuugaaua

SEQ ID NO: 219353 - RNA, 19 nt, Artificial Sequence
  Description of Artificial Sequence: Synthetic oligonucleotide
ugaugaacgucucgaagga

SEQ ID NO: 219354 - RNA, 19 nt, Artificial Sequence
  Description of Artificial Sequence: Synthetic oligonucleotide
ugaccaagagucuuucuca

SEQ ID NO: 219355 - RNA, 19 nt, Artificial Sequence
  Description of Artificial Sequence: Synthetic oligonucleotide
gacuuuuaaucagaacccg

SEQ ID NO: 219356 - RNA, 19 nt, Artificial Sequence
  Description of Artificial Sequence: Synthetic oligonucleotide
gucuauaagugauucaauc

SEQ ID NO: 219357 - RNA, 19 nt, Artificial Sequence
  Description of Artificial Sequence: Synthetic oligonucleotide
uuaguauguucaccgugag

SEQ ID NO: 219358 - RNA, 19 nt, Artificial Sequence
  Description of Artificial Sequence: Synthetic oligonucleotide
guguaugugggccaguagc

SEQ ID NO: 219359 - RNA, 19 nt, Artificial Sequence
  Description of Artificial Sequence: Synthetic oligonucleotide
uuccagaaaauauugcuuu

SEQ ID NO: 219360 - RNA, 19 nt, Artificial Sequence
  Description of Artificial Sequence: Synthetic oligonucleotide
cucacgugugaacacauag

SEQ ID NO: 219361 - RNA, 19 nt, Artificial Sequence
  Description of Artificial Sequence: Synthetic oligonucleotide
agaagguugugaccaagag

SEQ ID NO: 219362 - RNA, 19 nt, Artificial Sequence
  Description of Artificial Sequence: Synthetic oligonucleotide
aacgaaacaguaucaugau

SEQ ID NO: 219363 - RNA, 19 nt, Artificial Sequence
  Description of Artificial Sequence: Synthetic oligonucleotide
uccuggaauacucucucug

SEQ ID NO: 219364 - RNA, 19 nt, Artificial Sequence
  Description of Artificial Sequence: Synthetic oligonucleotide
auguugcuugaagugaacc

SEQ ID NO: 219365 - RNA, 19 nt, Artificial Sequence
  Description of Artificial Sequence: Synthetic oligonucleotide
aagugauucaauccucuuu

SEQ ID NO: 219366 - RNA, 19 nt, Artificial Sequence
  Description of Artificial Sequence: Synthetic oligonucleotide
guuauauaaacuugguaua

SEQ ID NO: 219367 - RNA, 19 nt, Artificial Sequence
  Description of Artificial Sequence: Synthetic oligonucleotide
gauaaaacgcucauuccuc

SEQ ID NO: 219368 - RNA, 19 nt, Artificial Sequence
  Description of Artificial Sequence: Synthetic oligonucleotide
caugaucaaaauuccuuug

SEQ ID NO: 219369 - RNA, 19 nt, Artificial Sequence
  Description of Artificial Sequence: Synthetic oligonucleotide
ugaaaacgcacagaacagc

SEQ ID NO: 219370 - RNA, 19 nt, Artificial Sequence
  Description of Artificial Sequence: Synthetic oligonucleotide
ugguacaucugugugaggu

SEQ ID NO: 219371 - RNA, 19 nt, Artificial Sequence
  Description of Artificial Sequence: Synthetic oligonucleotide
aggaacuaaaaucggcaug

SEQ ID NO: 219372 - RNA, 19 nt, Artificial Sequence
  Description of Artificial Sequence: Synthetic oligonucleotide
ucgugcuugagcuucgaca

SEQ ID NO: 219373 - RNA, 19 nt, Artificial Sequence
  Description of Artificial Sequence: Synthetic oligonucleotide
aaaacgcacagaacagcgg

SEQ ID NO: 219374 - RNA, 19 nt, Artificial Sequence
  Description of Artificial Sequence: Synthetic oligonucleotide
uugccugcucguaacuugg

SEQ ID NO: 219375 - RNA, 19 nt, Artificial Sequence
  Description of Artificial Sequence: Synthetic oligonucleotide
auucaaaguaagucuacau

SEQ ID NO: 219376 - RNA, 19 nt, Artificial Sequence
  Description of Artificial Sequence: Synthetic oligonucleotide
uuaaucagaacccgugcuu

SEQ ID NO: 219377 - RNA, 19 nt, Artificial Sequence
  Description of Artificial Sequence: Synthetic oligonucleotide
uguuugaaguccccauuga

SEQ ID NO: 219378 - RNA, 19 nt, Artificial Sequence
  Description of Artificial Sequence: Synthetic oligonucleotide
acgaaacaguaucaugauc

SEQ ID NO: 219379 - RNA, 19 nt, Artificial Sequence
  Description of Artificial Sequence: Synthetic oligonucleotide
cagagauccaagacagucc

SEQ ID NO: 219380 - RNA, 19 nt, Artificial Sequence
  Description of Artificial Sequence: Synthetic oligonucleotide
uagcccaugguuaguaugu

SEQ ID NO: 219381 - RNA, 19 nt, Artificial Sequence
  Description of Artificial Sequence: Synthetic oligonucleotide
gaauccacguguuuagcga

SEQ ID NO: 219382 - RNA, 19 nt, Artificial Sequence
  Description of Artificial Sequence: Synthetic oligonucleotide
auaaaacgcucauuccucu

SEQ ID NO: 219383 - RNA, 19 nt, Artificial Sequence
  Description of Artificial Sequence: Synthetic oligonucleotide
uuuguugccugcucguaac

SEQ ID NO: 219384 - RNA, 19 nt, Artificial Sequence
  Description of Artificial Sequence: Synthetic oligonucleotide
uauguucaccgugagguca

SEQ ID NO: 219385 - RNA, 19 nt, Artificial Sequence
  Description of Artificial Sequence: Synthetic oligonucleotide
uucugaacaacuuguguuu

SEQ ID NO: 219386 - RNA, 19 nt, Artificial Sequence
  Description of Artificial Sequence: Synthetic oligonucleotide
acauucgugcuugagcuuc

SEQ ID NO: 219387 - RNA, 19 nt, Artificial Sequence
  Description of Artificial Sequence: Synthetic oligonucleotide
uaggguauuuccacugugu

SEQ ID NO: 219388 - RNA, 19 nt, Artificial Sequence
  Description of Artificial Sequence: Synthetic oligonucleotide
ugguauauuccagaaaaua

SEQ ID NO: 219389 - RNA, 19 nt, Artificial Sequence
  Description of Artificial Sequence: Synthetic oligonucleotide
uggaagcacaccucuacca

SEQ ID NO: 219390 - RNA, 19 nt, Artificial Sequence
  Description of Artificial Sequence: Synthetic oligonucleotide
uagaagguugugaccaaga

SEQ ID NO: 219391 - RNA, 19 nt, Artificial Sequence
  Description of Artificial Sequence: Synthetic oligonucleotide
cuugccauggaugaaacga

SEQ ID NO: 219392 - RNA, 19 nt, Artificial Sequence
  Description of Artificial Sequence: Synthetic oligonucleotide
aauccacguguuuagcgau

SEQ ID NO: 219393 - RNA, 19 nt, Artificial Sequence
  Description of Artificial Sequence: Synthetic oligonucleotide
acaguaucaugaucuuguc

SEQ ID NO: 219394 - RNA, 19 nt, Artificial Sequence
  Description of Artificial Sequence: Synthetic oligonucleotide
gguacaagagcuugugaag

SEQ ID NO: 219395 - RNA, 19 nt, Artificial Sequence
  Description of Artificial Sequence: Synthetic oligonucleotide
cagucaaacagcagucacc

SEQ ID NO: 219396 - RNA, 19 nt, Artificial Sequence
  Description of Artificial Sequence: Synthetic oligonucleotide
cugugucccacaaucacac

SEQ ID NO: 219397 - RNA, 19 nt, Artificial Sequence
  Description of Artificial Sequence: Synthetic oligonucleotide
acgcccguggcuuucugcc

SEQ ID NO: 219398 - RNA, 19 nt, Artificial Sequence
  Description of Artificial Sequence: Synthetic oligonucleotide
ugaacgucucgaaggauuc

SEQ ID NO: 219399 - RNA, 19 nt, Artificial Sequence
  Description of Artificial Sequence: Synthetic oligonucleotide
guacaauucagaaacuaga

SEQ ID NO: 219400 - RNA, 19 nt, Artificial Sequence
  Description of Artificial Sequence: Synthetic oligonucleotide
ucccuaugcaagacuauga

SEQ ID NO: 219401 - RNA, 19 nt, Artificial Sequence
  Description of Artificial Sequence: Synthetic oligonucleotide
ggaauccacguguuuagcg

SEQ ID NO: 219402 - RNA, 19 nt, Artificial Sequence
  Description of Artificial Sequence: Synthetic oligonucleotide
ucuuggcacaucagggacc

SEQ ID NO: 219403 - RNA, 19 nt, Artificial Sequence
  Description of Artificial Sequence: Synthetic oligonucleotide
ucugucuauaagugauuca

SEQ ID NO: 219404 - RNA, 19 nt, Artificial Sequence
  Description of Artificial Sequence: Synthetic oligonucleotide
agaacccgugcuuuaccac

SEQ ID NO: 219405 - RNA, 19 nt, Artificial Sequence
  Description of Artificial Sequence: Synthetic oligonucleotide
cuuccgaccacugugcuug

SEQ ID NO: 219406 - RNA, 19 nt, Artificial Sequence
  Description of Artificial Sequence: Synthetic oligonucleotide
cugauuguacaauucagaa

SEQ ID NO: 219407 - RNA, 19 nt, Artificial Sequence
  Description of Artificial Sequence: Synthetic oligonucleotide
uuucucgggauugaugaca

SEQ ID NO: 219408 - RNA, 19 nt, Artificial Sequence
  Description of Artificial Sequence: Synthetic oligonucleotide
uggucuuuuguugaugaac

SEQ ID NO: 219409 - RNA, 19 nt, Artificial Sequence
  Description of Artificial Sequence: Synthetic oligonucleotide
ugaaacgaaacaguaucau

SEQ ID NO: 219410 - RNA, 19 nt, Artificial Sequence
  Description of Artificial Sequence: Synthetic oligonucleotide
uguccaaucuaaagccaga

SEQ ID NO: 219411 - RNA, 19 nt, Artificial Sequence
  Description of Artificial Sequence: Synthetic oligonucleotide
ucuaggguauuuccacugu

SEQ ID NO: 219412 - RNA, 19 nt, Artificial Sequence
  Description of Artificial Sequence: Synthetic oligonucleotide
augggcguguaugugggcc

SEQ ID NO: 219413 - RNA, 19 nt, Artificial Sequence
  Description of Artificial Sequence: Synthetic oligonucleotide
aucgaguuauauaaacuug

SEQ ID NO: 219414 - RNA, 19 nt, Artificial Sequence
  Description of Artificial Sequence: Synthetic oligonucleotide
ucggacuauggcagcgucg

SEQ ID NO: 219415 - RNA, 19 nt, Artificial Sequence
  Description of Artificial Sequence: Synthetic oligonucleotide
aucacacacacaacacacc

SEQ ID NO: 219416 - RNA, 19 nt, Artificial Sequence
  Description of Artificial Sequence: Synthetic oligonucleotide
aaacgcucauuccucugga

SEQ ID NO: 219417 - RNA, 19 nt, Artificial Sequence
  Description of Artificial Sequence: Synthetic oligonucleotide
acguguuuagcgaugagcu

SEQ ID NO: 219418 - RNA, 19 nt, Artificial Sequence
  Description of Artificial Sequence: Synthetic oligonucleotide
gacaaguagccuucuggac

SEQ ID NO: 219419 - RNA, 19 nt, Artificial Sequence
  Description of Artificial Sequence: Synthetic oligonucleotide
caguaucaugaucuugucc

SEQ ID NO: 219420 - RNA, 19 nt, Artificial Sequence
  Description of Artificial Sequence: Synthetic oligonucleotide
uaaaacgcucauuccucug

SEQ ID NO: 219421 - RNA, 19 nt, Artificial Sequence
  Description of Artificial Sequence: Synthetic oligonucleotide
cucgggauugaugacaaug

SEQ ID NO: 219422 - RNA, 19 nt, Artificial Sequence
  Description of Artificial Sequence: Synthetic oligonucleotide
ggacuuuuaaucagaaccc

SEQ ID NO: 219423 - RNA, 19 nt, Artificial Sequence
  Description of Artificial Sequence: Synthetic oligonucleotide
ugucuauaagugauucaau

SEQ ID NO: 219424 - RNA, 19 nt, Artificial Sequence
  Description of Artificial Sequence: Synthetic oligonucleotide
ucagaacccgugcuuuacc

SEQ ID NO: 219425 - RNA, 19 nt, Artificial Sequence
  Description of Artificial Sequence: Synthetic oligonucleotide
ugucucgcuccauauaguc

SEQ ID NO: 219426 - RNA, 19 nt, Artificial Sequence
  Description of Artificial Sequence: Synthetic oligonucleotide
gugaccaagagucuuucuc

SEQ ID NO: 219427 - RNA, 19 nt, Artificial Sequence
  Description of Artificial Sequence: Synthetic oligonucleotide
uguagacacaaugaacuua

SEQ ID NO: 219428 - RNA, 19 nt, Artificial Sequence
  Description of Artificial Sequence: Synthetic oligonucleotide
accgugaggucaauggggc

SEQ ID NO: 219429 - RNA, 19 nt, Artificial Sequence
  Description of Artificial Sequence: Synthetic oligonucleotide
uugucucauugggagacgg

SEQ ID NO: 219430 - RNA, 19 nt, Artificial Sequence
  Description of Artificial Sequence: Synthetic oligonucleotide
guuaguauguucaccguga

SEQ ID NO: 219431 - RNA, 19 nt, Artificial Sequence
  Description of Artificial Sequence: Synthetic oligonucleotide
aggcccaauuuuauuaugg

SEQ ID NO: 219432 - RNA, 19 nt, Artificial Sequence
  Description of Artificial Sequence: Synthetic oligonucleotide
gguacuaacuuguucuuca

SEQ ID NO: 219433 - RNA, 19 nt, Artificial Sequence
  Description of Artificial Sequence: Synthetic oligonucleotide
ugcguucuaguguuugucu

SEQ ID NO: 219434 - RNA, 19 nt, Artificial Sequence
  Description of Artificial Sequence: Synthetic oligonucleotide
aggccaauuaaacuaguuu

SEQ ID NO: 219435 - RNA, 19 nt, Artificial Sequence
  Description of Artificial Sequence: Synthetic oligonucleotide
caugguuaguauguucacc

SEQ ID NO: 219436 - RNA, 19 nt, Artificial Sequence
  Description of Artificial Sequence: Synthetic oligonucleotide
uguaucugauugaucuuua

SEQ ID NO: 219437 - RNA, 19 nt, Artificial Sequence
  Description of Artificial Sequence: Synthetic oligonucleotide
cacguguuuagcgaugagc

SEQ ID NO: 219438 - RNA, 19 nt, Artificial Sequence
  Description of Artificial Sequence: Synthetic oligonucleotide
agccccuaaacagaaauga

SEQ ID NO: 219439 - RNA, 19 nt, Artificial Sequence
  Description of Artificial Sequence: Synthetic oligonucleotide
uucucgggauugaugacaa

SEQ ID NO: 219440 - RNA, 19 nt, Artificial Sequence
  Description of Artificial Sequence: Synthetic oligonucleotide
uuaacacagcaugucccag

SEQ ID NO: 219441 - RNA, 19 nt, Artificial Sequence
  Description of Artificial Sequence: Synthetic oligonucleotide
uugccauggaugaaacgaa

SEQ ID NO: 219442 - RNA, 19 nt, Artificial Sequence
  Description of Artificial Sequence: Synthetic oligonucleotide
cuaaagccagagaguacag

SEQ ID NO: 219443 - RNA, 19 nt, Artificial Sequence
  Description of Artificial Sequence: Synthetic oligonucleotide
guagcccaugguuaguaug

SEQ ID NO: 219444 - RNA, 19 nt, Artificial Sequence
  Description of Artificial Sequence: Synthetic oligonucleotide
agucucugucuauaaguga

SEQ ID NO: 219445 - RNA, 19 nt, Artificial Sequence
  Description of Artificial Sequence: Synthetic oligonucleotide
uguucuccgcuuugagucc

SEQ ID NO: 219446 - RNA, 19 nt, Artificial Sequence
  Description of Artificial Sequence: Synthetic oligonucleotide
uugggacuuuuaaucagaa

SEQ ID NO: 219447 - RNA, 19 nt, Artificial Sequence
  Description of Artificial Sequence: Synthetic oligonucleotide
cauugaaaaugaacuuauc

SEQ ID NO: 219448 - RNA, 19 nt, Artificial Sequence
  Description of Artificial Sequence: Synthetic oligonucleotide
gaacccaaaagaugucaga

SEQ ID NO: 219449 - RNA, 19 nt, Artificial Sequence
  Description of Artificial Sequence: Synthetic oligonucleotide
gguuaguauguucaccgug

SEQ ID NO: 219450 - RNA, 19 nt, Artificial Sequence
  Description of Artificial Sequence: Synthetic oligonucleotide
gaacccgugcuuuaccaca

SEQ ID NO: 219451 - RNA, 19 nt, Artificial Sequence
  Description of Artificial Sequence: Synthetic oligonucleotide
uagugguacugauuuggac

SEQ ID NO: 219452 - RNA, 19 nt, Artificial Sequence
  Description of Artificial Sequence: Synthetic oligonucleotide
caaaggucuugauguauuc

SEQ ID NO: 219453 - RNA, 19 nt, Artificial Sequence
  Description of Artificial Sequence: Synthetic oligonucleotide
auguccaaucuaaagccag

SEQ ID NO: 219454 - RNA, 19 nt, Artificial Sequence
  Description of Artificial Sequence: Synthetic oligonucleotide
caccauuggagccuuguuc

SEQ ID NO: 219455 - RNA, 19 nt, Artificial Sequence
  Description of Artificial Sequence: Synthetic oligonucleotide
caaucacacacacaacaca

SEQ ID NO: 219456 - RNA, 19 nt, Artificial Sequence
  Description of Artificial Sequence: Synthetic oligonucleotide
ugugacaucucaaguccuu

SEQ ID NO: 219457 - RNA, 19 nt, Artificial Sequence
  Description of Artificial Sequence: Synthetic oligonucleotide
augcaagacuaugaaacca

SEQ ID NO: 219458 - RNA, 19 nt, Artificial Sequence
  Description of Artificial Sequence: Synthetic oligonucleotide
ugguagcuuuuaaucaaaa

SEQ ID NO: 219459 - RNA, 19 nt, Artificial Sequence
  Description of Artificial Sequence: Synthetic oligonucleotide
cugucuauaagugauucaa

SEQ ID NO: 219460 - RNA, 19 nt, Artificial Sequence
  Description of Artificial Sequence: Synthetic oligonucleotide
auuauggucaucacacaaa

SEQ ID NO: 219461 - RNA, 19 nt, Artificial Sequence
  Description of Artificial Sequence: Synthetic oligonucleotide
cuggaagcacaccucuacc

SEQ ID NO: 219462 - RNA, 19 nt, Artificial Sequence
  Description of Artificial Sequence: Synthetic oligonucleotide
cuaggguauuuccacugug

SEQ ID NO: 219463 - RNA, 19 nt, Artificial Sequence
  Description of Artificial Sequence: Synthetic oligonucleotide
acacuuauacaugaucaaa

SEQ ID NO: 219464 - RNA, 19 nt, Artificial Sequence
  Description of Artificial Sequence: Synthetic oligonucleotide
aacgcacagaacagcgguc

SEQ ID NO: 219465 - RNA, 19 nt, Artificial Sequence
  Description of Artificial Sequence: Synthetic oligonucleotide
aacaugcccuccagcuugc

SEQ ID NO: 219466 - RNA, 19 nt, Artificial Sequence
  Description of Artificial Sequence: Synthetic oligonucleotide
auaugggaacccaaaagau

SEQ ID NO: 219467 - RNA, 19 nt, Artificial Sequence
  Description of Artificial Sequence: Synthetic oligonucleotide
augaaacgaaacaguauca

SEQ ID NO: 219468 - RNA, 19 nt, Artificial Sequence
  Description of Artificial Sequence: Synthetic oligonucleotide
uugggagacggcagucugc

SEQ ID NO: 219469 - RNA, 19 nt, Artificial Sequence
  Description of Artificial Sequence: Synthetic oligonucleotide
acuuuuaaucagaacccgu

SEQ ID NO: 219470 - RNA, 19 nt, Artificial Sequence
  Description of Artificial Sequence: Synthetic oligonucleotide
gacggcagucugcugacac

SEQ ID NO: 219471 - RNA, 19 nt, Artificial Sequence
  Description of Artificial Sequence: Synthetic oligonucleotide
ugggacuuuuaaucagaac

SEQ ID NO: 219472 - RNA, 19 nt, Artificial Sequence
  Description of Artificial Sequence: Synthetic oligonucleotide
aguagccuucuggacgggc

SEQ ID NO: 219473 - RNA, 19 nt, Artificial Sequence
  Description of Artificial Sequence: Synthetic oligonucleotide
ggguauuuccacugugucc

SEQ ID NO: 219474 - RNA, 19 nt, Artificial Sequence
  Description of Artificial Sequence: Synthetic oligonucleotide
aucuaaagccagagaguac

SEQ ID NO: 219475 - RNA, 19 nt, Artificial Sequence
  Description of Artificial Sequence: Synthetic oligonucleotide
uucaacgguuuccuucauc

SEQ ID NO: 219476 - RNA, 19 nt, Artificial Sequence
  Description of Artificial Sequence: Synthetic oligonucleotide
aaccucacgugugaacaca

SEQ ID NO: 219477 - RNA, 19 nt, Artificial Sequence
  Description of Artificial Sequence: Synthetic oligonucleotide
ggcagcgucgaucugguac

SEQ ID NO: 219478 - RNA, 19 nt, Artificial Sequence
  Description of Artificial Sequence: Synthetic oligonucleotide
cauucgugcuugagcuucg

SEQ ID NO: 219479 - RNA, 19 nt, Artificial Sequence
  Description of Artificial Sequence: Synthetic oligonucleotide
uacugucuguccuggaaua

SEQ ID NO: 219480 - RNA, 19 nt, Artificial Sequence
  Description of Artificial Sequence: Synthetic oligonucleotide
ugguuaguauguucaccgu

SEQ ID NO: 219481 - RNA, 19 nt, Artificial Sequence
  Description of Artificial Sequence: Synthetic oligonucleotide
cuaaaaucggcauguccaa

SEQ ID NO: 219482 - RNA, 19 nt, Artificial Sequence
  Description of Artificial Sequence: Synthetic oligonucleotide
cagcggucagugcuuaggg

SEQ ID NO: 219483 - RNA, 19 nt, Artificial Sequence
  Description of Artificial Sequence: Synthetic oligonucleotide
uguccucuaugccgguggc

SEQ ID NO: 219484 - RNA, 19 nt, Artificial Sequence
  Description of Artificial Sequence: Synthetic oligonucleotide
cacacacacaacacaccac

SEQ ID NO: 219485 - RNA, 19 nt, Artificial Sequence
  Description of Artificial Sequence: Synthetic oligonucleotide
cacgugugaacacauagua

SEQ ID NO: 219486 - RNA, 19 nt, Artificial Sequence
  Description of Artificial Sequence: Synthetic oligonucleotide
caucacgccacauaguggu

SEQ ID NO: 219487 - RNA, 19 nt, Artificial Sequence
  Description of Artificial Sequence: Synthetic oligonucleotide
cuagaagguugugaccaag

SEQ ID NO: 219488 - RNA, 19 nt, Artificial Sequence
  Description of Artificial Sequence: Synthetic oligonucleotide
gaaaucuauuuggucuuuc

SEQ ID NO: 219489 - RNA, 19 nt, Artificial Sequence
  Description of Artificial Sequence: Synthetic oligonucleotide
auauguugcuugaagugaa

SEQ ID NO: 219490 - RNA, 19 nt, Artificial Sequence
  Description of Artificial Sequence: Synthetic oligonucleotide
aacccgugcuuuaccacag

SEQ ID NO: 219491 - RNA, 19 nt, Artificial Sequence
  Description of Artificial Sequence: Synthetic oligonucleotide
accgaugcgcucuucccca

SEQ ID NO: 219492 - RNA, 19 nt, Artificial Sequence
  Description of Artificial Sequence: Synthetic oligonucleotide
aacgucucgaaggauucuu

SEQ ID NO: 219493 - RNA, 19 nt, Artificial Sequence
  Description of Artificial Sequence: Synthetic oligonucleotide
ugugaccaagagucuuucu

SEQ ID NO: 219494 - RNA, 19 nt, Artificial Sequence
  Description of Artificial Sequence: Synthetic oligonucleotide
cuccgcuuugaguccaggc

SEQ ID NO: 219495 - RNA, 19 nt, Artificial Sequence
  Description of Artificial Sequence: Synthetic oligonucleotide
uccacguguuuagcgauga

SEQ ID NO: 219496 - RNA, 19 nt, Artificial Sequence
  Description of Artificial Sequence: Synthetic oligonucleotide
cuuucucgggauugaugac

SEQ ID NO: 219497 - RNA, 19 nt, Artificial Sequence
  Description of Artificial Sequence: Synthetic oligonucleotide
ugcacuuccaugggcgugu

SEQ ID NO: 219498 - RNA, 19 nt, Artificial Sequence
  Description of Artificial Sequence: Synthetic oligonucleotide
gucccuaugcaagacuaug

SEQ ID NO: 219499 - RNA, 19 nt, Artificial Sequence
  Description of Artificial Sequence: Synthetic oligonucleotide
agcaugucccaguguuguc

SEQ ID NO: 219500 - RNA, 19 nt, Artificial Sequence
  Description of Artificial Sequence: Synthetic oligonucleotide
ucucugucuauaagugauu

SEQ ID NO: 219501 - RNA, 19 nt, Artificial Sequence
  Description of Artificial Sequence: Synthetic oligonucleotide
uucggacuauggcagcguc

SEQ ID NO: 219502 - RNA, 19 nt, Artificial Sequence
  Description of Artificial Sequence: Synthetic oligonucleotide
gggaccuggaaacagcaca

SEQ ID NO: 219503 - RNA, 19 nt, Artificial Sequence
  Description of Artificial Sequence: Synthetic oligonucleotide
ggagacggcagucugcuga

SEQ ID NO: 219504 - RNA, 19 nt, Artificial Sequence
  Description of Artificial Sequence: Synthetic oligonucleotide
cccuaaacagaaaugacaa

SEQ ID NO: 219505 - RNA, 19 nt, Artificial Sequence
  Description of Artificial Sequence: Synthetic oligonucleotide
aacgcucauuccucuggaa

SEQ ID NO: 219506 - RNA, 19 nt, Artificial Sequence
  Description of Artificial Sequence: Synthetic oligonucleotide
cugcaggugcguucuagug

SEQ ID NO: 219507 - RNA, 19 nt, Artificial Sequence
  Description of Artificial Sequence: Synthetic oligonucleotide
aucggcauguccaaucuaa

SEQ ID NO: 219508 - RNA, 19 nt, Artificial Sequence
  Description of Artificial Sequence: Synthetic oligonucleotide
uucucaacucacuguccuc

SEQ ID NO: 219509 - RNA, 19 nt, Artificial Sequence
  Description of Artificial Sequence: Synthetic oligonucleotide
aaucggcauguccaaucua

SEQ ID NO: 219510 - RNA, 19 nt, Artificial Sequence
  Description of Artificial Sequence: Synthetic oligonucleotide
ccaacaccaccauuggagc

SEQ ID NO: 219511 - RNA, 19 nt, Artificial Sequence
  Description of Artificial Sequence: Synthetic oligonucleotide
gagacggcagucugcugac

SEQ ID NO: 219512 - RNA, 19 nt, Artificial Sequence
  Description of Artificial Sequence: Synthetic oligonucleotide
ucagugcuuagggugcaga

SEQ ID NO: 219513 - RNA, 19 nt, Artificial Sequence
  Description of Artificial Sequence: Synthetic oligonucleotide
gaugcgcucuuccccacga

SEQ ID NO: 219514 - RNA, 19 nt, Artificial Sequence
  Description of Artificial Sequence: Synthetic oligonucleotide
ucggcauguccaaucuaaa

SEQ ID NO: 219515 - RNA, 19 nt, Artificial Sequence
  Description of Artificial Sequence: Synthetic oligonucleotide
gguauauuccagaaaauau

SEQ ID NO: 219516 - RNA, 19 nt, Artificial Sequence
  Description of Artificial Sequence: Synthetic oligonucleotide
ucugccggcuuguuugguc

SEQ ID NO: 219517 - RNA, 19 nt, Artificial Sequence
  Description of Artificial Sequence: Synthetic oligonucleotide
augaacgucucgaaggauu

SEQ ID NO: 219518 - RNA, 19 nt, Artificial Sequence
  Description of Artificial Sequence: Synthetic oligonucleotide
ugguacuaacuuguucuuc

SEQ ID NO: 219519 - RNA, 19 nt, Artificial Sequence
  Description of Artificial Sequence: Synthetic oligonucleotide
uaaaaucggcauguccaau

SEQ ID NO: 219520 - RNA, 19 nt, Artificial Sequence
  Description of Artificial Sequence: Synthetic oligonucleotide
ugggcguguaugugggcca

SEQ ID NO: 219521 - RNA, 19 nt, Artificial Sequence
  Description of Artificial Sequence: Synthetic oligonucleotide
uucccucucugaguguuca

SEQ ID NO: 219522 - RNA, 19 nt, Artificial Sequence
  Description of Artificial Sequence: Synthetic oligonucleotide
uucgugcuugagcuucgac

SEQ ID NO: 219523 - RNA, 19 nt, Artificial Sequence
  Description of Artificial Sequence: Synthetic oligonucleotide
aggucuuggaccaugucuu

SEQ ID NO: 219524 - RNA, 19 nt, Artificial Sequence
  Description of Artificial Sequence: Synthetic oligonucleotide
cugcucaaccucacgugug

SEQ ID NO: 219525 - RNA, 19 nt, Artificial Sequence
  Description of Artificial Sequence: Synthetic oligonucleotide
caaccucacgugugaacac

SEQ ID NO: 219526 - RNA, 19 nt, Artificial Sequence
  Description of Artificial Sequence: Synthetic oligonucleotide
acuagaagguugugaccaa

SEQ ID NO: 219527 - RNA, 19 nt, Artificial Sequence
  Description of Artificial Sequence: Synthetic oligonucleotide
gacagucccuaugcaagac

SEQ ID NO: 219528 - RNA, 19 nt, Artificial Sequence
  Description of Artificial Sequence: Synthetic oligonucleotide
cauauagucucugucuaua

SEQ ID NO: 219529 - RNA, 19 nt, Artificial Sequence
  Description of Artificial Sequence: Synthetic oligonucleotide
cagaacccgugcuuuacca

SEQ ID NO: 219530 - RNA, 19 nt, Artificial Sequence
  Description of Artificial Sequence: Synthetic oligonucleotide
gaauacucucucuguggua

SEQ ID NO: 219531 - RNA, 19 nt, Artificial Sequence
  Description of Artificial Sequence: Synthetic oligonucleotide
uguccuccuuucacccggc

SEQ ID NO: 219532 - RNA, 19 nt, Artificial Sequence
  Description of Artificial Sequence: Synthetic oligonucleotide
cagagaguacagaaacaaa

SEQ ID NO: 219533 - RNA, 19 nt, Artificial Sequence
  Description of Artificial Sequence: Synthetic oligonucleotide
auacucucucugugguacu

SEQ ID NO: 219534 - RNA, 19 nt, Artificial Sequence
  Description of Artificial Sequence: Synthetic oligonucleotide
augcuacuuuguaaaauau

SEQ ID NO: 219535 - RNA, 19 nt, Artificial Sequence
  Description of Artificial Sequence: Synthetic oligonucleotide
ucauugggagacggcaguc

SEQ ID NO: 219536 - RNA, 19 nt, Artificial Sequence
  Description of Artificial Sequence: Synthetic oligonucleotide
ccccucauugaacaugagc

SEQ ID NO: 219537 - RNA, 19 nt, Artificial Sequence
  Description of Artificial Sequence: Synthetic oligonucleotide
uccuuaaacuccgccuuua

SEQ ID NO: 219538 - RNA, 19 nt, Artificial Sequence
  Description of Artificial Sequence: Synthetic oligonucleotide
uucuccgcuuugaguccag

SEQ ID NO: 219539 - RNA, 19 nt, Artificial Sequence
  Description of Artificial Sequence: Synthetic oligonucleotide
gucaaacagcagucacccc

SEQ ID NO: 219540 - RNA, 19 nt, Artificial Sequence
  Description of Artificial Sequence: Synthetic oligonucleotide
aacuuggaauccacguguu

SEQ ID NO: 219541 - RNA, 19 nt, Artificial Sequence
  Description of Artificial Sequence: Synthetic oligonucleotide
aggugcguucuaguguuug

SEQ ID NO: 219542 - RNA, 19 nt, Artificial Sequence
  Description of Artificial Sequence: Synthetic oligonucleotide
caagccccuaaacagaaau

SEQ ID NO: 219543 - RNA, 19 nt, Artificial Sequence
  Description of Artificial Sequence: Synthetic oligonucleotide
ucuccgcuuugaguccagg

SEQ ID NO: 219544 - RNA, 19 nt, Artificial Sequence
  Description of Artificial Sequence: Synthetic oligonucleotide
cagucccuaugcaagacua

SEQ ID NO: 219545 - RNA, 19 nt, Artificial Sequence
  Description of Artificial Sequence: Synthetic oligonucleotide
gguacaucugugugagguc

SEQ ID NO: 219546 - RNA, 19 nt, Artificial Sequence
  Description of Artificial Sequence: Synthetic oligonucleotide
aaguagccuucuggacggg

SEQ ID NO: 219547 - RNA, 19 nt, Artificial Sequence
  Description of Artificial Sequence: Synthetic oligonucleotide
agggaccuggaaacagcac

SEQ ID NO: 219548 - RNA, 19 nt, Artificial Sequence
  Description of Artificial Sequence: Synthetic oligonucleotide
uguugccugcucguaacuu

SEQ ID NO: 219549 - RNA, 19 nt, Artificial Sequence
  Description of Artificial Sequence: Synthetic oligonucleotide
ugccugcucguaacuugga

SEQ ID NO: 219550 - RNA, 19 nt, Artificial Sequence
  Description of Artificial Sequence: Synthetic oligonucleotide
agcuugugaaggaacuaaa

SEQ ID NO: 219551 - RNA, 19 nt, Artificial Sequence
  Description of Artificial Sequence: Synthetic oligonucleotide
acgugugaacacauaguau

SEQ ID NO: 219552 - RNA, 19 nt, Artificial Sequence
  Description of Artificial Sequence: Synthetic oligonucleotide
uacagcgccagggcagaga

SEQ ID NO: 219553 - RNA, 19 nt, Artificial Sequence
  Description of Artificial Sequence: Synthetic oligonucleotide
aagagacugcaguguucuu

SEQ ID NO: 219554 - RNA, 19 nt, Artificial Sequence
  Description of Artificial Sequence: Synthetic oligonucleotide
cacgcccguggcuuucugc

SEQ ID NO: 219555 - RNA, 19 nt, Artificial Sequence
  Description of Artificial Sequence: Synthetic oligonucleotide
caugggcguguaugugggc

SEQ ID NO: 219556 - RNA, 19 nt, Artificial Sequence
  Description of Artificial Sequence: Synthetic oligonucleotide
acuaugaaaccaggcccaa

SEQ ID NO: 219557 - RNA, 19 nt, Artificial Sequence
  Description of Artificial Sequence: Synthetic oligonucleotide
uuccacugugucccacaau

SEQ ID NO: 219558 - RNA, 19 nt, Artificial Sequence
  Description of Artificial Sequence: Synthetic oligonucleotide
acgcggcuucucccagugc

SEQ ID NO: 219559 - RNA, 19 nt, Artificial Sequence
  Description of Artificial Sequence: Synthetic oligonucleotide
ccuuucacccggcugaaca

SEQ ID NO: 219560 - RNA, 19 nt, Artificial Sequence
  Description of Artificial Sequence: Synthetic oligonucleotide
uacucucucugugguacua

SEQ ID NO: 219561 - RNA, 19 nt, Artificial Sequence
  Description of Artificial Sequence: Synthetic oligonucleotide
gcguucuaguguuugucuc

SEQ ID NO: 219562 - RNA, 19 nt, Artificial Sequence
  Description of Artificial Sequence: Synthetic oligonucleotide
agaacagcggucagugcuu

SEQ ID NO: 219563 - RNA, 19 nt, Artificial Sequence
  Description of Artificial Sequence: Synthetic oligonucleotide
cuuugucucgcuccauaua

SEQ ID NO: 219564 - RNA, 19 nt, Artificial Sequence
  Description of Artificial Sequence: Synthetic oligonucleotide
ccagagaguacagaaacaa

SEQ ID NO: 219565 - RNA, 19 nt, Artificial Sequence
  Description of Artificial Sequence: Synthetic oligonucleotide
ucuaugccgguggccauuu

SEQ ID NO: 219566 - RNA, 19 nt, Artificial Sequence
  Description of Artificial Sequence: Synthetic oligonucleotide
uggacgggcucuguaucuc

SEQ ID NO: 219567 - RNA, 19 nt, Artificial Sequence
  Description of Artificial Sequence: Synthetic oligonucleotide
acacaccacgcccguggcu

SEQ ID NO: 219568 - RNA, 19 nt, Artificial Sequence
  Description of Artificial Sequence: Synthetic oligonucleotide
ccacauucgugcuugagcu

SEQ ID NO: 219569 - RNA, 19 nt, Artificial Sequence
  Description of Artificial Sequence: Synthetic oligonucleotide
cuggacgcggcuucuccca

SEQ ID NO: 219570 - RNA, 19 nt, Artificial Sequence
  Description of Artificial Sequence: Synthetic oligonucleotide
ucgcuccauauagucucug

SEQ ID NO: 219571 - RNA, 19 nt, Artificial Sequence
  Description of Artificial Sequence: Synthetic oligonucleotide
ggacgggcucuguaucucc

SEQ ID NO: 219572 - RNA, 19 nt, Artificial Sequence
  Description of Artificial Sequence: Synthetic oligonucleotide
cuccgccuuuaacacagca

SEQ ID NO: 219573 - RNA, 19 nt, Artificial Sequence
  Description of Artificial Sequence: Synthetic oligonucleotide
auccacguguuuagcgaug

SEQ ID NO: 219574 - RNA, 19 nt, Artificial Sequence
  Description of Artificial Sequence: Synthetic oligonucleotide
ccuaugcaagacuaugaaa

SEQ ID NO: 219575 - RNA, 19 nt, Artificial Sequence
  Description of Artificial Sequence: Synthetic oligonucleotide
gauccaagacagucccuau

SEQ ID NO: 219576 - RNA, 19 nt, Artificial Sequence
  Description of Artificial Sequence: Synthetic oligonucleotide
agucgccucuuuguugccu

SEQ ID NO: 219577 - RNA, 19 nt, Artificial Sequence
  Description of Artificial Sequence: Synthetic oligonucleotide
cccgugcuuuaccacaggc

SEQ ID NO: 219578 - RNA, 19 nt, Artificial Sequence
  Description of Artificial Sequence: Synthetic oligonucleotide
ccauugaaaaugaacuuau

SEQ ID NO: 219579 - RNA, 19 nt, Artificial Sequence
  Description of Artificial Sequence: Synthetic oligonucleotide
cucauugggagacggcagu

SEQ ID NO: 219580 - RNA, 19 nt, Artificial Sequence
  Description of Artificial Sequence: Synthetic oligonucleotide
gcgucgaucugguacuguc

SEQ ID NO: 219581 - RNA, 19 nt, Artificial Sequence
  Description of Artificial Sequence: Synthetic oligonucleotide
auggcagcgucgaucuggu

SEQ ID NO: 219582 - RNA, 19 nt, Artificial Sequence
  Description of Artificial Sequence: Synthetic oligonucleotide
cauacagcgccagggcaga

SEQ ID NO: 219583 - RNA, 19 nt, Artificial Sequence
  Description of Artificial Sequence: Synthetic oligonucleotide
gugcacuuccaugggcgug

SEQ ID NO: 219584 - RNA, 19 nt, Artificial Sequence
  Description of Artificial Sequence: Synthetic oligonucleotide
aucagggaccucacuuaga

SEQ ID NO: 219585 - RNA, 19 nt, Artificial Sequence
  Description of Artificial Sequence: Synthetic oligonucleotide
uuccgaccacugugcuugc

SEQ ID NO: 219586 - RNA, 19 nt, Artificial Sequence
  Description of Artificial Sequence: Synthetic oligonucleotide
gacgggcucuguaucucca

SEQ ID NO: 219587 - RNA, 19 nt, Artificial Sequence
  Description of Artificial Sequence: Synthetic oligonucleotide
ugcauccaccgaugcgcuc

SEQ ID NO: 219588 - RNA, 19 nt, Artificial Sequence
  Description of Artificial Sequence: Synthetic oligonucleotide
ccaguguugucugccacug

SEQ ID NO: 219589 - RNA, 19 nt, Artificial Sequence
  Description of Artificial Sequence: Synthetic oligonucleotide
cagucgccucuuuguugcc

SEQ ID NO: 219590 - RNA, 19 nt, Artificial Sequence
  Description of Artificial Sequence: Synthetic oligonucleotide
gaguggcagucuggacgcg

SEQ ID NO: 219591 - RNA, 19 nt, Artificial Sequence
  Description of Artificial Sequence: Synthetic oligonucleotide
acgccacauagugguacug

SEQ ID NO: 219592 - RNA, 19 nt, Artificial Sequence
  Description of Artificial Sequence: Synthetic oligonucleotide
agccaaaguuuggaacuuu

SEQ ID NO: 219593 - RNA, 19 nt, Artificial Sequence
  Description of Artificial Sequence: Synthetic oligonucleotide
accucacgugugaacacau

SEQ ID NO: 219594 - RNA, 19 nt, Artificial Sequence
  Description of Artificial Sequence: Synthetic oligonucleotide
uccgaccacugugcuugcc

SEQ ID NO: 219595 - RNA, 19 nt, Artificial Sequence
  Description of Artificial Sequence: Synthetic oligonucleotide
ggaugaaacgaaacaguau

SEQ ID NO: 219596 - RNA, 19 nt, Artificial Sequence
  Description of Artificial Sequence: Synthetic oligonucleotide
auucgugcuugagcuucga

SEQ ID NO: 219597 - RNA, 19 nt, Artificial Sequence
  Description of Artificial Sequence: Synthetic oligonucleotide
gcagcgucgaucugguacu

SEQ ID NO: 219598 - RNA, 19 nt, Artificial Sequence
  Description of Artificial Sequence: Synthetic oligonucleotide
cccuaugcaagacuaugaa

SEQ ID NO: 219599 - RNA, 19 nt, Artificial Sequence
  Description of Artificial Sequence: Synthetic oligonucleotide
cguucuaguguuugucuca

SEQ ID NO: 219600 - RNA, 19 nt, Artificial Sequence
  Description of Artificial Sequence: Synthetic oligonucleotide
gaugaacgucucgaaggau

SEQ ID NO: 219601 - RNA, 19 nt, Artificial Sequence
  Description of Artificial Sequence: Synthetic oligonucleotide
cgucucgaaggauucuuuc

SEQ ID NO: 219602 - RNA, 19 nt, Artificial Sequence
  Description of Artificial Sequence: Synthetic oligonucleotide
agcgucgaucugguacugu

SEQ ID NO: 219603 - RNA, 19 nt, Artificial Sequence
  Description of Artificial Sequence: Synthetic oligonucleotide
auacagcgccagggcagag

SEQ ID NO: 219604 - RNA, 19 nt, Artificial Sequence
  Description of Artificial Sequence: Synthetic oligonucleotide
ccgugcuuuaccacaggca

SEQ ID NO: 219605 - RNA, 19 nt, Artificial Sequence
  Description of Artificial Sequence: Synthetic oligonucleotide
gaacagcggucagugcuua

SEQ ID NO: 219606 - RNA, 19 nt, Artificial Sequence
  Description of Artificial Sequence: Synthetic oligonucleotide
gcaggugcguucuaguguu

SEQ ID NO: 219607 - RNA, 19 nt, Artificial Sequence
  Description of Artificial Sequence: Synthetic oligonucleotide
acgucucgaaggauucuuu

SEQ ID NO: 219608 - RNA, 19 nt, Artificial Sequence
  Description of Artificial Sequence: Synthetic oligonucleotide
gaacgucucgaaggauucu

SEQ ID NO: 219609 - RNA, 19 nt, Artificial Sequence
  Description of Artificial Sequence: Synthetic oligonucleotide
uguucaccgugaggucaau

SEQ ID NO: 219610 - RNA, 19 nt, Artificial Sequence
  Description of Artificial Sequence: Synthetic oligonucleotide
ggugcguucuaguguuugu

SEQ ID NO: 219611 - RNA, 19 nt, Artificial Sequence
  Description of Artificial Sequence: Synthetic oligonucleotide
ccuuaaaguccagcagguc

SEQ ID NO: 219612 - RNA, 19 nt, Artificial Sequence
  Description of Artificial Sequence: Synthetic oligonucleotide
cauugggagacggcagucu

SEQ ID NO: 219613 - RNA, 19 nt, Artificial Sequence
  Description of Artificial Sequence: Synthetic oligonucleotide
agcccaugguuaguauguu

SEQ ID NO: 219614 - RNA, 19 nt, Artificial Sequence
  Description of Artificial Sequence: Synthetic oligonucleotide
caucagucgccucuuuguu

SEQ ID NO: 219615 - RNA, 19 nt, Artificial Sequence
  Description of Artificial Sequence: Synthetic oligonucleotide
cuucgacagcauggacuuc

SEQ ID NO: 219616 - RNA, 19 nt, Artificial Sequence
  Description of Artificial Sequence: Synthetic oligonucleotide
cucgcuccauauagucucu

SEQ ID NO: 219617 - RNA, 19 nt, Artificial Sequence
  Description of Artificial Sequence: Synthetic oligonucleotide
gccugcucguaacuuggaa

SEQ ID NO: 219618 - RNA, 19 nt, Artificial Sequence
  Description of Artificial Sequence: Synthetic oligonucleotide
cagcgucgaucugguacug

SEQ ID NO: 219619 - RNA, 19 nt, Artificial Sequence
  Description of Artificial Sequence: Synthetic oligonucleotide
gggcguguaugugggccag

SEQ ID NO: 219620 - RNA, 19 nt, Artificial Sequence
  Description of Artificial Sequence: Synthetic oligonucleotide
ggugcacuuccaugggcgu

SEQ ID NO: 219621 - RNA, 19 nt, Artificial Sequence
  Description of Artificial Sequence: Synthetic oligonucleotide
ccacguguuuagcgaugag

SEQ ID NO: 219622 - RNA, 19 nt, Artificial Sequence
  Description of Artificial Sequence: Synthetic oligonucleotide
accacgcccguggcuuucu

SEQ ID NO: 219623 - RNA, 19 nt, Artificial Sequence
  Description of Artificial Sequence: Synthetic oligonucleotide
ccuggugcacuuugguucu

SEQ ID NO: 219624 - RNA, 19 nt, Artificial Sequence
  Description of Artificial Sequence: Synthetic oligonucleotide
gggagacggcagucugcug

SEQ ID NO: 219625 - RNA, 19 nt, Artificial Sequence
  Description of Artificial Sequence: Synthetic oligonucleotide
cgaugcgcucuuccccacg

SEQ ID NO: 219626 - RNA, 19 nt, Artificial Sequence
  Description of Artificial Sequence: Synthetic oligonucleotide
gcgcccacaguugcagcug

SEQ ID NO: 219627 - RNA, 19 nt, Artificial Sequence
  Description of Artificial Sequence: Synthetic oligonucleotide
cuaugaaaccaggcccaau

SEQ ID NO: 219628 - RNA, 19 nt, Artificial Sequence
  Description of Artificial Sequence: Synthetic oligonucleotide
cacauucgugcuugagcuu

SEQ ID NO: 219629 - RNA, 19 nt, Artificial Sequence
  Description of Artificial Sequence: Synthetic oligonucleotide
cuccuuucacccggcugaa

SEQ ID NO: 219630 - RNA, 19 nt, Artificial Sequence
  Description of Artificial Sequence: Synthetic oligonucleotide
uggcagcgucgaucuggua

SEQ ID NO: 219631 - RNA, 19 nt, Artificial Sequence
  Description of Artificial Sequence: Synthetic oligonucleotide
guaugucaccaggcaccaa

SEQ ID NO: 219632 - RNA, 19 nt, Artificial Sequence
  Description of Artificial Sequence: Synthetic oligonucleotide
caccacgcccguggcuuuc

SEQ ID NO: 219633 - RNA, 19 nt, Artificial Sequence
  Description of Artificial Sequence: Synthetic oligonucleotide
gcguguaugugggccagua

SEQ ID NO: 219634 - RNA, 19 nt, Artificial Sequence
  Description of Artificial Sequence: Synthetic oligonucleotide
ccgaugcgcucuuccccac

SEQ ID NO: 219635 - RNA, 19 nt, Artificial Sequence
  Description of Artificial Sequence: Synthetic oligonucleotide
cucuaccacguggucuacu

SEQ ID NO: 219636 - RNA, 19 nt, Artificial Sequence
  Description of Artificial Sequence: Synthetic oligonucleotide
cugacacaucacgccacau

SEQ ID NO: 219637 - RNA, 19 nt, Artificial Sequence
  Description of Artificial Sequence: Synthetic oligonucleotide
ccucacgugugaacacaua

SEQ ID NO: 219638 - RNA, 19 nt, Artificial Sequence
  Description of Artificial Sequence: Synthetic oligonucleotide
cucuaugccgguggccauu

SEQ ID NO: 219639 - RNA, 19 nt, Artificial Sequence
  Description of Artificial Sequence: Synthetic oligonucleotide
gcuuccgaccacugugcuu

SEQ ID NO: 219640 - RNA, 19 nt, Artificial Sequence
  Description of Artificial Sequence: Synthetic oligonucleotide
ggacgcggcuucucccagu

SEQ ID NO: 219641 - RNA, 19 nt, Artificial Sequence
  Description of Artificial Sequence: Synthetic oligonucleotide
cgcuccauauagucucugu

SEQ ID NO: 219642 - RNA, 19 nt, Artificial Sequence
  Description of Artificial Sequence: Synthetic oligonucleotide
ggacuauggcagcgucgau

SEQ ID NO: 219643 - RNA, 19 nt, Artificial Sequence
  Description of Artificial Sequence: Synthetic oligonucleotide
ccacgcccguggcuuucug

SEQ ID NO: 219644 - RNA, 19 nt, Artificial Sequence
  Description of Artificial Sequence: Synthetic oligonucleotide
caggugcguucuaguguuu

SEQ ID NO: 219645 - RNA, 19 nt, Artificial Sequence
  Description of Artificial Sequence: Synthetic oligonucleotide
cuaugccgguggccauuuu

SEQ ID NO: 219646 - RNA, 19 nt, Artificial Sequence
  Description of Artificial Sequence: Synthetic oligonucleotide
ggcguguaugugggccagu

SEQ ID NO: 219647 - RNA, 19 nt, Artificial Sequence
  Description of Artificial Sequence: Synthetic oligonucleotide
gccggcuuguuuggucuuu

SEQ ID NO: 219648 - RNA, 19 nt, Artificial Sequence
  Description of Artificial Sequence: Synthetic oligonucleotide
acacauaacauauaaacag

SEQ ID NO: 219649 - RNA, 19 nt, Artificial Sequence
  Description of Artificial Sequence: Synthetic oligonucleotide
caucuuauagccaaaauag

SEQ ID NO: 219650 - RNA, 19 nt, Artificial Sequence
  Description of Artificial Sequence: Synthetic oligonucleotide
ucuucgugaagacagacgg

SEQ ID NO: 219651 - RNA, 19 nt, Artificial Sequence
  Description of Artificial Sequence: Synthetic oligonucleotide
aaggguguagaccaguuac

SEQ ID NO: 219652 - RNA, 19 nt, Artificial Sequence
  Description of Artificial Sequence: Synthetic oligonucleotide
uauuauuagcagcagaaca

SEQ ID NO: 219653 - RNA, 19 nt, Artificial Sequence
  Description of Artificial Sequence: Synthetic oligonucleotide
aguaucuucguguuucugc

SEQ ID NO: 219654 - RNA, 19 nt, Artificial Sequence
  Description of Artificial Sequence: Synthetic oligonucleotide
uuauagccaaaauagcccg

SEQ ID NO: 219655 - RNA, 19 nt, Artificial Sequence
  Description of Artificial Sequence: Synthetic oligonucleotide
aauaacucacacugucucg

SEQ ID NO: 219656 - RNA, 19 nt, Artificial Sequence
  Description of Artificial Sequence: Synthetic oligonucleotide
aaucgcacacucuacuugg

SEQ ID NO: 219657 - RNA, 19 nt, Artificial Sequence
  Description of Artificial Sequence: Synthetic oligonucleotide
uuuguguuucccaauuagg

SEQ ID NO: 219658 - RNA, 19 nt, Artificial Sequence
  Description of Artificial Sequence: Synthetic oligonucleotide
uuuuguguuucccaauuag

SEQ ID NO: 219659 - RNA, 19 nt, Artificial Sequence
  Description of Artificial Sequence: Synthetic oligonucleotide
agcggaagaacacaggacg

SEQ ID NO: 219660 - RNA, 19 nt, Artificial Sequence
  Description of Artificial Sequence: Synthetic oligonucleotide
uuauugcugagcaauaacu

SEQ ID NO: 219661 - RNA, 19 nt, Artificial Sequence
  Description of Artificial Sequence: Synthetic oligonucleotide
uuacuuaaggggacuaagg

SEQ ID NO: 219662 - RNA, 19 nt, Artificial Sequence
  Description of Artificial Sequence: Synthetic oligonucleotide
agagcugaacacaagaggc

SEQ ID NO: 219663 - RNA, 19 nt, Artificial Sequence
  Description of Artificial Sequence: Synthetic oligonucleotide
uuaggaugaauauaucaga

SEQ ID NO: 219664 - RNA, 19 nt, Artificial Sequence
  Description of Artificial Sequence: Synthetic oligonucleotide
acuuggacugucaagaugg

SEQ ID NO: 219665 - RNA, 19 nt, Artificial Sequence
  Description of Artificial Sequence: Synthetic oligonucleotide
auaaucacggaucuuccag

SEQ ID NO: 219666 - RNA, 19 nt, Artificial Sequence
  Description of Artificial Sequence: Synthetic oligonucleotide
acuauuucauaaguucucc

SEQ ID NO: 219667 - RNA, 19 nt, Artificial Sequence
  Description of Artificial Sequence: Synthetic oligonucleotide
aacagcgagaggugugucc

SEQ ID NO: 219668 - RNA, 19 nt, Artificial Sequence
  Description of Artificial Sequence: Synthetic oligonucleotide
gguuaucuuacuuaagggg

SEQ ID NO: 219669 - RNA, 19 nt, Artificial Sequence
  Description of Artificial Sequence: Synthetic oligonucleotide
acaaucguaaugcuaucgg

SEQ ID NO: 219670 - RNA, 19 nt, Artificial Sequence
  Description of Artificial Sequence: Synthetic oligonucleotide
aggaauacgaaacaaucgu

SEQ ID NO: 219671 - RNA, 19 nt, Artificial Sequence
  Description of Artificial Sequence: Synthetic oligonucleotide
auuauuagcagcagaacag

SEQ ID NO: 219672 - RNA, 19 nt, Artificial Sequence
  Description of Artificial Sequence: Synthetic oligonucleotide
uaauauacgucccauucuc

SEQ ID NO: 219673 - RNA, 19 nt, Artificial Sequence
  Description of Artificial Sequence: Synthetic oligonucleotide
aacaaucguaaugcuaucg

SEQ ID NO: 219674 - RNA, 19 nt, Artificial Sequence
  Description of Artificial Sequence: Synthetic oligonucleotide
agguuaucuuacuuaaggg

SEQ ID NO: 219675 - RNA, 19 nt, Artificial Sequence
  Description of Artificial Sequence: Synthetic oligonucleotide
cuuauaaucacggaucuuc

SEQ ID NO: 219676 - RNA, 19 nt, Artificial Sequence
  Description of Artificial Sequence: Synthetic oligonucleotide
uuguguuucccaauuaggu

SEQ ID NO: 219677 - RNA, 19 nt, Artificial Sequence
  Description of Artificial Sequence: Synthetic oligonucleotide
agacuuugucuacucaggc

SEQ ID NO: 219678 - RNA, 19 nt, Artificial Sequence
  Description of Artificial Sequence: Synthetic oligonucleotide
uagcauugcaaaauuuugc

SEQ ID NO: 219679 - RNA, 19 nt, Artificial Sequence
  Description of Artificial Sequence: Synthetic oligonucleotide
auacgaaacaaucguaaug

SEQ ID NO: 219680 - RNA, 19 nt, Artificial Sequence
  Description of Artificial Sequence: Synthetic oligonucleotide
caggaauacgaaacaaucg

SEQ ID NO: 219681 - RNA, 19 nt, Artificial Sequence
  Description of Artificial Sequence: Synthetic oligonucleotide
uuauaaucacggaucuucc

SEQ ID NO: 219682 - RNA, 19 nt, Artificial Sequence
  Description of Artificial Sequence: Synthetic oligonucleotide
aauacaguccaaugagaga

SEQ ID NO: 219683 - RNA, 19 nt, Artificial Sequence
  Description of Artificial Sequence: Synthetic oligonucleotide
aauacgaaacaaucguaau

SEQ ID NO: 219684 - RNA, 19 nt, Artificial Sequence
  Description of Artificial Sequence: Synthetic oligonucleotide
uggcacacaucuuauagcc

SEQ ID NO: 219685 - RNA, 19 nt, Artificial Sequence
  Description of Artificial Sequence: Synthetic oligonucleotide
uguguuacgagcugccugc

SEQ ID NO: 219686 - RNA, 19 nt, Artificial Sequence
  Description of Artificial Sequence: Synthetic oligonucleotide
acaggaauacgaaacaauc

SEQ ID NO: 219687 - RNA, 19 nt, Artificial Sequence
  Description of Artificial Sequence: Synthetic oligonucleotide
ugcuaacuccuacugacag

SEQ ID NO: 219688 - RNA, 19 nt, Artificial Sequence
  Description of Artificial Sequence: Synthetic oligonucleotide
agcauugcaaaauuuugca

SEQ ID NO: 219689 - RNA, 19 nt, Artificial Sequence
  Description of Artificial Sequence: Synthetic oligonucleotide
guagcuggcggucucaagg

SEQ ID NO: 219690 - RNA, 19 nt, Artificial Sequence
  Description of Artificial Sequence: Synthetic oligonucleotide
aagcgauauucaucucucc

SEQ ID NO: 219691 - RNA, 19 nt, Artificial Sequence
  Description of Artificial Sequence: Synthetic oligonucleotide
aaacaaucguaaugcuauc

SEQ ID NO: 219692 - RNA, 19 nt, Artificial Sequence
  Description of Artificial Sequence: Synthetic oligonucleotide
uuaucuuacuuaaggggac

SEQ ID NO: 219693 - RNA, 19 nt, Artificial Sequence
  Description of Artificial Sequence: Synthetic oligonucleotide
agcgccuacagauucuugg

SEQ ID NO: 219694 - RNA, 19 nt, Artificial Sequence
  Description of Artificial Sequence: Synthetic oligonucleotide
agaagcgauauucaucucu

SEQ ID NO: 219695 - RNA, 19 nt, Artificial Sequence
  Description of Artificial Sequence: Synthetic oligonucleotide
agucuauugggaaauccgc

SEQ ID NO: 219696 - RNA, 19 nt, Artificial Sequence
  Description of Artificial Sequence: Synthetic oligonucleotide
agugauugcauguggccuc

SEQ ID NO: 219697 - RNA, 19 nt, Artificial Sequence
  Description of Artificial Sequence: Synthetic oligonucleotide
caggauaccaccacacagg

SEQ ID NO: 219698 - RNA, 19 nt, Artificial Sequence
  Description of Artificial Sequence: Synthetic oligonucleotide
gggacaaucaguaucuucg

SEQ ID NO: 219699 - RNA, 19 nt, Artificial Sequence
  Description of Artificial Sequence: Synthetic oligonucleotide
uauacgucccauucucuag

SEQ ID NO: 219700 - RNA, 19 nt, Artificial Sequence
  Description of Artificial Sequence: Synthetic oligonucleotide
auaacucacacugucucgg

SEQ ID NO: 219701 - RNA, 19 nt, Artificial Sequence
  Description of Artificial Sequence: Synthetic oligonucleotide
caaucguaaugcuaucggg

SEQ ID NO: 219702 - RNA, 19 nt, Artificial Sequence
  Description of Artificial Sequence: Synthetic oligonucleotide
uucuccacgcauaaugaca

SEQ ID NO: 219703 - RNA, 19 nt, Artificial Sequence
  Description of Artificial Sequence: Synthetic oligonucleotide
acuacagacggcaaguguc

SEQ ID NO: 219704 - RNA, 19 nt, Artificial Sequence
  Description of Artificial Sequence: Synthetic oligonucleotide
uccgaaguauccacuauga

SEQ ID NO: 219705 - RNA, 19 nt, Artificial Sequence
  Description of Artificial Sequence: Synthetic oligonucleotide
ucugcacgaagacagggga

SEQ ID NO: 219706 - RNA, 19 nt, Artificial Sequence
  Description of Artificial Sequence: Synthetic oligonucleotide
aaucguaaugcuaucggga

SEQ ID NO: 219707 - RNA, 19 nt, Artificial Sequence
  Description of Artificial Sequence: Synthetic oligonucleotide
aguuugggcgacaaagacc

SEQ ID NO: 219708 - RNA, 19 nt, Artificial Sequence
  Description of Artificial Sequence: Synthetic oligonucleotide
ucgcaagaaccucaaaaca

SEQ ID NO: 219709 - RNA, 19 nt, Artificial Sequence
  Description of Artificial Sequence: Synthetic oligonucleotide
agaccaguuacugacuacg

SEQ ID NO: 219710 - RNA, 19 nt, Artificial Sequence
  Description of Artificial Sequence: Synthetic oligonucleotide
ugcuaucgggaaaugagac

SEQ ID NO: 219711 - RNA, 19 nt, Artificial Sequence
  Description of Artificial Sequence: Synthetic oligonucleotide
caauaacucacacugucuc

SEQ ID NO: 219712 - RNA, 19 nt, Artificial Sequence
  Description of Artificial Sequence: Synthetic oligonucleotide
uuacugacuacggaguggc

SEQ ID NO: 219713 - RNA, 19 nt, Artificial Sequence
  Description of Artificial Sequence: Synthetic oligonucleotide
ugcagugauugcauguggc

SEQ ID NO: 219714 - RNA, 19 nt, Artificial Sequence
  Description of Artificial Sequence: Synthetic oligonucleotide
agaaacaucgcaagaaccu

SEQ ID NO: 219715 - RNA, 19 nt, Artificial Sequence
  Description of Artificial Sequence: Synthetic oligonucleotide
aacacaagaggcgugcccu

SEQ ID NO: 219716 - RNA, 19 nt, Artificial Sequence
  Description of Artificial Sequence: Synthetic oligonucleotide
acagcgagagguguguccc

SEQ ID NO: 219717 - RNA, 19 nt, Artificial Sequence
  Description of Artificial Sequence: Synthetic oligonucleotide
ucaaccgguguccacacuc

SEQ ID NO: 219718 - RNA, 19 nt, Artificial Sequence
  Description of Artificial Sequence: Synthetic oligonucleotide
gaaacaaucguaaugcuau

SEQ ID NO: 219719 - RNA, 19 nt, Artificial Sequence
  Description of Artificial Sequence: Synthetic oligonucleotide
aauccucgggaggaaggcc

SEQ ID NO: 219720 - RNA, 19 nt, Artificial Sequence
  Description of Artificial Sequence: Synthetic oligonucleotide
cuuacuuaaggggacuaag

SEQ ID NO: 219721 - RNA, 19 nt, Artificial Sequence
  Description of Artificial Sequence: Synthetic oligonucleotide
uaaucacggaucuuccaga

SEQ ID NO: 219722 - RNA, 19 nt, Artificial Sequence
  Description of Artificial Sequence: Synthetic oligonucleotide
gacggcaagugucaaaaca

SEQ ID NO: 219723 - RNA, 19 nt, Artificial Sequence
  Description of Artificial Sequence: Synthetic oligonucleotide
gaauacgaaacaaucguaa

SEQ ID NO: 219724 - RNA, 19 nt, Artificial Sequence
  Description of Artificial Sequence: Synthetic oligonucleotide
acuacggaguggcacagug

SEQ ID NO: 219725 - RNA, 19 nt, Artificial Sequence
  Description of Artificial Sequence: Synthetic oligonucleotide
agcgauauucaucucucca

SEQ ID NO: 219726 - RNA, 19 nt, Artificial Sequence
  Description of Artificial Sequence: Synthetic oligonucleotide
aggucgaggaucuucguga

SEQ ID NO: 219727 - RNA, 19 nt, Artificial Sequence
  Description of Artificial Sequence: Synthetic oligonucleotide
aaucacggaucuuccagau

SEQ ID NO: 219728 - RNA, 19 nt, Artificial Sequence
  Description of Artificial Sequence: Synthetic oligonucleotide
aacuccuacugacaggauu

SEQ ID NO: 219729 - RNA, 19 nt, Artificial Sequence
  Description of Artificial Sequence: Synthetic oligonucleotide
acagcgagcgguuacuaca

SEQ ID NO: 219730 - RNA, 19 nt, Artificial Sequence
  Description of Artificial Sequence: Synthetic oligonucleotide
cuuagaagagcggaagaac

SEQ ID NO: 219731 - RNA, 19 nt, Artificial Sequence
  Description of Artificial Sequence: Synthetic oligonucleotide
auagacacuuagcauugca

SEQ ID NO: 219732 - RNA, 19 nt, Artificial Sequence
  Description of Artificial Sequence: Synthetic oligonucleotide
auccgaaguauccacuaug

SEQ ID NO: 219733 - RNA, 19 nt, Artificial Sequence
  Description of Artificial Sequence: Synthetic oligonucleotide
agaacgcaaccccacaaca

SEQ ID NO: 219734 - RNA, 19 nt, Artificial Sequence
  Description of Artificial Sequence: Synthetic oligonucleotide
uuuagagacuuugucuacu

SEQ ID NO: 219735 - RNA, 19 nt, Artificial Sequence
  Description of Artificial Sequence: Synthetic oligonucleotide
agcagaacagaaacaucgc

SEQ ID NO: 219736 - RNA, 19 nt, Artificial Sequence
  Description of Artificial Sequence: Synthetic oligonucleotide
cuaauagacacuuagcauu

SEQ ID NO: 219737 - RNA, 19 nt, Artificial Sequence
  Description of Artificial Sequence: Synthetic oligonucleotide
uccggcgcuuauaaucacg

SEQ ID NO: 219738 - RNA, 19 nt, Artificial Sequence
  Description of Artificial Sequence: Synthetic oligonucleotide
ucgacuccaucuuaggaaa

SEQ ID NO: 219739 - RNA, 19 nt, Artificial Sequence
  Description of Artificial Sequence: Synthetic oligonucleotide
aacaggaauacgaaacaau

SEQ ID NO: 219740 - RNA, 19 nt, Artificial Sequence
  Description of Artificial Sequence: Synthetic oligonucleotide
uccagcuaccuccacgugu

SEQ ID NO: 219741 - RNA, 19 nt, Artificial Sequence
  Description of Artificial Sequence: Synthetic oligonucleotide
agagucuggacgcugcacu

SEQ ID NO: 219742 - RNA, 19 nt, Artificial Sequence
  Description of Artificial Sequence: Synthetic oligonucleotide
aucguaaugcuaucgggaa

SEQ ID NO: 219743 - RNA, 19 nt, Artificial Sequence
  Description of Artificial Sequence: Synthetic oligonucleotide
uugcucgacuccaucuuag

SEQ ID NO: 219744 - RNA, 19 nt, Artificial Sequence
  Description of Artificial Sequence: Synthetic oligonucleotide
guaucuucguguuucugca

SEQ ID NO: 219745 - RNA, 19 nt, Artificial Sequence
  Description of Artificial Sequence: Synthetic oligonucleotide
guuacugacuacggagugg

SEQ ID NO: 219746 - RNA, 19 nt, Artificial Sequence
  Description of Artificial Sequence: Synthetic oligonucleotide
aggaugaauauaucagaau

SEQ ID NO: 219747 - RNA, 19 nt, Artificial Sequence
  Description of Artificial Sequence: Synthetic oligonucleotide
cuaacuccuacugacagga

SEQ ID NO: 219748 - RNA, 19 nt, Artificial Sequence
  Description of Artificial Sequence: Synthetic oligonucleotide
uuaaggggacuaagggugu

SEQ ID NO: 219749 - RNA, 19 nt, Artificial Sequence
  Description of Artificial Sequence: Synthetic oligonucleotide
ugcugacacguccagcuac

SEQ ID NO: 219750 - RNA, 19 nt, Artificial Sequence
  Description of Artificial Sequence: Synthetic oligonucleotide
caagauggggccucacagc

SEQ ID NO: 219751 - RNA, 19 nt, Artificial Sequence
  Description of Artificial Sequence: Synthetic oligonucleotide
gaagcgauauucaucucuc

SEQ ID NO: 219752 - RNA, 19 nt, Artificial Sequence
  Description of Artificial Sequence: Synthetic oligonucleotide
aacucacaugaaagacucc

SEQ ID NO: 219753 - RNA, 19 nt, Artificial Sequence
  Description of Artificial Sequence: Synthetic oligonucleotide
aggcagauccgaaguaucc

SEQ ID NO: 219754 - RNA, 19 nt, Artificial Sequence
  Description of Artificial Sequence: Synthetic oligonucleotide
ccgacagcagaucugaagg

SEQ ID NO: 219755 - RNA, 19 nt, Artificial Sequence
  Description of Artificial Sequence: Synthetic oligonucleotide
aauauacgucccauucucu

SEQ ID NO: 219756 - RNA, 19 nt, Artificial Sequence
  Description of Artificial Sequence: Synthetic oligonucleotide
ugggcgacaaagaccgggc

SEQ ID NO: 219757 - RNA, 19 nt, Artificial Sequence
  Description of Artificial Sequence: Synthetic oligonucleotide
uuagccauacggcugccuu

SEQ ID NO: 219758 - RNA, 19 nt, Artificial Sequence
  Description of Artificial Sequence: Synthetic oligonucleotide
cuggcacgagcacugaccc

SEQ ID NO: 219759 - RNA, 19 nt, Artificial Sequence
  Description of Artificial Sequence: Synthetic oligonucleotide
agacauguugcuaacuccu

SEQ ID NO: 219760 - RNA, 19 nt, Artificial Sequence
  Description of Artificial Sequence: Synthetic oligonucleotide
uugcuaacuccuacugaca

SEQ ID NO: 219761 - RNA, 19 nt, Artificial Sequence
  Description of Artificial Sequence: Synthetic oligonucleotide
gcgauauucaucucuccag

SEQ ID NO: 219762 - RNA, 19 nt, Artificial Sequence
  Description of Artificial Sequence: Synthetic oligonucleotide
auauacgucccauucucua

SEQ ID NO: 219763 - RNA, 19 nt, Artificial Sequence
  Description of Artificial Sequence: Synthetic oligonucleotide
acguccagcuaccuccacg

SEQ ID NO: 219764 - RNA, 19 nt, Artificial Sequence
  Description of Artificial Sequence: Synthetic oligonucleotide
auagccaaaauagcccgug

SEQ ID NO: 219765 - RNA, 19 nt, Artificial Sequence
  Description of Artificial Sequence: Synthetic oligonucleotide
cucucgguauuuacaggcc

SEQ ID NO: 219766 - RNA, 19 nt, Artificial Sequence
  Description of Artificial Sequence: Synthetic oligonucleotide
aucgggaaaugagacaugu

SEQ ID NO: 219767 - RNA, 19 nt, Artificial Sequence
  Description of Artificial Sequence: Synthetic oligonucleotide
acgagcacugaccccgcac

SEQ ID NO: 219768 - RNA, 19 nt, Artificial Sequence
  Description of Artificial Sequence: Synthetic oligonucleotide
gacggcuuccugcuuccgg

SEQ ID NO: 219769 - RNA, 19 nt, Artificial Sequence
  Description of Artificial Sequence: Synthetic oligonucleotide
gaggcgugcccucagagaa

SEQ ID NO: 219770 - RNA, 19 nt, Artificial Sequence
  Description of Artificial Sequence: Synthetic oligonucleotide
uuugcucgacuccaucuua

SEQ ID NO: 219771 - RNA, 19 nt, Artificial Sequence
  Description of Artificial Sequence: Synthetic oligonucleotide
acguguggcuccuccugcc

SEQ ID NO: 219772 - RNA, 19 nt, Artificial Sequence
  Description of Artificial Sequence: Synthetic oligonucleotide
agaagagcggaagaacaca

SEQ ID NO: 219773 - RNA, 19 nt, Artificial Sequence
  Description of Artificial Sequence: Synthetic oligonucleotide
gaccaguuacugacuacgg

SEQ ID NO: 219774 - RNA, 19 nt, Artificial Sequence
  Description of Artificial Sequence: Synthetic oligonucleotide
uaucgggaaaugagacaug

SEQ ID NO: 219775 - RNA, 19 nt, Artificial Sequence
  Description of Artificial Sequence: Synthetic oligonucleotide
cuuggacugucaagauggg

SEQ ID NO: 219776 - RNA, 19 nt, Artificial Sequence
  Description of Artificial Sequence: Synthetic oligonucleotide
gauuauugcugagcaauaa

SEQ ID NO: 219777 - RNA, 19 nt, Artificial Sequence
  Description of Artificial Sequence: Synthetic oligonucleotide
cuuccggcgcuuauaauca

SEQ ID NO: 219778 - RNA, 19 nt, Artificial Sequence
  Description of Artificial Sequence: Synthetic oligonucleotide
uguuacgagcugccugccc

SEQ ID NO: 219779 - RNA, 19 nt, Artificial Sequence
  Description of Artificial Sequence: Synthetic oligonucleotide
acgguccucucugaggucg

SEQ ID NO: 219780 - RNA, 19 nt, Artificial Sequence
  Description of Artificial Sequence: Synthetic oligonucleotide
cauuccgacagcagaucug

SEQ ID NO: 219781 - RNA, 19 nt, Artificial Sequence
  Description of Artificial Sequence: Synthetic oligonucleotide
agugugaucauggggacuu

SEQ ID NO: 219782 - RNA, 19 nt, Artificial Sequence
  Description of Artificial Sequence: Synthetic oligonucleotide
gaucuucgugaagacagac

SEQ ID NO: 219783 - RNA, 19 nt, Artificial Sequence
  Description of Artificial Sequence: Synthetic oligonucleotide
aguuacuugucagggguca

SEQ ID NO: 219784 - RNA, 19 nt, Artificial Sequence
  Description of Artificial Sequence: Synthetic oligonucleotide
ucguaaugcuaucgggaaa

SEQ ID NO: 219785 - RNA, 19 nt, Artificial Sequence
  Description of Artificial Sequence: Synthetic oligonucleotide
cauuccguccccguucagg

SEQ ID NO: 219786 - RNA, 19 nt, Artificial Sequence
  Description of Artificial Sequence: Synthetic oligonucleotide
aaacagcgagagguguguc

SEQ ID NO: 219787 - RNA, 19 nt, Artificial Sequence
  Description of Artificial Sequence: Synthetic oligonucleotide
caugacggcuuccugcuuc

SEQ ID NO: 219788 - RNA, 19 nt, Artificial Sequence
  Description of Artificial Sequence: Synthetic oligonucleotide
ucuuacuuaaggggacuaa

SEQ ID NO: 219789 - RNA, 19 nt, Artificial Sequence
  Description of Artificial Sequence: Synthetic oligonucleotide
gcuaacuccuacugacagg

SEQ ID NO: 219790 - RNA, 19 nt, Artificial Sequence
  Description of Artificial Sequence: Synthetic oligonucleotide
ggggaagugaaucgcacac

SEQ ID NO: 219791 - RNA, 19 nt, Artificial Sequence
  Description of Artificial Sequence: Synthetic oligonucleotide
aacucacacugucucgguu

SEQ ID NO: 219792 - RNA, 19 nt, Artificial Sequence
  Description of Artificial Sequence: Synthetic oligonucleotide
agccaagcggaugucauga

SEQ ID NO: 219793 - RNA, 19 nt, Artificial Sequence
  Description of Artificial Sequence: Synthetic oligonucleotide
cagcgagcgguuacuacag

SEQ ID NO: 219794 - RNA, 19 nt, Artificial Sequence
  Description of Artificial Sequence: Synthetic oligonucleotide
gaucccgcaagucucuucu

SEQ ID NO: 219795 - RNA, 19 nt, Artificial Sequence
  Description of Artificial Sequence: Synthetic oligonucleotide
aggaucucucaaccggugu

SEQ ID NO: 219796 - RNA, 19 nt, Artificial Sequence
  Description of Artificial Sequence: Synthetic oligonucleotide
uggcuagucuauugggaaa

SEQ ID NO: 219797 - RNA, 19 nt, Artificial Sequence
  Description of Artificial Sequence: Synthetic oligonucleotide
agcaagccuguguuacgag

SEQ ID NO: 219798 - RNA, 19 nt, Artificial Sequence
  Description of Artificial Sequence: Synthetic oligonucleotide
agcgguuacuacagacggc

SEQ ID NO: 219799 - RNA, 19 nt, Artificial Sequence
  Description of Artificial Sequence: Synthetic oligonucleotide
gguuucuuagaagagcgga

SEQ ID NO: 219800 - RNA, 19 nt, Artificial Sequence
  Description of Artificial Sequence: Synthetic oligonucleotide
agccaaaauagcccgugua

SEQ ID NO: 219801 - RNA, 19 nt, Artificial Sequence
  Description of Artificial Sequence: Synthetic oligonucleotide
ugaccccgcacugcgauca

SEQ ID NO: 219802 - RNA, 19 nt, Artificial Sequence
  Description of Artificial Sequence: Synthetic oligonucleotide
acaagaggcgugcccucag

SEQ ID NO: 219803 - RNA, 19 nt, Artificial Sequence
  Description of Artificial Sequence: Synthetic oligonucleotide
cugcacgaagacaggggag

SEQ ID NO: 219804 - RNA, 19 nt, Artificial Sequence
  Description of Artificial Sequence: Synthetic oligonucleotide
aacaucgcaagaaccucaa

SEQ ID NO: 219805 - RNA, 19 nt, Artificial Sequence
  Description of Artificial Sequence: Synthetic oligonucleotide
acuccuacugacaggauua

SEQ ID NO: 219806 - RNA, 19 nt, Artificial Sequence
  Description of Artificial Sequence: Synthetic oligonucleotide
aggacgcuaaucacugguc

SEQ ID NO: 219807 - RNA, 19 nt, Artificial Sequence
  Description of Artificial Sequence: Synthetic oligonucleotide
uaacucacacugucucggu

SEQ ID NO: 219808 - RNA, 19 nt, Artificial Sequence
  Description of Artificial Sequence: Synthetic oligonucleotide
acuaaggguguagaccagu

SEQ ID NO: 219809 - RNA, 19 nt, Artificial Sequence
  Description of Artificial Sequence: Synthetic oligonucleotide
gaccgggcagccagaagcg

SEQ ID NO: 219810 - RNA, 19 nt, Artificial Sequence
  Description of Artificial Sequence: Synthetic oligonucleotide
ugacuacggaguggcacag

SEQ ID NO: 219811 - RNA, 19 nt, Artificial Sequence
  Description of Artificial Sequence: Synthetic oligonucleotide
uucacguguggcuccuccu

SEQ ID NO: 219812 - RNA, 19 nt, Artificial Sequence
  Description of Artificial Sequence: Synthetic oligonucleotide
agauugcacucuugaauuu

SEQ ID NO: 219813 - RNA, 19 nt, Artificial Sequence
  Description of Artificial Sequence: Synthetic oligonucleotide
augcuaucgggaaaugaga

SEQ ID NO: 219814 - RNA, 19 nt, Artificial Sequence
  Description of Artificial Sequence: Synthetic oligonucleotide
ggcgacaaagaccgggcag

SEQ ID NO: 219815 - RNA, 19 nt, Artificial Sequence
  Description of Artificial Sequence: Synthetic oligonucleotide
ccgagaggaccccugaucc

SEQ ID NO: 219816 - RNA, 19 nt, Artificial Sequence
  Description of Artificial Sequence: Synthetic oligonucleotide
acugaccccgcacugcgau

SEQ ID NO: 219817 - RNA, 19 nt, Artificial Sequence
  Description of Artificial Sequence: Synthetic oligonucleotide
accuccacguguuuucuuu

SEQ ID NO: 219818 - RNA, 19 nt, Artificial Sequence
  Description of Artificial Sequence: Synthetic oligonucleotide
acgcuaaucacuggucaca

SEQ ID NO: 219819 - RNA, 19 nt, Artificial Sequence
  Description of Artificial Sequence: Synthetic oligonucleotide
gcaagccuguguuacgagc

SEQ ID NO: 219820 - RNA, 19 nt, Artificial Sequence
  Description of Artificial Sequence: Synthetic oligonucleotide
gcgccuacagauucuuggg

SEQ ID NO: 219821 - RNA, 19 nt, Artificial Sequence
  Description of Artificial Sequence: Synthetic oligonucleotide
ggaccccugauccaucagc

SEQ ID NO: 219822 - RNA, 19 nt, Artificial Sequence
  Description of Artificial Sequence: Synthetic oligonucleotide
ccggcgcuuauaaucacgg

SEQ ID NO: 219823 - RNA, 19 nt, Artificial Sequence
  Description of Artificial Sequence: Synthetic oligonucleotide
guuacuugucaggggucag

SEQ ID NO: 219824 - RNA, 19 nt, Artificial Sequence
  Description of Artificial Sequence: Synthetic oligonucleotide
cacagcgagcgguuacuac

SEQ ID NO: 219825 - RNA, 19 nt, Artificial Sequence
  Description of Artificial Sequence: Synthetic oligonucleotide
aucuggucaugccggcuca

SEQ ID NO: 219826 - RNA, 19 nt, Artificial Sequence
  Description of Artificial Sequence: Synthetic oligonucleotide
cgagcgguuacuacagacg

SEQ ID NO: 219827 - RNA, 19 nt, Artificial Sequence
  Description of Artificial Sequence: Synthetic oligonucleotide
ccagaugacgccgagagga

SEQ ID NO: 219828 - RNA, 19 nt, Artificial Sequence
  Description of Artificial Sequence: Synthetic oligonucleotide
cagaugacgccgagaggac

SEQ ID NO: 219829 - RNA, 19 nt, Artificial Sequence
  Description of Artificial Sequence: Synthetic oligonucleotide
ggaucucucaaccgguguc

SEQ ID NO: 219830 - RNA, 19 nt, Artificial Sequence
  Description of Artificial Sequence: Synthetic oligonucleotide
gagaggugugucccuuuuc

SEQ ID NO: 219831 - RNA, 19 nt, Artificial Sequence
  Description of Artificial Sequence: Synthetic oligonucleotide
cacuggucacaaucacuug

SEQ ID NO: 219832 - RNA, 19 nt, Artificial Sequence
  Description of Artificial Sequence: Synthetic oligonucleotide
ugaggucgaggaucuucgu

SEQ ID NO: 219833 - RNA, 19 nt, Artificial Sequence
  Description of Artificial Sequence: Synthetic oligonucleotide
gugaaucgcacacucuacu

SEQ ID NO: 219834 - RNA, 19 nt, Artificial Sequence
  Description of Artificial Sequence: Synthetic oligonucleotide
ggucaugccggcucagcug

SEQ ID NO: 219835 - RNA, 19 nt, Artificial Sequence
  Description of Artificial Sequence: Synthetic oligonucleotide
cuucauuccgacagcagau

SEQ ID NO: 219836 - RNA, 19 nt, Artificial Sequence
  Description of Artificial Sequence: Synthetic oligonucleotide
acagacggcaagugucaaa

SEQ ID NO: 219837 - RNA, 19 nt, Artificial Sequence
  Description of Artificial Sequence: Synthetic oligonucleotide
guaaugcuaucgggaaaug

SEQ ID NO: 219838 - RNA, 19 nt, Artificial Sequence
  Description of Artificial Sequence: Synthetic oligonucleotide
ugaucccgcaagucucuuc

SEQ ID NO: 219839 - RNA, 19 nt, Artificial Sequence
  Description of Artificial Sequence: Synthetic oligonucleotide
gccuacagauucuugggga

SEQ ID NO: 219840 - RNA, 19 nt, Artificial Sequence
  Description of Artificial Sequence: Synthetic oligonucleotide
guggccucucgguauuuac

SEQ ID NO: 219841 - RNA, 19 nt, Artificial Sequence
  Description of Artificial Sequence: Synthetic oligonucleotide
gucgaggaucuucgugaag

SEQ ID NO: 219842 - RNA, 19 nt, Artificial Sequence
  Description of Artificial Sequence: Synthetic oligonucleotide
aucccgcaagucucuucuc

SEQ ID NO: 219843 - RNA, 19 nt, Artificial Sequence
  Description of Artificial Sequence: Synthetic oligonucleotide
gcgcuuauaaucacggauc

SEQ ID NO: 219844 - RNA, 19 nt, Artificial Sequence
  Description of Artificial Sequence: Synthetic oligonucleotide
ucgugaagacagacggcuu

SEQ ID NO: 219845 - RNA, 19 nt, Artificial Sequence
  Description of Artificial Sequence: Synthetic oligonucleotide
gcuaucgggaaaugagaca

SEQ ID NO: 219846 - RNA, 19 nt, Artificial Sequence
  Description of Artificial Sequence: Synthetic oligonucleotide
ucgggaaaugagacauguu

SEQ ID NO: 219847 - RNA, 19 nt, Artificial Sequence
  Description of Artificial Sequence: Synthetic oligonucleotide
uccccaugacggcuuccug

SEQ ID NO: 219848 - RNA, 19 nt, Artificial Sequence
  Description of Artificial Sequence: Synthetic oligonucleotide
ggccaggaucucucaaccg

SEQ ID NO: 219849 - RNA, 19 nt, Artificial Sequence
  Description of Artificial Sequence: Synthetic oligonucleotide
gcgaucaggcugcagcuug

SEQ ID NO: 219850 - RNA, 19 nt, Artificial Sequence
  Description of Artificial Sequence: Synthetic oligonucleotide
gcgguuacuacagacggca

SEQ ID NO: 219851 - RNA, 19 nt, Artificial Sequence
  Description of Artificial Sequence: Synthetic oligonucleotide
cccaguuacuugucagggg

SEQ ID NO: 219852 - RNA, 19 nt, Artificial Sequence
  Description of Artificial Sequence: Synthetic oligonucleotide
agcucacuucucagaagag

SEQ ID NO: 219853 - RNA, 19 nt, Artificial Sequence
  Description of Artificial Sequence: Synthetic oligonucleotide
cuagaacaguuugggcgac

SEQ ID NO: 219854 - RNA, 19 nt, Artificial Sequence
  Description of Artificial Sequence: Synthetic oligonucleotide
cgcacugcgaucaggcugc

SEQ ID NO: 219855 - RNA, 19 nt, Artificial Sequence
  Description of Artificial Sequence: Synthetic oligonucleotide
gcgagcgguuacuacagac

SEQ ID NO: 219856 - RNA, 19 nt, Artificial Sequence
  Description of Artificial Sequence: Synthetic oligonucleotide
uagaacaguuugggcgaca

SEQ ID NO: 219857 - RNA, 19 nt, Artificial Sequence
  Description of Artificial Sequence: Synthetic oligonucleotide
aaauccgcuggggucuguu

SEQ ID NO: 219858 - RNA, 19 nt, Artificial Sequence
  Description of Artificial Sequence: Synthetic oligonucleotide
ggcgcuuauaaucacggau

SEQ ID NO: 219859 - RNA, 19 nt, Artificial Sequence
  Description of Artificial Sequence: Synthetic oligonucleotide
cacgugaucccgcaagucu

SEQ ID NO: 219860 - RNA, 19 nt, Artificial Sequence
  Description of Artificial Sequence: Synthetic oligonucleotide
cuacggaguggcacaguga

SEQ ID NO: 219861 - RNA, 19 nt, Artificial Sequence
  Description of Artificial Sequence: Synthetic oligonucleotide
cgaaguauccacuaugacu

SEQ ID NO: 219862 - RNA, 19 nt, Artificial Sequence
  Description of Artificial Sequence: Synthetic oligonucleotide
gucuauugggaaauccgcu

SEQ ID NO: 219863 - RNA, 19 nt, Artificial Sequence
  Description of Artificial Sequence: Synthetic oligonucleotide
uuccggcgcuuauaaucac

SEQ ID NO: 219864 - RNA, 19 nt, Artificial Sequence
  Description of Artificial Sequence: Synthetic oligonucleotide
ccaaaugaaaccacacaua

SEQ ID NO: 219865 - RNA, 19 nt, Artificial Sequence
  Description of Artificial Sequence: Synthetic oligonucleotide
cagaucagcacaccauugu

SEQ ID NO: 219866 - RNA, 19 nt, Artificial Sequence
  Description of Artificial Sequence: Synthetic oligonucleotide
ggggacuaaggguguagac

SEQ ID NO: 219867 - RNA, 19 nt, Artificial Sequence
  Description of Artificial Sequence: Synthetic oligonucleotide
uggcacgagcacugacccc

SEQ ID NO: 219868 - RNA, 19 nt, Artificial Sequence
  Description of Artificial Sequence: Synthetic oligonucleotide
ggaauacgaaacaaucgua

SEQ ID NO: 219869 - RNA, 19 nt, Artificial Sequence
  Description of Artificial Sequence: Synthetic oligonucleotide
gauccgaaguauccacuau

SEQ ID NO: 219870 - RNA, 19 nt, Artificial Sequence
  Description of Artificial Sequence: Synthetic oligonucleotide
caaccgguguccacacuca

SEQ ID NO: 219871 - RNA, 19 nt, Artificial Sequence
  Description of Artificial Sequence: Synthetic oligonucleotide
cugucucgguuucuuagaa

SEQ ID NO: 219872 - RNA, 19 nt, Artificial Sequence
  Description of Artificial Sequence: Synthetic oligonucleotide
uacagacggcaagugucaa

SEQ ID NO: 219873 - RNA, 19 nt, Artificial Sequence
  Description of Artificial Sequence: Synthetic oligonucleotide
acaucgcaagaaccucaaa

SEQ ID NO: 219874 - RNA, 19 nt, Artificial Sequence
  Description of Artificial Sequence: Synthetic oligonucleotide
gacgccgagaggaccccug

SEQ ID NO: 219875 - RNA, 19 nt, Artificial Sequence
  Description of Artificial Sequence: Synthetic oligonucleotide
ccaaaauagcccguguaga

SEQ ID NO: 219876 - RNA, 19 nt, Artificial Sequence
  Description of Artificial Sequence: Synthetic oligonucleotide
uaaggggacuaagggugua

SEQ ID NO: 219877 - RNA, 19 nt, Artificial Sequence
  Description of Artificial Sequence: Synthetic oligonucleotide
gcuggcggucucaaggacc

SEQ ID NO: 219878 - RNA, 19 nt, Artificial Sequence
  Description of Artificial Sequence: Synthetic oligonucleotide
agcgagcgguuacuacaga

SEQ ID NO: 219879 - RNA, 19 nt, Artificial Sequence
  Description of Artificial Sequence: Synthetic oligonucleotide
cuggcggucucaaggaccu

SEQ ID NO: 219880 - RNA, 19 nt, Artificial Sequence
  Description of Artificial Sequence: Synthetic oligonucleotide
gggacggaucuccuuguca

SEQ ID NO: 219881 - RNA, 19 nt, Artificial Sequence
  Description of Artificial Sequence: Synthetic oligonucleotide
gcugacacguccagcuacc

SEQ ID NO: 219882 - RNA, 19 nt, Artificial Sequence
  Description of Artificial Sequence: Synthetic oligonucleotide
uccuacugacaggauuauu

SEQ ID NO: 219883 - RNA, 19 nt, Artificial Sequence
  Description of Artificial Sequence: Synthetic oligonucleotide
acgccgagaggaccccuga

SEQ ID NO: 219884 - RNA, 19 nt, Artificial Sequence
  Description of Artificial Sequence: Synthetic oligonucleotide
uguggccucucgguauuua

SEQ ID NO: 219885 - RNA, 19 nt, Artificial Sequence
  Description of Artificial Sequence: Synthetic oligonucleotide
ccgcacugcgaucaggcug

SEQ ID NO: 219886 - RNA, 19 nt, Artificial Sequence
  Description of Artificial Sequence: Synthetic oligonucleotide
agcuaccuccacguguuuu

SEQ ID NO: 219887 - RNA, 19 nt, Artificial Sequence
  Description of Artificial Sequence: Synthetic oligonucleotide
ucacacgguucuggaggga

SEQ ID NO: 219888 - RNA, 19 nt, Artificial Sequence
  Description of Artificial Sequence: Synthetic oligonucleotide
cgccuacagauucuugggg

SEQ ID NO: 219889 - RNA, 19 nt, Artificial Sequence
  Description of Artificial Sequence: Synthetic oligonucleotide
ggaagaacacaggacgcua

SEQ ID NO: 219890 - RNA, 19 nt, Artificial Sequence
  Description of Artificial Sequence: Synthetic oligonucleotide
accgguguccacacucagu

SEQ ID NO: 219891 - RNA, 19 nt, Artificial Sequence
  Description of Artificial Sequence: Synthetic oligonucleotide
guguuacgagcugccugcc

SEQ ID NO: 219892 - RNA, 19 nt, Artificial Sequence
  Description of Artificial Sequence: Synthetic oligonucleotide
guccagcuaccuccacgug

SEQ ID NO: 219893 - RNA, 19 nt, Artificial Sequence
  Description of Artificial Sequence: Synthetic oligonucleotide
cagugacccuguacuuguc

SEQ ID NO: 219894 - RNA, 19 nt, Artificial Sequence
  Description of Artificial Sequence: Synthetic oligonucleotide
ugcgaucaggcugcagcuu

SEQ ID NO: 219895 - RNA, 19 nt, Artificial Sequence
  Description of Artificial Sequence: Synthetic oligonucleotide
cugcgaucaggcugcagcu

SEQ ID NO: 219896 - RNA, 19 nt, Artificial Sequence
  Description of Artificial Sequence: Synthetic oligonucleotide
cugaccccgcacugcgauc

SEQ ID NO: 219897 - RNA, 19 nt, Artificial Sequence
  Description of Artificial Sequence: Synthetic oligonucleotide
cacaagaggcgugcccuca

SEQ ID NO: 219898 - RNA, 19 nt, Artificial Sequence
  Description of Artificial Sequence: Synthetic oligonucleotide
ccucacagcgagcgguuac

SEQ ID NO: 219899 - RNA, 19 nt, Artificial Sequence
  Description of Artificial Sequence: Synthetic oligonucleotide
agcgagaggugugucccuu

SEQ ID NO: 219900 - RNA, 19 nt, Artificial Sequence
  Description of Artificial Sequence: Synthetic oligonucleotide
cccagaugacgccgagagg

SEQ ID NO: 219901 - RNA, 19 nt, Artificial Sequence
  Description of Artificial Sequence: Synthetic oligonucleotide
agagaccagaugaggccuu

SEQ ID NO: 219902 - RNA, 19 nt, Artificial Sequence
  Description of Artificial Sequence: Synthetic oligonucleotide
gggccugcuuagccauacg

SEQ ID NO: 219903 - RNA, 19 nt, Artificial Sequence
  Description of Artificial Sequence: Synthetic oligonucleotide
ugacgccgagaggaccccu

SEQ ID NO: 219904 - RNA, 19 nt, Artificial Sequence
  Description of Artificial Sequence: Synthetic oligonucleotide
gccggcuuuuguguuuccc

SEQ ID NO: 219905 - RNA, 19 nt, Artificial Sequence
  Description of Artificial Sequence: Synthetic oligonucleotide
cuccacgcauaaugacaaa

SEQ ID NO: 219906 - RNA, 19 nt, Artificial Sequence
  Description of Artificial Sequence: Synthetic oligonucleotide
gggcgacaaagaccgggca

SEQ ID NO: 219907 - RNA, 19 nt, Artificial Sequence
  Description of Artificial Sequence: Synthetic oligonucleotide
uucugccggaagggacgga

SEQ ID NO: 219908 - RNA, 19 nt, Artificial Sequence
  Description of Artificial Sequence: Synthetic oligonucleotide
ggcgugcccucagagaaaa

SEQ ID NO: 219909 - RNA, 19 nt, Artificial Sequence
  Description of Artificial Sequence: Synthetic oligonucleotide
cacugcgaucaggcugcag

SEQ ID NO: 219910 - RNA, 19 nt, Artificial Sequence
  Description of Artificial Sequence: Synthetic oligonucleotide
ccaccuuaauuaacuagau

SEQ ID NO: 219911 - RNA, 19 nt, Artificial Sequence
  Description of Artificial Sequence: Synthetic oligonucleotide
uggcggucucaaggaccug

SEQ ID NO: 219912 - RNA, 19 nt, Artificial Sequence
  Description of Artificial Sequence: Synthetic oligonucleotide
cguaaugcuaucgggaaau

SEQ ID NO: 219913 - RNA, 19 nt, Artificial Sequence
  Description of Artificial Sequence: Synthetic oligonucleotide
gacuacggaguggcacagu

SEQ ID NO: 219914 - RNA, 19 nt, Artificial Sequence
  Description of Artificial Sequence: Synthetic oligonucleotide
gccaagcggaugucaugaa

SEQ ID NO: 219915 - RNA, 19 nt, Artificial Sequence
  Description of Artificial Sequence: Synthetic oligonucleotide
cagugugaucauggggacu

SEQ ID NO: 219916 - RNA, 19 nt, Artificial Sequence
  Description of Artificial Sequence: Synthetic oligonucleotide
auguggccucucgguauuu

SEQ ID NO: 219917 - RNA, 19 nt, Artificial Sequence
  Description of Artificial Sequence: Synthetic oligonucleotide
cguccagcuaccuccacgu

SEQ ID NO: 219918 - RNA, 19 nt, Artificial Sequence
  Description of Artificial Sequence: Synthetic oligonucleotide
gcggucucaaggaccugga

SEQ ID NO: 219919 - RNA, 19 nt, Artificial Sequence
  Description of Artificial Sequence: Synthetic oligonucleotide
gaguuaccuucugcugaau

SEQ ID NO: 219920 - RNA, 19 nt, Artificial Sequence
  Description of Artificial Sequence: Synthetic oligonucleotide
gaaauccgcuggggucugu

SEQ ID NO: 219921 - RNA, 19 nt, Artificial Sequence
  Description of Artificial Sequence: Synthetic oligonucleotide
cugacacguccagcuaccu

SEQ ID NO: 219922 - RNA, 19 nt, Artificial Sequence
  Description of Artificial Sequence: Synthetic oligonucleotide
cagcgagaggugugucccu

SEQ ID NO: 219923 - RNA, 19 nt, Artificial Sequence
  Description of Artificial Sequence: Synthetic oligonucleotide
gcuuauaaucacggaucuu

SEQ ID NO: 219924 - RNA, 19 nt, Artificial Sequence
  Description of Artificial Sequence: Synthetic oligonucleotide
ccauuccguccccguucag

SEQ ID NO: 219925 - RNA, 19 nt, Artificial Sequence
  Description of Artificial Sequence: Synthetic oligonucleotide
cgcuaaucacuggucacaa

SEQ ID NO: 219926 - RNA, 19 nt, Artificial Sequence
  Description of Artificial Sequence: Synthetic oligonucleotide
cgugaucccgcaagucucu

SEQ ID NO: 219927 - RNA, 19 nt, Artificial Sequence
  Description of Artificial Sequence: Synthetic oligonucleotide
cccuggcacacaucuuaua

SEQ ID NO: 219928 - RNA, 19 nt, Artificial Sequence
  Description of Artificial Sequence: Synthetic oligonucleotide
cgacuccaucuuaggaaaa

SEQ ID NO: 219929 - RNA, 19 nt, Artificial Sequence
  Description of Artificial Sequence: Synthetic oligonucleotide
gugaucccgcaagucucuu

SEQ ID NO: 219930 - RNA, 19 nt, Artificial Sequence
  Description of Artificial Sequence: Synthetic oligonucleotide
cggcgcuuauaaucacgga

SEQ ID NO: 219931 - RNA, 19 nt, Artificial Sequence
  Description of Artificial Sequence: Synthetic oligonucleotide
gcgagaggugugucccuuu

SEQ ID NO: 219932 - RNA, 19 nt, Artificial Sequence
  Description of Artificial Sequence: Synthetic oligonucleotide
gccucacagcgagcgguua

SEQ ID NO: 219933 - RNA, 19 nt, Artificial Sequence
  Description of Artificial Sequence: Synthetic oligonucleotide
gcggcacuucucacacuua

SEQ ID NO: 219934 - RNA, 19 nt, Artificial Sequence
  Description of Artificial Sequence: Synthetic oligonucleotide
cgguccucucugaggucga

SEQ ID NO: 219935 - RNA, 19 nt, Artificial Sequence
  Description of Artificial Sequence: Synthetic oligonucleotide
gcacugcgaucaggcugca

SEQ ID NO: 219936 - RNA, 19 nt, Artificial Sequence
  Description of Artificial Sequence: Synthetic oligonucleotide
aauacauccaacucacuuc

SEQ ID NO: 219937 - RNA, 19 nt, Artificial Sequence
  Description of Artificial Sequence: Synthetic oligonucleotide
uaacauguuaauuauacug

SEQ ID NO: 219938 - RNA, 19 nt, Artificial Sequence
  Description of Artificial Sequence: Synthetic oligonucleotide
caaucagugaauaaugugc

SEQ ID NO: 219939 - RNA, 19 nt, Artificial Sequence
  Description of Artificial Sequence: Synthetic oligonucleotide
aauucaacuuuaagaaucc

SEQ ID NO: 219940 - RNA, 19 nt, Artificial Sequence
  Description of Artificial Sequence: Synthetic oligonucleotide
ucaacuuuaagaaucccca

SEQ ID NO: 219941 - RNA, 19 nt, Artificial Sequence
  Description of Artificial Sequence: Synthetic oligonucleotide
aagcuccuaacuugaaucc

SEQ ID NO: 219942 - RNA, 19 nt, Artificial Sequence
  Description of Artificial Sequence: Synthetic oligonucleotide
caugcuaugcacuugguag

SEQ ID NO: 219943 - RNA, 19 nt, Artificial Sequence
  Description of Artificial Sequence: Synthetic oligonucleotide
acuuauuaaauggagaaug

SEQ ID NO: 219944 - RNA, 19 nt, Artificial Sequence
  Description of Artificial Sequence: Synthetic oligonucleotide
aaucagucagucaacaguc

SEQ ID NO: 219945 - RNA, 19 nt, Artificial Sequence
  Description of Artificial Sequence: Synthetic oligonucleotide
auuaacgcuuuaucaacgc

SEQ ID NO: 219946 - RNA, 19 nt, Artificial Sequence
  Description of Artificial Sequence: Synthetic oligonucleotide
aaugaacuagaucuaacaa

SEQ ID NO: 219947 - RNA, 19 nt, Artificial Sequence
  Description of Artificial Sequence: Synthetic oligonucleotide
uuaucaacgcacauagcag

SEQ ID NO: 219948 - RNA, 19 nt, Artificial Sequence
  Description of Artificial Sequence: Synthetic oligonucleotide
aaugcguuccauuaacgcu

SEQ ID NO: 219949 - RNA, 19 nt, Artificial Sequence
  Description of Artificial Sequence: Synthetic oligonucleotide
ugugaauccaccuuugggu

SEQ ID NO: 219950 - RNA, 19 nt, Artificial Sequence
  Description of Artificial Sequence: Synthetic oligonucleotide
aguccucuaaucuauaucu

SEQ ID NO: 219951 - RNA, 19 nt, Artificial Sequence
  Description of Artificial Sequence: Synthetic oligonucleotide
ugaacuuauccaauccuag

SEQ ID NO: 219952 - RNA, 19 nt, Artificial Sequence
  Description of Artificial Sequence: Synthetic oligonucleotide
uaaauggagaaugaacuag

SEQ ID NO: 219953 - RNA, 19 nt, Artificial Sequence
  Description of Artificial Sequence: Synthetic oligonucleotide
cuauacaaagccauucacc

SEQ ID NO: 219954 - RNA, 19 nt, Artificial Sequence
  Description of Artificial Sequence: Synthetic oligonucleotide
cugaaugucggcuuggaag

SEQ ID NO: 219955 - RNA, 19 nt, Artificial Sequence
  Description of Artificial Sequence: Synthetic oligonucleotide
acagauuuauguuaugcca

SEQ ID NO: 219956 - RNA, 19 nt, Artificial Sequence
  Description of Artificial Sequence: Synthetic oligonucleotide
ucuuuaaucaggcuuucuc

SEQ ID NO: 219957 - RNA, 19 nt, Artificial Sequence
  Description of Artificial Sequence: Synthetic oligonucleotide
cagacuaugccaaucagug

SEQ ID NO: 219958 - RNA, 19 nt, Artificial Sequence
  Description of Artificial Sequence: Synthetic oligonucleotide
uuauuuugcacuagacaca

SEQ ID NO: 219959 - RNA, 19 nt, Artificial Sequence
  Description of Artificial Sequence: Synthetic oligonucleotide
agacugacuaggcugcugc

SEQ ID NO: 219960 - RNA, 19 nt, Artificial Sequence
  Description of Artificial Sequence: Synthetic oligonucleotide
ugaaugucggcuuggaaga

SEQ ID NO: 219961 - RNA, 19 nt, Artificial Sequence
  Description of Artificial Sequence: Synthetic oligonucleotide
guagcuccgaaacugaacc

SEQ ID NO: 219962 - RNA, 19 nt, Artificial Sequence
  Description of Artificial Sequence: Synthetic oligonucleotide
gaaugaacuagaucuaaca

SEQ ID NO: 219963 - RNA, 19 nt, Artificial Sequence
  Description of Artificial Sequence: Synthetic oligonucleotide
ucuauacaaagccauucac

SEQ ID NO: 219964 - RNA, 19 nt, Artificial Sequence
  Description of Artificial Sequence: Synthetic oligonucleotide
ucggguuagcaccaaaugc

SEQ ID NO: 219965 - RNA, 19 nt, Artificial Sequence
  Description of Artificial Sequence: Synthetic oligonucleotide
ucaaugcguuccauuaacg

SEQ ID NO: 219966 - RNA, 19 nt, Artificial Sequence
  Description of Artificial Sequence: Synthetic oligonucleotide
ggaacuaccaaauaugcca

SEQ ID NO: 219967 - RNA, 19 nt, Artificial Sequence
  Description of Artificial Sequence: Synthetic oligonucleotide
ugggauuucuaaucaaccc

SEQ ID NO: 219968 - RNA, 19 nt, Artificial Sequence
  Description of Artificial Sequence: Synthetic oligonucleotide
aacuuuaagaauccccaau

SEQ ID NO: 219969 - RNA, 19 nt, Artificial Sequence
  Description of Artificial Sequence: Synthetic oligonucleotide
uaacgcuuuaucaacgcac

SEQ ID NO: 219970 - RNA, 19 nt, Artificial Sequence
  Description of Artificial Sequence: Synthetic oligonucleotide
aauuacaauuucaaugcgu

SEQ ID NO: 219971 - RNA, 19 nt, Artificial Sequence
  Description of Artificial Sequence: Synthetic oligonucleotide
uuaguauggaccauucuuu

SEQ ID NO: 219972 - RNA, 19 nt, Artificial Sequence
  Description of Artificial Sequence: Synthetic oligonucleotide
cuaacuugaauccucccug

SEQ ID NO: 219973 - RNA, 19 nt, Artificial Sequence
  Description of Artificial Sequence: Synthetic oligonucleotide
aaucagugaauaaugugcu

SEQ ID NO: 219974 - RNA, 19 nt, Artificial Sequence
  Description of Artificial Sequence: Synthetic oligonucleotide
gacuaugccaaucagugaa

SEQ ID NO: 219975 - RNA, 19 nt, Artificial Sequence
  Description of Artificial Sequence: Synthetic oligonucleotide
aaaguacagaaacaauauu

SEQ ID NO: 219976 - RNA, 19 nt, Artificial Sequence
  Description of Artificial Sequence: Synthetic oligonucleotide
aaacagaacuggaauuagg

SEQ ID NO: 219977 - RNA, 19 nt, Artificial Sequence
  Description of Artificial Sequence: Synthetic oligonucleotide
auggagaaugaacuagauc

SEQ ID NO: 219978 - RNA, 19 nt, Artificial Sequence
  Description of Artificial Sequence: Synthetic oligonucleotide
uuggguauaacaccuucgu

SEQ ID NO: 219979 - RNA, 19 nt, Artificial Sequence
  Description of Artificial Sequence: Synthetic oligonucleotide
uaucaacgcacauagcagu

SEQ ID NO: 219980 - RNA, 19 nt, Artificial Sequence
  Description of Artificial Sequence: Synthetic oligonucleotide
ugauaaaacuguuggguau

SEQ ID NO: 219981 - RNA, 19 nt, Artificial Sequence
  Description of Artificial Sequence: Synthetic oligonucleotide
uaaucaacccuucccauua

SEQ ID NO: 219982 - RNA, 19 nt, Artificial Sequence
  Description of Artificial Sequence: Synthetic oligonucleotide
agauaagcccagcauguag

SEQ ID NO: 219983 - RNA, 19 nt, Artificial Sequence
  Description of Artificial Sequence: Synthetic oligonucleotide
acuugaauccucccugauc

SEQ ID NO: 219984 - RNA, 19 nt, Artificial Sequence
  Description of Artificial Sequence: Synthetic oligonucleotide
uggguuuguagacccagag

SEQ ID NO: 219985 - RNA, 19 nt, Artificial Sequence
  Description of Artificial Sequence: Synthetic oligonucleotide
aauuucaaugcguuccauu

SEQ ID NO: 219986 - RNA, 19 nt, Artificial Sequence
  Description of Artificial Sequence: Synthetic oligonucleotide
acuuauccaauccuagaca

SEQ ID NO: 219987 - RNA, 19 nt, Artificial Sequence
  Description of Artificial Sequence: Synthetic oligonucleotide
caaugcguuccauuaacgc

SEQ ID NO: 219988 - RNA, 19 nt, Artificial Sequence
  Description of Artificial Sequence: Synthetic oligonucleotide
ucccaagauauaauuacaa

SEQ ID NO: 219989 - RNA, 19 nt, Artificial Sequence
  Description of Artificial Sequence: Synthetic oligonucleotide
  modified_base (5)..(5): a, c, u, g, unknown or other
aaagnggcagacuccacuu

SEQ ID NO: 219990 - RNA, 19 nt, Artificial Sequence
  Description of Artificial Sequence: Synthetic oligonucleotide
acuuuaagaauccccaauu

SEQ ID NO: 219991 - RNA, 19 nt, Artificial Sequence
  Description of Artificial Sequence: Synthetic oligonucleotide
ucccaaacgaaaaguggcc

SEQ ID NO: 219992 - RNA, 19 nt, Artificial Sequence
  Description of Artificial Sequence: Synthetic oligonucleotide
aggaggacgauggaauacc

SEQ ID NO: 219993 - RNA, 19 nt, Artificial Sequence
  Description of Artificial Sequence: Synthetic oligonucleotide
accuucgugaccuuuauuu

SEQ ID NO: 219994 - RNA, 19 nt, Artificial Sequence
  Description of Artificial Sequence: Synthetic oligonucleotide
aagacagucgguagaauga

SEQ ID NO: 219995 - RNA, 19 nt, Artificial Sequence
  Description of Artificial Sequence: Synthetic oligonucleotide
aaauaugccaccacuggau

SEQ ID NO: 219996 - RNA, 19 nt, Artificial Sequence
  Description of Artificial Sequence: Synthetic oligonucleotide
ucauugucggcuuucuuuc

SEQ ID NO: 219997 - RNA, 19 nt, Artificial Sequence
  Description of Artificial Sequence: Synthetic oligonucleotide
uucaaaagagaaugggaua

SEQ ID NO: 219998 - RNA, 19 nt, Artificial Sequence
  Description of Artificial Sequence: Synthetic oligonucleotide
aaacuccgcauagaaauca

SEQ ID NO: 219999 - RNA, 19 nt, Artificial Sequence
  Description of Artificial Sequence: Synthetic oligonucleotide
uccgcauagaaaucauuca

SEQ ID NO: 220000 - RNA, 19 nt, Artificial Sequence
  Description of Artificial Sequence: Synthetic oligonucleotide
aauguuggggucggguuag

SEQ ID NO: 220001 - RNA, 19 nt, Artificial Sequence
  Description of Artificial Sequence: Synthetic oligonucleotide
ugauucccaaacgaaaagu

SEQ ID NO: 220002 - RNA, 19 nt, Artificial Sequence
  Description of Artificial Sequence: Synthetic oligonucleotide
uccaauccuagacagccuc

SEQ ID NO: 220003 - RNA, 19 nt, Artificial Sequence
  Description of Artificial Sequence: Synthetic oligonucleotide
agguggaacuaccaaauau

SEQ ID NO: 220004 - RNA, 19 nt, Artificial Sequence
  Description of Artificial Sequence: Synthetic oligonucleotide
gguacagccagacuaugcc

SEQ ID NO: 220005 - RNA, 19 nt, Artificial Sequence
  Description of Artificial Sequence: Synthetic oligonucleotide
cagucuuuaucuugcgacc

SEQ ID NO: 220006 - RNA, 19 nt, Artificial Sequence
  Description of Artificial Sequence: Synthetic oligonucleotide
uggguauaacaccuucgug

SEQ ID NO: 220007 - RNA, 19 nt, Artificial Sequence
  Description of Artificial Sequence: Synthetic oligonucleotide
cuugaauccucccugaucu

SEQ ID NO: 220008 - RNA, 19 nt, Artificial Sequence
  Description of Artificial Sequence: Synthetic oligonucleotide
uuucaaugcguuccauuaa

SEQ ID NO: 220009 - RNA, 19 nt, Artificial Sequence
  Description of Artificial Sequence: Synthetic oligonucleotide
aguagaaguaacagguucu

SEQ ID NO: 220010 - RNA, 19 nt, Artificial Sequence
  Description of Artificial Sequence: Synthetic oligonucleotide
gaacuuauccaauccuaga

SEQ ID NO: 220011 - RNA, 19 nt, Artificial Sequence
  Description of Artificial Sequence: Synthetic oligonucleotide
gaauuaggagcugucccag

SEQ ID NO: 220012 - RNA, 19 nt, Artificial Sequence
  Description of Artificial Sequence: Synthetic oligonucleotide
uuaaucaggcuuucucuau

SEQ ID NO: 220013 - RNA, 19 nt, Artificial Sequence
  Description of Artificial Sequence: Synthetic oligonucleotide
gguauaacaccuucgugac

SEQ ID NO: 220014 - RNA, 19 nt, Artificial Sequence
  Description of Artificial Sequence: Synthetic oligonucleotide
gacggauuauuguuuguga

SEQ ID NO: 220015 - RNA, 19 nt, Artificial Sequence
  Description of Artificial Sequence: Synthetic oligonucleotide
ugcacuugguagagucugg

SEQ ID NO: 220016 - RNA, 19 nt, Artificial Sequence
  Description of Artificial Sequence: Synthetic oligonucleotide
cacacugaaacugaauguc

SEQ ID NO: 220017 - RNA, 19 nt, Artificial Sequence
  Description of Artificial Sequence: Synthetic oligonucleotide
uaaucaggcuuucucuauc

SEQ ID NO: 220018 - RNA, 19 nt, Artificial Sequence
  Description of Artificial Sequence: Synthetic oligonucleotide
agauuuauguuaugccaaa

SEQ ID NO: 220019 - RNA, 19 nt, Artificial Sequence
  Description of Artificial Sequence: Synthetic oligonucleotide
cugcagaguuaccaaaggc

SEQ ID NO: 220020 - RNA, 19 nt, Artificial Sequence
  Description of Artificial Sequence: Synthetic oligonucleotide
uaacuugaauccucccuga

SEQ ID NO: 220021 - RNA, 19 nt, Artificial Sequence
  Description of Artificial Sequence: Synthetic oligonucleotide
ucuaaucaacccuucccau

SEQ ID NO: 220022 - RNA, 19 nt, Artificial Sequence
  Description of Artificial Sequence: Synthetic oligonucleotide
ucaacccuucccauuaaua

SEQ ID NO: 220023 - RNA, 19 nt, Artificial Sequence
  Description of Artificial Sequence: Synthetic oligonucleotide
cuugaacuagaggaacugc

SEQ ID NO: 220024 - RNA, 19 nt, Artificial Sequence
  Description of Artificial Sequence: Synthetic oligonucleotide
auaugggauuuccguaaag

SEQ ID NO: 220025 - RNA, 19 nt, Artificial Sequence
  Description of Artificial Sequence: Synthetic oligonucleotide
gacuccacuuuaccaaaug

SEQ ID NO: 220026 - RNA, 19 nt, Artificial Sequence
  Description of Artificial Sequence: Synthetic oligonucleotide
acuugaacuagaggaacug

SEQ ID NO: 220027 - RNA, 19 nt, Artificial Sequence
  Description of Artificial Sequence: Synthetic oligonucleotide
ugacuucagauaagcccag

SEQ ID NO: 220028 - RNA, 19 nt, Artificial Sequence
  Description of Artificial Sequence: Synthetic oligonucleotide
acggauuauuguuugugaa

SEQ ID NO: 220029 - RNA, 19 nt, Artificial Sequence
  Description of Artificial Sequence: Synthetic oligonucleotide
aguugaaauuuguggugcu

SEQ ID NO: 220030 - RNA, 19 nt, Artificial Sequence
  Description of Artificial Sequence: Synthetic oligonucleotide
agagaaugggauaugggau

SEQ ID NO: 220031 - RNA, 19 nt, Artificial Sequence
  Description of Artificial Sequence: Synthetic oligonucleotide
augcuaugcacuugguaga

SEQ ID NO: 220032 - RNA, 19 nt, Artificial Sequence
  Description of Artificial Sequence: Synthetic oligonucleotide
cagauuuauguuaugccaa

SEQ ID NO: 220033 - RNA, 19 nt, Artificial Sequence
  Description of Artificial Sequence: Synthetic oligonucleotide
uccuuaguauggaccauuc

SEQ ID NO: 220034 - RNA, 19 nt, Artificial Sequence
  Description of Artificial Sequence: Synthetic oligonucleotide
gaggacaauuccaaaauua

SEQ ID NO: 220035 - RNA, 19 nt, Artificial Sequence
  Description of Artificial Sequence: Synthetic oligonucleotide
cuuuaucaacgcacauagc

SEQ ID NO: 220036 - RNA, 19 nt, Artificial Sequence
  Description of Artificial Sequence: Synthetic oligonucleotide
cagaucugacuucagauaa

SEQ ID NO: 220037 - RNA, 19 nt, Artificial Sequence
  Description of Artificial Sequence: Synthetic oligonucleotide
caaacgaaaaguggccuug

SEQ ID NO: 220038 - RNA, 19 nt, Artificial Sequence
  Description of Artificial Sequence: Synthetic oligonucleotide
accaaauaugccaccacug

SEQ ID NO: 220039 - RNA, 19 nt, Artificial Sequence
  Description of Artificial Sequence: Synthetic oligonucleotide
gucggguuagcaccaaaug

SEQ ID NO: 220040 - RNA, 19 nt, Artificial Sequence
  Description of Artificial Sequence: Synthetic oligonucleotide
agccagacuaugccaauca

SEQ ID NO: 220041 - RNA, 19 nt, Artificial Sequence
  Description of Artificial Sequence: Synthetic oligonucleotide
ugcuaugcacuugguagag

SEQ ID NO: 220042 - RNA, 19 nt, Artificial Sequence
  Description of Artificial Sequence: Synthetic oligonucleotide
auacugugugccuucacua

SEQ ID NO: 220043 - RNA, 19 nt, Artificial Sequence
  Description of Artificial Sequence: Synthetic oligonucleotide
uaguauggaccauucuuua

SEQ ID NO: 220044 - RNA, 19 nt, Artificial Sequence
  Description of Artificial Sequence: Synthetic oligonucleotide
agucgguagaaugaaaaua

SEQ ID NO: 220045 - RNA, 19 nt, Artificial Sequence
  Description of Artificial Sequence: Synthetic oligonucleotide
gucagaugaagcuccuaac

SEQ ID NO: 220046 - RNA, 19 nt, Artificial Sequence
  Description of Artificial Sequence: Synthetic oligonucleotide
cauagcagugcagacagga

SEQ ID NO: 220047 - RNA, 19 nt, Artificial Sequence
  Description of Artificial Sequence: Synthetic oligonucleotide
ucaacgcacauagcagugc

SEQ ID NO: 220048 - RNA, 19 nt, Artificial Sequence
  Description of Artificial Sequence: Synthetic oligonucleotide
ugccuucacuaugagaacu

SEQ ID NO: 220049 - RNA, 19 nt, Artificial Sequence
  Description of Artificial Sequence: Synthetic oligonucleotide
agaggacaauuccaaaauu

SEQ ID NO: 220050 - RNA, 19 nt, Artificial Sequence
  Description of Artificial Sequence: Synthetic oligonucleotide
ucgguagaaugaaaauaua

SEQ ID NO: 220051 - RNA, 19 nt, Artificial Sequence
  Description of Artificial Sequence: Synthetic oligonucleotide
cuuaguauggaccauucuu

SEQ ID NO: 220052 - RNA, 19 nt, Artificial Sequence
  Description of Artificial Sequence: Synthetic oligonucleotide
agucuuuaucuugcgacca

SEQ ID NO: 220053 - RNA, 19 nt, Artificial Sequence
  Description of Artificial Sequence: Synthetic oligonucleotide
acagucgguagaaugaaaa

SEQ ID NO: 220054 - RNA, 19 nt, Artificial Sequence
  Description of Artificial Sequence: Synthetic oligonucleotide
uuggguuuguagacccaga

SEQ ID NO: 220055 - RNA, 19 nt, Artificial Sequence
  Description of Artificial Sequence: Synthetic oligonucleotide
auaaugugcuggaucauaa

SEQ ID NO: 220056 - RNA, 19 nt, Artificial Sequence
  Description of Artificial Sequence: Synthetic oligonucleotide
uuagcaccaaaugcuggac

SEQ ID NO: 220057 - RNA, 19 nt, Artificial Sequence
  Description of Artificial Sequence: Synthetic oligonucleotide
agcagucuuuaucuugcga

SEQ ID NO: 220058 - RNA, 19 nt, Artificial Sequence
  Description of Artificial Sequence: Synthetic oligonucleotide
gaucaguuguaguauuggu

SEQ ID NO: 220059 - RNA, 19 nt, Artificial Sequence
  Description of Artificial Sequence: Synthetic oligonucleotide
uucacaugcuaugcacuug

SEQ ID NO: 220060 - RNA, 19 nt, Artificial Sequence
  Description of Artificial Sequence: Synthetic oligonucleotide
  modified_base (4)..(4): a, c, u, g, unknown or other
aagnggcagacuccacuuu

SEQ ID NO: 220061 - RNA, 19 nt, Artificial Sequence
  Description of Artificial Sequence: Synthetic oligonucleotide
uagcuccgaaacugaaccc

SEQ ID NO: 220062 - RNA, 19 nt, Artificial Sequence
  Description of Artificial Sequence: Synthetic oligonucleotide
cauugucggcuuucuuucc

SEQ ID NO: 220063 - RNA, 19 nt, Artificial Sequence
  Description of Artificial Sequence: Synthetic oligonucleotide
  modified_base (3)..(3): a, c, u, g, unknown or other
agnggcagacuccacuuua

SEQ ID NO: 220064 - RNA, 19 nt, Artificial Sequence
  Description of Artificial Sequence: Synthetic oligonucleotide
ccuuuggguuuguagaccc

SEQ ID NO: 220065 - RNA, 19 nt, Artificial Sequence
  Description of Artificial Sequence: Synthetic oligonucleotide
caaaagagaaugggauaug

SEQ ID NO: 220066 - RNA, 19 nt, Artificial Sequence
  Description of Artificial Sequence: Synthetic oligonucleotide
uccgaaacugaaccccgau

SEQ ID NO: 220067 - RNA, 19 nt, Artificial Sequence
  Description of Artificial Sequence: Synthetic oligonucleotide
gucgguagaaugaaaauau

SEQ ID NO: 220068 - RNA, 19 nt, Artificial Sequence
  Description of Artificial Sequence: Synthetic oligonucleotide
auaagcccagcauguagua

SEQ ID NO: 220069 - RNA, 19 nt, Artificial Sequence
  Description of Artificial Sequence: Synthetic oligonucleotide
agaucugacuucagauaag

SEQ ID NO: 220070 - RNA, 19 nt, Artificial Sequence
  Description of Artificial Sequence: Synthetic oligonucleotide
auguccagugccaaauaca

SEQ ID NO: 220071 - RNA, 19 nt, Artificial Sequence
  Description of Artificial Sequence: Synthetic oligonucleotide
gagaaugggauaugggauu

SEQ ID NO: 220072 - RNA, 19 nt, Artificial Sequence
  Description of Artificial Sequence: Synthetic oligonucleotide
augcguuccauuaacgcuu

SEQ ID NO: 220073 - RNA, 19 nt, Artificial Sequence
  Description of Artificial Sequence: Synthetic oligonucleotide
uaagcccagcauguaguac

SEQ ID NO: 220074 - RNA, 19 nt, Artificial Sequence
  Description of Artificial Sequence: Synthetic oligonucleotide
caauacauccaacucacuu

SEQ ID NO: 220075 - RNA, 19 nt, Artificial Sequence
  Description of Artificial Sequence: Synthetic oligonucleotide
aucaacccuucccauuaau

SEQ ID NO: 220076 - RNA, 19 nt, Artificial Sequence
  Description of Artificial Sequence: Synthetic oligonucleotide
agaaugggauaugggauuu

SEQ ID NO: 220077 - RNA, 19 nt, Artificial Sequence
  Description of Artificial Sequence: Synthetic oligonucleotide
  modified_base (2)..(2): a, c, u, g, unknown or other
gnggcagacuccacuuuac

SEQ ID NO: 220078 - RNA, 19 nt, Artificial Sequence
  Description of Artificial Sequence: Synthetic oligonucleotide
ccugacggauuauuguuug

SEQ ID NO: 220079 - RNA, 19 nt, Artificial Sequence
  Description of Artificial Sequence: Synthetic oligonucleotide
uggcgugcugggauuugca

SEQ ID NO: 220080 - RNA, 19 nt, Artificial Sequence
  Description of Artificial Sequence: Synthetic oligonucleotide
agcuccuaacuugaauccu

SEQ ID NO: 220081 - RNA, 19 nt, Artificial Sequence
  Description of Artificial Sequence: Synthetic oligonucleotide
  modified_base (6)..(6): a, c, u, g, unknown or other
caaagnggcagacuccacu

SEQ ID NO: 220082 - RNA, 19 nt, Artificial Sequence
  Description of Artificial Sequence: Synthetic oligonucleotide
aacuccgcauagaaaucau

SEQ ID NO: 220083 - RNA, 19 nt, Artificial Sequence
  Description of Artificial Sequence: Synthetic oligonucleotide
agacagucgguagaaugaa

SEQ ID NO: 220084 - RNA, 19 nt, Artificial Sequence
  Description of Artificial Sequence: Synthetic oligonucleotide
ugucggcuuucuuuccaaa

SEQ ID NO: 220085 - RNA, 19 nt, Artificial Sequence
  Description of Artificial Sequence: Synthetic oligonucleotide
gaugucccaaagccuuuaa

SEQ ID NO: 220086 - RNA, 19 nt, Artificial Sequence
  Description of Artificial Sequence: Synthetic oligonucleotide
gaaccccgaugaugcagug

SEQ ID NO: 220087 - RNA, 19 nt, Artificial Sequence
  Description of Artificial Sequence: Synthetic oligonucleotide
uugaauccucccugaucuc

SEQ ID NO: 220088 - RNA, 19 nt, Artificial Sequence
  Description of Artificial Sequence: Synthetic oligonucleotide
gucggcuuucuuuccaaaa

SEQ ID NO: 220089 - RNA, 19 nt, Artificial Sequence
  Description of Artificial Sequence: Synthetic oligonucleotide
ugcguuccauuaacgcuuu

SEQ ID NO: 220090 - RNA, 19 nt, Artificial Sequence
  Description of Artificial Sequence: Synthetic oligonucleotide
  modified_base (8)..(8): a, c, u, g, unknown or other
ggcaaagnggcagacucca

SEQ ID NO: 220091 - RNA, 19 nt, Artificial Sequence
  Description of Artificial Sequence: Synthetic oligonucleotide
guaaaugaugcuggagacu

SEQ ID NO: 220092 - RNA, 19 nt, Artificial Sequence
  Description of Artificial Sequence: Synthetic oligonucleotide
ccuucgugaccuuuauuuc

SEQ ID NO: 220093 - RNA, 19 nt, Artificial Sequence
  Description of Artificial Sequence: Synthetic oligonucleotide
aacacuccugacggauuau

SEQ ID NO: 220094 - RNA, 19 nt, Artificial Sequence
  Description of Artificial Sequence: Synthetic oligonucleotide
gcuccgaaacugaaccccg

SEQ ID NO: 220095 - RNA, 19 nt, Artificial Sequence
  Description of Artificial Sequence: Synthetic oligonucleotide
acgcuuuaucaacgcacau

SEQ ID NO: 220096 - RNA, 19 nt, Artificial Sequence
  Description of Artificial Sequence: Synthetic oligonucleotide
caauccuagacagccucca

SEQ ID NO: 220097 - RNA, 19 nt, Artificial Sequence
  Description of Artificial Sequence: Synthetic oligonucleotide
gggauaugggauuuccgua

SEQ ID NO: 220098 - RNA, 19 nt, Artificial Sequence
  Description of Artificial Sequence: Synthetic oligonucleotide
uugguagagucugguuuau

SEQ ID NO: 220099 - RNA, 19 nt, Artificial Sequence
  Description of Artificial Sequence: Synthetic oligonucleotide
caguccauuucaguaaaua

SEQ ID NO: 220100 - RNA, 19 nt, Artificial Sequence
  Description of Artificial Sequence: Synthetic oligonucleotide
cuaaucaacccuucccauu

SEQ ID NO: 220101 - RNA, 19 nt, Artificial Sequence
  Description of Artificial Sequence: Synthetic oligonucleotide
caaauguuggggucggguu

SEQ ID NO: 220102 - RNA, 19 nt, Artificial Sequence
  Description of Artificial Sequence: Synthetic oligonucleotide
gacagucgguagaaugaaa

SEQ ID NO: 220103 - RNA, 19 nt, Artificial Sequence
  Description of Artificial Sequence: Synthetic oligonucleotide
caaaguccucuaaucuaua

SEQ ID NO: 220104 - RNA, 19 nt, Artificial Sequence
  Description of Artificial Sequence: Synthetic oligonucleotide
ugcuaucuugagggaagua

SEQ ID NO: 220105 - RNA, 19 nt, Artificial Sequence
  Description of Artificial Sequence: Synthetic oligonucleotide
gccuucacuaugagaacug

SEQ ID NO: 220106 - RNA, 19 nt, Artificial Sequence
  Description of Artificial Sequence: Synthetic oligonucleotide
ccucuaaucuauaucuaua

SEQ ID NO: 220107 - RNA, 19 nt, Artificial Sequence
  Description of Artificial Sequence: Synthetic oligonucleotide
gcuccuaacuugaauccuc

SEQ ID NO: 220108 - RNA, 19 nt, Artificial Sequence
  Description of Artificial Sequence: Synthetic oligonucleotide
cagacugacuaggcugcug

SEQ ID NO: 220109 - RNA, 19 nt, Artificial Sequence
  Description of Artificial Sequence: Synthetic oligonucleotide
auccaauccuagacagccu

SEQ ID NO: 220110 - RNA, 19 nt, Artificial Sequence
  Description of Artificial Sequence: Synthetic oligonucleotide
cuccugacggauuauuguu

SEQ ID NO: 220111 - RNA, 19 nt, Artificial Sequence
  Description of Artificial Sequence: Synthetic oligonucleotide
auacccuuugggauuucua

SEQ ID NO: 220112 - RNA, 19 nt, Artificial Sequence
  Description of Artificial Sequence: Synthetic oligonucleotide
cuccgaaacugaaccccga

SEQ ID NO: 220113 - RNA, 19 nt, Artificial Sequence
  Description of Artificial Sequence: Synthetic oligonucleotide
gaaugucggcuuggaagaa

SEQ ID NO: 220114 - RNA, 19 nt, Artificial Sequence
  Description of Artificial Sequence: Synthetic oligonucleotide
ggcaagacagucgguagaa

SEQ ID NO: 220115 - RNA, 19 nt, Artificial Sequence
  Description of Artificial Sequence: Synthetic oligonucleotide
ccuaacuugaauccucccu

SEQ ID NO: 220116 - RNA, 19 nt, Artificial Sequence
  Description of Artificial Sequence: Synthetic oligonucleotide
cagucgguagaaugaaaau

SEQ ID NO: 220117 - RNA, 19 nt, Artificial Sequence
  Description of Artificial Sequence: Synthetic oligonucleotide
gaauaaugugcuggaucau

SEQ ID NO: 220118 - RNA, 19 nt, Artificial Sequence
  Description of Artificial Sequence: Synthetic oligonucleotide
cuggugcacuugaacuaga

SEQ ID NO: 220119 - RNA, 19 nt, Artificial Sequence
  Description of Artificial Sequence: Synthetic oligonucleotide
cuggguacagccagacuau

SEQ ID NO: 220120 - RNA, 19 nt, Artificial Sequence
  Description of Artificial Sequence: Synthetic oligonucleotide
agacuccacuuuaccaaau

SEQ ID NO: 220121 - RNA, 19 nt, Artificial Sequence
  Description of Artificial Sequence: Synthetic oligonucleotide
guccucuaaucuauaucua

SEQ ID NO: 220122 - RNA, 19 nt, Artificial Sequence
  Description of Artificial Sequence: Synthetic oligonucleotide
ggguuuguagacccagagu

SEQ ID NO: 220123 - RNA, 19 nt, Artificial Sequence
  Description of Artificial Sequence: Synthetic oligonucleotide
ugguagagucugguuuauu

SEQ ID NO: 220124 - RNA, 19 nt, Artificial Sequence
  Description of Artificial Sequence: Synthetic oligonucleotide
caccuugaucaguuguagu

SEQ ID NO: 220125 - RNA, 19 nt, Artificial Sequence
  Description of Artificial Sequence: Synthetic oligonucleotide
ccagacuaugccaaucagu

SEQ ID NO: 220126 - RNA, 19 nt, Artificial Sequence
  Description of Artificial Sequence: Synthetic oligonucleotide
caaauggauuuaggcaacu

SEQ ID NO: 220127 - RNA, 19 nt, Artificial Sequence
  Description of Artificial Sequence: Synthetic oligonucleotide
  modified_base (7)..(7): a, c, u, g, unknown or other
gcaaagnggcagacuccac

SEQ ID NO: 220128 - RNA, 19 nt, Artificial Sequence
  Description of Artificial Sequence: Synthetic oligonucleotide
cauucaccgugcaggcucu

SEQ ID NO: 220129 - RNA, 19 nt, Artificial Sequence
  Description of Artificial Sequence: Synthetic oligonucleotide
ggcuugcuaucuugaggga

SEQ ID NO: 220130 - RNA, 19 nt, Artificial Sequence
  Description of Artificial Sequence: Synthetic oligonucleotide
ccgcauagaaaucauucau

SEQ ID NO: 220131 - RNA, 19 nt, Artificial Sequence
  Description of Artificial Sequence: Synthetic oligonucleotide
guccuuaguauggaccauu

SEQ ID NO: 220132 - RNA, 19 nt, Artificial Sequence
  Description of Artificial Sequence: Synthetic oligonucleotide
cacaugcuaugcacuuggu

SEQ ID NO: 220133 - RNA, 19 nt, Artificial Sequence
  Description of Artificial Sequence: Synthetic oligonucleotide
ggaucuauacaaagccauu

SEQ ID NO: 220134 - RNA, 19 nt, Artificial Sequence
  Description of Artificial Sequence: Synthetic oligonucleotide
ggucggguuagcaccaaau

SEQ ID NO: 220135 - RNA, 19 nt, Artificial Sequence
  Description of Artificial Sequence: Synthetic oligonucleotide
ccuuaguauggaccauucu

SEQ ID NO: 220136 - RNA, 19 nt, Artificial Sequence
  Description of Artificial Sequence: Synthetic oligonucleotide
auucaccgugcaggcucua

SEQ ID NO: 220137 - RNA, 19 nt, Artificial Sequence
  Description of Artificial Sequence: Synthetic oligonucleotide
gcguuccauuaacgcuuua

SEQ ID NO: 220138 - RNA, 19 nt, Artificial Sequence
  Description of Artificial Sequence: Synthetic oligonucleotide
aucuuagcuaaacagaacc

SEQ ID NO: 220139 - RNA, 19 nt, Artificial Sequence
  Description of Artificial Sequence: Synthetic oligonucleotide
uauacaaacagccagugga

SEQ ID NO: 220140 - RNA, 19 nt, Artificial Sequence
  Description of Artificial Sequence: Synthetic oligonucleotide
aauugaaggacucucagcu

SEQ ID NO: 220141 - RNA, 19 nt, Artificial Sequence
  Description of Artificial Sequence: Synthetic oligonucleotide
uuauaucccacauuuaggg

SEQ ID NO: 220142 - RNA, 19 nt, Artificial Sequence
  Description of Artificial Sequence: Synthetic oligonucleotide
uuuaggggcucauagaugg

SEQ ID NO: 220143 - RNA, 19 nt, Artificial Sequence
  Description of Artificial Sequence: Synthetic oligonucleotide
auaucccacauuuaggggc

SEQ ID NO: 220144 - RNA, 19 nt, Artificial Sequence
  Description of Artificial Sequence: Synthetic oligonucleotide
ucuaacaugagcauuggac

SEQ ID NO: 220145 - RNA, 19 nt, Artificial Sequence
  Description of Artificial Sequence: Synthetic oligonucleotide
auaacuagagaguauacug

SEQ ID NO: 220146 - RNA, 19 nt, Artificial Sequence
  Description of Artificial Sequence: Synthetic oligonucleotide
aacuagagaguauacugcg

SEQ ID NO: 220147 - RNA, 19 nt, Artificial Sequence
  Description of Artificial Sequence: Synthetic oligonucleotide
uuuggauaguacauuagag

SEQ ID NO: 220148 - RNA, 19 nt, Artificial Sequence
  Description of Artificial Sequence: Synthetic oligonucleotide
auuguaacuacccucguag

SEQ ID NO: 220149 - RNA, 19 nt, Artificial Sequence
  Description of Artificial Sequence: Synthetic oligonucleotide
cauuaucaugauaaaaugg

SEQ ID NO: 220150 - RNA, 19 nt, Artificial Sequence
  Description of Artificial Sequence: Synthetic oligonucleotide
cucauuuaauguuaaaggc

SEQ ID NO: 220151 - RNA, 19 nt, Artificial Sequence
  Description of Artificial Sequence: Synthetic oligonucleotide
cuaacaugagcauuggacc

SEQ ID NO: 220152 - RNA, 19 nt, Artificial Sequence
  Description of Artificial Sequence: Synthetic oligonucleotide
cauauaaugagcugggaug

SEQ ID NO: 220153 - RNA, 19 nt, Artificial Sequence
  Description of Artificial Sequence: Synthetic oligonucleotide
acuacagcagaucaacugg

SEQ ID NO: 220154 - RNA, 19 nt, Artificial Sequence
  Description of Artificial Sequence: Synthetic oligonucleotide
uuaucaugauaaaauggag

SEQ ID NO: 220155 - RNA, 19 nt, Artificial Sequence
  Description of Artificial Sequence: Synthetic oligonucleotide
uuuuggauaguacauuaga

SEQ ID NO: 220156 - RNA, 19 nt, Artificial Sequence
  Description of Artificial Sequence: Synthetic oligonucleotide
ucauuugagccaaagcugc

SEQ ID NO: 220157 - RNA, 19 nt, Artificial Sequence
  Description of Artificial Sequence: Synthetic oligonucleotide
aacuacagcagaucaacug

SEQ ID NO: 220158 - RNA, 19 nt, Artificial Sequence
  Description of Artificial Sequence: Synthetic oligonucleotide
aacaacgaagcagcaaugc

SEQ ID NO: 220159 - RNA, 19 nt, Artificial Sequence
  Description of Artificial Sequence: Synthetic oligonucleotide
ugggaagauucccacaugg

SEQ ID NO: 220160 - RNA, 19 nt, Artificial Sequence
  Description of Artificial Sequence: Synthetic oligonucleotide
acaaacagccaguggaacc

SEQ ID NO: 220161 - RNA, 19 nt, Artificial Sequence
  Description of Artificial Sequence: Synthetic oligonucleotide
ugacauauaggcuucccag

SEQ ID NO: 220162 - RNA, 19 nt, Artificial Sequence
  Description of Artificial Sequence: Synthetic oligonucleotide
aacgacaacaacgaagcag

SEQ ID NO: 220163 - RNA, 19 nt, Artificial Sequence
  Description of Artificial Sequence: Synthetic oligonucleotide
cugacuuugggaaacuacg

SEQ ID NO: 220164 - RNA, 19 nt, Artificial Sequence
  Description of Artificial Sequence: Synthetic oligonucleotide
uguaccugcguccugcagg

SEQ ID NO: 220165 - RNA, 19 nt, Artificial Sequence
  Description of Artificial Sequence: Synthetic oligonucleotide
uguaagcaaaguaacgaca

SEQ ID NO: 220166 - RNA, 19 nt, Artificial Sequence
  Description of Artificial Sequence: Synthetic oligonucleotide
uaacuagagaguauacugc

SEQ ID NO: 220167 - RNA, 19 nt, Artificial Sequence
  Description of Artificial Sequence: Synthetic oligonucleotide
uacgauguguucugaaugg

SEQ ID NO: 220168 - RNA, 19 nt, Artificial Sequence
  Description of Artificial Sequence: Synthetic oligonucleotide
aaaguaacgacaacaacga

SEQ ID NO: 220169 - RNA, 19 nt, Artificial Sequence
  Description of Artificial Sequence: Synthetic oligonucleotide
gaauagucacauucaaucc

SEQ ID NO: 220170 - RNA, 19 nt, Artificial Sequence
  Description of Artificial Sequence: Synthetic oligonucleotide
agaacuacagcagaucaac

SEQ ID NO: 220171 - RNA, 19 nt, Artificial Sequence
  Description of Artificial Sequence: Synthetic oligonucleotide
uauacugcguugaaaugag

SEQ ID NO: 220172 - RNA, 19 nt, Artificial Sequence
  Description of Artificial Sequence: Synthetic oligonucleotide
uggaaguuucauauaauga

SEQ ID NO: 220173 - RNA, 19 nt, Artificial Sequence
  Description of Artificial Sequence: Synthetic oligonucleotide
ucugaaguucguuugguug

SEQ ID NO: 220174 - RNA, 19 nt, Artificial Sequence
  Description of Artificial Sequence: Synthetic oligonucleotide
gucuaucuuagcuaaacag

SEQ ID NO: 220175 - RNA, 19 nt, Artificial Sequence
  Description of Artificial Sequence: Synthetic oligonucleotide
ucucgcuuuucaaauaaag

SEQ ID NO: 220176 - RNA, 19 nt, Artificial Sequence
  Description of Artificial Sequence: Synthetic oligonucleotide
aguagcauuaucaugauaa

SEQ ID NO: 220177 - RNA, 19 nt, Artificial Sequence
  Description of Artificial Sequence: Synthetic oligonucleotide
acgaauggcacuuggcagc

SEQ ID NO: 220178 - RNA, 19 nt, Artificial Sequence
  Description of Artificial Sequence: Synthetic oligonucleotide
auuagaguguucuugaaua

SEQ ID NO: 220179 - RNA, 19 nt, Artificial Sequence
  Description of Artificial Sequence: Synthetic oligonucleotide
cucgcuguucauuugagcc

SEQ ID NO: 220180 - RNA, 19 nt, Artificial Sequence
  Description of Artificial Sequence: Synthetic oligonucleotide
aaaggguuauuauuuagua

SEQ ID NO: 220181 - RNA, 19 nt, Artificial Sequence
  Description of Artificial Sequence: Synthetic oligonucleotide
uuggauaguacauuagagu

SEQ ID NO: 220182 - RNA, 19 nt, Artificial Sequence
  Description of Artificial Sequence: Synthetic oligonucleotide
cauuuaauguuaaaggcca

SEQ ID NO: 220183 - RNA, 19 nt, Artificial Sequence
  Description of Artificial Sequence: Synthetic oligonucleotide
uuugugguagucuuucccc

SEQ ID NO: 220184 - RNA, 19 nt, Artificial Sequence
  Description of Artificial Sequence: Synthetic oligonucleotide
ugcguugaaaugaggaugc

SEQ ID NO: 220185 - RNA, 19 nt, Artificial Sequence
  Description of Artificial Sequence: Synthetic oligonucleotide
ugagauaaugcugacuuug

SEQ ID NO: 220186 - RNA, 19 nt, Artificial Sequence
  Description of Artificial Sequence: Synthetic oligonucleotide
aaagaguaggucucuccag

SEQ ID NO: 220187 - RNA, 19 nt, Artificial Sequence
  Description of Artificial Sequence: Synthetic oligonucleotide
uguuaaaggccaucagggg

SEQ ID NO: 220188 - RNA, 19 nt, Artificial Sequence
  Description of Artificial Sequence: Synthetic oligonucleotide
ucuuagcuaaacagaaccc

SEQ ID NO: 220189 - RNA, 19 nt, Artificial Sequence
  Description of Artificial Sequence: Synthetic oligonucleotide
uucguucauauccacacca

SEQ ID NO: 220190 - RNA, 19 nt, Artificial Sequence
  Description of Artificial Sequence: Synthetic oligonucleotide
uauaucccacauuuagggg

SEQ ID NO: 220191 - RNA, 19 nt, Artificial Sequence
  Description of Artificial Sequence: Synthetic oligonucleotide
uuuggcaauuuuauauccc

SEQ ID NO: 220192 - RNA, 19 nt, Artificial Sequence
  Description of Artificial Sequence: Synthetic oligonucleotide
ucuagucuaucuuagcuaa

SEQ ID NO: 220193 - RNA, 19 nt, Artificial Sequence
  Description of Artificial Sequence: Synthetic oligonucleotide
uagaugauaagagacgaca

SEQ ID NO: 220194 - RNA, 19 nt, Artificial Sequence
  Description of Artificial Sequence: Synthetic oligonucleotide
aguucguuugguugucucc

SEQ ID NO: 220195 - RNA, 19 nt, Artificial Sequence
  Description of Artificial Sequence: Synthetic oligonucleotide
uguucauuugagccaaagc

SEQ ID NO: 220196 - RNA, 19 nt, Artificial Sequence
  Description of Artificial Sequence: Synthetic oligonucleotide
ucauauaaugagcugggau

SEQ ID NO: 220197 - RNA, 19 nt, Artificial Sequence
  Description of Artificial Sequence: Synthetic oligonucleotide
augauaagagacgacacag

SEQ ID NO: 220198 - RNA, 19 nt, Artificial Sequence
  Description of Artificial Sequence: Synthetic oligonucleotide
agaauugaaggacucucag

SEQ ID NO: 220199 - RNA, 19 nt, Artificial Sequence
  Description of Artificial Sequence: Synthetic oligonucleotide
guaugaaugucuaacauga

SEQ ID NO: 220200 - RNA, 19 nt, Artificial Sequence
  Description of Artificial Sequence: Synthetic oligonucleotide
gauuaucaaaagauguuug

SEQ ID NO: 220201 - RNA, 19 nt, Artificial Sequence
  Description of Artificial Sequence: Synthetic oligonucleotide
acuacccucguagucaucc

SEQ ID NO: 220202 - RNA, 19 nt, Artificial Sequence
  Description of Artificial Sequence: Synthetic oligonucleotide
uacugcguugaaaugagga

SEQ ID NO: 220203 - RNA, 19 nt, Artificial Sequence
  Description of Artificial Sequence: Synthetic oligonucleotide
uuagaguguucuugaauag

SEQ ID NO: 220204 - RNA, 19 nt, Artificial Sequence
  Description of Artificial Sequence: Synthetic oligonucleotide
agaucaauguaugaauguc

SEQ ID NO: 220205 - RNA, 19 nt, Artificial Sequence
  Description of Artificial Sequence: Synthetic oligonucleotide
aaaaggguuauuauuuagu

SEQ ID NO: 220206 - RNA, 19 nt, Artificial Sequence
  Description of Artificial Sequence: Synthetic oligonucleotide
acuguggucccacacucgc

SEQ ID NO: 220207 - RNA, 19 nt, Artificial Sequence
  Description of Artificial Sequence: Synthetic oligonucleotide
cuggaaguuucauauaaug

SEQ ID NO: 220208 - RNA, 19 nt, Artificial Sequence
  Description of Artificial Sequence: Synthetic oligonucleotide
guuaaugggaccagaauug

SEQ ID NO: 220209 - RNA, 19 nt, Artificial Sequence
  Description of Artificial Sequence: Synthetic oligonucleotide
gacagagacucugacauag

SEQ ID NO: 220210 - RNA, 19 nt, Artificial Sequence
  Description of Artificial Sequence: Synthetic oligonucleotide
agcugcaucauucagggau

SEQ ID NO: 220211 - RNA, 19 nt, Artificial Sequence
  Description of Artificial Sequence: Synthetic oligonucleotide
ggaccuuccaucuagggag

SEQ ID NO: 220212 - RNA, 19 nt, Artificial Sequence
  Description of Artificial Sequence: Synthetic oligonucleotide
ccagaguuaauacauaacc

SEQ ID NO: 220213 - RNA, 19 nt, Artificial Sequence
  Description of Artificial Sequence: Synthetic oligonucleotide
guucauuugagccaaagcu

SEQ ID NO: 220214 - RNA, 19 nt, Artificial Sequence
  Description of Artificial Sequence: Synthetic oligonucleotide
agcauuguaacuacccucg

SEQ ID NO: 220215 - RNA, 19 nt, Artificial Sequence
  Description of Artificial Sequence: Synthetic oligonucleotide
ucuacaguguccucuaguc

SEQ ID NO: 220216 - RNA, 19 nt, Artificial Sequence
  Description of Artificial Sequence: Synthetic oligonucleotide
gaauugaaggacucucagc

SEQ ID NO: 220217 - RNA, 19 nt, Artificial Sequence
  Description of Artificial Sequence: Synthetic oligonucleotide
ggaagauucccacaugggg

SEQ ID NO: 220218 - RNA, 19 nt, Artificial Sequence
  Description of Artificial Sequence: Synthetic oligonucleotide
cuauaggagagcuucagca

SEQ ID NO: 220219 - RNA, 19 nt, Artificial Sequence
  Description of Artificial Sequence: Synthetic oligonucleotide
aaguucguuugguugucuc

SEQ ID NO: 220220 - RNA, 19 nt, Artificial Sequence
  Description of Artificial Sequence: Synthetic oligonucleotide
ugacauagaugcauucuga

SEQ ID NO: 220221 - RNA, 19 nt, Artificial Sequence
  Description of Artificial Sequence: Synthetic oligonucleotide
aaggguuauuauuuaguaa

SEQ ID NO: 220222 - RNA, 19 nt, Artificial Sequence
  Description of Artificial Sequence: Synthetic oligonucleotide
gaugcauucugagagcccc

SEQ ID NO: 220223 - RNA, 19 nt, Artificial Sequence
  Description of Artificial Sequence: Synthetic oligonucleotide
gaugauaagagacgacaca

SEQ ID NO: 220224 - RNA, 19 nt, Artificial Sequence
  Description of Artificial Sequence: Synthetic oligonucleotide
uaguacauuagaguguucu

SEQ ID NO: 220225 - RNA, 19 nt, Artificial Sequence
  Description of Artificial Sequence: Synthetic oligonucleotide
ccuauauacaaacagccag

SEQ ID NO: 220226 - RNA, 19 nt, Artificial Sequence
  Description of Artificial Sequence: Synthetic oligonucleotide
gaacccacauuacacauga

SEQ ID NO: 220227 - RNA, 19 nt, Artificial Sequence
  Description of Artificial Sequence: Synthetic oligonucleotide
agaucaacuggccuggccu

SEQ ID NO: 220228 - RNA, 19 nt, Artificial Sequence
  Description of Artificial Sequence: Synthetic oligonucleotide
auaggagagcuucagcaug

SEQ ID NO: 220229 - RNA, 19 nt, Artificial Sequence
  Description of Artificial Sequence: Synthetic oligonucleotide
auaaaacugagggacuguc

SEQ ID NO: 220230 - RNA, 19 nt, Artificial Sequence
  Description of Artificial Sequence: Synthetic oligonucleotide
uuaauuccuuucugcaccc

SEQ ID NO: 220231 - RNA, 19 nt, Artificial Sequence
  Description of Artificial Sequence: Synthetic oligonucleotide
ugcauagcuuuucuuugag

SEQ ID NO: 220232 - RNA, 19 nt, Artificial Sequence
  Description of Artificial Sequence: Synthetic oligonucleotide
uggagaucaauguaugaau

SEQ ID NO: 220233 - RNA, 19 nt, Artificial Sequence
  Description of Artificial Sequence: Synthetic oligonucleotide
ugauaacuagagaguauac

SEQ ID NO: 220234 - RNA, 19 nt, Artificial Sequence
  Description of Artificial Sequence: Synthetic oligonucleotide
cuuuuggauaguacauuag

SEQ ID NO: 220235 - RNA, 19 nt, Artificial Sequence
  Description of Artificial Sequence: Synthetic oligonucleotide
agcuaaauuccugugaggu

SEQ ID NO: 220236 - RNA, 19 nt, Artificial Sequence
  Description of Artificial Sequence: Synthetic oligonucleotide
ugauaagagacgacacaga

SEQ ID NO: 220237 - RNA, 19 nt, Artificial Sequence
  Description of Artificial Sequence: Synthetic oligonucleotide
acacgaguuguguguaggc

SEQ ID NO: 220238 - RNA, 19 nt, Artificial Sequence
  Description of Artificial Sequence: Synthetic oligonucleotide
uggugucagauuaucaaaa

SEQ ID NO: 220239 - RNA, 19 nt, Artificial Sequence
  Description of Artificial Sequence: Synthetic oligonucleotide
uguggucccacacucgcug

SEQ ID NO: 220240 - RNA, 19 nt, Artificial Sequence
  Description of Artificial Sequence: Synthetic oligonucleotide
uuuggagaucaauguauga

SEQ ID NO: 220241 - RNA, 19 nt, Artificial Sequence
  Description of Artificial Sequence: Synthetic oligonucleotide
auauaaugagcugggauga

SEQ ID NO: 220242 - RNA, 19 nt, Artificial Sequence
  Description of Artificial Sequence: Synthetic oligonucleotide
auuucuaagugcaccccgc

SEQ ID NO: 220243 - RNA, 19 nt, Artificial Sequence
  Description of Artificial Sequence: Synthetic oligonucleotide
uuagaugauaagagacgac

SEQ ID NO: 220244 - RNA, 19 nt, Artificial Sequence
  Description of Artificial Sequence: Synthetic oligonucleotide
caggauagucugaugcucg

SEQ ID NO: 220245 - RNA, 19 nt, Artificial Sequence
  Description of Artificial Sequence: Synthetic oligonucleotide
uuccugugagguacuauag

SEQ ID NO: 220246 - RNA, 19 nt, Artificial Sequence
  Description of Artificial Sequence: Synthetic oligonucleotide
cauuggaccuuccaucuag

SEQ ID NO: 220247 - RNA, 19 nt, Artificial Sequence
  Description of Artificial Sequence: Synthetic oligonucleotide
cuaucuuagcuaaacagaa

SEQ ID NO: 220248 - RNA, 19 nt, Artificial Sequence
  Description of Artificial Sequence: Synthetic oligonucleotide
ggagcuaaauuccugugag

SEQ ID NO: 220249 - RNA, 19 nt, Artificial Sequence
  Description of Artificial Sequence: Synthetic oligonucleotide
gagauaaugcugacuuugg

SEQ ID NO: 220250 - RNA, 19 nt, Artificial Sequence
  Description of Artificial Sequence: Synthetic oligonucleotide
aguauacugcguugaaaug

SEQ ID NO: 220251 - RNA, 19 nt, Artificial Sequence
  Description of Artificial Sequence: Synthetic oligonucleotide
auucccguguaccugcguc

SEQ ID NO: 220252 - RNA, 19 nt, Artificial Sequence
  Description of Artificial Sequence: Synthetic oligonucleotide
aucauuggcagaccuucuc

SEQ ID NO: 220253 - RNA, 19 nt, Artificial Sequence
  Description of Artificial Sequence: Synthetic oligonucleotide
gaaggugcgggguacgaug

SEQ ID NO: 220254 - RNA, 19 nt, Artificial Sequence
  Description of Artificial Sequence: Synthetic oligonucleotide
uuggagaucaauguaugaa

SEQ ID NO: 220255 - RNA, 19 nt, Artificial Sequence
  Description of Artificial Sequence: Synthetic oligonucleotide
uggaccuuccaucuaggga

SEQ ID NO: 220256 - RNA, 19 nt, Artificial Sequence
  Description of Artificial Sequence: Synthetic oligonucleotide
gaaacuacgugccacccaa

SEQ ID NO: 220257 - RNA, 19 nt, Artificial Sequence
  Description of Artificial Sequence: Synthetic oligonucleotide
uggcuaguggccaaaggga

SEQ ID NO: 220258 - RNA, 19 nt, Artificial Sequence
  Description of Artificial Sequence: Synthetic oligonucleotide
acauagaugcauucugaga

SEQ ID NO: 220259 - RNA, 19 nt, Artificial Sequence
  Description of Artificial Sequence: Synthetic oligonucleotide
uuccgauacacacugucau

SEQ ID NO: 220260 - RNA, 19 nt, Artificial Sequence
  Description of Artificial Sequence: Synthetic oligonucleotide
acagaacccacauuacaca

SEQ ID NO: 220261 - RNA, 19 nt, Artificial Sequence
  Description of Artificial Sequence: Synthetic oligonucleotide
agcaauaccacaugugguu

SEQ ID NO: 220262 - RNA, 19 nt, Artificial Sequence
  Description of Artificial Sequence: Synthetic oligonucleotide
uuucuaagugcaccccgcc

SEQ ID NO: 220263 - RNA, 19 nt, Artificial Sequence
  Description of Artificial Sequence: Synthetic oligonucleotide
acugauuugugguagucuu

SEQ ID NO: 220264 - RNA, 19 nt, Artificial Sequence
  Description of Artificial Sequence: Synthetic oligonucleotide
guacauuagaguguucuug

SEQ ID NO: 220265 - RNA, 19 nt, Artificial Sequence
  Description of Artificial Sequence: Synthetic oligonucleotide
cacuuuccgauacacacug

SEQ ID NO: 220266 - RNA, 19 nt, Artificial Sequence
  Description of Artificial Sequence: Synthetic oligonucleotide
uuuaauguuaaaggccauc

SEQ ID NO: 220267 - RNA, 19 nt, Artificial Sequence
  Description of Artificial Sequence: Synthetic oligonucleotide
ucaauccccuugcucagcc

SEQ ID NO: 220268 - RNA, 19 nt, Artificial Sequence
  Description of Artificial Sequence: Synthetic oligonucleotide
uauaggagagcuucagcau

SEQ ID NO: 220269 - RNA, 19 nt, Artificial Sequence
  Description of Artificial Sequence: Synthetic oligonucleotide
guguaagcaaaguaacgac

SEQ ID NO: 220270 - RNA, 19 nt, Artificial Sequence
  Description of Artificial Sequence: Synthetic oligonucleotide
ucguucauauccacaccag

SEQ ID NO: 220271 - RNA, 19 nt, Artificial Sequence
  Description of Artificial Sequence: Synthetic oligonucleotide
acgaguuguguguaggcug

SEQ ID NO: 220272 - RNA, 19 nt, Artificial Sequence
  Description of Artificial Sequence: Synthetic oligonucleotide
aaggcugggagagcauagc

SEQ ID NO: 220273 - RNA, 19 nt, Artificial Sequence
  Description of Artificial Sequence: Synthetic oligonucleotide
gguacuauaggagagcuuc

SEQ ID NO: 220274 - RNA, 19 nt, Artificial Sequence
  Description of Artificial Sequence: Synthetic oligonucleotide
agaaaggauauuuggcaau

SEQ ID NO: 220275 - RNA, 19 nt, Artificial Sequence
  Description of Artificial Sequence: Synthetic oligonucleotide
uacacgaguuguguguagg

SEQ ID NO: 220276 - RNA, 19 nt, Artificial Sequence
  Description of Artificial Sequence: Synthetic oligonucleotide
gagcuaaauuccugugagg

SEQ ID NO: 220277 - RNA, 19 nt, Artificial Sequence
  Description of Artificial Sequence: Synthetic oligonucleotide
cuacgugccacccaauuuc

SEQ ID NO: 220278 - RNA, 19 nt, Artificial Sequence
  Description of Artificial Sequence: Synthetic oligonucleotide
cacgaauggcacuuggcag

SEQ ID NO: 220279 - RNA, 19 nt, Artificial Sequence
  Description of Artificial Sequence: Synthetic oligonucleotide
cuuagaugauaagagacga

SEQ ID NO: 220280 - RNA, 19 nt, Artificial Sequence
  Description of Artificial Sequence: Synthetic oligonucleotide
guauacugcguugaaauga

SEQ ID NO: 220281 - RNA, 19 nt, Artificial Sequence
  Description of Artificial Sequence: Synthetic oligonucleotide
uucuaagugcaccccgccc

SEQ ID NO: 220282 - RNA, 19 nt, Artificial Sequence
  Description of Artificial Sequence: Synthetic oligonucleotide
uagucuaucuuagcuaaac

SEQ ID NO: 220283 - RNA, 19 nt, Artificial Sequence
  Description of Artificial Sequence: Synthetic oligonucleotide
uacuauaggagagcuucag

SEQ ID NO: 220284 - RNA, 19 nt, Artificial Sequence
  Description of Artificial Sequence: Synthetic oligonucleotide
augacauauaggcuuccca

SEQ ID NO: 220285 - RNA, 19 nt, Artificial Sequence
  Description of Artificial Sequence: Synthetic oligonucleotide
uuggaccuuccaucuaggg

SEQ ID NO: 220286 - RNA, 19 nt, Artificial Sequence
  Description of Artificial Sequence: Synthetic oligonucleotide
aagccuaaccaaagcaaag

SEQ ID NO: 220287 - RNA, 19 nt, Artificial Sequence
  Description of Artificial Sequence: Synthetic oligonucleotide
agucuaucuuagcuaaaca

SEQ ID NO: 220288 - RNA, 19 nt, Artificial Sequence
  Description of Artificial Sequence: Synthetic oligonucleotide
gagcauuggaccuuccauc

SEQ ID NO: 220289 - RNA, 19 nt, Artificial Sequence
  Description of Artificial Sequence: Synthetic oligonucleotide
ugagguacuauaggagagc

SEQ ID NO: 220290 - RNA, 19 nt, Artificial Sequence
  Description of Artificial Sequence: Synthetic oligonucleotide
agguacacgaguugugugu

SEQ ID NO: 220291 - RNA, 19 nt, Artificial Sequence
  Description of Artificial Sequence: Synthetic oligonucleotide
uuaaugggaccagaauuga

SEQ ID NO: 220292 - RNA, 19 nt, Artificial Sequence
  Description of Artificial Sequence: Synthetic oligonucleotide
gcuuagaugauaagagacg

SEQ ID NO: 220293 - RNA, 19 nt, Artificial Sequence
  Description of Artificial Sequence: Synthetic oligonucleotide
aguaagagcuucacaguag

SEQ ID NO: 220294 - RNA, 19 nt, Artificial Sequence
  Description of Artificial Sequence: Synthetic oligonucleotide
caucuagggagacaaacca

SEQ ID NO: 220295 - RNA, 19 nt, Artificial Sequence
  Description of Artificial Sequence: Synthetic oligonucleotide
ugggaaacuacgugccacc

SEQ ID NO: 220296 - RNA, 19 nt, Artificial Sequence
  Description of Artificial Sequence: Synthetic oligonucleotide
gaucucgcuuuucaaauaa

SEQ ID NO: 220297 - RNA, 19 nt, Artificial Sequence
  Description of Artificial Sequence: Synthetic oligonucleotide
ucaauguaugaaugucuaa

SEQ ID NO: 220298 - RNA, 19 nt, Artificial Sequence
  Description of Artificial Sequence: Synthetic oligonucleotide
guagucuuuccccagcguc

SEQ ID NO: 220299 - RNA, 19 nt, Artificial Sequence
  Description of Artificial Sequence: Synthetic oligonucleotide
ggagaaugcacagaagagc

SEQ ID NO: 220300 - RNA, 19 nt, Artificial Sequence
  Description of Artificial Sequence: Synthetic oligonucleotide
agcagaucaacuggccugg

SEQ ID NO: 220301 - RNA, 19 nt, Artificial Sequence
  Description of Artificial Sequence: Synthetic oligonucleotide
agauggcucauuuaauguu

SEQ ID NO: 220302 - RNA, 19 nt, Artificial Sequence
  Description of Artificial Sequence: Synthetic oligonucleotide
ucguuugguugucuccucc

SEQ ID NO: 220303 - RNA, 19 nt, Artificial Sequence
  Description of Artificial Sequence: Synthetic oligonucleotide
uacgugccacccaauuucc

SEQ ID NO: 220304 - RNA, 19 nt, Artificial Sequence
  Description of Artificial Sequence: Synthetic oligonucleotide
cagcagaucaacuggccug

SEQ ID NO: 220305 - RNA, 19 nt, Artificial Sequence
  Description of Artificial Sequence: Synthetic oligonucleotide
guuaaaggccaucaggggu

SEQ ID NO: 220306 - RNA, 19 nt, Artificial Sequence
  Description of Artificial Sequence: Synthetic oligonucleotide
cauagcuuuucuuugagau

SEQ ID NO: 220307 - RNA, 19 nt, Artificial Sequence
  Description of Artificial Sequence: Synthetic oligonucleotide
gugucagauuaucaaaaga

SEQ ID NO: 220308 - RNA, 19 nt, Artificial Sequence
  Description of Artificial Sequence: Synthetic oligonucleotide
cagaauuugagggagaacu

SEQ ID NO: 220309 - RNA, 19 nt, Artificial Sequence
  Description of Artificial Sequence: Synthetic oligonucleotide
ugacccuuccaacaagcau

SEQ ID NO: 220310 - RNA, 19 nt, Artificial Sequence
  Description of Artificial Sequence: Synthetic oligonucleotide
ugccuaggggcuuuucuug

SEQ ID NO: 220311 - RNA, 19 nt, Artificial Sequence
  Description of Artificial Sequence: Synthetic oligonucleotide
cugcguugaaaugaggaug

SEQ ID NO: 220312 - RNA, 19 nt, Artificial Sequence
  Description of Artificial Sequence: Synthetic oligonucleotide
gagaucaauguaugaaugu

SEQ ID NO: 220313 - RNA, 19 nt, Artificial Sequence
  Description of Artificial Sequence: Synthetic oligonucleotide
ugcugagcacgaauggcac

SEQ ID NO: 220314 - RNA, 19 nt, Artificial Sequence
  Description of Artificial Sequence: Synthetic oligonucleotide
agagaguauacugcguuga

SEQ ID NO: 220315 - RNA, 19 nt, Artificial Sequence
  Description of Artificial Sequence: Synthetic oligonucleotide
gaugacauauaggcuuccc

SEQ ID NO: 220316 - RNA, 19 nt, Artificial Sequence
  Description of Artificial Sequence: Synthetic oligonucleotide
cucccgggagcuaaauucc

SEQ ID NO: 220317 - RNA, 19 nt, Artificial Sequence
  Description of Artificial Sequence: Synthetic oligonucleotide
uuggcagaccuucucuggu

SEQ ID NO: 220318 - RNA, 19 nt, Artificial Sequence
  Description of Artificial Sequence: Synthetic oligonucleotide
gugagguacuauaggagag

SEQ ID NO: 220319 - RNA, 19 nt, Artificial Sequence
  Description of Artificial Sequence: Synthetic oligonucleotide
uagaguguucuugaauagu

SEQ ID NO: 220320 - RNA, 19 nt, Artificial Sequence
  Description of Artificial Sequence: Synthetic oligonucleotide
cuuggaguuaaugggacca

SEQ ID NO: 220321 - RNA, 19 nt, Artificial Sequence
  Description of Artificial Sequence: Synthetic oligonucleotide
uugggaaacuacgugccac

SEQ ID NO: 220322 - RNA, 19 nt, Artificial Sequence
  Description of Artificial Sequence: Synthetic oligonucleotide
aguacauuagaguguucuu

SEQ ID NO: 220323 - RNA, 19 nt, Artificial Sequence
  Description of Artificial Sequence: Synthetic oligonucleotide
agcaaaguaacgacaacaa

SEQ ID NO: 220324 - RNA, 19 nt, Artificial Sequence
  Description of Artificial Sequence: Synthetic oligonucleotide
cucguagccuucucuuucc

SEQ ID NO: 220325 - RNA, 19 nt, Artificial Sequence
  Description of Artificial Sequence: Synthetic oligonucleotide
ugcacagaagagccauucu

SEQ ID NO: 220326 - RNA, 19 nt, Artificial Sequence
  Description of Artificial Sequence: Synthetic oligonucleotide
agcacgaauggcacuuggc

SEQ ID NO: 220327 - RNA, 19 nt, Artificial Sequence
  Description of Artificial Sequence: Synthetic oligonucleotide
uuguaacuacccucguagu

SEQ ID NO: 220328 - RNA, 19 nt, Artificial Sequence
  Description of Artificial Sequence: Synthetic oligonucleotide
ggagaucaauguaugaaug

SEQ ID NO: 220329 - RNA, 19 nt, Artificial Sequence
  Description of Artificial Sequence: Synthetic oligonucleotide
uggcaacacuuuccgauac

SEQ ID NO: 220330 - RNA, 19 nt, Artificial Sequence
  Description of Artificial Sequence: Synthetic oligonucleotide
aagcccgaggguguggaag

SEQ ID NO: 220331 - RNA, 19 nt, Artificial Sequence
  Description of Artificial Sequence: Synthetic oligonucleotide
guuaauacauaacccuaua

SEQ ID NO: 220332 - RNA, 19 nt, Artificial Sequence
  Description of Artificial Sequence: Synthetic oligonucleotide
auggaggauucaaacaaug

SEQ ID NO: 220333 - RNA, 19 nt, Artificial Sequence
  Description of Artificial Sequence: Synthetic oligonucleotide
aauggugaguuugcuuccu

SEQ ID NO: 220334 - RNA, 19 nt, Artificial Sequence
  Description of Artificial Sequence: Synthetic oligonucleotide
gauuuugguucguucauau

SEQ ID NO: 220335 - RNA, 19 nt, Artificial Sequence
  Description of Artificial Sequence: Synthetic oligonucleotide
aaguaacgacaacaacgaa

SEQ ID NO: 220336 - RNA, 19 nt, Artificial Sequence
  Description of Artificial Sequence: Synthetic oligonucleotide
aagacaaggguuggcccug

SEQ ID NO: 220337 - RNA, 19 nt, Artificial Sequence
  Description of Artificial Sequence: Synthetic oligonucleotide
aggaaagggcaucucuaca

SEQ ID NO: 220338 - RNA, 19 nt, Artificial Sequence
  Description of Artificial Sequence: Synthetic oligonucleotide
uuucgggcagauuuugguu

SEQ ID NO: 220339 - RNA, 19 nt, Artificial Sequence
  Description of Artificial Sequence: Synthetic oligonucleotide
agaagccuaaccaaagcaa

SEQ ID NO: 220340 - RNA, 19 nt, Artificial Sequence
  Description of Artificial Sequence: Synthetic oligonucleotide
uucccguguaccugcgucc

SEQ ID NO: 220341 - RNA, 19 nt, Artificial Sequence
  Description of Artificial Sequence: Synthetic oligonucleotide
ugcaccucgcuguucauuu

SEQ ID NO: 220342 - RNA, 19 nt, Artificial Sequence
  Description of Artificial Sequence: Synthetic oligonucleotide
auaagagacgacacagaga

SEQ ID NO: 220343 - RNA, 19 nt, Artificial Sequence
  Description of Artificial Sequence: Synthetic oligonucleotide
agccuaaccaaagcaaagu

SEQ ID NO: 220344 - RNA, 19 nt, Artificial Sequence
  Description of Artificial Sequence: Synthetic oligonucleotide
augaccaaggcuggcaaca

SEQ ID NO: 220345 - RNA, 19 nt, Artificial Sequence
  Description of Artificial Sequence: Synthetic oligonucleotide
gaugaccaaggcuggcaac

SEQ ID NO: 220346 - RNA, 19 nt, Artificial Sequence
  Description of Artificial Sequence: Synthetic oligonucleotide
uccgaccugacccuuccaa

SEQ ID NO: 220347 - RNA, 19 nt, Artificial Sequence
  Description of Artificial Sequence: Synthetic oligonucleotide
aucaauguaugaaugucua

SEQ ID NO: 220348 - RNA, 19 nt, Artificial Sequence
  Description of Artificial Sequence: Synthetic oligonucleotide
ccaucuagggagacaaacc

SEQ ID NO: 220349 - RNA, 19 nt, Artificial Sequence
  Description of Artificial Sequence: Synthetic oligonucleotide
uggcacuuuuggauaguac

SEQ ID NO: 220350 - RNA, 19 nt, Artificial Sequence
  Description of Artificial Sequence: Synthetic oligonucleotide
augagcugggaugaccaag

SEQ ID NO: 220351 - RNA, 19 nt, Artificial Sequence
  Description of Artificial Sequence: Synthetic oligonucleotide
cagaauugaaggacucuca

SEQ ID NO: 220352 - RNA, 19 nt, Artificial Sequence
  Description of Artificial Sequence: Synthetic oligonucleotide
acaugagcauuggaccuuc

SEQ ID NO: 220353 - RNA, 19 nt, Artificial Sequence
  Description of Artificial Sequence: Synthetic oligonucleotide
uacuugguccacagaacua

SEQ ID NO: 220354 - RNA, 19 nt, Artificial Sequence
  Description of Artificial Sequence: Synthetic oligonucleotide
uuaggggcucauagauggc

SEQ ID NO: 220355 - RNA, 19 nt, Artificial Sequence
  Description of Artificial Sequence: Synthetic oligonucleotide
gccaguggaaccagaaugg

SEQ ID NO: 220356 - RNA, 19 nt, Artificial Sequence
  Description of Artificial Sequence: Synthetic oligonucleotide
acccuuccaacaagcaucg

SEQ ID NO: 220357 - RNA, 19 nt, Artificial Sequence
  Description of Artificial Sequence: Synthetic oligonucleotide
ugucgugagcucuggguuc

SEQ ID NO: 220358 - RNA, 19 nt, Artificial Sequence
  Description of Artificial Sequence: Synthetic oligonucleotide
auuuaggggcucauagaug

SEQ ID NO: 220359 - RNA, 19 nt, Artificial Sequence
  Description of Artificial Sequence: Synthetic oligonucleotide
aaaccaagcccgagggugu

SEQ ID NO: 220360 - RNA, 19 nt, Artificial Sequence
  Description of Artificial Sequence: Synthetic oligonucleotide
gguaugcacuuccauaaga

SEQ ID NO: 220361 - RNA, 19 nt, Artificial Sequence
  Description of Artificial Sequence: Synthetic oligonucleotide
acauuagaguguucuugaa

SEQ ID NO: 220362 - RNA, 19 nt, Artificial Sequence
  Description of Artificial Sequence: Synthetic oligonucleotide
gccuaaccaaagcaaagug

SEQ ID NO: 220363 - RNA, 19 nt, Artificial Sequence
  Description of Artificial Sequence: Synthetic oligonucleotide
caccccgcccaucaguucc

SEQ ID NO: 220364 - RNA, 19 nt, Artificial Sequence
  Description of Artificial Sequence: Synthetic oligonucleotide
acccgacacagccauguca

SEQ ID NO: 220365 - RNA, 19 nt, Artificial Sequence
  Description of Artificial Sequence: Synthetic oligonucleotide
cuguucauuugagccaaag

SEQ ID NO: 220366 - RNA, 19 nt, Artificial Sequence
  Description of Artificial Sequence: Synthetic oligonucleotide
guagcauuaucaugauaaa

SEQ ID NO: 220367 - RNA, 19 nt, Artificial Sequence
  Description of Artificial Sequence: Synthetic oligonucleotide
cauuuaggggcucauagau

SEQ ID NO: 220368 - RNA, 19 nt, Artificial Sequence
  Description of Artificial Sequence: Synthetic oligonucleotide
auuggaccuuccaucuagg

SEQ ID NO: 220369 - RNA, 19 nt, Artificial Sequence
  Description of Artificial Sequence: Synthetic oligonucleotide
cagguacacgaguugugug

SEQ ID NO: 220370 - RNA, 19 nt, Artificial Sequence
  Description of Artificial Sequence: Synthetic oligonucleotide
ccuuaauuccuuucugcac

SEQ ID NO: 220371 - RNA, 19 nt, Artificial Sequence
  Description of Artificial Sequence: Synthetic oligonucleotide
ugggugugggaagauuccc

SEQ ID NO: 220372 - RNA, 19 nt, Artificial Sequence
  Description of Artificial Sequence: Synthetic oligonucleotide
aucccuacugggacaaguc

SEQ ID NO: 220373 - RNA, 19 nt, Artificial Sequence
  Description of Artificial Sequence: Synthetic oligonucleotide
cagaucaacuggccuggcc

SEQ ID NO: 220374 - RNA, 19 nt, Artificial Sequence
  Description of Artificial Sequence: Synthetic oligonucleotide
ggagugcagacuguggucc

SEQ ID NO: 220375 - RNA, 19 nt, Artificial Sequence
  Description of Artificial Sequence: Synthetic oligonucleotide
ggccuugggaaagaguagg

SEQ ID NO: 220376 - RNA, 19 nt, Artificial Sequence
  Description of Artificial Sequence: Synthetic oligonucleotide
gcuauggcuggagacagag

SEQ ID NO: 220377 - RNA, 19 nt, Artificial Sequence
  Description of Artificial Sequence: Synthetic oligonucleotide
aggacucucagcugauaaa

SEQ ID NO: 220378 - RNA, 19 nt, Artificial Sequence
  Description of Artificial Sequence: Synthetic oligonucleotide
gggaccagaauugaaggac

SEQ ID NO: 220379 - RNA, 19 nt, Artificial Sequence
  Description of Artificial Sequence: Synthetic oligonucleotide
agaguauacugcguugaaa

SEQ ID NO: 220380 - RNA, 19 nt, Artificial Sequence
  Description of Artificial Sequence: Synthetic oligonucleotide
caucagcgccuuuucaguc

SEQ ID NO: 220381 - RNA, 19 nt, Artificial Sequence
  Description of Artificial Sequence: Synthetic oligonucleotide
auaggaaagggcaucucua

SEQ ID NO: 220382 - RNA, 19 nt, Artificial Sequence
  Description of Artificial Sequence: Synthetic oligonucleotide
accugacccuuccaacaag

SEQ ID NO: 220383 - RNA, 19 nt, Artificial Sequence
  Description of Artificial Sequence: Synthetic oligonucleotide
caugucaauacaucuacuu

SEQ ID NO: 220384 - RNA, 19 nt, Artificial Sequence
  Description of Artificial Sequence: Synthetic oligonucleotide
ucugggcggcuauggcugg

SEQ ID NO: 220385 - RNA, 19 nt, Artificial Sequence
  Description of Artificial Sequence: Synthetic oligonucleotide
caguaagagcuucacagua

SEQ ID NO: 220386 - RNA, 19 nt, Artificial Sequence
  Description of Artificial Sequence: Synthetic oligonucleotide
gagugcagacugugguccc

SEQ ID NO: 220387 - RNA, 19 nt, Artificial Sequence
  Description of Artificial Sequence: Synthetic oligonucleotide
ugaaguucguuugguuguc

SEQ ID NO: 220388 - RNA, 19 nt, Artificial Sequence
  Description of Artificial Sequence: Synthetic oligonucleotide
caaacuggcaucauugcuu

SEQ ID NO: 220389 - RNA, 19 nt, Artificial Sequence
  Description of Artificial Sequence: Synthetic oligonucleotide
caaagggauggaauaggaa

SEQ ID NO: 220390 - RNA, 19 nt, Artificial Sequence
  Description of Artificial Sequence: Synthetic oligonucleotide
agcgccuuuucagucagga

SEQ ID NO: 220391 - RNA, 19 nt, Artificial Sequence
  Description of Artificial Sequence: Synthetic oligonucleotide
gagaguauacugcguugaa

SEQ ID NO: 220392 - RNA, 19 nt, Artificial Sequence
  Description of Artificial Sequence: Synthetic oligonucleotide
aaggugcgggguacgaugu

SEQ ID NO: 220393 - RNA, 19 nt, Artificial Sequence
  Description of Artificial Sequence: Synthetic oligonucleotide
auggugaguuugcuuccug

SEQ ID NO: 220394 - RNA, 19 nt, Artificial Sequence
  Description of Artificial Sequence: Synthetic oligonucleotide
cagaagagccauucuggca

SEQ ID NO: 220395 - RNA, 19 nt, Artificial Sequence
  Description of Artificial Sequence: Synthetic oligonucleotide
ugagccaaagcugcaucau

SEQ ID NO: 220396 - RNA, 19 nt, Artificial Sequence
  Description of Artificial Sequence: Synthetic oligonucleotide
gcacgaauggcacuuggca

SEQ ID NO: 220397 - RNA, 19 nt, Artificial Sequence
  Description of Artificial Sequence: Synthetic oligonucleotide
cugggaagacaaggguugg

SEQ ID NO: 220398 - RNA, 19 nt, Artificial Sequence
  Description of Artificial Sequence: Synthetic oligonucleotide
acauaggaaugguccccug

SEQ ID NO: 220399 - RNA, 19 nt, Artificial Sequence
  Description of Artificial Sequence: Synthetic oligonucleotide
cccuacugggacaagucag

SEQ ID NO: 220400 - RNA, 19 nt, Artificial Sequence
  Description of Artificial Sequence: Synthetic oligonucleotide
gggaagauucccacauggg

SEQ ID NO: 220401 - RNA, 19 nt, Artificial Sequence
  Description of Artificial Sequence: Synthetic oligonucleotide
ugagagccccauucccgug

SEQ ID NO: 220402 - RNA, 19 nt, Artificial Sequence
  Description of Artificial Sequence: Synthetic oligonucleotide
agcccgaggguguggaagu

SEQ ID NO: 220403 - RNA, 19 nt, Artificial Sequence
  Description of Artificial Sequence: Synthetic oligonucleotide
ucccgggagcuaaauuccu

SEQ ID NO: 220404 - RNA, 19 nt, Artificial Sequence
  Description of Artificial Sequence: Synthetic oligonucleotide
acacuuuccgauacacacu

SEQ ID NO: 220405 - RNA, 19 nt, Artificial Sequence
  Description of Artificial Sequence: Synthetic oligonucleotide
ucgguccuagcaguugucu

SEQ ID NO: 220406 - RNA, 19 nt, Artificial Sequence
  Description of Artificial Sequence: Synthetic oligonucleotide
cugagagauggccugggaa

SEQ ID NO: 220407 - RNA, 19 nt, Artificial Sequence
  Description of Artificial Sequence: Synthetic oligonucleotide
gaccugacccuuccaacaa

SEQ ID NO: 220408 - RNA, 19 nt, Artificial Sequence
  Description of Artificial Sequence: Synthetic oligonucleotide
uguccucgggagugcagac

SEQ ID NO: 220409 - RNA, 19 nt, Artificial Sequence
  Description of Artificial Sequence: Synthetic oligonucleotide
ggcagauuuugguucguuc

SEQ ID NO: 220410 - RNA, 19 nt, Artificial Sequence
  Description of Artificial Sequence: Synthetic oligonucleotide
auuuaauguuaaaggccau

SEQ ID NO: 220411 - RNA, 19 nt, Artificial Sequence
  Description of Artificial Sequence: Synthetic oligonucleotide
auacugcguugaaaugagg

SEQ ID NO: 220412 - RNA, 19 nt, Artificial Sequence
  Description of Artificial Sequence: Synthetic oligonucleotide
aguuuucauuuugggacaa

SEQ ID NO: 220413 - RNA, 19 nt, Artificial Sequence
  Description of Artificial Sequence: Synthetic oligonucleotide
gagguacuauaggagagcu

SEQ ID NO: 220414 - RNA, 19 nt, Artificial Sequence
  Description of Artificial Sequence: Synthetic oligonucleotide
cuagagaguauacugcguu

SEQ ID NO: 220415 - RNA, 19 nt, Artificial Sequence
  Description of Artificial Sequence: Synthetic oligonucleotide
uacccucguagucauccuu

SEQ ID NO: 220416 - RNA, 19 nt, Artificial Sequence
  Description of Artificial Sequence: Synthetic oligonucleotide
agauuuugguucguucaua

SEQ ID NO: 220417 - RNA, 19 nt, Artificial Sequence
  Description of Artificial Sequence: Synthetic oligonucleotide
gaaaggauauuuggcaauu

SEQ ID NO: 220418 - RNA, 19 nt, Artificial Sequence
  Description of Artificial Sequence: Synthetic oligonucleotide
ggaaugguccccuggaagu

SEQ ID NO: 220419 - RNA, 19 nt, Artificial Sequence
  Description of Artificial Sequence: Synthetic oligonucleotide
caagucagguccaugggau

SEQ ID NO: 220420 - RNA, 19 nt, Artificial Sequence
  Description of Artificial Sequence: Synthetic oligonucleotide
acgauguguucugaauggu

SEQ ID NO: 220421 - RNA, 19 nt, Artificial Sequence
  Description of Artificial Sequence: Synthetic oligonucleotide
acccucguagucauccuug

SEQ ID NO: 220422 - RNA, 19 nt, Artificial Sequence
  Description of Artificial Sequence: Synthetic oligonucleotide
ugagcacgaauggcacuug

SEQ ID NO: 220423 - RNA, 19 nt, Artificial Sequence
  Description of Artificial Sequence: Synthetic oligonucleotide
cauuagaguguucuugaau

SEQ ID NO: 220424 - RNA, 19 nt, Artificial Sequence
  Description of Artificial Sequence: Synthetic oligonucleotide
gcugacuuugggaaacuac

SEQ ID NO: 220425 - RNA, 19 nt, Artificial Sequence
  Description of Artificial Sequence: Synthetic oligonucleotide
aaccaagcccgagggugug

SEQ ID NO: 220426 - RNA, 19 nt, Artificial Sequence
  Description of Artificial Sequence: Synthetic oligonucleotide
caauccccuugcucagccc

SEQ ID NO: 220427 - RNA, 19 nt, Artificial Sequence
  Description of Artificial Sequence: Synthetic oligonucleotide
caugauaacuagagaguau

SEQ ID NO: 220428 - RNA, 19 nt, Artificial Sequence
  Description of Artificial Sequence: Synthetic oligonucleotide
gaucuucuaguaggucuuc

SEQ ID NO: 220429 - RNA, 19 nt, Artificial Sequence
  Description of Artificial Sequence: Synthetic oligonucleotide
guaggcugugcugucguga

SEQ ID NO: 220430 - RNA, 19 nt, Artificial Sequence
  Description of Artificial Sequence: Synthetic oligonucleotide
cucgggagugcagacugug

SEQ ID NO: 220431 - RNA, 19 nt, Artificial Sequence
  Description of Artificial Sequence: Synthetic oligonucleotide
cucauagauggcucauuua

SEQ ID NO: 220432 - RNA, 19 nt, Artificial Sequence
  Description of Artificial Sequence: Synthetic oligonucleotide
ggacucucagcugauaaaa

SEQ ID NO: 220433 - RNA, 19 nt, Artificial Sequence
  Description of Artificial Sequence: Synthetic oligonucleotide
ugggaugaccaaggcuggc

SEQ ID NO: 220434 - RNA, 19 nt, Artificial Sequence
  Description of Artificial Sequence: Synthetic oligonucleotide
ugcgggguacgauguguuc

SEQ ID NO: 220435 - RNA, 19 nt, Artificial Sequence
  Description of Artificial Sequence: Synthetic oligonucleotide
ugcuggucagcagggacua

SEQ ID NO: 220436 - RNA, 19 nt, Artificial Sequence
  Description of Artificial Sequence: Synthetic oligonucleotide
agccaugucaauacaucua

SEQ ID NO: 220437 - RNA, 19 nt, Artificial Sequence
  Description of Artificial Sequence: Synthetic oligonucleotide
gugugggaagauucccaca

SEQ ID NO: 220438 - RNA, 19 nt, Artificial Sequence
  Description of Artificial Sequence: Synthetic oligonucleotide
guguaccugcguccugcag

SEQ ID NO: 220439 - RNA, 19 nt, Artificial Sequence
  Description of Artificial Sequence: Synthetic oligonucleotide
aacuacccucguagucauc

SEQ ID NO: 220440 - RNA, 19 nt, Artificial Sequence
  Description of Artificial Sequence: Synthetic oligonucleotide
cagcaauaccacauguggu

SEQ ID NO: 220441 - RNA, 19 nt, Artificial Sequence
  Description of Artificial Sequence: Synthetic oligonucleotide
caccucgcuguucauuuga

SEQ ID NO: 220442 - RNA, 19 nt, Artificial Sequence
  Description of Artificial Sequence: Synthetic oligonucleotide
accucgcuguucauuugag

SEQ ID NO: 220443 - RNA, 19 nt, Artificial Sequence
  Description of Artificial Sequence: Synthetic oligonucleotide
ucccguguaccugcguccu

SEQ ID NO: 220444 - RNA, 19 nt, Artificial Sequence
  Description of Artificial Sequence: Synthetic oligonucleotide
ccgaggguguggaaguggc

SEQ ID NO: 220445 - RNA, 19 nt, Artificial Sequence
  Description of Artificial Sequence: Synthetic oligonucleotide
guaccugcguccugcaggu

SEQ ID NO: 220446 - RNA, 19 nt, Artificial Sequence
  Description of Artificial Sequence: Synthetic oligonucleotide
caucgcagagcacuguccu

SEQ ID NO: 220447 - RNA, 19 nt, Artificial Sequence
  Description of Artificial Sequence: Synthetic oligonucleotide
gguacgauguguucugaau

SEQ ID NO: 220448 - RNA, 19 nt, Artificial Sequence
  Description of Artificial Sequence: Synthetic oligonucleotide
cagaacccacauuacacau

SEQ ID NO: 220449 - RNA, 19 nt, Artificial Sequence
  Description of Artificial Sequence: Synthetic oligonucleotide
gaagagccauucuggcacu

SEQ ID NO: 220450 - RNA, 19 nt, Artificial Sequence
  Description of Artificial Sequence: Synthetic oligonucleotide
aguuugcuuccugccgaug

SEQ ID NO: 220451 - RNA, 19 nt, Artificial Sequence
  Description of Artificial Sequence: Synthetic oligonucleotide
uuuugccuaggggcuuuuc

SEQ ID NO: 220452 - RNA, 19 nt, Artificial Sequence
  Description of Artificial Sequence: Synthetic oligonucleotide
guuggcccugcaucugaga

SEQ ID NO: 220453 - RNA, 19 nt, Artificial Sequence
  Description of Artificial Sequence: Synthetic oligonucleotide
cuggagagacaaagggucu

SEQ ID NO: 220454 - RNA, 19 nt, Artificial Sequence
  Description of Artificial Sequence: Synthetic oligonucleotide
gcauagcauuguaacuacc

SEQ ID NO: 220455 - RNA, 19 nt, Artificial Sequence
  Description of Artificial Sequence: Synthetic oligonucleotide
cucuacaguguccucuagu

SEQ ID NO: 220456 - RNA, 19 nt, Artificial Sequence
  Description of Artificial Sequence: Synthetic oligonucleotide
aggugcgggguacgaugug

SEQ ID NO: 220457 - RNA, 19 nt, Artificial Sequence
  Description of Artificial Sequence: Synthetic oligonucleotide
ggaugacauauaggcuucc

SEQ ID NO: 220458 - RNA, 19 nt, Artificial Sequence
  Description of Artificial Sequence: Synthetic oligonucleotide
cuguccucgggagugcaga

SEQ ID NO: 220459 - RNA, 19 nt, Artificial Sequence
  Description of Artificial Sequence: Synthetic oligonucleotide
ggggcucauagauggcuca

SEQ ID NO: 220460 - RNA, 19 nt, Artificial Sequence
  Description of Artificial Sequence: Synthetic oligonucleotide
cguugaaaugaggaugcug

SEQ ID NO: 220461 - RNA, 19 nt, Artificial Sequence
  Description of Artificial Sequence: Synthetic oligonucleotide
cccgacacagccaugucaa

SEQ ID NO: 220462 - RNA, 19 nt, Artificial Sequence
  Description of Artificial Sequence: Synthetic oligonucleotide
gcugucgugagcucugggu

SEQ ID NO: 220463 - RNA, 19 nt, Artificial Sequence
  Description of Artificial Sequence: Synthetic oligonucleotide
cagcaucccuacugggaca

SEQ ID NO: 220464 - RNA, 19 nt, Artificial Sequence
  Description of Artificial Sequence: Synthetic oligonucleotide
ccgaccugacccuuccaac

SEQ ID NO: 220465 - RNA, 19 nt, Artificial Sequence
  Description of Artificial Sequence: Synthetic oligonucleotide
gaaggacucucagcugaua

SEQ ID NO: 220466 - RNA, 19 nt, Artificial Sequence
  Description of Artificial Sequence: Synthetic oligonucleotide
cugccgauggcaggccuuc

SEQ ID NO: 220467 - RNA, 19 nt, Artificial Sequence
  Description of Artificial Sequence: Synthetic oligonucleotide
cagcgccuuuucagucagg

SEQ ID NO: 220468 - RNA, 19 nt, Artificial Sequence
  Description of Artificial Sequence: Synthetic oligonucleotide
ccguguaccugcguccugc

SEQ ID NO: 220469 - RNA, 19 nt, Artificial Sequence
  Description of Artificial Sequence: Synthetic oligonucleotide
caucaggggucucuccucu

SEQ ID NO: 220470 - RNA, 19 nt, Artificial Sequence
  Description of Artificial Sequence: Synthetic oligonucleotide
caguagcauuaucaugaua

SEQ ID NO: 220471 - RNA, 19 nt, Artificial Sequence
  Description of Artificial Sequence: Synthetic oligonucleotide
ggagacaaaccaagcccga

SEQ ID NO: 220472 - RNA, 19 nt, Artificial Sequence
  Description of Artificial Sequence: Synthetic oligonucleotide
ggucuucgguccuagcagu

SEQ ID NO: 220473 - RNA, 19 nt, Artificial Sequence
  Description of Artificial Sequence: Synthetic oligonucleotide
gcucauagauggcucauuu

SEQ ID NO: 220474 - RNA, 19 nt, Artificial Sequence
  Description of Artificial Sequence: Synthetic oligonucleotide
ggaccagaauugaaggacu

SEQ ID NO: 220475 - RNA, 19 nt, Artificial Sequence
  Description of Artificial Sequence: Synthetic oligonucleotide
ccauucccguguaccugcg

SEQ ID NO: 220476 - RNA, 19 nt, Artificial Sequence
  Description of Artificial Sequence: Synthetic oligonucleotide
cacgaguuguguguaggcu

SEQ ID NO: 220477 - RNA, 19 nt, Artificial Sequence
  Description of Artificial Sequence: Synthetic oligonucleotide
cacauaggaaugguccccu

SEQ ID NO: 220478 - RNA, 19 nt, Artificial Sequence
  Description of Artificial Sequence: Synthetic oligonucleotide
ggguacgauguguucugaa

SEQ ID NO: 220479 - RNA, 19 nt, Artificial Sequence
  Description of Artificial Sequence: Synthetic oligonucleotide
caucccuacugggacaagu

SEQ ID NO: 220480 - RNA, 19 nt, Artificial Sequence
  Description of Artificial Sequence: Synthetic oligonucleotide
gcuaauggcuccagaggaa

SEQ ID NO: 220481 - RNA, 19 nt, Artificial Sequence
  Description of Artificial Sequence: Synthetic oligonucleotide
cagucauccuuaauuccuu

SEQ ID NO: 220482 - RNA, 19 nt, Artificial Sequence
  Description of Artificial Sequence: Synthetic oligonucleotide
agguacuauaggagagcuu

SEQ ID NO: 220483 - RNA, 19 nt, Artificial Sequence
  Description of Artificial Sequence: Synthetic oligonucleotide
cacuuuuggauaguacauu

SEQ ID NO: 220484 - RNA, 19 nt, Artificial Sequence
  Description of Artificial Sequence: Synthetic oligonucleotide
cugagcacgaauggcacuu

SEQ ID NO: 220485 - RNA, 19 nt, Artificial Sequence
  Description of Artificial Sequence: Synthetic oligonucleotide
cacccgacacagccauguc

SEQ ID NO: 220486 - RNA, 19 nt, Artificial Sequence
  Description of Artificial Sequence: Synthetic oligonucleotide
cuggcacuuuuggauagua

SEQ ID NO: 220487 - RNA, 19 nt, Artificial Sequence
  Description of Artificial Sequence: Synthetic oligonucleotide
gcaccucgcuguucauuug

SEQ ID NO: 220488 - RNA, 19 nt, Artificial Sequence
  Description of Artificial Sequence: Synthetic oligonucleotide
gccuuccuauuuccagcug

SEQ ID NO: 220489 - RNA, 19 nt, Artificial Sequence
  Description of Artificial Sequence: Synthetic oligonucleotide
uccuagcaguugucucguu

SEQ ID NO: 220490 - RNA, 19 nt, Artificial Sequence
  Description of Artificial Sequence: Synthetic oligonucleotide
cacuuggcagcaugcaguu

SEQ ID NO: 220491 - RNA, 19 nt, Artificial Sequence
  Description of Artificial Sequence: Synthetic oligonucleotide
cgggguacgauguguucug

SEQ ID NO: 220492 - RNA, 19 nt, Artificial Sequence
  Description of Artificial Sequence: Synthetic oligonucleotide
cccgaggguguggaagugg

SEQ ID NO: 220493 - RNA, 19 nt, Artificial Sequence
  Description of Artificial Sequence: Synthetic oligonucleotide
cgggagcuaaauuccugug

SEQ ID NO: 220494 - RNA, 19 nt, Artificial Sequence
  Description of Artificial Sequence: Synthetic oligonucleotide
ggugagcaagaugggcaca

SEQ ID NO: 220495 - RNA, 19 nt, Artificial Sequence
  Description of Artificial Sequence: Synthetic oligonucleotide
cuaagugcaccccgcccau

SEQ ID NO: 220496 - RNA, 19 nt, Artificial Sequence
  Description of Artificial Sequence: Synthetic oligonucleotide
gcaaugcauagcuuuucuu

SEQ ID NO: 220497 - RNA, 19 nt, Artificial Sequence
  Description of Artificial Sequence: Synthetic oligonucleotide
guaggucucuccaggugau

SEQ ID NO: 220498 - RNA, 19 nt, Artificial Sequence
  Description of Artificial Sequence: Synthetic oligonucleotide
ggacagagacucugacaua

SEQ ID NO: 220499 - RNA, 19 nt, Artificial Sequence
  Description of Artificial Sequence: Synthetic oligonucleotide
cuacccucguagucauccu

SEQ ID NO: 220500 - RNA, 19 nt, Artificial Sequence
  Description of Artificial Sequence: Synthetic oligonucleotide
ccaucagcgccuuuucagu

SEQ ID NO: 220501 - RNA, 19 nt, Artificial Sequence
  Description of Artificial Sequence: Synthetic oligonucleotide
ggcuaguggccaaagggau

SEQ ID NO: 220502 - RNA, 19 nt, Artificial Sequence
  Description of Artificial Sequence: Synthetic oligonucleotide
cuguggucccacacucgcu

SEQ ID NO: 220503 - RNA, 19 nt, Artificial Sequence
  Description of Artificial Sequence: Synthetic oligonucleotide
gcugagcacgaauggcacu

SEQ ID NO: 220504 - RNA, 19 nt, Artificial Sequence
  Description of Artificial Sequence: Synthetic oligonucleotide
ccccuugcucagcccauac

SEQ ID NO: 220505 - RNA, 19 nt, Artificial Sequence
  Description of Artificial Sequence: Synthetic oligonucleotide
ccgggagcuaaauuccugu

SEQ ID NO: 220506 - RNA, 19 nt, Artificial Sequence
  Description of Artificial Sequence: Synthetic oligonucleotide
gcacccgacacagccaugu

SEQ ID NO: 220507 - RNA, 19 nt, Artificial Sequence
  Description of Artificial Sequence: Synthetic oligonucleotide
gcauuguaacuacccucgu

SEQ ID NO: 220508 - RNA, 19 nt, Artificial Sequence
  Description of Artificial Sequence: Synthetic oligonucleotide
ccuggaaguuucauauaau

SEQ ID NO: 220509 - RNA, 19 nt, Artificial Sequence
  Description of Artificial Sequence: Synthetic oligonucleotide
gcaauaccacaugugguuu

SEQ ID NO: 220510 - RNA, 19 nt, Artificial Sequence
  Description of Artificial Sequence: Synthetic oligonucleotide
gcauuggaccuuccaucua

SEQ ID NO: 220511 - RNA, 19 nt, Artificial Sequence
  Description of Artificial Sequence: Synthetic oligonucleotide
gcgggguacgauguguucu

SEQ ID NO: 220512 - RNA, 19 nt, Artificial Sequence
  Description of Artificial Sequence: Synthetic oligonucleotide
ccaugucaauacaucuacu

SEQ ID NO: 220513 - RNA, 19 nt, Artificial Sequence
  Description of Artificial Sequence: Synthetic oligonucleotide
caagcccgaggguguggaa

SEQ ID NO: 220514 - RNA, 19 nt, Artificial Sequence
  Description of Artificial Sequence: Synthetic oligonucleotide
gcagaucaacuggccuggc

SEQ ID NO: 220515 - RNA, 19 nt, Artificial Sequence
  Description of Artificial Sequence: Synthetic oligonucleotide
accccgcccaucaguuccu

SEQ ID NO: 220516 - RNA, 19 nt, Artificial Sequence
  Description of Artificial Sequence: Synthetic oligonucleotide
gccccauucccguguaccu

SEQ ID NO: 220517 - RNA, 19 nt, Artificial Sequence
  Description of Artificial Sequence: Synthetic oligonucleotide
gggcucguagccuucucuu

SEQ ID NO: 220518 - RNA, 19 nt, Artificial Sequence
  Description of Artificial Sequence: Synthetic oligonucleotide
gggguacgauguguucuga

SEQ ID NO: 220519 - RNA, 19 nt, Artificial Sequence
  Description of Artificial Sequence: Synthetic oligonucleotide
cauucccguguaccugcgu

SEQ ID NO: 220520 - RNA, 19 nt, Artificial Sequence
  Description of Artificial Sequence: Synthetic oligonucleotide
guccucgggagugcagacu

SEQ ID NO: 220521 - RNA, 19 nt, Artificial Sequence
  Description of Artificial Sequence: Synthetic oligonucleotide
ccuagcaguugucucguuu

SEQ ID NO: 220522 - RNA, 19 nt, Artificial Sequence
  Description of Artificial Sequence: Synthetic oligonucleotide
cgcuguucauuugagccaa

SEQ ID NO: 220523 - RNA, 19 nt, Artificial Sequence
  Description of Artificial Sequence: Synthetic oligonucleotide
cgaauggcacuuggcagca

SEQ ID NO: 220524 - RNA, 19 nt, Artificial Sequence
  Description of Artificial Sequence: Synthetic oligonucleotide
ccaagcccgagggugugga

SEQ ID NO: 220525 - RNA, 19 nt, Artificial Sequence
  Description of Artificial Sequence: Synthetic oligonucleotide
gcaccccgcccaucaguuc

SEQ ID NO: 220526 - RNA, 19 nt, Artificial Sequence
  Description of Artificial Sequence: Synthetic oligonucleotide
gucuucgguccuagcaguu

SEQ ID NO: 220527 - RNA, 19 nt, Artificial Sequence
  Description of Artificial Sequence: Synthetic oligonucleotide
gugcgggguacgauguguu

SEQ ID NO: 220528 - RNA, 19 nt, Artificial Sequence
  Description of Artificial Sequence: Synthetic oligonucleotide
ggcucauagauggcucauu

SEQ ID NO: 220529 - RNA, 19 nt, Artificial Sequence
  Description of Artificial Sequence: Synthetic oligonucleotide
ccccuggaaguuucauaua

SEQ ID NO: 220530 - RNA, 19 nt, Artificial Sequence
  Description of Artificial Sequence: Synthetic oligonucleotide
gcuguucauuugagccaaa

SEQ ID NO: 220531 - RNA, 19 nt, Artificial Sequence
  Description of Artificial Sequence: Synthetic oligonucleotide
gcguugaaaugaggaugcu

SEQ ID NO: 220532 - RNA, 19 nt, Artificial Sequence
  Description of Artificial Sequence: Synthetic oligonucleotide
ggacaaccaagcagcucuu

SEQ ID NO: 220533 - RNA, 19 nt, Artificial Sequence
  Description of Artificial Sequence: Synthetic oligonucleotide
cuccucccgggagcuaaau

SEQ ID NO: 220534 - RNA, 19 nt, Artificial Sequence
  Description of Artificial Sequence: Synthetic oligonucleotide
gcuccucccgggagcuaaa

SEQ ID NO: 220535 - RNA, 19 nt, Artificial Sequence
  Description of Artificial Sequence: Synthetic oligonucleotide
ccucgggagugcagacugu

SEQ ID NO: 220536 - RNA, 19 nt, Artificial Sequence
  Description of Artificial Sequence: Synthetic oligonucleotide
cuccuccgaccugacccuu

SEQ ID NO: 220537 - RNA, 19 nt, Artificial Sequence
  Description of Artificial Sequence: Synthetic oligonucleotide
uuuuaaugaauuaugagcc

SEQ ID NO: 220538 - RNA, 19 nt, Artificial Sequence
  Description of Artificial Sequence: Synthetic oligonucleotide
aaccauauuaauuauacug

SEQ ID NO: 220539 - RNA, 19 nt, Artificial Sequence
  Description of Artificial Sequence: Synthetic oligonucleotide
aaaacuaccaaaauccugc

SEQ ID NO: 220540 - RNA, 19 nt, Artificial Sequence
  Description of Artificial Sequence: Synthetic oligonucleotide
aauuagaacaaagcaaucc

SEQ ID NO: 220541 - RNA, 19 nt, Artificial Sequence
  Description of Artificial Sequence: Synthetic oligonucleotide
aauuccauguuguacaagg

SEQ ID NO: 220542 - RNA, 19 nt, Artificial Sequence
  Description of Artificial Sequence: Synthetic oligonucleotide
uuagcauuaaaucccaugg

SEQ ID NO: 220543 - RNA, 19 nt, Artificial Sequence
  Description of Artificial Sequence: Synthetic oligonucleotide
auuagaacaaagcaauccc

SEQ ID NO: 220544 - RNA, 19 nt, Artificial Sequence
  Description of Artificial Sequence: Synthetic oligonucleotide
uuaacgagaagguuuaugg

SEQ ID NO: 220545 - RNA, 19 nt, Artificial Sequence
  Description of Artificial Sequence: Synthetic oligonucleotide
gauacuaucacuucauggc

SEQ ID NO: 220546 - RNA, 19 nt, Artificial Sequence
  Description of Artificial Sequence: Synthetic oligonucleotide
aaguuuaauucucaaggac

SEQ ID NO: 220547 - RNA, 19 nt, Artificial Sequence
  Description of Artificial Sequence: Synthetic oligonucleotide
aacccagccaguuucauac

SEQ ID NO: 220548 - RNA, 19 nt, Artificial Sequence
  Description of Artificial Sequence: Synthetic oligonucleotide
ucaagaacacucuuaacgg

SEQ ID NO: 220549 - RNA, 19 nt, Artificial Sequence
  Description of Artificial Sequence: Synthetic oligonucleotide
uguuguauaauguaaacaa

SEQ ID NO: 220550 - RNA, 19 nt, Artificial Sequence
  Description of Artificial Sequence: Synthetic oligonucleotide
aauaccaguaaccauuuca

SEQ ID NO: 220551 - RNA, 19 nt, Artificial Sequence
  Description of Artificial Sequence: Synthetic oligonucleotide
ugaauuagaacaaagcaau

SEQ ID NO: 220552 - RNA, 19 nt, Artificial Sequence
  Description of Artificial Sequence: Synthetic oligonucleotide
uguguugccauauacagca

SEQ ID NO: 220553 - RNA, 19 nt, Artificial Sequence
  Description of Artificial Sequence: Synthetic oligonucleotide
ugaaccauauuaauuauac

SEQ ID NO: 220554 - RNA, 19 nt, Artificial Sequence
  Description of Artificial Sequence: Synthetic oligonucleotide
uuaacauauaauuccaugu

SEQ ID NO: 220555 - RNA, 19 nt, Artificial Sequence
  Description of Artificial Sequence: Synthetic oligonucleotide
uuacaugucuuccugauca

SEQ ID NO: 220556 - RNA, 19 nt, Artificial Sequence
  Description of Artificial Sequence: Synthetic oligonucleotide
aacugaauuagaacaaagc

SEQ ID NO: 220557 - RNA, 19 nt, Artificial Sequence
  Description of Artificial Sequence: Synthetic oligonucleotide
aacauauaauuccauguug

SEQ ID NO: 220558 - RNA, 19 nt, Artificial Sequence
  Description of Artificial Sequence: Synthetic oligonucleotide
acugaauuagaacaaagca

SEQ ID NO: 220559 - RNA, 19 nt, Artificial Sequence
  Description of Artificial Sequence: Synthetic oligonucleotide
uguauuacccuacuguccc

SEQ ID NO: 220560 - RNA, 19 nt, Artificial Sequence
  Description of Artificial Sequence: Synthetic oligonucleotide
agaaguaaagggcuggagg

SEQ ID NO: 220561 - RNA, 19 nt, Artificial Sequence
  Description of Artificial Sequence: Synthetic oligonucleotide
uggacuauaagcccaaaca

SEQ ID NO: 220562 - RNA, 19 nt, Artificial Sequence
  Description of Artificial Sequence: Synthetic oligonucleotide
aagacguuacuguuguaac

SEQ ID NO: 220563 - RNA, 19 nt, Artificial Sequence
  Description of Artificial Sequence: Synthetic oligonucleotide
uuuuguaccauguagugau

SEQ ID NO: 220564 - RNA, 19 nt, Artificial Sequence
  Description of Artificial Sequence: Synthetic oligonucleotide
uuuucaagcaacauagcaa

SEQ ID NO: 220565 - RNA, 19 nt, Artificial Sequence
  Description of Artificial Sequence: Synthetic oligonucleotide
cuaggguuuauucuaauag

SEQ ID NO: 220566 - RNA, 19 nt, Artificial Sequence
  Description of Artificial Sequence: Synthetic oligonucleotide
  modified_base (6)..(6): a, c, u, g, unknown or other
aacaunuacagcauuauaa

SEQ ID NO: 220567 - RNA, 19 nt, Artificial Sequence
  Description of Artificial Sequence: Synthetic oligonucleotide
agucauuugugcugaaggc

SEQ ID NO: 220568 - RNA, 19 nt, Artificial Sequence
  Description of Artificial Sequence: Synthetic oligonucleotide
uagauuauuguccaccaga

SEQ ID NO: 220569 - RNA, 19 nt, Artificial Sequence
  Description of Artificial Sequence: Synthetic oligonucleotide
agaaucugcggcaacaugc

SEQ ID NO: 220570 - RNA, 19 nt, Artificial Sequence
  Description of Artificial Sequence: Synthetic oligonucleotide
ucuaagucaagcuggcuag

SEQ ID NO: 220571 - RNA, 19 nt, Artificial Sequence
  Description of Artificial Sequence: Synthetic oligonucleotide
ggaaacacuaagaugaucg

SEQ ID NO: 220572 - RNA, 19 nt, Artificial Sequence
  Description of Artificial Sequence: Synthetic oligonucleotide
guuaguacaacaugucucc

SEQ ID NO: 220573 - RNA, 19 nt, Artificial Sequence
  Description of Artificial Sequence: Synthetic oligonucleotide
accagauaauuauaacagc

SEQ ID NO: 220574 - RNA, 19 nt, Artificial Sequence
  Description of Artificial Sequence: Synthetic oligonucleotide
uguaguagauuauugucca

SEQ ID NO: 220575 - RNA, 19 nt, Artificial Sequence
  Description of Artificial Sequence: Synthetic oligonucleotide
uauaagcccaaacacaaaa

SEQ ID NO: 220576 - RNA, 19 nt, Artificial Sequence
  Description of Artificial Sequence: Synthetic oligonucleotide
  modified_base (4)..(4): a, c, u, g, unknown or other
caunuacagcauuauaaag

SEQ ID NO: 220577 - RNA, 19 nt, Artificial Sequence
  Description of Artificial Sequence: Synthetic oligonucleotide
uuuagcauuaaaucccaug

SEQ ID NO: 220578 - RNA, 19 nt, Artificial Sequence
  Description of Artificial Sequence: Synthetic oligonucleotide
auagcaaauacacaguaaa

SEQ ID NO: 220579 - RNA, 19 nt, Artificial Sequence
  Description of Artificial Sequence: Synthetic oligonucleotide
uuauguaguagauuauugu

SEQ ID NO: 220580 - RNA, 19 nt, Artificial Sequence
  Description of Artificial Sequence: Synthetic oligonucleotide
uauguaguagauuauuguc

SEQ ID NO: 220581 - RNA, 19 nt, Artificial Sequence
  Description of Artificial Sequence: Synthetic oligonucleotide
aacuaguugaccaaugugu

SEQ ID NO: 220582 - RNA, 19 nt, Artificial Sequence
  Description of Artificial Sequence: Synthetic oligonucleotide
uguuuaacccuuuccaaug

SEQ ID NO: 220583 - RNA, 19 nt, Artificial Sequence
  Description of Artificial Sequence: Synthetic oligonucleotide
uguguguugaauuauuaau

SEQ ID NO: 220584 - RNA, 19 nt, Artificial Sequence
  Description of Artificial Sequence: Synthetic oligonucleotide
ucaaaauaggagaccaugu

SEQ ID NO: 220585 - RNA, 19 nt, Artificial Sequence
  Description of Artificial Sequence: Synthetic oligonucleotide
uucguagcaauuccuauca

SEQ ID NO: 220586 - RNA, 19 nt, Artificial Sequence
  Description of Artificial Sequence: Synthetic oligonucleotide
ugaauagucauaguaauua

SEQ ID NO: 220587 - RNA, 19 nt, Artificial Sequence
  Description of Artificial Sequence: Synthetic oligonucleotide
aucgcuguuguacaguuuc

SEQ ID NO: 220588 - RNA, 19 nt, Artificial Sequence
  Description of Artificial Sequence: Synthetic oligonucleotide
  modified_base (2)..(2): a, c, u, g, unknown or other
unuacagcauuauaaaguu

SEQ ID NO: 220589 - RNA, 19 nt, Artificial Sequence
  Description of Artificial Sequence: Synthetic oligonucleotide
auagugaauagucauagua

SEQ ID NO: 220590 - RNA, 19 nt, Artificial Sequence
  Description of Artificial Sequence: Synthetic oligonucleotide
aacacuaagaugaucgcug

SEQ ID NO: 220591 - RNA, 19 nt, Artificial Sequence
  Description of Artificial Sequence: Synthetic oligonucleotide
agagaagugcaguccaggc

SEQ ID NO: 220592 - RNA, 19 nt, Artificial Sequence
  Description of Artificial Sequence: Synthetic oligonucleotide
uuuguauuacccuacuguc

SEQ ID NO: 220593 - RNA, 19 nt, Artificial Sequence
  Description of Artificial Sequence: Synthetic oligonucleotide
aagaacacucuuaacgggg

SEQ ID NO: 220594 - RNA, 19 nt, Artificial Sequence
  Description of Artificial Sequence: Synthetic oligonucleotide
  modified_base (3)..(3): a, c, u, g, unknown or other
aunuacagcauuauaaagu

SEQ ID NO: 220595 - RNA, 19 nt, Artificial Sequence
  Description of Artificial Sequence: Synthetic oligonucleotide
aacagccuaucucaaguag

SEQ ID NO: 220596 - RNA, 19 nt, Artificial Sequence
  Description of Artificial Sequence: Synthetic oligonucleotide
auguuggaaagcucguacc

SEQ ID NO: 220597 - RNA, 19 nt, Artificial Sequence
  Description of Artificial Sequence: Synthetic oligonucleotide
uagugaauagucauaguaa

SEQ ID NO: 220598 - RNA, 19 nt, Artificial Sequence
  Description of Artificial Sequence: Synthetic oligonucleotide
aguuaguacaacaugucuc

SEQ ID NO: 220599 - RNA, 19 nt, Artificial Sequence
  Description of Artificial Sequence: Synthetic oligonucleotide
uaguuuuguaccauguagu

SEQ ID NO: 220600 - RNA, 19 nt, Artificial Sequence
  Description of Artificial Sequence: Synthetic oligonucleotide
uucagagaguauuaacgag

SEQ ID NO: 220601 - RNA, 19 nt, Artificial Sequence
  Description of Artificial Sequence: Synthetic oligonucleotide
uguauuguuguauaaugua

SEQ ID NO: 220602 - RNA, 19 nt, Artificial Sequence
  Description of Artificial Sequence: Synthetic oligonucleotide
aauuacaugucuuccugau

SEQ ID NO: 220603 - RNA, 19 nt, Artificial Sequence
  Description of Artificial Sequence: Synthetic oligonucleotide
gaaguaaagggcuggagga

SEQ ID NO: 220604 - RNA, 19 nt, Artificial Sequence
  Description of Artificial Sequence: Synthetic oligonucleotide
accaaaauccugcggcucc

SEQ ID NO: 220605 - RNA, 19 nt, Artificial Sequence
  Description of Artificial Sequence: Synthetic oligonucleotide
uaacgagaagguuuauggg

SEQ ID NO: 220606 - RNA, 19 nt, Artificial Sequence
  Description of Artificial Sequence: Synthetic oligonucleotide
accaguaaccauuucagga

SEQ ID NO: 220607 - RNA, 19 nt, Artificial Sequence
  Description of Artificial Sequence: Synthetic oligonucleotide
cuucauagcaguauggaca

SEQ ID NO: 220608 - RNA, 19 nt, Artificial Sequence
  Description of Artificial Sequence: Synthetic oligonucleotide
agcauuaaaucccaugggu

SEQ ID NO: 220609 - RNA, 19 nt, Artificial Sequence
  Description of Artificial Sequence: Synthetic oligonucleotide
guacaaagauuuuacuugc

SEQ ID NO: 220610 - RNA, 19 nt, Artificial Sequence
  Description of Artificial Sequence: Synthetic oligonucleotide
uuuaaugaauuaugagcca

SEQ ID NO: 220611 - RNA, 19 nt, Artificial Sequence
  Description of Artificial Sequence: Synthetic oligonucleotide
uuguauuacccuacugucc

SEQ ID NO: 220612 - RNA, 19 nt, Artificial Sequence
  Description of Artificial Sequence: Synthetic oligonucleotide
accaucggugcucugagcg

SEQ ID NO: 220613 - RNA, 19 nt, Artificial Sequence
  Description of Artificial Sequence: Synthetic oligonucleotide
agaaagacguuacuguugu

SEQ ID NO: 220614 - RNA, 19 nt, Artificial Sequence
  Description of Artificial Sequence: Synthetic oligonucleotide
  modified_base (5)..(5): a, c, u, g, unknown or other
acaunuacagcauuauaaa

SEQ ID NO: 220615 - RNA, 19 nt, Artificial Sequence
  Description of Artificial Sequence: Synthetic oligonucleotide
aauaccuaggugaucaaga

SEQ ID NO: 220616 - RNA, 19 nt, Artificial Sequence
  Description of Artificial Sequence: Synthetic oligonucleotide
aaaucccaugggucaauac

SEQ ID NO: 220617 - RNA, 19 nt, Artificial Sequence
  Description of Artificial Sequence: Synthetic oligonucleotide
ucuacuuuccaaaguagau

SEQ ID NO: 220618 - RNA, 19 nt, Artificial Sequence
  Description of Artificial Sequence: Synthetic oligonucleotide
agguuuguuccacccaugc

SEQ ID NO: 220619 - RNA, 19 nt, Artificial Sequence
  Description of Artificial Sequence: Synthetic oligonucleotide
uucaucaauucuuauguau

SEQ ID NO: 220620 - RNA, 19 nt, Artificial Sequence
  Description of Artificial Sequence: Synthetic oligonucleotide
aguuuuguaccauguagug

SEQ ID NO: 220621 - RNA, 19 nt, Artificial Sequence
  Description of Artificial Sequence: Synthetic oligonucleotide
accaaagucacuucugugu

SEQ ID NO: 220622 - RNA, 19 nt, Artificial Sequence
  Description of Artificial Sequence: Synthetic oligonucleotide
agugaauagucauaguaau

SEQ ID NO: 220623 - RNA, 19 nt, Artificial Sequence
  Description of Artificial Sequence: Synthetic oligonucleotide
aucuuuaacaaaugucucu

SEQ ID NO: 220624 - RNA, 19 nt, Artificial Sequence
  Description of Artificial Sequence: Synthetic oligonucleotide
aagccuuaauauuucuucu

SEQ ID NO: 220625 - RNA, 19 nt, Artificial Sequence
  Description of Artificial Sequence: Synthetic oligonucleotide
agguuuaugggucaaaaua

SEQ ID NO: 220626 - RNA, 19 nt, Artificial Sequence
  Description of Artificial Sequence: Synthetic oligonucleotide
cauacccacgcucaaaagc

SEQ ID NO: 220627 - RNA, 19 nt, Artificial Sequence
  Description of Artificial Sequence: Synthetic oligonucleotide
caaucuugguccuugcacc

SEQ ID NO: 220628 - RNA, 19 nt, Artificial Sequence
  Description of Artificial Sequence: Synthetic oligonucleotide
cagccauggacuauaagcc

SEQ ID NO: 220629 - RNA, 19 nt, Artificial Sequence
  Description of Artificial Sequence: Synthetic oligonucleotide
aaagacguuacuguuguaa

SEQ ID NO: 220630 - RNA, 19 nt, Artificial Sequence
  Description of Artificial Sequence: Synthetic oligonucleotide
uauaacagccuaucucaag

SEQ ID NO: 220631 - RNA, 19 nt, Artificial Sequence
  Description of Artificial Sequence: Synthetic oligonucleotide
aggaccauagugaauaguc

SEQ ID NO: 220632 - RNA, 19 nt, Artificial Sequence
  Description of Artificial Sequence: Synthetic oligonucleotide
uuccccauuauguaguaga

SEQ ID NO: 220633 - RNA, 19 nt, Artificial Sequence
  Description of Artificial Sequence: Synthetic oligonucleotide
uguucuaggguuuauucua

SEQ ID NO: 220634 - RNA, 19 nt, Artificial Sequence
  Description of Artificial Sequence: Synthetic oligonucleotide
uucaauuacaugucuuccu

SEQ ID NO: 220635 - RNA, 19 nt, Artificial Sequence
  Description of Artificial Sequence: Synthetic oligonucleotide
aguauggacaaguuuaauu

SEQ ID NO: 220636 - RNA, 19 nt, Artificial Sequence
  Description of Artificial Sequence: Synthetic oligonucleotide
uaugagccaaugaacauua

SEQ ID NO: 220637 - RNA, 19 nt, Artificial Sequence
  Description of Artificial Sequence: Synthetic oligonucleotide
aguuuaauucucaaggacu

SEQ ID NO: 220638 - RNA, 19 nt, Artificial Sequence
  Description of Artificial Sequence: Synthetic oligonucleotide
uucuuauguaucugaacca

SEQ ID NO: 220639 - RNA, 19 nt, Artificial Sequence
  Description of Artificial Sequence: Synthetic oligonucleotide
aacaugcacaugucaacug

SEQ ID NO: 220640 - RNA, 19 nt, Artificial Sequence
  Description of Artificial Sequence: Synthetic oligonucleotide
uaguagauuauuguccacc

SEQ ID NO: 220641 - RNA, 19 nt, Artificial Sequence
  Description of Artificial Sequence: Synthetic oligonucleotide
agccauggacuauaagccc

SEQ ID NO: 220642 - RNA, 19 nt, Artificial Sequence
  Description of Artificial Sequence: Synthetic oligonucleotide
caagaacacucuuaacggg

SEQ ID NO: 220643 - RNA, 19 nt, Artificial Sequence
  Description of Artificial Sequence: Synthetic oligonucleotide
aguagauuauuguccacca

SEQ ID NO: 220644 - RNA, 19 nt, Artificial Sequence
  Description of Artificial Sequence: Synthetic oligonucleotide
uuaauucucaaggacucca

SEQ ID NO: 220645 - RNA, 19 nt, Artificial Sequence
  Description of Artificial Sequence: Synthetic oligonucleotide
auacuuucuaagucaagcu

SEQ ID NO: 220646 - RNA, 19 nt, Artificial Sequence
  Description of Artificial Sequence: Synthetic oligonucleotide
uguguucuaggguuuauuc

SEQ ID NO: 220647 - RNA, 19 nt, Artificial Sequence
  Description of Artificial Sequence: Synthetic oligonucleotide
aacccuuuccaaugaaacu

SEQ ID NO: 220648 - RNA, 19 nt, Artificial Sequence
  Description of Artificial Sequence: Synthetic oligonucleotide
agauaauuauaacagccua

SEQ ID NO: 220649 - RNA, 19 nt, Artificial Sequence
  Description of Artificial Sequence: Synthetic oligonucleotide
  modified_base (7)..(7): a, c, u, g, unknown or other
uaacaunuacagcauuaua

SEQ ID NO: 220650 - RNA, 19 nt, Artificial Sequence
  Description of Artificial Sequence: Synthetic oligonucleotide
uaucugauauuuuggugca

SEQ ID NO: 220651 - RNA, 19 nt, Artificial Sequence
  Description of Artificial Sequence: Synthetic oligonucleotide
uaggguuuauucuaauagu

SEQ ID NO: 220652 - RNA, 19 nt, Artificial Sequence
  Description of Artificial Sequence: Synthetic oligonucleotide
gguuuaugggucaaaauag

SEQ ID NO: 220653 - RNA, 19 nt, Artificial Sequence
  Description of Artificial Sequence: Synthetic oligonucleotide
accauauuaauuauacugu

SEQ ID NO: 220654 - RNA, 19 nt, Artificial Sequence
  Description of Artificial Sequence: Synthetic oligonucleotide
uuaacgggguucuggcugg

SEQ ID NO: 220655 - RNA, 19 nt, Artificial Sequence
  Description of Artificial Sequence: Synthetic oligonucleotide
ugaguuaguacaacauguc

SEQ ID NO: 220656 - RNA, 19 nt, Artificial Sequence
  Description of Artificial Sequence: Synthetic oligonucleotide
auuacaugucuuccugauc

SEQ ID NO: 220657 - RNA, 19 nt, Artificial Sequence
  Description of Artificial Sequence: Synthetic oligonucleotide
agaacuaguugaccaaugu

SEQ ID NO: 220658 - RNA, 19 nt, Artificial Sequence
  Description of Artificial Sequence: Synthetic oligonucleotide
ucauugcuagagaagugca

SEQ ID NO: 220659 - RNA, 19 nt, Artificial Sequence
  Description of Artificial Sequence: Synthetic oligonucleotide
cauauuaauuauacuguca

SEQ ID NO: 220660 - RNA, 19 nt, Artificial Sequence
  Description of Artificial Sequence: Synthetic oligonucleotide
aaacacuaagaugaucgcu

SEQ ID NO: 220661 - RNA, 19 nt, Artificial Sequence
  Description of Artificial Sequence: Synthetic oligonucleotide
guaauuaagguuuguucca

SEQ ID NO: 220662 - RNA, 19 nt, Artificial Sequence
  Description of Artificial Sequence: Synthetic oligonucleotide
cuacagaccuguccuaugg

SEQ ID NO: 220663 - RNA, 19 nt, Artificial Sequence
  Description of Artificial Sequence: Synthetic oligonucleotide
accaauguguucuaggguu

SEQ ID NO: 220664 - RNA, 19 nt, Artificial Sequence
  Description of Artificial Sequence: Synthetic oligonucleotide
cucauugcuagagaagugc

SEQ ID NO: 220665 - RNA, 19 nt, Artificial Sequence
  Description of Artificial Sequence: Synthetic oligonucleotide
uacaaagauuuuacuugcc

SEQ ID NO: 220666 - RNA, 19 nt, Artificial Sequence
  Description of Artificial Sequence: Synthetic oligonucleotide
aaauaccaguaaccauuuc

SEQ ID NO: 220667 - RNA, 19 nt, Artificial Sequence
  Description of Artificial Sequence: Synthetic oligonucleotide
uggcuagaaguaaagggcu

SEQ ID NO: 220668 - RNA, 19 nt, Artificial Sequence
  Description of Artificial Sequence: Synthetic oligonucleotide
cuuaacgggguucuggcug

SEQ ID NO: 220669 - RNA, 19 nt, Artificial Sequence
  Description of Artificial Sequence: Synthetic oligonucleotide
ugcauaggagcccguuucg

SEQ ID NO: 220670 - RNA, 19 nt, Artificial Sequence
  Description of Artificial Sequence: Synthetic oligonucleotide
ugagcgauggguuccgaug

SEQ ID NO: 220671 - RNA, 19 nt, Artificial Sequence
  Description of Artificial Sequence: Synthetic oligonucleotide
uuucguagcaauuccuauc

SEQ ID NO: 220672 - RNA, 19 nt, Artificial Sequence
  Description of Artificial Sequence: Synthetic oligonucleotide
aaucugcggcaacaugcac

SEQ ID NO: 220673 - RNA, 19 nt, Artificial Sequence
  Description of Artificial Sequence: Synthetic oligonucleotide
cauguuggaaagcucguac

SEQ ID NO: 220674 - RNA, 19 nt, Artificial Sequence
  Description of Artificial Sequence: Synthetic oligonucleotide
aauaggagaccauguuuaa

SEQ ID NO: 220675 - RNA, 19 nt, Artificial Sequence
  Description of Artificial Sequence: Synthetic oligonucleotide
acucaaccaacugcaaccc

SEQ ID NO: 220676 - RNA, 19 nt, Artificial Sequence
  Description of Artificial Sequence: Synthetic oligonucleotide
auuaagccuuaauauuucu

SEQ ID NO: 220677 - RNA, 19 nt, Artificial Sequence
  Description of Artificial Sequence: Synthetic oligonucleotide
augacucggauucucucuc

SEQ ID NO: 220678 - RNA, 19 nt, Artificial Sequence
  Description of Artificial Sequence: Synthetic oligonucleotide
auauacauacagcaaucau

SEQ ID NO: 220679 - RNA, 19 nt, Artificial Sequence
  Description of Artificial Sequence: Synthetic oligonucleotide
agauucagaggcuuuguau

SEQ ID NO: 220680 - RNA, 19 nt, Artificial Sequence
  Description of Artificial Sequence: Synthetic oligonucleotide
gauguccgugcgcagagcc

SEQ ID NO: 220681 - RNA, 19 nt, Artificial Sequence
  Description of Artificial Sequence: Synthetic oligonucleotide
gguauaagcaggccuuugg

SEQ ID NO: 220682 - RNA, 19 nt, Artificial Sequence
  Description of Artificial Sequence: Synthetic oligonucleotide
gaugaucgcuguuguacag

SEQ ID NO: 220683 - RNA, 19 nt, Artificial Sequence
  Description of Artificial Sequence: Synthetic oligonucleotide
gucaauaccuaggugauca

SEQ ID NO: 220684 - RNA, 19 nt, Artificial Sequence
  Description of Artificial Sequence: Synthetic oligonucleotide
aagguuuaugggucaaaau

SEQ ID NO: 220685 - RNA, 19 nt, Artificial Sequence
  Description of Artificial Sequence: Synthetic oligonucleotide
uagagaagugcaguccagg

SEQ ID NO: 220686 - RNA, 19 nt, Artificial Sequence
  Description of Artificial Sequence: Synthetic oligonucleotide
ucaaaagcuaaagucuuau

SEQ ID NO: 220687 - RNA, 19 nt, Artificial Sequence
  Description of Artificial Sequence: Synthetic oligonucleotide
aggguuuauucuaauagug

SEQ ID NO: 220688 - RNA, 19 nt, Artificial Sequence
  Description of Artificial Sequence: Synthetic oligonucleotide
aguaaccauuucaggaggc

SEQ ID NO: 220689 - RNA, 19 nt, Artificial Sequence
  Description of Artificial Sequence: Synthetic oligonucleotide
  modified_base (9)..(9): a, c, u, g, unknown or other
cauaacaunuacagcauua

SEQ ID NO: 220690 - RNA, 19 nt, Artificial Sequence
  Description of Artificial Sequence: Synthetic oligonucleotide
uacagaauuaagccuuaau

SEQ ID NO: 220691 - RNA, 19 nt, Artificial Sequence
  Description of Artificial Sequence: Synthetic oligonucleotide
cucuuaacgggguucuggc

SEQ ID NO: 220692 - RNA, 19 nt, Artificial Sequence
  Description of Artificial Sequence: Synthetic oligonucleotide
cuguccuaugguuggagcc

SEQ ID NO: 220693 - RNA, 19 nt, Artificial Sequence
  Description of Artificial Sequence: Synthetic oligonucleotide
ucuuauguaucugaaccau

SEQ ID NO: 220694 - RNA, 19 nt, Artificial Sequence
  Description of Artificial Sequence: Synthetic oligonucleotide
ucugaaccauauuaauuau

SEQ ID NO: 220695 - RNA, 19 nt, Artificial Sequence
  Description of Artificial Sequence: Synthetic oligonucleotide
agcucuggucgucacuccc

SEQ ID NO: 220696 - RNA, 19 nt, Artificial Sequence
  Description of Artificial Sequence: Synthetic oligonucleotide
ggacuauaagcccaaacac

SEQ ID NO: 220697 - RNA, 19 nt, Artificial Sequence
  Description of Artificial Sequence: Synthetic oligonucleotide
ugggcaugcacacaugaua

SEQ ID NO: 220698 - RNA, 19 nt, Artificial Sequence
  Description of Artificial Sequence: Synthetic oligonucleotide
auaggagaccauguuuaac

SEQ ID NO: 220699 - RNA, 19 nt, Artificial Sequence
  Description of Artificial Sequence: Synthetic oligonucleotide
ucuuugagcuggaguaaca

SEQ ID NO: 220700 - RNA, 19 nt, Artificial Sequence
  Description of Artificial Sequence: Synthetic oligonucleotide
acgagaagguuuauggguc

SEQ ID NO: 220701 - RNA, 19 nt, Artificial Sequence
  Description of Artificial Sequence: Synthetic oligonucleotide
acucuuaacgggguucugg

SEQ ID NO: 220702 - RNA, 19 nt, Artificial Sequence
  Description of Artificial Sequence: Synthetic oligonucleotide
aguggaaagaggaaacacu

SEQ ID NO: 220703 - RNA, 19 nt, Artificial Sequence
  Description of Artificial Sequence: Synthetic oligonucleotide
cuaagcaucucuacaccuc

SEQ ID NO: 220704 - RNA, 19 nt, Artificial Sequence
  Description of Artificial Sequence: Synthetic oligonucleotide
agaugaucgcuguuguaca

SEQ ID NO: 220705 - RNA, 19 nt, Artificial Sequence
  Description of Artificial Sequence: Synthetic oligonucleotide
cuucuguguugccauauac

SEQ ID NO: 220706 - RNA, 19 nt, Artificial Sequence
  Description of Artificial Sequence: Synthetic oligonucleotide
cugauauuuuggugcauug

SEQ ID NO: 220707 - RNA, 19 nt, Artificial Sequence
  Description of Artificial Sequence: Synthetic oligonucleotide
ccaagauaaaccaaaguca

SEQ ID NO: 220708 - RNA, 19 nt, Artificial Sequence
  Description of Artificial Sequence: Synthetic oligonucleotide
aguucucaacuccacgugu

SEQ ID NO: 220709 - RNA, 19 nt, Artificial Sequence
  Description of Artificial Sequence: Synthetic oligonucleotide
ucuaggguuuauucuaaua

SEQ ID NO: 220710 - RNA, 19 nt, Artificial Sequence
  Description of Artificial Sequence: Synthetic oligonucleotide
uucuaauagugcucagaac

SEQ ID NO: 220711 - RNA, 19 nt, Artificial Sequence
  Description of Artificial Sequence: Synthetic oligonucleotide
guucucgucgccguggagg

SEQ ID NO: 220712 - RNA, 19 nt, Artificial Sequence
  Description of Artificial Sequence: Synthetic oligonucleotide
aucuuugagcuggaguaac

SEQ ID NO: 220713 - RNA, 19 nt, Artificial Sequence
  Description of Artificial Sequence: Synthetic oligonucleotide
acagccuaucucaaguagg

SEQ ID NO: 220714 - RNA, 19 nt, Artificial Sequence
  Description of Artificial Sequence: Synthetic oligonucleotide
uccaauuguugccagccua

SEQ ID NO: 220715 - RNA, 19 nt, Artificial Sequence
  Description of Artificial Sequence: Synthetic oligonucleotide
auccaaagguuuuccaaga

SEQ ID NO: 220716 - RNA, 19 nt, Artificial Sequence
  Description of Artificial Sequence: Synthetic oligonucleotide
aagaacuaguugaccaaug

SEQ ID NO: 220717 - RNA, 19 nt, Artificial Sequence
  Description of Artificial Sequence: Synthetic oligonucleotide
ugcuucauagcaguaugga

SEQ ID NO: 220718 - RNA, 19 nt, Artificial Sequence
  Description of Artificial Sequence: Synthetic oligonucleotide
ucguaccuuggccuuguag

SEQ ID NO: 220719 - RNA, 19 nt, Artificial Sequence
  Description of Artificial Sequence: Synthetic oligonucleotide
guagauuauuguccaccag

SEQ ID NO: 220720 - RNA, 19 nt, Artificial Sequence
  Description of Artificial Sequence: Synthetic oligonucleotide
ugcuagagaagugcagucc

SEQ ID NO: 220721 - RNA, 19 nt, Artificial Sequence
  Description of Artificial Sequence: Synthetic oligonucleotide
uaccuaggugaucaagaac

SEQ ID NO: 220722 - RNA, 19 nt, Artificial Sequence
  Description of Artificial Sequence: Synthetic oligonucleotide
uggcgcuguuucaaguggg

SEQ ID NO: 220723 - RNA, 19 nt, Artificial Sequence
  Description of Artificial Sequence: Synthetic oligonucleotide
ucauacccacgcucaaaag

SEQ ID NO: 220724 - RNA, 19 nt, Artificial Sequence
  Description of Artificial Sequence: Synthetic oligonucleotide
acucuaguuuuguaccaug

SEQ ID NO: 220725 - RNA, 19 nt, Artificial Sequence
  Description of Artificial Sequence: Synthetic oligonucleotide
gaaaacugccauugacuuc

SEQ ID NO: 220726 - RNA, 19 nt, Artificial Sequence
  Description of Artificial Sequence: Synthetic oligonucleotide
cuguggaaaacugccauug

SEQ ID NO: 220727 - RNA, 19 nt, Artificial Sequence
  Description of Artificial Sequence: Synthetic oligonucleotide
cugccccuaauuuuauuag

SEQ ID NO: 220728 - RNA, 19 nt, Artificial Sequence
  Description of Artificial Sequence: Synthetic oligonucleotide
  modified_base (8)..(8): a, c, u, g, unknown or other
auaacaunuacagcauuau

SEQ ID NO: 220729 - RNA, 19 nt, Artificial Sequence
  Description of Artificial Sequence: Synthetic oligonucleotide
uggguuccgaugcaaagua

SEQ ID NO: 220730 - RNA, 19 nt, Artificial Sequence
  Description of Artificial Sequence: Synthetic oligonucleotide
auaccuaggugaucaagaa

SEQ ID NO: 220731 - RNA, 19 nt, Artificial Sequence
  Description of Artificial Sequence: Synthetic oligonucleotide
auacccacgcucaaaagcu

SEQ ID NO: 220732 - RNA, 19 nt, Artificial Sequence
  Description of Artificial Sequence: Synthetic oligonucleotide
ggaucuuuaacaaaugucu

SEQ ID NO: 220733 - RNA, 19 nt, Artificial Sequence
  Description of Artificial Sequence: Synthetic oligonucleotide
guauaagcaggccuuugga

SEQ ID NO: 220734 - RNA, 19 nt, Artificial Sequence
  Description of Artificial Sequence: Synthetic oligonucleotide
agaaaacuaccaaaauccu

SEQ ID NO: 220735 - RNA, 19 nt, Artificial Sequence
  Description of Artificial Sequence: Synthetic oligonucleotide
ugccccuaauuuuauuaga

SEQ ID NO: 220736 - RNA, 19 nt, Artificial Sequence
  Description of Artificial Sequence: Synthetic oligonucleotide
agagaguauuaacgagaag

SEQ ID NO: 220737 - RNA, 19 nt, Artificial Sequence
  Description of Artificial Sequence: Synthetic oligonucleotide
cuagagaagugcaguccag

SEQ ID NO: 220738 - RNA, 19 nt, Artificial Sequence
  Description of Artificial Sequence: Synthetic oligonucleotide
ucugauauuuuggugcauu

SEQ ID NO: 220739 - RNA, 19 nt, Artificial Sequence
  Description of Artificial Sequence: Synthetic oligonucleotide
gaguuaguacaacaugucu

SEQ ID NO: 220740 - RNA, 19 nt, Artificial Sequence
  Description of Artificial Sequence: Synthetic oligonucleotide
uaagaugggacuguaccuu

SEQ ID NO: 220741 - RNA, 19 nt, Artificial Sequence
  Description of Artificial Sequence: Synthetic oligonucleotide
uacccuacuguccccaaau

SEQ ID NO: 220742 - RNA, 19 nt, Artificial Sequence
  Description of Artificial Sequence: Synthetic oligonucleotide
uuguaagaugggacuguac

SEQ ID NO: 220743 - RNA, 19 nt, Artificial Sequence
  Description of Artificial Sequence: Synthetic oligonucleotide
cuuugagcuggaguaacac

SEQ ID NO: 220744 - RNA, 19 nt, Artificial Sequence
  Description of Artificial Sequence: Synthetic oligonucleotide
caccauaccuucccaggcg

SEQ ID NO: 220745 - RNA, 19 nt, Artificial Sequence
  Description of Artificial Sequence: Synthetic oligonucleotide
cuggcgcuguuucaagugg

SEQ ID NO: 220746 - RNA, 19 nt, Artificial Sequence
  Description of Artificial Sequence: Synthetic oligonucleotide
uauuacccuacugucccca

SEQ ID NO: 220747 - RNA, 19 nt, Artificial Sequence
  Description of Artificial Sequence: Synthetic oligonucleotide
uguaccauguagugauuuu

SEQ ID NO: 220748 - RNA, 19 nt, Artificial Sequence
  Description of Artificial Sequence: Synthetic oligonucleotide
agauuauuguccaccagau

SEQ ID NO: 220749 - RNA, 19 nt, Artificial Sequence
  Description of Artificial Sequence: Synthetic oligonucleotide
guuuaacccuuuccaauga

SEQ ID NO: 220750 - RNA, 19 nt, Artificial Sequence
  Description of Artificial Sequence: Synthetic oligonucleotide
ggcaacuacagaccugucc

SEQ ID NO: 220751 - RNA, 19 nt, Artificial Sequence
  Description of Artificial Sequence: Synthetic oligonucleotide
caagugggugaguaaaaca

SEQ ID NO: 220752 - RNA, 19 nt, Artificial Sequence
  Description of Artificial Sequence: Synthetic oligonucleotide
uaauuccauguuguacaag

SEQ ID NO: 220753 - RNA, 19 nt, Artificial Sequence
  Description of Artificial Sequence: Synthetic oligonucleotide
gaagguuuaugggucaaaa

SEQ ID NO: 220754 - RNA, 19 nt, Artificial Sequence
  Description of Artificial Sequence: Synthetic oligonucleotide
cugcauaggagcccguuuc

SEQ ID NO: 220755 - RNA, 19 nt, Artificial Sequence
  Description of Artificial Sequence: Synthetic oligonucleotide
cuggucgucacuccccagc

SEQ ID NO: 220756 - RNA, 19 nt, Artificial Sequence
  Description of Artificial Sequence: Synthetic oligonucleotide
acguguuuucaggauguuc

SEQ ID NO: 220757 - RNA, 19 nt, Artificial Sequence
  Description of Artificial Sequence: Synthetic oligonucleotide
caauaccuaggugaucaag

SEQ ID NO: 220758 - RNA, 19 nt, Artificial Sequence
  Description of Artificial Sequence: Synthetic oligonucleotide
ucuuaacgggguucuggcu

SEQ ID NO: 220759 - RNA, 19 nt, Artificial Sequence
  Description of Artificial Sequence: Synthetic oligonucleotide
aaccaacugcaacccugag

SEQ ID NO: 220760 - RNA, 19 nt, Artificial Sequence
  Description of Artificial Sequence: Synthetic oligonucleotide
uccccauuauguaguagau

SEQ ID NO: 220761 - RNA, 19 nt, Artificial Sequence
  Description of Artificial Sequence: Synthetic oligonucleotide
uuguuccacccaugcaugc

SEQ ID NO: 220762 - RNA, 19 nt, Artificial Sequence
  Description of Artificial Sequence: Synthetic oligonucleotide
ccauagugaauagucauag

SEQ ID NO: 220763 - RNA, 19 nt, Artificial Sequence
  Description of Artificial Sequence: Synthetic oligonucleotide
auaccuucccaggcguggc

SEQ ID NO: 220764 - RNA, 19 nt, Artificial Sequence
  Description of Artificial Sequence: Synthetic oligonucleotide
uacagaccuguccuauggu

SEQ ID NO: 220765 - RNA, 19 nt, Artificial Sequence
  Description of Artificial Sequence: Synthetic oligonucleotide
ucccaccauaccuucccag

SEQ ID NO: 220766 - RNA, 19 nt, Artificial Sequence
  Description of Artificial Sequence: Synthetic oligonucleotide
ucgucacuccccagcaaug

SEQ ID NO: 220767 - RNA, 19 nt, Artificial Sequence
  Description of Artificial Sequence: Synthetic oligonucleotide
uuccaauuguugccagccu

SEQ ID NO: 220768 - RNA, 19 nt, Artificial Sequence
  Description of Artificial Sequence: Synthetic oligonucleotide
auuugugcugaaggcaugu

SEQ ID NO: 220769 - RNA, 19 nt, Artificial Sequence
  Description of Artificial Sequence: Synthetic oligonucleotide
gaccauagugaauagucau

SEQ ID NO: 220770 - RNA, 19 nt, Artificial Sequence
  Description of Artificial Sequence: Synthetic oligonucleotide
guauuaacgagaagguuua

SEQ ID NO: 220771 - RNA, 19 nt, Artificial Sequence
  Description of Artificial Sequence: Synthetic oligonucleotide
auuaaaucccaugggucaa

SEQ ID NO: 220772 - RNA, 19 nt, Artificial Sequence
  Description of Artificial Sequence: Synthetic oligonucleotide
ccagcuaucuuccuuaaca

SEQ ID NO: 220773 - RNA, 19 nt, Artificial Sequence
  Description of Artificial Sequence: Synthetic oligonucleotide
cuaucucaaguaggcagag

SEQ ID NO: 220774 - RNA, 19 nt, Artificial Sequence
  Description of Artificial Sequence: Synthetic oligonucleotide
caauuacaugucuuccuga

SEQ ID NO: 220775 - RNA, 19 nt, Artificial Sequence
  Description of Artificial Sequence: Synthetic oligonucleotide
uuaguacaacaugucuccu

SEQ ID NO: 220776 - RNA, 19 nt, Artificial Sequence
  Description of Artificial Sequence: Synthetic oligonucleotide
ugacucggauucucucucc

SEQ ID NO: 220777 - RNA, 19 nt, Artificial Sequence
  Description of Artificial Sequence: Synthetic oligonucleotide
gaaucugcggcaacaugca

SEQ ID NO: 220778 - RNA, 19 nt, Artificial Sequence
  Description of Artificial Sequence: Synthetic oligonucleotide
guaguagauuauuguccac

SEQ ID NO: 220779 - RNA, 19 nt, Artificial Sequence
  Description of Artificial Sequence: Synthetic oligonucleotide
cauuugugcugaaggcaug

SEQ ID NO: 220780 - RNA, 19 nt, Artificial Sequence
  Description of Artificial Sequence: Synthetic oligonucleotide
gcuucauagcaguauggac

SEQ ID NO: 220781 - RNA, 19 nt, Artificial Sequence
  Description of Artificial Sequence: Synthetic oligonucleotide
ucucuccuaucugauauuu

SEQ ID NO: 220782 - RNA, 19 nt, Artificial Sequence
  Description of Artificial Sequence: Synthetic oligonucleotide
guccucgaaaggcaacccc

SEQ ID NO: 220783 - RNA, 19 nt, Artificial Sequence
  Description of Artificial Sequence: Synthetic oligonucleotide
agauuuuacuugccuucau

SEQ ID NO: 220784 - RNA, 19 nt, Artificial Sequence
  Description of Artificial Sequence: Synthetic oligonucleotide
gcaacaugcacaugucaac

SEQ ID NO: 220785 - RNA, 19 nt, Artificial Sequence
  Description of Artificial Sequence: Synthetic oligonucleotide
cauguguguugaauuauua

SEQ ID NO: 220786 - RNA, 19 nt, Artificial Sequence
  Description of Artificial Sequence: Synthetic oligonucleotide
cucauacccacgcucaaaa

SEQ ID NO: 220787 - RNA, 19 nt, Artificial Sequence
  Description of Artificial Sequence: Synthetic oligonucleotide
cacacugcuaauguagaga

SEQ ID NO: 220788 - RNA, 19 nt, Artificial Sequence
  Description of Artificial Sequence: Synthetic oligonucleotide
gaggcaacuacagaccugu

SEQ ID NO: 220789 - RNA, 19 nt, Artificial Sequence
  Description of Artificial Sequence: Synthetic oligonucleotide
uuguaccauguagugauuu

SEQ ID NO: 220790 - RNA, 19 nt, Artificial Sequence
  Description of Artificial Sequence: Synthetic oligonucleotide
aacccucagcucaugugug

SEQ ID NO: 220791 - RNA, 19 nt, Artificial Sequence
  Description of Artificial Sequence: Synthetic oligonucleotide
aaagggcccucccaccaua

SEQ ID NO: 220792 - RNA, 19 nt, Artificial Sequence
  Description of Artificial Sequence: Synthetic oligonucleotide
aagguuuguuccacccaug

SEQ ID NO: 220793 - RNA, 19 nt, Artificial Sequence
  Description of Artificial Sequence: Synthetic oligonucleotide
guauuacccuacugucccc

SEQ ID NO: 220794 - RNA, 19 nt, Artificial Sequence
  Description of Artificial Sequence: Synthetic oligonucleotide
ucaauaccuaggugaucaa

SEQ ID NO: 220795 - RNA, 19 nt, Artificial Sequence
  Description of Artificial Sequence: Synthetic oligonucleotide
caagaaccccagcaagcug

SEQ ID NO: 220796 - RNA, 19 nt, Artificial Sequence
  Description of Artificial Sequence: Synthetic oligonucleotide
gcuaucuuccuuaacaugu

SEQ ID NO: 220797 - RNA, 19 nt, Artificial Sequence
  Description of Artificial Sequence: Synthetic oligonucleotide
agaacacucuuaacggggu

SEQ ID NO: 220798 - RNA, 19 nt, Artificial Sequence
  Description of Artificial Sequence: Synthetic oligonucleotide
uguuccacccaugcaugcu

SEQ ID NO: 220799 - RNA, 19 nt, Artificial Sequence
  Description of Artificial Sequence: Synthetic oligonucleotide
guuacagccauggacuaua

SEQ ID NO: 220800 - RNA, 19 nt, Artificial Sequence
  Description of Artificial Sequence: Synthetic oligonucleotide
ucguagcaauuccuaucac

SEQ ID NO: 220801 - RNA, 19 nt, Artificial Sequence
  Description of Artificial Sequence: Synthetic oligonucleotide
gcuaaagucuuaucuucca

SEQ ID NO: 220802 - RNA, 19 nt, Artificial Sequence
  Description of Artificial Sequence: Synthetic oligonucleotide
aagggcccucccaccauac

SEQ ID NO: 220803 - RNA, 19 nt, Artificial Sequence
  Description of Artificial Sequence: Synthetic oligonucleotide
uuacagccauggacuauaa

SEQ ID NO: 220804 - RNA, 19 nt, Artificial Sequence
  Description of Artificial Sequence: Synthetic oligonucleotide
uuacccuacuguccccaaa

SEQ ID NO: 220805 - RNA, 19 nt, Artificial Sequence
  Description of Artificial Sequence: Synthetic oligonucleotide
uuuguaccauguagugauu

SEQ ID NO: 220806 - RNA, 19 nt, Artificial Sequence
  Description of Artificial Sequence: Synthetic oligonucleotide
gagauucagaggcuuugua

SEQ ID NO: 220807 - RNA, 19 nt, Artificial Sequence
  Description of Artificial Sequence: Synthetic oligonucleotide
uuaaaucccaugggucaau

SEQ ID NO: 220808 - RNA, 19 nt, Artificial Sequence
  Description of Artificial Sequence: Synthetic oligonucleotide
agggcccucccaccauacc

SEQ ID NO: 220809 - RNA, 19 nt, Artificial Sequence
  Description of Artificial Sequence: Synthetic oligonucleotide
caaccaacugcaacccuga

SEQ ID NO: 220810 - RNA, 19 nt, Artificial Sequence
  Description of Artificial Sequence: Synthetic oligonucleotide
cuaauagugcucagaacau

SEQ ID NO: 220811 - RNA, 19 nt, Artificial Sequence
  Description of Artificial Sequence: Synthetic oligonucleotide
gggcaugcacacaugauac

SEQ ID NO: 220812 - RNA, 19 nt, Artificial Sequence
  Description of Artificial Sequence: Synthetic oligonucleotide
ggcucuacuuuccaaagua

SEQ ID NO: 220813 - RNA, 19 nt, Artificial Sequence
  Description of Artificial Sequence: Synthetic oligonucleotide
cuaagaugaucgcuguugu

SEQ ID NO: 220814 - RNA, 19 nt, Artificial Sequence
  Description of Artificial Sequence: Synthetic oligonucleotide
ucacuucauggcucuacuu

SEQ ID NO: 220815 - RNA, 19 nt, Artificial Sequence
  Description of Artificial Sequence: Synthetic oligonucleotide
aguggagauucagaggcuu

SEQ ID NO: 220816 - RNA, 19 nt, Artificial Sequence
  Description of Artificial Sequence: Synthetic oligonucleotide
gugaucaagaacacucuua

SEQ ID NO: 220817 - RNA, 19 nt, Artificial Sequence
  Description of Artificial Sequence: Synthetic oligonucleotide
cucgucgccguggaggcag

SEQ ID NO: 220818 - RNA, 19 nt, Artificial Sequence
  Description of Artificial Sequence: Synthetic oligonucleotide
caugggucaauaccuaggu

SEQ ID NO: 220819 - RNA, 19 nt, Artificial Sequence
  Description of Artificial Sequence: Synthetic oligonucleotide
gguuggagccuccugcuuc

SEQ ID NO: 220820 - RNA, 19 nt, Artificial Sequence
  Description of Artificial Sequence: Synthetic oligonucleotide
ucucaacuccacguguuuu

SEQ ID NO: 220821 - RNA, 19 nt, Artificial Sequence
  Description of Artificial Sequence: Synthetic oligonucleotide
ucccaugggucaauaccua

SEQ ID NO: 220822 - RNA, 19 nt, Artificial Sequence
  Description of Artificial Sequence: Synthetic oligonucleotide
gaccaauguguucuagggu

SEQ ID NO: 220823 - RNA, 19 nt, Artificial Sequence
  Description of Artificial Sequence: Synthetic oligonucleotide
acaccaacuccagcacccg

SEQ ID NO: 220824 - RNA, 19 nt, Artificial Sequence
  Description of Artificial Sequence: Synthetic oligonucleotide
acguuacuguuguaacaaa

SEQ ID NO: 220825 - RNA, 19 nt, Artificial Sequence
  Description of Artificial Sequence: Synthetic oligonucleotide
cccaguggagauucagagg

SEQ ID NO: 220826 - RNA, 19 nt, Artificial Sequence
  Description of Artificial Sequence: Synthetic oligonucleotide
gcaguuguaagaugggacu

SEQ ID NO: 220827 - RNA, 19 nt, Artificial Sequence
  Description of Artificial Sequence: Synthetic oligonucleotide
cagaggauguccgugcgca

SEQ ID NO: 220828 - RNA, 19 nt, Artificial Sequence
  Description of Artificial Sequence: Synthetic oligonucleotide
acaccucgcuguucucguc

SEQ ID NO: 220829 - RNA, 19 nt, Artificial Sequence
  Description of Artificial Sequence: Synthetic oligonucleotide
uggcuggcgcuguuucaag

SEQ ID NO: 220830 - RNA, 19 nt, Artificial Sequence
  Description of Artificial Sequence: Synthetic oligonucleotide
guuucguagcaauuccuau

SEQ ID NO: 220831 - RNA, 19 nt, Artificial Sequence
  Description of Artificial Sequence: Synthetic oligonucleotide
cugcuaauguagagaagaa

SEQ ID NO: 220832 - RNA, 19 nt, Artificial Sequence
  Description of Artificial Sequence: Synthetic oligonucleotide
gcuggcgcuguuucaagug

SEQ ID NO: 220833 - RNA, 19 nt, Artificial Sequence
  Description of Artificial Sequence: Synthetic oligonucleotide
ggcguggcggcccucacug

SEQ ID NO: 220834 - RNA, 19 nt, Artificial Sequence
  Description of Artificial Sequence: Synthetic oligonucleotide
ccuaucucaaguaggcaga

SEQ ID NO: 220835 - RNA, 19 nt, Artificial Sequence
  Description of Artificial Sequence: Synthetic oligonucleotide
uauuaacgagaagguuuau

SEQ ID NO: 220836 - RNA, 19 nt, Artificial Sequence
  Description of Artificial Sequence: Synthetic oligonucleotide
uacccacgcucaaaagcua

SEQ ID NO: 220837 - RNA, 19 nt, Artificial Sequence
  Description of Artificial Sequence: Synthetic oligonucleotide
cccguuucguagcaauucc

SEQ ID NO: 220838 - RNA, 19 nt, Artificial Sequence
  Description of Artificial Sequence: Synthetic oligonucleotide
ggcaacaugcacaugucaa

SEQ ID NO: 220839 - RNA, 19 nt, Artificial Sequence
  Description of Artificial Sequence: Synthetic oligonucleotide
auuacccuacuguccccaa

SEQ ID NO: 220840 - RNA, 19 nt, Artificial Sequence
  Description of Artificial Sequence: Synthetic oligonucleotide
ucgcuguucucgucgccgu

SEQ ID NO: 220841 - RNA, 19 nt, Artificial Sequence
  Description of Artificial Sequence: Synthetic oligonucleotide
agugggugaguaaaacauu

SEQ ID NO: 220842 - RNA, 19 nt, Artificial Sequence
  Description of Artificial Sequence: Synthetic oligonucleotide
cauaggagcccguuucgua

SEQ ID NO: 220843 - RNA, 19 nt, Artificial Sequence
  Description of Artificial Sequence: Synthetic oligonucleotide
agcgauggguuccgaugca

SEQ ID NO: 220844 - RNA, 19 nt, Artificial Sequence
  Description of Artificial Sequence: Synthetic oligonucleotide
guaccagugcuugcacacc

SEQ ID NO: 220845 - RNA, 19 nt, Artificial Sequence
  Description of Artificial Sequence: Synthetic oligonucleotide
agaagguuuaugggucaaa

SEQ ID NO: 220846 - RNA, 19 nt, Artificial Sequence
  Description of Artificial Sequence: Synthetic oligonucleotide
aguugaccaauguguucua

SEQ ID NO: 220847 - RNA, 19 nt, Artificial Sequence
  Description of Artificial Sequence: Synthetic oligonucleotide
gcuguucucgucgccgugg

SEQ ID NO: 220848 - RNA, 19 nt, Artificial Sequence
  Description of Artificial Sequence: Synthetic oligonucleotide
agccccaguggagauucag

SEQ ID NO: 220849 - RNA, 19 nt, Artificial Sequence
  Description of Artificial Sequence: Synthetic oligonucleotide
aggagcccguuucguagca

SEQ ID NO: 220850 - RNA, 19 nt, Artificial Sequence
  Description of Artificial Sequence: Synthetic oligonucleotide
cacgcucaaaagcuaaagu

SEQ ID NO: 220851 - RNA, 19 nt, Artificial Sequence
  Description of Artificial Sequence: Synthetic oligonucleotide
gguuccgaugcaaaguaaa

SEQ ID NO: 220852 - RNA, 19 nt, Artificial Sequence
  Description of Artificial Sequence: Synthetic oligonucleotide
auagugcucagaacauuua

SEQ ID NO: 220853 - RNA, 19 nt, Artificial Sequence
  Description of Artificial Sequence: Synthetic oligonucleotide
caacugcccacucaaccaa

SEQ ID NO: 220854 - RNA, 19 nt, Artificial Sequence
  Description of Artificial Sequence: Synthetic oligonucleotide
cauagugaauagucauagu

SEQ ID NO: 220855 - RNA, 19 nt, Artificial Sequence
  Description of Artificial Sequence: Synthetic oligonucleotide
ggcuagaaguaaagggcug

SEQ ID NO: 220856 - RNA, 19 nt, Artificial Sequence
  Description of Artificial Sequence: Synthetic oligonucleotide
cuggguauaagcaggccuu

SEQ ID NO: 220857 - RNA, 19 nt, Artificial Sequence
  Description of Artificial Sequence: Synthetic oligonucleotide
uggguauaagcaggccuuu

SEQ ID NO: 220858 - RNA, 19 nt, Artificial Sequence
  Description of Artificial Sequence: Synthetic oligonucleotide
cccuucuaagcaucucuac

SEQ ID NO: 220859 - RNA, 19 nt, Artificial Sequence
  Description of Artificial Sequence: Synthetic oligonucleotide
gaaagacguuacuguugua

SEQ ID NO: 220860 - RNA, 19 nt, Artificial Sequence
  Description of Artificial Sequence: Synthetic oligonucleotide
acccuacuguccccaaaua

SEQ ID NO: 220861 - RNA, 19 nt, Artificial Sequence
  Description of Artificial Sequence: Synthetic oligonucleotide
gcgcagagccucuucugcc

SEQ ID NO: 220862 - RNA, 19 nt, Artificial Sequence
  Description of Artificial Sequence: Synthetic oligonucleotide
gccauugacuuccccauua

SEQ ID NO: 220863 - RNA, 19 nt, Artificial Sequence
  Description of Artificial Sequence: Synthetic oligonucleotide
gcucugagcgauggguucc

SEQ ID NO: 220864 - RNA, 19 nt, Artificial Sequence
  Description of Artificial Sequence: Synthetic oligonucleotide
cagcgguaccagugcuugc

SEQ ID NO: 220865 - RNA, 19 nt, Artificial Sequence
  Description of Artificial Sequence: Synthetic oligonucleotide
gaggaccauagugaauagu

SEQ ID NO: 220866 - RNA, 19 nt, Artificial Sequence
  Description of Artificial Sequence: Synthetic oligonucleotide
ccaauuguugccagccuaa

SEQ ID NO: 220867 - RNA, 19 nt, Artificial Sequence
  Description of Artificial Sequence: Synthetic oligonucleotide
aucugauauuuuggugcau

SEQ ID NO: 220868 - RNA, 19 nt, Artificial Sequence
  Description of Artificial Sequence: Synthetic oligonucleotide
cuggaguaacacacugcua

SEQ ID NO: 220869 - RNA, 19 nt, Artificial Sequence
  Description of Artificial Sequence: Synthetic oligonucleotide
acccacgcucaaaagcuaa

SEQ ID NO: 220870 - RNA, 19 nt, Artificial Sequence
  Description of Artificial Sequence: Synthetic oligonucleotide
caacuacagaccuguccua

SEQ ID NO: 220871 - RNA, 19 nt, Artificial Sequence
  Description of Artificial Sequence: Synthetic oligonucleotide
ccaaaauccugcggcuccc

SEQ ID NO: 220872 - RNA, 19 nt, Artificial Sequence
  Description of Artificial Sequence: Synthetic oligonucleotide
cauuuaccauaauucuguu

SEQ ID NO: 220873 - RNA, 19 nt, Artificial Sequence
  Description of Artificial Sequence: Synthetic oligonucleotide
cauguuguacaagguuucu

SEQ ID NO: 220874 - RNA, 19 nt, Artificial Sequence
  Description of Artificial Sequence: Synthetic oligonucleotide
aggcguggcggcccucacu

SEQ ID NO: 220875 - RNA, 19 nt, Artificial Sequence
  Description of Artificial Sequence: Synthetic oligonucleotide
gaacacucuuaacgggguu

SEQ ID NO: 220876 - RNA, 19 nt, Artificial Sequence
  Description of Artificial Sequence: Synthetic oligonucleotide
ggugaucaagaacacucuu

SEQ ID NO: 220877 - RNA, 19 nt, Artificial Sequence
  Description of Artificial Sequence: Synthetic oligonucleotide
guuggaaagcucguaccuu

SEQ ID NO: 220878 - RNA, 19 nt, Artificial Sequence
  Description of Artificial Sequence: Synthetic oligonucleotide
aggcaacuacagaccuguc

SEQ ID NO: 220879 - RNA, 19 nt, Artificial Sequence
  Description of Artificial Sequence: Synthetic oligonucleotide
cagucggccgccggccccg

SEQ ID NO: 220880 - RNA, 19 nt, Artificial Sequence
  Description of Artificial Sequence: Synthetic oligonucleotide
aucggugcucugagcgaug

SEQ ID NO: 220881 - RNA, 19 nt, Artificial Sequence
  Description of Artificial Sequence: Synthetic oligonucleotide
ccuugcaccaucggugcuc

SEQ ID NO: 220882 - RNA, 19 nt, Artificial Sequence
  Description of Artificial Sequence: Synthetic oligonucleotide
gcgcuguuucaagugggug

SEQ ID NO: 220883 - RNA, 19 nt, Artificial Sequence
  Description of Artificial Sequence: Synthetic oligonucleotide
ggcagaccaugcuucucaa

SEQ ID NO: 220884 - RNA, 19 nt, Artificial Sequence
  Description of Artificial Sequence: Synthetic oligonucleotide
cucaaccaacugcaacccu

SEQ ID NO: 220885 - RNA, 19 nt, Artificial Sequence
  Description of Artificial Sequence: Synthetic oligonucleotide
cuugcaccaucggugcucu

SEQ ID NO: 220886 - RNA, 19 nt, Artificial Sequence
  Description of Artificial Sequence: Synthetic oligonucleotide
gccauauacagcagacacu

SEQ ID NO: 220887 - RNA, 19 nt, Artificial Sequence
  Description of Artificial Sequence: Synthetic oligonucleotide
cguuucguagcaauuccua

SEQ ID NO: 220888 - RNA, 19 nt, Artificial Sequence
  Description of Artificial Sequence: Synthetic oligonucleotide
ggcaugcacacaugauacu

SEQ ID NO: 220889 - RNA, 19 nt, Artificial Sequence
  Description of Artificial Sequence: Synthetic oligonucleotide
gccccuaauuuuauuagau

SEQ ID NO: 220890 - RNA, 19 nt, Artificial Sequence
  Description of Artificial Sequence: Synthetic oligonucleotide
gguugcagaggauguccgu

SEQ ID NO: 220891 - RNA, 19 nt, Artificial Sequence
  Description of Artificial Sequence: Synthetic oligonucleotide
gcccucacugaaaccaauc

SEQ ID NO: 220892 - RNA, 19 nt, Artificial Sequence
  Description of Artificial Sequence: Synthetic oligonucleotide
ccacguguuuucaggaugu

SEQ ID NO: 220893 - RNA, 19 nt, Artificial Sequence
  Description of Artificial Sequence: Synthetic oligonucleotide
cuccacguguuuucaggau

SEQ ID NO: 220894 - RNA, 19 nt, Artificial Sequence
  Description of Artificial Sequence: Synthetic oligonucleotide
ggauguccgugcgcagagc

SEQ ID NO: 220895 - RNA, 19 nt, Artificial Sequence
  Description of Artificial Sequence: Synthetic oligonucleotide
ggcagucggccgccggccc

SEQ ID NO: 220896 - RNA, 19 nt, Artificial Sequence
  Description of Artificial Sequence: Synthetic oligonucleotide
cauggacuauaagcccaaa

SEQ ID NO: 220897 - RNA, 19 nt, Artificial Sequence
  Description of Artificial Sequence: Synthetic oligonucleotide
gcagucggccgccggcccc

SEQ ID NO: 220898 - RNA, 19 nt, Artificial Sequence
  Description of Artificial Sequence: Synthetic oligonucleotide
gcauguuggaaagcucgua

SEQ ID NO: 220899 - RNA, 19 nt, Artificial Sequence
  Description of Artificial Sequence: Synthetic oligonucleotide
caucggugcucugagcgau

SEQ ID NO: 220900 - RNA, 19 nt, Artificial Sequence
  Description of Artificial Sequence: Synthetic oligonucleotide
ccaagaaccccagcaagcu

SEQ ID NO: 220901 - RNA, 19 nt, Artificial Sequence
  Description of Artificial Sequence: Synthetic oligonucleotide
ggcauguuggaaagcucgu

SEQ ID NO: 220902 - RNA, 19 nt, Artificial Sequence
  Description of Artificial Sequence: Synthetic oligonucleotide
gaucgcuguuguacaguuu

SEQ ID NO: 220903 - RNA, 19 nt, Artificial Sequence
  Description of Artificial Sequence: Synthetic oligonucleotide
gggcagucggccgccggcc

SEQ ID NO: 220904 - RNA, 19 nt, Artificial Sequence
  Description of Artificial Sequence: Synthetic oligonucleotide
guggcggcccucacugaaa

SEQ ID NO: 220905 - RNA, 19 nt, Artificial Sequence
  Description of Artificial Sequence: Synthetic oligonucleotide
ggcuggcgcuguuucaagu

SEQ ID NO: 220906 - RNA, 19 nt, Artificial Sequence
  Description of Artificial Sequence: Synthetic oligonucleotide
ggucgucacuccccagcaa

SEQ ID NO: 220907 - RNA, 19 nt, Artificial Sequence
  Description of Artificial Sequence: Synthetic oligonucleotide
ccccgagcccgcacucgcg

SEQ ID NO: 220908 - RNA, 19 nt, Artificial Sequence
  Description of Artificial Sequence: Synthetic oligonucleotide
caaaauccugcggcucccu

SEQ ID NO: 220909 - RNA, 19 nt, Artificial Sequence
  Description of Artificial Sequence: Synthetic oligonucleotide
ggguuccgaugcaaaguaa

SEQ ID NO: 220910 - RNA, 19 nt, Artificial Sequence
  Description of Artificial Sequence: Synthetic oligonucleotide
cuaucacuucauggcucua

SEQ ID NO: 220911 - RNA, 19 nt, Artificial Sequence
  Description of Artificial Sequence: Synthetic oligonucleotide
caaagggcccucccaccau

SEQ ID NO: 220912 - RNA, 19 nt, Artificial Sequence
  Description of Artificial Sequence: Synthetic oligonucleotide
cccacgcucaaaagcuaaa

SEQ ID NO: 220913 - RNA, 19 nt, Artificial Sequence
  Description of Artificial Sequence: Synthetic oligonucleotide
ccccuaauuuuauuagauu

SEQ ID NO: 220914 - RNA, 19 nt, Artificial Sequence
  Description of Artificial Sequence: Synthetic oligonucleotide
ccaauguguucuaggguuu

SEQ ID NO: 220915 - RNA, 19 nt, Artificial Sequence
  Description of Artificial Sequence: Synthetic oligonucleotide
gcacccggcugggcagucg

SEQ ID NO: 220916 - RNA, 19 nt, Artificial Sequence
  Description of Artificial Sequence: Synthetic oligonucleotide
cugcggcaacaugcacaug

SEQ ID NO: 220917 - RNA, 19 nt, Artificial Sequence
  Description of Artificial Sequence: Synthetic oligonucleotide
ggcgcuguuucaagugggu

SEQ ID NO: 220918 - RNA, 19 nt, Artificial Sequence
  Description of Artificial Sequence: Synthetic oligonucleotide
auccugcggcucccuucua

SEQ ID NO: 220919 - RNA, 19 nt, Artificial Sequence
  Description of Artificial Sequence: Synthetic oligonucleotide
cacugccccuaauuuuauu

SEQ ID NO: 220920 - RNA, 19 nt, Artificial Sequence
  Description of Artificial Sequence: Synthetic oligonucleotide
ggagcccguuucguagcaa

SEQ ID NO: 220921 - RNA, 19 nt, Artificial Sequence
  Description of Artificial Sequence: Synthetic oligonucleotide
cucguaccuuggccuugua

SEQ ID NO: 220922 - RNA, 19 nt, Artificial Sequence
  Description of Artificial Sequence: Synthetic oligonucleotide
cguggcggcccucacugaa

SEQ ID NO: 220923 - RNA, 19 nt, Artificial Sequence
  Description of Artificial Sequence: Synthetic oligonucleotide
cgugcgcagagccucuucu

SEQ ID NO: 220924 - RNA, 19 nt, Artificial Sequence
  Description of Artificial Sequence: Synthetic oligonucleotide
gcucguaccuuggccuugu

SEQ ID NO: 220925 - RNA, 19 nt, Artificial Sequence
  Description of Artificial Sequence: Synthetic oligonucleotide
guccgugcgcagagccucu

SEQ ID NO: 220926 - RNA, 19 nt, Artificial Sequence
  Description of Artificial Sequence: Synthetic oligonucleotide
cacguguuuucaggauguu

SEQ ID NO: 220927 - RNA, 19 nt, Artificial Sequence
  Description of Artificial Sequence: Synthetic oligonucleotide
ccccauuauguaguagauu

SEQ ID NO: 220928 - RNA, 19 nt, Artificial Sequence
  Description of Artificial Sequence: Synthetic oligonucleotide
gcgggcgcacaggcuccgc

SEQ ID NO: 220929 - RNA, 19 nt, Artificial Sequence
  Description of Artificial Sequence: Synthetic oligonucleotide
ccgccacaccucgcuguuc

SEQ ID NO: 220930 - RNA, 19 nt, Artificial Sequence
  Description of Artificial Sequence: Synthetic oligonucleotide
ccccagcaagcugcucacu

SEQ ID NO: 220931 - RNA, 19 nt, Artificial Sequence
  Description of Artificial Sequence: Synthetic oligonucleotide
  modified_base (1)..(1): a, c, u, g, unknown or other
nuacagcauuauaaaguua

SEQ ID NO: 220932 - RNA, 19 nt, Artificial Sequence
  Description of Artificial Sequence: Synthetic oligonucleotide
auaaugacgaccuucaugc

SEQ ID NO: 220933 - RNA, 19 nt, Artificial Sequence
  Description of Artificial Sequence: Synthetic oligonucleotide
auuaguaucagauacacag

SEQ ID NO: 220934 - RNA, 19 nt, Artificial Sequence
  Description of Artificial Sequence: Synthetic oligonucleotide
uuuauggugauucuuacgg

SEQ ID NO: 220935 - RNA, 19 nt, Artificial Sequence
  Description of Artificial Sequence: Synthetic oligonucleotide
aucuacucaauauagaccc

SEQ ID NO: 220936 - RNA, 19 nt, Artificial Sequence
  Description of Artificial Sequence: Synthetic oligonucleotide
ucaauauagacccuauugg

SEQ ID NO: 220937 - RNA, 19 nt, Artificial Sequence
  Description of Artificial Sequence: Synthetic oligonucleotide
auaaacuggaaccaugggc

SEQ ID NO: 220938 - RNA, 19 nt, Artificial Sequence
  Description of Artificial Sequence: Synthetic oligonucleotide
aaugcgauuacguucaugu

SEQ ID NO: 220939 - RNA, 19 nt, Artificial Sequence
  Description of Artificial Sequence: Synthetic oligonucleotide
auacuuaugagccacugac

SEQ ID NO: 220940 - RNA, 19 nt, Artificial Sequence
  Description of Artificial Sequence: Synthetic oligonucleotide
aauauagacccuauuggcc

SEQ ID NO: 220941 - RNA, 19 nt, Artificial Sequence
  Description of Artificial Sequence: Synthetic oligonucleotide
auauagacccuauuggccc

SEQ ID NO: 220942 - RNA, 19 nt, Artificial Sequence
  Description of Artificial Sequence: Synthetic oligonucleotide
uuuguuaucauacaugaua

SEQ ID NO: 220943 - RNA, 19 nt, Artificial Sequence
  Description of Artificial Sequence: Synthetic oligonucleotide
agcaaagacauacagguuc

SEQ ID NO: 220944 - RNA, 19 nt, Artificial Sequence
  Description of Artificial Sequence: Synthetic oligonucleotide
uuuacugacauguauggca

SEQ ID NO: 220945 - RNA, 19 nt, Artificial Sequence
  Description of Artificial Sequence: Synthetic oligonucleotide
uuccccauaguucuuaugg

SEQ ID NO: 220946 - RNA, 19 nt, Artificial Sequence
  Description of Artificial Sequence: Synthetic oligonucleotide
augucaaauaugaagaggc

SEQ ID NO: 220947 - RNA, 19 nt, Artificial Sequence
  Description of Artificial Sequence: Synthetic oligonucleotide
uuucaguccauucagaaaa

SEQ ID NO: 220948 - RNA, 19 nt, Artificial Sequence
  Description of Artificial Sequence: Synthetic oligonucleotide
auagaaaaugcccugucgg

SEQ ID NO: 220949 - RNA, 19 nt, Artificial Sequence
  Description of Artificial Sequence: Synthetic oligonucleotide
uacaugauauauuaguggc

SEQ ID NO: 220950 - RNA, 19 nt, Artificial Sequence
  Description of Artificial Sequence: Synthetic oligonucleotide
aaucuacucaauauagacc

SEQ ID NO: 220951 - RNA, 19 nt, Artificial Sequence
  Description of Artificial Sequence: Synthetic oligonucleotide
auuuuacugacauguaugg

SEQ ID NO: 220952 - RNA, 19 nt, Artificial Sequence
  Description of Artificial Sequence: Synthetic oligonucleotide
ucacuaacaaugaucacag

SEQ ID NO: 220953 - RNA, 19 nt, Artificial Sequence
  Description of Artificial Sequence: Synthetic oligonucleotide
auaaccauccaugugaggg

SEQ ID NO: 220954 - RNA, 19 nt, Artificial Sequence
  Description of Artificial Sequence: Synthetic oligonucleotide
uacggaaaacacaaugucg

SEQ ID NO: 220955 - RNA, 19 nt, Artificial Sequence
  Description of Artificial Sequence: Synthetic oligonucleotide
ugaaaugcgauuacguuca

SEQ ID NO: 220956 - RNA, 19 nt, Artificial Sequence
  Description of Artificial Sequence: Synthetic oligonucleotide
aaugacgaccuucaugcuc

SEQ ID NO: 220957 - RNA, 19 nt, Artificial Sequence
  Description of Artificial Sequence: Synthetic oligonucleotide
gauguuucgaaauaccuga

SEQ ID NO: 220958 - RNA, 19 nt, Artificial Sequence
  Description of Artificial Sequence: Synthetic oligonucleotide
ugagguuagacaaauguuc

SEQ ID NO: 220959 - RNA, 19 nt, Artificial Sequence
  Description of Artificial Sequence: Synthetic oligonucleotide
cauaucaucacgguaaccc

SEQ ID NO: 220960 - RNA, 19 nt, Artificial Sequence
  Description of Artificial Sequence: Synthetic oligonucleotide
aaucagacccucauagugc

SEQ ID NO: 220961 - RNA, 19 nt, Artificial Sequence
  Description of Artificial Sequence: Synthetic oligonucleotide
auauauuaguggcagaagu

SEQ ID NO: 220962 - RNA, 19 nt, Artificial Sequence
  Description of Artificial Sequence: Synthetic oligonucleotide
ugcgauuacguucauguug

SEQ ID NO: 220963 - RNA, 19 nt, Artificial Sequence
  Description of Artificial Sequence: Synthetic oligonucleotide
uucuuuacgggucaacuug

SEQ ID NO: 220964 - RNA, 19 nt, Artificial Sequence
  Description of Artificial Sequence: Synthetic oligonucleotide
cucaauauagacccuauug

SEQ ID NO: 220965 - RNA, 19 nt, Artificial Sequence
  Description of Artificial Sequence: Synthetic oligonucleotide
uguacggaaaacacaaugu

SEQ ID NO: 220966 - RNA, 19 nt, Artificial Sequence
  Description of Artificial Sequence: Synthetic oligonucleotide
agaaagaagcauugcauag

SEQ ID NO: 220967 - RNA, 19 nt, Artificial Sequence
  Description of Artificial Sequence: Synthetic oligonucleotide
uuaauagcagaaauccuac

SEQ ID NO: 220968 - RNA, 19 nt, Artificial Sequence
  Description of Artificial Sequence: Synthetic oligonucleotide
caaucuacucaauauagac

SEQ ID NO: 220969 - RNA, 19 nt, Artificial Sequence
  Description of Artificial Sequence: Synthetic oligonucleotide
uucgaaauaccugaaauac

SEQ ID NO: 220970 - RNA, 19 nt, Artificial Sequence
  Description of Artificial Sequence: Synthetic oligonucleotide
aaauaugucauaccaguuu

SEQ ID NO: 220971 - RNA, 19 nt, Artificial Sequence
  Description of Artificial Sequence: Synthetic oligonucleotide
aucaccauuagacuggucu

SEQ ID NO: 220972 - RNA, 19 nt, Artificial Sequence
  Description of Artificial Sequence: Synthetic oligonucleotide
gaugucgccaaauaacagc

SEQ ID NO: 220973 - RNA, 19 nt, Artificial Sequence
  Description of Artificial Sequence: Synthetic oligonucleotide
caucacauucauaaugacg

SEQ ID NO: 220974 - RNA, 19 nt, Artificial Sequence
  Description of Artificial Sequence: Synthetic oligonucleotide
ugauguuucgaaauaccug

SEQ ID NO: 220975 - RNA, 19 nt, Artificial Sequence
  Description of Artificial Sequence: Synthetic oligonucleotide
ucuauaauugccccagcca

SEQ ID NO: 220976 - RNA, 19 nt, Artificial Sequence
  Description of Artificial Sequence: Synthetic oligonucleotide
uuuagauuaugcuuucgcu

SEQ ID NO: 220977 - RNA, 19 nt, Artificial Sequence
  Description of Artificial Sequence: Synthetic oligonucleotide
ugccauagaaucuuauucc

SEQ ID NO: 220978 - RNA, 19 nt, Artificial Sequence
  Description of Artificial Sequence: Synthetic oligonucleotide
uuuuauggugauucuuacg

SEQ ID NO: 220979 - RNA, 19 nt, Artificial Sequence
  Description of Artificial Sequence: Synthetic oligonucleotide
cauuuuacugacauguaug

SEQ ID NO: 220980 - RNA, 19 nt, Artificial Sequence
  Description of Artificial Sequence: Synthetic oligonucleotide
uuguuaucauacaugauau

SEQ ID NO: 220981 - RNA, 19 nt, Artificial Sequence
  Description of Artificial Sequence: Synthetic oligonucleotide
auugguccaacuugcuucc

SEQ ID NO: 220982 - RNA, 19 nt, Artificial Sequence
  Description of Artificial Sequence: Synthetic oligonucleotide
agaaauccuacuuggguag

SEQ ID NO: 220983 - RNA, 19 nt, Artificial Sequence
  Description of Artificial Sequence: Synthetic oligonucleotide
gauagagagagaauugcag

SEQ ID NO: 220984 - RNA, 19 nt, Artificial Sequence
  Description of Artificial Sequence: Synthetic oligonucleotide
guacugacaacuuaaauaa

SEQ ID NO: 220985 - RNA, 19 nt, Artificial Sequence
  Description of Artificial Sequence: Synthetic oligonucleotide
agaaaacauaucaucacgg

SEQ ID NO: 220986 - RNA, 19 nt, Artificial Sequence
  Description of Artificial Sequence: Synthetic oligonucleotide
agauguuuuagauuaugcu

SEQ ID NO: 220987 - RNA, 19 nt, Artificial Sequence
  Description of Artificial Sequence: Synthetic oligonucleotide
aaaacauaucaucacggua

SEQ ID NO: 220988 - RNA, 19 nt, Artificial Sequence
  Description of Artificial Sequence: Synthetic oligonucleotide
uauauuaguggcagaaguc

SEQ ID NO: 220989 - RNA, 19 nt, Artificial Sequence
  Description of Artificial Sequence: Synthetic oligonucleotide
uguuuucuauaauugcccc

SEQ ID NO: 220990 - RNA, 19 nt, Artificial Sequence
  Description of Artificial Sequence: Synthetic oligonucleotide
ugcucuagagucuugggug

SEQ ID NO: 220991 - RNA, 19 nt, Artificial Sequence
  Description of Artificial Sequence: Synthetic oligonucleotide
uucuauaauugccccagcc

SEQ ID NO: 220992 - RNA, 19 nt, Artificial Sequence
  Description of Artificial Sequence: Synthetic oligonucleotide
caugauauauuaguggcag

SEQ ID NO: 220993 - RNA, 19 nt, Artificial Sequence
  Description of Artificial Sequence: Synthetic oligonucleotide
caucuaacagacauauuag

SEQ ID NO: 220994 - RNA, 19 nt, Artificial Sequence
  Description of Artificial Sequence: Synthetic oligonucleotide
uuacuaacccacuugcuac

SEQ ID NO: 220995 - RNA, 19 nt, Artificial Sequence
  Description of Artificial Sequence: Synthetic oligonucleotide
aaugucguuggcuucaauu

SEQ ID NO: 220996 - RNA, 19 nt, Artificial Sequence
  Description of Artificial Sequence: Synthetic oligonucleotide
aaggauuugugaguugcac

SEQ ID NO: 220997 - RNA, 19 nt, Artificial Sequence
  Description of Artificial Sequence: Synthetic oligonucleotide
acccagaucaccauuagac

SEQ ID NO: 220998 - RNA, 19 nt, Artificial Sequence
  Description of Artificial Sequence: Synthetic oligonucleotide
cacaccauaaugaugaaga

SEQ ID NO: 220999 - RNA, 19 nt, Artificial Sequence
  Description of Artificial Sequence: Synthetic oligonucleotide
acauuuugaguuugcgugg

SEQ ID NO: 221000 - RNA, 19 nt, Artificial Sequence
  Description of Artificial Sequence: Synthetic oligonucleotide
uagccggauauuuagaaga

SEQ ID NO: 221001 - RNA, 19 nt, Artificial Sequence
  Description of Artificial Sequence: Synthetic oligonucleotide
aagcacuaggcauucaccu

SEQ ID NO: 221002 - RNA, 19 nt, Artificial Sequence
  Description of Artificial Sequence: Synthetic oligonucleotide
guuauuuuguaguaagcca

SEQ ID NO: 221003 - RNA, 19 nt, Artificial Sequence
  Description of Artificial Sequence: Synthetic oligonucleotide
gauucuuacggacauccac

SEQ ID NO: 221004 - RNA, 19 nt, Artificial Sequence
  Description of Artificial Sequence: Synthetic oligonucleotide
agaaucuuauuccugugcu

SEQ ID NO: 221005 - RNA, 19 nt, Artificial Sequence
  Description of Artificial Sequence: Synthetic oligonucleotide
aggauaaacagcauaaacu

SEQ ID NO: 221006 - RNA, 19 nt, Artificial Sequence
  Description of Artificial Sequence: Synthetic oligonucleotide
ugggugauguaaaaguaca

SEQ ID NO: 221007 - RNA, 19 nt, Artificial Sequence
  Description of Artificial Sequence: Synthetic oligonucleotide
agggauauugauaaagguc

SEQ ID NO: 221008 - RNA, 19 nt, Artificial Sequence
  Description of Artificial Sequence: Synthetic oligonucleotide
uccaauggaaaaccauucc

SEQ ID NO: 221009 - RNA, 19 nt, Artificial Sequence
  Description of Artificial Sequence: Synthetic oligonucleotide
uaauaacucaguuggcuac

SEQ ID NO: 221010 - RNA, 19 nt, Artificial Sequence
  Description of Artificial Sequence: Synthetic oligonucleotide
cugaaaugcgauuacguuc

SEQ ID NO: 221011 - RNA, 19 nt, Artificial Sequence
  Description of Artificial Sequence: Synthetic oligonucleotide
uagauuaugcuuucgcuuc

SEQ ID NO: 221012 - RNA, 19 nt, Artificial Sequence
  Description of Artificial Sequence: Synthetic oligonucleotide
aucacgguaacccagggaa

SEQ ID NO: 221013 - RNA, 19 nt, Artificial Sequence
  Description of Artificial Sequence: Synthetic oligonucleotide
aaaaucagacccucauagu

SEQ ID NO: 221014 - RNA, 19 nt, Artificial Sequence
  Description of Artificial Sequence: Synthetic oligonucleotide
uauggugauucuuacggac

SEQ ID NO: 221015 - RNA, 19 nt, Artificial Sequence
  Description of Artificial Sequence: Synthetic oligonucleotide
aaaacuucaagggugcgau

SEQ ID NO: 221016 - RNA, 19 nt, Artificial Sequence
  Description of Artificial Sequence: Synthetic oligonucleotide
aauugccccagccauuucu

SEQ ID NO: 221017 - RNA, 19 nt, Artificial Sequence
  Description of Artificial Sequence: Synthetic oligonucleotide
ugauauauuaguggcagaa

SEQ ID NO: 221018 - RNA, 19 nt, Artificial Sequence
  Description of Artificial Sequence: Synthetic oligonucleotide
uuuacgggucaacuuguag

SEQ ID NO: 221019 - RNA, 19 nt, Artificial Sequence
  Description of Artificial Sequence: Synthetic oligonucleotide
uaucaucacgguaacccag

SEQ ID NO: 221020 - RNA, 19 nt, Artificial Sequence
  Description of Artificial Sequence: Synthetic oligonucleotide
agauuaugcuuucgcuucc

SEQ ID NO: 221021 - RNA, 19 nt, Artificial Sequence
  Description of Artificial Sequence: Synthetic oligonucleotide
ucggaugucgccaaauaac

SEQ ID NO: 221022 - RNA, 19 nt, Artificial Sequence
  Description of Artificial Sequence: Synthetic oligonucleotide
uuagauuaugcuuucgcuu

SEQ ID NO: 221023 - RNA, 19 nt, Artificial Sequence
  Description of Artificial Sequence: Synthetic oligonucleotide
uuaguaucagauacacaga

SEQ ID NO: 221024 - RNA, 19 nt, Artificial Sequence
  Description of Artificial Sequence: Synthetic oligonucleotide
cauaaugacgaccuucaug

SEQ ID NO: 221025 - RNA, 19 nt, Artificial Sequence
  Description of Artificial Sequence: Synthetic oligonucleotide
uaccugaaauaccaugaag

SEQ ID NO: 221026 - RNA, 19 nt, Artificial Sequence
  Description of Artificial Sequence: Synthetic oligonucleotide
ugguccauccacaugggug

SEQ ID NO: 221027 - RNA, 19 nt, Artificial Sequence
  Description of Artificial Sequence: Synthetic oligonucleotide
agacauauuaguaucagau

SEQ ID NO: 221028 - RNA, 19 nt, Artificial Sequence
  Description of Artificial Sequence: Synthetic oligonucleotide
uauuuuguaguaagccacu

SEQ ID NO: 221029 - RNA, 19 nt, Artificial Sequence
  Description of Artificial Sequence: Synthetic oligonucleotide
uccaacuugcuuccaauac

SEQ ID NO: 221030 - RNA, 19 nt, Artificial Sequence
  Description of Artificial Sequence: Synthetic oligonucleotide
uuucgaaauaccugaaaua

SEQ ID NO: 221031 - RNA, 19 nt, Artificial Sequence
  Description of Artificial Sequence: Synthetic oligonucleotide
uauaagucagcuccccacu

SEQ ID NO: 221032 - RNA, 19 nt, Artificial Sequence
  Description of Artificial Sequence: Synthetic oligonucleotide
ucaagggugcgauagcaca

SEQ ID NO: 221033 - RNA, 19 nt, Artificial Sequence
  Description of Artificial Sequence: Synthetic oligonucleotide
gaaaaugcccugucggaug

SEQ ID NO: 221034 - RNA, 19 nt, Artificial Sequence
  Description of Artificial Sequence: Synthetic oligonucleotide
aaugucuaacugcaggaua

SEQ ID NO: 221035 - RNA, 19 nt, Artificial Sequence
  Description of Artificial Sequence: Synthetic oligonucleotide
auuaugcuuucgcuucccc

SEQ ID NO: 221036 - RNA, 19 nt, Artificial Sequence
  Description of Artificial Sequence: Synthetic oligonucleotide
aaaaugcccugucggaugu

SEQ ID NO: 221037 - RNA, 19 nt, Artificial Sequence
  Description of Artificial Sequence: Synthetic oligonucleotide
uccaauaccacaccauaau

SEQ ID NO: 221038 - RNA, 19 nt, Artificial Sequence
  Description of Artificial Sequence: Synthetic oligonucleotide
aguacauuuugaguuugcg

SEQ ID NO: 221039 - RNA, 19 nt, Artificial Sequence
  Description of Artificial Sequence: Synthetic oligonucleotide
ugugacaccaccccauuuc

SEQ ID NO: 221040 - RNA, 19 nt, Artificial Sequence
  Description of Artificial Sequence: Synthetic oligonucleotide
gauauauuaguggcagaag

SEQ ID NO: 221041 - RNA, 19 nt, Artificial Sequence
  Description of Artificial Sequence: Synthetic oligonucleotide
auauuaguggcagaagucu

SEQ ID NO: 221042 - RNA, 19 nt, Artificial Sequence
  Description of Artificial Sequence: Synthetic oligonucleotide
ggugcgauagcacagaaga

SEQ ID NO: 221043 - RNA, 19 nt, Artificial Sequence
  Description of Artificial Sequence: Synthetic oligonucleotide
guguacggaaaacacaaug

SEQ ID NO: 221044 - RNA, 19 nt, Artificial Sequence
  Description of Artificial Sequence: Synthetic oligonucleotide
ugucaaauaugaagaggca

SEQ ID NO: 221045 - RNA, 19 nt, Artificial Sequence
  Description of Artificial Sequence: Synthetic oligonucleotide
augucacuaacaaugauca

SEQ ID NO: 221046 - RNA, 19 nt, Artificial Sequence
  Description of Artificial Sequence: Synthetic oligonucleotide
uaucagauacacagauuug

SEQ ID NO: 221047 - RNA, 19 nt, Artificial Sequence
  Description of Artificial Sequence: Synthetic oligonucleotide
acccuauuggcccaaacca

SEQ ID NO: 221048 - RNA, 19 nt, Artificial Sequence
  Description of Artificial Sequence: Synthetic oligonucleotide
aucuaacagacauauuagu

SEQ ID NO: 221049 - RNA, 19 nt, Artificial Sequence
  Description of Artificial Sequence: Synthetic oligonucleotide
aaagagccaacagcaauug

SEQ ID NO: 221050 - RNA, 19 nt, Artificial Sequence
  Description of Artificial Sequence: Synthetic oligonucleotide
uacuuaugagccacugacc

SEQ ID NO: 221051 - RNA, 19 nt, Artificial Sequence
  Description of Artificial Sequence: Synthetic oligonucleotide
gacccuauuggcccaaacc

SEQ ID NO: 221052 - RNA, 19 nt, Artificial Sequence
  Description of Artificial Sequence: Synthetic oligonucleotide
caccugacuaacaaugaag

SEQ ID NO: 221053 - RNA, 19 nt, Artificial Sequence
  Description of Artificial Sequence: Synthetic oligonucleotide
auaauaacucaguuggcua

SEQ ID NO: 221054 - RNA, 19 nt, Artificial Sequence
  Description of Artificial Sequence: Synthetic oligonucleotide
aacaucuguaguccaaaua

SEQ ID NO: 221055 - RNA, 19 nt, Artificial Sequence
  Description of Artificial Sequence: Synthetic oligonucleotide
uuuuaggacccagaggcca

SEQ ID NO: 221056 - RNA, 19 nt, Artificial Sequence
  Description of Artificial Sequence: Synthetic oligonucleotide
acccacuugcuacagaugu

SEQ ID NO: 221057 - RNA, 19 nt, Artificial Sequence
  Description of Artificial Sequence: Synthetic oligonucleotide
uggauucccaccaaucgaa

SEQ ID NO: 221058 - RNA, 19 nt, Artificial Sequence
  Description of Artificial Sequence: Synthetic oligonucleotide
cauggaaaucccaagggca

SEQ ID NO: 221059 - RNA, 19 nt, Artificial Sequence
  Description of Artificial Sequence: Synthetic oligonucleotide
uccuacuuggguaguuuag

SEQ ID NO: 221060 - RNA, 19 nt, Artificial Sequence
  Description of Artificial Sequence: Synthetic oligonucleotide
ggacaucacauucauaaug

SEQ ID NO: 221061 - RNA, 19 nt, Artificial Sequence
  Description of Artificial Sequence: Synthetic oligonucleotide
cauaaacuggaaccauggg

SEQ ID NO: 221062 - RNA, 19 nt, Artificial Sequence
  Description of Artificial Sequence: Synthetic oligonucleotide
gauggcgcauacaagaaca

SEQ ID NO: 221063 - RNA, 19 nt, Artificial Sequence
  Description of Artificial Sequence: Synthetic oligonucleotide
gauugugguggugagcugc

SEQ ID NO: 221064 - RNA, 19 nt, Artificial Sequence
  Description of Artificial Sequence: Synthetic oligonucleotide
agacuagauugcuuuccac

SEQ ID NO: 221065 - RNA, 19 nt, Artificial Sequence
  Description of Artificial Sequence: Synthetic oligonucleotide
uaacccacuugcuacagau

SEQ ID NO: 221066 - RNA, 19 nt, Artificial Sequence
  Description of Artificial Sequence: Synthetic oligonucleotide
ucuuuacgggucaacuugu

SEQ ID NO: 221067 - RNA, 19 nt, Artificial Sequence
  Description of Artificial Sequence: Synthetic oligonucleotide
gaugaagauacugggugug

SEQ ID NO: 221068 - RNA, 19 nt, Artificial Sequence
  Description of Artificial Sequence: Synthetic oligonucleotide
aaagccauagccaguucug

SEQ ID NO: 221069 - RNA, 19 nt, Artificial Sequence
  Description of Artificial Sequence: Synthetic oligonucleotide
uugugaguugcacuccucu

SEQ ID NO: 221070 - RNA, 19 nt, Artificial Sequence
  Description of Artificial Sequence: Synthetic oligonucleotide
auuucugcgccccucuucu

SEQ ID NO: 221071 - RNA, 19 nt, Artificial Sequence
  Description of Artificial Sequence: Synthetic oligonucleotide
guuuuauggugauucuuac

SEQ ID NO: 221072 - RNA, 19 nt, Artificial Sequence
  Description of Artificial Sequence: Synthetic oligonucleotide
aauaacucaguuggcuacu

SEQ ID NO: 221073 - RNA, 19 nt, Artificial Sequence
  Description of Artificial Sequence: Synthetic oligonucleotide
cuggauagagagagaauug

SEQ ID NO: 221074 - RNA, 19 nt, Artificial Sequence
  Description of Artificial Sequence: Synthetic oligonucleotide
uuggucuaagaaaccauau

SEQ ID NO: 221075 - RNA, 19 nt, Artificial Sequence
  Description of Artificial Sequence: Synthetic oligonucleotide
aggguuacuaacccacuug

SEQ ID NO: 221076 - RNA, 19 nt, Artificial Sequence
  Description of Artificial Sequence: Synthetic oligonucleotide
uuauggugauucuuacgga

SEQ ID NO: 221077 - RNA, 19 nt, Artificial Sequence
  Description of Artificial Sequence: Synthetic oligonucleotide
auaucaucacgguaaccca

SEQ ID NO: 221078 - RNA, 19 nt, Artificial Sequence
  Description of Artificial Sequence: Synthetic oligonucleotide
uccaacaaugcagagcuuc

SEQ ID NO: 221079 - RNA, 19 nt, Artificial Sequence
  Description of Artificial Sequence: Synthetic oligonucleotide
guacggaaaacacaauguc

SEQ ID NO: 221080 - RNA, 19 nt, Artificial Sequence
  Description of Artificial Sequence: Synthetic oligonucleotide
ugcuggagcgaucaagccu

SEQ ID NO: 221081 - RNA, 19 nt, Artificial Sequence
  Description of Artificial Sequence: Synthetic oligonucleotide
aggauuugugaguugcacu

SEQ ID NO: 221082 - RNA, 19 nt, Artificial Sequence
  Description of Artificial Sequence: Synthetic oligonucleotide
uguauggcacugcuguggu

SEQ ID NO: 221083 - RNA, 19 nt, Artificial Sequence
  Description of Artificial Sequence: Synthetic oligonucleotide
ugggagacuagauugcuuu

SEQ ID NO: 221084 - RNA, 19 nt, Artificial Sequence
  Description of Artificial Sequence: Synthetic oligonucleotide
guagccggauauuuagaag

SEQ ID NO: 221085 - RNA, 19 nt, Artificial Sequence
  Description of Artificial Sequence: Synthetic oligonucleotide
gagggugaaaggucuauga

SEQ ID NO: 221086 - RNA, 19 nt, Artificial Sequence
  Description of Artificial Sequence: Synthetic oligonucleotide
uuaguggcagaagucuugc

SEQ ID NO: 221087 - RNA, 19 nt, Artificial Sequence
  Description of Artificial Sequence: Synthetic oligonucleotide
gaaaacauaucaucacggu

SEQ ID NO: 221088 - RNA, 19 nt, Artificial Sequence
  Description of Artificial Sequence: Synthetic oligonucleotide
guuacuaacccacuugcua

SEQ ID NO: 221089 - RNA, 19 nt, Artificial Sequence
  Description of Artificial Sequence: Synthetic oligonucleotide
guucuuaugggauggcgca

SEQ ID NO: 221090 - RNA, 19 nt, Artificial Sequence
  Description of Artificial Sequence: Synthetic oligonucleotide
uggucuaagaaaccauaua

SEQ ID NO: 221091 - RNA, 19 nt, Artificial Sequence
  Description of Artificial Sequence: Synthetic oligonucleotide
ucaccugacuaacaaugaa

SEQ ID NO: 221092 - RNA, 19 nt, Artificial Sequence
  Description of Artificial Sequence: Synthetic oligonucleotide
aggucauggaaaucccaag

SEQ ID NO: 221093 - RNA, 19 nt, Artificial Sequence
  Description of Artificial Sequence: Synthetic oligonucleotide
ggauuugugaguugcacuc

SEQ ID NO: 221094 - RNA, 19 nt, Artificial Sequence
  Description of Artificial Sequence: Synthetic oligonucleotide
auguguacggaaaacacaa

SEQ ID NO: 221095 - RNA, 19 nt, Artificial Sequence
  Description of Artificial Sequence: Synthetic oligonucleotide
ggugauaagcaugaggaac

SEQ ID NO: 221096 - RNA, 19 nt, Artificial Sequence
  Description of Artificial Sequence: Synthetic oligonucleotide
uuucuauaauugccccagc

SEQ ID NO: 221097 - RNA, 19 nt, Artificial Sequence
  Description of Artificial Sequence: Synthetic oligonucleotide
uauuaguggcagaagucuu

SEQ ID NO: 221098 - RNA, 19 nt, Artificial Sequence
  Description of Artificial Sequence: Synthetic oligonucleotide
acugacaacuuaaauaaua

SEQ ID NO: 221099 - RNA, 19 nt, Artificial Sequence
  Description of Artificial Sequence: Synthetic oligonucleotide
cuuuuaggacccagaggcc

SEQ ID NO: 221100 - RNA, 19 nt, Artificial Sequence
  Description of Artificial Sequence: Synthetic oligonucleotide
gcauaaacuggaaccaugg

SEQ ID NO: 221101 - RNA, 19 nt, Artificial Sequence
  Description of Artificial Sequence: Synthetic oligonucleotide
caugcucuagagucuuggg

SEQ ID NO: 221102 - RNA, 19 nt, Artificial Sequence
  Description of Artificial Sequence: Synthetic oligonucleotide
uauagacccuauuggccca

SEQ ID NO: 221103 - RNA, 19 nt, Artificial Sequence
  Description of Artificial Sequence: Synthetic oligonucleotide
augcucuagagucuugggu

SEQ ID NO: 221104 - RNA, 19 nt, Artificial Sequence
  Description of Artificial Sequence: Synthetic oligonucleotide
acauaucaucacgguaacc

SEQ ID NO: 221105 - RNA, 19 nt, Artificial Sequence
  Description of Artificial Sequence: Synthetic oligonucleotide
ccagaggccauuuaauagc

SEQ ID NO: 221106 - RNA, 19 nt, Artificial Sequence
  Description of Artificial Sequence: Synthetic oligonucleotide
uacuuggguaguuuagcaa

SEQ ID NO: 221107 - RNA, 19 nt, Artificial Sequence
  Description of Artificial Sequence: Synthetic oligonucleotide
caagggugcgauagcacag

SEQ ID NO: 221108 - RNA, 19 nt, Artificial Sequence
  Description of Artificial Sequence: Synthetic oligonucleotide
uacuaacccacuugcuaca

SEQ ID NO: 221109 - RNA, 19 nt, Artificial Sequence
  Description of Artificial Sequence: Synthetic oligonucleotide
ucauucacugguagccgga

SEQ ID NO: 221110 - RNA, 19 nt, Artificial Sequence
  Description of Artificial Sequence: Synthetic oligonucleotide
uauaauugccccagccauu

SEQ ID NO: 221111 - RNA, 19 nt, Artificial Sequence
  Description of Artificial Sequence: Synthetic oligonucleotide
gauguugcuaugucacuaa

SEQ ID NO: 221112 - RNA, 19 nt, Artificial Sequence
  Description of Artificial Sequence: Synthetic oligonucleotide
uacucaauauagacccuau

SEQ ID NO: 221113 - RNA, 19 nt, Artificial Sequence
  Description of Artificial Sequence: Synthetic oligonucleotide
aucauacaugauauauuag

SEQ ID NO: 221114 - RNA, 19 nt, Artificial Sequence
  Description of Artificial Sequence: Synthetic oligonucleotide
agucacaaucuacucaaua

SEQ ID NO: 221115 - RNA, 19 nt, Artificial Sequence
  Description of Artificial Sequence: Synthetic oligonucleotide
agugccauagaaucuuauu

SEQ ID NO: 221116 - RNA, 19 nt, Artificial Sequence
  Description of Artificial Sequence: Synthetic oligonucleotide
ggguuacuaacccacuugc

SEQ ID NO: 221117 - RNA, 19 nt, Artificial Sequence
  Description of Artificial Sequence: Synthetic oligonucleotide
auuaguggcagaagucuug

SEQ ID NO: 221118 - RNA, 19 nt, Artificial Sequence
  Description of Artificial Sequence: Synthetic oligonucleotide
agagucuugggugauguaa

SEQ ID NO: 221119 - RNA, 19 nt, Artificial Sequence
  Description of Artificial Sequence: Synthetic oligonucleotide
gccaucuuguuuuauggug

SEQ ID NO: 221120 - RNA, 19 nt, Artificial Sequence
  Description of Artificial Sequence: Synthetic oligonucleotide
aaaugcgauuacguucaug

SEQ ID NO: 221121 - RNA, 19 nt, Artificial Sequence
  Description of Artificial Sequence: Synthetic oligonucleotide
auaccugaaauaccaugaa

SEQ ID NO: 221122 - RNA, 19 nt, Artificial Sequence
  Description of Artificial Sequence: Synthetic oligonucleotide
cuuacggacauccacacau

SEQ ID NO: 221123 - RNA, 19 nt, Artificial Sequence
  Description of Artificial Sequence: Synthetic oligonucleotide
augacgaccuucaugcucu

SEQ ID NO: 221124 - RNA, 19 nt, Artificial Sequence
  Description of Artificial Sequence: Synthetic oligonucleotide
guagaaaggauuugugagu

SEQ ID NO: 221125 - RNA, 19 nt, Artificial Sequence
  Description of Artificial Sequence: Synthetic oligonucleotide
guuugcgugguacucuuuc

SEQ ID NO: 221126 - RNA, 19 nt, Artificial Sequence
  Description of Artificial Sequence: Synthetic oligonucleotide
gcauucaccuuucacuaag

SEQ ID NO: 221127 - RNA, 19 nt, Artificial Sequence
  Description of Artificial Sequence: Synthetic oligonucleotide
gucgccaaauaacagcauc

SEQ ID NO: 221128 - RNA, 19 nt, Artificial Sequence
  Description of Artificial Sequence: Synthetic oligonucleotide
ugaggguuacuaacccacu

SEQ ID NO: 221129 - RNA, 19 nt, Artificial Sequence
  Description of Artificial Sequence: Synthetic oligonucleotide
ucggaucuugucacacuug

SEQ ID NO: 221130 - RNA, 19 nt, Artificial Sequence
  Description of Artificial Sequence: Synthetic oligonucleotide
cagaaauccuacuugggua

SEQ ID NO: 221131 - RNA, 19 nt, Artificial Sequence
  Description of Artificial Sequence: Synthetic oligonucleotide
ucuuacggacauccacaca

SEQ ID NO: 221132 - RNA, 19 nt, Artificial Sequence
  Description of Artificial Sequence: Synthetic oligonucleotide
agacccuauuggcccaaac

SEQ ID NO: 221133 - RNA, 19 nt, Artificial Sequence
  Description of Artificial Sequence: Synthetic oligonucleotide
cuacuuggguaguuuagca

SEQ ID NO: 221134 - RNA, 19 nt, Artificial Sequence
  Description of Artificial Sequence: Synthetic oligonucleotide
gaugggauccagaccgcag

SEQ ID NO: 221135 - RNA, 19 nt, Artificial Sequence
  Description of Artificial Sequence: Synthetic oligonucleotide
augucuaacugcaggauaa

SEQ ID NO: 221136 - RNA, 19 nt, Artificial Sequence
  Description of Artificial Sequence: Synthetic oligonucleotide
gggugaaaggucuaugaca

SEQ ID NO: 221137 - RNA, 19 nt, Artificial Sequence
  Description of Artificial Sequence: Synthetic oligonucleotide
uaagaagcacuaggcauuc

SEQ ID NO: 221138 - RNA, 19 nt, Artificial Sequence
  Description of Artificial Sequence: Synthetic oligonucleotide
ggcgcauacaagaacauca

SEQ ID NO: 221139 - RNA, 19 nt, Artificial Sequence
  Description of Artificial Sequence: Synthetic oligonucleotide
acaugauauauuaguggca

SEQ ID NO: 221140 - RNA, 19 nt, Artificial Sequence
  Description of Artificial Sequence: Synthetic oligonucleotide
uggugcuggagcgaucaag

SEQ ID NO: 221141 - RNA, 19 nt, Artificial Sequence
  Description of Artificial Sequence: Synthetic oligonucleotide
ugguagccggauauuuaga

SEQ ID NO: 221142 - RNA, 19 nt, Artificial Sequence
  Description of Artificial Sequence: Synthetic oligonucleotide
uacugacaacuuaaauaau

SEQ ID NO: 221143 - RNA, 19 nt, Artificial Sequence
  Description of Artificial Sequence: Synthetic oligonucleotide
uuugugaguugcacuccuc

SEQ ID NO: 221144 - RNA, 19 nt, Artificial Sequence
  Description of Artificial Sequence: Synthetic oligonucleotide
ugucggaugucgccaaaua

SEQ ID NO: 221145 - RNA, 19 nt, Artificial Sequence
  Description of Artificial Sequence: Synthetic oligonucleotide
uguguacggaaaacacaau

SEQ ID NO: 221146 - RNA, 19 nt, Artificial Sequence
  Description of Artificial Sequence: Synthetic oligonucleotide
acacccagaucaccauuag

SEQ ID NO: 221147 - RNA, 19 nt, Artificial Sequence
  Description of Artificial Sequence: Synthetic oligonucleotide
acccugaaaugcgauuacg

SEQ ID NO: 221148 - RNA, 19 nt, Artificial Sequence
  Description of Artificial Sequence: Synthetic oligonucleotide
uacggacauccacacauuu

SEQ ID NO: 221149 - RNA, 19 nt, Artificial Sequence
  Description of Artificial Sequence: Synthetic oligonucleotide
uuugguggauucccaccaa

SEQ ID NO: 221150 - RNA, 19 nt, Artificial Sequence
  Description of Artificial Sequence: Synthetic oligonucleotide
cuguauaagucagcucccc

SEQ ID NO: 221151 - RNA, 19 nt, Artificial Sequence
  Description of Artificial Sequence: Synthetic oligonucleotide
uccacacauuuuacugaca

SEQ ID NO: 221152 - RNA, 19 nt, Artificial Sequence
  Description of Artificial Sequence: Synthetic oligonucleotide
agguuagacaaauguucau

SEQ ID NO: 221153 - RNA, 19 nt, Artificial Sequence
  Description of Artificial Sequence: Synthetic oligonucleotide
cuuaugggauggcgcauac

SEQ ID NO: 221154 - RNA, 19 nt, Artificial Sequence
  Description of Artificial Sequence: Synthetic oligonucleotide
aauccuacuuggguaguuu

SEQ ID NO: 221155 - RNA, 19 nt, Artificial Sequence
  Description of Artificial Sequence: Synthetic oligonucleotide
guacauuuugaguuugcgu

SEQ ID NO: 221156 - RNA, 19 nt, Artificial Sequence
  Description of Artificial Sequence: Synthetic oligonucleotide
auuggucuaagaaaccaua

SEQ ID NO: 221157 - RNA, 19 nt, Artificial Sequence
  Description of Artificial Sequence: Synthetic oligonucleotide
uuagacuggucuuccccau

SEQ ID NO: 221158 - RNA, 19 nt, Artificial Sequence
  Description of Artificial Sequence: Synthetic oligonucleotide
aaaccauuccacagggaua

SEQ ID NO: 221159 - RNA, 19 nt, Artificial Sequence
  Description of Artificial Sequence: Synthetic oligonucleotide
cauguauggcacugcugug

SEQ ID NO: 221160 - RNA, 19 nt, Artificial Sequence
  Description of Artificial Sequence: Synthetic oligonucleotide
gaggggaauguguacggaa

SEQ ID NO: 221161 - RNA, 19 nt, Artificial Sequence
  Description of Artificial Sequence: Synthetic oligonucleotide
aaaccacacuuuagugaag

SEQ ID NO: 221162 - RNA, 19 nt, Artificial Sequence
  Description of Artificial Sequence: Synthetic oligonucleotide
cucaguugguccauccaca

SEQ ID NO: 221163 - RNA, 19 nt, Artificial Sequence
  Description of Artificial Sequence: Synthetic oligonucleotide
ucucggaucuugucacacu

SEQ ID NO: 221164 - RNA, 19 nt, Artificial Sequence
  Description of Artificial Sequence: Synthetic oligonucleotide
agauguugcuaugucacua

SEQ ID NO: 221165 - RNA, 19 nt, Artificial Sequence
  Description of Artificial Sequence: Synthetic oligonucleotide
uucaugcucuagagucuug

SEQ ID NO: 221166 - RNA, 19 nt, Artificial Sequence
  Description of Artificial Sequence: Synthetic oligonucleotide
ugcccugucggaugucgcc

SEQ ID NO: 221167 - RNA, 19 nt, Artificial Sequence
  Description of Artificial Sequence: Synthetic oligonucleotide
cacgguaacccagggaaac

SEQ ID NO: 221168 - RNA, 19 nt, Artificial Sequence
  Description of Artificial Sequence: Synthetic oligonucleotide
acuaacccacuugcuacag

SEQ ID NO: 221169 - RNA, 19 nt, Artificial Sequence
  Description of Artificial Sequence: Synthetic oligonucleotide
ggagacuagauugcuuucc

SEQ ID NO: 221170 - RNA, 19 nt, Artificial Sequence
  Description of Artificial Sequence: Synthetic oligonucleotide
cagaggccauuuaauagca

SEQ ID NO: 221171 - RNA, 19 nt, Artificial Sequence
  Description of Artificial Sequence: Synthetic oligonucleotide
gugauaagcaugaggaacu

SEQ ID NO: 221172 - RNA, 19 nt, Artificial Sequence
  Description of Artificial Sequence: Synthetic oligonucleotide
cacuuguuggguccccaag

SEQ ID NO: 221173 - RNA, 19 nt, Artificial Sequence
  Description of Artificial Sequence: Synthetic oligonucleotide
acucaauauagacccuauu

SEQ ID NO: 221174 - RNA, 19 nt, Artificial Sequence
  Description of Artificial Sequence: Synthetic oligonucleotide
uugguccauccacaugggu

SEQ ID NO: 221175 - RNA, 19 nt, Artificial Sequence
  Description of Artificial Sequence: Synthetic oligonucleotide
cauuucugcgccccucuuc

SEQ ID NO: 221176 - RNA, 19 nt, Artificial Sequence
  Description of Artificial Sequence: Synthetic oligonucleotide
ucacgguaacccagggaaa

SEQ ID NO: 221177 - RNA, 19 nt, Artificial Sequence
  Description of Artificial Sequence: Synthetic oligonucleotide
ccaauaccacaccauaaug

SEQ ID NO: 221178 - RNA, 19 nt, Artificial Sequence
  Description of Artificial Sequence: Synthetic oligonucleotide
aggccaaggugauaagcau

SEQ ID NO: 221179 - RNA, 19 nt, Artificial Sequence
  Description of Artificial Sequence: Synthetic oligonucleotide
aaaccaucccaaagaguau

SEQ ID NO: 221180 - RNA, 19 nt, Artificial Sequence
  Description of Artificial Sequence: Synthetic oligonucleotide
ucuuaugggauggcgcaua

SEQ ID NO: 221181 - RNA, 19 nt, Artificial Sequence
  Description of Artificial Sequence: Synthetic oligonucleotide
gguagccggauauuuagaa

SEQ ID NO: 221182 - RNA, 19 nt, Artificial Sequence
  Description of Artificial Sequence: Synthetic oligonucleotide
cacugucugagguuagaca

SEQ ID NO: 221183 - RNA, 19 nt, Artificial Sequence
  Description of Artificial Sequence: Synthetic oligonucleotide
aaauccuacuuggguaguu

SEQ ID NO: 221184 - RNA, 19 nt, Artificial Sequence
  Description of Artificial Sequence: Synthetic oligonucleotide
auggaaaucccaagggcaa

SEQ ID NO: 221185 - RNA, 19 nt, Artificial Sequence
  Description of Artificial Sequence: Synthetic oligonucleotide
ggaauugcuucuucaaugu

SEQ ID NO: 221186 - RNA, 19 nt, Artificial Sequence
  Description of Artificial Sequence: Synthetic oligonucleotide
agcacuaggcauucaccuu

SEQ ID NO: 221187 - RNA, 19 nt, Artificial Sequence
  Description of Artificial Sequence: Synthetic oligonucleotide
uuacggacauccacacauu

SEQ ID NO: 221188 - RNA, 19 nt, Artificial Sequence
  Description of Artificial Sequence: Synthetic oligonucleotide
guugguccauccacauggg

SEQ ID NO: 221189 - RNA, 19 nt, Artificial Sequence
  Description of Artificial Sequence: Synthetic oligonucleotide
caggcucccgcgcggaucc

SEQ ID NO: 221190 - RNA, 19 nt, Artificial Sequence
  Description of Artificial Sequence: Synthetic oligonucleotide
cuccaauaccacaccauaa

SEQ ID NO: 221191 - RNA, 19 nt, Artificial Sequence
  Description of Artificial Sequence: Synthetic oligonucleotide
ggacugaaaacaauguuua

SEQ ID NO: 221192 - RNA, 19 nt, Artificial Sequence
  Description of Artificial Sequence: Synthetic oligonucleotide
aaacuucaagggugcgaua

SEQ ID NO: 221193 - RNA, 19 nt, Artificial Sequence
  Description of Artificial Sequence: Synthetic oligonucleotide
auccuacuuggguaguuua

SEQ ID NO: 221194 - RNA, 19 nt, Artificial Sequence
  Description of Artificial Sequence: Synthetic oligonucleotide
ccauaguucuuaugggaug

SEQ ID NO: 221195 - RNA, 19 nt, Artificial Sequence
  Description of Artificial Sequence: Synthetic oligonucleotide
ggagcgaucaagccuccac

SEQ ID NO: 221196 - RNA, 19 nt, Artificial Sequence
  Description of Artificial Sequence: Synthetic oligonucleotide
gcgauuacguucauguuga

SEQ ID NO: 221197 - RNA, 19 nt, Artificial Sequence
  Description of Artificial Sequence: Synthetic oligonucleotide
ccauggaggagggugaaag

SEQ ID NO: 221198 - RNA, 19 nt, Artificial Sequence
  Description of Artificial Sequence: Synthetic oligonucleotide
aaaugcccugucggauguc

SEQ ID NO: 221199 - RNA, 19 nt, Artificial Sequence
  Description of Artificial Sequence: Synthetic oligonucleotide
agcuccccacucuagggaa

SEQ ID NO: 221200 - RNA, 19 nt, Artificial Sequence
  Description of Artificial Sequence: Synthetic oligonucleotide
ccuacuuggguaguuuagc

SEQ ID NO: 221201 - RNA, 19 nt, Artificial Sequence
  Description of Artificial Sequence: Synthetic oligonucleotide
ucccgcgcggaucccuggg

SEQ ID NO: 221202 - RNA, 19 nt, Artificial Sequence
  Description of Artificial Sequence: Synthetic oligonucleotide
uggacacccagaucaccau

SEQ ID NO: 221203 - RNA, 19 nt, Artificial Sequence
  Description of Artificial Sequence: Synthetic oligonucleotide
aagaagcauugcauagaaa

SEQ ID NO: 221204 - RNA, 19 nt, Artificial Sequence
  Description of Artificial Sequence: Synthetic oligonucleotide
ugucuaacugcaggauaaa

SEQ ID NO: 221205 - RNA, 19 nt, Artificial Sequence
  Description of Artificial Sequence: Synthetic oligonucleotide
cccaaagaguauaaccauc

SEQ ID NO: 221206 - RNA, 19 nt, Artificial Sequence
  Description of Artificial Sequence: Synthetic oligonucleotide
ggaugucgccaaauaacag

SEQ ID NO: 221207 - RNA, 19 nt, Artificial Sequence
  Description of Artificial Sequence: Synthetic oligonucleotide
ccuggugcugcaaaacuuc

SEQ ID NO: 221208 - RNA, 19 nt, Artificial Sequence
  Description of Artificial Sequence: Synthetic oligonucleotide
uggaaaucccaagggcaaa

SEQ ID NO: 221209 - RNA, 19 nt, Artificial Sequence
  Description of Artificial Sequence: Synthetic oligonucleotide
ggagauccuccuccaauac

SEQ ID NO: 221210 - RNA, 19 nt, Artificial Sequence
  Description of Artificial Sequence: Synthetic oligonucleotide
uuggguaguuuagcaaaua

SEQ ID NO: 221211 - RNA, 19 nt, Artificial Sequence
  Description of Artificial Sequence: Synthetic oligonucleotide
auacacagauuugguuuca

SEQ ID NO: 221212 - RNA, 19 nt, Artificial Sequence
  Description of Artificial Sequence: Synthetic oligonucleotide
ggauggcgcauacaagaac

SEQ ID NO: 221213 - RNA, 19 nt, Artificial Sequence
  Description of Artificial Sequence: Synthetic oligonucleotide
gugcgauagcacagaagag

SEQ ID NO: 221214 - RNA, 19 nt, Artificial Sequence
  Description of Artificial Sequence: Synthetic oligonucleotide
cagaucccggccacaauga

SEQ ID NO: 221215 - RNA, 19 nt, Artificial Sequence
  Description of Artificial Sequence: Synthetic oligonucleotide
ggcagaagucuugcaaaag

SEQ ID NO: 221216 - RNA, 19 nt, Artificial Sequence
  Description of Artificial Sequence: Synthetic oligonucleotide
uccggacuuugcucauggc

SEQ ID NO: 221217 - RNA, 19 nt, Artificial Sequence
  Description of Artificial Sequence: Synthetic oligonucleotide
acgggucaacuuguagauc

SEQ ID NO: 221218 - RNA, 19 nt, Artificial Sequence
  Description of Artificial Sequence: Synthetic oligonucleotide
cuacucaauauagacccua

SEQ ID NO: 221219 - RNA, 19 nt, Artificial Sequence
  Description of Artificial Sequence: Synthetic oligonucleotide
cugagguuagacaaauguu

SEQ ID NO: 221220 - RNA, 19 nt, Artificial Sequence
  Description of Artificial Sequence: Synthetic oligonucleotide
caguugguccauccacaug

SEQ ID NO: 221221 - RNA, 19 nt, Artificial Sequence
  Description of Artificial Sequence: Synthetic oligonucleotide
uucuuaugggauggcgcau

SEQ ID NO: 221222 - RNA, 19 nt, Artificial Sequence
  Description of Artificial Sequence: Synthetic oligonucleotide
agaugggauccagaccgca

SEQ ID NO: 221223 - RNA, 19 nt, Artificial Sequence
  Description of Artificial Sequence: Synthetic oligonucleotide
ucccucuggcaggauauaa

SEQ ID NO: 221224 - RNA, 19 nt, Artificial Sequence
  Description of Artificial Sequence: Synthetic oligonucleotide
uaauugccccagccauuuc

SEQ ID NO: 221225 - RNA, 19 nt, Artificial Sequence
  Description of Artificial Sequence: Synthetic oligonucleotide
acaccaccccauuuccaau

SEQ ID NO: 221226 - RNA, 19 nt, Artificial Sequence
  Description of Artificial Sequence: Synthetic oligonucleotide
augcgauuacguucauguu

SEQ ID NO: 221227 - RNA, 19 nt, Artificial Sequence
  Description of Artificial Sequence: Synthetic oligonucleotide
augcccugucggaugucgc

SEQ ID NO: 221228 - RNA, 19 nt, Artificial Sequence
  Description of Artificial Sequence: Synthetic oligonucleotide
auucacugguagccggaua

SEQ ID NO: 221229 - RNA, 19 nt, Artificial Sequence
  Description of Artificial Sequence: Synthetic oligonucleotide
caguccauucagaaaacau

SEQ ID NO: 221230 - RNA, 19 nt, Artificial Sequence
  Description of Artificial Sequence: Synthetic oligonucleotide
cauuggucuaagaaaccau

SEQ ID NO: 221231 - RNA, 19 nt, Artificial Sequence
  Description of Artificial Sequence: Synthetic oligonucleotide
agaucccggccacaaugau

SEQ ID NO: 221232 - RNA, 19 nt, Artificial Sequence
  Description of Artificial Sequence: Synthetic oligonucleotide
ggccaaggugauaagcaug

SEQ ID NO: 221233 - RNA, 19 nt, Artificial Sequence
  Description of Artificial Sequence: Synthetic oligonucleotide
ggcuacuuguguguuauaa

SEQ ID NO: 221234 - RNA, 19 nt, Artificial Sequence
  Description of Artificial Sequence: Synthetic oligonucleotide
caccaaucgaauauccuuu

SEQ ID NO: 221235 - RNA, 19 nt, Artificial Sequence
  Description of Artificial Sequence: Synthetic oligonucleotide
acgguaacccagggaaaca

SEQ ID NO: 221236 - RNA, 19 nt, Artificial Sequence
  Description of Artificial Sequence: Synthetic oligonucleotide
gcucuagagucuuggguga

SEQ ID NO: 221237 - RNA, 19 nt, Artificial Sequence
  Description of Artificial Sequence: Synthetic oligonucleotide
agauugcuuuccacugaug

SEQ ID NO: 221238 - RNA, 19 nt, Artificial Sequence
  Description of Artificial Sequence: Synthetic oligonucleotide
gcgaucaagccuccaccag

SEQ ID NO: 221239 - RNA, 19 nt, Artificial Sequence
  Description of Artificial Sequence: Synthetic oligonucleotide
agggugcgauagcacagaa

SEQ ID NO: 221240 - RNA, 19 nt, Artificial Sequence
  Description of Artificial Sequence: Synthetic oligonucleotide
auaacucaguuggcuacuu

SEQ ID NO: 221241 - RNA, 19 nt, Artificial Sequence
  Description of Artificial Sequence: Synthetic oligonucleotide
cuggagcgaucaagccucc

SEQ ID NO: 221242 - RNA, 19 nt, Artificial Sequence
  Description of Artificial Sequence: Synthetic oligonucleotide
cuaacccacuugcuacaga

SEQ ID NO: 221243 - RNA, 19 nt, Artificial Sequence
  Description of Artificial Sequence: Synthetic oligonucleotide
gaggguuacuaacccacuu

SEQ ID NO: 221244 - RNA, 19 nt, Artificial Sequence
  Description of Artificial Sequence: Synthetic oligonucleotide
auguuucgaaauaccugaa

SEQ ID NO: 221245 - RNA, 19 nt, Artificial Sequence
  Description of Artificial Sequence: Synthetic oligonucleotide
cuuggguaguuuagcaaau

SEQ ID NO: 221246 - RNA, 19 nt, Artificial Sequence
  Description of Artificial Sequence: Synthetic oligonucleotide
cagauacacagauuugguu

SEQ ID NO: 221247 - RNA, 19 nt, Artificial Sequence
  Description of Artificial Sequence: Synthetic oligonucleotide
aguuggcuacuuguguguu

SEQ ID NO: 221248 - RNA, 19 nt, Artificial Sequence
  Description of Artificial Sequence: Synthetic oligonucleotide
ccauuagacuggucuuccc

SEQ ID NO: 221249 - RNA, 19 nt, Artificial Sequence
  Description of Artificial Sequence: Synthetic oligonucleotide
ugcuuucgcuuccccucuc

SEQ ID NO: 221250 - RNA, 19 nt, Artificial Sequence
  Description of Artificial Sequence: Synthetic oligonucleotide
gggagacuagauugcuuuc

SEQ ID NO: 221251 - RNA, 19 nt, Artificial Sequence
  Description of Artificial Sequence: Synthetic oligonucleotide
cacccagaucaccauuaga

SEQ ID NO: 221252 - RNA, 19 nt, Artificial Sequence
  Description of Artificial Sequence: Synthetic oligonucleotide
cauagccaguucuguucca

SEQ ID NO: 221253 - RNA, 19 nt, Artificial Sequence
  Description of Artificial Sequence: Synthetic oligonucleotide
cuuuacgggucaacuugua

SEQ ID NO: 221254 - RNA, 19 nt, Artificial Sequence
  Description of Artificial Sequence: Synthetic oligonucleotide
cggaugucgccaaauaaca

SEQ ID NO: 221255 - RNA, 19 nt, Artificial Sequence
  Description of Artificial Sequence: Synthetic oligonucleotide
gaguuugcgugguacucuu

SEQ ID NO: 221256 - RNA, 19 nt, Artificial Sequence
  Description of Artificial Sequence: Synthetic oligonucleotide
ccaauacccugaaaugcga

SEQ ID NO: 221257 - RNA, 19 nt, Artificial Sequence
  Description of Artificial Sequence: Synthetic oligonucleotide
acggacauccacacauuuu

SEQ ID NO: 221258 - RNA, 19 nt, Artificial Sequence
  Description of Artificial Sequence: Synthetic oligonucleotide
ggccauuuaauagcagaaa

SEQ ID NO: 221259 - RNA, 19 nt, Artificial Sequence
  Description of Artificial Sequence: Synthetic oligonucleotide
cauuuugaguuugcguggu

SEQ ID NO: 221260 - RNA, 19 nt, Artificial Sequence
  Description of Artificial Sequence: Synthetic oligonucleotide
caauacccugaaaugcgau

SEQ ID NO: 221261 - RNA, 19 nt, Artificial Sequence
  Description of Artificial Sequence: Synthetic oligonucleotide
uccagaccgcaggcucccg

SEQ ID NO: 221262 - RNA, 19 nt, Artificial Sequence
  Description of Artificial Sequence: Synthetic oligonucleotide
gggugcgauagcacagaag

SEQ ID NO: 221263 - RNA, 19 nt, Artificial Sequence
  Description of Artificial Sequence: Synthetic oligonucleotide
cucggaucuugucacacuu

SEQ ID NO: 221264 - RNA, 19 nt, Artificial Sequence
  Description of Artificial Sequence: Synthetic oligonucleotide
cucccgcgcggaucccugg

SEQ ID NO: 221265 - RNA, 19 nt, Artificial Sequence
  Description of Artificial Sequence: Synthetic oligonucleotide
cagauguugcuaugucacu

SEQ ID NO: 221266 - RNA, 19 nt, Artificial Sequence
  Description of Artificial Sequence: Synthetic oligonucleotide
acaaugucguuggcuucaa

SEQ ID NO: 221267 - RNA, 19 nt, Artificial Sequence
  Description of Artificial Sequence: Synthetic oligonucleotide
auagacccuauuggcccaa

SEQ ID NO: 221268 - RNA, 19 nt, Artificial Sequence
  Description of Artificial Sequence: Synthetic oligonucleotide
uggagcgaucaagccucca

SEQ ID NO: 221269 - RNA, 19 nt, Artificial Sequence
  Description of Artificial Sequence: Synthetic oligonucleotide
agcaaauguuggacugaaa

SEQ ID NO: 221270 - RNA, 19 nt, Artificial Sequence
  Description of Artificial Sequence: Synthetic oligonucleotide
uuucugcgccccucuucuu

SEQ ID NO: 221271 - RNA, 19 nt, Artificial Sequence
  Description of Artificial Sequence: Synthetic oligonucleotide
gugaagccuccauuuuggu

SEQ ID NO: 221272 - RNA, 19 nt, Artificial Sequence
  Description of Artificial Sequence: Synthetic oligonucleotide
gaucaccauuagacugguc

SEQ ID NO: 221273 - RNA, 19 nt, Artificial Sequence
  Description of Artificial Sequence: Synthetic oligonucleotide
cccugggcgaagccgcugg

SEQ ID NO: 221274 - RNA, 19 nt, Artificial Sequence
  Description of Artificial Sequence: Synthetic oligonucleotide
caaugucuaacugcaggau

SEQ ID NO: 221275 - RNA, 19 nt, Artificial Sequence
  Description of Artificial Sequence: Synthetic oligonucleotide
ccacugucugagguuagac

SEQ ID NO: 221276 - RNA, 19 nt, Artificial Sequence
  Description of Artificial Sequence: Synthetic oligonucleotide
cccugaaaugcgauuacgu

SEQ ID NO: 221277 - RNA, 19 nt, Artificial Sequence
  Description of Artificial Sequence: Synthetic oligonucleotide
ugacgaccuucaugcucua

SEQ ID NO: 221278 - RNA, 19 nt, Artificial Sequence
  Description of Artificial Sequence: Synthetic oligonucleotide
ccugaaaugcgauuacguu

SEQ ID NO: 221279 - RNA, 19 nt, Artificial Sequence
  Description of Artificial Sequence: Synthetic oligonucleotide
cgaucaagccuccaccaga

SEQ ID NO: 221280 - RNA, 19 nt, Artificial Sequence
  Description of Artificial Sequence: Synthetic oligonucleotide
uagacccuauuggcccaaa

SEQ ID NO: 221281 - RNA, 19 nt, Artificial Sequence
  Description of Artificial Sequence: Synthetic oligonucleotide
cccauaguucuuaugggau

SEQ ID NO: 221282 - RNA, 19 nt, Artificial Sequence
  Description of Artificial Sequence: Synthetic oligonucleotide
gaaaugcgauuacguucau

SEQ ID NO: 221283 - RNA, 19 nt, Artificial Sequence
  Description of Artificial Sequence: Synthetic oligonucleotide
gggauggcgcauacaagaa

SEQ ID NO: 221284 - RNA, 19 nt, Artificial Sequence
  Description of Artificial Sequence: Synthetic oligonucleotide
ggcaccagccaucuuguuu

SEQ ID NO: 221285 - RNA, 19 nt, Artificial Sequence
  Description of Artificial Sequence: Synthetic oligonucleotide
gcgcauacaagaacaucaa

SEQ ID NO: 221286 - RNA, 19 nt, Artificial Sequence
  Description of Artificial Sequence: Synthetic oligonucleotide
agccuccaccagaaaggca

SEQ ID NO: 221287 - RNA, 19 nt, Artificial Sequence
  Description of Artificial Sequence: Synthetic oligonucleotide
cccagaucaccauuagacu

SEQ ID NO: 221288 - RNA, 19 nt, Artificial Sequence
  Description of Artificial Sequence: Synthetic oligonucleotide
ggaggggaauguguacgga

SEQ ID NO: 221289 - RNA, 19 nt, Artificial Sequence
  Description of Artificial Sequence: Synthetic oligonucleotide
ccuuuagguagauguuuua

SEQ ID NO: 221290 - RNA, 19 nt, Artificial Sequence
  Description of Artificial Sequence: Synthetic oligonucleotide
ccgcgcggaucccugggcg

SEQ ID NO: 221291 - RNA, 19 nt, Artificial Sequence
  Description of Artificial Sequence: Synthetic oligonucleotide
ggauauugauaaaggucau

SEQ ID NO: 221292 - RNA, 19 nt, Artificial Sequence
  Description of Artificial Sequence: Synthetic oligonucleotide
ggcgaagccgcuggggcuc

SEQ ID NO: 221293 - RNA, 19 nt, Artificial Sequence
  Description of Artificial Sequence: Synthetic oligonucleotide
ccggacuuugcucauggcu

SEQ ID NO: 221294 - RNA, 19 nt, Artificial Sequence
  Description of Artificial Sequence: Synthetic oligonucleotide
gggucaacuuguagaucuc

SEQ ID NO: 221295 - RNA, 19 nt, Artificial Sequence
  Description of Artificial Sequence: Synthetic oligonucleotide
aguuugcgugguacucuuu

SEQ ID NO: 221296 - RNA, 19 nt, Artificial Sequence
  Description of Artificial Sequence: Synthetic oligonucleotide
cugggagacuagauugcuu

SEQ ID NO: 221297 - RNA, 19 nt, Artificial Sequence
  Description of Artificial Sequence: Synthetic oligonucleotide
cauccagguccagucaaau

SEQ ID NO: 221298 - RNA, 19 nt, Artificial Sequence
  Description of Artificial Sequence: Synthetic oligonucleotide
ucccggccacaaugaugaa

SEQ ID NO: 221299 - RNA, 19 nt, Artificial Sequence
  Description of Artificial Sequence: Synthetic oligonucleotide
gggugauguaaaaguacau

SEQ ID NO: 221300 - RNA, 19 nt, Artificial Sequence
  Description of Artificial Sequence: Synthetic oligonucleotide
aucccucuggcaggauaua

SEQ ID NO: 221301 - RNA, 19 nt, Artificial Sequence
  Description of Artificial Sequence: Synthetic oligonucleotide
cgccaaauaacagcaucca

SEQ ID NO: 221302 - RNA, 19 nt, Artificial Sequence
  Description of Artificial Sequence: Synthetic oligonucleotide
cauucacugguagccggau

SEQ ID NO: 221303 - RNA, 19 nt, Artificial Sequence
  Description of Artificial Sequence: Synthetic oligonucleotide
cccaccaaucgaauauccu

SEQ ID NO: 221304 - RNA, 19 nt, Artificial Sequence
  Description of Artificial Sequence: Synthetic oligonucleotide
gcccugucggaugucgcca

SEQ ID NO: 221305 - RNA, 19 nt, Artificial Sequence
  Description of Artificial Sequence: Synthetic oligonucleotide
ccauaaugaugaagauacu

SEQ ID NO: 221306 - RNA, 19 nt, Artificial Sequence
  Description of Artificial Sequence: Synthetic oligonucleotide
gcaauugguccaacuugcu

SEQ ID NO: 221307 - RNA, 19 nt, Artificial Sequence
  Description of Artificial Sequence: Synthetic oligonucleotide
cccuauuggcccaaaccau

SEQ ID NO: 221308 - RNA, 19 nt, Artificial Sequence
  Description of Artificial Sequence: Synthetic oligonucleotide
accauuccacagggauauu

SEQ ID NO: 221309 - RNA, 19 nt, Artificial Sequence
  Description of Artificial Sequence: Synthetic oligonucleotide
cugucggaugucgccaaau

SEQ ID NO: 221310 - RNA, 19 nt, Artificial Sequence
  Description of Artificial Sequence: Synthetic oligonucleotide
cucuagagucuugggugau

SEQ ID NO: 221311 - RNA, 19 nt, Artificial Sequence
  Description of Artificial Sequence: Synthetic oligonucleotide
gaaaucccucuggcaggau

SEQ ID NO: 221312 - RNA, 19 nt, Artificial Sequence
  Description of Artificial Sequence: Synthetic oligonucleotide
ggauucccaccaaucgaau

SEQ ID NO: 221313 - RNA, 19 nt, Artificial Sequence
  Description of Artificial Sequence: Synthetic oligonucleotide
caaugucguuggcuucaau

SEQ ID NO: 221314 - RNA, 19 nt, Artificial Sequence
  Description of Artificial Sequence: Synthetic oligonucleotide
cggaucccugggcgaagcc

SEQ ID NO: 221315 - RNA, 19 nt, Artificial Sequence
  Description of Artificial Sequence: Synthetic oligonucleotide
cccggccacaaugaugaaa

SEQ ID NO: 221316 - RNA, 19 nt, Artificial Sequence
  Description of Artificial Sequence: Synthetic oligonucleotide
augggccauuucaguccau

SEQ ID NO: 221317 - RNA, 19 nt, Artificial Sequence
  Description of Artificial Sequence: Synthetic oligonucleotide
cccugucggaugucgccaa

SEQ ID NO: 221318 - RNA, 19 nt, Artificial Sequence
  Description of Artificial Sequence: Synthetic oligonucleotide
ccauuuccaauggccuucu

SEQ ID NO: 221319 - RNA, 19 nt, Artificial Sequence
  Description of Artificial Sequence: Synthetic oligonucleotide
ccugucggaugucgccaaa

SEQ ID NO: 221320 - RNA, 19 nt, Artificial Sequence
  Description of Artificial Sequence: Synthetic oligonucleotide
gcgcggaucccugggcgaa

SEQ ID NO: 221321 - RNA, 19 nt, Artificial Sequence
  Description of Artificial Sequence: Synthetic oligonucleotide
cggaaaacacaaugucguu

SEQ ID NO: 221322 - RNA, 19 nt, Artificial Sequence
  Description of Artificial Sequence: Synthetic oligonucleotide
cgcgcggaucccugggcga

SEQ ID NO: 221323 - RNA, 19 nt, Artificial Sequence
  Description of Artificial Sequence: Synthetic oligonucleotide
cgguaacccagggaaacau

SEQ ID NO: 221324 - RNA, 19 nt, Artificial Sequence
  Description of Artificial Sequence: Synthetic oligonucleotide
gccuccggacuuugcucau

SEQ ID NO: 221325 - RNA, 19 nt, Artificial Sequence
  Description of Artificial Sequence: Synthetic oligonucleotide
gaagauauacccuauaaug

SEQ ID NO: 221326 - RNA, 19 nt, Artificial Sequence
  Description of Artificial Sequence: Synthetic oligonucleotide
uuagacaaagcuuugaccc

SEQ ID NO: 221327 - RNA, 19 nt, Artificial Sequence
  Description of Artificial Sequence: Synthetic oligonucleotide
uuuaugacggcacagagca

SEQ ID NO: 221328 - RNA, 19 nt, Artificial Sequence
  Description of Artificial Sequence: Synthetic oligonucleotide
aacuuaaccaauccauucc

SEQ ID NO: 221329 - RNA, 19 nt, Artificial Sequence
  Description of Artificial Sequence: Synthetic oligonucleotide
  modified_base (5)..(5): a, c, u, g, unknown or other
augancuuuuaacaaaugc

SEQ ID NO: 221330 - RNA, 19 nt, Artificial Sequence
  Description of Artificial Sequence: Synthetic oligonucleotide
auagcguugaaucaucagc

SEQ ID NO: 221331 - RNA, 19 nt, Artificial Sequence
  Description of Artificial Sequence: Synthetic oligonucleotide
aguguucagauuuacgugc

SEQ ID NO: 221332 - RNA, 19 nt, Artificial Sequence
  Description of Artificial Sequence: Synthetic oligonucleotide
cauguauuguuuaugacgg

SEQ ID NO: 221333 - RNA, 19 nt, Artificial Sequence
  Description of Artificial Sequence: Synthetic oligonucleotide
cauguggugaucuugaccg

SEQ ID NO: 221334 - RNA, 19 nt, Artificial Sequence
  Description of Artificial Sequence: Synthetic oligonucleotide
uuuaaacugaaccaaugcc

SEQ ID NO: 221335 - RNA, 19 nt, Artificial Sequence
  Description of Artificial Sequence: Synthetic oligonucleotide
uauguauugggccaggccc

SEQ ID NO: 221336 - RNA, 19 nt, Artificial Sequence
  Description of Artificial Sequence: Synthetic oligonucleotide
cuaauugucagcaacuggc

SEQ ID NO: 221337 - RNA, 19 nt, Artificial Sequence
  Description of Artificial Sequence: Synthetic oligonucleotide
aaugguagcccuuuuaagu

SEQ ID NO: 221338 - RNA, 19 nt, Artificial Sequence
  Description of Artificial Sequence: Synthetic oligonucleotide
ucguuuucgaaucauaucu

SEQ ID NO: 221339 - RNA, 19 nt, Artificial Sequence
  Description of Artificial Sequence: Synthetic oligonucleotide
aggucuaucauuuaaguca

SEQ ID NO: 221340 - RNA, 19 nt, Artificial Sequence
  Description of Artificial Sequence: Synthetic oligonucleotide
aacaggaguuaauggaccc

SEQ ID NO: 221341 - RNA, 19 nt, Artificial Sequence
  Description of Artificial Sequence: Synthetic oligonucleotide
auaaugugaaccacuaucc

SEQ ID NO: 221342 - RNA, 19 nt, Artificial Sequence
  Description of Artificial Sequence: Synthetic oligonucleotide
aaaucaaugacguguuugu

SEQ ID NO: 221343 - RNA, 19 nt, Artificial Sequence
  Description of Artificial Sequence: Synthetic oligonucleotide
auacccuauaaugugaacc

SEQ ID NO: 221344 - RNA, 19 nt, Artificial Sequence
  Description of Artificial Sequence: Synthetic oligonucleotide
uuaaguaaacuacaauaac

SEQ ID NO: 221345 - RNA, 19 nt, Artificial Sequence
  Description of Artificial Sequence: Synthetic oligonucleotide
uuuacgugcaucaucuuca

SEQ ID NO: 221346 - RNA, 19 nt, Artificial Sequence
  Description of Artificial Sequence: Synthetic oligonucleotide
aaucgaauugcaaaaguag

SEQ ID NO: 221347 - RNA, 19 nt, Artificial Sequence
  Description of Artificial Sequence: Synthetic oligonucleotide
uacgaaacaaauugcaaug

SEQ ID NO: 221348 - RNA, 19 nt, Artificial Sequence
  Description of Artificial Sequence: Synthetic oligonucleotide
aaguaaacuacaauaacca

SEQ ID NO: 221349 - RNA, 19 nt, Artificial Sequence
  Description of Artificial Sequence: Synthetic oligonucleotide
ucuaggguaacuauaugga

SEQ ID NO: 221350 - RNA, 19 nt, Artificial Sequence
  Description of Artificial Sequence: Synthetic oligonucleotide
aaagcgauugcccauguau

SEQ ID NO: 221351 - RNA, 19 nt, Artificial Sequence
  Description of Artificial Sequence: Synthetic oligonucleotide
uguuauagaaaccaaucua

SEQ ID NO: 221352 - RNA, 19 nt, Artificial Sequence
  Description of Artificial Sequence: Synthetic oligonucleotide
uuaccugauacccauaaaa

SEQ ID NO: 221353 - RNA, 19 nt, Artificial Sequence
  Description of Artificial Sequence: Synthetic oligonucleotide
  modified_base (3)..(3): a, c, u, g, unknown or other
gancuuuuaacaaaugcac

SEQ ID NO: 221354 - RNA, 19 nt, Artificial Sequence
  Description of Artificial Sequence: Synthetic oligonucleotide
uccuaaagacuucaaaugu

SEQ ID NO: 221355 - RNA, 19 nt, Artificial Sequence
  Description of Artificial Sequence: Synthetic oligonucleotide
cacuuaaauuauuuggugc

SEQ ID NO: 221356 - RNA, 19 nt, Artificial Sequence
  Description of Artificial Sequence: Synthetic oligonucleotide
uguuauaugggcacagacu

SEQ ID NO: 221357 - RNA, 19 nt, Artificial Sequence
  Description of Artificial Sequence: Synthetic oligonucleotide
aaaugguagcccuuuuaag

SEQ ID NO: 221358 - RNA, 19 nt, Artificial Sequence
  Description of Artificial Sequence: Synthetic oligonucleotide
aacuugaauaaagcgauug

SEQ ID NO: 221359 - RNA, 19 nt, Artificial Sequence
  Description of Artificial Sequence: Synthetic oligonucleotide
aagauauacccuauaaugu

SEQ ID NO: 221360 - RNA, 19 nt, Artificial Sequence
  Description of Artificial Sequence: Synthetic oligonucleotide
uaggguaacuauauggaca

SEQ ID NO: 221361 - RNA, 19 nt, Artificial Sequence
  Description of Artificial Sequence: Synthetic oligonucleotide
aucgaauugcaaaaguagc

SEQ ID NO: 221362 - RNA, 19 nt, Artificial Sequence
  Description of Artificial Sequence: Synthetic oligonucleotide
uucuugaaccuauaggucu

SEQ ID NO: 221363 - RNA, 19 nt, Artificial Sequence
  Description of Artificial Sequence: Synthetic oligonucleotide
aauggacccagaaacacag

SEQ ID NO: 221364 - RNA, 19 nt, Artificial Sequence
  Description of Artificial Sequence: Synthetic oligonucleotide
guuaacaggaguuaaugga

SEQ ID NO: 221365 - RNA, 19 nt, Artificial Sequence
  Description of Artificial Sequence: Synthetic oligonucleotide
aauggcggcccauuauugg

SEQ ID NO: 221366 - RNA, 19 nt, Artificial Sequence
  Description of Artificial Sequence: Synthetic oligonucleotide
aguaaacuacaauaaccag

SEQ ID NO: 221367 - RNA, 19 nt, Artificial Sequence
  Description of Artificial Sequence: Synthetic oligonucleotide
uuaaaucgaauugcaaaag

SEQ ID NO: 221368 - RNA, 19 nt, Artificial Sequence
  Description of Artificial Sequence: Synthetic oligonucleotide
ucuacaaagccuucaccag

SEQ ID NO: 221369 - RNA, 19 nt, Artificial Sequence
  Description of Artificial Sequence: Synthetic oligonucleotide
uagcguugaaucaucagca

SEQ ID NO: 221370 - RNA, 19 nt, Artificial Sequence
  Description of Artificial Sequence: Synthetic oligonucleotide
ugaaccuauaggucuauca

SEQ ID NO: 221371 - RNA, 19 nt, Artificial Sequence
  Description of Artificial Sequence: Synthetic oligonucleotide
cuuuaaaucgaauugcaaa

SEQ ID NO: 221372 - RNA, 19 nt, Artificial Sequence
  Description of Artificial Sequence: Synthetic oligonucleotide
gcgauuuugaccuuggaag

SEQ ID NO: 221373 - RNA, 19 nt, Artificial Sequence
  Description of Artificial Sequence: Synthetic oligonucleotide
ucuccagauagcuuuacga

SEQ ID NO: 221374 - RNA, 19 nt, Artificial Sequence
  Description of Artificial Sequence: Synthetic oligonucleotide
uguauuguuuaugacggca

SEQ ID NO: 221375 - RNA, 19 nt, Artificial Sequence
  Description of Artificial Sequence: Synthetic oligonucleotide
uacccuauaaugugaacca

SEQ ID NO: 221376 - RNA, 19 nt, Artificial Sequence
  Description of Artificial Sequence: Synthetic oligonucleotide
accuuaauuauuguagguc

SEQ ID NO: 221377 - RNA, 19 nt, Artificial Sequence
  Description of Artificial Sequence: Synthetic oligonucleotide
aaccuuaauuauuguaggu

SEQ ID NO: 221378 - RNA, 19 nt, Artificial Sequence
  Description of Artificial Sequence: Synthetic oligonucleotide
caugcuuuguuugaaagug

SEQ ID NO: 221379 - RNA, 19 nt, Artificial Sequence
  Description of Artificial Sequence: Synthetic oligonucleotide
gagagaacuuaaccaaucc

SEQ ID NO: 221380 - RNA, 19 nt, Artificial Sequence
  Description of Artificial Sequence: Synthetic oligonucleotide
  modified_base (8)..(8): a, c, u, g, unknown or other
uacaugancuuuuaacaaa

SEQ ID NO: 221381 - RNA, 19 nt, Artificial Sequence
  Description of Artificial Sequence: Synthetic oligonucleotide
  modified_base (18)..(18): a, c, u, g, unknown or other
uauuucgaccuacauganc

SEQ ID NO: 221382 - RNA, 19 nt, Artificial Sequence
  Description of Artificial Sequence: Synthetic oligonucleotide
uguagguuuuagacaaagc

SEQ ID NO: 221383 - RNA, 19 nt, Artificial Sequence
  Description of Artificial Sequence: Synthetic oligonucleotide
auaggucuaucauuuaagu

SEQ ID NO: 221384 - RNA, 19 nt, Artificial Sequence
  Description of Artificial Sequence: Synthetic oligonucleotide
cuauauggacaaaagcuuc

SEQ ID NO: 221385 - RNA, 19 nt, Artificial Sequence
  Description of Artificial Sequence: Synthetic oligonucleotide
  modified_base (17)..(17): a, c, u, g, unknown or other
auuucgaccuacaugancu

SEQ ID NO: 221386 - RNA, 19 nt, Artificial Sequence
  Description of Artificial Sequence: Synthetic oligonucleotide
uagguuuuagacaaagcuu

SEQ ID NO: 221387 - RNA, 19 nt, Artificial Sequence
  Description of Artificial Sequence: Synthetic oligonucleotide
gauaugaccuccagcagcc

SEQ ID NO: 221388 - RNA, 19 nt, Artificial Sequence
  Description of Artificial Sequence: Synthetic oligonucleotide
ucauguggugaucuugacc

SEQ ID NO: 221389 - RNA, 19 nt, Artificial Sequence
  Description of Artificial Sequence: Synthetic oligonucleotide
aguaauuggaugaacuuga

SEQ ID NO: 221390 - RNA, 19 nt, Artificial Sequence
  Description of Artificial Sequence: Synthetic oligonucleotide
uucgucccgagauucaaag

SEQ ID NO: 221391 - RNA, 19 nt, Artificial Sequence
  Description of Artificial Sequence: Synthetic oligonucleotide
  modified_base (2)..(2): a, c, u, g, unknown or other
ancuuuuaacaaaugcacu

SEQ ID NO: 221392 - RNA, 19 nt, Artificial Sequence
  Description of Artificial Sequence: Synthetic oligonucleotide
uuuaacaaaugcacugcau

SEQ ID NO: 221393 - RNA, 19 nt, Artificial Sequence
  Description of Artificial Sequence: Synthetic oligonucleotide
ucgcauaucuucuagggua

SEQ ID NO: 221394 - RNA, 19 nt, Artificial Sequence
  Description of Artificial Sequence: Synthetic oligonucleotide
agagaacuuaaccaaucca

SEQ ID NO: 221395 - RNA, 19 nt, Artificial Sequence
  Description of Artificial Sequence: Synthetic oligonucleotide
aacuuuaaaucgaauugca

SEQ ID NO: 221396 - RNA, 19 nt, Artificial Sequence
  Description of Artificial Sequence: Synthetic oligonucleotide
guagguuuuagacaaagcu

SEQ ID NO: 221397 - RNA, 19 nt, Artificial Sequence
  Description of Artificial Sequence: Synthetic oligonucleotide
ugaauggaauguuuguuau

SEQ ID NO: 221398 - RNA, 19 nt, Artificial Sequence
  Description of Artificial Sequence: Synthetic oligonucleotide
uuaauuauuguagguccug

SEQ ID NO: 221399 - RNA, 19 nt, Artificial Sequence
  Description of Artificial Sequence: Synthetic oligonucleotide
aagggcauguucugaaccu

SEQ ID NO: 221400 - RNA, 19 nt, Artificial Sequence
  Description of Artificial Sequence: Synthetic oligonucleotide
aaugacguguuuguuuucu

SEQ ID NO: 221401 - RNA, 19 nt, Artificial Sequence
  Description of Artificial Sequence: Synthetic oligonucleotide
uccgguuuuccuaaagacu

SEQ ID NO: 221402 - RNA, 19 nt, Artificial Sequence
  Description of Artificial Sequence: Synthetic oligonucleotide
accugauacccauaaaaga

SEQ ID NO: 221403 - RNA, 19 nt, Artificial Sequence
  Description of Artificial Sequence: Synthetic oligonucleotide
auuuaaacuaccagggcca

SEQ ID NO: 221404 - RNA, 19 nt, Artificial Sequence
  Description of Artificial Sequence: Synthetic oligonucleotide
aaaacaaucuggaugcauu

SEQ ID NO: 221405 - RNA, 19 nt, Artificial Sequence
  Description of Artificial Sequence: Synthetic oligonucleotide
acgugcaucaucuucaguu

SEQ ID NO: 221406 - RNA, 19 nt, Artificial Sequence
  Description of Artificial Sequence: Synthetic oligonucleotide
gcccacuuaaauuauuugg

SEQ ID NO: 221407 - RNA, 19 nt, Artificial Sequence
  Description of Artificial Sequence: Synthetic oligonucleotide
accgugaccuuuucugccc

SEQ ID NO: 221408 - RNA, 19 nt, Artificial Sequence
  Description of Artificial Sequence: Synthetic oligonucleotide
uaaacacacugaaccuggg

SEQ ID NO: 221409 - RNA, 19 nt, Artificial Sequence
  Description of Artificial Sequence: Synthetic oligonucleotide
aggguaacuauauggacaa

SEQ ID NO: 221410 - RNA, 19 nt, Artificial Sequence
  Description of Artificial Sequence: Synthetic oligonucleotide
aauugucagcaacuggcaa

SEQ ID NO: 221411 - RNA, 19 nt, Artificial Sequence
  Description of Artificial Sequence: Synthetic oligonucleotide
cuaggguaacuauauggac

SEQ ID NO: 221412 - RNA, 19 nt, Artificial Sequence
  Description of Artificial Sequence: Synthetic oligonucleotide
aaccaaucuaucugcaauu

SEQ ID NO: 221413 - RNA, 19 nt, Artificial Sequence
  Description of Artificial Sequence: Synthetic oligonucleotide
cugggauuaccugauaccc

SEQ ID NO: 221414 - RNA, 19 nt, Artificial Sequence
  Description of Artificial Sequence: Synthetic oligonucleotide
acccgcaauauguauuggg

SEQ ID NO: 221415 - RNA, 19 nt, Artificial Sequence
  Description of Artificial Sequence: Synthetic oligonucleotide
uaaacuaccagggccauuu

SEQ ID NO: 221416 - RNA, 19 nt, Artificial Sequence
  Description of Artificial Sequence: Synthetic oligonucleotide
  modified_base (10)..(10): a, c, u, g, unknown or other
ccuacaugancuuuuaaca

SEQ ID NO: 221417 - RNA, 19 nt, Artificial Sequence
  Description of Artificial Sequence: Synthetic oligonucleotide
uaaauggcggcccauuauu

SEQ ID NO: 221418 - RNA, 19 nt, Artificial Sequence
  Description of Artificial Sequence: Synthetic oligonucleotide
uuaaauggcggcccauuau

SEQ ID NO: 221419 - RNA, 19 nt, Artificial Sequence
  Description of Artificial Sequence: Synthetic oligonucleotide
gaguuguaaacagccaacc

SEQ ID NO: 221420 - RNA, 19 nt, Artificial Sequence
  Description of Artificial Sequence: Synthetic oligonucleotide
auuccgugcacacucacau

SEQ ID NO: 221421 - RNA, 19 nt, Artificial Sequence
  Description of Artificial Sequence: Synthetic oligonucleotide
gauauacccuauaauguga

SEQ ID NO: 221422 - RNA, 19 nt, Artificial Sequence
  Description of Artificial Sequence: Synthetic oligonucleotide
uaggucuaucauuuaaguc

SEQ ID NO: 221423 - RNA, 19 nt, Artificial Sequence
  Description of Artificial Sequence: Synthetic oligonucleotide
aaguagccaacuucuaauu

SEQ ID NO: 221424 - RNA, 19 nt, Artificial Sequence
  Description of Artificial Sequence: Synthetic oligonucleotide
gaaauuaaauggcggccca

SEQ ID NO: 221425 - RNA, 19 nt, Artificial Sequence
  Description of Artificial Sequence: Synthetic oligonucleotide
ucgaaucauaucuaucuuu

SEQ ID NO: 221426 - RNA, 19 nt, Artificial Sequence
  Description of Artificial Sequence: Synthetic oligonucleotide
ugacggcccacuuaaauua

SEQ ID NO: 221427 - RNA, 19 nt, Artificial Sequence
  Description of Artificial Sequence: Synthetic oligonucleotide
uuauuggccuccuucgauc

SEQ ID NO: 221428 - RNA, 19 nt, Artificial Sequence
  Description of Artificial Sequence: Synthetic oligonucleotide
aggcauaacaggccuaaca

SEQ ID NO: 221429 - RNA, 19 nt, Artificial Sequence
  Description of Artificial Sequence: Synthetic oligonucleotide
agcgauugcccauguauug

SEQ ID NO: 221430 - RNA, 19 nt, Artificial Sequence
  Description of Artificial Sequence: Synthetic oligonucleotide
accuuucuugaaccuauag

SEQ ID NO: 221431 - RNA, 19 nt, Artificial Sequence
  Description of Artificial Sequence: Synthetic oligonucleotide
gaaccgggaauuccggcag

SEQ ID NO: 221432 - RNA, 19 nt, Artificial Sequence
  Description of Artificial Sequence: Synthetic oligonucleotide
guuauaugggcacagacuu

SEQ ID NO: 221433 - RNA, 19 nt, Artificial Sequence
  Description of Artificial Sequence: Synthetic oligonucleotide
acuauauggacaaaagcuu

SEQ ID NO: 221434 - RNA, 19 nt, Artificial Sequence
  Description of Artificial Sequence: Synthetic oligonucleotide
agaaccgggaauuccggca

SEQ ID NO: 221435 - RNA, 19 nt, Artificial Sequence
  Description of Artificial Sequence: Synthetic oligonucleotide
uucgauccuacagucaaga

SEQ ID NO: 221436 - RNA, 19 nt, Artificial Sequence
  Description of Artificial Sequence: Synthetic oligonucleotide
  modified_base (6)..(6): a, c, u, g, unknown or other
caugancuuuuaacaaaug

SEQ ID NO: 221437 - RNA, 19 nt, Artificial Sequence
  Description of Artificial Sequence: Synthetic oligonucleotide
gaauugcaaaaguagccaa

SEQ ID NO: 221438 - RNA, 19 nt, Artificial Sequence
  Description of Artificial Sequence: Synthetic oligonucleotide
aaccgggaauuccggcagc

SEQ ID NO: 221439 - RNA, 19 nt, Artificial Sequence
  Description of Artificial Sequence: Synthetic oligonucleotide
cauagcguugaaucaucag

SEQ ID NO: 221440 - RNA, 19 nt, Artificial Sequence
  Description of Artificial Sequence: Synthetic oligonucleotide
uugacgggaagugacuuca

SEQ ID NO: 221441 - RNA, 19 nt, Artificial Sequence
  Description of Artificial Sequence: Synthetic oligonucleotide
  modified_base (7)..(7): a, c, u, g, unknown or other
acaugancuuuuaacaaau

SEQ ID NO: 221442 - RNA, 19 nt, Artificial Sequence
  Description of Artificial Sequence: Synthetic oligonucleotide
ugaccgugaccuuuucugc

SEQ ID NO: 221443 - RNA, 19 nt, Artificial Sequence
  Description of Artificial Sequence: Synthetic oligonucleotide
ugggauuaccugauaccca

SEQ ID NO: 221444 - RNA, 19 nt, Artificial Sequence
  Description of Artificial Sequence: Synthetic oligonucleotide
gaaucauaucuaucuuuuc

SEQ ID NO: 221445 - RNA, 19 nt, Artificial Sequence
  Description of Artificial Sequence: Synthetic oligonucleotide
guuuguuauaugggcacag

SEQ ID NO: 221446 - RNA, 19 nt, Artificial Sequence
  Description of Artificial Sequence: Synthetic oligonucleotide
cacuaggcauuccagcacc

SEQ ID NO: 221447 - RNA, 19 nt, Artificial Sequence
  Description of Artificial Sequence: Synthetic oligonucleotide
ggaaauuaaauggcggccc

SEQ ID NO: 221448 - RNA, 19 nt, Artificial Sequence
  Description of Artificial Sequence: Synthetic oligonucleotide
cagauuuacgugcaucauc

SEQ ID NO: 221449 - RNA, 19 nt, Artificial Sequence
  Description of Artificial Sequence: Synthetic oligonucleotide
cucucgcauaucuucuagg

SEQ ID NO: 221450 - RNA, 19 nt, Artificial Sequence
  Description of Artificial Sequence: Synthetic oligonucleotide
uugucagcaacuggcaaga

SEQ ID NO: 221451 - RNA, 19 nt, Artificial Sequence
  Description of Artificial Sequence: Synthetic oligonucleotide
ucccgagauucaaaggcca

SEQ ID NO: 221452 - RNA, 19 nt, Artificial Sequence
  Description of Artificial Sequence: Synthetic oligonucleotide
aauuaaauggcggcccauu

SEQ ID NO: 221453 - RNA, 19 nt, Artificial Sequence
  Description of Artificial Sequence: Synthetic oligonucleotide
uuauuuggugcuccuccaa

SEQ ID NO: 221454 - RNA, 19 nt, Artificial Sequence
  Description of Artificial Sequence: Synthetic oligonucleotide
uuuaccuuucuugaaccua

SEQ ID NO: 221455 - RNA, 19 nt, Artificial Sequence
  Description of Artificial Sequence: Synthetic oligonucleotide
aaauggcggcccauuauug

SEQ ID NO: 221456 - RNA, 19 nt, Artificial Sequence
  Description of Artificial Sequence: Synthetic oligonucleotide
uauacccuauaaugugaac

SEQ ID NO: 221457 - RNA, 19 nt, Artificial Sequence
  Description of Artificial Sequence: Synthetic oligonucleotide
uuuuacgguguaaguguuc

SEQ ID NO: 221458 - RNA, 19 nt, Artificial Sequence
  Description of Artificial Sequence: Synthetic oligonucleotide
ucgucccgagauucaaagg

SEQ ID NO: 221459 - RNA, 19 nt, Artificial Sequence
  Description of Artificial Sequence: Synthetic oligonucleotide
uguuuguuauaugggcaca

SEQ ID NO: 221460 - RNA, 19 nt, Artificial Sequence
  Description of Artificial Sequence: Synthetic oligonucleotide
guauuguuuaugacggcac

SEQ ID NO: 221461 - RNA, 19 nt, Artificial Sequence
  Description of Artificial Sequence: Synthetic oligonucleotide
cccgccaaaauuaccaggg

SEQ ID NO: 221462 - RNA, 19 nt, Artificial Sequence
  Description of Artificial Sequence: Synthetic oligonucleotide
aagaccuugcccauuguua

SEQ ID NO: 221463 - RNA, 19 nt, Artificial Sequence
  Description of Artificial Sequence: Synthetic oligonucleotide
caaaugguagcccuuuuaa

SEQ ID NO: 221464 - RNA, 19 nt, Artificial Sequence
  Description of Artificial Sequence: Synthetic oligonucleotide
gucguuuucgaaucauauc

SEQ ID NO: 221465 - RNA, 19 nt, Artificial Sequence
  Description of Artificial Sequence: Synthetic oligonucleotide
aauccugacggcccacuua

SEQ ID NO: 221466 - RNA, 19 nt, Artificial Sequence
  Description of Artificial Sequence: Synthetic oligonucleotide
acgaaacaaauugcaaugu

SEQ ID NO: 221467 - RNA, 19 nt, Artificial Sequence
  Description of Artificial Sequence: Synthetic oligonucleotide
guagccaacuucuaauugu

SEQ ID NO: 221468 - RNA, 19 nt, Artificial Sequence
  Description of Artificial Sequence: Synthetic oligonucleotide
caucccaugugguauaaaa

SEQ ID NO: 221469 - RNA, 19 nt, Artificial Sequence
  Description of Artificial Sequence: Synthetic oligonucleotide
  modified_base (19)..(19): a, c, u, g, unknown or other
uuauuucgaccuacaugan

SEQ ID NO: 221470 - RNA, 19 nt, Artificial Sequence
  Description of Artificial Sequence: Synthetic oligonucleotide
aaggcauaacaggccuaac

SEQ ID NO: 221471 - RNA, 19 nt, Artificial Sequence
  Description of Artificial Sequence: Synthetic oligonucleotide
aaauuaaauggcggcccau

SEQ ID NO: 221472 - RNA, 19 nt, Artificial Sequence
  Description of Artificial Sequence: Synthetic oligonucleotide
acccuauaaugugaaccac

SEQ ID NO: 221473 - RNA, 19 nt, Artificial Sequence
  Description of Artificial Sequence: Synthetic oligonucleotide
cacauagcguugaaucauc

SEQ ID NO: 221474 - RNA, 19 nt, Artificial Sequence
  Description of Artificial Sequence: Synthetic oligonucleotide
uccggcagcgggaauucca

SEQ ID NO: 221475 - RNA, 19 nt, Artificial Sequence
  Description of Artificial Sequence: Synthetic oligonucleotide
ugguagcccuuuuaaguaa

SEQ ID NO: 221476 - RNA, 19 nt, Artificial Sequence
  Description of Artificial Sequence: Synthetic oligonucleotide
gguguaaguguucagauuu

SEQ ID NO: 221477 - RNA, 19 nt, Artificial Sequence
  Description of Artificial Sequence: Synthetic oligonucleotide
agucguuuucgaaucauau

SEQ ID NO: 221478 - RNA, 19 nt, Artificial Sequence
  Description of Artificial Sequence: Synthetic oligonucleotide
uacagaucaucaggguuga

SEQ ID NO: 221479 - RNA, 19 nt, Artificial Sequence
  Description of Artificial Sequence: Synthetic oligonucleotide
cccgcaauauguauugggc

SEQ ID NO: 221480 - RNA, 19 nt, Artificial Sequence
  Description of Artificial Sequence: Synthetic oligonucleotide
ggacccgcaauauguauug

SEQ ID NO: 221481 - RNA, 19 nt, Artificial Sequence
  Description of Artificial Sequence: Synthetic oligonucleotide
cuucgauccuacagucaag

SEQ ID NO: 221482 - RNA, 19 nt, Artificial Sequence
  Description of Artificial Sequence: Synthetic oligonucleotide
ggguuaacaggaguuaaug

SEQ ID NO: 221483 - RNA, 19 nt, Artificial Sequence
  Description of Artificial Sequence: Synthetic oligonucleotide
gcuuuacgaaacaaauugc

SEQ ID NO: 221484 - RNA, 19 nt, Artificial Sequence
  Description of Artificial Sequence: Synthetic oligonucleotide
gaaggcauaacaggccuaa

SEQ ID NO: 221485 - RNA, 19 nt, Artificial Sequence
  Description of Artificial Sequence: Synthetic oligonucleotide
ucccauuauuucgaccuac

SEQ ID NO: 221486 - RNA, 19 nt, Artificial Sequence
  Description of Artificial Sequence: Synthetic oligonucleotide
acuucacgcugcuuugaga

SEQ ID NO: 221487 - RNA, 19 nt, Artificial Sequence
  Description of Artificial Sequence: Synthetic oligonucleotide
guucagauuuacgugcauc

SEQ ID NO: 221488 - RNA, 19 nt, Artificial Sequence
  Description of Artificial Sequence: Synthetic oligonucleotide
agcauaccuuucuuaguaa

SEQ ID NO: 221489 - RNA, 19 nt, Artificial Sequence
  Description of Artificial Sequence: Synthetic oligonucleotide
gauaggguuaacaggaguu

SEQ ID NO: 221490 - RNA, 19 nt, Artificial Sequence
  Description of Artificial Sequence: Synthetic oligonucleotide
uguucagauuuacgugcau

SEQ ID NO: 221491 - RNA, 19 nt, Artificial Sequence
  Description of Artificial Sequence: Synthetic oligonucleotide
cagaaccgggaauuccggc

SEQ ID NO: 221492 - RNA, 19 nt, Artificial Sequence
  Description of Artificial Sequence: Synthetic oligonucleotide
auauacccuauaaugugaa

SEQ ID NO: 221493 - RNA, 19 nt, Artificial Sequence
  Description of Artificial Sequence: Synthetic oligonucleotide
ucagauuuacgugcaucau

SEQ ID NO: 221494 - RNA, 19 nt, Artificial Sequence
  Description of Artificial Sequence: Synthetic oligonucleotide
uuuaaacuaccagggccau

SEQ ID NO: 221495 - RNA, 19 nt, Artificial Sequence
  Description of Artificial Sequence: Synthetic oligonucleotide
cgauccuacagucaagaag

SEQ ID NO: 221496 - RNA, 19 nt, Artificial Sequence
  Description of Artificial Sequence: Synthetic oligonucleotide
uucggcccgccaaaauuac

SEQ ID NO: 221497 - RNA, 19 nt, Artificial Sequence
  Description of Artificial Sequence: Synthetic oligonucleotide
ccgcaauauguauugggcc

SEQ ID NO: 221498 - RNA, 19 nt, Artificial Sequence
  Description of Artificial Sequence: Synthetic oligonucleotide
guuuucgaaucauaucuau

SEQ ID NO: 221499 - RNA, 19 nt, Artificial Sequence
  Description of Artificial Sequence: Synthetic oligonucleotide
cgucccgagauucaaaggc

SEQ ID NO: 221500 - RNA, 19 nt, Artificial Sequence
  Description of Artificial Sequence: Synthetic oligonucleotide
auaggguuaacaggaguua

SEQ ID NO: 221501 - RNA, 19 nt, Artificial Sequence
  Description of Artificial Sequence: Synthetic oligonucleotide
agcguugaaucaucagcau

SEQ ID NO: 221502 - RNA, 19 nt, Artificial Sequence
  Description of Artificial Sequence: Synthetic oligonucleotide
ccugcacuaggcaucacug

SEQ ID NO: 221503 - RNA, 19 nt, Artificial Sequence
  Description of Artificial Sequence: Synthetic oligonucleotide
ucgauccuacagucaagaa

SEQ ID NO: 221504 - RNA, 19 nt, Artificial Sequence
  Description of Artificial Sequence: Synthetic oligonucleotide
ucggcccgccaaaauuacc

SEQ ID NO: 221505 - RNA, 19 nt, Artificial Sequence
  Description of Artificial Sequence: Synthetic oligonucleotide
gcaacuggcaagagcaccc

SEQ ID NO: 221506 - RNA, 19 nt, Artificial Sequence
  Description of Artificial Sequence: Synthetic oligonucleotide
ggcgauuuugaccuuggaa

SEQ ID NO: 221507 - RNA, 19 nt, Artificial Sequence
  Description of Artificial Sequence: Synthetic oligonucleotide
aagucguuuucgaaucaua

SEQ ID NO: 221508 - RNA, 19 nt, Artificial Sequence
  Description of Artificial Sequence: Synthetic oligonucleotide
accgggaauuccggcagcg

SEQ ID NO: 221509 - RNA, 19 nt, Artificial Sequence
  Description of Artificial Sequence: Synthetic oligonucleotide
caucccggcaccaggcauc

SEQ ID NO: 221510 - RNA, 19 nt, Artificial Sequence
  Description of Artificial Sequence: Synthetic oligonucleotide
uacgugcaucaucuucagu

SEQ ID NO: 221511 - RNA, 19 nt, Artificial Sequence
  Description of Artificial Sequence: Synthetic oligonucleotide
ccccucuggauuuaacacc

SEQ ID NO: 221512 - RNA, 19 nt, Artificial Sequence
  Description of Artificial Sequence: Synthetic oligonucleotide
uggaugcauuaaucacagc

SEQ ID NO: 221513 - RNA, 19 nt, Artificial Sequence
  Description of Artificial Sequence: Synthetic oligonucleotide
gacccgcaauauguauugg

SEQ ID NO: 221514 - RNA, 19 nt, Artificial Sequence
  Description of Artificial Sequence: Synthetic oligonucleotide
gaaaacaaucuggaugcau

SEQ ID NO: 221515 - RNA, 19 nt, Artificial Sequence
  Description of Artificial Sequence: Synthetic oligonucleotide
aaccagccucaugugguga

SEQ ID NO: 221516 - RNA, 19 nt, Artificial Sequence
  Description of Artificial Sequence: Synthetic oligonucleotide
acauagcguugaaucauca

SEQ ID NO: 221517 - RNA, 19 nt, Artificial Sequence
  Description of Artificial Sequence: Synthetic oligonucleotide
ugacgggaagugacuucac

SEQ ID NO: 221518 - RNA, 19 nt, Artificial Sequence
  Description of Artificial Sequence: Synthetic oligonucleotide
ggucuaucauuuaagucaa

SEQ ID NO: 221519 - RNA, 19 nt, Artificial Sequence
  Description of Artificial Sequence: Synthetic oligonucleotide
auucggcccgccaaaauua

SEQ ID NO: 221520 - RNA, 19 nt, Artificial Sequence
  Description of Artificial Sequence: Synthetic oligonucleotide
ccuauaaugugaaccacua

SEQ ID NO: 221521 - RNA, 19 nt, Artificial Sequence
  Description of Artificial Sequence: Synthetic oligonucleotide
uggcuucgucccgagauuc

SEQ ID NO: 221522 - RNA, 19 nt, Artificial Sequence
  Description of Artificial Sequence: Synthetic oligonucleotide
uaccuuucuugaaccuaua

SEQ ID NO: 221523 - RNA, 19 nt, Artificial Sequence
  Description of Artificial Sequence: Synthetic oligonucleotide
caggcucuaaccuggaaau

SEQ ID NO: 221524 - RNA, 19 nt, Artificial Sequence
  Description of Artificial Sequence: Synthetic oligonucleotide
uugaaccuauaggucuauc

SEQ ID NO: 221525 - RNA, 19 nt, Artificial Sequence
  Description of Artificial Sequence: Synthetic oligonucleotide
agcucuacuuauguuucua

SEQ ID NO: 221526 - RNA, 19 nt, Artificial Sequence
  Description of Artificial Sequence: Synthetic oligonucleotide
gcaaaccacuguuuccaac

SEQ ID NO: 221527 - RNA, 19 nt, Artificial Sequence
  Description of Artificial Sequence: Synthetic oligonucleotide
gguauuccggcaccaggca

SEQ ID NO: 221528 - RNA, 19 nt, Artificial Sequence
  Description of Artificial Sequence: Synthetic oligonucleotide
cgcaauauguauugggcca

SEQ ID NO: 221529 - RNA, 19 nt, Artificial Sequence
  Description of Artificial Sequence: Synthetic oligonucleotide
ccagcaccggguauuccgg

SEQ ID NO: 221530 - RNA, 19 nt, Artificial Sequence
  Description of Artificial Sequence: Synthetic oligonucleotide
uuggguccauaagcuauau

SEQ ID NO: 221531 - RNA, 19 nt, Artificial Sequence
  Description of Artificial Sequence: Synthetic oligonucleotide
cagcacucucauccaccgg

SEQ ID NO: 221532 - RNA, 19 nt, Artificial Sequence
  Description of Artificial Sequence: Synthetic oligonucleotide
cagcaccggguauuccggc

SEQ ID NO: 221533 - RNA, 19 nt, Artificial Sequence
  Description of Artificial Sequence: Synthetic oligonucleotide
uuaaacuaccagggccauu

SEQ ID NO: 221534 - RNA, 19 nt, Artificial Sequence
  Description of Artificial Sequence: Synthetic oligonucleotide
gcagccuacccacugucuc

SEQ ID NO: 221535 - RNA, 19 nt, Artificial Sequence
  Description of Artificial Sequence: Synthetic oligonucleotide
gggauuaccugauacccau

SEQ ID NO: 221536 - RNA, 19 nt, Artificial Sequence
  Description of Artificial Sequence: Synthetic oligonucleotide
ccucauguggugaucuuga

SEQ ID NO: 221537 - RNA, 19 nt, Artificial Sequence
  Description of Artificial Sequence: Synthetic oligonucleotide
caggccuaacaucaccaaa

SEQ ID NO: 221538 - RNA, 19 nt, Artificial Sequence
  Description of Artificial Sequence: Synthetic oligonucleotide
cgggaauuccggcagcggg

SEQ ID NO: 221539 - RNA, 19 nt, Artificial Sequence
  Description of Artificial Sequence: Synthetic oligonucleotide
gaagucguuuucgaaucau

SEQ ID NO: 221540 - RNA, 19 nt, Artificial Sequence
  Description of Artificial Sequence: Synthetic oligonucleotide
ccgcacuaggcauuccagc

SEQ ID NO: 221541 - RNA, 19 nt, Artificial Sequence
  Description of Artificial Sequence: Synthetic oligonucleotide
acuaggcauuccagcaccu

SEQ ID NO: 221542 - RNA, 19 nt, Artificial Sequence
  Description of Artificial Sequence: Synthetic oligonucleotide
auacaguaaagggcauguu

SEQ ID NO: 221543 - RNA, 19 nt, Artificial Sequence
  Description of Artificial Sequence: Synthetic oligonucleotide
cucgcauaucuucuagggu

SEQ ID NO: 221544 - RNA, 19 nt, Artificial Sequence
  Description of Artificial Sequence: Synthetic oligonucleotide
ggauaggguuaacaggagu

SEQ ID NO: 221545 - RNA, 19 nt, Artificial Sequence
  Description of Artificial Sequence: Synthetic oligonucleotide
ccgagauucaaaggccacc

SEQ ID NO: 221546 - RNA, 19 nt, Artificial Sequence
  Description of Artificial Sequence: Synthetic oligonucleotide
cuauaaugugaaccacuau

SEQ ID NO: 221547 - RNA, 19 nt, Artificial Sequence
  Description of Artificial Sequence: Synthetic oligonucleotide
guauugcggcaccagguau

SEQ ID NO: 221548 - RNA, 19 nt, Artificial Sequence
  Description of Artificial Sequence: Synthetic oligonucleotide
caaucuagauuuccuugau

SEQ ID NO: 221549 - RNA, 19 nt, Artificial Sequence
  Description of Artificial Sequence: Synthetic oligonucleotide
cugacggcccacuuaaauu

SEQ ID NO: 221550 - RNA, 19 nt, Artificial Sequence
  Description of Artificial Sequence: Synthetic oligonucleotide
gagcucuacuuauguuucu

SEQ ID NO: 221551 - RNA, 19 nt, Artificial Sequence
  Description of Artificial Sequence: Synthetic oligonucleotide
cuucgucccgagauucaaa

SEQ ID NO: 221552 - RNA, 19 nt, Artificial Sequence
  Description of Artificial Sequence: Synthetic oligonucleotide
acggccccaugcuuuguuu

SEQ ID NO: 221553 - RNA, 19 nt, Artificial Sequence
  Description of Artificial Sequence: Synthetic oligonucleotide
cccgagauucaaaggccac

SEQ ID NO: 221554 - RNA, 19 nt, Artificial Sequence
  Description of Artificial Sequence: Synthetic oligonucleotide
cccauuauuucgaccuaca

SEQ ID NO: 221555 - RNA, 19 nt, Artificial Sequence
  Description of Artificial Sequence: Synthetic oligonucleotide
guccuaggccaggcaaacc

SEQ ID NO: 221556 - RNA, 19 nt, Artificial Sequence
  Description of Artificial Sequence: Synthetic oligonucleotide
gggaauuccggcagcggga

SEQ ID NO: 221557 - RNA, 19 nt, Artificial Sequence
  Description of Artificial Sequence: Synthetic oligonucleotide
auaugaccuccagcagccu

SEQ ID NO: 221558 - RNA, 19 nt, Artificial Sequence
  Description of Artificial Sequence: Synthetic oligonucleotide
gauuuacgugcaucaucuu

SEQ ID NO: 221559 - RNA, 19 nt, Artificial Sequence
  Description of Artificial Sequence: Synthetic oligonucleotide
guauuccggcaccaggcau

SEQ ID NO: 221560 - RNA, 19 nt, Artificial Sequence
  Description of Artificial Sequence: Synthetic oligonucleotide
gcauaccuuucuuaguaau

SEQ ID NO: 221561 - RNA, 19 nt, Artificial Sequence
  Description of Artificial Sequence: Synthetic oligonucleotide
cagaacggccccaugcuuu

SEQ ID NO: 221562 - RNA, 19 nt, Artificial Sequence
  Description of Artificial Sequence: Synthetic oligonucleotide
cccuauaaugugaaccacu

SEQ ID NO: 221563 - RNA, 19 nt, Artificial Sequence
  Description of Artificial Sequence: Synthetic oligonucleotide
gaacuugaauaaagcgauu

SEQ ID NO: 221564 - RNA, 19 nt, Artificial Sequence
  Description of Artificial Sequence: Synthetic oligonucleotide
ggaauuccggcagcgggaa

SEQ ID NO: 221565 - RNA, 19 nt, Artificial Sequence
  Description of Artificial Sequence: Synthetic oligonucleotide
caaaugcccagggacacuu

SEQ ID NO: 221566 - RNA, 19 nt, Artificial Sequence
  Description of Artificial Sequence: Synthetic oligonucleotide
ggcauugcgggaccaggua

SEQ ID NO: 221567 - RNA, 19 nt, Artificial Sequence
  Description of Artificial Sequence: Synthetic oligonucleotide
cagccuacccacugucucu

SEQ ID NO: 221568 - RNA, 19 nt, Artificial Sequence
  Description of Artificial Sequence: Synthetic oligonucleotide
cgaaucauaucuaucuuuu

SEQ ID NO: 221569 - RNA, 19 nt, Artificial Sequence
  Description of Artificial Sequence: Synthetic oligonucleotide
gacaaagcuuugacccuau

SEQ ID NO: 221570 - RNA, 19 nt, Artificial Sequence
  Description of Artificial Sequence: Synthetic oligonucleotide
ccgugaccuuuucugcccc

SEQ ID NO: 221571 - RNA, 19 nt, Artificial Sequence
  Description of Artificial Sequence: Synthetic oligonucleotide
ccuccuucgauccuacagu

SEQ ID NO: 221572 - RNA, 19 nt, Artificial Sequence
  Description of Artificial Sequence: Synthetic oligonucleotide
cggcccgccaaaauuacca

SEQ ID NO: 221573 - RNA, 19 nt, Artificial Sequence
  Description of Artificial Sequence: Synthetic oligonucleotide
gcgggaccagguauuccag

SEQ ID NO: 221574 - RNA, 19 nt, Artificial Sequence
  Description of Artificial Sequence: Synthetic oligonucleotide
cucgagcucuacuuauguu

SEQ ID NO: 221575 - RNA, 19 nt, Artificial Sequence
  Description of Artificial Sequence: Synthetic oligonucleotide
gacggcccacuuaaauuau

SEQ ID NO: 221576 - RNA, 19 nt, Artificial Sequence
  Description of Artificial Sequence: Synthetic oligonucleotide
cguuuucgaaucauaucua

SEQ ID NO: 221577 - RNA, 19 nt, Artificial Sequence
  Description of Artificial Sequence: Synthetic oligonucleotide
ccgggauuccuucuaggaa

SEQ ID NO: 221578 - RNA, 19 nt, Artificial Sequence
  Description of Artificial Sequence: Synthetic oligonucleotide
gcguugaaucaucagcauu

SEQ ID NO: 221579 - RNA, 19 nt, Artificial Sequence
  Description of Artificial Sequence: Synthetic oligonucleotide
cccaaauccugacggccca

SEQ ID NO: 221580 - RNA, 19 nt, Artificial Sequence
  Description of Artificial Sequence: Synthetic oligonucleotide
acggcccacuuaaauuauu

SEQ ID NO: 221581 - RNA, 19 nt, Artificial Sequence
  Description of Artificial Sequence: Synthetic oligonucleotide
ccuauaggucuaucauuua

SEQ ID NO: 221582 - RNA, 19 nt, Artificial Sequence
  Description of Artificial Sequence: Synthetic oligonucleotide
gcuucgucccgagauucaa

SEQ ID NO: 221583 - RNA, 19 nt, Artificial Sequence
  Description of Artificial Sequence: Synthetic oligonucleotide
cuugaaccuauaggucuau

SEQ ID NO: 221584 - RNA, 19 nt, Artificial Sequence
  Description of Artificial Sequence: Synthetic oligonucleotide
gcgauugcccauguauugu

SEQ ID NO: 221585 - RNA, 19 nt, Artificial Sequence
  Description of Artificial Sequence: Synthetic oligonucleotide
agcgggcauccccgcacua

SEQ ID NO: 221586 - RNA, 19 nt, Artificial Sequence
  Description of Artificial Sequence: Synthetic oligonucleotide
ccgggaauuccggcagcgg

SEQ ID NO: 221587 - RNA, 19 nt, Artificial Sequence
  Description of Artificial Sequence: Synthetic oligonucleotide
gaauuccggcagcgggaau

SEQ ID NO: 221588 - RNA, 19 nt, Artificial Sequence
  Description of Artificial Sequence: Synthetic oligonucleotide
gcauccccgcacuaggcau

SEQ ID NO: 221589 - RNA, 19 nt, Artificial Sequence
  Description of Artificial Sequence: Synthetic oligonucleotide
ccauuauuucgaccuacau

SEQ ID NO: 221590 - RNA, 19 nt, Artificial Sequence
  Description of Artificial Sequence: Synthetic oligonucleotide
ggcuucgucccgagauuca

SEQ ID NO: 221591 - RNA, 19 nt, Artificial Sequence
  Description of Artificial Sequence: Synthetic oligonucleotide
ccugacggcccacuuaaau

SEQ ID NO: 221592 - RNA, 19 nt, Artificial Sequence
  Description of Artificial Sequence: Synthetic oligonucleotide
ccacauagcguugaaucau

SEQ ID NO: 221593 - RNA, 19 nt, Artificial Sequence
  Description of Artificial Sequence: Synthetic oligonucleotide
  modified_base (13)..(13): a, c, u, g, unknown or other
cgaccuacaugancuuuua

SEQ ID NO: 221594 - RNA, 19 nt, Artificial Sequence
  Description of Artificial Sequence: Synthetic oligonucleotide
gggacccgcaauauguauu

SEQ ID NO: 221595 - RNA, 19 nt, Artificial Sequence
  Description of Artificial Sequence: Synthetic oligonucleotide
ggguugacgggaagugacu

SEQ ID NO: 221596 - RNA, 19 nt, Artificial Sequence
  Description of Artificial Sequence: Synthetic oligonucleotide
ucccugcacuaggcaucac

SEQ ID NO: 221597 - RNA, 19 nt, Artificial Sequence
  Description of Artificial Sequence: Synthetic oligonucleotide
gcaucccggcaccaggcau

SEQ ID NO: 221598 - RNA, 19 nt, Artificial Sequence
  Description of Artificial Sequence: Synthetic oligonucleotide
gcggcccauuauuggccuc

SEQ ID NO: 221599 - RNA, 19 nt, Artificial Sequence
  Description of Artificial Sequence: Synthetic oligonucleotide
ggccuccuucgauccuaca

SEQ ID NO: 221600 - RNA, 19 nt, Artificial Sequence
  Description of Artificial Sequence: Synthetic oligonucleotide
cgauugcccauguauuguu

SEQ ID NO: 221601 - RNA, 19 nt, Artificial Sequence
  Description of Artificial Sequence: Synthetic oligonucleotide
cggcccacuuaaauuauuu

SEQ ID NO: 221602 - RNA, 19 nt, Artificial Sequence
  Description of Artificial Sequence: Synthetic oligonucleotide
ggcccauuauuggccuccu

SEQ ID NO: 221603 - RNA, 19 nt, Artificial Sequence
  Description of Artificial Sequence: Synthetic oligonucleotide
cauaauaagauuccgagcc

SEQ ID NO: 221604 - RNA, 19 nt, Artificial Sequence
  Description of Artificial Sequence: Synthetic oligonucleotide
acugacuccaaccauagcc

SEQ ID NO: 221605 - RNA, 19 nt, Artificial Sequence
  Description of Artificial Sequence: Synthetic oligonucleotide
aaauuuguagaagaaggcc

SEQ ID NO: 221606 - RNA, 19 nt, Artificial Sequence
  Description of Artificial Sequence: Synthetic oligonucleotide
auuucaugaauacacgggc

SEQ ID NO: 221607 - RNA, 19 nt, Artificial Sequence
  Description of Artificial Sequence: Synthetic oligonucleotide
uagaauuuagaucugucag

SEQ ID NO: 221608 - RNA, 19 nt, Artificial Sequence
  Description of Artificial Sequence: Synthetic oligonucleotide
aaaguaugcagcucgcaac

SEQ ID NO: 221609 - RNA, 19 nt, Artificial Sequence
  Description of Artificial Sequence: Synthetic oligonucleotide
gaucauagaauuuagaucu

SEQ ID NO: 221610 - RNA, 19 nt, Artificial Sequence
  Description of Artificial Sequence: Synthetic oligonucleotide
acgagcuuuauuuaagacc

SEQ ID NO: 221611 - RNA, 19 nt, Artificial Sequence
  Description of Artificial Sequence: Synthetic oligonucleotide
ucucaaaguaugcagcucg

SEQ ID NO: 221612 - RNA, 19 nt, Artificial Sequence
  Description of Artificial Sequence: Synthetic oligonucleotide
ugucagauagccuuugggg

SEQ ID NO: 221613 - RNA, 19 nt, Artificial Sequence
  Description of Artificial Sequence: Synthetic oligonucleotide
ucucuaacagauuugagaa

SEQ ID NO: 221614 - RNA, 19 nt, Artificial Sequence
  Description of Artificial Sequence: Synthetic oligonucleotide
uccacaaucgaacagaguu

SEQ ID NO: 221615 - RNA, 19 nt, Artificial Sequence
  Description of Artificial Sequence: Synthetic oligonucleotide
uuucguucacuccagaaca

SEQ ID NO: 221616 - RNA, 19 nt, Artificial Sequence
  Description of Artificial Sequence: Synthetic oligonucleotide
caaagcuccacacuggugg

SEQ ID NO: 221617 - RNA, 19 nt, Artificial Sequence
  Description of Artificial Sequence: Synthetic oligonucleotide
cuugccucaaggaagacag

SEQ ID NO: 221618 - RNA, 19 nt, Artificial Sequence
  Description of Artificial Sequence: Synthetic oligonucleotide
ugagucaauuuucacagug

SEQ ID NO: 221619 - RNA, 19 nt, Artificial Sequence
  Description of Artificial Sequence: Synthetic oligonucleotide
uucucuaacagauuugaga

SEQ ID NO: 221620 - RNA, 19 nt, Artificial Sequence
  Description of Artificial Sequence: Synthetic oligonucleotide
agaauuggggcacuccugc

SEQ ID NO: 221621 - RNA, 19 nt, Artificial Sequence
  Description of Artificial Sequence: Synthetic oligonucleotide
uauuuaagaccuuucgagc

SEQ ID NO: 221622 - RNA, 19 nt, Artificial Sequence
  Description of Artificial Sequence: Synthetic oligonucleotide
auuuauguccccuccgugg

SEQ ID NO: 221623 - RNA, 19 nt, Artificial Sequence
  Description of Artificial Sequence: Synthetic oligonucleotide
uucaugaauacacgggcag

SEQ ID NO: 221624 - RNA, 19 nt, Artificial Sequence
  Description of Artificial Sequence: Synthetic oligonucleotide
gauggaaccacucccgugc

SEQ ID NO: 221625 - RNA, 19 nt, Artificial Sequence
  Description of Artificial Sequence: Synthetic oligonucleotide
uucaaauuuguagaagaag

SEQ ID NO: 221626 - RNA, 19 nt, Artificial Sequence
  Description of Artificial Sequence: Synthetic oligonucleotide
aggauaccagaauuggggc

SEQ ID NO: 221627 - RNA, 19 nt, Artificial Sequence
  Description of Artificial Sequence: Synthetic oligonucleotide
ucggacuccagcuuuacag

SEQ ID NO: 221628 - RNA, 19 nt, Artificial Sequence
  Description of Artificial Sequence: Synthetic oligonucleotide
auaaguuuccagccuugcc

SEQ ID NO: 221629 - RNA, 19 nt, Artificial Sequence
  Description of Artificial Sequence: Synthetic oligonucleotide
agauuugagaaguagccgu

SEQ ID NO: 221630 - RNA, 19 nt, Artificial Sequence
  Description of Artificial Sequence: Synthetic oligonucleotide
ucauaauaagauuccgagc

SEQ ID NO: 221631 - RNA, 19 nt, Artificial Sequence
  Description of Artificial Sequence: Synthetic oligonucleotide
ucgaucauccacaggauca

SEQ ID NO: 221632 - RNA, 19 nt, Artificial Sequence
  Description of Artificial Sequence: Synthetic oligonucleotide
ugauuauaggccucucggg

SEQ ID NO: 221633 - RNA, 19 nt, Artificial Sequence
  Description of Artificial Sequence: Synthetic oligonucleotide
cuuggggaagucuucauag

SEQ ID NO: 221634 - RNA, 19 nt, Artificial Sequence
  Description of Artificial Sequence: Synthetic oligonucleotide
uuagaucugucagauagcc

SEQ ID NO: 221635 - RNA, 19 nt, Artificial Sequence
  Description of Artificial Sequence: Synthetic oligonucleotide
agaccuuucgagcauuuuc

SEQ ID NO: 221636 - RNA, 19 nt, Artificial Sequence
  Description of Artificial Sequence: Synthetic oligonucleotide
aagauuccgagccacuugu

SEQ ID NO: 221637 - RNA, 19 nt, Artificial Sequence
  Description of Artificial Sequence: Synthetic oligonucleotide
aaauugaguuugucgagga

SEQ ID NO: 221638 - RNA, 19 nt, Artificial Sequence
  Description of Artificial Sequence: Synthetic oligonucleotide
agucgcacugacuccaacc

SEQ ID NO: 221639 - RNA, 19 nt, Artificial Sequence
  Description of Artificial Sequence: Synthetic oligonucleotide
agaugugccggucuguggg

SEQ ID NO: 221640 - RNA, 19 nt, Artificial Sequence
  Description of Artificial Sequence: Synthetic oligonucleotide
uuuaauaugggcggcuacc

SEQ ID NO: 221641 - RNA, 19 nt, Artificial Sequence
  Description of Artificial Sequence: Synthetic oligonucleotide
aauaccgauuacggcacgc

SEQ ID NO: 221642 - RNA, 19 nt, Artificial Sequence
  Description of Artificial Sequence: Synthetic oligonucleotide
uuugucgaggaucaacaga

SEQ ID NO: 221643 - RNA, 19 nt, Artificial Sequence
  Description of Artificial Sequence: Synthetic oligonucleotide
gauuuggcacccaugagcc

SEQ ID NO: 221644 - RNA, 19 nt, Artificial Sequence
  Description of Artificial Sequence: Synthetic oligonucleotide
uacauagccaagcggcgcg

SEQ ID NO: 221645 - RNA, 19 nt, Artificial Sequence
  Description of Artificial Sequence: Synthetic oligonucleotide
ucacauaacuccugggcag

SEQ ID NO: 221646 - RNA, 19 nt, Artificial Sequence
  Description of Artificial Sequence: Synthetic oligonucleotide
agaauuuagaucugucaga

SEQ ID NO: 221647 - RNA, 19 nt, Artificial Sequence
  Description of Artificial Sequence: Synthetic oligonucleotide
uuagacgagacuuuuccaa

SEQ ID NO: 221648 - RNA, 19 nt, Artificial Sequence
  Description of Artificial Sequence: Synthetic oligonucleotide
acuuguagggcauaggcau

SEQ ID NO: 221649 - RNA, 19 nt, Artificial Sequence
  Description of Artificial Sequence: Synthetic oligonucleotide
acagccgccagccaaaucu

SEQ ID NO: 221650 - RNA, 19 nt, Artificial Sequence
  Description of Artificial Sequence: Synthetic oligonucleotide
auguucgggugguaaagcc

SEQ ID NO: 221651 - RNA, 19 nt, Artificial Sequence
  Description of Artificial Sequence: Synthetic oligonucleotide
aagccgggagaguaagagc

SEQ ID NO: 221652 - RNA, 19 nt, Artificial Sequence
  Description of Artificial Sequence: Synthetic oligonucleotide
cuggcuaagccucaugucc

SEQ ID NO: 221653 - RNA, 19 nt, Artificial Sequence
  Description of Artificial Sequence: Synthetic oligonucleotide
cugcuaaaagcacaugggg

SEQ ID NO: 221654 - RNA, 19 nt, Artificial Sequence
  Description of Artificial Sequence: Synthetic oligonucleotide
uuuagaucugucagauagc

SEQ ID NO: 221655 - RNA, 19 nt, Artificial Sequence
  Description of Artificial Sequence: Synthetic oligonucleotide
agcuuuacagccgccagcc

SEQ ID NO: 221656 - RNA, 19 nt, Artificial Sequence
  Description of Artificial Sequence: Synthetic oligonucleotide
cuuagccacugcuaaaagc

SEQ ID NO: 221657 - RNA, 19 nt, Artificial Sequence
  Description of Artificial Sequence: Synthetic oligonucleotide
ugcgauggaaccacucccg

SEQ ID NO: 221658 - RNA, 19 nt, Artificial Sequence
  Description of Artificial Sequence: Synthetic oligonucleotide
agccgggagaguaagagcc

SEQ ID NO: 221659 - RNA, 19 nt, Artificial Sequence
  Description of Artificial Sequence: Synthetic oligonucleotide
ucguauucauuguucucgg

SEQ ID NO: 221660 - RNA, 19 nt, Artificial Sequence
  Description of Artificial Sequence: Synthetic oligonucleotide
gauuccgagccacuuguag

SEQ ID NO: 221661 - RNA, 19 nt, Artificial Sequence
  Description of Artificial Sequence: Synthetic oligonucleotide
ugggagaugacggacagcu

SEQ ID NO: 221662 - RNA, 19 nt, Artificial Sequence
  Description of Artificial Sequence: Synthetic oligonucleotide
ugcacgguacuccagucgc

SEQ ID NO: 221663 - RNA, 19 nt, Artificial Sequence
  Description of Artificial Sequence: Synthetic oligonucleotide
ucgaggaucaacagaagua

SEQ ID NO: 221664 - RNA, 19 nt, Artificial Sequence
  Description of Artificial Sequence: Synthetic oligonucleotide
gauaggguguguucagacc

SEQ ID NO: 221665 - RNA, 19 nt, Artificial Sequence
  Description of Artificial Sequence: Synthetic oligonucleotide
acagaaguaugguucucuc

SEQ ID NO: 221666 - RNA, 19 nt, Artificial Sequence
  Description of Artificial Sequence: Synthetic oligonucleotide
caaucgaacagaguuuggg

SEQ ID NO: 221667 - RNA, 19 nt, Artificial Sequence
  Description of Artificial Sequence: Synthetic oligonucleotide
ucugaguguucccauuggc

SEQ ID NO: 221668 - RNA, 19 nt, Artificial Sequence
  Description of Artificial Sequence: Synthetic oligonucleotide
cuugagaagaggcucccag

SEQ ID NO: 221669 - RNA, 19 nt, Artificial Sequence
  Description of Artificial Sequence: Synthetic oligonucleotide
uuuagacgagacuuuucca

SEQ ID NO: 221670 - RNA, 19 nt, Artificial Sequence
  Description of Artificial Sequence: Synthetic oligonucleotide
uuuuaauaugggcggcuac

SEQ ID NO: 221671 - RNA, 19 nt, Artificial Sequence
  Description of Artificial Sequence: Synthetic oligonucleotide
aauacacgggcagugggug

SEQ ID NO: 221672 - RNA, 19 nt, Artificial Sequence
  Description of Artificial Sequence: Synthetic oligonucleotide
ucccgauuaaucuccacac

SEQ ID NO: 221673 - RNA, 19 nt, Artificial Sequence
  Description of Artificial Sequence: Synthetic oligonucleotide
ucgaacagaguuugggaca

SEQ ID NO: 221674 - RNA, 19 nt, Artificial Sequence
  Description of Artificial Sequence: Synthetic oligonucleotide
uuuaagaccuuucgagcau

SEQ ID NO: 221675 - RNA, 19 nt, Artificial Sequence
  Description of Artificial Sequence: Synthetic oligonucleotide
cagcauagccauuaaacuc

SEQ ID NO: 221676 - RNA, 19 nt, Artificial Sequence
  Description of Artificial Sequence: Synthetic oligonucleotide
ggauuuggcacccaugagc

SEQ ID NO: 221677 - RNA, 19 nt, Artificial Sequence
  Description of Artificial Sequence: Synthetic oligonucleotide
auaauaagauuccgagcca

SEQ ID NO: 221678 - RNA, 19 nt, Artificial Sequence
  Description of Artificial Sequence: Synthetic oligonucleotide
gauaccagaauuggggcac

SEQ ID NO: 221679 - RNA, 19 nt, Artificial Sequence
  Description of Artificial Sequence: Synthetic oligonucleotide
ugcucuaauguaaauccua

SEQ ID NO: 221680 - RNA, 19 nt, Artificial Sequence
  Description of Artificial Sequence: Synthetic oligonucleotide
ucgagcauuuucauaaguu

SEQ ID NO: 221681 - RNA, 19 nt, Artificial Sequence
  Description of Artificial Sequence: Synthetic oligonucleotide
uguucgggugguaaagcca

SEQ ID NO: 221682 - RNA, 19 nt, Artificial Sequence
  Description of Artificial Sequence: Synthetic oligonucleotide
uaugcagcucgcaaccaca

SEQ ID NO: 221683 - RNA, 19 nt, Artificial Sequence
  Description of Artificial Sequence: Synthetic oligonucleotide
gucauuuauguccccuccg

SEQ ID NO: 221684 - RNA, 19 nt, Artificial Sequence
  Description of Artificial Sequence: Synthetic oligonucleotide
cucacgagcuuuauuuaag

SEQ ID NO: 221685 - RNA, 19 nt, Artificial Sequence
  Description of Artificial Sequence: Synthetic oligonucleotide
aucaauccuggugucauuc

SEQ ID NO: 221686 - RNA, 19 nt, Artificial Sequence
  Description of Artificial Sequence: Synthetic oligonucleotide
cugucagauagccuuuggg

SEQ ID NO: 221687 - RNA, 19 nt, Artificial Sequence
  Description of Artificial Sequence: Synthetic oligonucleotide
agccuugccaaagcaagcc

SEQ ID NO: 221688 - RNA, 19 nt, Artificial Sequence
  Description of Artificial Sequence: Synthetic oligonucleotide
uaauaugggcggcuaccag

SEQ ID NO: 221689 - RNA, 19 nt, Artificial Sequence
  Description of Artificial Sequence: Synthetic oligonucleotide
cacaggauaccagaauugg

SEQ ID NO: 221690 - RNA, 19 nt, Artificial Sequence
  Description of Artificial Sequence: Synthetic oligonucleotide
auuacggcacgcaugacug

SEQ ID NO: 221691 - RNA, 19 nt, Artificial Sequence
  Description of Artificial Sequence: Synthetic oligonucleotide
uuaauaugggcggcuacca

SEQ ID NO: 221692 - RNA, 19 nt, Artificial Sequence
  Description of Artificial Sequence: Synthetic oligonucleotide
ucacgagcuuuauuuaaga

SEQ ID NO: 221693 - RNA, 19 nt, Artificial Sequence
  Description of Artificial Sequence: Synthetic oligonucleotide
gagcugaugcaauccaagc

SEQ ID NO: 221694 - RNA, 19 nt, Artificial Sequence
  Description of Artificial Sequence: Synthetic oligonucleotide
cagauuugagaaguagccg

SEQ ID NO: 221695 - RNA, 19 nt, Artificial Sequence
  Description of Artificial Sequence: Synthetic oligonucleotide
agccauuaaacucaucaua

SEQ ID NO: 221696 - RNA, 19 nt, Artificial Sequence
  Description of Artificial Sequence: Synthetic oligonucleotide
aagacuuguagggcauagg

SEQ ID NO: 221697 - RNA, 19 nt, Artificial Sequence
  Description of Artificial Sequence: Synthetic oligonucleotide
uuccgagccacuuguagcu

SEQ ID NO: 221698 - RNA, 19 nt, Artificial Sequence
  Description of Artificial Sequence: Synthetic oligonucleotide
uugagaaguagccgugccu

SEQ ID NO: 221699 - RNA, 19 nt, Artificial Sequence
  Description of Artificial Sequence: Synthetic oligonucleotide
uuucgagcauuuucauaag

SEQ ID NO: 221700 - RNA, 19 nt, Artificial Sequence
  Description of Artificial Sequence: Synthetic oligonucleotide
uuuacagccgccagccaaa

SEQ ID NO: 221701 - RNA, 19 nt, Artificial Sequence
  Description of Artificial Sequence: Synthetic oligonucleotide
uggguugggaucauagaau

SEQ ID NO: 221702 - RNA, 19 nt, Artificial Sequence
  Description of Artificial Sequence: Synthetic oligonucleotide
acagcuuagccacugcuaa

SEQ ID NO: 221703 - RNA, 19 nt, Artificial Sequence
  Description of Artificial Sequence: Synthetic oligonucleotide
cagucuaacuucaggguug

SEQ ID NO: 221704 - RNA, 19 nt, Artificial Sequence
  Description of Artificial Sequence: Synthetic oligonucleotide
agucuaacuucaggguugc

SEQ ID NO: 221705 - RNA, 19 nt, Artificial Sequence
  Description of Artificial Sequence: Synthetic oligonucleotide
accaggauaggguguguuc

SEQ ID NO: 221706 - RNA, 19 nt, Artificial Sequence
  Description of Artificial Sequence: Synthetic oligonucleotide
cacaccauuggcccguagg

SEQ ID NO: 221707 - RNA, 19 nt, Artificial Sequence
  Description of Artificial Sequence: Synthetic oligonucleotide
ugggaucauagaauuuaga

SEQ ID NO: 221708 - RNA, 19 nt, Artificial Sequence
  Description of Artificial Sequence: Synthetic oligonucleotide
ucuaccgcucggcucaaca

SEQ ID NO: 221709 - RNA, 19 nt, Artificial Sequence
  Description of Artificial Sequence: Synthetic oligonucleotide
aguuugucgaggaucaaca

SEQ ID NO: 221710 - RNA, 19 nt, Artificial Sequence
  Description of Artificial Sequence: Synthetic oligonucleotide
gguaccaugguucuucuca

SEQ ID NO: 221711 - RNA, 19 nt, Artificial Sequence
  Description of Artificial Sequence: Synthetic oligonucleotide
gaugacggacagcuugugc

SEQ ID NO: 221712 - RNA, 19 nt, Artificial Sequence
  Description of Artificial Sequence: Synthetic oligonucleotide
cagaaguaugguucucucc

SEQ ID NO: 221713 - RNA, 19 nt, Artificial Sequence
  Description of Artificial Sequence: Synthetic oligonucleotide
gagucaauuuucacagugc

SEQ ID NO: 221714 - RNA, 19 nt, Artificial Sequence
  Description of Artificial Sequence: Synthetic oligonucleotide
aauugaguuugucgaggau

SEQ ID NO: 221715 - RNA, 19 nt, Artificial Sequence
  Description of Artificial Sequence: Synthetic oligonucleotide
gaugcaauccaagcuggug

SEQ ID NO: 221716 - RNA, 19 nt, Artificial Sequence
  Description of Artificial Sequence: Synthetic oligonucleotide
ucucacgagcuuuauuuaa

SEQ ID NO: 221717 - RNA, 19 nt, Artificial Sequence
  Description of Artificial Sequence: Synthetic oligonucleotide
gaagacuuguagggcauag

SEQ ID NO: 221718 - RNA, 19 nt, Artificial Sequence
  Description of Artificial Sequence: Synthetic oligonucleotide
uucuagccagacaucuuca

SEQ ID NO: 221719 - RNA, 19 nt, Artificial Sequence
  Description of Artificial Sequence: Synthetic oligonucleotide
uggcuaagccucaugucca

SEQ ID NO: 221720 - RNA, 19 nt, Artificial Sequence
  Description of Artificial Sequence: Synthetic oligonucleotide
ucuuucguucacuccagaa

SEQ ID NO: 221721 - RNA, 19 nt, Artificial Sequence
  Description of Artificial Sequence: Synthetic oligonucleotide
cucuaacagauuugagaag

SEQ ID NO: 221722 - RNA, 19 nt, Artificial Sequence
  Description of Artificial Sequence: Synthetic oligonucleotide
auacacgggcagugggugc

SEQ ID NO: 221723 - RNA, 19 nt, Artificial Sequence
  Description of Artificial Sequence: Synthetic oligonucleotide
cauccguuuauccagagcu

SEQ ID NO: 221724 - RNA, 19 nt, Artificial Sequence
  Description of Artificial Sequence: Synthetic oligonucleotide
caaccauagcccaggauuc

SEQ ID NO: 221725 - RNA, 19 nt, Artificial Sequence
  Description of Artificial Sequence: Synthetic oligonucleotide
ggaucauuugcaucccggg

SEQ ID NO: 221726 - RNA, 19 nt, Artificial Sequence
  Description of Artificial Sequence: Synthetic oligonucleotide
ucaauccuggugucauucc

SEQ ID NO: 221727 - RNA, 19 nt, Artificial Sequence
  Description of Artificial Sequence: Synthetic oligonucleotide
guuugucgaggaucaacag

SEQ ID NO: 221728 - RNA, 19 nt, Artificial Sequence
  Description of Artificial Sequence: Synthetic oligonucleotide
auaacuccugggcagcagu

SEQ ID NO: 221729 - RNA, 19 nt, Artificial Sequence
  Description of Artificial Sequence: Synthetic oligonucleotide
aaauggcccgagcacgagu

SEQ ID NO: 221730 - RNA, 19 nt, Artificial Sequence
  Description of Artificial Sequence: Synthetic oligonucleotide
auggaaccacucccgugcc

SEQ ID NO: 221731 - RNA, 19 nt, Artificial Sequence
  Description of Artificial Sequence: Synthetic oligonucleotide
uagacgagacuuuuccaaa

SEQ ID NO: 221732 - RNA, 19 nt, Artificial Sequence
  Description of Artificial Sequence: Synthetic oligonucleotide
auagcccaggauucuucgg

SEQ ID NO: 221733 - RNA, 19 nt, Artificial Sequence
  Description of Artificial Sequence: Synthetic oligonucleotide
accuggcuaagccucaugu

SEQ ID NO: 221734 - RNA, 19 nt, Artificial Sequence
  Description of Artificial Sequence: Synthetic oligonucleotide
cuucagcccuugauuauag

SEQ ID NO: 221735 - RNA, 19 nt, Artificial Sequence
  Description of Artificial Sequence: Synthetic oligonucleotide
cacgagcuuuauuuaagac

SEQ ID NO: 221736 - RNA, 19 nt, Artificial Sequence
  Description of Artificial Sequence: Synthetic oligonucleotide
uaccgcucggcucaacaug

SEQ ID NO: 221737 - RNA, 19 nt, Artificial Sequence
  Description of Artificial Sequence: Synthetic oligonucleotide
agcucgcaaccacacacuc

SEQ ID NO: 221738 - RNA, 19 nt, Artificial Sequence
  Description of Artificial Sequence: Synthetic oligonucleotide
gaccuuucgagcauuuuca

SEQ ID NO: 221739 - RNA, 19 nt, Artificial Sequence
  Description of Artificial Sequence: Synthetic oligonucleotide
uagccauuaaacucaucau

SEQ ID NO: 221740 - RNA, 19 nt, Artificial Sequence
  Description of Artificial Sequence: Synthetic oligonucleotide
aggaucauuugcaucccgg

SEQ ID NO: 221741 - RNA, 19 nt, Artificial Sequence
  Description of Artificial Sequence: Synthetic oligonucleotide
aggcccaauguucgggugg

SEQ ID NO: 221742 - RNA, 19 nt, Artificial Sequence
  Description of Artificial Sequence: Synthetic oligonucleotide
aauuuagaucugucagaua

SEQ ID NO: 221743 - RNA, 19 nt, Artificial Sequence
  Description of Artificial Sequence: Synthetic oligonucleotide
cuccagaacagcuuagcca

SEQ ID NO: 221744 - RNA, 19 nt, Artificial Sequence
  Description of Artificial Sequence: Synthetic oligonucleotide
uuggugaucuuucguucac

SEQ ID NO: 221745 - RNA, 19 nt, Artificial Sequence
  Description of Artificial Sequence: Synthetic oligonucleotide
uucaagccgggagaguaag

SEQ ID NO: 221746 - RNA, 19 nt, Artificial Sequence
  Description of Artificial Sequence: Synthetic oligonucleotide
guucgggugguaaagccag

SEQ ID NO: 221747 - RNA, 19 nt, Artificial Sequence
  Description of Artificial Sequence: Synthetic oligonucleotide
gauuacggcacgcaugacu

SEQ ID NO: 221748 - RNA, 19 nt, Artificial Sequence
  Description of Artificial Sequence: Synthetic oligonucleotide
ugucgaggaucaacagaag

SEQ ID NO: 221749 - RNA, 19 nt, Artificial Sequence
  Description of Artificial Sequence: Synthetic oligonucleotide
gaagaggcucccagcauag

SEQ ID NO: 221750 - RNA, 19 nt, Artificial Sequence
  Description of Artificial Sequence: Synthetic oligonucleotide
ugagaaguagccgugccuu

SEQ ID NO: 221751 - RNA, 19 nt, Artificial Sequence
  Description of Artificial Sequence: Synthetic oligonucleotide
guaaccuggcugcuucuag

SEQ ID NO: 221752 - RNA, 19 nt, Artificial Sequence
  Description of Artificial Sequence: Synthetic oligonucleotide
uucagcccuugauuauagg

SEQ ID NO: 221753 - RNA, 19 nt, Artificial Sequence
  Description of Artificial Sequence: Synthetic oligonucleotide
uacacgggcagugggugcg

SEQ ID NO: 221754 - RNA, 19 nt, Artificial Sequence
  Description of Artificial Sequence: Synthetic oligonucleotide
cuaagccucauguccauga

SEQ ID NO: 221755 - RNA, 19 nt, Artificial Sequence
  Description of Artificial Sequence: Synthetic oligonucleotide
gaucuuucguucacuccag

SEQ ID NO: 221756 - RNA, 19 nt, Artificial Sequence
  Description of Artificial Sequence: Synthetic oligonucleotide
ugccaguuggugauauccu

SEQ ID NO: 221757 - RNA, 19 nt, Artificial Sequence
  Description of Artificial Sequence: Synthetic oligonucleotide
aaaauggcccgagcacgag

SEQ ID NO: 221758 - RNA, 19 nt, Artificial Sequence
  Description of Artificial Sequence: Synthetic oligonucleotide
guacggaguguucaggcca

SEQ ID NO: 221759 - RNA, 19 nt, Artificial Sequence
  Description of Artificial Sequence: Synthetic oligonucleotide
caauuuucacagugcgaug

SEQ ID NO: 221760 - RNA, 19 nt, Artificial Sequence
  Description of Artificial Sequence: Synthetic oligonucleotide
ucaugaauacacgggcagu

SEQ ID NO: 221761 - RNA, 19 nt, Artificial Sequence
  Description of Artificial Sequence: Synthetic oligonucleotide
uugcucgaaugucuguuuc

SEQ ID NO: 221762 - RNA, 19 nt, Artificial Sequence
  Description of Artificial Sequence: Synthetic oligonucleotide
guuuccagccuugccaaag

SEQ ID NO: 221763 - RNA, 19 nt, Artificial Sequence
  Description of Artificial Sequence: Synthetic oligonucleotide
cuuggcagcggugauccag

SEQ ID NO: 221764 - RNA, 19 nt, Artificial Sequence
  Description of Artificial Sequence: Synthetic oligonucleotide
guaagagccacaguggugu

SEQ ID NO: 221765 - RNA, 19 nt, Artificial Sequence
  Description of Artificial Sequence: Synthetic oligonucleotide
cccaauaccgauuacggca

SEQ ID NO: 221766 - RNA, 19 nt, Artificial Sequence
  Description of Artificial Sequence: Synthetic oligonucleotide
aagaggcucccagcauagc

SEQ ID NO: 221767 - RNA, 19 nt, Artificial Sequence
  Description of Artificial Sequence: Synthetic oligonucleotide
aggcgagcugaugcaaucc

SEQ ID NO: 221768 - RNA, 19 nt, Artificial Sequence
  Description of Artificial Sequence: Synthetic oligonucleotide
agguguguuugcgaucuuc

SEQ ID NO: 221769 - RNA, 19 nt, Artificial Sequence
  Description of Artificial Sequence: Synthetic oligonucleotide
agacgagacuuuuccaaaa

SEQ ID NO: 221770 - RNA, 19 nt, Artificial Sequence
  Description of Artificial Sequence: Synthetic oligonucleotide
gucagauagccuuuggggu

SEQ ID NO: 221771 - RNA, 19 nt, Artificial Sequence
  Description of Artificial Sequence: Synthetic oligonucleotide
gucgcacugacuccaacca

SEQ ID NO: 221772 - RNA, 19 nt, Artificial Sequence
  Description of Artificial Sequence: Synthetic oligonucleotide
cugcacgguacuccagucg

SEQ ID NO: 221773 - RNA, 19 nt, Artificial Sequence
  Description of Artificial Sequence: Synthetic oligonucleotide
ggcucaacaugauucuagc

SEQ ID NO: 221774 - RNA, 19 nt, Artificial Sequence
  Description of Artificial Sequence: Synthetic oligonucleotide
ccaaauugaguuugucgag

SEQ ID NO: 221775 - RNA, 19 nt, Artificial Sequence
  Description of Artificial Sequence: Synthetic oligonucleotide
cucauagggcccacuugag

SEQ ID NO: 221776 - RNA, 19 nt, Artificial Sequence
  Description of Artificial Sequence: Synthetic oligonucleotide
caugucgaucauccacagg

SEQ ID NO: 221777 - RNA, 19 nt, Artificial Sequence
  Description of Artificial Sequence: Synthetic oligonucleotide
gguuuguuucucuaacaga

SEQ ID NO: 221778 - RNA, 19 nt, Artificial Sequence
  Description of Artificial Sequence: Synthetic oligonucleotide
ccccuucauaauaagauuc

SEQ ID NO: 221779 - RNA, 19 nt, Artificial Sequence
  Description of Artificial Sequence: Synthetic oligonucleotide
gguacauagccaagcggcg

SEQ ID NO: 221780 - RNA, 19 nt, Artificial Sequence
  Description of Artificial Sequence: Synthetic oligonucleotide
auagcucuccaugccgggg

SEQ ID NO: 221781 - RNA, 19 nt, Artificial Sequence
  Description of Artificial Sequence: Synthetic oligonucleotide
gggaucauagaauuuagau

SEQ ID NO: 221782 - RNA, 19 nt, Artificial Sequence
  Description of Artificial Sequence: Synthetic oligonucleotide
ccaaaauggcccgagcacg

SEQ ID NO: 221783 - RNA, 19 nt, Artificial Sequence
  Description of Artificial Sequence: Synthetic oligonucleotide
agcuuuauuuaagaccuuu

SEQ ID NO: 221784 - RNA, 19 nt, Artificial Sequence
  Description of Artificial Sequence: Synthetic oligonucleotide
gcagcucgcaaccacacac

SEQ ID NO: 221785 - RNA, 19 nt, Artificial Sequence
  Description of Artificial Sequence: Synthetic oligonucleotide
ggcucgcucguauucauug

SEQ ID NO: 221786 - RNA, 19 nt, Artificial Sequence
  Description of Artificial Sequence: Synthetic oligonucleotide
aacagcuuagccacugcua

SEQ ID NO: 221787 - RNA, 19 nt, Artificial Sequence
  Description of Artificial Sequence: Synthetic oligonucleotide
cagcugcuuuccacaaucg

SEQ ID NO: 221788 - RNA, 19 nt, Artificial Sequence
  Description of Artificial Sequence: Synthetic oligonucleotide
uuccacaaucgaacagagu

SEQ ID NO: 221789 - RNA, 19 nt, Artificial Sequence
  Description of Artificial Sequence: Synthetic oligonucleotide
ucuucagcccuugauuaua

SEQ ID NO: 221790 - RNA, 19 nt, Artificial Sequence
  Description of Artificial Sequence: Synthetic oligonucleotide
cacagugcgauggaaccac

SEQ ID NO: 221791 - RNA, 19 nt, Artificial Sequence
  Description of Artificial Sequence: Synthetic oligonucleotide
guacauagccaagcggcgc

SEQ ID NO: 221792 - RNA, 19 nt, Artificial Sequence
  Description of Artificial Sequence: Synthetic oligonucleotide
cacucuaccgcucggcuca

SEQ ID NO: 221793 - RNA, 19 nt, Artificial Sequence
  Description of Artificial Sequence: Synthetic oligonucleotide
cacauaacuccugggcagc

SEQ ID NO: 221794 - RNA, 19 nt, Artificial Sequence
  Description of Artificial Sequence: Synthetic oligonucleotide
aacacgcuucuuugcucga

SEQ ID NO: 221795 - RNA, 19 nt, Artificial Sequence
  Description of Artificial Sequence: Synthetic oligonucleotide
auaagauuccgagccacuu

SEQ ID NO: 221796 - RNA, 19 nt, Artificial Sequence
  Description of Artificial Sequence: Synthetic oligonucleotide
uaccgauuacggcacgcau

SEQ ID NO: 221797 - RNA, 19 nt, Artificial Sequence
  Description of Artificial Sequence: Synthetic oligonucleotide
ucaagccgggagaguaaga

SEQ ID NO: 221798 - RNA, 19 nt, Artificial Sequence
  Description of Artificial Sequence: Synthetic oligonucleotide
ucgggugguaaagccagug

SEQ ID NO: 221799 - RNA, 19 nt, Artificial Sequence
  Description of Artificial Sequence: Synthetic oligonucleotide
ggauaggguguguucagac

SEQ ID NO: 221800 - RNA, 19 nt, Artificial Sequence
  Description of Artificial Sequence: Synthetic oligonucleotide
cagccuugccaaagcaagc

SEQ ID NO: 221801 - RNA, 19 nt, Artificial Sequence
  Description of Artificial Sequence: Synthetic oligonucleotide
caaaauggcccgagcacga

SEQ ID NO: 221802 - RNA, 19 nt, Artificial Sequence
  Description of Artificial Sequence: Synthetic oligonucleotide
uagggcccacuugagaaga

SEQ ID NO: 221803 - RNA, 19 nt, Artificial Sequence
  Description of Artificial Sequence: Synthetic oligonucleotide
gauuaaucuccacaccauu

SEQ ID NO: 221804 - RNA, 19 nt, Artificial Sequence
  Description of Artificial Sequence: Synthetic oligonucleotide
gguacggaguguucaggcc

SEQ ID NO: 221805 - RNA, 19 nt, Artificial Sequence
  Description of Artificial Sequence: Synthetic oligonucleotide
gcugcuucuagccagacau

SEQ ID NO: 221806 - RNA, 19 nt, Artificial Sequence
  Description of Artificial Sequence: Synthetic oligonucleotide
auaggcauagauggcucgu

SEQ ID NO: 221807 - RNA, 19 nt, Artificial Sequence
  Description of Artificial Sequence: Synthetic oligonucleotide
uuugcaucccgggcaggcc

SEQ ID NO: 221808 - RNA, 19 nt, Artificial Sequence
  Description of Artificial Sequence: Synthetic oligonucleotide
augggcggcuaccagcacu

SEQ ID NO: 221809 - RNA, 19 nt, Artificial Sequence
  Description of Artificial Sequence: Synthetic oligonucleotide
ggcuuuccgaagaacacgc

SEQ ID NO: 221810 - RNA, 19 nt, Artificial Sequence
  Description of Artificial Sequence: Synthetic oligonucleotide
ccaauaccgauuacggcac

SEQ ID NO: 221811 - RNA, 19 nt, Artificial Sequence
  Description of Artificial Sequence: Synthetic oligonucleotide
accgauuacggcacgcaug

SEQ ID NO: 221812 - RNA, 19 nt, Artificial Sequence
  Description of Artificial Sequence: Synthetic oligonucleotide
uaagaccuuucgagcauuu

SEQ ID NO: 221813 - RNA, 19 nt, Artificial Sequence
  Description of Artificial Sequence: Synthetic oligonucleotide
aucauagaauuuagaucug

SEQ ID NO: 221814 - RNA, 19 nt, Artificial Sequence
  Description of Artificial Sequence: Synthetic oligonucleotide
acgagucagcugcccaauc

SEQ ID NO: 221815 - RNA, 19 nt, Artificial Sequence
  Description of Artificial Sequence: Synthetic oligonucleotide
uugcccacucacugaguca

SEQ ID NO: 221816 - RNA, 19 nt, Artificial Sequence
  Description of Artificial Sequence: Synthetic oligonucleotide
gacugugggagaugacgga

SEQ ID NO: 221817 - RNA, 19 nt, Artificial Sequence
  Description of Artificial Sequence: Synthetic oligonucleotide
ggguacggaguguucaggc

SEQ ID NO: 221818 - RNA, 19 nt, Artificial Sequence
  Description of Artificial Sequence: Synthetic oligonucleotide
ugcagcucgcaaccacaca

SEQ ID NO: 221819 - RNA, 19 nt, Artificial Sequence
  Description of Artificial Sequence: Synthetic oligonucleotide
cagcacaccauagcucucc

SEQ ID NO: 221820 - RNA, 19 nt, Artificial Sequence
  Description of Artificial Sequence: Synthetic oligonucleotide
caauaccgauuacggcacg

SEQ ID NO: 221821 - RNA, 19 nt, Artificial Sequence
  Description of Artificial Sequence: Synthetic oligonucleotide
uuacggcacgcaugacugc

SEQ ID NO: 221822 - RNA, 19 nt, Artificial Sequence
  Description of Artificial Sequence: Synthetic oligonucleotide
uccucaagcuuggcagcgg

SEQ ID NO: 221823 - RNA, 19 nt, Artificial Sequence
  Description of Artificial Sequence: Synthetic oligonucleotide
ucccagcauagccauuaaa

SEQ ID NO: 221824 - RNA, 19 nt, Artificial Sequence
  Description of Artificial Sequence: Synthetic oligonucleotide
gucgaggaucaacagaagu

SEQ ID NO: 221825 - RNA, 19 nt, Artificial Sequence
  Description of Artificial Sequence: Synthetic oligonucleotide
ucuuguucauggcgguguu

SEQ ID NO: 221826 - RNA, 19 nt, Artificial Sequence
  Description of Artificial Sequence: Synthetic oligonucleotide
augcagcucgcaaccacac

SEQ ID NO: 221827 - RNA, 19 nt, Artificial Sequence
  Description of Artificial Sequence: Synthetic oligonucleotide
aacaugauucuagcaucuu

SEQ ID NO: 221828 - RNA, 19 nt, Artificial Sequence
  Description of Artificial Sequence: Synthetic oligonucleotide
ugggcggcuaccagcacua

SEQ ID NO: 221829 - RNA, 19 nt, Artificial Sequence
  Description of Artificial Sequence: Synthetic oligonucleotide
caucuuccauccaggugug

SEQ ID NO: 221830 - RNA, 19 nt, Artificial Sequence
  Description of Artificial Sequence: Synthetic oligonucleotide
uccaaccauagcccaggau

SEQ ID NO: 221831 - RNA, 19 nt, Artificial Sequence
  Description of Artificial Sequence: Synthetic oligonucleotide
ggauaccagaauuggggca

SEQ ID NO: 221832 - RNA, 19 nt, Artificial Sequence
  Description of Artificial Sequence: Synthetic oligonucleotide
auggcucgugcacacucca

SEQ ID NO: 221833 - RNA, 19 nt, Artificial Sequence
  Description of Artificial Sequence: Synthetic oligonucleotide
ccgauuaaucuccacacca

SEQ ID NO: 221834 - RNA, 19 nt, Artificial Sequence
  Description of Artificial Sequence: Synthetic oligonucleotide
auaccgauuacggcacgca

SEQ ID NO: 221835 - RNA, 19 nt, Artificial Sequence
  Description of Artificial Sequence: Synthetic oligonucleotide
cuccagucgcacugacucc

SEQ ID NO: 221836 - RNA, 19 nt, Artificial Sequence
  Description of Artificial Sequence: Synthetic oligonucleotide
cccauuggccuccucaagc

SEQ ID NO: 221837 - RNA, 19 nt, Artificial Sequence
  Description of Artificial Sequence: Synthetic oligonucleotide
ucuuuucuucaagccggga

SEQ ID NO: 221838 - RNA, 19 nt, Artificial Sequence
  Description of Artificial Sequence: Synthetic oligonucleotide
cgagcuuuauuuaagaccu

SEQ ID NO: 221839 - RNA, 19 nt, Artificial Sequence
  Description of Artificial Sequence: Synthetic oligonucleotide
gcucgugcacacuccaaag

SEQ ID NO: 221840 - RNA, 19 nt, Artificial Sequence
  Description of Artificial Sequence: Synthetic oligonucleotide
cauaacuccugggcagcag

SEQ ID NO: 221841 - RNA, 19 nt, Artificial Sequence
  Description of Artificial Sequence: Synthetic oligonucleotide
ggugauggcucggucaaug

SEQ ID NO: 221842 - RNA, 19 nt, Artificial Sequence
  Description of Artificial Sequence: Synthetic oligonucleotide
gaugugccggucuguggga

SEQ ID NO: 221843 - RNA, 19 nt, Artificial Sequence
  Description of Artificial Sequence: Synthetic oligonucleotide
guaccaugguucuucucaa

SEQ ID NO: 221844 - RNA, 19 nt, Artificial Sequence
  Description of Artificial Sequence: Synthetic oligonucleotide
aucuuucguucacuccaga

SEQ ID NO: 221845 - RNA, 19 nt, Artificial Sequence
  Description of Artificial Sequence: Synthetic oligonucleotide
caacaugauucuagcaucu

SEQ ID NO: 221846 - RNA, 19 nt, Artificial Sequence
  Description of Artificial Sequence: Synthetic oligonucleotide
auuuggcacccaugagcca

SEQ ID NO: 221847 - RNA, 19 nt, Artificial Sequence
  Description of Artificial Sequence: Synthetic oligonucleotide
ccucauguccaugagggug

SEQ ID NO: 221848 - RNA, 19 nt, Artificial Sequence
  Description of Artificial Sequence: Synthetic oligonucleotide
caggcgagcugaugcaauc

SEQ ID NO: 221849 - RNA, 19 nt, Artificial Sequence
  Description of Artificial Sequence: Synthetic oligonucleotide
gacgagacuuuuccaaaau

SEQ ID NO: 221850 - RNA, 19 nt, Artificial Sequence
  Description of Artificial Sequence: Synthetic oligonucleotide
uccccuguaccaggugucc

SEQ ID NO: 221851 - RNA, 19 nt, Artificial Sequence
  Description of Artificial Sequence: Synthetic oligonucleotide
uuggcccguagggagguga

SEQ ID NO: 221852 - RNA, 19 nt, Artificial Sequence
  Description of Artificial Sequence: Synthetic oligonucleotide
cugugggagaugacggaca

SEQ ID NO: 221853 - RNA, 19 nt, Artificial Sequence
  Description of Artificial Sequence: Synthetic oligonucleotide
cacgguacuccagucgcac

SEQ ID NO: 221854 - RNA, 19 nt, Artificial Sequence
  Description of Artificial Sequence: Synthetic oligonucleotide
agcccugcacgguacucca

SEQ ID NO: 221855 - RNA, 19 nt, Artificial Sequence
  Description of Artificial Sequence: Synthetic oligonucleotide
gauccagaugugccggucu

SEQ ID NO: 221856 - RNA, 19 nt, Artificial Sequence
  Description of Artificial Sequence: Synthetic oligonucleotide
ggcucggucaaugaucuuc

SEQ ID NO: 221857 - RNA, 19 nt, Artificial Sequence
  Description of Artificial Sequence: Synthetic oligonucleotide
aguuugggacaugcucaag

SEQ ID NO: 221858 - RNA, 19 nt, Artificial Sequence
  Description of Artificial Sequence: Synthetic oligonucleotide
cuccccuguaccagguguc

SEQ ID NO: 221859 - RNA, 19 nt, Artificial Sequence
  Description of Artificial Sequence: Synthetic oligonucleotide
uauguccccuccguggguu

SEQ ID NO: 221860 - RNA, 19 nt, Artificial Sequence
  Description of Artificial Sequence: Synthetic oligonucleotide
accgcucggcucaacauga

SEQ ID NO: 221861 - RNA, 19 nt, Artificial Sequence
  Description of Artificial Sequence: Synthetic oligonucleotide
cucgcaaccacacacucuu

SEQ ID NO: 221862 - RNA, 19 nt, Artificial Sequence
  Description of Artificial Sequence: Synthetic oligonucleotide
ggugauauccuuggacaca

SEQ ID NO: 221863 - RNA, 19 nt, Artificial Sequence
  Description of Artificial Sequence: Synthetic oligonucleotide
ccggguacauagccaagcg

SEQ ID NO: 221864 - RNA, 19 nt, Artificial Sequence
  Description of Artificial Sequence: Synthetic oligonucleotide
cccgauuaaucuccacacc

SEQ ID NO: 221865 - RNA, 19 nt, Artificial Sequence
  Description of Artificial Sequence: Synthetic oligonucleotide
gcucaacaugauucuagca

SEQ ID NO: 221866 - RNA, 19 nt, Artificial Sequence
  Description of Artificial Sequence: Synthetic oligonucleotide
cuagccagacaucuucacu

SEQ ID NO: 221867 - RNA, 19 nt, Artificial Sequence
  Description of Artificial Sequence: Synthetic oligonucleotide
agcuaucagaagguauuuu

SEQ ID NO: 221868 - RNA, 19 nt, Artificial Sequence
  Description of Artificial Sequence: Synthetic oligonucleotide
ucgucaucagcagcuugau

SEQ ID NO: 221869 - RNA, 19 nt, Artificial Sequence
  Description of Artificial Sequence: Synthetic oligonucleotide
cugcuucuagccagacauc

SEQ ID NO: 221870 - RNA, 19 nt, Artificial Sequence
  Description of Artificial Sequence: Synthetic oligonucleotide
gcucuaauguaaauccuaa

SEQ ID NO: 221871 - RNA, 19 nt, Artificial Sequence
  Description of Artificial Sequence: Synthetic oligonucleotide
gagaugacggacagcuugu

SEQ ID NO: 221872 - RNA, 19 nt, Artificial Sequence
  Description of Artificial Sequence: Synthetic oligonucleotide
ccgauuacggcacgcauga

SEQ ID NO: 221873 - RNA, 19 nt, Artificial Sequence
  Description of Artificial Sequence: Synthetic oligonucleotide
gacggacagcuugugccac

SEQ ID NO: 221874 - RNA, 19 nt, Artificial Sequence
  Description of Artificial Sequence: Synthetic oligonucleotide
caggcccaauguucgggug

SEQ ID NO: 221875 - RNA, 19 nt, Artificial Sequence
  Description of Artificial Sequence: Synthetic oligonucleotide
ucucggacuccagcuuuac

SEQ ID NO: 221876 - RNA, 19 nt, Artificial Sequence
  Description of Artificial Sequence: Synthetic oligonucleotide
aguuuccagccuugccaaa

SEQ ID NO: 221877 - RNA, 19 nt, Artificial Sequence
  Description of Artificial Sequence: Synthetic oligonucleotide
cagccacuuggauuuggca

SEQ ID NO: 221878 - RNA, 19 nt, Artificial Sequence
  Description of Artificial Sequence: Synthetic oligonucleotide
ugugccggucugugggaau

SEQ ID NO: 221879 - RNA, 19 nt, Artificial Sequence
  Description of Artificial Sequence: Synthetic oligonucleotide
cuuuccgaagaacacgcuu

SEQ ID NO: 221880 - RNA, 19 nt, Artificial Sequence
  Description of Artificial Sequence: Synthetic oligonucleotide
uacagccgccagccaaauc

SEQ ID NO: 221881 - RNA, 19 nt, Artificial Sequence
  Description of Artificial Sequence: Synthetic oligonucleotide
cggcucaacaugauucuag

SEQ ID NO: 221882 - RNA, 19 nt, Artificial Sequence
  Description of Artificial Sequence: Synthetic oligonucleotide
accaggguacggaguguuc

SEQ ID NO: 221883 - RNA, 19 nt, Artificial Sequence
  Description of Artificial Sequence: Synthetic oligonucleotide
cucggcucaacaugauucu

SEQ ID NO: 221884 - RNA, 19 nt, Artificial Sequence
  Description of Artificial Sequence: Synthetic oligonucleotide
cggugauccagaugugccg

SEQ ID NO: 221885 - RNA, 19 nt, Artificial Sequence
  Description of Artificial Sequence: Synthetic oligonucleotide
ggcacgcaugacugccugg

SEQ ID NO: 221886 - RNA, 19 nt, Artificial Sequence
  Description of Artificial Sequence: Synthetic oligonucleotide
ugaguuugucgaggaucaa

SEQ ID NO: 221887 - RNA, 19 nt, Artificial Sequence
  Description of Artificial Sequence: Synthetic oligonucleotide
ucggcucaacaugauucua

SEQ ID NO: 221888 - RNA, 19 nt, Artificial Sequence
  Description of Artificial Sequence: Synthetic oligonucleotide
ggcgagcugaugcaaucca

SEQ ID NO: 221889 - RNA, 19 nt, Artificial Sequence
  Description of Artificial Sequence: Synthetic oligonucleotide
ccaaccauagcccaggauu

SEQ ID NO: 221890 - RNA, 19 nt, Artificial Sequence
  Description of Artificial Sequence: Synthetic oligonucleotide
cugcucuaauguaaauccu

SEQ ID NO: 221891 - RNA, 19 nt, Artificial Sequence
  Description of Artificial Sequence: Synthetic oligonucleotide
cagccgccagccaaaucuc

SEQ ID NO: 221892 - RNA, 19 nt, Artificial Sequence
  Description of Artificial Sequence: Synthetic oligonucleotide
auccauccguuuauccaga

SEQ ID NO: 221893 - RNA, 19 nt, Artificial Sequence
  Description of Artificial Sequence: Synthetic oligonucleotide
agagacucccugguaccau

SEQ ID NO: 221894 - RNA, 19 nt, Artificial Sequence
  Description of Artificial Sequence: Synthetic oligonucleotide
auggcccgagcacgaguca

SEQ ID NO: 221895 - RNA, 19 nt, Artificial Sequence
  Description of Artificial Sequence: Synthetic oligonucleotide
ccuggcuaagccucauguc

SEQ ID NO: 221896 - RNA, 19 nt, Artificial Sequence
  Description of Artificial Sequence: Synthetic oligonucleotide
uuacagccgccagccaaau

SEQ ID NO: 221897 - RNA, 19 nt, Artificial Sequence
  Description of Artificial Sequence: Synthetic oligonucleotide
cagucgcacugacuccaac

SEQ ID NO: 221898 - RNA, 19 nt, Artificial Sequence
  Description of Artificial Sequence: Synthetic oligonucleotide
guagccgugccuucuuaau

SEQ ID NO: 221899 - RNA, 19 nt, Artificial Sequence
  Description of Artificial Sequence: Synthetic oligonucleotide
cccggguacauagccaagc

SEQ ID NO: 221900 - RNA, 19 nt, Artificial Sequence
  Description of Artificial Sequence: Synthetic oligonucleotide
gcggcuaccagcacuagua

SEQ ID NO: 221901 - RNA, 19 nt, Artificial Sequence
  Description of Artificial Sequence: Synthetic oligonucleotide
cgggugguaaagccagugg

SEQ ID NO: 221902 - RNA, 19 nt, Artificial Sequence
  Description of Artificial Sequence: Synthetic oligonucleotide
uggcacccaugagccacag

SEQ ID NO: 221903 - RNA, 19 nt, Artificial Sequence
  Description of Artificial Sequence: Synthetic oligonucleotide
caaucugccccuucaucau

SEQ ID NO: 221904 - RNA, 19 nt, Artificial Sequence
  Description of Artificial Sequence: Synthetic oligonucleotide
cuuugcucgaaugucuguu

SEQ ID NO: 221905 - RNA, 19 nt, Artificial Sequence
  Description of Artificial Sequence: Synthetic oligonucleotide
augguucucuccagucuaa

SEQ ID NO: 221906 - RNA, 19 nt, Artificial Sequence
  Description of Artificial Sequence: Synthetic oligonucleotide
cucggacuccagcuuuaca

SEQ ID NO: 221907 - RNA, 19 nt, Artificial Sequence
  Description of Artificial Sequence: Synthetic oligonucleotide
ccgggcaggcccaauguuc

SEQ ID NO: 221908 - RNA, 19 nt, Artificial Sequence
  Description of Artificial Sequence: Synthetic oligonucleotide
uccgaagaacacgcuucuu

SEQ ID NO: 221909 - RNA, 19 nt, Artificial Sequence
  Description of Artificial Sequence: Synthetic oligonucleotide
cagcuuagccacugcuaaa

SEQ ID NO: 221910 - RNA, 19 nt, Artificial Sequence
  Description of Artificial Sequence: Synthetic oligonucleotide
cagcccggguacauagcca

SEQ ID NO: 221911 - RNA, 19 nt, Artificial Sequence
  Description of Artificial Sequence: Synthetic oligonucleotide
cgguacuccagucgcacug

SEQ ID NO: 221912 - RNA, 19 nt, Artificial Sequence
  Description of Artificial Sequence: Synthetic oligonucleotide
gguacuccagucgcacuga

SEQ ID NO: 221913 - RNA, 19 nt, Artificial Sequence
  Description of Artificial Sequence: Synthetic oligonucleotide
ggccuugccucaaggaaga

SEQ ID NO: 221914 - RNA, 19 nt, Artificial Sequence
  Description of Artificial Sequence: Synthetic oligonucleotide
acagugcgauggaaccacu

SEQ ID NO: 221915 - RNA, 19 nt, Artificial Sequence
  Description of Artificial Sequence: Synthetic oligonucleotide
agggcccacuugagaagag

SEQ ID NO: 221916 - RNA, 19 nt, Artificial Sequence
  Description of Artificial Sequence: Synthetic oligonucleotide
cacgcaugacugccuggca

SEQ ID NO: 221917 - RNA, 19 nt, Artificial Sequence
  Description of Artificial Sequence: Synthetic oligonucleotide
caugccggggcucugcauu

SEQ ID NO: 221918 - RNA, 19 nt, Artificial Sequence
  Description of Artificial Sequence: Synthetic oligonucleotide
gcuaagccucauguccaug

SEQ ID NO: 221919 - RNA, 19 nt, Artificial Sequence
  Description of Artificial Sequence: Synthetic oligonucleotide
cucgcucguauucauuguu

SEQ ID NO: 221920 - RNA, 19 nt, Artificial Sequence
  Description of Artificial Sequence: Synthetic oligonucleotide
cuaccgcucggcucaacau

SEQ ID NO: 221921 - RNA, 19 nt, Artificial Sequence
  Description of Artificial Sequence: Synthetic oligonucleotide
ccaggguacggaguguuca

SEQ ID NO: 221922 - RNA, 19 nt, Artificial Sequence
  Description of Artificial Sequence: Synthetic oligonucleotide
agccgccagccaaaucucu

SEQ ID NO: 221923 - RNA, 19 nt, Artificial Sequence
  Description of Artificial Sequence: Synthetic oligonucleotide
cagcucgcaaccacacacu

SEQ ID NO: 221924 - RNA, 19 nt, Artificial Sequence
  Description of Artificial Sequence: Synthetic oligonucleotide
ccaagcggcgcgggcaugc

SEQ ID NO: 221925 - RNA, 19 nt, Artificial Sequence
  Description of Artificial Sequence: Synthetic oligonucleotide
ccuugccucaaggaagaca

SEQ ID NO: 221926 - RNA, 19 nt, Artificial Sequence
  Description of Artificial Sequence: Synthetic oligonucleotide
cuguaaccuggcugcuucu

SEQ ID NO: 221927 - RNA, 19 nt, Artificial Sequence
  Description of Artificial Sequence: Synthetic oligonucleotide
gcucggucaaugaucuucu

SEQ ID NO: 221928 - RNA, 19 nt, Artificial Sequence
  Description of Artificial Sequence: Synthetic oligonucleotide
ccagucuaacuucaggguu

SEQ ID NO: 221929 - RNA, 19 nt, Artificial Sequence
  Description of Artificial Sequence: Synthetic oligonucleotide
ccucaaucccaauaccgau

SEQ ID NO: 221930 - RNA, 19 nt, Artificial Sequence
  Description of Artificial Sequence: Synthetic oligonucleotide
ccuugauuauaggccucuc

SEQ ID NO: 221931 - RNA, 19 nt, Artificial Sequence
  Description of Artificial Sequence: Synthetic oligonucleotide
uggcucggucaaugaucuu

SEQ ID NO: 221932 - RNA, 19 nt, Artificial Sequence
  Description of Artificial Sequence: Synthetic oligonucleotide
ggaaccacucccgugccuu

SEQ ID NO: 221933 - RNA, 19 nt, Artificial Sequence
  Description of Artificial Sequence: Synthetic oligonucleotide
ccacaaucgaacagaguuu

SEQ ID NO: 221934 - RNA, 19 nt, Artificial Sequence
  Description of Artificial Sequence: Synthetic oligonucleotide
caucaauccuggugucauu

SEQ ID NO: 221935 - RNA, 19 nt, Artificial Sequence
  Description of Artificial Sequence: Synthetic oligonucleotide
gcucgcucguauucauugu

SEQ ID NO: 221936 - RNA, 19 nt, Artificial Sequence
  Description of Artificial Sequence: Synthetic oligonucleotide
gcgagcugaugcaauccaa

SEQ ID NO: 221937 - RNA, 19 nt, Artificial Sequence
  Description of Artificial Sequence: Synthetic oligonucleotide
cagcuaucagaagguauuu

SEQ ID NO: 221938 - RNA, 19 nt, Artificial Sequence
  Description of Artificial Sequence: Synthetic oligonucleotide
gcgauggaaccacucccgu

SEQ ID NO: 221939 - RNA, 19 nt, Artificial Sequence
  Description of Artificial Sequence: Synthetic oligonucleotide
cgauuaaucuccacaccau

SEQ ID NO: 221940 - RNA, 19 nt, Artificial Sequence
  Description of Artificial Sequence: Synthetic oligonucleotide
cgcgggcaugcccaggaac

SEQ ID NO: 221941 - RNA, 19 nt, Artificial Sequence
  Description of Artificial Sequence: Synthetic oligonucleotide
ggcggcuaccagcacuagu

SEQ ID NO: 221942 - RNA, 19 nt, Artificial Sequence
  Description of Artificial Sequence: Synthetic oligonucleotide
cucuaccgcucggcucaac

SEQ ID NO: 221943 - RNA, 19 nt, Artificial Sequence
  Description of Artificial Sequence: Synthetic oligonucleotide
ggcuaagccucauguccau

SEQ ID NO: 221944 - RNA, 19 nt, Artificial Sequence
  Description of Artificial Sequence: Synthetic oligonucleotide
gcccuugauuauaggccuc

SEQ ID NO: 221945 - RNA, 19 nt, Artificial Sequence
  Description of Artificial Sequence: Synthetic oligonucleotide
acucuaccgcucggcucaa

SEQ ID NO: 221946 - RNA, 19 nt, Artificial Sequence
  Description of Artificial Sequence: Synthetic oligonucleotide
gcccggguacauagccaag

SEQ ID NO: 221947 - RNA, 19 nt, Artificial Sequence
  Description of Artificial Sequence: Synthetic oligonucleotide
gccggggcucugcauucuc

SEQ ID NO: 221948 - RNA, 19 nt, Artificial Sequence
  Description of Artificial Sequence: Synthetic oligonucleotide
cggcacgcaugacugccug

SEQ ID NO: 221949 - RNA, 19 nt, Artificial Sequence
  Description of Artificial Sequence: Synthetic oligonucleotide
ggcccaauguucggguggu

SEQ ID NO: 221950 - RNA, 19 nt, Artificial Sequence
  Description of Artificial Sequence: Synthetic oligonucleotide
gcucgcaaccacacacucu

SEQ ID NO: 221951 - RNA, 19 nt, Artificial Sequence
  Description of Artificial Sequence: Synthetic oligonucleotide
ccucaagcuuggcagcggu

SEQ ID NO: 221952 - RNA, 19 nt, Artificial Sequence
  Description of Artificial Sequence: Synthetic oligonucleotide
ccacaccauuggcccguag

SEQ ID NO: 221953 - RNA, 19 nt, Artificial Sequence
  Description of Artificial Sequence: Synthetic oligonucleotide
caccaggguacggaguguu

SEQ ID NO: 221954 - RNA, 19 nt, Artificial Sequence
  Description of Artificial Sequence: Synthetic oligonucleotide
gcuuuccgaagaacacgcu

SEQ ID NO: 221955 - RNA, 19 nt, Artificial Sequence
  Description of Artificial Sequence: Synthetic oligonucleotide
cccuugauuauaggccucu

SEQ ID NO: 221956 - RNA, 19 nt, Artificial Sequence
  Description of Artificial Sequence: Synthetic oligonucleotide
gcaauccaagcuggugggu

SEQ ID NO: 221957 - RNA, 19 nt, Artificial Sequence
  Description of Artificial Sequence: Synthetic oligonucleotide
cccugcacgguacuccagu

SEQ ID NO: 221958 - RNA, 19 nt, Artificial Sequence
  Description of Artificial Sequence: Synthetic oligonucleotide
gcccugcacgguacuccag

SEQ ID NO: 221959 - RNA, 19 nt, Artificial Sequence
  Description of Artificial Sequence: Synthetic oligonucleotide
cuucacucuuggggcacau

SEQ ID NO: 221960 - RNA, 19 nt, Artificial Sequence
  Description of Artificial Sequence: Synthetic oligonucleotide
cgaacagaguuugggacau

SEQ ID NO: 221961 - RNA, 19 nt, Artificial Sequence
  Description of Artificial Sequence: Synthetic oligonucleotide
gcccgagcacgagucagcu

SEQ ID NO: 221962 - RNA, 19 nt, Artificial Sequence
  Description of Artificial Sequence: Synthetic oligonucleotide
ccaggcgagcugaugcaau

SEQ ID NO: 221963 - RNA, 19 nt, Artificial Sequence
  Description of Artificial Sequence: Synthetic oligonucleotide
ccguagggaggugauggcu

SEQ ID NO: 221964 - RNA, 19 nt, Artificial Sequence
  Description of Artificial Sequence: Synthetic oligonucleotide
cggaguguucaggccacca

SEQ ID NO: 221965 - RNA, 19 nt, Artificial Sequence
  Description of Artificial Sequence: Synthetic oligonucleotide
gccaagcggcgcgggcaug

SEQ ID NO: 221966 - RNA, 19 nt, Artificial Sequence
  Description of Artificial Sequence: Synthetic oligonucleotide
cgauuacggcacgcaugac

SEQ ID NO: 221967 - RNA, 19 nt, Artificial Sequence
  Description of Artificial Sequence: Synthetic oligonucleotide
cuccgggcucgcucguauu

SEQ ID NO: 221968 - RNA, 19 nt, Artificial Sequence
  Description of Artificial Sequence: Synthetic oligonucleotide
ggcuguaaccuggcugcuu

SEQ ID NO: 221969 - RNA, 19 nt, Artificial Sequence
  Description of Artificial Sequence: Synthetic oligonucleotide
cgaucauccacaggaucau

SEQ ID NO: 221970 - RNA, 19 nt, Artificial Sequence
  Description of Artificial Sequence: Synthetic oligonucleotide
ccccagcuaucagaaggua

SEQ ID NO: 221971 - RNA, 19 nt, Artificial Sequence
  Description of Artificial Sequence: Synthetic oligonucleotide
gggagaugacggacagcuu

SEQ ID NO: 221972 - RNA, 19 nt, Artificial Sequence
  Description of Artificial Sequence: Synthetic oligonucleotide
gguguggagugaggacauu

SEQ ID NO: 221973 - RNA, 19 nt, Artificial Sequence
  Description of Artificial Sequence: Synthetic oligonucleotide
gggcucgcucguauucauu

SEQ ID NO: 221974 - RNA, 19 nt, Artificial Sequence
  Description of Artificial Sequence: Synthetic oligonucleotide
gcaucccgggcaggcccaa

SEQ ID NO: 221975 - RNA, 19 nt, Artificial Sequence
  Description of Artificial Sequence: Synthetic oligonucleotide
cccgggcaggcccaauguu

SEQ ID NO: 221976 - RNA, 19 nt, Artificial Sequence
  Description of Artificial Sequence: Synthetic oligonucleotide
caucccgggcaggcccaau

SEQ ID NO: 221977 - RNA, 19 nt, Artificial Sequence
  Description of Artificial Sequence: Synthetic oligonucleotide
cuccguggguugggaucau

SEQ ID NO: 221978 - RNA, 19 nt, Artificial Sequence
  Description of Artificial Sequence: Synthetic oligonucleotide
cgggcucgcucguauucau

SEQ ID NO: 221979 - RNA, 19 nt, Artificial Sequence
  Description of Artificial Sequence: Synthetic oligonucleotide
ccgcucggcucaacaugau

SEQ ID NO: 221980 - RNA, 19 nt, Artificial Sequence
  Description of Artificial Sequence: Synthetic oligonucleotide
uuaauugugugucugcucg

SEQ ID NO: 221981 - RNA, 19 nt, Artificial Sequence
  Description of Artificial Sequence: Synthetic oligonucleotide
gauagugacauuuucacug

SEQ ID NO: 221982 - RNA, 19 nt, Artificial Sequence
  Description of Artificial Sequence: Synthetic oligonucleotide
uuuuggagcaaccacgugg

SEQ ID NO: 221983 - RNA, 19 nt, Artificial Sequence
  Description of Artificial Sequence: Synthetic oligonucleotide
aaguaacaaaucaaguugc

SEQ ID NO: 221984 - RNA, 19 nt, Artificial Sequence
  Description of Artificial Sequence: Synthetic oligonucleotide
agaaucgaaguucacuugc

SEQ ID NO: 221985 - RNA, 19 nt, Artificial Sequence
  Description of Artificial Sequence: Synthetic oligonucleotide
guugaaacaagucaagggc

SEQ ID NO: 221986 - RNA, 19 nt, Artificial Sequence
  Description of Artificial Sequence: Synthetic oligonucleotide
ucaacuaaugccguguugg

SEQ ID NO: 221987 - RNA, 19 nt, Artificial Sequence
  Description of Artificial Sequence: Synthetic oligonucleotide
uuaugugcugcuuaaacug

SEQ ID NO: 221988 - RNA, 19 nt, Artificial Sequence
  Description of Artificial Sequence: Synthetic oligonucleotide
cuagauacucaccacaggg

SEQ ID NO: 221989 - RNA, 19 nt, Artificial Sequence
  Description of Artificial Sequence: Synthetic oligonucleotide
aauucuacauauagcuucc

SEQ ID NO: 221990 - RNA, 19 nt, Artificial Sequence
  Description of Artificial Sequence: Synthetic oligonucleotide
cuuagcauuacagaggcgg

SEQ ID NO: 221991 - RNA, 19 nt, Artificial Sequence
  Description of Artificial Sequence: Synthetic oligonucleotide
uuaaacugagagagaaacg

SEQ ID NO: 221992 - RNA, 19 nt, Artificial Sequence
  Description of Artificial Sequence: Synthetic oligonucleotide
acuaaugccguguuggguc

SEQ ID NO: 221993 - RNA, 19 nt, Artificial Sequence
  Description of Artificial Sequence: Synthetic oligonucleotide
ugaugagcuacgaagagac

SEQ ID NO: 221994 - RNA, 19 nt, Artificial Sequence
  Description of Artificial Sequence: Synthetic oligonucleotide
uugaaacaagucaagggcc

SEQ ID NO: 221995 - RNA, 19 nt, Artificial Sequence
  Description of Artificial Sequence: Synthetic oligonucleotide
cuaguuuagaguaguagag

SEQ ID NO: 221996 - RNA, 19 nt, Artificial Sequence
  Description of Artificial Sequence: Synthetic oligonucleotide
uuaggaucauccaaagccc

SEQ ID NO: 221997 - RNA, 19 nt, Artificial Sequence
  Description of Artificial Sequence: Synthetic oligonucleotide
uucauuaaaaggugggcgc

SEQ ID NO: 221998 - RNA, 19 nt, Artificial Sequence
  Description of Artificial Sequence: Synthetic oligonucleotide
gauauggagucucugauga

SEQ ID NO: 221999 - RNA, 19 nt, Artificial Sequence
  Description of Artificial Sequence: Synthetic oligonucleotide
ugugauugcugaaagggga

SEQ ID NO: 222000 - RNA, 19 nt, Artificial Sequence
  Description of Artificial Sequence: Synthetic oligonucleotide
agaaguguguauguugugc

SEQ ID NO: 222001 - RNA, 19 nt, Artificial Sequence
  Description of Artificial Sequence: Synthetic oligonucleotide
ugcuagagcuuuaauauac

SEQ ID NO: 222002 - RNA, 19 nt, Artificial Sequence
  Description of Artificial Sequence: Synthetic oligonucleotide
agagacuagauacucacca

SEQ ID NO: 222003 - RNA, 19 nt, Artificial Sequence
  Description of Artificial Sequence: Synthetic oligonucleotide
aaucgaaguucacuugcuc

SEQ ID NO: 222004 - RNA, 19 nt, Artificial Sequence
  Description of Artificial Sequence: Synthetic oligonucleotide
cucuuuuggagcaaccacg

SEQ ID NO: 222005 - RNA, 19 nt, Artificial Sequence
  Description of Artificial Sequence: Synthetic oligonucleotide
uggggaacuacucuguccc

SEQ ID NO: 222006 - RNA, 19 nt, Artificial Sequence
  Description of Artificial Sequence: Synthetic oligonucleotide
ugcaguaaggacaaacggu

SEQ ID NO: 222007 - RNA, 19 nt, Artificial Sequence
  Description of Artificial Sequence: Synthetic oligonucleotide
acuaaugggacacuucugu

SEQ ID NO: 222008 - RNA, 19 nt, Artificial Sequence
  Description of Artificial Sequence: Synthetic oligonucleotide
auauagcuuccauaauuac

SEQ ID NO: 222009 - RNA, 19 nt, Artificial Sequence
  Description of Artificial Sequence: Synthetic oligonucleotide
uacgaagagacagaacagg

SEQ ID NO: 222010 - RNA, 19 nt, Artificial Sequence
  Description of Artificial Sequence: Synthetic oligonucleotide
acugcauuucucuuaacca

SEQ ID NO: 222011 - RNA, 19 nt, Artificial Sequence
  Description of Artificial Sequence: Synthetic oligonucleotide
gaaaugacuccagagccgg

SEQ ID NO: 222012 - RNA, 19 nt, Artificial Sequence
  Description of Artificial Sequence: Synthetic oligonucleotide
acgugguuuaccuugcuag

SEQ ID NO: 222013 - RNA, 19 nt, Artificial Sequence
  Description of Artificial Sequence: Synthetic oligonucleotide
aauauaccuuugcauguca

SEQ ID NO: 222014 - RNA, 19 nt, Artificial Sequence
  Description of Artificial Sequence: Synthetic oligonucleotide
cuguuauccacuucaacac

SEQ ID NO: 222015 - RNA, 19 nt, Artificial Sequence
  Description of Artificial Sequence: Synthetic oligonucleotide
cauggguguagaaugcugg

SEQ ID NO: 222016 - RNA, 19 nt, Artificial Sequence
  Description of Artificial Sequence: Synthetic oligonucleotide
ucagaaucgaaguucacuu

SEQ ID NO: 222017 - RNA, 19 nt, Artificial Sequence
  Description of Artificial Sequence: Synthetic oligonucleotide
uuuggagcaaccacguggu

SEQ ID NO: 222018 - RNA, 19 nt, Artificial Sequence
  Description of Artificial Sequence: Synthetic oligonucleotide
uaaugggacacuucuguca

SEQ ID NO: 222019 - RNA, 19 nt, Artificial Sequence
  Description of Artificial Sequence: Synthetic oligonucleotide
guuucaagcuggcagagac

SEQ ID NO: 222020 - RNA, 19 nt, Artificial Sequence
  Description of Artificial Sequence: Synthetic oligonucleotide
ugugccgugaacaucuuuc

SEQ ID NO: 222021 - RNA, 19 nt, Artificial Sequence
  Description of Artificial Sequence: Synthetic oligonucleotide
cuaccauggguguagaaug

SEQ ID NO: 222022 - RNA, 19 nt, Artificial Sequence
  Description of Artificial Sequence: Synthetic oligonucleotide
aacgguggcguuccggcac

SEQ ID NO: 222023 - RNA, 19 nt, Artificial Sequence
  Description of Artificial Sequence: Synthetic oligonucleotide
uauagcuuuccccuugggu

SEQ ID NO: 222024 - RNA, 19 nt, Artificial Sequence
  Description of Artificial Sequence: Synthetic oligonucleotide
gcuacgaagagacagaaca

SEQ ID NO: 222025 - RNA, 19 nt, Artificial Sequence
  Description of Artificial Sequence: Synthetic oligonucleotide
uuugcuaccauggguguag

SEQ ID NO: 222026 - RNA, 19 nt, Artificial Sequence
  Description of Artificial Sequence: Synthetic oligonucleotide
aaacccuaaguaacaaauc

SEQ ID NO: 222027 - RNA, 19 nt, Artificial Sequence
  Description of Artificial Sequence: Synthetic oligonucleotide
accguugugguccagggug

SEQ ID NO: 222028 - RNA, 19 nt, Artificial Sequence
  Description of Artificial Sequence: Synthetic oligonucleotide
uccauagacagugaacgcc

SEQ ID NO: 222029 - RNA, 19 nt, Artificial Sequence
  Description of Artificial Sequence: Synthetic oligonucleotide
auaaagacugccuuugcua

SEQ ID NO: 222030 - RNA, 19 nt, Artificial Sequence
  Description of Artificial Sequence: Synthetic oligonucleotide
ucgaaguucacuugcucug

SEQ ID NO: 222031 - RNA, 19 nt, Artificial Sequence
  Description of Artificial Sequence: Synthetic oligonucleotide
uaccuugcuaggcucagcc

SEQ ID NO: 222032 - RNA, 19 nt, Artificial Sequence
  Description of Artificial Sequence: Synthetic oligonucleotide
acuagauacucaccacagg

SEQ ID NO: 222033 - RNA, 19 nt, Artificial Sequence
  Description of Artificial Sequence: Synthetic oligonucleotide
uuagcauuacagaggcggc

SEQ ID NO: 222034 - RNA, 19 nt, Artificial Sequence
  Description of Artificial Sequence: Synthetic oligonucleotide
cugcaguaaggacaaacgg

SEQ ID NO: 222035 - RNA, 19 nt, Artificial Sequence
  Description of Artificial Sequence: Synthetic oligonucleotide
agacuagauacucaccaca

SEQ ID NO: 222036 - RNA, 19 nt, Artificial Sequence
  Description of Artificial Sequence: Synthetic oligonucleotide
uauaccuuugcaugucaga

SEQ ID NO: 222037 - RNA, 19 nt, Artificial Sequence
  Description of Artificial Sequence: Synthetic oligonucleotide
gagcuuagcauuacagagg

SEQ ID NO: 222038 - RNA, 19 nt, Artificial Sequence
  Description of Artificial Sequence: Synthetic oligonucleotide
agagaaacgcgguaugccu

SEQ ID NO: 222039 - RNA, 19 nt, Artificial Sequence
  Description of Artificial Sequence: Synthetic oligonucleotide
acggguaaaccucccuugc

SEQ ID NO: 222040 - RNA, 19 nt, Artificial Sequence
  Description of Artificial Sequence: Synthetic oligonucleotide
gaaguguguauguugugca

SEQ ID NO: 222041 - RNA, 19 nt, Artificial Sequence
  Description of Artificial Sequence: Synthetic oligonucleotide
gacuagauacucaccacag

SEQ ID NO: 222042 - RNA, 19 nt, Artificial Sequence
  Description of Artificial Sequence: Synthetic oligonucleotide
aaacgcgguaugccuugcc

SEQ ID NO: 222043 - RNA, 19 nt, Artificial Sequence
  Description of Artificial Sequence: Synthetic oligonucleotide
uuggaccuuugcuagagcu

SEQ ID NO: 222044 - RNA, 19 nt, Artificial Sequence
  Description of Artificial Sequence: Synthetic oligonucleotide
uggcguuccggcacaagcg

SEQ ID NO: 222045 - RNA, 19 nt, Artificial Sequence
  Description of Artificial Sequence: Synthetic oligonucleotide
agauauggagucucugaug

SEQ ID NO: 222046 - RNA, 19 nt, Artificial Sequence
  Description of Artificial Sequence: Synthetic oligonucleotide
cuacgaagagacagaacag

SEQ ID NO: 222047 - RNA, 19 nt, Artificial Sequence
  Description of Artificial Sequence: Synthetic oligonucleotide
agauacucaccacagggaa

SEQ ID NO: 222048 - RNA, 19 nt, Artificial Sequence
  Description of Artificial Sequence: Synthetic oligonucleotide
uggaaagcgcaugaaagcu

SEQ ID NO: 222049 - RNA, 19 nt, Artificial Sequence
  Description of Artificial Sequence: Synthetic oligonucleotide
aagacuaaaggcggucuug

SEQ ID NO: 222050 - RNA, 19 nt, Artificial Sequence
  Description of Artificial Sequence: Synthetic oligonucleotide
auagugacauuuucacugu

SEQ ID NO: 222051 - RNA, 19 nt, Artificial Sequence
  Description of Artificial Sequence: Synthetic oligonucleotide
uggcuuaucguccguggcc

SEQ ID NO: 222052 - RNA, 19 nt, Artificial Sequence
  Description of Artificial Sequence: Synthetic oligonucleotide
ugaauguccuauggcagag

SEQ ID NO: 222053 - RNA, 19 nt, Artificial Sequence
  Description of Artificial Sequence: Synthetic oligonucleotide
ugcucgugacuccaaagac

SEQ ID NO: 222054 - RNA, 19 nt, Artificial Sequence
  Description of Artificial Sequence: Synthetic oligonucleotide
cuuugcuagagcuuuaaua

SEQ ID NO: 222055 - RNA, 19 nt, Artificial Sequence
  Description of Artificial Sequence: Synthetic oligonucleotide
aaagacuaaaggcggucuu

SEQ ID NO: 222056 - RNA, 19 nt, Artificial Sequence
  Description of Artificial Sequence: Synthetic oligonucleotide
aauugugugucugcucgug

SEQ ID NO: 222057 - RNA, 19 nt, Artificial Sequence
  Description of Artificial Sequence: Synthetic oligonucleotide
ucaccguugugguccaggg

SEQ ID NO: 222058 - RNA, 19 nt, Artificial Sequence
  Description of Artificial Sequence: Synthetic oligonucleotide
augaucagggccuucuuaa

SEQ ID NO: 222059 - RNA, 19 nt, Artificial Sequence
  Description of Artificial Sequence: Synthetic oligonucleotide
aacgcgguaugccuugcca

SEQ ID NO: 222060 - RNA, 19 nt, Artificial Sequence
  Description of Artificial Sequence: Synthetic oligonucleotide
gagaccaaacacugugggc

SEQ ID NO: 222061 - RNA, 19 nt, Artificial Sequence
  Description of Artificial Sequence: Synthetic oligonucleotide
cagccuaauuuuauuuccc

SEQ ID NO: 222062 - RNA, 19 nt, Artificial Sequence
  Description of Artificial Sequence: Synthetic oligonucleotide
caugggaacuagaggcugg

SEQ ID NO: 222063 - RNA, 19 nt, Artificial Sequence
  Description of Artificial Sequence: Synthetic oligonucleotide
aagacugccuuugcuacca

SEQ ID NO: 222064 - RNA, 19 nt, Artificial Sequence
  Description of Artificial Sequence: Synthetic oligonucleotide
gagacuagauacucaccac

SEQ ID NO: 222065 - RNA, 19 nt, Artificial Sequence
  Description of Artificial Sequence: Synthetic oligonucleotide
gagagaaacgcgguaugcc

SEQ ID NO: 222066 - RNA, 19 nt, Artificial Sequence
  Description of Artificial Sequence: Synthetic oligonucleotide
ugcacauaaacugucuuuu

SEQ ID NO: 222067 - RNA, 19 nt, Artificial Sequence
  Description of Artificial Sequence: Synthetic oligonucleotide
caacuaaugccguguuggg

SEQ ID NO: 222068 - RNA, 19 nt, Artificial Sequence
  Description of Artificial Sequence: Synthetic oligonucleotide
cuaauuuuggaccuuugcu

SEQ ID NO: 222069 - RNA, 19 nt, Artificial Sequence
  Description of Artificial Sequence: Synthetic oligonucleotide
agaaacgcgguaugccuug
